United States Patent Application Publication US 2018/0126003 A1 - sequence listing, part 35

SEQ ID NO: 58512 - DNA, 2943 bp, Artificial Sequence
  derived and/or modified sequence
atgaagagcctgaaggccaagttcagaaagagcgacaccaacgagtggaacaagaacgacgacagactgctgcaggccgtggagaacggcgacgccgagaaggtggccagcctgctgggcaagaagggcgccagcgccaccaagcacgacagcgagggcaagaccgccttccacctggccgccgccaagggccacgtggagtgcctgagagtgatgatcacccacggcgtggacgtgaccgcccaggacaccaccggccacagcgccctgcacctggccgccaagaacagccaccacgagtgcatcagaaagctgctgcagagcaagtgccccgccgagagcgtggacagcagcggcaagaccgccctgcactacgccgccgcccagggctgcctgcaggccgtgcagatcctgtgcgagcacaagagccccatcaacctgaaggacctggacggcaacatccccctgctgctggccgtgcagaacggccacagcgagatctgccacttcctgctggaccacggcgccgacgtgaacagcagaaacaagagcggcagaaccgccctgatgctggcctgcgagatcggcagcagcaacgccgtggaggccctgatcaagaagggcgccgacctgaacctggtggacagcctgggctacaacgccctgcactacagcaagctgagcgagaacgccggcatccagagcctgctgctgagcaagatcagccaggacgccgacctgaagacccccaccaagcccaagcagcacgaccaggtgagcaagatcagcagcgagagaagcggcacccccaagaagagaaaggccccccccccccccatcagccccacccagctgagcgacgtgagcagccccagaagcatcaccagcacccccctgagcggcaaggagagcgtgttcttcgccgagccccccttcaaggccgagatcagcagcatcagagagaacaaggacagactgagcgacagcaccaccggcgccgacagcctgctggacatcagcagcgaggccgaccagcaggacctgctgagcctgctgcaggccaaggtggccagcctgaccctgcacaacaaggagctgcaggacaagctgcaggccaagagccccaaggaggccgaggccgacctgagcttcgacagctaccacagcacccagaccgacctgggccccagcctgggcaagcccggcgagaccagcccccccgacagcaagagcagccccagcgtgctgatccacagcctgggcaagagcaccaccgacaacgacgtgagaatccagcagctgcaggagatcctgcaggacctgcagaagagactggagagcagcgaggccgagagaaagcagctgcaggtggagctgcagagcagaagagccgagctggtgtgcctgaacaacaccgagatcagcgagaacagcagcgacctgagccagaagctgaaggagacccagagcaagtacgaggaggccatgaaggaggtgctgagcgtgcagaagcagatgaagctgggcctggtgagccccgagagcatggacaactacagccacttccacgagctgagagtgaccgaggaggagatcaacgtgctgaagcaggacctgcagaacgccctggaggagagcgagagaaacaaggagaaggtgagagagctggaggagaagctggtggagagagagaagggcaccgtgatcaagccccccgtggaggagtacgaggagatgaagagcagctactgcagcgtgatcgagaacatgaacaaggagaaggccttcctgttcgagaagtaccaggaggcccaggaggagatcatgaagctgaaggacaccctgaagagccagatgacccaggaggccagcgacgaggccgaggacatgaaggaggccatgaacagaatgatcgacgagctgaacaagcaggtgagcgagctgagccagctgtacaaggaggcccaggccgagctggaggactacagaaagagaaagagcctggaggacgtgaccgccgagtacatccacaaggccgagcacgagaagctgatgcagctgaccaacgtgagcagagccaaggccgaggacgccctgagcgagatgaagagccagtacagcaaggtgctgaacgagctgacccagctgaagcagctggtggacgcccagaaggagaacagcgtgagcatcaccgagcacctgcaggtgatcaccaccctgagaaccgccgccaaggagatggaggagaagatcagcaacctgaaggagcacctggccagcaaggaggtggaggtggccaagctggagaagcagctgctggaggagaaggccgccatgaccgacgccatggtgcccagaagcagctacgagaagctgcagagcagcctggagagcgaggtgagcgtgctggccagcaagctgaaggagagcgtgaaggagaaggagaaggtgcacagcgaggtggtgcagatcagaagcgaggtgagccaggtgaagagagagaaggagaacatccagaccctgctgaagagcaaggagcaggaggtgaacgagctgctgcagaagttccagcaggcccaggaggagctggccgagatgaagagatacgccgagagcagcagcaagctggaggaggacaaggacaagaagatcaacgagatgagcaaggaggtgaccaagctgaaggaggccctgaacagcctgagccagctgagctacagcaccagcagcagcaagagacagagccagcagctggaggccctgcagcagcaggtgaagcagctgcagaaccagctggccgagtgcaagaagcagcaccaggaggtgatcagcgtgtacagaatgcacctgctgtacgccgtgcagggccagatggacgaggacgtgcagaaggtgctgaagcagatcctgaccatgtgcaagaaccagagccagaagaagtag

SEQ ID NO: 58513 - protein, 114 aa, Artificial Sequence
  derived and/or modified sequence
MKSLKAKFRKSDTNEWNKNDDRLLQAVENGDAEKVASLLGKKGASATKHDSEGKTAFHLAAAKGHVECLRVMITHGVDVTAQDTTGHSALHLAAKNSHHECIRKLLQSKCPAES

SEQ ID NO: 58514 - protein, 107 aa, Artificial Sequence
  derived and/or modified sequence
MKSLKAKFRKSDTNEWNKNDDRLLQAVENGDAEKVASLLGKKGASATKHDSEGKTAFHLAAAKGHVECLRVMITHGVDVTAQDTTGHSALHLAAKNSHHECIRKLLQ

SEQ ID NO: 58515 - protein, 150 aa, Artificial Sequence
  derived and/or modified sequence
MKSLKAKFRKSDTNEWNKNDDRLLQAVENGDAEKVASLLGKKGASATKHDSEGKTAFHLAAAKGHVECLRVMITHGVDVTAQDTTGHSALHLAAKNSHHECIRKLLQSKCPAESVDSSGKTALHYAAAQGCLQAVQILCEHKSPINLKDL

SEQ ID NO: 58516 - protein, 126 aa, Artificial Sequence
  derived and/or modified sequence
MKSLKAKFRKSDTNEWNKNDDRLLQAVENGDAEKVASLLGKKGASATKHDSEGKTAFHLAAAKGHVECLRVMITHGVDVTAQDTTGHSALHLAAKNSHHECIRKLLQSKCPAESVDSSGKTALHYA

SEQ ID NO: 58517 - protein, 139 aa, Artificial Sequence
  derived and/or modified sequence
MKSLKAKFRKSDTNEWNKNDDRLLQAVENGDAEKVASLLGKKGASATKHDSEGKTAFHLAAAKGHVECLRVMITHGVDVTAQDTTGHSALHLAAKNSHHECIRKLLQSKCPAESVDSSGKTALHYAAAQGCLQAVQILC

SEQ ID NO: 58518 - protein, 951 aa, Artificial Sequence
  derived and/or modified sequence
MKSLKAKFRKSDTNEWNKNDDRLLQAVENGDAEKVASLLGKKGASATKHDSEGKTAFHLAAAKGHVECLRVMITHGVDVTAQDTTGHSALHLAAKNSHHECIRKLLQSKCPAESVDSSGKTALHYAAAQGCLQAVQILCEHKSPINLKDLDGNIPLLLAVQNGHSEICHFLLDHGADVNSRNKSGRTALMLACEIGSSNAVEALIKKGADLNLVDSLGYNALHYSKLSENAGIQSLLLSKISQDADLKTPTKPKQLSDVSSPRSITSTPLSGKESVFFAEPPFKAEISSIRENKDRLSDSTTGADSLLDISSEADQQDLLSLLQAKVASLTLHNKELQDKLQAKSPKEAEADLSFDSYHSTQTDLGPSLGKPGETSPPDSKSSPSVLIHSLGKSTTDNDVRIQQLQEILQDLQKRLESSEAERKQLQVELQSRRAELVCLNNTEISENSSDLSQKLKETQSKYEEAMKEVLSVQKQMKLGLVSPESMDNYSHFHELRVTEEEINVLKQDLQNALEESERNKEKVRELEEKLVEREKGTVIKPPVEEYEEMKSSYCSVIENMNKEKAFLFEKYQEAQEEIMKLKDTLKSQMTQEASDEAEDMKEAMNRMIDELNKQVSELSQLYKEAQAELEDYRKRKSLEDVTAEYIHKAEHEKLMQLTNVSRAKAEDALSEMKSQYSKVLNELTQLKQLVDAQKENSVSITEHLQVITTLRTAAKEMEEKISNLKEHLASKEVEVAKLEKQLLEEKAAMTDAMVPRSSYEKLQSSLESEVSVLASKLKESVKEKEKVHSEVVQIRSEVSQVKREKENIQTLLKSKEQEVNELLQKFQQAQEELAEMKRYAESSSKLEEDKDKKINEMSKEVTKLKEALNSLSQLSYSTSSSKRQSQQLEALQQQVKQLQNQLAECKKQHQEVISVYRMHLLYAVQGQMDEDVQKVLKQILTMCKNQSQKK

SEQ ID NO: 58519 - DNA, 345 bp, Artificial Sequence
  derived and/or modified sequence
atgaagtccctcaaagctaaatttcgaaagtctgataccaatgagtggaacaaaaacgatgaccgcctccttcaagcagtggagaatggcgatgccgagaaggtagcttcgctcttaggcaagaagggggcttcagcaacaaaacatgactccgaggggaagacagcgtttcacttggccgctgctaagggtcacgtagaatgcctccgtgtgatgataacacatggcgtcgatgtcactgctcaggacactaccggccactcagcactccatctggcagcgaagaattcacaccacgaatgtattcggaagcttcttcagtctaagtgcccagccgagagttag

SEQ ID NO: 58520 - DNA, 378 bp, Artificial Sequence
  derived and/or modified sequence
atgaagagcctgaaagccaagttccgaaaatccgatactaatgagtggaataaaaacgacgaccggctactccaggccgtggagaacggggatgccgagaaggtggcctcccttctcggaaagaaaggagccagcgccaccaagcacgacagcgaggggaagactgcttttcaccttgcggcagctaagggacacgtggagtgcctaagagtgatgatcacacatggtgtggacgtaaccgcgcaggacaccacaggtcatagcgccctacacttggcagctaagaattcacaccatgaatgtatccggaaactactgcagtcgaaatgccctgcagagtcagtagacagtagcggcaagaccgctctgcactattag

SEQ ID NO: 58521 - DNA, 324 bp, Artificial Sequence
  derived and/or modified sequence
atgaagtcgctcaaggctaagttccgcaaatccgacactaatgagtggaacaaaaacgatgacaggctgctgcaggcggtagaaaacggcgacgcagaaaaggtagccagtctgctgggtaaaaaaggcgctagtgctaccaagcatgatagtgagggcaagacagcgttccatctggcagccgcaaagggacacgtcgaatgtctgcgagttatgatcacccacggagtggacgtcaccgcacaagataccaccggccactctgcacttcacctagctgccaaaaacagccaccatgagtgtattcgtaaactgctgcagtag

SEQ ID NO: 58522 - DNA, 453 bp, Artificial Sequence
  derived and/or modified sequence
atgaagagtctgaaggccaaattccgcaaatccgatacaaacgagtggaacaaaaatgacgacagactgcttcaagccgttgaaaatggggatgccgagaaagtcgccagtctgctcggtaagaaaggcgcttctgccacgaaacacgacagcgaaggcaagacagcctttcatttggcggcggccaaggggcatgtcgagtgtctgagagtcatgatcacccatggggtggacgtcactgctcaggacacaacagggcacagcgctctacacctggctgctaagaatagtcaccacgaatgtatccggaaactcctccaaagcaaatgtcctgcggagtccgtggattcgtccggcaagacggcgctgcactacgccgccgcccagggctgcctgcaagccgttcagatcctctgcgaacataagagcccaataaacttgaaagatttgtag

SEQ ID NO: 58523 - DNA, 381 bp, Artificial Sequence
  derived and/or modified sequence
atgaagtcgctgaaagctaagtttagaaagtccgatacaaacgagtggaataagaatgacgaccgccttctccaagccgtcgaaaacggcgacgctgaaaaggtagcaagcctgctgggtaagaagggtgcttccgccacgaagcacgatagcgagggcaagaccgcatttcacctggccgcggcgaaggggcatgtagaatgtctgagagtgatgattacccacggggtcgacgttactgcccaggacacaacaggccactcagctctgcacttagccgcgaagaatagtcatcacgaatgtatcaggaagctgctgcagtctaagtgtcctgccgagtcagtagactcatcagggaaaaccgctctgcactatgcatag

SEQ ID NO: 58524 - DNA, 315 bp, Artificial Sequence
  derived and/or modified sequence
atgaagagcttgaaagccaaattcagaaagtcggataccaatgagtggaacaagaacgacgaccgccttctccaggccgtggaaaacggcgatgccgaaaaggtcgcgagtctgcttgggaaaaaaggcgcctcggcaaccaagcacgattcagagggtaagacggcctttcatcttgccgcggccaaaggacatgtcgaatgccttagagtgatgatcacccatggcgtagatgtgacggcacaagacacaactggccacagcgctctgcacctggccgccaagaatagtcaccacgagtgtatcagaaagtag

SEQ ID NO: 58525 - DNA, 420 bp, Artificial Sequence
  derived and/or modified sequence
atgaagagcttaaaggccaagttccggaagagtgacacgaatgagtggaacaagaatgacgatcgcttactgcaggccgtagagaatggggacgctgaaaaagtggctagtctgctcgggaaaaaaggcgcttctgccacaaagcatgacagtgaaggaaagaccgccttccacttagcagccgctaagggccatgtggaatgccttagggttatgattacacacggagtggacgtcacagcacaagacaccaccggacactctgcattacatctcgcagccaaaaatagccaccatgagtgcattagaaagctgttgcagagcaaatgccctgcggaaagtgtggacagtagcgggaaaaccgctctgcattatgccgcggcacagggttgcctgcaagccgttcagatattgtgctag

SEQ ID NO: 58526 - DNA, 381 bp, Artificial Sequence
  derived and/or modified sequence
atgaaatctcttaaggctaaatttagaaagtctgataccaacgaatggaacaaaaacgatgacagactgttgcaggcggtggaaaacggagatgccgagaaggtcgcgagcctacttggcaaaaaaggcgcttcagccactaagcatgattctgagggcaagaccgcatttcacctggctgctgcaaagggccatgtcgaatgcctgcgagttatgattacgcatggtgtggatgtgactgcccaggacactactggacattcagctctgcatctggctgccaagaacagccatcatgagtgcattcggaagctgctccagagtaaatgccctgccgaaagtgtcgacagctccgggaaaaccgccttgcactatgcatag

SEQ ID NO: 58527 - DNA, 2856 bp, Artificial Sequence
  derived and/or modified sequence
atgaagagtctgaaggccaagttccgtaagtccgacacaaatgaatggaacaagaatgacgaccggttacttcaagccgtagaaaatggggacgcggagaaagtagccagtctcttggggaagaagggcgcaagtgcgaccaagcatgactccgagggaaagaccgctttccaccttgcggccgccaaagggcacgtggaatgcctgagggtgatgattacacatggggtggacgttaccgctcaggataccactggccactctgccctccatctggcggcaaagaattcccaccatgagtgtatcagaaagttgttgcaatcaaaatgcccagccgagtcagtcgactccagcggaaagaccgccctacattatgctgccgcccaaggctgccttcaggccgtgcaaattttatgcgagcataagtctcctataaatctcaaagaccttgatgggaatatacctcttctactggctgtacaaaatggacactccgaaatatgccattttctgttagaccacggcgcagacgtgaattctagaaataaaagcggtcgcactgccctaatgttggcatgtgaaatcggctccagcaacgccgtcgaggccctaataaagaagggcgccgaccttaacctcgttgacagcctcggctacaacgccctgcattattcgaagctttcagagaacgctggcatccaatccctgctgctgtcgaaaatcagccaagatgccgacctgaaaactccgaccaagccgaagcagctgtccgatgtatcatcccctaggagtatcacgtctacacccttatccggaaaagaatcagtattctttgccgagccgccatttaaggcggagatttcttcaatcagggagaacaaggaccggctctccgactcaacgacaggtgcagactcactgctggacattagctccgaggccgatcagcaggatctcctttcactgctgcaggcaaaagtggcctccctgaccctgcacaacaaggaattgcaggataaactccaggcgaaaagcccaaaagaagccgaagccgaccttagcttcgattcttatcattccacccagacagatctgggtccaagtctggggaaacccggggagacatccccacccgattccaaatcttcaccttcggtgctcatacacagcttaggaaaaagtaccactgacaacgacgtacggatccaacagctacaagaaattctccaagacctgcagaagagactcgaatctagcgaagcggaaaggaaacaactgcaggtggaattacaatcacgccgagccgagcttgtctgtctgaacaatacagagatatccgagaactcaagcgatctgtctcagaagctgaaggagacacagagtaagtacgaggaggctatgaaggaagtgctctccgtgcagaagcagatgaagctgggtctggttagcccagaatcgatggataactattcacatttccacgagctgcgggttactgaggaagaaattaatgtcttgaaacaagaccttcagaacgccctggaggagagtgagaggaacaaggaaaaggtgcgagagctggaggagaagttggttgaaagggagaaaggtaccgttattaagcctcctgtagaggagtacgaagagatgaaaagcagctattgtagcgtcatcgagaatatgaataaggagaaggcattcctgtttgaaaaatatcaagaagcccaggaagagattatgaagcttaaagataccttaaagagccagatgacccaggaggcaagtgatgaggccgaagacatgaaggaggcgatgaacagaatgatagacgaactgaacaaacaggtctctgagctttcccagctgtacaaggaggcacaagccgagctggaggactatcgcaagagaaaaagcctcgaggacgttaccgccgaatatattcataaagccgagcacgagaaactcatgcaactcactaatgtgtctcgggccaaagccgaggatgcgttaagcgagatgaagtctcagtattcgaaggtgctcaatgaactgacccagcttaaacagcttgtggacgctcagaaggagaacagtgtctctattaccgagcatctgcaggttataacaacactgagaacagcagccaaggagatggaagaaaagatatctaacttgaaagagcacctggcctcaaaagaagtcgaggtggctaagctggaaaaacagcttttggaggagaaggctgctatgacggacgcaatggtacctcggtcgtcctacgaaaagctccagagcagtttggaatctgaagtctctgtactggccagtaaactgaaggaaagcgtgaaagagaaggaaaaagttcatagcgaggtcgtgcagattagaagcgaggtctcccaggtgaagagagagaaagaaaatattcagactctactgaagagcaaggaacaggaggtgaatgaactgctgcaaaagtttcagcaggcccaggaggaactggccgaaatgaaacgatacgcagagtcttcatcgaaactcgaagaggataaggataaaaagatcaatgaaatgagcaaagaggtgactaagttgaaagaggccctcaactcactaagccagctctcttattcaacctccagctcgaagcgccagtcgcagcagcttgaggctcttcagcagcaggttaaacaactgcagaatcagcttgccgaatgtaaaaaacagcatcaggaagtgatcagcgtatacagaatgcatctgctgtatgctgtgcagggccagatggacgaggacgtccagaaagtgctgaagcagatcctgaccatgtgcaaaaaccagagtcagaagaaatag

SEQ ID NO: 58528 - DNA, 345 bp, Artificial Sequence
  derived and/or modified sequence
atgaagagcctgaaggccaagttcaggaagagtgacaccaatgagtggaacaagaatgatgaccggctgctgcaggccgtggagaatggagatgctgagaaggtggccagcctgctgggcaagaagggggccagcgccaccaagcatgattctgagggcaagacagccttccacctggccgccgccaagggccacgtggagtgcctgcgggtgatgatcacccatggagtggatgtgacagcccaggacaccaccggccacagcgccctgcacctggccgccaagaacagccaccacgagtgcatcaggaagctgctgcagagcaaatgtcctgctgagagctag

SEQ ID NO: 58529 - DNA, 378 bp, Artificial Sequence
  derived and/or modified sequence
atgaagagcctgaaggccaagttcaggaagagtgacaccaatgagtggaacaagaatgatgaccggctgctgcaggccgtggagaatggagatgctgagaaggtggccagcctgctgggcaagaagggggccagcgccaccaagcatgattctgagggcaagacagccttccacctggccgccgccaagggccacgtggagtgcctgcgggtgatgatcacccatggagtggatgtgacagcccaggacaccaccggccacagcgccctgcacctggccgccaagaacagccaccacgagtgcatcaggaagctgctgcagagcaaatgtcctgctgagagcgtggacagcagcggcaagacagccctgcactactag

SEQ ID NO: 58530 - DNA, 324 bp, Artificial Sequence
  derived and/or modified sequence
atgaagagcctgaaggccaagttcaggaagagtgacaccaatgagtggaacaagaatgatgaccggctgctgcaggccgtggagaatggagatgctgagaaggtggccagcctgctgggcaagaagggggccagcgccaccaagcatgattctgagggcaagacagccttccacctggccgccgccaagggccacgtggagtgcctgcgggtgatgatcacccatggagtggatgtgacagcccaggacaccaccggccacagcgccctgcacctggccgccaagaacagccaccacgagtgcatcaggaagctgctgcagtag

SEQ ID NO: 58531 - DNA, 453 bp, Artificial Sequence
  derived and/or modified sequence
atgaagagcctgaaggccaagttcaggaagagtgacaccaatgagtggaacaagaatgatgaccggctgctgcaggccgtggagaatggagatgctgagaaggtggccagcctgctgggcaagaagggggccagcgccaccaagcatgattctgagggcaagacagccttccacctggccgccgccaagggccacgtggagtgcctgcgggtgatgatcacccatggagtggatgtgacagcccaggacaccaccggccacagcgccctgcacctggccgccaagaacagccaccacgagtgcatcaggaagctgctgcagagcaaatgtcctgctgagagcgtggacagcagcggcaagacagccctgcactacgccgccgcccagggctgcctgcaggccgtgcagatcctgtgtgagcacaagagccccatcaacctgaaggacctgtag

SEQ ID NO: 58532 - DNA, 381 bp, Artificial Sequence
  derived and/or modified sequence
atgaagagcctgaaggccaagttcaggaagagtgacaccaatgagtggaacaagaatgatgaccggctgctgcaggccgtggagaatggagatgctgagaaggtggccagcctgctgggcaagaagggggccagcgccaccaagcatgattctgagggcaagacagccttccacctggccgccgccaagggccacgtggagtgcctgcgggtgatgatcacccatggagtggatgtgacagcccaggacaccaccggccacagcgccctgcacctggccgccaagaacagccaccacgagtgcatcaggaagctgctgcagagcaaatgtcctgctgagagcgtggacagcagcggcaagacagccctgcactacgcctag

SEQ ID NO: 58533 - DNA, 315 bp, Artificial Sequence
  derived and/or modified sequence
atgaagagcctgaaggccaagttcaggaagagtgacaccaatgagtggaacaagaatgatgaccggctgctgcaggccgtggagaatggagatgctgagaaggtggccagcctgctgggcaagaagggggccagcgccaccaagcatgattctgagggcaagacagccttccacctggccgccgccaagggccacgtggagtgcctgcgggtgatgatcacccatggagtggatgtgacagcccaggacaccaccggccacagcgccctgcacctggccgccaagaacagccaccacgagtgcatcaggaagtag

SEQ ID NO: 58534 - DNA, 420 bp, Artificial Sequence
  derived and/or modified sequence
atgaagagcctgaaggccaagttcaggaagagtgacaccaatgagtggaacaagaatgatgaccggctgctgcaggccgtggagaatggagatgctgagaaggtggccagcctgctgggcaagaagggggccagcgccaccaagcatgattctgagggcaagacagccttccacctggccgccgccaagggccacgtggagtgcctgcgggtgatgatcacccatggagtggatgtgacagcccaggacaccaccggccacagcgccctgcacctggccgccaagaacagccaccacgagtgcatcaggaagctgctgcagagcaaatgtcctgctgagagcgtggacagcagcggcaagacagccctgcactacgccgccgcccagggctgcctgcaggccgtgcagatcctgtgctag

SEQ ID NO: 58535 - DNA, 2856 bp, Artificial Sequence
  derived and/or modified sequence
atgaagagcctgaaggccaagttcaggaagagtgacaccaatgagtggaacaagaatgatgaccggctgctgcaggccgtggagaatggagatgctgagaaggtggccagcctgctgggcaagaagggggccagcgccaccaagcatgattctgagggcaagacagccttccacctggccgccgccaagggccacgtggagtgcctgcgggtgatgatcacccatggagtggatgtgacagcccaggacaccaccggccacagcgccctgcacctggccgccaagaacagccaccacgagtgcatcaggaagctgctgcagagcaaatgtcctgctgagagcgtggacagcagcggcaagacagccctgcactacgccgccgcccagggctgcctgcaggccgtgcagatcctgtgtgagcacaagagccccatcaacctgaaggacctggatggcaacatccccctgctgctggccgtgcagaatggccacagcgagatctgccacttcctgctggaccacggggctgatgtgaacagcaggaacaagagcggccgcacagccctgatgctggcctgtgaaattggcagcagcaatgctgtggaggccctgatcaagaagggagctgacctgaacctggtggacagcctgggctacaatgccctgcactacagcaagctgtctgaaaatgccggcatccagagcctgctgctgagcaagatcagccaggatgctgacctgaagacccccaccaagcccaagcagctgagtgatgtgagcagccccaggagcatcaccagcacccccctgagcggcaaggagagcgtcttctttgctgagccccccttcaaggccgagatcagcagcatccgggagaacaaggaccggctgagtgacagcaccaccggggctgacagcctgctggacatcagcagcgaggccgaccagcaggacctgctgagcctgctgcaggccaaggtggccagcctgaccctgcacaacaaggagctgcaggacaagctgcaggccaagagccccaaggaggccgaggccgacctgagctttgacagctaccacagcacccagacagacctgggccccagcctgggcaagccaggagagaccagccccccagacagcaagagcagccccagcgtgctgatccacagcctgggcaagagcaccacagacaatgatgtgcgcatccagcagctgcaggagatcctgcaggacctgcagaagaggctggagagcagcgaggccgagaggaagcagctgcaggtggagctgcagagcagaagagctgagctggtgtgcctgaacaacacagagatcagcgagaacagcagtgacctgagccagaagctgaaggagacccagagcaaatatgaggaggccatgaaggaggtgctgtctgtgcagaagcagatgaagctgggcctggtgtccccagagagcatggacaactacagccacttccacgagctgcgggtgacagaggaggagatcaacgtgctgaagcaggacctgcagaatgccctggaggagagcgagaggaacaaggagaaggtgcgggagctggaggagaagctggtggagcgggagaagggcaccgtcatcaagccccctgtggaggagtatgaggagatgaagagcagctactgcagcgtgattgagaacatgaacaaggagaaggccttcctgtttgagaagtaccaggaggcccaggaggagatcatgaagctgaaggacaccctgaagagccagatgacccaggaggccagtgatgaagctgaggacatgaaggaggccatgaacaggatgattgatgagctgaacaagcaggtgtctgagctgagccagctgtacaaggaggcccaggccgagctggaggactacaggaagaggaagagcctggaggatgtgacagctgagtacatccacaaggccgagcacgagaagctgatgcagctgaccaacgtgtcccgggccaaggcagaagatgccctgtctgagatgaagagccagtacagcaaggtgctgaatgagctgacccagctgaagcagctggtggatgcccagaaggagaacagcgtgtccatcacagagcacctgcaggtgatcaccaccctgaggacagctgccaaggagatggaggagaagatcagcaacctgaaggagcacctggccagcaaggaggtggaggtggccaagctggagaagcagctgctggaggagaaggccgccatgacagatgccatggtgcccaggagcagctatgagaagctgcagagcagcctggagagcgaggtgtctgtgctggccagcaagctgaaggagagcgtgaaggagaaggagaaggtgcacagcgaggtggtgcagatccgctctgaggtgtcccaggtgaagcgggagaaggagaacatccagaccctgctgaagagcaaggagcaggaggtgaatgagctgctgcagaagttccagcaggcccaggaggagctggccgagatgaagagatatgcagagagcagcagcaagctggaggaggacaaggacaagaagatcaatgagatgagcaaggaggtgaccaagctgaaggaggccctgaacagcctgagccagctgagctacagcaccagcagcagcaagaggcagagccagcagctggaggccctgcagcagcaggtgaagcagctgcagaaccagctggccgagtgcaagaagcagcaccaggaggtgatctctgtgtacaggatgcacctgctgtatgctgtgcagggccagatggatgaagatgtgcagaaggtgctgaagcagatcctgaccatgtgcaagaaccagagccagaagaagtag

SEQ ID NO: 58536 - DNA, 345 bp, Artificial Sequence
  derived and/or modified sequence
atgaagagcctgaaggccaagttccggaagagcgacaccaacgagtggaacaaaaacgatgaccgtttactccaagccgttgaaaatggagatgctgagaaggtggcatcgttgctcggaaagaagggtgccagcgcaacaaagcacgattccgaaggcaagacagcattccatttggctgcagcaaagggccacgtcgagtgtttgcgcgtcatgatcactcacggtgttgatgtcactgcccaagacacaacagggcactcagcactccatctggccgcaaagaattctcatcacgaatgcatacgcaagctgttgcagagcaaatgtcctgcagagtcctag

SEQ ID NO: 58537 - DNA, 378 bp, Artificial Sequence
  derived and/or modified sequence
atgaagagcctgaaggccaagttccggaagagcgacaccaacgagtggaacaaaaatgacgacagacttcttcaggccgtggagaatggagacgctgagaaggtggcatccctgttaggaaaaaagggcgcttccgcaactaaacatgactccgagggtaagaccgcttttcatctggccgctgccaagggacacgttgaatgcctgcgcgttatgatcacacacggagtggacgtcaccgcccaggacacaaccggacatagcgccttacatctggcggctaaaaacagtcaccacgaatgtattcggaagctgctgcaaagcaagtgcccggctgaaagcgtggactcaagcggcaaaacagctctgcactactag

SEQ ID NO: 58538 - DNA, 324 bp, Artificial Sequence
  derived and/or modified sequence
atgaagagcctgaaggccaagttccggaagagcgacaccaacgagtggaacaagaatgacgacaggctcctccaagccgtcgagaatggagatgcagaaaaggtcgcgagtctgctaggcaagaagggggcaagcgcaacaaaacacgattccgaagggaagacagctttccatcttgccgccgctaagggtcatgtagaatgtctcagagtaatgatcactcatggagtggacgtgactgcacaagacaccacaggccattcagccctgcatctggccgcgaagaacagccaccacgagtgcatcagaaaactgctacagtag

SEQ ID NO: 58539 - DNA, 453 bp, Artificial Sequence
  derived and/or modified sequence
atgaagagcctgaaggccaagttccggaagagcgacaccaacgagtggaacaagaatgatgatcggctgctccaagccgtggaaaacggggacgcggagaaggtggccagcctgcttggtaagaagggggcctccgctactaaacacgattctgagggcaagaccgccttccacctcgccgcggctaaggggcacgtggaatgcctccgtgtgatgattacacatggagtggacgtgacagcacaggatacaaccggacatagtgcattgcacttggctgctaagaactcccatcatgagtgcattcgaaagttacttcagagcaaatgccccgccgagtcggtggacagcagcggaaagacggcactgcactacgccgccgcacagggatgcctgcaggccgttcaaatcctgtgtgagcacaagagtccaatcaatttgaaggacctctag

SEQ ID NO: 58540 - DNA, 381 bp, Artificial Sequence
  derived and/or modified sequence
atgaagagcctgaaggccaagttccggaagagcgacaccaacgagtggaacaaaaacgatgacaggctccttcaggctgtggagaacggcgatgccgaaaaagtagcaagtcttctgggaaagaaaggtgcctcggccaccaaacacgactcagagggaaaaacagccttccacctggccgccgccaagggtcatgtggaatgcttgcgcgttatgatcactcatggggtcgacgtaacggcccaggatacaacagggcattccgctctccatcttgccgctaagaacagccaccacgagtgcatcaggaagctcctgcagtctaagtgcccggcagagtctgtggatagttcaggtaagaccgcactccattacgcatag

SEQ ID NO: 58541 - DNA, 315 bp, Artificial Sequence
  derived and/or modified sequence
atgaagagcctgaaggccaagttccggaagagcgacaccaacgagtggaataaaaacgatgatagactcctgcaagccgttgagaatggcgacgctgaaaaggtggcctcactgctggggaaaaagggtgcatcagcgacaaaacacgattccgaaggcaaaaccgctttccatcttgccgctgccaagggacacgtggaatgtctccgggtgatgattactcatggagtagatgttaccgcacaagacacaacaggccattccgccctccacctggccgcaaagaactctcatcacgagtgcattcgaaagtag

SEQ ID NO: 58542 - DNA, 420 bp, Artificial Sequence
  derived and/or modified sequence
atgaagagcctgaaggccaagttccggaagagcgacaccaacgagtggaacaaaaatgacgacaggctgttgcaggctgtggaaaatggagatgcggaaaaagtggccagtctactgggaaagaagggtgcatctgctacaaagcacgattccgaggggaagacggcattccatcttgctgccgctaagggacatgttgagtgcttgcgcgtgatgattacacatggggtggacgtgaccgctcaggatacaaccggtcacagcgcacttcaccttgccgctaaaaactcacatcacgaatgcatccgcaagttactgcagagtaagtgtccagcagaaagcgtcgacagtagcggcaagactgcattacactatgctgcagcccaggggtgcctgcaagctgttcagatcctgtgttag

SEQ ID NO: 58543 - DNA, 381 bp, Artificial Sequence
  derived and/or modified sequence
atgaagagcctgaaggccaagttccggaagagcgacaccaacgagtggaacaaaaatgacgatcgcctgttacaggccgtggagaacggagacgccgaaaaagtggcaagtttactcggaaagaaaggcgcaagcgctaccaagcacgatagcgaggggaagaccgctttccacctagcagccgcaaaaggccacgtggagtgtttgcgcgtaatgattacccacggggtcgacgtgaccgcgcaggacaccaccggtcatagcgctctgcatctggccgccaaaaattcacatcatgagtgcattcgaaagctgcttcagtctaagtgcccagcagaatccgtcgactcatccggtaagactgcgctccattatgcctag

SEQ ID NO: 58544 - DNA, 2856 bp, Artificial Sequence
  derived and/or modified sequence
atgaagagcctgaaggccaagttccggaagagcgacaccaacgagtggaataagaatgacgaccgtctgctccaggctgtggaaaacggcgacgcagaaaaggtcgcttccttgctcggtaaaaaaggcgcttccgccactaaacacgacagtgaaggcaaaactgcttttcatctggctgcagccaagggacatgtggagtgtttacgggtgatgattactcatggggtagacgtgaccgcgcaagataccactggccattctgcactccacctggcggctaaaaattctcaccacgagtgtatccgaaaactgcttcaatctaagtgtccagcggaatcggtagatagctccggcaaaaccgctttacactatgccgcagcacagggctgtctgcaggcagttcagatcctgtgtgaacacaagtctcccattaaccttaaggacctggatggaaacatcccccttctgctcgctgtgcagaatggtcatagcgagatttgtcacttccttctcgatcatggtgctgacgtcaactctagaaacaaaagtggccgaacagccctgatgctggcctgtgaaatcggttctagtaatgctgtggaggcactgatcaagaaaggcgccgatttaaatctggttgactctctgggatataatgcactgcactattcaaagctgtccgagaatgcaggaatacagtcacttctcctcagcaaaatctcacaagacgccgatctcaagaccccaactaaaccaaaacagcttagcgatgtttccagtccccgctccattacgtccacgcctctcagcgggaaggagtcagttttcttcgcagagcccccgttcaaagcagaaatcagctcgattcgcgagaataaggaccggttgtcagattcgactaccggtgcagatagtctcctggacatttcctctgaggctgatcagcaggatttgctgagcctgctgcaggccaaggtcgcatcgttgaccctacacaacaaagagctgcaggataaactccaggccaagtctcccaaagaggccgaggccgaccttagctttgactcataccacagtacccagacagatctaggaccctccctggggaagcctggcgaaacatccccacccgactccaagtcctctcccagtgtcctcatacactccctcggcaaaagcactaccgacaatgatgtccgaatacagcagctgcaggaaattctccaggacctccagaagaggctcgagtccagtgaagccgagcggaagcagctacaagtagagctccagagccggagagcagagcttgtgtgtttgaacaacacggagatttcggagaattcttccgacctgtcccagaagctcaaggaaactcaaagcaaatatgaagaggccatgaaggaagtgctctctgtgcaaaagcaaatgaagctcgggctggtctcaccagagtctatggacaactattcccactttcacgaattacgggtgactgaggaggaaataaacgtgctcaagcaggacctgcagaatgccctggaggagagtgagaggaataaagaaaaggtgcgggagctagaagaaaaacttgtcgagcgagagaagggtacagttataaagccacccgtggaagagtacgaagaaatgaaatccagttactgttccgtgatcgagaatatgaataaagaaaaggcctttctattcgaaaagtaccaggaagctcaggaggaaattatgaagctgaaagacacactgaaatcacagatgacccaagaggcctctgacgaggctgaggatatgaaggaggccatgaaccgcatgattgatgagctgaacaagcaggtcagtgagctgagccagctttacaaagaggcacaggccgaactggaagattacaggaaacgtaagagcctggaggatgtcacagctgaatacattcacaaggcagagcacgaaaagttgatgcagcttacaaacgtctctcgagctaaagcagaggatgctctatctgaaatgaaaagtcaatacagcaaagtgctgaatgaactcacccaacttaagcagctcgtggatgcccagaaggaaaactccgtctcaataacggagcatctgcaggtaatcacaacactcaggaccgctgccaaagagatggaggagaagattagcaaccttaaggagcatttggcatctaaagaagtagaggtagctaagctggaaaaacagttattagaagagaaggccgccatgacggatgcgatggtgccccgctctagttacgaaaagctgcaatcgagtctggaatctgaggtttcagtgctggcaagcaaactaaaggaatcagttaaggaaaaagaaaaagtccacagcgaggttgttcagattagatcagaggtgtctcaggtaaaacgtgagaaggagaacatccagaccctattaaagagtaaagagcaggaagtgaatgagctgctgcagaaattccagcaggcccaggaggaactcgccgagatgaaaaggtacgcagagagcagtagcaaattagaagaggataaggacaaaaaaattaatgagatgagcaaggaggtcaccaagttgaaggaggcacttaactcactgagtcagctgagttacagtaccagttcttccaagcgtcagagccagcagctggaagcgctgcaacagcaggtgaaacagctccagaaccaactggctgagtgtaagaaacaacaccaggaagtcatttctgtatatcgcatgcacctcctgtatgcagttcagggccaaatggacgaagacgtgcagaaagtgttgaagcagatcctgacaatgtgtaagaaccagtctcagaagaaatag

SEQ ID NO: 58545 - DNA, 345 bp, Artificial Sequence
  derived and/or modified sequence
atgaaatctttaaaggcaaaatttaggaagagcgacacaaacgagtggaacaaaaatgatgatcggcttttgcaggccgttgagaatggggacgccgaaaaggttgccagcctcctggggaagaagggtgcgtccgctacaaagcacgatagcgagggtaagacagcattccatctggccgcagccaaaggccacgtggagtgcttgagggtgatgataacacatggcgtggatgtgacggcacaagacaccactggacactccgctctccacctggcggcaaaaaactctcatcacgagtgtataagaaagcttctacagtcaaagtgtccagccgagagctag

SEQ ID NO: 58546 - DNA, 378 bp, Artificial Sequence
  derived and/or modified sequence
atgaaaagcctgaaagccaaatttaggaagagcgacacaaatgaatggaacaagaatgatgatcgcctcctccaagctgtggaaaatggggacgccgagaaggttgcatccctactcggaaaaaagggagcctccgccaccaagcacgatagtgagggcaagaccgctttccacctcgcggcagcaaaagggcacgtggaatgcctgagggtgatgattactcatggagtggatgtgactgcccaggacaccaccggacactccgccttacacctggccgctaagaactcccaccacgaatgtattagaaagttgctgcagagtaagtgcccggcagagtcggtggactcgtcgggcaaaaccgctctccactactag

SEQ ID NO: 58547 - DNA, 324 bp, Artificial Sequence
  derived and/or modified sequence
atgaaatctttaaaagctaaattccggaagtcagatacaaacgagtggaataaaaacgacgacaggctgctgcaggccgtggaaaatggcgatgctgaaaaagttgcgtcactcctaggcaagaagggagcttccgctacaaaacatgactctgaggggaagaccgcgtttcacctggcggctgcgaagggccatgtggagtgcctgagagttatgatcacccatggagttgatgtaaccgcacaagatactaccggacatagcgcccttcacttagctgcaaagaactcgcatcatgagtgcattcggaagctactccagtag

SEQ ID NO: 58548 - DNA, 453 bp, Artificial Sequence
  derived and/or modified sequence
atgaaatcgctgaaggctaagtttaggaagtccgacaccaatgagtggaacaagaacgatgaccggttgttacaggctgtcgaaaatggggacgcagaaaaggtggcgagtctactgggcaaaaagggagcttcagccaccaaacacgattctgaaggtaaaactgccttccacctggcagcagccaagggtcacgtggagtgcctgcgcgtgatgatcacacatggcgtcgatgtcacagcccaagacaccactggtcactcagccctgcacttagcggcaaagaactctcaccatgagtgcatacgaaagctgttgcagtctaaatgccccgcagagtccgtagacagctccgggaagaccgccctccactatgccgctgcccaaggctgcctgcaggccgtgcagattctctgcgagcataaatctccgataaatcttaaggacctttag

SEQ ID NO: 58549 - DNA, 381 bp, Artificial Sequence
  derived and/or modified sequence
atgaagagcctcaaggccaagtttcgaaaatccgataccaacgagtggaataaaaatgatgatcggcttctgcaagctgtagaaaacggagatgcagagaaggtcgcctctctgcttggcaaaaaaggcgcttctgctactaaacacgactctgagggcaagactgcattccacctagccgcagctaaagggcatgttgaatgcctcagggtgatgattacacatggagtcgatgttacagcacaagataccacaggacatagtgcgttgcacctggctgccaaaaactcccaccacgagtgcatccgaaagctgcttcagagcaaatgcccagccgaaagcgtagattctagtggcaagaccgctctgcattacgcttag

SEQ ID NO: 58550 - DNA, 315 bp, Artificial Sequence
  derived and/or modified sequence
atgaagagtctgaaagccaaattccggaagagtgacacaaatgagtggaacaaaaacgacgatcgtctcctgcaggccgtcgagaacggagatgctgaaaaggtcgccagcctgctaggaaagaagggggcatccgctaccaagcacgacagtgaaggcaagaccgcgttccacctcgccgctgcgaaggggcacgttgaatgcctgcgcgtcatgataacacatggcgtggatgtgactgcccaggacaccaccgggcactccgccctccacctcgccgcaaagaattcccaccacgaatgcattcggaaatag

SEQ ID NO: 58551 - DNA, 420 bp, Artificial Sequence
  derived and/or modified sequence
atgaagagtctaaaagcgaaattccgcaagtccgatactaacgaatggaataagaatgatgaccggctgctgcaggcggtggaaaatggagatgccgaaaaagttgccagcctgttgggtaaaaagggggcttcagcaacaaagcacgactctgaggggaagacagcgttccacctagctgccgctaaaggtcacgtcgaatgcctacgcgtcatgatcacacatggagtggacgtgaccgcccaggatacaacaggccattccgccctgcacctggctgctaagaactctcaccacgaatgcattagaaagctgttgcaaagcaagtgccctgcagagagcgtggattcaagtggcaagacggcgctccattacgcagctgcacagggctgcctccaggccgtgcagattctctgctag

SEQ ID NO: 58552 - DNA, 381 bp, Artificial Sequence
  derived and/or modified sequence
atgaaatctctgaaggctaaatttcgcaagagcgacaccaatgaatggaataagaacgacgaccgtttacttcaggccgttgaaaacggtgacgcagagaaggtggcaagcctgctgggcaagaaaggcgctagtgccaccaaacacgattccgaagggaaaacagcctttcatctagccgctgcgaaaggccacgtagaatgcctccgagtgatgataacgcacggtgtggatgtgactgcacaagacaccacagggcactccgcgttgcacctggcagcgaagaattcccaccatgagtgcatacgcaaactgttgcaatccaagtgtcccgctgagtcagtggacagttcaggtaagacagccctacattatgcatag

SEQ ID NO: 58553 - DNA, 2856 bp, Artificial Sequence
  derived and/or modified sequence
atgaaaagtctcaaagccaagttccgaaagtccgatacaaacgagtggaataagaacgacgatcgcttgctgcaagccgttgagaacggggatgcagaaaaggtcgctagccttcttgggaagaaaggcgcaagcgctaccaaacatgactccgaggggaagaccgctttccacctcgctgctgccaaaggccatgtggagtgcctgagagtgatgatcacacatggagttgacgttacggctcaagacaccaccggtcattccgcactgcacctggctgctaagaacagccatcatgagtgtatcagaaaactgctccaatctaagtgccccgctgagagcgtggatagctcaggtaaaaccgctctccactacgccgcagcccaggggtgcttgcaggcggtccagattctttgtgaacacaaatctcctataaaccttaaagatcttgacggtaatatacccctcctgctggccgtgcagaatgggcactctgagatctgccacttcctgctggaccacggcgcagacgtgaattcacgtaacaagagcggcaggacagccctcatgctcgcttgcgagattggctcgtcgaatgccgtcgaagccctgattaaaaagggcgctgaccttaatctggtggactccctgggatataatgctctccactattctaagctgtccgagaatgcaggcattcagagtctcctgctttcaaagattagccaggatgccgacctgaaaacacccactaaacctaagcagctgagcgacgtgtcctcacccaggagcattacctccacccctctaagcggcaaggaaagcgtgttttttgcagaaccccctttcaaagctgagatcagttctatccgcgaaaacaaggaccgcttgagtgatagcactacaggtgcagactccctccttgacatttccagcgaagctgaccagcaggatcttttgagtctcctccaggcaaaggtggcctcccttactctccataataaagaactgcaggacaaactccaggcgaagagtcccaaagaggctgaagccgatttatcatttgattcttatcacagtactcagacagatctgggaccatctttggggaagccaggggaaacatcccctcctgatagtaagtcttctccttctgttcttattcacagtttggggaagagtaccacagataacgatgttcgtatacagcagctccaagaaatcctgcaggatctgcagaaacgccttgagagtagcgaggccgagagaaagcagttgcaggtggagcttcagagccgcagggctgagctggtgtgcctgaataacaccgaaatcagtgagaactcgagtgatctgagtcagaagcttaaagagacccagagcaagtatgaggaggctatgaaggaagtactttcagttcagaaacaaatgaaactcggcctggtctcccccgagagcatggataactacagccacttccacgagctgcgtgtgacggaggaagaaatcaacgtcctcaaacaggacctccaaaatgcccttgaggaatctgaaaggaacaaggaaaaagtcagggaactcgaagagaaactcgtggagcgcgagaagggaaccgtgattaaaccacccgtagaagagtatgaagaaatgaaaagctcctattgctcagtaatagagaacatgaataaggagaaggcttttttgtttgaaaaatatcaggaggctcaagaggagatcatgaaactgaaggataccctgaaatcacagatgacgcaggaggctagcgacgaggccgaagatatgaaggaggcgatgaaccgtatgatcgacgaactgaataaacaggtgagcgaattgtcccagttgtacaaggaggcacaggcagaattggaagattaccgtaaaagaaagagtctggaggacgtgacagccgagtatattcacaaggcggagcatgagaaactcatgcagctcaccaacgtgagtcgggcaaaggcggaggatgctttgtccgaaatgaaatcccaatacagcaaggtgctgaatgaattgacccagctcaagcagctcgtggatgctcaaaaagagaactcagtgtctattacagagcacctccaggtgatcacaaccctgagaactgccgctaaggagatggaggaaaagatctcaaatctcaaagagcaccttgccagcaaagaggtggaggtcgcaaagctggagaaacaactcctggaagaaaaggctgctatgactgacgcaatggtgcccaggagcagctatgaaaaacttcagtcatcactcgaaagcgaggtatctgtgctagcttctaagctaaaagaatctgtgaaggaaaaagagaaggtgcattccgaggtagtccagatacgctctgaggtctcgcaagtcaaaagagagaaagaaaatatccagacgcttttaaagagcaaggaacaggaagtcaatgagctgctccaaaagttccaacaggcacaggaagaactggccgaaatgaagagatacgcagagtccagctctaaactggaagaagataaggacaagaagataaatgaaatgagcaaggaagtgacgaagttgaaggaagcattgaacagtctgtcacagctgagttatagcactagctcctccaaaagacagagccaacagttagaggcattgcagcagcaggtcaaacagcttcagaaccaactcgccgaatgcaaaaagcagcaccaggaagtgatttccgtctataggatgcacctactgtacgccgtgcagggccagatggatgaggacgtccaaaaggttctgaagcaaatattgaccatgtgtaagaatcaatctcaaaagaaatag

SEQ ID NO: 58554 - DNA, 630 bp, Artificial Sequence
  derived and/or modified sequence
aagattgaaaggggccatggagaggctgcagtcacaatgaggcctccagattcatgtcatcaaagtgcttcatgatgactggattttcacaccatttatccaagggccctagtcaatggcagcagcaagaatgaaagtagacacattggaagctagagagtcactgggtgacttttggaggtagcaacaagctcatgaagaaggcattcagtggcttgcactccccacccatcctctcaagtgttgaaaagtctcctctagagctttggaaggctgaatgcactaaacatgaagagcttgaaagcgaagttcaggaagagtgacaccaatgagtggaacaagaatgatgaccggctactgcaggccgtggagaatggagatgcggagaaggtggcctcactgctcggcaagaagggggccagtgccaccaaacacgacagtgagggcaagaccgctttccatcttgctgctgcaaaaggacacgtggaatgcctcagggtcatgattacacatggtgtggatgtgacagcccaagatactaccggacacagcgccttacatctcgcagccaagaacagccaccatgaatgcatcaggaagctgcttcagtctaaatgcccagccgaaagt

SEQ ID NO: 58555 - DNA, 579 bp, Artificial Sequence
  derived and/or modified sequence
gttgctacttctgtgaaatgaggcacttagactagatgagcaatcttgacttttgaagggtggcaactaccttgtagaatccagtgaaaactcagaaccttcctccctgaaaaatgtgttgaaaagtctcctctagagctttggaaggctgaatgcactaaacatgaagagcttgaaagcgaagttcaggaagagtgacaccaatgagtggaacaagaatgatgaccggctactgcaggccgtggagaatggagatgcggagaaggtggcctcactgctcggcaagaagggggccagtgccaccaaacacgacagtgagggcaagaccgctttccatcttgctgctgcaaaaggacacgtggaatgcctcagggtcatgattacacatggtgtggatgtgacagcccaagatactaccggacacagcgccttacatctcgcagccaagaacagccaccatgaatgcatcaggaagctgcttcagtctaaatgcccagccgaaagtgtcgacagctctgggaaaacagctttacattatgcagcggctcagggctgccttcaagctgtgcagattctctg

SEQ ID NO: 58556 - DNA, 542 bp, Artificial Sequence
  derived and/or modified sequence
aaaggggccatggagaggctgcagtcacaatgaggcctccagattcatgtcatcaaagtgcttcatgatgactggattttcacaccatttatccaagggccctagtcaatggcagcagcaagaatgaaagtagacacattggaagctagagagtcactgggtgacttttggaggtgttgaaaagtctcctctagagctttggaaggctgaatgcactaaacatgaagagcttgaaagcgaagttcaggaagagtgacaccaatgagtggaacaagaatgatgaccggctactgcaggccgtggagaatggagatgcggagaaggtggcctcactgctcggcaagaagggggccagtgccaccaaacacgacagtgagggcaagaccgctttccatcttgctgctgcaaaaggacacgtggaatgcctcagggtcatgattacacatggtgtggatgtgacagcccaagatactaccggacacagcgccttacatctcgcagccaagaacagccaccatgaatgcatcaggaagctgcttcag

SEQ ID NO: 58557 - DNA, 554 bp, Artificial Sequence
  derived and/or modified sequence
aaggatgcagcgtttcagttaagaggaatagatgaagagatctattgtacaacatggtgttgaaaagtctcctctagagctttggaaggctgaatgcactaaacatgaagagcttgaaagcgaagttcaggaagagtgacaccaatgagtggaacaagaatgatgaccggctactgcaggccgtggagaatggagatgcggagaaggtggcctcactgctcggcaagaagggggccagtgccaccaaacacgacagtgagggcaagaccgctttccatcttgctgctgcaaaaggacacgtggaatgcctcagggtcatgattacacatggtgtggatgtgacagcccaagatactaccggacacagcgccttacatctcgcagccaagaacagccaccatgaatgcatcaggaagctgcttcagtctaaatgcccagccgaaagtgtcgacagctctgggaaaacagctttacattatgcagcggctcagggctgccttcaagctgtgcagattctctgcgaacacaagagccccataaacctcaaagatttg

SEQ ID NO: 58558 - DNA, 548 bp, Artificial Sequence
  derived and/or modified sequence
agcagccagctgggtccggggagcgccgccgccgcctcgatggggtaacctctaatgtgaagttagcgcacacagttctcaagcatgtttggaactacactgtatccacaaaaaaatacatgtgttgaaaagtctcctctagagctttggaaggctgaatgcactaaacatgaagagcttgaaagcgaagttcaggaagagtgacaccaatgagtggaacaagaatgatgaccggctactgcaggccgtggagaatggagatgcggagaaggtggcctcactgctcggcaagaagggggccagtgccaccaaacacgacagtgagggcaagaccgctttccatcttgctgctgcaaaaggacacgtggaatgcctcagggtcatgattacacatggtgtggatgtgacagcccaagatactaccggacacagcgccttacatctcgcagccaagaacagccaccatgaatgcatcaggaagctgcttcagtctaaatgcccagccgaaagtgtcgacagctctgggaaaacagctttacattatgcag

SEQ ID NO: 58559 - DNA, 575 bp, Artificial Sequence
  derived and/or modified sequence
atggagaggctgcagtcacaatgaggcctccagattcatgtcatcaaagtgcttcatgatgactggattttcacaccatttatccaagggccctagtcaatggcagcagcaagaatgaaagtagacacattggaagctagagagtcactgggtgacttttggagctacatgcgaagttttcacatcttgtacatttccaaatttaatgaaaaaggtgttgaaaagtctcctctagagctttggaaggctgaatgcactaaacatgaagagcttgaaagcgaagttcaggaagagtgacaccaatgagtggaacaagaatgatgaccggctactgcaggccgtggagaatggagatgcggagaaggtggcctcactgctcggcaagaagggggccagtgccaccaaacacgacagtgagggcaagaccgctttccatcttgctgctgcaaaaggacacgtggaatgcctcagggtcatgattacacatggtgtggatgtgacagcccaagatactaccggacacagcgccttacatctcgcagccaagaacagccaccatgaatgcatcaggaagc

SEQ ID NO: 58560 - DNA, 660 bp, Artificial Sequence
  derived and/or modified sequence
cgcgttttcctggggaagcggcgggcggggtggagcagccagctgggtccggggagcgccgccgccgcctcgatggggatctcgctctgtcccttaggctggagtgcagtggtgcaatcttagctcaccgcagccttgacctcctgggctcaagcagtcctcccaccttagcctccctggagctggcactacaggtgttgaaaagtctcctctagagctttggaaggctgaatgcactaaacatgaagagcttgaaagcgaagttcaggaagagtgacaccaatgagtggaacaagaatgatgaccggctactgcaggccgtggagaatggagatgcggagaaggtggcctcactgctcggcaagaagggggccagtgccaccaaacacgacagtgagggcaagaccgctttccatcttgctgctgcaaaaggacacgtggaatgcctcagggtcatgattacacatggtgtggatgtgacagcccaagatactaccggacacagcgccttacatctcgcagccaagaacagccaccatgaatgcatcaggaagctgcttcagtctaaatgcccagccgaaagtgtcgacagctctgggaaaacagctttacattatgcagcggctcagggctgccttcaagctgtgcagattctctgcg

SEQ ID NO: 58561 - DNA, 542 bp, Artificial Sequence
  derived and/or modified sequence
gagatgcaccctggagtctgcgccgggtcccacctgtttcgccccgcgcggcgcctcgctgcccccgcgtcggtgctgctgagcccaatccgcctcccggctgaacttggaggaggtgttgaaaagtctcctctagagctttggaaggctgaatgcactaaacatgaagagcttgaaagcgaagttcaggaagagtgacaccaatgagtggaacaagaatgatgaccggctactgcaggccgtggagaatggagatgcggagaaggtggcctcactgctcggcaagaagggggccagtgccaccaaacacgacagtgagggcaagaccgctttccatcttgctgctgcaaaaggacacgtggaatgcctcagggtcatgattacacatggtgtggatgtgacagcccaagatactaccggacacagcgccttacatctcgcagccaagaacagccaccatgaatgcatcaggaagctgcttcagtctaaatgcccagccgaaagtgtcgacagctctgggaaaacagctttacattatgcag

SEQ ID NO: 58562 - DNA, 2941 bp, Artificial Sequence
  derived and/or modified sequence
agctgggtccggggagcgccgccgccgcctcgatggggtgttgaaaagtctcctctagagctttggaaggctgaatgcactaaacatgaagagcttgaaagcgaagttcaggaagagtgacaccaatgagtggaacaagaatgatgaccggctactgcaggccgtggagaatggagatgcggagaaggtggcctcactgctcggcaagaagggggccagtgccaccaaacacgacagtgagggcaagaccgctttccatcttgctgctgcaaaaggacacgtggaatgcctcagggtcatgattacacatggtgtggatgtgacagcccaagatactaccggacacagcgccttacatctcgcagccaagaacagccaccatgaatgcatcaggaagctgcttcagtctaaatgcccagccgaaagtgtcgacagctctgggaaaacagctttacattatgcagcggctcagggctgccttcaagctgtgcagattctctgcgaacacaagagccccataaacctcaaagatttggatgggaatataccgctgcttcttgctgtacaaaatggtcacagtgagatctgtcactttctcctggatcatggagcagatgtcaattccaggaacaaaagtggaagaactgctctcatgctggcctgtgagattggcagctctaacgctgtggaagccttaattaaaaagggtgcagacctaaaccttgtagattctcttggatacaatgccttacattattccaaactctcagaaaatgcaggaattcaaagccttctattatcaaaaatctctcaggatgctgatttaaagaccccaacaaaaccaaagcagttgagtgatgtctcttccccaagatcaataacttcgactccactatcgggaaaggaatcggtattttttgctgaaccacccttcaaggctgagatcagttctatacgagaaaacaaagacagactaagtgacagtactacaggtgctgatagcttattggatataagttctgaagctgaccaacaagatcttctctctctattgcaagcaaaagttgcttcccttaccttacacaataaggagttacaagataaattacaggccaaatcacccaaggaggcggaagcagacctaagctttgactcataccattccacccaaactgacttgggcccatccctgggaaaacctggtgaaacctctcccccagactccaaatcatctccatctgtcttaatacattctttaggtaaatccactactgacaatgatgtcagaattcagcaactgcaagagattttgcaagatctacagaagagattagagagctctgaagcagagagaaaacagctacaggtcgaactccaatcccgaagggcagaactggtatgcttaaacaacactgagatttcagagaacagctctgacctcagccagaaacttaaagaaactcagagcaaatacgaggaggctatgaaagaagtccttagtgtgcagaagcagatgaaactcggtcttgtctcacctgaaagcatggataattattcacatttccacgagctgagggtcacggaagaggaaataaatgtgctaaagcaggatctgcagaatgcattagaagaaagtgaaagaaataaagagaaagtgagagagttagaggaaaaactggtagagagggagaaaggtacagtgattaagccacctgtggaagagtacgaggaaatgaaaagttcatattgctctgttattgagaatatgaataaggagaaagcatttttgtttgagaaataccaagaagcccaagaagaaatcatgaaattaaaagacacactaaaaagtcagatgacacaggaagccagtgatgaagctgaggacatgaaagaagccatgaataggatgatagatgaactcaataaacaggtgagcgagctgtcacagctgtacaaagaagcccaggctgagctggaggattacaggaagaggaaatctctagaggatgtcacagctgaatatatccataaagcagagcatgagaaactgatgcaattgacaaacgtgtccagggctaaagcagaagatgcactgtctgaaatgaagtctcagtattcaaaagtgttgaatgagttgacccagctcaaacaactggtggatgcacaaaaagagaactctgtctctatcacagaacatttgcaagtgataaccacgctgcggactgcagcaaaagagatggaagaaaaaataagcaatcttaaggaacaccttgcaagcaaggaagtggaagtagcaaagctggagaaacaactcttagaagagaaagctgctatgactgatgcaatggtacctcggtcttcctatgaaaaactccagtcatccttagagagtgaagtgagtgtgttggcatcgaaattaaaggaatctgtgaaagagaaagagaaggtccattcagaggttgtccagattagaagtgaggtctcacaggtgaaaagagaaaaggaaaatattcagactctcttgaaatccaaagagcaagaagtaaatgaacttctgcaaaaattccagcaagctcaggaagaacttgcagaaatgaaaagatacgctgagagctcttcaaaactggaggaagataaagataaaaagataaatgagatgtcgaaggaagtcaccaaattgaaggaggccttgaacagcctctcccagctctcctactcaacaagctcatccaaaaggcagagtcagcagctggaggcgctgcagcagcaagtcaaacagctccagaaccagctggcggaatgcaagaaacaacaccaggaggtcatatcagtttacagaatgcatcttctgtatgctgtgcagggccagatggatgaagatgtccagaaagtactgaagcaaatccttaccatgtgtaaaaaccagtctcaaaagaagtaa

SEQ ID NO: 58563 - DNA, 345 bp, Artificial Sequence
  derived and/or modified sequence
atgaagagcctgaaggccaagttcagaaagagcgacaccaacgagtggaacaagaacgacgacagactgctgcaggccgtggagaacggcgacgccgagaaggtggccagcctgctgggcaagaagggcgccagcgccaccaagcacgacagcgagggcaagaccgccttccacctggccgccgccaagggccacgtggagtgcctgagagtgatgatcacccacggcgtggacgtgaccgcccaggacaccaccggccacagcgccctgcacctggccgccaagaacagccaccacgagtgcatcagaaagctgctgcagagcaagtgccccgccgagagctag

SEQ ID NO: 58564 - DNA, 378 bp, Artificial Sequence
  derived and/or modified sequence
atgaagagcctgaaggccaagttcagaaagagcgacaccaacgagtggaacaagaacgacgacagactgctgcaggccgtggagaacggcgacgccgagaaggtggccagcctgctgggcaagaagggcgccagcgccaccaagcacgacagcgagggcaagaccgccttccacctggccgccgccaagggccacgtggagtgcctgagagtgatgatcacccacggcgtggacgtgaccgcccaggacaccaccggccacagcgccctgcacctggccgccaagaacagccaccacgagtgcatcagaaagctgctgcagagcaagtgccccgccgagagcgtggacagcagcggcaagaccgccctgcactactag

SEQ ID NO: 58565 - DNA, 324 bp, Artificial Sequence
  derived and/or modified sequence
atgaagagcctgaaggccaagttcagaaagagcgacaccaacgagtggaacaagaacgacgacagactgctgcaggccgtggagaacggcgacgccgagaaggtggccagcctgctgggcaagaagggcgccagcgccaccaagcacgacagcgagggcaagaccgccttccacctggccgccgccaagggccacgtggagtgcctgagagtgatgatcacccacggcgtggacgtgaccgcccaggacaccaccggccacagcgccctgcacctggccgccaagaacagccaccacgagtgcatcagaaagctgctgcagtag

SEQ ID NO: 58566 - DNA, 453 bp, Artificial Sequence
  derived and/or modified sequence
atgaagagcctgaaggccaagttcagaaagagcgacaccaacgagtggaacaagaacgacgacagactgctgcaggccgtggagaacggcgacgccgagaaggtggccagcctgctgggcaagaagggcgccagcgccaccaagcacgacagcgagggcaagaccgccttccacctggccgccgccaagggccacgtggagtgcctgagagtgatgatcacccacggcgtggacgtgaccgcccaggacaccaccggccacagcgccctgcacctggccgccaagaacagccaccacgagtgcatcagaaagctgctgcagagcaagtgccccgccgagagcgtggacagcagcggcaagaccgccctgcactacgccgccgcccagggctgcctgcaggccgtgcagatcctgtgcgagcacaagagccccatcaacctgaaggacctgtag

SEQ ID NO: 58567 - DNA, 381 bp, Artificial Sequence
  derived and/or modified sequence
atgaagagcctgaaggccaagttcagaaagagcgacaccaacgagtggaacaagaacgacgacagactgctgcaggccgtggagaacggcgacgccgagaaggtggccagcctgctgggcaagaagggcgccagcgccaccaagcacgacagcgagggcaagaccgccttccacctggccgccgccaagggccacgtggagtgcctgagagtgatgatcacccacggcgtggacgtgaccgcccaggacaccaccggccacagcgccctgcacctggccgccaagaacagccaccacgagtgcatcagaaagctgctgcagagcaagtgccccgccgagagcgtggacagcagcggcaagaccgccctgcactacgcctag

SEQ ID NO: 58568 - DNA, 315 bp, Artificial Sequence
  derived and/or modified sequence
atgaagagcctgaaggccaagttcagaaagagcgacaccaacgagtggaacaagaacgacgacagactgctgcaggccgtggagaacggcgacgccgagaaggtggccagcctgctgggcaagaagggcgccagcgccaccaagcacgacagcgagggcaagaccgccttccacctggccgccgccaagggccacgtggagtgcctgagagtgatgatcacccacggcgtggacgtgaccgcccaggacaccaccggccacagcgccctgcacctggccgccaagaacagccaccacgagtgcatcagaaagtag

SEQ ID NO: 58569 - DNA, 420 bp, Artificial Sequence
  derived and/or modified sequence
atgaagagcctgaaggccaagttcagaaagagcgacaccaacgagtggaacaagaacgacgacagactgctgcaggccgtggagaacggcgacgccgagaaggtggccagcctgctgggcaagaagggcgccagcgccaccaagcacgacagcgagggcaagaccgccttccacctggccgccgccaagggccacgtggagtgcctgagagtgatgatcacccacggcgtggacgtgaccgcccaggacaccaccggccacagcgccctgcacctggccgccaagaacagccaccacgagtgcatcagaaagctgctgcagagcaagtgccccgccgagagcgtggacagcagcggcaagaccgccctgcactacgccgccgcccagggctgcctgcaggccgtgcagatcctgtgctag

SEQ ID NO: 58570 - DNA, 2856 bp, Artificial Sequence
  derived and/or modified sequence
atgaagagcctgaaggccaagttcagaaagagcgacaccaacgagtggaacaagaacgacgacagactgctgcaggccgtggagaacggcgacgccgagaaggtggccagcctgctgggcaagaagggcgccagcgccaccaagcacgacagcgagggcaagaccgccttccacctggccgccgccaagggccacgtggagtgcctgagagtgatgatcacccacggcgtggacgtgaccgcccaggacaccaccggccacagcgccctgcacctggccgccaagaacagccaccacgagtgcatcagaaagctgctgcagagcaagtgccccgccgagagcgtggacagcagcggcaagaccgccctgcactacgccgccgcccagggctgcctgcaggccgtgcagatcctgtgcgagcacaagagccccatcaacctgaaggacctggacggcaacatccccctgctgctggccgtgcagaacggccacagcgagatctgccacttcctgctggaccacggcgccgacgtgaacagcagaaacaagagcggcagaaccgccctgatgctggcctgcgagatcggcagcagcaacgccgtggaggccctgatcaagaagggcgccgacctgaacctggtggacagcctgggctacaacgccctgcactacagcaagctgagcgagaacgccggcatccagagcctgctgctgagcaagatcagccaggacgccgacctgaagacccccaccaagcccaagcagctgagcgacgtgagcagccccagaagcatcaccagcacccccctgagcggcaaggagagcgtgttcttcgccgagccccccttcaaggccgagatcagcagcatcagagagaacaaggacagactgagcgacagcaccaccggcgccgacagcctgctggacatcagcagcgaggccgaccagcaggacctgctgagcctgctgcaggccaaggtggccagcctgaccctgcacaacaaggagctgcaggacaagctgcaggccaagagccccaaggaggccgaggccgacctgagcttcgacagctaccacagcacccagaccgacctgggccccagcctgggcaagcccggcgagaccagcccccccgacagcaagagcagccccagcgtgctgatccacagcctgggcaagagcaccaccgacaacgacgtgagaatccagcagctgcaggagatcctgcaggacctgcagaagagactggagagcagcgaggccgagagaaagcagctgcaggtggagctgcagagcagaagagccgagctggtgtgcctgaacaacaccgagatcagcgagaacagcagcgacctgagccagaagctgaaggagacccagagcaagtacgaggaggccatgaaggaggtgctgagcgtgcagaagcagatgaagctgggcctggtgagccccgagagcatggacaactacagccacttccacgagctgagagtgaccgaggaggagatcaacgtgctgaagcaggacctgcagaacgccctggaggagagcgagagaaacaaggagaaggtgagagagctggaggagaagctggtggagagagagaagggcaccgtgatcaagccccccgtggaggagtacgaggagatgaagagcagctactgcagcgtgatcgagaacatgaacaaggagaaggccttcctgttcgagaagtaccaggaggcccaggaggagatcatgaagctgaaggacaccctgaagagccagatgacccaggaggccagcgacgaggccgaggacatgaaggaggccatgaacagaatgatcgacgagctgaacaagcaggtgagcgagctgagccagctgtacaaggaggcccaggccgagctggaggactacagaaagagaaagagcctggaggacgtgaccgccgagtacatccacaaggccgagcacgagaagctgatgcagctgaccaacgtgagcagagccaaggccgaggacgccctgagcgagatgaagagccagtacagcaaggtgctgaacgagctgacccagctgaagcagctggtggacgcccagaaggagaacagcgtgagcatcaccgagcacctgcaggtgatcaccaccctgagaaccgccgccaaggagatggaggagaagatcagcaacctgaaggagcacctggccagcaaggaggtggaggtggccaagctggagaagcagctgctggaggagaaggccgccatgaccgacgccatggtgcccagaagcagctacgagaagctgcagagcagcctggagagcgaggtgagcgtgctggccagcaagctgaaggagagcgtgaaggagaaggagaaggtgcacagcgaggtggtgcagatcagaagcgaggtgagccaggtgaagagagagaaggagaacatccagaccctgctgaagagcaaggagcaggaggtgaacgagctgctgcagaagttccagcaggcccaggaggagctggccgagatgaagagatacgccgagagcagcagcaagctggaggaggacaaggacaagaagatcaacgagatgagcaaggaggtgaccaagctgaaggaggccctgaacagcctgagccagctgagctacagcaccagcagcagcaagagacagagccagcagctggaggccctgcagcagcaggtgaagcagctgcagaaccagctggccgagtgcaagaagcagcaccaggaggtgatcagcgtgtacagaatgcacctgctgtacgccgtgcagggccagatggacgaggacgtgcagaaggtgctgaagcagatcctgaccatgtgcaagaaccagagccagaagaagtag

SEQ ID NO: 58571 - protein, 972 aa, Artificial Sequence
  derived and/or modified sequence
MEAKTNEWNKNDDRLLQAVENGDAEKVASLLGKKGASATKHDSEGKTAFHLAAAKGHVECLRVMITHGVDVTAQDTTGHSALHLAAKNSHHECIRKLLQSKCPAESVDSSGKTALHYAAAQGCLQAVQILCEHKSPINLKDLDGNIPLLLAVQNGHSEICHFLLDHGADVNSRNKSGRTALMLACEIGSSNAVEALIKKGADLNLVDSLGYNALHYSKLSENAGIQSLLLSKISQDADLKTPTKPKQHDQVSKISSERSGTPKKRKAPPPPISPTQLSDVSSPRSITSTPLSGKESVFFAEPPFKAEISSIRENKDRLSDSTTGADSLLDISSEADQQDLLSLLQAKVASLTLHNKELQDKLQAKSPKEAEADLSFDSYHSTQTDLGPSLGKPGETSPPDSKSSPSVLIHSLGKSTTDNDVRIQQLQEILQDLQKRLESSEAERKQLQVELQSRRAELVCLNNTEISENSSDLSQKLKETQSKYEEAMKEVLSVQKQMKLGLVSPESMDNYSHFHELRVTEEEINVLKQDLQNALEESERNKEKVRELEEKLVEREKGTVIKPPVEEYEEMKSSYCSVIENMNKEKAFLFEKYQEAQEEIMKLKDTLKSQMTQEASDEAEDMKEAMNRMIDELNKQVSELSQLYKEAQAELEDYRKRKSLEDVTAEYIHKAEHEKLMQLTNVSRAKAEDALSEMKSQYSKVLNELTQLKQLVDAQKENSVSITEHLQVITTLRTAAKEMEEKISNLKEHLASKEVEVAKLEKQLLEEKAAMTDAMVPRSSYEKLQSSLESEVSVLASKLKESVKEKEKVHSEVVQIRSEVSQVKREKENIQTLLKSKEQEVNELLQKFQQAQEELAEMKRYAESSSKLEEDKDKKINEMSKEVTKLKEALNSLSQLSYSTSSSKRQSQQLEALQQQVKQLQNQLAECKKQHQEVISVYRMHLLYAVQGQMDEDVQKVLKQILTMCKNQSQKK

SEQ ID NO: 58572 - DNA, 2919 bp, Artificial Sequence
  derived and/or modified sequence
atggaggctaagactaatgaatggaacaagaacgacgatcggctgttacaggctgtggaaaatggtgatgccgagaaggtggctagcttgctgggaaagaagggggcaagcgcgactaagcacgactccgaagggaagactgccttccacctggctgcagccaaaggccacgttgaatgcttgcgcgtcatgatcactcatggcgtcgatgttacagctcaggatacaaccggacacagtgcacttcatctagccgccaaaaattcccaccatgaatgtattcggaaactgctacaatctaagtgtcctgcagaatccgtcgacagcagcggtaaaaccgccttgcactacgcagccgctcagggctgtctccaagctgtgcagatcctctgtgaacacaagagtcccattaacctgaaggatctcgacggcaatattcctttgctgttggcggtgcagaatggtcactctgagatctgccacttcctactcgaccacggggctgatgtgaattccagaaataaatccggtcgaaccgcgctcatgttagcatgcgaaattggtagttctaatgcggtggaggcattgatcaagaaaggggccgatcttaacctggttgactctttaggttataatgcactgcactactcaaagctgtcagagaacgccggcattcagtccctgttgctgagtaagatcagccaggatgctgatttgaaaaccccgaccaaacccaaacaacacgatcaggtgtcgaagatttcatccgagcgctccggaactccaaagaaacgtaaggcacccccccctcccattagccccactcagctcagcgacgttagcagcccccgttcgatcacgtctacccccctttcaggcaaggaatccgtattctttgccgaaccaccttttaaagcagaaatttctagtataagagagaataaagaccgcttatccgattctacaactggtgcggattcactgttagacatatcttctgaggcggatcagcaagacttgctatctctcctccaggctaaagtggcatcattaacgcttcacaataaagaattgcaggacaaactgcaagccaaatcaccgaaagaggctgaggccgatctgtcattcgatagttatcactctacccaaaccgacctgggtccatctctgggtaagcctggggaaacatcgcctcctgactccaaatcgagtccctctgttctgattcactccttgggaaagagcacgacagataatgacgtcagaattcaacagttgcaggaaatcctgcaagatcttcaaaagcgccttgaaagttccgaggcagagcgaaaacagctgcaagtggaactccagagcaggcgtgccgaactcgtgtgccttaacaacaccgagattagcgagaacagttcagacctgagtcaaaagttaaaggaaactcagtccaagtacgaagaggccatgaaggaagtgctatccgtacagaagcagatgaagctgggcctggtgagtcctgaaagtatggataattatagccacttccatgagctgcgcgtgacagaggaggaaatcaacgtattgaagcaggatctccagaatgctctcgaagaaagcgagagaaacaaagagaaggtcagggagctggaagagaagctcgtagaacgcgagaagggaacagtaataaaaccacccgtggaagagtacgaagaaatgaagagcagctactgcagcgtgatcgagaacatgaataaggaaaaggcgttcctcttcgaaaagtaccaagaggcccaggaagagataatgaagctgaaggacacactgaaaagccaaatgacacaggaggcctctgacgaagcggaagacatgaaggaggcgatgaaccgcatgatcgatgagttaaacaagcaggtttccgagctgtcccagctgtacaaagaagctcaagctgagctggaagattaccggaagcgaaaatccctagaagacgttaccgccgagtacattcacaaggcagagcacgaaaagctgatgcagctgaccaatgtcagtagagcaaaggccgaagatgctctgtcagagatgaagtcccagtattcgaaagtactgaacgagctcacccaacttaaacagctcgtggatgcccaaaaggaaaactctgtctccatcacggagcacctgcaggtgatcaccaccctgaggacagcggctaaggaaatggaagagaaaatatccaatttgaaagagcaccttgctagtaaggaggtcgaagtcgccaagctggaaaaacagctgttagaggagaaagccgctatgaccgatgcaatggtgccgcgttcttcctacgagaaactgcagtccagcctcgagagcgaggtgtctgtgctggcatccaaactcaaggaatcagtcaaggaaaaggagaaggtacactcggaggtggtgcagattcggtccgaggtgtcccaggtgaaacgtgaaaaggaaaatattcaaacactgctgaagtccaaggagcaggaggtaaacgaactgctgcagaagttccagcaggcccaggaggagctggcagaaatgaagcgttatgcagagagttcctcaaaactggaagaggacaaggacaagaagattaacgagatgtccaaggaagtgaccaagctcaaagaggccctgaattccctgtcccaacttagctattctaccagctcaagtaagcgtcagtcccagcaactggaggctctgcagcagcaggtcaagcaactacagaatcaattggctgaatgtaaaaaacagcaccaggaggtcattagcgtctatagaatgcacctgctgtatgccgtgcaggggcagatggatgaagacgttcagaaggtgctgaagcagattctgaccatgtgcaaaaaccagagtcagaaaaagtag

SEQ ID NO: 58573 - DNA, 2919 bp, Artificial Sequence
  derived and/or modified sequence
atggaggccaagaccaatgagtggaacaagaatgatgaccggctgctgcaggccgtggagaatggagatgctgagaaggtggccagcctgctgggcaagaagggggccagcgccaccaagcatgattctgagggcaagacagccttccacctggccgccgccaagggccacgtggagtgcctgcgggtgatgatcacccatggagtggatgtgacagcccaggacaccaccggccacagcgccctgcacctggccgccaagaacagccaccacgagtgcatcaggaagctgctgcagagcaaatgtcctgctgagagcgtggacagcagcggcaagacagccctgcactacgccgccgcccagggctgcctgcaggccgtgcagatcctgtgtgagcacaagagccccatcaacctgaaggacctggatggcaacatccccctgctgctggccgtgcagaatggccacagcgagatctgccacttcctgctggaccacggggctgatgtgaacagcaggaacaagagcggccgcacagccctgatgctggcctgtgaaattggcagcagcaatgctgtggaggccctgatcaagaagggagctgacctgaacctggtggacagcctgggctacaatgccctgcactacagcaagctgtctgaaaatgccggcatccagagcctgctgctgagcaagatcagccaggatgctgacctgaagacccccaccaagcccaagcagcacgaccaggtgtccaagatcagcagcgagaggagcggcacccccaagaagaggaaggcccctcctccacccatcagccccacccagctgagtgatgtgagcagccccaggagcatcaccagcacccccctgagcggcaaggagagcgtcttctttgctgagccccccttcaaggccgagatcagcagcatccgggagaacaaggaccggctgagtgacagcaccactggagctgacagcctgctggacatcagcagcgaggccgaccagcaggacctgctgagcctgctgcaggccaaggtggccagcctgaccctgcacaacaaggagctgcaggacaagctgcaggccaagagccccaaggaggccgaggccgacctgagctttgacagctaccacagcacccagacagacctgggccccagcctgggcaagccaggagagaccagccccccagacagcaagagcagccccagcgtgctgatccacagcctgggcaagagcaccacagacaatgatgtgcgcatccagcagctgcaggagatcctgcaggacctgcagaagaggctggagagcagcgaggccgagaggaagcagctgcaggtggagctgcagagccggcgggcagagctggtgtgcctgaacaacacagagatcagcgagaacagcagtgacctgagccagaagctgaaggagacccagagcaaatatgaggaggccatgaaggaggtgctgtctgtgcagaagcagatgaagctgggcctggtgtccccagagagcatggacaactacagccacttccacgagctgcgggtgacagaggaggagatcaacgtgctgaagcaggacctgcagaatgccctggaggagagcgagaggaacaaggagaaggtgcgggagctggaggagaagctggtggagcgggagaagggcaccgtcatcaagccccctgtggaggagtatgaggagatgaagagcagctactgcagcgtgattgagaacatgaacaaggagaaggccttcctgtttgagaagtaccaggaggcccaggaggagatcatgaagctgaaggacaccctgaagagccagatgacccaggaggccagtgatgaagctgaggacatgaaggaggccatgaacaggatgattgatgagctgaacaagcaggtgtctgagctgagccagctgtacaaggaggcccaggccgagctggaggactacaggaagaggaagagcctggaggatgtgacagctgagtacatccacaaggccgagcacgagaagctgatgcagctgaccaacgtgtcccgggccaaggccgaggatgccctgtctgagatgaagagccagtacagcaaggtgctgaatgagctgacccagctgaagcagctggtggatgcccagaaggaaaattctgtgtccatcacagagcacctgcaggtgatcaccaccctgaggacagctgccaaggagatggaggagaagatcagcaacctgaaggagcacctggccagcaaggaggtggaggtggccaagctggagaagcagctgctggaggagaaggccgccatgacagatgccatggtgcccaggagcagctatgagaagctgcagagcagcctggagagcgaggtgtctgtgctggccagcaagctgaaggagagcgtgaaggagaaggagaaggtgcacagcgaggtggtgcagatccgctctgaggtgtcccaggtgaagcgggagaaggagaacatccagaccctgctgaagagcaaggagcaggaggtgaatgagctgctgcagaagttccagcaggcccaggaggagctggccgagatgaagagatatgcagagagcagcagcaagctggaggaggacaaggacaagaagatcaatgagatgagcaaggaggtgaccaagctgaaggaggccctgaacagcctgagccagctgagctacagcaccagcagcagcaagaggcagagccagcagctggaggccctgcagcagcaggtgaagcagctgcagaaccagctggccgagtgcaagaagcagcaccaggaggtgatctctgtgtacaggatgcacctgctgtatgctgtgcagggccagatggatgaagatgtgcagaaggtgctgaagcagatcctgaccatgtgcaagaaccagagccagaagaagtag

SEQ ID NO: 58574 - DNA, 2919 bp, Artificial Sequence
  derived and/or modified sequence
atggaggccaagaccaacgagtggaacaagaacgacgaccggctgcttcaggccgtcgaaaacggggacgcagagaaggtggcttcgctcctcgggaagaaaggtgccagcgctactaaacacgatagcgagggaaagaccgcttttcatctggccgccgctaaggggcatgttgagtgcctcagggtgatgattacacacggagttgatgtcaccgcgcaggataccacaggtcattccgccttgcatttggctgccaagaattcgcaccacgagtgcatccgaaaattgcttcagagcaagtgccccgccgagtctgttgacagctcgggcaaaaccgcattgcattatgcagccgctcagggttgtctgcaggcagtgcagatcctctgcgaacacaaatctccgatcaacttaaaagatctggacggcaacataccgctgctgctggccgtgcagaacggccattcagagatctgtcatttcctcttggaccatggcgctgacgttaacagtcggaataaatctggtaggacagcattgatgctggcctgcgagatcgggtctagcaacgccgtggaagccttgattaagaaaggggcagacctgaacctcgttgatagtttaggatataatgccctgcactattctaagctgagtgagaatgcgggcatccagagcctgctcctcagcaagatctcacaggacgccgacctgaagacgccaaccaaacccaaacaacacgatcaagtgtcaaagatctcttctgagagaagcggcactccgaagaagagaaaagcgcctccacctcctatctcacctacccagttgtccgacgttagttctcctagatctattacatccaccccattgtccggaaaggagtccgtgttcttcgccgaacctccctttaaagccgaaatatcatctatcagggaaaacaaggatagactctccgacagcaccaccggtgctgactccctgctcgatatttcgagcgaggccgatcagcaggacctcctgtctctcctccaggcaaaggttgccagcctgactctccacaacaaagaactccaggataagctgcaggcgaagagccctaaggaagctgaggccgacctgtcgttcgactcatatcattccacacagacagaccttggcccttctctggggaagccgggggagacatcgccccctgacagcaagagtagtccatcagttttaatccattctctgggaaaaagtacaaccgataacgatgtgagaatccagcagctgcaagaaatccttcaggatttacagaagcggctggagagcagcgaggcagagcgcaaacagttgcaggtggagctgcaatcaaggcgagctgagcttgtgtgtctcaacaatacagagatctctgaaaacagcagtgacttaagccagaaactgaaagaaactcagtctaagtatgaggaagccatgaaagaggtgttgtcagtccagaagcaaatgaagcttggccttgtatccccggagtcaatggacaactactctcatttccacgagctgagagtcacagaggaagagattaacgttttaaagcaggacttgcagaacgcccttgaagaatctgaaagaaacaaggaaaaggtgcgggagttggaggagaaactggttgaacgtgaaaagggtactgtaatcaagcctccagtggaggagtacgaggagatgaaatcttcctactgcagtgtgattgagaatatgaataaagaaaaggcctttctgttcgaaaaataccaagaggcccaagaggagatcatgaagctgaaagatactcttaagtcacaaatgacacaggaagctagcgatgaggctgaagacatgaaagaggctatgaatagaatgatagacgagctcaataagcaggttagcgaattgtctcagctgtacaaggaggcccaggccgaactcgaggattataggaaaaggaagtcactggaggatgtgaccgccgagtacatccacaaagctgagcacgagaaactgatgcagttaacaaacgtctcccgggccaaagccgaagacgcactctcagagatgaagtcacagtattctaaggttctcaacgagttaacacaactcaagcagctggtcgatgctcaaaaggagaactcagtgtccatcacagaacatcttcaggttatcaccacattgcggacagccgcaaaagaaatggaagagaagataagcaatctaaaggaacatctggcgagcaaagaagtagaagttgccaaacttgaaaagcagttgctggaggaaaaagccgctatgactgacgcgatggtgccccgctcttcctacgagaaacttcagtcaagtctcgaaagcgaggtatcagtgctcgcgagtaagttgaaagagtctgtgaaggaaaaagaaaaggttcacagcgaagtggttcagatcagatccgaggtatcgcaggtcaaacgcgaaaaggagaacattcagactctgctaaagtctaaagaacaggaggtgaacgaactgcttcagaagtttcaacaggcacaggaggaacttgcggagatgaagcggtatgctgaatctagttccaaattggaagaggacaaggataaaaagatcaacgagatgagtaaagaagtgacgaaactgaaggaggcccttaattcgctgagccagctgtcatacagcactagcagcagcaagcgacagtcccagcaactggaagcactacagcaacaggtgaaacaattgcagaaccaacttgctgaatgcaaaaaacagcaccaggaggtcatctctgtatatcgaatgcacctgttgtatgctgtccagggccagatggacgaagatgttcagaaggttctgaaacaaatcctcacgatgtgcaaaaaccaatctcagaaaaagtag

SEQ ID NO: 58575 - DNA, 2919 bp, Artificial Sequence
  derived and/or modified sequence
atggaagccaaaacaaacgaatggaacaagaatgacgaccgtcttctgcaggccgtagagaacggcgatgcggagaaagttgcaagcctactgggaaagaagggtgcaagtgccaccaagcacgatagcgagggcaaaactgcgttccatctggcagccgctaagggccatgtagaatgcttgcgggttatgataactcatggtgtagatgttactgcccaggacaccactggccatagcgcactgcatcttgcagcgaaaaactctcatcacgagtgcatcaggaagcttctccagagcaaatgtcctgctgagtccgtagattcatcagggaaaacagccctgcactatgccgcagcccaggggtgccttcaggccgtgcaaatcctctgcgaacacaaatcaccgattaatctgaaggacctagatgggaacataccactgctgctggctgtgcagaatggtcattctgagatctgtcattttctgctggatcatggggcagatgtcaattctcgcaacaagagtgggcgtacggcactgatgctggcatgtgagatcggaagctctaacgccgtggaagcacttatcaaaaaaggcgcagatctgaatcttgtggactcactagggtataacgctctacactactccaaactctcggaaaacgctgggatacaaagcctcctgttgtctaagataagtcaggacgccgacctgaagacacctacaaagccaaaacagcacgaccaggttagtaagataagtagtgagcggagcggaacaccgaagaagcgcaaggcccctccgccaccaataagccctacccagctgagtgacgtctcatcgccacggagtattaccagcacacctctgagtgggaaggagtctgtttttttcgccgaaccccctttcaaggccgagatcagcagtatccgggaaaataaggatcggctgagcgattctaccactggcgcagactcacttctggacattagcagcgaagcagatcagcaggacttactctcactcctgcaagccaaggtcgccagtctgacgttacacaataaagaactgcaagataaactgcaggctaagtctcccaaagaggctgaagcggatctgtcgttcgactcttatcactctacacaaaccgacttgggaccaagcctgggcaagcccggagaaaccagccctcccgattctaagagttctccgtccgtcctgatacattccttgggtaagagcactacagataatgatgtgagaattcaacagctccaagaaatcttgcaggacctgcagaagcggctcgagtcgagcgaagcggagcgcaagcagttacaggtcgaattacagtccaggagggcagaattggtgtgtctgaataacacagagattagcgaaaatagctccgatctgtcacagaaattaaaagagacgcagtctaagtatgaggaggccatgaaagaagttctgagcgtccagaaacaaatgaagctgggtctggtcagtcccgagtctatggataactactcccactttcatgagctgagagttacagaggaggaaataaacgttctgaaacaggacctgcagaatgcactggaggagtcagagcggaacaaagagaaggtccgggaactcgaggaaaagctagtcgagcgagagaaagggacggtgatcaagcctccggtggaggagtatgaggaaatgaagtcttcctactgctctgtgatcgaaaatatgaacaaggagaaggccttcctcttcgagaagtatcaggaggcacaggaggagattatgaagcttaaggacaccctcaaaagccagatgacacaggaggcctccgacgaagcagaggatatgaaggaggcaatgaatcggatgattgacgaattgaacaagcaagtgtctgagctctcccaattgtacaaagaggcacaggccgagttggaggattacagaaaaaggaagagtctcgaggacgtcacagcagaatacatacataaagctgagcatgaaaaactcatgcagcttaccaatgtgtctcgagcgaaagccgaagatgcactgtctgaaatgaagtcacagtattccaaagtcttgaatgagctgactcagcttaagcagctggtggatgcgcagaaggaaaactcagtgtccatcaccgagcacctgcaggtgatcacaaccctccgcaccgccgcaaaggagatggaagaaaaaatctcaaatttaaaggaacacctcgccagtaaggaggttgaggtagcgaagctcgagaagcagctcctggaggaaaaagcggcaatgactgacgcaatggtgcctcgctcatcttatgaaaagctccaatcctctctggagagtgaagtgtctgtactggcctccaaactgaaggagtctgtgaaggagaaagaaaaagtgcactccgaagtcgtccaaatccgctccgaagtgtctcaggtgaaaagagaaaaggaaaacatacagaccctgctgaaatcaaaagaacaggaggtcaatgaacttttgcaaaagttccagcaagcgcaagaagaactcgctgagatgaagagatacgccgagtcttccagcaagctggaagaggataaagacaagaaaatcaacgaaatgtccaaggaggtcaccaaactcaaggaagcactgaactccctaagccaattgagctattctacctcctcctcaaagaggcagtcacagcaactggaagctctccaacaacaagtcaaacagcttcagaaccagctggccgagtgcaagaagcagcatcaggaagtcatctcggtgtatcgcatgcacctgttatatgcggtgcagggccaaatggacgaggatgtgcagaaggtcctgaagcagatcctgacaatgtgtaaaaatcagtctcagaagaagtag

SEQ ID NO: 58576 - DNA, 3091 bp, Artificial Sequence
  derived and/or modified sequence
gggagaaaaacatagcagaggggttgtacacgataatatttttttaaaaggtcaccccataaacccttctatgatcccagtcttgtattagctgcattccagatactttgagcagagttgtggagtgggagaaattaatggaagggaattagatggaagccaagaccaatgagtggaacaagaatgatgaccggctactgcaggccgtggagaatggagatgcggagaaggtggcctcactgctcggcaagaagggggccagtgccaccaaacacgacagtgagggcaagaccgctttccatcttgctgctgcaaaaggacacgtggaatgcctcagggtcatgattacacatggtgtggatgtgacagcccaagatactaccggacacagcgccttacatctcgcagccaagaacagccaccatgaatgcatcaggaagctgcttcagtctaaatgcccagccgaaagtgtcgacagctctgggaaaacagctttacattatgcagcggctcagggctgccttcaagctgtgcagattctctgcgaacacaagagccccataaacctcaaagatttggatgggaatataccgctgcttcttgctgtacaaaatggtcacagtgagatctgtcactttctcctggatcatggagcagatgtcaattccaggaacaaaagtggaagaactgctctcatgctggcctgtgagattggcagctctaacgctgtggaagccttaattaaaaagggtgcagacctaaaccttgtagattctcttggatacaatgccttacattattccaaactctcagaaaatgcaggaattcaaagccttctattatcaaaaatctctcaggatgctgatttaaagaccccaacaaaaccaaagcagcatgaccaagtctctaaaataagctcagaaagaagtggaactccaaaaaaacgcaaagctccaccacctcctatcagtcctacccagttgagtgatgtctcttccccaagatcaataacttcgactccactatcgggaaaggaatcggtattttttgctgaaccacccttcaaggctgagatcagttctatacgagaaaacaaagacagactaagtgacagtactacaggtgctgatagcttattggatataagttctgaagctgaccaacaagatcttctctctctattgcaagcaaaagttgcttcccttaccttacacaataaggagttacaagataaattacaggccaaatcacccaaggaggcggaagcagacctaagctttgactcataccattccacccaaactgacttgggcccatccctgggaaaacctggtgaaacctctcccccagactccaaatcatctccatctgtcttaatacattctttaggtaaatccactactgacaatgatgtcagaattcagcaactgcaagagattttgcaagatctacagaagagattagagagctctgaagcagagagaaaacagctacaggtcgaactccaatcccgaagggcagaactggtatgcttaaacaacactgagatttcagagaacagctctgacctcagccagaaacttaaagaaactcagagcaaatacgaggaggctatgaaagaagtccttagtgtgcagaagcagatgaaactcggtcttgtctcacctgaaagcatggataattattcacatttccacgagctgagggtcacggaagaggaaataaatgtgctaaagcaggatctgcagaatgcattagaagaaagtgaaagaaataaagagaaagtgagagagttagaggaaaaactggtagagagggagaaaggtacagtgattaagccacctgtggaagagtacgaggaaatgaaaagttcatattgctctgttattgagaatatgaataaggagaaagcatttttgtttgagaaataccaagaagcccaagaagaaatcatgaaattaaaagacacactaaaaagtcagatgacacaggaagccagtgatgaagctgaggacatgaaagaagccatgaataggatgatagatgaactcaataaacaggtgagcgagctgtcacagctgtacaaagaagcccaggctgagctggaggattacaggaagaggaaatctctagaggatgtcacagctgaatatatccataaagcagagcatgagaaactgatgcaattgacaaacgtgtccagggctaaagcagaagatgcactgtctgaaatgaagtctcagtattcaaaagtgttgaatgagttgacccagctcaaacaactggtggatgcacaaaaagagaactctgtctctatcacagaacatttgcaagtgataaccacgctgcggactgcagcaaaagagatggaagaaaaaataagcaatcttaaggaacaccttgcaagcaaggaagtggaagtagcaaagctggagaaacaactcttagaagagaaagctgctatgactgatgcaatggtacctcggtcttcctatgaaaaactccagtcatccttagagagtgaagtgagtgtgttggcatcgaaattaaaggaatctgtgaaagagaaagagaaggtccattcagaggttgtccagattagaagtgaggtctcacaggtgaaaagagaaaaggaaaatattcagactctcttgaaatccaaagagcaagaagtaaatgaacttctgcaaaaattccagcaagctcaggaagaacttgcagaaatgaaaagatacgctgagagctcttcaaaactggaggaagataaagataaaaagataaatgagatgtcgaaggaagtcaccaaattgaaggaggccttgaacagcctctcccagctctcctactcaacaagctcatccaaaaggcagagtcagcagctggaggcgctgcagcagcaagtcaaacagctccagaaccagctggcggaatgcaagaaacaacaccaggaggtcatatcagtttacagaatgcatcttctgtatgctgtgcagggccagatggatgaagatgtccagaaagtactgaagcaaatccttaccatgtgtaaaaaccagtctcaaaagaagtaaagtggattccttggcaggac

SEQ ID NO: 58577 - DNA, 2919 bp, Artificial Sequence
  derived and/or modified sequence
atggaggccaagaccaacgagtggaacaagaacgacgacagactgctgcaggccgtggagaacggcgacgccgagaaggtggccagcctgctgggcaagaagggcgccagcgccaccaagcacgacagcgagggcaagaccgccttccacctggccgccgccaagggccacgtggagtgcctgagagtgatgatcacccacggcgtggacgtgaccgcccaggacaccaccggccacagcgccctgcacctggccgccaagaacagccaccacgagtgcatcagaaagctgctgcagagcaagtgccccgccgagagcgtggacagcagcggcaagaccgccctgcactacgccgccgcccagggctgcctgcaggccgtgcagatcctgtgcgagcacaagagccccatcaacctgaaggacctggacggcaacatccccctgctgctggccgtgcagaacggccacagcgagatctgccacttcctgctggaccacggcgccgacgtgaacagcagaaacaagagcggcagaaccgccctgatgctggcctgcgagatcggcagcagcaacgccgtggaggccctgatcaagaagggcgccgacctgaacctggtggacagcctgggctacaacgccctgcactacagcaagctgagcgagaacgccggcatccagagcctgctgctgagcaagatcagccaggacgccgacctgaagacccccaccaagcccaagcagcacgaccaggtgagcaagatcagcagcgagagaagcggcacccccaagaagagaaaggccccccccccccccatcagccccacccagctgagcgacgtgagcagccccagaagcatcaccagcacccccctgagcggcaaggagagcgtgttcttcgccgagccccccttcaaggccgagatcagcagcatcagagagaacaaggacagactgagcgacagcaccaccggcgccgacagcctgctggacatcagcagcgaggccgaccagcaggacctgctgagcctgctgcaggccaaggtggccagcctgaccctgcacaacaaggagctgcaggacaagctgcaggccaagagccccaaggaggccgaggccgacctgagcttcgacagctaccacagcacccagaccgacctgggccccagcctgggcaagcccggcgagaccagcccccccgacagcaagagcagccccagcgtgctgatccacagcctgggcaagagcaccaccgacaacgacgtgagaatccagcagctgcaggagatcctgcaggacctgcagaagagactggagagcagcgaggccgagagaaagcagctgcaggtggagctgcagagcagaagagccgagctggtgtgcctgaacaacaccgagatcagcgagaacagcagcgacctgagccagaagctgaaggagacccagagcaagtacgaggaggccatgaaggaggtgctgagcgtgcagaagcagatgaagctgggcctggtgagccccgagagcatggacaactacagccacttccacgagctgagagtgaccgaggaggagatcaacgtgctgaagcaggacctgcagaacgccctggaggagagcgagagaaacaaggagaaggtgagagagctggaggagaagctggtggagagagagaagggcaccgtgatcaagccccccgtggaggagtacgaggagatgaagagcagctactgcagcgtgatcgagaacatgaacaaggagaaggccttcctgttcgagaagtaccaggaggcccaggaggagatcatgaagctgaaggacaccctgaagagccagatgacccaggaggccagcgacgaggccgaggacatgaaggaggccatgaacagaatgatcgacgagctgaacaagcaggtgagcgagctgagccagctgtacaaggaggcccaggccgagctggaggactacagaaagagaaagagcctggaggacgtgaccgccgagtacatccacaaggccgagcacgagaagctgatgcagctgaccaacgtgagcagagccaaggccgaggacgccctgagcgagatgaagagccagtacagcaaggtgctgaacgagctgacccagctgaagcagctggtggacgcccagaaggagaacagcgtgagcatcaccgagcacctgcaggtgatcaccaccctgagaaccgccgccaaggagatggaggagaagatcagcaacctgaaggagcacctggccagcaaggaggtggaggtggccaagctggagaagcagctgctggaggagaaggccgccatgaccgacgccatggtgcccagaagcagctacgagaagctgcagagcagcctggagagcgaggtgagcgtgctggccagcaagctgaaggagagcgtgaaggagaaggagaaggtgcacagcgaggtggtgcagatcagaagcgaggtgagccaggtgaagagagagaaggagaacatccagaccctgctgaagagcaaggagcaggaggtgaacgagctgctgcagaagttccagcaggcccaggaggagctggccgagatgaagagatacgccgagagcagcagcaagctggaggaggacaaggacaagaagatcaacgagatgagcaaggaggtgaccaagctgaaggaggccctgaacagcctgagccagctgagctacagcaccagcagcagcaagagacagagccagcagctggaggccctgcagcagcaggtgaagcagctgcagaaccagctggccgagtgcaagaagcagcaccaggaggtgatcagcgtgtacagaatgcacctgctgtacgccgtgcagggccagatggacgaggacgtgcagaaggtgctgaagcagatcctgaccatgtgcaagaaccagagccagaagaagtag

SEQ ID NO: 58578 - DNA, 360 bp, Artificial Sequence
  derived and/or modified sequence
atggtgagaatcagcaagcccaagaccttccaggcctacctggacgactgccacagaagatacagctgcgcccactgcagagcccacctggccaaccacgacgacctgatcagcaagagcttccagggcagccagggcagagcctacctgttcaacagcgtggtgaacgtgggctgcggccccgccgaggagagagtgctgctgaccggcctgcacgccgtggccgacatccactgcgagaactgcaagaccaccctgggctggaagtacgagcaggccttcgagagcagccagaagtacaaggagggcaagtacatcatcgagctgaaccacatgatcaaggacaacggctgggactag

SEQ ID NO: 58579 - DNA, 360 bp, Artificial Sequence
  derived and/or modified sequence
atggtgcgtattagcaaacccaagacttttcaggcatacctggacgattgccacaggagatactcgtgtgcgcattgtagggcccacctggctaatcatgacgacctcatatccaaaagttttcaaggatcccaagggcgcgcctatctgttcaactcagttgtgaacgtgggttgtggacccgccgaagaacgggtcctactgacgggattgcacgctgtcgccgacatccattgcgagaactgtaagacaactctgggttggaaatacgaacaggccttcgagtcgtcacagaagtacaaagaaggcaagtatattattgaacttaaccacatgatcaaagacaacggttgggactag

SEQ ID NO: 58580 - DNA, 360 bp, Artificial Sequence
  derived and/or modified sequence
atggtgcgcatcagcaagcccaagaccttccaggcctacctggatgactgccaccggcgctacagctgtgcccactgccgggcccacctggccaaccatgatgacctgatcagcaagagcttccagggcagccagggccgggcctacctgttcaacagcgtggtgaatgtgggctgcggccctgctgaggagcgggtgctgctgaccggcctgcatgctgtggccgacatccactgtgagaactgcaagaccaccctgggctggaagtatgagcaggcctttgagagcagccagaagtacaaggagggcaagtacatcatcgagctgaaccacatgatcaaggacaatggctgggactag

SEQ ID NO: 58581 - DNA, 360 bp, Artificial Sequence
  derived and/or modified sequence
atggtgcggatcagcaagcccaagaccttccaggcctacctggacgattgtcaccgtcggtactcatgcgctcattgcagagctcatctagcgaaccacgacgacttgatttcaaagagtttccaggggagccagggccgcgcctacctcttcaacagcgtcgtgaacgttggctgcggccccgcagaagagagagtgcttctaacagggctacacgccgtcgcagacattcactgcgagaactgcaagaccacattaggctggaagtatgaacaggcatttgagtcctcacagaaatataaagaggggaaatatatcattgaactcaatcacatgattaaagacaatggttgggactag

SEQ ID NO: 58582 - DNA, 360 bp, Artificial Sequence
  derived and/or modified sequence
atggtgcgcatcagcaaacccaagacatttcaggcctacctcgacgactgtcaccgccgatattcctgcgcccactgccgcgctcatcttgctaatcacgacgatctcattagcaagtccttccagggttctcagggtcgagcatacctcttcaattctgtggtcaacgtgggctgtggccctgctgaggaacgagtgttactgactggactgcacgccgttgcagatatccactgtgagaactgcaagacaacccttggatggaaatatgaacaggccttcgagagctcccagaagtataaggagggtaaatacattatcgaactgaaccatatgatcaaggataatgggtgggactag

SEQ ID NO: 58583 - protein, 983 aa, Artificial Sequence
  derived and/or modified sequence
MQPTYLPWLSAKEKKTNEWNKNDDRLLQAVENGDAEKVASLLGKKGASATKHDSEGKTAFHLAAAKGHVECLRVMITHGVDVTAQDTTGHSALHLAAKNSHHECIRKLLQSKCPAESVDSSGKTALHYAAAQGCLQAVQILCEHKSPINLKDLDGNIPLLLAVQNGHSEICHFLLDHGADVNSRNKSGRTALMLACEIGSSNAVEALIKKGADLNLVDSLGYNALHYSKLSENAGIQSLLLSKISQDADLKTPTKPKQHDQVSKISSERSGTPKKRKAPPPPISPTQLSDVSSPRSITSTPLSGKESVFFAEPPFKAEISSIRENKDRLSDSTTGADSLLDISSEADQQDLLSLLQAKVASLTLHNKELQDKLQAKSPKEAEADLSFDSYHSTQTDLGPSLGKPGETSPPDSKSSPSVLIHSLGKSTTDNDVRIQQLQEILQDLQKRLESSEAERKQLQVELQSRRAELVCLNNTEISENSSDLSQKLKETQSKYEEAMKEVLSVQKQMKLGLVSPESMDNYSHFHELRVTEEEINVLKQDLQNALEESERNKEKVRELEEKLVEREKGTVIKPPVEEYEEMKSSYCSVIENMNKEKAFLFEKYQEAQEEIMKLKDTLKSQMTQEASDEAEDMKEAMNRMIDELNKQVSELSQLYKEAQAELEDYRKRKSLEDVTAEYIHKAEHEKLMQLTNVSRAKAEDALSEMKSQYSKVLNELTQLKQLVDAQKENSVSITEHLQVITTLRTAAKEMEEKISNLKEHLASKEVEVAKLEKQLLEEKAAMTDAMVPRSSYEKLQSSLESEVSVLASKLKESVKEKEKVHSEVVQIRSEVSQVKREKENIQTLLKSKEQEVNELLQKFQQAQEELAEMKRYAESSSKLEEDKDKKINEMSKEVTKLKEALNSLSQLSYSTSSSKRQSQQLEALQQQVKQLQNQLAECKKQHQEVISVYRMHLLYAVQGQMDEDVQKVLKQILTMCKNQSQKK

SEQ ID NO: 58584 - DNA, 2952 bp, Artificial Sequence
  derived and/or modified sequence
atgcagcccacatatctgccttggctttctgctaaagagaagaagacgaatgagtggaacaagaacgatgacagactcctgcaggcggtcgaaaatggggatgcggagaaggtggcctcgctgctgggaaagaagggcgcctcagctacaaagcacgacagcgagggaaagacagcatttcacctggcagccgctaaggggcacgtggagtgtcttcgggttatgattactcacggcgtggatgtcacagcccaggacacgaccggccattcggcgctgcacttggccgccaagaacagccatcacgagtgcatcagaaagctgctacagagcaaatgtcccgccgaatctgtggactctagtggtaagactgcactgcactatgccgcggcccagggatgcctccaggctgttcagatcttgtgcgagcacaaatccccaatcaatcttaaagatttagacgggaacatccccctcctgttggccgtacagaacgggcatagcgagatttgccactttttactggatcacggagctgacgtcaactctcgtaacaaaagcggaaggactgccctcatgctcgcctgtgagattggctcctctaatgctgtggaagcccttatcaaaaagggagccgacctgaacctcgttgactctctcggatataatgccctccattactccaagctaagtgaaaacgccggaattcaatcactcctgctctccaaaatctcgcaggacgcggacctgaagacacctacaaagccaaagcagcacgatcaggtcagcaagattagtagcgaacgtagcggaacccctaaaaaacgcaaagcaccaccaccccctatatcaccaacacagctatctgatgtgtccagcccacgatcgattactagcacaccattgtccggcaaggaatctgttttcttcgccgagccaccttttaaggcagagatctctagcatccgagagaacaaggatcgactcagtgactccactacaggcgccgactccctactggacattagcagtgaagctgatcagcaggatctactatctctgcttcaagctaaagtcgcaagcctgacactccataacaaggaactgcaggacaaactgcaggcgaaaagccctaaagaggcagaagcagatctttctttcgattcctatcattcaacgcaaacagatctcggcccatcactcgggaagccaggcgaaacctctcctccagattcaaagagcagtccctcagtcctcattcattcactgggcaaatccactaccgacaacgacgtgcggattcagcagctgcaggagatcctccaagacctacagaagcggctggaatcttctgaggccgaaagaaagcagctgcaggtagaactccagtcccgccgtgcagaattggtctgccttaacaacaccgagatttcagaaaacagcagtgacctgagtcagaaactcaaggagacgcagtctaagtatgaggaagctatgaaggaagttcttagtgttcaaaaacaaatgaagctggggctggtaagccctgagtcaatggacaattattcacactttcacgagctccgcgtaaccgaagaggagattaacgtgctgaaacaggatctgcaaaacgcgctggaagagtctgagcgaaataaagaaaaggttcgagagttggaagaaaagcttgtagagagagagaaaggaaccgtaatcaaacccccggtggaggagtatgaggaaatgaagtcctcctattgctcagtaatcgagaatatgaacaaagagaaggcttttttgttcgagaaatatcaggaagcccaggaggagatcatgaaactgaaggacaccctgaaatctcagatgactcaggaggcttcggacgaagccgaggacatgaaagaggcaatgaacagaatgatcgacgagctaaacaagcaggtgtctgagttgtcccaattgtacaaagaagcgcaagccgagttggaagattatcgcaaacgtaagtctctggaggatgtcacggctgagtatattcacaaggctgagcatgagaagctgatgcaactcaccaatgttagcagggcaaaagccgaggacgctctcagcgaaatgaagagccagtatagcaaggtcttgaacgagttgactcaactgaagcagcttgttgacgcccaaaaggaaaacagtgttagtatcacagaacacctccaggtgattaccaccctaagaacagccgccaaggagatggaggaaaagatcagcaatctgaaggagcacctggcctcaaaagaggtggaggtcgccaaactggagaaacagctgcttgaggagaaggccgcaatgacagacgcgatggtgccccgcagctcctacgagaaattacagtcttcactagaaagcgaggtgtcggtccttgcatctaagctcaaagagagtgtcaaagagaaggaaaaggttcattcagaagtcgtgcaaatcagatcagaagttagccaggttaaaagggaaaaggagaacatccagactctacttaagtctaaagagcaggaggtgaacgagctcctccaaaagtttcagcaggcccaggaagaattagcagagatgaaacggtacgcagagtcctcttccaaattagaagaagataaagacaagaagattaacgagatgtctaaagaagtgacaaagctgaaagaggctctcaactctctatcccaattgagttacagcactagtagctccaagagacagagccagcagctggaagcgttgcagcaacaggtcaaacagctgcagaatcagctcgcagaatgcaaaaaacagcaccaagaggtgatctccgtatataggatgcacctgctttatgccgtgcaggggcagatggacgaagatgtgcagaaggtccttaagcagatcctgaccatgtgcaagaaccagtcacagaaaaagtag

SEQ ID NO: 58585 - DNA, 2952 bp, Artificial Sequence
  derived and/or modified sequence
atgcagcccacctacctgccctggctgagcgccaaggagaagaagaccaatgagtggaacaagaatgatgaccggctgctgcaggccgtggagaatggagatgctgagaaggtggccagcctgctgggcaagaagggggccagcgccaccaagcatgacagcgagggcaagacagccttccacctggccgccgccaagggccacgtggagtgcctgcgggtgatgatcacccacggcgtggatgtgacagcccaggacaccaccggccacagcgccctgcacctggccgccaagaacagccaccacgagtgcatcaggaagctgctgcagagcaagtgcccagctgagagcgtggacagcagcggcaagacagccctgcactatgctgctgcccagggctgcctgcaggccgtgcagatcctgtgtgagcacaagagccccatcaacctgaaggacctggatggcaacatccccctgctgctggccgtgcagaatggccacagcgagatctgccacttcctgctggaccatggagcagatgtgaacagcaggaacaagagcggccgcacagccctgatgctggcctgtgagatcggcagcagcaatgctgtggaggccctgatcaagaagggagctgacctgaacctggtggacagcctgggctacaatgccctgcactacagcaagctgtctgaaaatgccggcatccagagcctgctgctgagcaagatcagccaggatgctgacctgaagacccccaccaagcccaagcagcacgaccaggtgtccaagatcagcagcgagaggagcggcacccccaagaagaggaaggcccctcctccacccatcagccccacccagctgagtgatgtgagcagccccaggagcatcaccagcacccccctgagcggcaaggagagcgtcttctttgctgagccccccttcaaggccgagatcagcagcatccgggagaacaaggaccggctgagtgacagcaccaccggggctgacagcctgctggacatcagcagcgaggccgaccagcaggacctgctgagcctgctgcaggccaaggtggccagcctgaccctgcacaacaaggagctgcaggacaagctgcaggccaagagccccaaggaggccgaggccgacctgagctttgacagctaccacagcacccagacagacctgggccccagcctgggcaagccaggagagaccagccccccagacagcaagagcagccccagcgtgctgatccacagcctgggcaagagcaccacagacaatgatgtgcgcatccagcagctgcaggagatcctgcaggacctgcagaagaggctggagagcagcgaggccgagaggaagcagctgcaggtggagctgcagagcagaagagctgagctggtgtgcctgaacaacacagagatcagcgagaacagcagtgacctgagccagaagctgaaggagacccagagcaaatatgaggaggccatgaaggaggtgctgtctgtgcagaagcagatgaagctgggcctggtgtccccagagagcatggacaactacagccacttccacgagctgcgggtgacagaggaggagatcaacgtgctgaagcaggacctgcagaatgccctggaggagagcgagaggaacaaggagaaggtgcgggagctggaggagaagctggtggagcgggagaagggcaccgtcatcaagccccctgtggaggagtatgaggagatgaagagcagctactgcagcgtgattgagaacatgaacaaggagaaggccttcctgtttgagaagtaccaggaggcccaggaggagatcatgaagctgaaggacaccctgaagagccagatgacccaggaggccagtgatgaagctgaggacatgaaggaggccatgaacaggatgattgatgagctgaacaagcaggtgtctgagctgagccagctgtacaaggaggcccaggccgagctggaggactacaggaagaggaagagcctggaggatgtgacagctgagtacatccacaaggccgagcacgagaagctgatgcagctgaccaacgtgtcccgggccaaggcagaagatgccctgtctgagatgaagagccagtacagcaaggtgctgaatgagctgacccagctgaagcagctggtggatgcccagaaggagaacagcgtgtccatcacagagcacctgcaggtgatcaccaccctgaggacagctgccaaggagatggaggagaagatcagcaacctgaaggagcacctggccagcaaggaggtggaggtggccaagctggagaagcagctgctggaggagaaggccgccatgacagatgccatggtgcccaggagcagctatgagaagctgcagagcagcctggagagcgaggtgtctgtgctggccagcaagctgaaggagagcgtgaaggagaaggagaaggtgcacagcgaggtggtgcagatccgctctgaggtgtcccaggtgaagcgggagaaggagaacatccagaccctgctgaagagcaaggagcaggaggtgaatgagctgctgcagaagttccagcaggcccaggaggagctggccgagatgaagagatatgcagagagcagcagcaagctggaggaggacaaggacaagaagatcaatgagatgagcaaggaggtgaccaagctgaaggaggccctgaacagcctgagccagctgagctacagcaccagcagcagcaagaggcagagccagcagctggaggccctgcagcagcaggtgaagcagctgcagaaccagctggccgagtgcaagaagcagcaccaggaggtgatctctgtgtacaggatgcacctgctgtatgctgtgcagggccagatggatgaagatgtgcagaaggtgctgaagcagatcctgaccatgtgcaagaaccagagccagaagaagtag

SEQ ID NO: 58586 - DNA, 2952 bp, Artificial Sequence
  derived and/or modified sequence
atgcagcccacctacctgccctggctgagcgccaaggagaagaagactaatgaatggaataaaaatgacgatagattactgcaagccgtggaaaatggcgatgccgagaaggtcgcctcactcctcggcaagaaaggagctagcgccactaagcatgactctgaaggtaaaactgcatttcacttggcggccgctaagggtcatgtggagtgcttacgagtcatgatcacacacggagtggacgtcactgcccaggacaccactggacatagcgccttgcacctggctgccaagaactcccaccatgagtgcattcggaaactgcttcaatccaagtgccctgcagaaagcgtggattcctcgggaaagacagccctgcattacgctgcggcacagggatgcttgcaggccgtgcaaatactgtgcgagcataaatccccaattaatctgaaagatctggacggtaatattcccttgctgcttgcagtccaaaacggtcacagtgagatttgtcattttctgctggaccacggcgccgatgtgaacagccgcaacaaatccggcaggacggctctcatgttggcttgtgagatcgggtcttccaatgcagttgaagcccttatcaaaaaaggagccgatcttaatctggttgattctctcggctataatgcactccattactcgaagttgagcgagaacgctggaattcagtccctcctgctcagcaaaatcagtcaagacgctgatctaaagactcctaccaagccaaagcaacacgaccaggtgagcaaaatttccagtgagcggagtggcactccgaagaaacgcaaggcccctcccccaccaatttcgcctactcagcttagcgatgttagtagtccaagatcaatcacaagcacccctctgtccggcaaggagtctgtgttcttcgctgagccccccttcaaggccgaaattagctctatcagggagaataaagacaggctgtctgattcaaccacgggggccgactcactgctggatatctcatctgaagccgatcagcaggacctgcttagcctgctgcaggctaaggtggcgagtctcacgttgcataacaaagagttgcaagacaagctgcaggctaaatctccaaaagaggccgaggctgaccttagtttcgacagttaccacagtacacagactgacctgggccctagtctggggaagcctggagagacttctccaccagattcaaagagtagtccctccgttctgatccacagtctgggcaaatctactactgataatgatgtgaggatacagcagttgcaggaaatcttacaggatctccagaaaagattggaatccagcgaagcagagaggaaacaattgcaggttgaactacaatctaggagagccgagcttgtgtgtctgaataacacagagatcagtgaaaattcttcggatttgagtcagaaactcaaggagacacaatctaaatacgaggaggctatgaaagaggtgctcagcgtgcaaaagcagatgaagttggggctggtgtcccccgagtccatggacaactactcacactttcatgagctgagagtgacagaagaagagataaatgtgttaaagcaagacttgcagaacgccctggaggagagcgaaagaaataaggagaaggtgcgggaactggaagagaagttagtggaacgagagaagggtaccgtgatcaagccgcccgtagaggagtacgaagaaatgaaaagctcttactgctctgtgatagaaaatatgaacaaggagaaagcttttctgttcgaaaaataccaggaagcccaagaggagatcatgaagttaaaagataccctgaaatctcaaatgacacaggaggcatctgacgaagctgaggacatgaaggaagctatgaacaggatgattgacgaactcaataagcaggtatctgagctgtctcagctatataaggaagcccaggccgaattggaggattatcgaaagagaaagtctttggaagacgtcactgcggagtacatccacaaagctgagcacgagaaactcatgcagctgactaacgtcagtagagcaaaggctgaggacgctctgtcggagatgaaatctcaatactcaaaagtgctgaatgagctcacacagctgaagcaattggttgacgcacaaaaagaaaattctgtatcgatcactgagcatctccaggtgataaccacccttcggacagctgccaaggaaatggaagagaaaattagcaatcttaaggagcacctggcgagcaaagaggtagaagtggccaaattggagaaacagctcctggaggaaaaagcagccatgactgacgcgatggtaccacgctcctcctacgagaagctgcagtccagccttgagagcgaagtttcggtcctcgcctccaagcttaaggaatccgtaaaggaaaaagaaaaggtccactccgaggtggtgcaaattcgcagtgaagtcagtcaggtgaaacgagagaaggaaaatatccaaactttgctaaagtctaaggagcaggaagttaatgagctgctacagaagttccagcaagcccaggaagagttggccgagatgaagcgctacgcagagtcgtccagtaagctggaggaagacaaagataagaagattaatgaaatgagtaaggaggttactaagttgaaggaggctctaaattctctgtcccagttaagctatagtacgagttccagcaagagacagagccagcagcttgaggccctccagcaacaggtcaaacagctgcagaaccagctcgctgaatgtaaaaaacagcaccaggaggttattagcgtgtatagaatgcatctactctatgccgtgcaggggcagatggatgaggatgttcaaaaagttttgaagcagattttgaccatgtgtaagaatcagtcacagaagaaatag

SEQ ID NO: 58587 - DNA, 2952 bp, Artificial Sequence
  derived and/or modified sequence
atgcaaccgacttacttgccctggctttccgccaaggagaaaaagaccaacgaatggaacaaaaatgatgaccgccttttacaggccgtagagaacggagacgcagagaaggtagcctcactcctcgggaaaaaaggtgcttcagccaccaaacacgactcagaaggtaagactgcattccacctggccgcagcgaaaggccacgtggagtgtctgagggtgatgatcacccacggcgtggatgtgaccgcgcaagacaccacggggcacagtgccctccacctagctgccaaaaattctcaccatgaatgtattagaaaactcctgcagtctaagtgtcctgcagagagtgttgacagctctggcaagacagccctccattacgcggcagcgcagggttgcctgcaggccgttcagatcctctgcgagcataaatcccccatcaatctgaaggacctggacggcaacatccctttgctgctggcggtgcagaacggtcactccgagatttgtcacttcctcctcgatcacggggcagacgtgaattcccggaacaagagcgggagaacagccctcatgctagcttgtgaaattgggtcctcgaacgctgtggaagctttaattaagaagggggctgatttgaatctggtcgactcactgggctacaatgccttgcactacagtaagctcagcgagaatgcaggcatacagtcactcctgctatctaaaataagccaggatgcggatctaaaaaccccgactaagccaaaacagcacgaccaggtgagcaagatctcctccgaaagaagcgggacccctaagaaaagaaaagcaccaccccctcctatttcgccaactcaactctcagacgtgtctagtcctagaagtattacctccacacccctctcgggcaaagaaagcgttttcttcgccgagcccccatttaaagcggagatatcatcgattagagaaaacaaagaccgtctttcagatagtaccaccggtgccgactccctcctggacattagctctgaggcagaccagcaggatctgctctcactgcttcaagcaaaggtggctagtctgactttgcacaacaaggaacttcaggataaactccaggctaaaagccccaaggaagccgaggccgatctctcctttgatagttatcactctacccaaacagatctcggtccaagtctagggaagcctggagaaactagccccccagattccaagagttcacccagcgtcctgatacatagcctcggaaagtcaacaactgataatgatgttaggatccagcagctccaagagatattacaggatctccaaaagcgtcttgagagtagtgaggcggaaaggaaacaacttcaggtggaactccaaagccggagggctgaactggtatgtctcaataatacagaaatatctgagaattcctctgacctgtcacagaagttgaaggaaactcagtccaaatacgaggaggccatgaaggaggtgctttcagtgcaaaagcagatgaagctgggactggtatcaccagagagcatggacaactacagtcatttccacgagctccgagtaactgaggaagaaattaatgtgttaaaacaggacttgcagaacgccttagaggaaagtgaacgaaataaggaaaaagttcgggaattagaagaaaagttggtggagcgcgagaagggcaccgttatcaaacctccagtagaggagtacgaagagatgaagagtagctactgttctgttattgaaaatatgaacaaggagaaggctttcctatttgagaagtaccaagaggcacaggaggagatcatgaagctcaaagacacactcaaatcccagatgacccaagaggcctccgatgaggctgaggatatgaaggaggccatgaaccggatgattgacgagttgaacaagcaggtgtctgagctaagccaactgtataaagaggcacaggccgagctggaggattacagaaagcgcaaatctctcgaggatgtgacagcagaatatatccacaaggccgaacacgagaagctgatgcaactaactaacgtgtccagagctaaagctgaagatgccctgtccgagatgaagtcacaatacagtaaagtgctgaacgaattgacacagctgaagcagctcgtcgatgcccagaaggaaaacagtgttagcatcacagagcacctacaagttattacgacactcagaaccgcagctaaggagatggaggagaagattagcaacctgaaggagcacctggcttctaaagaagttgaggtcgctaaacttgagaaacagctcctggaagaaaaggccgctatgaccgatgccatggtgccccgttctagttacgaaaaacttcaatcaagtctcgaatctgaagtgagcgtgctggcgagcaaactgaaggagtctgtgaaggaaaaggaaaaggtacattcagaggtggtgcagatccgttcagaggtttctcaggttaagagggagaaagagaacatacagacactgttgaagagtaaagaacaagaggttaatgagttacttcagaagtttcaacaagcccaggaggagctggctgagatgaaacgctatgcggagtctagcagcaaactcgaagaggacaaggacaaaaagatcaacgaaatgtccaaggaggtcaccaagttaaaggaagccttgaactctctctcccagctgagttatagtaccagctcttccaagcggcaaagccaacagctggaggcgctccagcagcaggtcaaacagctgcaaaaccagctggctgagtgtaaaaagcagcaccaagaggtgattagtgtgtaccgaatgcacctcctttacgccgtgcagggacagatggatgaagacgtgcaaaaggttctcaaacaaatcctgaccatgtgcaagaatcagagccagaagaagtag

SEQ ID NO: 58588 - DNA, 3486 bp, Artificial Sequence
  derived and/or modified sequence
ggagaggctgcagtcacaatgaggcctccagattcatgtcatcaaagtgcttcatgatgactggattttcacaccatttatccaagggccctagtcaatggcagcagcaagaatgaaagtagacacattggaagctagagagtcactgggtgacttttggaggtagcaacaagctcatgaagaaggcattcagtggcttgcactccccacccatcctctcaactacatgcgaagttttcacatcttgtacatttccaaatttaatgaaaaaggtgttgaaaagtctcctctagagctttggaaggctgaatgcactaaacatgaagagcttgaaagcgaagttcaggaagagtgacgtaaattaaataaaactcatagagtgcaaagagacttcgacaaagacagaaaactagctgttggccagagtgaaagtcctggtcatccgacttccgagaaacctccttcaacctcatcgtctgctggctgtatgttatgcagcctacatatctcccgtggctttcagctaaggagaaaaagaccaatgagtggaacaagaatgatgaccggctactgcaggccgtggagaatggagatgcggagaaggtggcctcactgctcggcaagaagggggccagtgccaccaaacacgacagtgagggcaagaccgctttccatcttgctgctgcaaaaggacacgtggaatgcctcagggtcatgattacacatggtgtggatgtgacagcccaagatactaccggacacagcgccttacatctcgcagccaagaacagccaccatgaatgcatcaggaagctgcttcagtctaaatgcccagccgaaagtgtcgacagctctgggaaaacagctttacattatgcagcggctcagggctgccttcaagctgtgcagattctctgcgaacacaagagccccataaacctcaaagatttggatgggaatataccgctgcttcttgctgtacaaaatggtcacagtgagatctgtcactttctcctggatcatggagcagatgtcaattccaggaacaaaagtggaagaactgctctcatgctggcctgtgagattggcagctctaacgctgtggaagccttaattaaaaagggtgcagacctaaaccttgtagattctcttggatacaatgccttacattattccaaactctcagaaaatgcaggaattcaaagccttctattatcaaaaatctctcaggatgctgatttaaagaccccaacaaaaccaaagcagcatgaccaagtctctaaaataagctcagaaagaagtggaactccaaaaaaacgcaaagctccaccacctcctatcagtcctacccagttgagtgatgtctcttccccaagatcaataacttcgactccactatcgggaaaggaatcggtattttttgctgaaccacccttcaaggctgagatcagttctatacgagaaaacaaagacagactaagtgacagtactacaggtgctgatagcttattggatataagttctgaagctgaccaacaagatcttctctctctattgcaagcaaaagttgcttcccttaccttacacaataaggagttacaagataaattacaggccaaatcacccaaggaggcggaagcagacctaagctttgactcataccattccacccaaactgacttgggcccatccctgggaaaacctggtgaaacctctcccccagactccaaatcatctccatctgtcttaatacattctttaggtaaatccactactgacaatgatgtcagaattcagcaactgcaagagattttgcaagatctacagaagagattagagagctctgaagcagagagaaaacagctacaggtcgaactccaatcccgaagggcagaactggtatgcttaaacaacactgagatttcagagaacagctctgacctcagccagaaacttaaagaaactcagagcaaatacgaggaggctatgaaagaagtccttagtgtgcagaagcagatgaaactcggtcttgtctcacctgaaagcatggataattattcacatttccacgagctgagggtcacggaagaggaaataaatgtgctaaagcaggatctgcagaatgcattagaagaaagtgaaagaaataaagagaaagtgagagagttagaggaaaaactggtagagagggagaaaggtacagtgattaagccacctgtggaagagtacgaggaaatgaaaagttcatattgctctgttattgagaatatgaataaggagaaagcatttttgtttgagaaataccaagaagcccaagaagaaatcatgaaattaaaagacacactaaaaagtcagatgacacaggaagccagtgatgaagctgaggacatgaaagaagccatgaataggatgatagatgaactcaataaacaggtgagcgagctgtcacagctgtacaaagaagcccaggctgagctggaggattacaggaagaggaaatctctagaggatgtcacagctgaatatatccataaagcagagcatgagaaactgatgcaattgacaaacgtgtccagggctaaagcagaagatgcactgtctgaaatgaagtctcagtattcaaaagtgttgaatgagttgacccagctcaaacaactggtggatgcacaaaaagagaactctgtctctatcacagaacatttgcaagtgataaccacgctgcggactgcagcaaaagagatggaagaaaaaataagcaatcttaaggaacaccttgcaagcaaggaagtggaagtagcaaagctggagaaacaactcttagaagagaaagctgctatgactgatgcaatggtacctcggtcttcctatgaaaaactccagtcatccttagagagtgaagtgagtgtgttggcatcgaaattaaaggaatctgtgaaagagaaagagaaggtccattcagaggttgtccagattagaagtgaggtctcacaggtgaaaagagaaaaggaaaatattcagactctcttgaaatccaaagagcaagaagtaaatgaacttctgcaaaaattccagcaagctcaggaagaacttgcagaaatgaaaagatacgctgagagctcttcaaaactggaggaagataaagataaaaagataaatgagatgtcgaaggaagtcaccaaattgaaggaggccttgaacagcctctcccagctctcctactcaacaagctcatccaaaaggcagagtcagcagctggaggcgctgcagcagcaagtcaaacagctccagaaccagctggcggaatgcaagaaacaacaccaggaggtcatatcagtttacagaatgcatcttctgtatgctgtgcagggccagatggatgaagatgtccagaaagtactgaagcaaatccttaccatgtgtaaaaaccagtctcaaaagaagtaaagtggattccttggcaggacactgccccttgtcatctgtctt

SEQ ID NO: 58589 - DNA, 2952 bp, Artificial Sequence
  derived and/or modified sequence
atgcagcccacctacctgccctggctgagcgccaaggagaagaagaccaacgagtggaacaagaacgacgacagactgctgcaggccgtggagaacggcgacgccgagaaggtggccagcctgctgggcaagaagggcgccagcgccaccaagcacgacagcgagggcaagaccgccttccacctggccgccgccaagggccacgtggagtgcctgagagtgatgatcacccacggcgtggacgtgaccgcccaggacaccaccggccacagcgccctgcacctggccgccaagaacagccaccacgagtgcatcagaaagctgctgcagagcaagtgccccgccgagagcgtggacagcagcggcaagaccgccctgcactacgccgccgcccagggctgcctgcaggccgtgcagatcctgtgcgagcacaagagccccatcaacctgaaggacctggacggcaacatccccctgctgctggccgtgcagaacggccacagcgagatctgccacttcctgctggaccacggcgccgacgtgaacagcagaaacaagagcggcagaaccgccctgatgctggcctgcgagatcggcagcagcaacgccgtggaggccctgatcaagaagggcgccgacctgaacctggtggacagcctgggctacaacgccctgcactacagcaagctgagcgagaacgccggcatccagagcctgctgctgagcaagatcagccaggacgccgacctgaagacccccaccaagcccaagcagcacgaccaggtgagcaagatcagcagcgagagaagcggcacccccaagaagagaaaggccccccccccccccatcagccccacccagctgagcgacgtgagcagccccagaagcatcaccagcacccccctgagcggcaaggagagcgtgttcttcgccgagccccccttcaaggccgagatcagcagcatcagagagaacaaggacagactgagcgacagcaccaccggcgccgacagcctgctggacatcagcagcgaggccgaccagcaggacctgctgagcctgctgcaggccaaggtggccagcctgaccctgcacaacaaggagctgcaggacaagctgcaggccaagagccccaaggaggccgaggccgacctgagcttcgacagctaccacagcacccagaccgacctgggccccagcctgggcaagcccggcgagaccagcccccccgacagcaagagcagccccagcgtgctgatccacagcctgggcaagagcaccaccgacaacgacgtgagaatccagcagctgcaggagatcctgcaggacctgcagaagagactggagagcagcgaggccgagagaaagcagctgcaggtggagctgcagagcagaagagccgagctggtgtgcctgaacaacaccgagatcagcgagaacagcagcgacctgagccagaagctgaaggagacccagagcaagtacgaggaggccatgaaggaggtgctgagcgtgcagaagcagatgaagctgggcctggtgagccccgagagcatggacaactacagccacttccacgagctgagagtgaccgaggaggagatcaacgtgctgaagcaggacctgcagaacgccctggaggagagcgagagaaacaaggagaaggtgagagagctggaggagaagctggtggagagagagaagggcaccgtgatcaagccccccgtggaggagtacgaggagatgaagagcagctactgcagcgtgatcgagaacatgaacaaggagaaggccttcctgttcgagaagtaccaggaggcccaggaggagatcatgaagctgaaggacaccctgaagagccagatgacccaggaggccagcgacgaggccgaggacatgaaggaggccatgaacagaatgatcgacgagctgaacaagcaggtgagcgagctgagccagctgtacaaggaggcccaggccgagctggaggactacagaaagagaaagagcctggaggacgtgaccgccgagtacatccacaaggccgagcacgagaagctgatgcagctgaccaacgtgagcagagccaaggccgaggacgccctgagcgagatgaagagccagtacagcaaggtgctgaacgagctgacccagctgaagcagctggtggacgcccagaaggagaacagcgtgagcatcaccgagcacctgcaggtgatcaccaccctgagaaccgccgccaaggagatggaggagaagatcagcaacctgaaggagcacctggccagcaaggaggtggaggtggccaagctggagaagcagctgctggaggagaaggccgccatgaccgacgccatggtgcccagaagcagctacgagaagctgcagagcagcctggagagcgaggtgagcgtgctggccagcaagctgaaggagagcgtgaaggagaaggagaaggtgcacagcgaggtggtgcagatcagaagcgaggtgagccaggtgaagagagagaaggagaacatccagaccctgctgaagagcaaggagcaggaggtgaacgagctgctgcagaagttccagcaggcccaggaggagctggccgagatgaagagatacgccgagagcagcagcaagctggaggaggacaaggacaagaagatcaacgagatgagcaaggaggtgaccaagctgaaggaggccctgaacagcctgagccagctgagctacagcaccagcagcagcaagagacagagccagcagctggaggccctgcagcagcaggtgaagcagctgcagaaccagctggccgagtgcaagaagcagcaccaggaggtgatcagcgtgtacagaatgcacctgctgtacgccgtgcagggccagatggacgaggacgtgcagaaggtgctgaagcagatcctgaccatgtgcaagaaccagagccagaagaagtag

SEQ ID NO: 58590 - protein, 825 aa, Artificial Sequence
  derived and/or modified sequence
MAADEGSAEKQAGEAHMAADGETNGSCENSDASSHANAAKHTQDSARVNPQDGTNTLTRIAENGVSERDSEAAKQNHVTADDFVQTSVIGSNGYILNKPALQAQPLRTTSTLASSLPGHAAKTLPGGAGKGRTPSAFPQTPAAPPATLGEGSADTEDRKLPAPGADVKVHRARKTMPKSVVGLHAASKDPREVREARDHKEPKEEINKNISDFGRQQLLPPFPSLHQSLPQNQCYMATTKSQTACLPFVLAAAVSRKKKRRMGTYSLVPKKKTKVLKQRTVIEMFKSITHSTVGSKGEKDLGASSLHVNGESLEMDSDEDDSEELEEDDGHGAEQAAAFPTEDSRTSKESMSEADRAQKMDGESEEEQESVDTGEEEEGGDESDLSSESSIKKKFLKRKGKTDSPWIKPARKRRRRSRKKPSGALGSESYKSSAGSAEQTAPGDSTGYMEVSLDSLDLRVKGILSSQAEGLANGPDVLETDGLQEVPLCSCRMETPKSREITTLANNQCMATESVDHELGRCTNSVVKYELMRPSNKAPLLVLCEDHRGRMVKHQCCPGCGYFCTAGNFMECQPESSISHRFHKDCASRVNNASYCPHCGEESSKAKEVTIAKADTTSTVTPVPGQEKGSALEGRADTTTGSAAGPPLSEDDKLQGAASHVPEGFDPTGPAGLGRPTPGLSQGPGKETLESALIALDSEKPKKLRFHPKQLYFSARQGELQKVLLMLVDGIDPNFKMEHQNKRSPLHAAAEAGHVDICHMLVQAGANIDTCSEDQRTPLMEAAENNHLEAVKYLIKAGALVDPKIQKTSKVYTESQETQRSQTIL

SEQ ID NO: 58591 - protein, 808 aa, Artificial Sequence
  derived and/or modified sequence
MAAADAEAVPARGEPQQDCCVKTELLGEETPMAADEGSAEKQAGEAHMAADGETNGSCENSDASSHANAAKHTQDSARVNPQDGTNTLTRIAENGVSERDSEAAKQNHVTADDFVQTSVIGSNGYILNKPALQAQPLRTTSTLASSLPGHAAKTLPGGAGKGRTPSAFPQTPAAPPATLGEGSADTEDRKLPAPGADVKVHRARKTMPKSVVGLHAASKDPREVREARDHKEPKEEINKNISDFGRQQLLPPFPSLHQSLPQNQCYMATTKSQTACLPFVLAAAVSRKKKRRMGTYSLVPKKKTKVLKQRTVIEMFKSITHSTVGSKGEKDLGASSLHVNGESLEMDSDEDDSEELEEDDGHGAEQAAAFPTEDSRTSKESMSEADRAQKMDGESEEEQESVDTGEEEEGGDESDLSSESSIKKKFLKRKGKTDSPWIKPARKRRRRSRKKPSGALGSESYKSSAGSAEQTAPGDSTGYMEVSLDSLDLRVKGILSSQAEGLANGPDVLETDGLQEVPLCSCRMETPKSREITTLANNQCMATESVDHELGRCTNSVVKYELMRPSNKAPLLVLCEDHRGRMVKHQCCPGCGYFCTAGNFMECQPESSISHRFHKDCASRVNNASYCPHCGEESSKAKEVTIAKADTTSTVTPVPGQEKGSALEGRADTTTGSAAGPPLSEDDKLQGAASHVPEGFDPTGPAGLGRPTPGLSQGPGKETLESALIALDSEKPKKLRFHPKQLYFSARQGELQKVLLMLVDGIDPNFKMEHQNKRSPLHAAAEAGHVDICHMLVQFCRLGSPRSRGCLW

SEQ ID NO: 58592 - DNA, 2427 bp, Artificial Sequence
  derived and/or modified sequence
atggctgctgccgatgctgaggccgttcccgccaggggggagccccagcaggactgttgtgtcaaaactgagctgctgggcgaggagaccccaatggccgccgacgagggcagcgcagagaaacaagccggggaggcccacatggccgccgatggagagacaaacggctcttgtgaaaattctgatgcctcttcgcatgccaatgctgccaaacatacacaggattcagcccgtgtgaacccccaagatggcaccaatacccttacgaggatcgccgaaaacggggttagcgagcgcgattcggaggccgcgaaacagaatcatgtgactgccgatgatttcgtgcagaccagtgtgattggctccaatggctacatcctgaataaacccgctctacaggcccagcctttgaggacgacttccacacttgcgtctagtctcccaggccacgccgccaaaactctaccagggggagctggcaaagggagaacccctagcgcttttccacagactcccgctgcaccgcctgccacgctaggagaggggagcgctgacacggaagacagaaagctccccgctcccggggccgatgtcaaagtgcaccgcgcaagaaaaacgatgcccaagtcggtcgtgggccttcatgccgcctcaaaagatccacgagaagtgagagaagcaagagatcataaggagcccaaggaagagatcaataaaaatatctcagacttcggtcggcaacaattactcccaccattcccatcgctccaccagtcactccctcagaaccaatgttacatggccactacgaaatcccagacagcctgcctacctttcgtgctggctgccgcggtgtcacgaaagaaaaaaagaaggatgggcacctactcccttgtgcctaagaaaaagaccaaagtgctgaaacaacgaacagtgatcgagatgttcaaatccatcactcacagtacagtgggcagcaagggggaaaaagatctaggggcatccagcctgcatgtgaatggtgaatcactggagatggacagcgatgaagacgattccgaggagctggaagaagatgatggacacggcgctgagcaggctgccgcctttccgactgaggacagccgtacttctaaagaatccatgagtgaggctgaccgcgcacaaaagatggacggagagtctgaggaggaacaagagtctgtcgatacaggagaggaggaagagggaggcgacgaatccgacctatcttccgagtccagcattaaaaagaagtttctgaagaggaagggtaaaacagattccccgtggattaagccagcaagaaagcggcggcgtcgcagtcgaaaaaaacccagcggagcattgggctctgaaagctacaagagttccgccgggtctgctgagcaaacagcacccggcgacagcactggatatatggaggtcagcttggattctctggacttgcgcgtcaaggggatcctcagcagccaggctgaagggttggccaatggtcctgatgtgctcgagacagacggcctgcaagaggtgcctctgtgcagctgccgcatggagacgcccaaaagtcgcgagatcacgacactggctaacaaccagtgtatggccacagagtcagtggatcatgaactcggcagatgcactaacagcgtggtgaaatacgaactcatgagaccatctaataaagcccccttgttagtgttgtgtgaggatcaccggggcaggatggtgaaacaccagtgctgcccaggatgcggatacttttgtacggccgggaattttatggagtgtcaaccagagtccagtatcagccatcgatttcataaggattgcgcatctagagttaacaacgctagctattgtccccactgcggcgaagagtcttctaaggccaaggaggttactatagccaaggccgatactacaagcacggttacccccgtccccggccaagaaaagggatctgctctggagggtagggctgacactaccacaggctccgctgcggggccgccgctttccgaagatgacaagcttcagggggcagcttctcatgtgccggagggatttgatccaactggcccggccgggctcggacggccgacccctgggctgtcccagggtccggggaaagagaccctcgagtccgccctgattgccctagattcagagaagcctaagaagttaaggttccacccaaagcaactttacttttccgcccgtcagggggagttacagaaagtgctgttgatgctcgtggacggtatcgatccaaacttcaagatggaacaccagaacaagagatctcccctccatgcagctgccgaggccggccatgtcgacatctgtcacatgctagtgcagttttgcagacttggatctcctaggtctagagggtgtctttggtag

SEQ ID NO: 58593 - DNA, 2427 bp, Artificial Sequence
  derived and/or modified sequence
atggctgctgctgatgctgaggccgtgcctgcccggggggagccccagcaggactgctgcgtgaagacagagctgctgggggaggagacccccatggccgcagatgagggcagcgctgagaagcaggccggggaggcccacatggccgcagatggagagaccaacggcagctgtgaaaattctgatgccagcagccacgccaatgctgccaagcacacccaggacagcgcccgggtgaacccccaggacggcaccaacaccctgaccagaattgctgaaaatggagtgtctgagcgggacagcgaggccgccaagcagaaccacgtgacagcagatgactttgtgcagaccagcgtcatcggcagcaatggctacatcctgaacaagccagccctgcaggcccagcccctgcggaccaccagcaccctggccagcagcctgcccggccatgctgccaagaccctgcccggcggggccgggaaaggaagaacacccagcgccttcccccagaccccagctgcccccccagccaccctgggggagggcagcgctgacacagaggacaggaagctgcctgcccctggagcagatgtgaaggtgcaccgggccaggaagaccatgcccaagtctgtggtgggcctgcacgccgccagcaaggacccccgggaggtgcgggaggcccgggaccacaaggagcccaaggaggagatcaacaagaacatcagtgactttggccggcagcagctgctgccccccttccccagcctgcaccagagcctgccccagaaccagtgctacatggccaccaccaagagccagacagcctgcctgccctttgtgctggccgctgctgtgtccaggaagaagaagaggaggatgggcacctacagcctggtgcccaagaagaagaccaaggtgctgaagcagaggacagtgattgagatgttcaagagcatcacccacagcacagtgggcagcaaaggagagaaggacctgggcgccagcagcctgcacgtgaatggagagagcctggagatggacagtgatgaagatgattctgaggagctggaggaggatgatggccacggggctgagcaggccgccgccttccccacagaggacagcaggaccagcaaggagagcatgtctgaggccgaccgggcccagaagatggatggagagagcgaggaggagcaggagagcgtggacaccggggaggaggaggagggcggagatgaaagtgacctgagcagcgagagcagcatcaagaagaagttcctgaagaggaagggcaagacagacagcccctggatcaagccagccaggaagagaagaagaagaagcaggaagaagcccagcggggccctgggcagcgagagctacaagagcagcgctggcagcgctgagcagacagcccctggggacagcacaggctacatggaggtgtccctggacagcctggacctgcgggtgaagggcatcctgagcagccaggccgagggcctggccaacggcccagatgtgctggagacagatggcctgcaggaggtgcccctgtgcagctgcaggatggagacccccaagagccgggagatcaccaccctggccaacaaccagtgcatggccacagaatctgtggaccacgagctgggccgctgcaccaacagcgtggtgaagtatgagctgatgaggcccagcaacaaggcccccctgctggtgctgtgtgaggaccaccggggccgcatggtgaagcaccagtgctgccccggctgcggctacttctgcacagctggcaacttcatggagtgccagcctgagagcagcatcagccaccgcttccacaaggactgtgccagccgggtgaacaatgccagctactgcccccactgtggggaggagagcagcaaggccaaggaggtgaccatcgccaaggctgacaccaccagcacagtgacccctgtgcccggccaggagaagggcagcgccctggagggccgggctgacaccaccactggatctgctgctggcccccccctgtctgaagatgacaagctgcagggcgccgccagccacgtgcctgagggctttgaccccactggacctgctggcctgggccggcccaccccaggcctgagccagggccctgggaaggagaccctggagagcgccctgattgccctggacagcgagaagcccaagaagctgcgcttccaccccaagcagctgtacttcagcgcccggcagggcgagctgcagaaggtgctgctgatgctggtggatggcatcgaccccaacttcaagatggagcaccagaacaagaggagccccctgcatgctgctgctgaggccggccacgtggacatctgccacatgctggtgcagttctgccgcctgggcagccccaggagccggggctgcctgtggtag

SEQ ID NO: 58594 - DNA, 2427 bp, Artificial Sequence
  derived and/or modified sequence
atggccgccgccgacgccgaggccgtgcccgcccggggcgagccccaacaggattgctgcgtcaagactgaacttctgggtgaagagactcccatggctgctgatgaagggtccgccgaaaagcaggcaggcgaggctcatatggccgcagatggcgagaccaatggttcctgtgaaaactctgacgccagctctcacgccaatgctgccaaacatactcaggacagtgctagggtgaaccctcaggatggcactaacaccctaacacgtatcgctgaaaatggcgtgtccgagagggactcagaagcagcgaagcagaaccacgttacagcagatgactttgtgcagacttccgtaattggtagcaatgggtacatcctgaacaagcccgcactgcaggcgcagccactgcgcaccaccagtacactcgctagttctctgcctggtcacgcagcaaaaactctgccagggggtgctgggaagggtcgcaccccttcagcgttcccccagacccctgctgcaccaccagccacactgggcgaaggaagcgccgatacggaggatcgcaaactcccggcaccaggggccgatgtaaaggtgcatcgggccaggaagaccatgcctaaaagcgtggtgggcctccacgccgccagcaaagacccacgtgaagtccgggaagcacgggatcacaaagaaccaaaggaggaaatcaacaaaaatatctccgatttcggtcgccagcagcttctgcccccattcccctcactccaccagagtttaccacagaaccaatgctatatggcgacgacaaagtcgcaaactgcctgccttcctttcgtgctggcagcggccgtgtcgcgcaagaaaaagcgccggatggggacatattctttggtacccaaaaagaagacgaaggtgctaaagcagaggactgtaattgagatgttcaaatccataacccactctactgtgggctctaagggtgagaaagacttaggggcttcttccctgcatgtgaacggcgagtcactggagatggatagcgacgaagacgactccgaggaactcgaagaggacgatgggcacggagctgagcaggccgctgcctttcccacggaggacagcaggacgagtaaagaatcaatgtcggaagccgatcgtgctcaaaaaatggatggcgagagcgaggaggagcaggaatcagtcgatactggcgaggaggaagaaggtggagacgaatccgatctgtccagcgagagctccattaaaaagaagttccttaaacgaaaaggcaagactgatagcccttggataaagccagctcgaaagcgcaggaggcgaagccggaagaaaccttctggcgcactgggcagtgagtcctacaagagcagcgcgggcagcgcagaacagaccgcaccgggggatagcaccggctacatggaggtgagccttgatagtctggacctccgagttaagggtatcctaagttcacaagccgagggtctggccaacggaccagatgtactggaaactgatgggttacaggaggtcccgttatgtagttgtagaatggaaactccaaagagtcgggaaattactaccttggctaataatcaatgtatggcaaccgaaagcgtggaccacgaactaggccgatgtaccaactctgtagtcaaatacgaactgatgagaccctctaataaggcccctctccttgttctctgcgaggatcatcgcggcaggatggtgaagcatcagtgctgtcccggctgcgggtacttctgcactgctggaaattttatggaatgccagccagagtcctctatttctcaccgcttccataaggattgcgccagtagagttaataacgcctcttactgcccgcactgtggggaggagagttcgaaagctaaagaggtcactatcgccaaagctgacacgacttcaacggtgacgccagtgcctggtcaagaaaagggttcggcccttgagggtcgcgcagataccaccacggggagcgccgcgggaccccctctcagtgaggatgataaattacaaggagcagcttcgcatgttcctgaagggtttgaccctactggcccggccggactgggaaggcccacccctggattgagccagggcccaggcaaagaaactctggagtctgccctgatcgcactcgatagcgaaaaaccaaagaagctgagattccatccaaagcagctgtacttcagcgctcgacaaggcgaactgcagaaagttctgcttatgcttgtagatggtatcgatccaaatttcaagatggagcatcagaataagaggagcccactgcacgccgccgccgaagctgggcacgtggacatctgccatatgctcgtgcagttctgccgactggggagtccgcgttctcgtggatgcttatggtag

SEQ ID NO: 58595 - DNA, 2427 bp, Artificial Sequence
  derived and/or modified sequence
atggccgcagccgatgccgaggctgtgcctgctagaggtgaaccacaacaggattgttgcgtcaaaacggagcttctcggggaagagactccaatggcggcagatgagggttcagccgaaaaacaagcgggagaggcacacatggcagcagatggcgaaaccaacggatcctgtgaaaattcagacgcatcatcccacgccaacgctgccaagcatactcaggattctgccagggttaaccctcaggacggtacaaacactctcacacgcattgctgagaacggggttagcgaacgtgattctgaggccgcaaaacaaaatcatgttacggctgatgactttgttcagacttccgtgataggaagtaacgggtacattttgaataagccagcactccaggcccagccactcagaacaactagtaccctggcatcctcactgcccggacatgcagccaagaccctgcctggaggggctgggaaagggagaaccccatctgctttcccccagacgcctgccgcaccacccgcaactctgggcgagggctcagccgatacagaggacaggaagttgccagctccaggagcggacgttaaggtccaccgtgccaggaagactatgcccaagagtgtggttggcctccatgccgcaagcaaggatccacgggaagttcgtgaggccagagaccataaggagcccaaggaggagataaataaaaacatctccgactttggacgacaacagctgttgcccccatttccatctcttcaccagtcactgccgcagaaccagtgttatatggccaccaccaagagccagactgcctgtctgccctttgtgctcgccgcagctgtgtctcgtaaaaaaaaacgccgtatgggaacatacagcctcgtccctaaaaagaaaactaaagtcctcaagcagaggactgttatagaaatgttcaagagcattacacattcaactgttggctccaagggtgaaaaagacctcggggcatccagcctccacgtgaacggcgagtcacttgagatggacagcgacgaagacgatagcgaggagctggaagaggacgacgggcacggtgcagagcaggcagcggctttccctaccgaggactcgcgtactagtaaagagtctatgtctgaagccgatcgcgcacaaaaaatggacggagagagcgaggaagagcaggagagcgttgataccggcgaggaagaggagggaggagatgaatcagacttgagctcagaatcttccattaaaaaaaagttcttaaaacgaaaaggcaagacggacagtccttggattaaacccgctaggaagcgccgacgccgttcgcgcaagaagccttcaggcgctctgggatccgagtcctacaagagttcagccggaagcgccgagcagacagcacctggagacagtacaggctatatggaagtgtcccttgacagcctagaccttcgggtgaagggaattctgagcagtcaagccgaagggttagctaacggcccagatgtgctggaaaccgacggccttcaggaagttcccctctgttcttgccgcatggaaacccccaaaagtagggaaatcacaaccttggccaacaaccagtgcatggcgacagaatccgtcgaccacgaacttggcagatgtacgaatagcgtggtgaaatacgagctgatgcgtccctccaataaggctccattgcttgtactgtgcgaggatcatcgcggtcggatggtgaagcatcagtgttgtccaggttgcggttatttctgcaccgcaggcaattttatggagtgtcagcccgaatcaagtatatcacaccgattccataaagattgcgcttcacgcgtgaataatgccagctactgccctcattgcggggaggaaagtagcaaagccaaggaggtgactattgccaaggccgacactacatccacagtaacccctgtccctggtcaggagaaaggttctgctctggagggacgtgccgatacaacaaccggctccgcggcaggcccaccactgtccgaggatgataagctccagggagctgcctcccacgttcccgaaggtttcgatccaactggaccagccggtctgggcagaccaacccctggattgtcccagggcccagggaaggaaaccctggaaagtgcgctaatcgcccttgacagcgagaagcctaagaaattgaggttccatccaaagcagctgtacttctctgctcgccaaggcgagctccagaaagtcctccttatgctggtggacgggattgatcctaatttcaaaatggagcaccaaaataaacggtctccactccacgcggctgctgaggccggtcacgttgatatttgtcatatgttggtgcagttctgccgcttaggaagccccaggtcaagggggtgcttgtggtag

SEQ ID NO: 58596 - DNA, 2427 bp, Artificial Sequence
  derived and/or modified sequence
atggccgccgccgacgccgaggccgtgcccgccagaggcgagccccagcaggactgctgcgtgaagaccgagctgctgggcgaggagacccccatggccgccgacgagggcagcgccgagaagcaggccggcgaggcccacatggccgccgacggcgagaccaacggcagctgcgagaacagcgacgccagcagccacgccaacgccgccaagcacacccaggacagcgccagagtgaacccccaggacggcaccaacaccctgaccagaatcgccgagaacggcgtgagcgagagagacagcgaggccgccaagcagaaccacgtgaccgccgacgacttcgtgcagaccagcgtgatcggcagcaacggctacatcctgaacaagcccgccctgcaggcccagcccctgagaaccaccagcaccctggccagcagcctgcccggccacgccgccaagaccctgcccggcggcgccggcaagggcagaacccccagcgccttcccccagacccccgccgccccccccgccaccctgggcgagggcagcgccgacaccgaggacagaaagctgcccgcccccggcgccgacgtgaaggtgcacagagccagaaagaccatgcccaagagcgtggtgggcctgcacgccgccagcaaggaccccagagaggtgagagaggccagagaccacaaggagcccaaggaggagatcaacaagaacatcagcgacttcggcagacagcagctgctgccccccttccccagcctgcaccagagcctgccccagaaccagtgctacatggccaccaccaagagccagaccgcctgcctgcccttcgtgctggccgccgccgtgagcagaaagaagaagagaagaatgggcacctacagcctggtgcccaagaagaagaccaaggtgctgaagcagagaaccgtgatcgagatgttcaagagcatcacccacagcaccgtgggcagcaagggcgagaaggacctgggcgccagcagcctgcacgtgaacggcgagagcctggagatggacagcgacgaggacgacagcgaggagctggaggaggacgacggccacggcgccgagcaggccgccgccttccccaccgaggacagcagaaccagcaaggagagcatgagcgaggccgacagagcccagaagatggacggcgagagcgaggaggagcaggagagcgtggacaccggcgaggaggaggagggcggcgacgagagcgacctgagcagcgagagcagcatcaagaagaagttcctgaagagaaagggcaagaccgacagcccctggatcaagcccgccagaaagagaagaagaagaagcagaaagaagcccagcggcgccctgggcagcgagagctacaagagcagcgccggcagcgccgagcagaccgcccccggcgacagcaccggctacatggaggtgagcctggacagcctggacctgagagtgaagggcatcctgagcagccaggccgagggcctggccaacggccccgacgtgctggagaccgacggcctgcaggaggtgcccctgtgcagctgcagaatggagacccccaagagcagagagatcaccaccctggccaacaaccagtgcatggccaccgagagcgtggaccacgagctgggcagatgcaccaacagcgtggtgaagtacgagctgatgagacccagcaacaaggcccccctgctggtgctgtgcgaggaccacagaggcagaatggtgaagcaccagtgctgccccggctgcggctacttctgcaccgccggcaacttcatggagtgccagcccgagagcagcatcagccacagattccacaaggactgcgccagcagagtgaacaacgccagctactgcccccactgcggcgaggagagcagcaaggccaaggaggtgaccatcgccaaggccgacaccaccagcaccgtgacccccgtgcccggccaggagaagggcagcgccctggagggcagagccgacaccaccaccggcagcgccgccggcccccccctgagcgaggacgacaagctgcagggcgccgccagccacgtgcccgagggcttcgaccccaccggccccgccggcctgggcagacccacccccggcctgagccagggccccggcaaggagaccctggagagcgccctgatcgccctggacagcgagaagcccaagaagctgagattccaccccaagcagctgtacttcagcgccagacagggcgagctgcagaaggtgctgctgatgctggtggacggcatcgaccccaacttcaagatggagcaccagaacaagagaagccccctgcacgccgccgccgaggccggccacgtggacatctgccacatgctggtgcagttctgcagactgggcagccccagaagcagaggctgcctgtggtag

SEQ ID NO: 58597 - protein, 496 aa, Artificial Sequence
  derived and/or modified sequence
MWQIVFFTLSCDLVLAAAYNNFRKSMDSIGKKQYQVQHGSCSYTFLLPEMDNCRSSSSPYVSNAVQRDAPLEYDDSVQRLQVLENIMENNTQWLMKLENYIQDNMKKEMVEIQQNAVQNQTAVMIEIGTNLLNQTAEQTRKLTDVEAQVLNQTTRLELQLLEHSLSTNKLEKQILDQTSEINKLQDKNSFLEKKVLAMEDKHIIQLQSIKEEKDQLQVLVSKQNSIIEELEKKIVTATVNNSVLQKQQHDLMETVNNLLTMMSTSNSAKDPTVAKEEQISFRDCAEVFKSGHTTNGIYTLTFPNSTEEIKAYCDMEAGGGGWTIIQRREDGSVDFQRTWKEYKVGFGNPSGEYWLGNEFVSQLTNQQRYVLKIHLKDWEGNEAYSLYEHFYLSSEELNYRIHLKGLTGTAGKISSISQPGNDFSTKDGDNDKCICKCSQMLTGGWWFDACGPSNLNGMYYPQRQNTNKFNGIKWYYWKGSGYSLKATTMMIRPADF

SEQ ID NO: 58598 - protein, 566 aa, Artificial Sequence
  derived and/or modified sequence
MRRVGGRADEDATAAGSLWVLAPPEPTGHLVIPGTSPLEPPCPWLDSHIFQCRFGKMLPLEKAFASPRSSPAPPDLPTPGSAAGVQQEEPETIPERTPADLEFSRLRFREFVYQEAAGPHQTLARLHELCRQWLMPEARSKEQMLELLVLEQFLGILPDKVRPWVVAQYPESCKKAASLVEGLADVLEEPGMLLGSPAGSSSILSDGVYERHMDPLLLPGELASPSQALGAGEIPAPSETPWLSPDPLFLEQRRVREAKTEEDGPANTEQKLKSFPEDPQHLGEWGHLDPAEENLKSYRKLLLWGYQLSQPDAASRLDTEELRLVERDPQGSSLPEGGRRQESAGCACEEAAPAGVLPELPTEAPPGDALADPPSGTTEEEEEQPGKAPDPQDPQDAESDSATGSQRQSVIQQPAPDRGTAKLGTKRPHPEDGDGQSLEGVSSSGDSAGLEAGQGPGADEPGLSRGKPYACGECGEAFAWLSHLMEHHSSHGGRKRYACQGCWKTFHFSLALAEHQKTHEKEKSYALGGARGPQPSTREAQAGARAGGPPESVEGEAPPAPPEAQR

SEQ ID NO: 58599 - DNA, 1701 bp, Artificial Sequence
  derived and/or modified sequence
atgagaagagtgggcggcagagccgacgaggacgccaccgccgccggcagcctgtgggtgctggccccccccgagcccaccggccacctggtgatccccggcaccagccccctggagcccccctgcccctggctggacagccacatcttccagtgcagattcggcaagatgctgcccctggagaaggccttcgccagccccagaagcagccccgccccccccgacctgcccacccccggcagcgccgccggcgtgcagcaggaggagcccgagaccatccccgagagaacccccgccgacctggagttcagcagactgagattcagagagttcgtgtaccaggaggccgccggcccccaccagaccctggccagactgcacgagctgtgcagacagtggctgatgcccgaggccagaagcaaggagcagatgctggagctgctggtgctggagcagttcctgggcatcctgcccgacaaggtgagaccctgggtggtggcccagtaccccgagagctgcaagaaggccgccagcctggtggagggcctggccgacgtgctggaggagcccggcatgctgctgggcagccccgccggcagcagcagcatcctgagcgacggcgtgtacgagagacacatggaccccctgctgctgcccggcgagctggccagccccagccaggccctgggcgccggcgagatccccgcccccagcgagaccccctggctgagccccgaccccctgttcctggagcagagaagagtgagagaggccaagaccgaggaggacggccccgccaacaccgagcagaagctgaagagcttccccgaggacccccagcacctgggcgagtggggccacctggaccccgccgaggagaacctgaagagctacagaaagctgctgctgtggggctaccagctgagccagcccgacgccgccagcagactggacaccgaggagctgagactggtggagagagacccccagggcagcagcctgcccgagggcggcagaagacaggagagcgccggctgcgcctgcgaggaggccgcccccgccggcgtgctgcccgagctgcccaccgaggccccccccggcgacgccctggccgacccccccagcggcaccaccgaggaggaggaggagcagcccggcaaggcccccgacccccaggacccccaggacgccgagagcgacagcgccaccggcagccagagacagagcgtgatccagcagcccgcccccgacagaggcaccgccaagctgggcaccaagagaccccaccccgaggacggcgacggccagagcctggagggcgtgagcagcagcggcgacagcgccggcctggaggccggccagggccccggcgccgacgagcccggcctgagcagaggcaagccctacgcctgcggcgagtgcggcgaggccttcgcctggctgagccacctgatggagcaccacagcagccacggcggcagaaagagatacgcctgccagggctgctggaagaccttccacttcagcctggccctggccgagcaccagaagacccacgagaaggagaagagctacgccctgggcggcgccagaggcccccagcccagcaccagagaggcccaggccggcgccagagccggcggcccccccgagagcgtggagggcgaggccccccccgccccccccgaggcccagagatag

SEQ ID NO: 58600 - DNA, 1701 bp, Artificial Sequence
  derived and/or modified sequence
atgagacgagtgggaggtagggccgacgaggacgccaccgcggcagggtcactttgggtgttggctccgcctgaaccaaccggccacttagtgattcccggaacctccccactggagcctccatgcccatggctcgactcacacatcttccagtgccgcttcggtaagatgctgccacttgaaaaagcattcgcttcacccagatcttcccccgcccccccagatcttccgacccctggaagtgcagccggtgtgcagcaagaagagcccgagaccatacctgagcgaacgccagccgatctggagttctccaggttacgattcagagaattcgtgtatcaggaagctgcaggcccacatcagacactggcccggctgcacgaactctgtcgacagtggctcatgccagaggctcgaagcaaagaacagatgctggaactgctcgtcctggaacagttccttgggattctgcctgacaaggtgcgtccctgggtggtggctcagtatcctgaaagctgtaaaaaagcagcgagccttgttgaaggccttgcggatgtcctcgaggaaccgggtatgttgttgggcagcccggctggaagtagcagcatcctgtccgacggtgtgtatgagcggcatatggacccactactgctgccaggggagctagccagtccgagccaggcactaggggccggcgagatcccagctcccagtgagacgccgtggctgagccccgacccccttttcttagaacaacgacgggtcagagaagcgaagacagaggaggatggaccagccaacacggagcagaaattaaaatctttccccgaggatccccagcatctaggagagtggggccatttagaccccgcggaggaaaaccttaaaagctaccggaagctcctcctgtggggctaccaattgagtcagccagatgcagccagtcggctggacacagaggaattacgtctcgtggaacgggatcctcaaggaagcagcctgccagagggcggcagaaggcaagagtctgccgggtgtgcatgcgaagaggccgctcccgccggtgtgctccccgaactgcccactgaggccccacccggagacgccttagctgaccccccatccggcaccaccgaagaggaggaagagcaacccggcaaagcgccagacccccaggacccacaggacgcagaatctgattccgccaccgggtcccagagacagtccgttatccagcaacccgccccagatagaggaaccgccaagcttggtacaaaacgaccacaccccgaagatggtgatggtcagtcgctcgaaggggtgtcctcctcaggggacagcgctggactcgaagccggtcaaggtcctggcgccgacgagcccggcctgtcccggggaaaaccctatgcttgtggcgagtgtggggaggctttcgcctggctgtcccacttaatggaacatcatagtagtcacggcggcagaaaaaggtacgcctgccagggttgctggaagacgttccacttcagcctggcattagccgaacaccagaagacacacgagaaggaaaagtcttacgcactgggcggagcccgggggcctcagcccagtacccgagaagctcaggctggcgcacgggccggcggccctccagagtccgtggagggagaggccccccccgctcctcccgaagcacagaggtag

SEQ ID NO: 58601 - DNA, 1701 bp, Artificial Sequence
  derived and/or modified sequence
atgcgtagagtggggggccgagctgacgaagacgctactgccgctgggtctctgtgggtactagcgccacctgagcctaccggtcacttggttatacccgggacctcccccctggaacccccctgtccatggctggattcccatattttccagtgtagattcggaaagatgttgcccctggagaaagctttcgcttcccccagaagctctcctgccccccctgatctacccacccctgggagcgctgccggcgtccaacaggaagagcccgagactatacctgagcgtactccggcagacctcgagttttctaggctgcggtttagggagttcgtgtaccaggaggctgccggaccgcaccagacattagccaggttgcatgagctgtgtcgccagtggcttatgcctgaagctaggtctaaagagcagatgctggagctgctggtattagagcaatttctgggcatcttgcctgataaggttagaccatgggtggtcgctcagtaccctgagtcgtgtaagaaggctgcctccctcgtggagggtctggccgatgtgctcgaggaaccgggcatgctgctaggttctccggcgggctctagttctatactgagcgatggggtctacgagcggcacatggacccccttcttcttcccggtgaactagcgtctccaagtcaggctctgggagccggtgagattcctgcaccctcagagactccatggttatcccctgaccccctgtttttagaacagcgacgggtgcgcgaagctaagacagaggaggatggccccgcaaatactgagcagaagctcaaaagcttccccgaggatccacagcacttgggagagtgggggcacctcgaccccgccgaagaaaacctcaaatcatacagaaaactccttttgtgggggtaccaactgagccagcccgacgccgcatctagactcgatacagaagaattaagactggtcgagagggacccacaagggtccagcctgccagagggcgggcggcggcaggaaagcgcaggctgcgcctgcgaggaggctgctccggccggggtgctgcctgagttgcctacagaggccccccctggggatgcactggctgatcccccttcaggtaccaccgaagaggaggaggaacagcctgggaaggcccccgatccacaggacccacaggatgctgaatctgactcggctaccggatcacagcggcagagcgtcatccaacagccagctccggaccgcggcacggccaagttaggaaccaaacgcccccacccagaggatggggacggccagtcactcgaaggagtttctagttctggggattcagccggtctggaagccggtcagggacccggcgcggatgaaccaggcttatctcgcggcaaaccgtacgcctgtggtgagtgtggggaggcctttgcttggctgagtcacctcatggaacaccattccagccacgggggccggaagcgctacgcttgccagggatgctggaaaacttttcacttttctctggcacttgccgaacaccagaaaactcatgagaaagagaagtcatacgctctcggcggtgctagaggaccccaaccttctacacgagaggcacaagcaggcgctcgagcagggggcccaccggagtcagtggaaggagaagctccgcctgccccacctgaggcacagaggtag

SEQ ID NO: 58602 - DNA, 1701 bp, Artificial Sequence
  derived and/or modified sequence
atgagaagagtgggcggccgggcagatgaagatgccacagctgctggcagcctgtgggtgctggcccctcctgagcccaccggccacctggtgattcctggcaccagccccctggagcccccctgcccctggctggacagccacatcttccagtgccgctttgggaagatgctgcccctggagaaggcctttgccagccccaggagcagccctgcccccccagacctgcccaccccaggcagcgctgctggggtgcagcaggaggagcctgagaccatccctgagaggaccccagctgacctggagttcagccggctgcgcttccgggagtttgtgtaccaggaggccgccggcccccaccagaccctggcccggctgcacgagctgtgccggcagtggctgatgcctgaggcccggagcaaggagcagatgctggagctgctggtgctggagcagttcctgggcatcctgcctgacaaggtgcggccctgggtggtggcccagtacccagagagctgcaagaaggccgccagcctggtggagggcctggctgatgtgctggaggagcccggcatgctgctgggcagccctgctggcagcagcagcatcctgagtgatggagtgtatgagcggcacatggaccccctgctgctgcctggagagctggccagccccagccaggccctgggcgctggggagatcccagcccccagcgagaccccctggctgagcccagaccccctcttcctggagcagaggagagtgcgggaggccaagacagaggaggatggccctgccaacacagagcagaagctgaagagcttccctgaggacccccagcacctgggggagtggggccacctggaccctgctgaggagaacctgaagagctacaggaagctgctgctgtggggctaccagctgagccagccagatgctgccagccggctggacacagaggagctgcggctggtggagcgggacccccagggcagcagcctgcctgagggcggccggcggcaggagagcgctggctgtgcctgtgaggaggccgccccagctggggtgctgcctgagctgcccacagaggcccctcctggagatgccctggccgaccccccatctggcaccacagaggaggaggaggagcagcccgggaaggccccagacccccaggacccccaggatgctgagagtgacagcgccaccggcagccagaggcagagcgtcatccagcagcctgccccagaccggggcacagccaagctgggcaccaagaggccccacccagaagatggagatggccagagcctggagggcgtgagcagcagcggggacagcgctggcctggaggccggccagggccctggagcagatgagcccggcctgagccggggcaagccctatgcctgtggagaatgtggggaggcctttgcctggctgagccacctgatggagcaccacagcagccatggaggcaggaagagatatgcctgccagggctgctggaagaccttccacttcagcctggccctggccgagcaccagaagacccatgagaaggagaagagctatgccctgggcggggcccggggcccccagcccagcacccgggaggcccaggccggggcccgggccggcggccccccagagagcgtggagggggaggcccccccagcccctcctgaggcccagaggtag

SEQ ID NO: 58603 - DNA, 1701 bp, Artificial Sequence
  derived and/or modified sequence
atgcggcgggtgggcggccgggccgacgaggacgccaccgccgccggcagtctgtgggtcctggcacctccagagccaacaggccacctggtgataccagggacttcaccacttgagcccccttgtccatggctggatagccatatcttccagtgccggttcggtaagatgttacccttggaaaaggcgtttgcatccccgcggtcaagcccggccccccctgacttgccgacaccaggctcagccgcaggcgttcagcaggaagagcctgaaaccattcctgagcggacaccagccgacttggaatttagcaggctccgcttcagagaatttgtttatcaggaagcagccggcccccatcagacacttgcccgactgcacgaattgtgccgccaatggctcatgcccgaggccagaagcaaagaacaaatgcttgaattgctcgtgctggaacagttcctcggtatcctgccagacaaggtgagaccatgggtggtggctcaatatcctgagtcctgtaagaaggctgcttcgctagttgaaggattagcagatgttttagaggagcctgggatgctgctgggaagccctgcagggtctagctcaatactttcagatggagtctacgaacgccacatggacccgctcctgctacccggggagttggcttccccaagtcaggctctgggtgctggagagatccctgcaccctctgagaccccctggctgagccctgatcccctgtttctggaacagcgaagggtcagggaagccaagaccgaagaagatggcccggccaatacagagcagaaactaaaatctttccccgaggacccgcaacatttgggagaatggggacacctagaccctgccgaggaaaatttaaagagttacaggaaactgctgctgtggggttatcaactctctcaaccagatgctgcctctcggctggacacagaagaattgcgtctggtggagagggatccacaggggtcttccctccccgagggcggaaggagacaggagtcagctgggtgcgcatgtgaggaggcggctccagctggcgtgctccctgagctacctaccgaggcccctcccggagacgccctcgcagatcccccctcagggacaacagaggaggaagaagagcagcctggcaaggctcctgacccccaggatccccaggatgctgaatctgattctgcaactggctcccagcggcagtctgtgatacagcaacccgccccagacagaggtactgccaaactggggacaaaacggccacacccggaagacggggatggccagagcctggagggcgtttcttcgagtggcgattccgccggcctggaagccggccaaggcccaggcgctgacgagcccggtctgagccgagggaagccatacgcttgcggcgaatgtggagaggcattcgcctggctgtcccatttaatggaacaccactcatctcatggcggccggaaaaggtacgcctgtcagggatgctggaaaacctttcatttctcgctggctctggctgagcaccagaagacccacgagaaggaaaagtcttacgcactgggcggcgcaagagggccccagcctagcacccgcgaggcccaggccggcgccagagctggcgggcctcctgaatcggtggaaggcgaagctccccccgcaccacctgaagcacagaggtag

SEQ ID NO: 58604 - DNA, 1701 bp, Artificial Sequence
  derived and/or modified sequence
atgcggcgggtgggcggccgggccgacgaggacgccaccgccgccgggtctctttgggtactcgcacccccagagcccacaggacacctagtcattccaggtaccagccccctggagcctccgtgtccatggttggacagtcacattttccaatgtcgattcggaaaaatgttgccactggaaaaagccttcgcttctccacgttcgtctcccgcaccgcctgatctgcctactcccggaagtgcggccggggtccaacaagaagaacccgagactatccccgagcgcactccagcagatctcgagttcagccgcttgcggttccgggaattcgtgtaccaagaggcggctgggccccaccagactttggctcgcctgcacgagctgtgccgtcagtggctaatgccagaggcgcgcagtaaggaacaaatgctcgagttgctcgtcctcgagcagttcctgggcattctgccggataaggtgcgaccatgggtggtggcccagtacccagagtcatgtaaaaaagctgcctccctcgtggaggggctagctgacgtgctcgaggagcctggcatgttgttaggttctcctgctggaagcagcagtatcttatcagatggcgtgtatgagcggcatatggatcctctacttcttcccggcgaattagcctcaccatcccaagccctcggggcaggggaaattccggcaccgtcagaaacgccatggctatcacccgatcctctttttcttgagcagagacgggtaagagaggccaaaactgaggaggatggcccagcaaatactgagcagaagttaaaatcctttcccgaagatccacagcacttgggcgaatgggggcaccttgacccagcagaagaaaatttgaagtcgtacagaaagctattactttggggctatcagttgagtcagccagacgccgcctcccgtcttgatacagaagagttgaggctggtggaacgggacccccaaggctcttccctgccagagggggggcgacggcaggaatccgcgggttgtgcctgcgaagaggctgctcctgccggcgtgctgcccgagctgccaactgaggcccccccaggggacgccctggcagatccaccttcaggaaccaccgaggaagaagaagaacaaccggggaaagctcccgacccacaggatccacaggacgcggagagtgactcagcaacagggtcacagcggcagtccgtaatccaacagcccgcccctgatcgggggactgcaaagcttggaactaaaaggcctcatccggaagatggtgacggacaatccctggagggggtatctagtagtggagatagcgctggtcttgaagctggtcagggcccaggcgccgacgagcccggactctctagaggaaagccttatgcttgcggggaatgcggagaggcgttcgcatggctcagccacctgatggaacaccattccagccacggcgggcgaaaaaggtatgcatgtcaaggctgttggaagactttccacttcagtttggccctggccgagcaccagaagacccacgagaaggagaagagctacgccctaggaggtgctcgcggcccccagccttctacccgcgaggcccaagcaggggcacgcgcagggggaccacctgagtccgtcgagggggaggcaccacccgctccccctgaagcccagcgctag

SEQ ID NO: 58605 - DNA, 1701 bp, Artificial Sequence
  derived and/or modified sequence
atgagacgcgtcggcggtagagctgatgaagacgccaccgctgctggatccctttgggttttagctccaccggaaccaactggccacttggtaatccctggcactagtcctctcgagcctccgtgtccatggctcgactcccacatatttcaatgtcggtttggcaagatgctccccctggaaaaggctttcgcctccccccgatcttctcctgcccctcccgaccttcccaccccaggtagcgcagccggtgtccaacaagaagagcccgagacaattccagagcgcacccctgcggacctggaattttcccgactgaggtttcgtgagtttgtgtatcaggaggctgcaggaccgcatcaaacgctcgctcggctgcacgaactttgcaggcaatggctgatgcccgaggccagatccaaagagcaaatgctggaactgttggttcttgaacaattcctcggaattctcccagataaagtccggccatgggttgtcgcccaatacccagaatcctgcaaaaaggcagcaagcctggtggaaggcttagctgacgttctcgaagagcccggaatgctgctcggctcccctgctggtagctcttccatattgtcagatggtgtgtacgagcgtcacatggacccccttctgttacctggcgagctcgcttcccctagccaagcactgggggctggtgagatccccgctcccagtgagactccgtggctgagtcccgacccattattcttggaacagcgacgcgtcagagaggccaagacagaagaagatggaccagccaacaccgagcagaaactaaaatcattcccagaggatccacagcacttgggggagtgggggcatctggaccctgcagaagagaatctgaagtcataccggaagcttttgctctggggatatcagctgtcccagccggacgcagcctcccggttggacacagaagagctcagactcgtggagagagacccacagggcagcagtcttcccgagggcggacgacgccaggagtcagccggttgcgcctgcgaagaagctgcacccgctggcgttttacccgaactgccgaccgaagccccacctggggacgccctcgcagatccgcctagcggaaccacggaggaggaggaggagcagcccggaaaggccccagacccacaggacccccaggatgctgaatcagacagtgctactggctctcagagacaaagtgtgattcagcagcccgctccagacaggggaactgcaaagttaggtaccaagcgtcctcaccctgaggatggcgacggtcagtccttggagggcgtaagctcctccggggatagtgctggccttgaggcagggcagggaccgggagccgatgaacccggattgtcacgtgggaaaccatacgcatgcggcgagtgcggagaagcattcgcgtggctaagccaccttatggagcaccactcaagtcatggcggaagaaaaaggtatgcctgtcagggatgttggaagacttttcatttcagcctagctcttgctgaacaccagaaaacacatgagaaagaaaagagttatgccctcgggggtgctagaggacctcaaccaagtactagggaagcccaggctggagccagagctggcggtcctcctgaaagtgtagaaggggaagcaccacctgcacctcccgaggcccagaggtag

SEQ ID NO: 58606 - DNA, 1701 bp, Artificial Sequence
  derived and/or modified sequence
atgagacgagtcggcggtcgagccgatgaagacgctactgccgcaggatctctttgggttttagcccctccggaaccaaccggacacctggtgattcccggaacgtcgcctttggaaccaccctgtccgtggcttgattcacatatctttcagtgtcgattcggtaagatgctgcccctcgagaaagcctttgcaagtcccagatctagccctgctcccccagacctacctacacctgggtctgcggcaggagttcagcaagaagaacctgagacaattcccgaaagaaccccagccgatctggaatttagccgattgaggtttcgcgaattcgtctaccaggaggcagcaggaccgcatcaaactctcgcccgactccacgagctctgccggcagtggcttatgccagaggctcgatccaaggagcagatgctggaactcctggttctcgagcagtttctaggtattctccctgataaggttaggccctgggttgtggcacagtatcctgagtcatgtaaaaaagcggcatctctggtggaaggcctagcggatgtgctggaagaacccggtatgctattgggcagcccagccggaagcagtagcatcctctcggacggcgtgtatgagaggcacatggatcctctcttactgcccggtgagctggcttccccatcacaggctctaggggcaggggagattcccgctccttctgagactccttggttgtcacccgatccactgtttctggagcagcgtagggtgcgagaagctaagaccgaagaggatgggccagccaataccgagcagaagctgaagtcctttcccgaggatccgcagcatctgggcgaatggggccaccttgaccccgcagaggaaaatctaaaatcctatagaaagttgcttttgtggggttatcaattgtcacagcccgatgctgcaagccgactcgacaccgaggagcttagattagtggagcgcgaccctcaggggtcttccttgccagaaggtggaaggcggcaggagagcgctggatgcgcatgcgaagaggcagcccctgctggcgtgttacctgagctgcccactgaggccccaccaggggatgccttagcagaccctccctcagggacaaccgaagaggaggaggagcaacctgggaaagctccggatccacaagatccacaggacgccgagtcagacagcgcaactggttctcagaggcagtccgtgatacaacagcctgccccagacaggggcaccgccaagctgggtacaaagagacctcatccggaggacggcgatggtcagagcctggaaggcgtctcctcgtcaggcgactctgccggtttagaagcgggacaggggcctggcgctgacgaacctggcttatctcgcggaaagccctacgcctgcggtgagtgtggagaggcgtttgcctggctatcacacctaatggaacaccactcctcacacggcggacgcaaacggtacgcctgccaaggttgttggaaaaccttccacttctccctggctctcgccgagcaccagaaaacacatgaaaaggagaagagctacgcactgggcggtgccaggggtcctcagccctctacacgggaggctcaggcaggggctagagctggtggaccccctgagtcagtcgagggcgaggcgccacccgcaccccctgaggcccagcgttag

SEQ ID NO: 58607 - DNA, 2926 bp, Artificial Sequence
  derived and/or modified sequence
gcgtctgattggccatgcgcactgtcacctgtcacggctcccttgctcgccccggtgcgcggcacagcctcgcggcattgtgggagtcgtagtccgcggtgaggcccagtgcgcaggcgcagtttgccggccgccatcgcgcactggggctccgggcggctgggaccggcctggggtagctgcgcagcaggtgggtcggtcccggggatgcagcgcgggggtcagagagcgaccccaacagggtagacggtgaggacgcctcagtgggcagcgttagggaaaggggccagggtgttcccggggttggggtgcgagcccccgctgtgcgtccaggaggccgagggtctggcatcccttcgcgtggagtgcggggcaggggccgggtccccccggaggtggctgagatccagatcggtgaggggccctgcaggcaggtctgtgggttctggcaccacctgagcccactgggcatctggtcatccctggcacctctcctttggagccaccttgtccctggctagacagtcacattttccagtgccgttttggaaagatgttgcctttggagaaggcgtttgcctcccccaggagctccccagccccgccggatctgcccacgccggggtcagcagccggagtccagcaggaagaacccgagaccatccctgagaggacccctgctgacctggagttctcccgcctgcgtttccgggaatttgtctaccaggaggctgccgggccccaccagaccctggcccggctgcatgagctgtgccgccagtggctgatgcctgaggcgcgctccaaggagcagatgctggagctgctggtgctggagcagttcctgggcatcctgcctgataaggtccggccctgggtggtggcacagtaccctgagagctgcaagaaggcagcctccctggtggagggcctcgctgatgtcctggaagagccagggatgctgctgggctcccctgcgggctcatcctcaattcttagcgatggagtgtacgagaggcacatggaccctctgctgctaccaggcgagctcgcgagccccagccaggcccttggagctggggagatcccggcaccttctgagacaccctggctttctccggaccccctgtttctggaacagaggagggtcagagaagcaaagaccgaagaggacggccctgccaacaccgagcagaagctgaagtcctttccagaggaccctcagcacctgggggagtggggccacctggaccctgccgaggagaacctgaagagctaccggaagctgctcctgtgggggtatcagctttcccagcctgacgctgcctccaggctggacactgaggaactccggttggtggaaagagatccacaaggaagcagcctcccagaaggcgggaggcggcaggagagcgctgggtgcgcctgcgaggaggccgcccccgcgggggtgctgcctgagctgcctacggaggcgccccctggggacgcccttgccgatcccccgtcgggcaccactgaggaggaggaagagcagcctgggaaggccccggacccgcaggacccccaggacgcggagtccgactctgccaccggatcgcagaggcagtccgtcatccagcagcctgccccggacaggggcacggcgaaactgggaaccaagaggccgcaccccgaggatggggacgggcagagcctcgagggcgtctctagctccggcgacagcgcagggctggaggccgggcagggccctggggctgacgagccgggcttgtcccgcgggaagccctatgcctgcggcgagtgcggggaggccttcgcgtggctctcgcacctgatggagcaccacagcagccatggcggccggaagcgctacgcctgtcagggctgctggaagaccttccacttcagcctggccctagccgagcaccagaagacccacgagaaggagaaaagctacgcgctggggggcgcccggggcccccaaccgtccacccgcgaagcccaggcgggggctagggcgggcggtcccccagagagcgtggagggcgaggctccccccgcacccccagaggcgcagaggtgagccgctgtgctgtcccgttccggaggggccgctttgccggccgtgaatcccagacgaggcattgggcctttccacgcccctgggtggcggcttcctgtggtgtttgtggacgtcctctgcctgtgccctgaatccgctcctgaggctaagcgctcccaacgagaagggtccacgggaagccctcacctctgtaaacacaccctgggccagcgctcgcatccgaggggagccgccggatgtggaagaagactcggctttcctgcagccatttagtgccgccccatgctaggttatttgacattgtgcagtgtagagttgccttaaagtgcgtgatctgccagtgctttcttcaagtcacccttgccccgattcctcctgtttgcgctccccagggttgctcaagtggaaattttgtcagctgtttagccttttcgtacttggcgtgatgtcaacttcacttctaatctgcaaaagcagaagctgtttcctagtttacctcgcgtgtgtttacctatatggagtagctcgcagagatcacagaaatgcttgcagcctaaggcagggttttcagaccgtgggtcccagcccatttagtaaaatgggaaatcaattagcaagtggtcaccagcattacacagcaatgaagcagaataaagtaggccagaatgcatcatgtagtaaaggcaaatactgttttgtgaaacttttcacccatacatctaaatgtgagaactggttgcaatgtaagacatttcttgctgggaagttgtgagcaaaataagttgaaaacactaataaagatctgtctgtctgagcaaaggagactaaactccttgggct

SEQ ID NO: 58608 - DNA, 2571 bp, Artificial Sequence
  derived and/or modified sequence
gaatatcgcatccgggaactctgcgcgcccatgcggagagtcggagggcgagctgacgaggacgctacggcggcgggaagtctgtgggttctggcaccacctgagcccactgggcatctggtcatccctggcacctctcctttggagccaccttgtccctggctagacagtcacattttccagtgccgttttggaaagatgttgcctttggagaaggcgtttgcctcccccaggagctccccagccccgccggatctgcccacgccggggtcagcagccggagtccagcaggaagaacccgagaccatccctgagaggacccctgctgacctggagttctcccgcctgcgtttccgggaatttgtctaccaggaggctgccgggccccaccagaccctggcccggctgcatgagctgtgccgccagtggctgatgcctgaggcgcgctccaaggagcagatgctggagctgctggtgctggagcagttcctgggcatcctgcctgataaggtccggccctgggtggtggcacagtaccctgagagctgcaagaaggcagcctccctggtggagggcctcgctgatgtcctggaagagccagggatgctgctgggctcccctgcgggctcatcctcaattcttagcgatggagtgtacgagaggcacatggaccctctgctgctaccaggcgagctcgcgagccccagccaggcccttggagctggggagatcccggcaccttctgagacaccctggctttctccggaccccctgtttctggaacagaggagggtcagagaagcaaagaccgaagaggacggccctgccaacaccgagcagaagctgaagtcctttccagaggaccctcagcacctgggggagtggggccacctggaccctgccgaggagaacctgaagagctaccggaagctgctcctgtgggggtatcagctttcccagcctgacgctgcctccaggctggacactgaggaactccggttggtggaaagagatccacaaggaagcagcctcccagaaggcgggaggcggcaggagagcgctgggtgcgcctgcgaggaggccgcccccgcgggggtgctgcctgagctgcctacggaggcgccccctggggacgcccttgccgatcccccgtcgggcaccactgaggaggaggaagagcagcctgggaaggccccggacccgcaggacccccaggacgcggagtccgactctgccaccggatcgcagaggcagtccgtcatccagcagcctgccccggacaggggcacggcgaaactgggaaccaagaggccgcaccccgaggatggggacgggcagagcctcgagggcgtctctagctccggcgacagcgcagggctggaggccgggcagggccctggggctgacgagccgggcttgtcccgcgggaagccctatgcctgcggcgagtgcggggaggccttcgcgtggctctcgcacctgatggagcaccacagcagccatggcggccggaagcgctacgcctgtcagggctgctggaagaccttccacttcagcctggccctagccgagcaccagaagacccacgagaaggagaaaagctacgcgctggggggcgcccggggcccccaaccgtccacccgcgaagcccaggcgggggctagggcgggcggtcccccagagagcgtggagggcgaggctccccccgcacccccagaggcgcagaggtgagccgctgtgctgtcccgttccggaggggccgctttgccggccgtgaatcccagacgaggcattgggcctttccacgcccctgggtggcggcttcctgtggtgtttgtggacgtcctctgcctgtgccctgaatccgctcctgaggctaagcgctcccaacgagaagggtccacgggaagccctcacctctgtaaacacaccctgggccagcgctcgcatccgaggggagccgccggatgtggaagaagactcggctttcctgcagccatttagtgccgccccatgctaggttatttgacattgtgcagtgtagagttgccttaaagtgcgtgatctgccagtgctttcttcaagtcacccttgccccgattcctcctgtttgcgctccccagggttgctcaagtggaaattttgtcagctgtttagccttttcgtacttggcgtgatgtcaacttcacttctaatctgcaaaagcagaagctgtttcctagtttacctcgcgtgtgtttacctatatggagtagctcgcagagatcacagaaatgcttgcagcctaaggcagggttttcagaccgtgggtcccagcccatttagtaaaatgggaaatcaattagcaagtggtcaccagcattacacagcaatgaagcagaataaagtaggccagaatgcatcatgtagtaaaggcaaatactgttttgtgaaacttttcacccatacatctaaatgtgagaactggttgcaatgtaagacatttcttgctgggaagttgtgagcaaaataagttgaaaacactaataaagatctgtctgtctgagcaaaggagactaaactccttgggct

SEQ ID NO: 58609 - DNA, 1934 bp, Artificial Sequence
  derived and/or modified sequence
gaatatcgcatccgggaactctgcgcgcccatgcggagagtcggagggcgagctgacgaggacgctacggcggcgggaagtctgtgggttctggcaccacctgagcccactgggcatctggtcatccctggcacctctcctttggagccaccttgtccctggctagacagtcacattttccagtgccgttttggaaagatgttgcctttggagaaggcgtttgcctcccccaggagctccccagccccgccggatctgcccacgccggggtcagcagccggagtccagcaggaagaacccgagaccatccctgagaggacccctgctgacctggagttctcccgcctgcgtttccgggaatttgtctaccaggaggctgccgggccccaccagaccctggcccggctgcatgagctgtgccgccagtggctgatgcctgaggcgcgctccaaggagcagatgctggagctgctggtgctggagcagttcctgggcatcctgcctgataaggtccggccctgggtggtggcacagtaccctgagagctgcaagaaggcagcctccctggtggagggcctcgctgatgtcctggaagagccagggatgctgctgggctcccctgcgggctcatcctcaattcttagcgatggagtgtacgagaggcacatggaccctctgctgctaccaggcgagctcgcgagccccagccaggcccttggagctggggagatcccggcaccttctgagacaccctggctttctccggaccccctgtttctggaacagaggagggtcagagaagcaaagaccgaagaggacggccctgccaacaccgagcagaagctgaagtcctttccagaggaccctcagcacctgggggagtggggccacctggaccctgccgaggagaacctgaagagctaccggaagctgctcctgtgggggtatcagctttcccagcctgacgctgcctccaggctggacactgaggaactccggttggtggaaagagatccacaaggaagcagcctcccagaaggcgggaggcggcaggagagcgctgggtgcgcctgcgaggaggccgcccccgcgggggtgctgcctgagctgcctacggaggcgccccctggggacgcccttgccgatcccccgtcgggcaccactgaggaggaggaagagcagcctgggaaggccccggacccgcaggacccccaggacgcggagtccgactctgccaccggatcgcagaggcagtccgtcatccagcagcctgccccggacaggggcacggcgaaactgggaaccaagaggccgcaccccgaggatggggacgggcagagcctcgagggcgtctctagctccggcgacagcgcagggctggaggccgggcagggccctggggctgacgagccgggcttgtcccgcgggaagccctatgcctgcggcgagtgcggggaggccttcgcgtggctctcgcacctgatggagcaccacagcagccatggcggccggaagcgctacgcctgtcagggctgctggaagaccttccacttcagcctggccctagccgagcaccagaagacccacgagaaggagaaaagctacgcgctggggggcgcccggggcccccaaccgtccacccgcgaagcccaggcgggggctagggcgggcggtcccccagagagcgtggagggcgaggctccccccgcacccccagaggcgcagaggtgagccgctgtgctgtcccgttccggaggggccgctttgccggccgtgaatcccagacgaggcattgggcctttccacgcccctgggtggcggcttcctgtggtgtttgtggacgtcctctgcctgtgccctgaatccgctcctgaggctaagcgctcccaacgagaagggtccacgggaagccctcacctctgtaaacacaccct

SEQ ID NO: 58610 - protein, 374 aa, Artificial Sequence
  derived and/or modified sequence
MLLGSPAGSSSILSDGVYERHMDPLLLPGELASPSQALGAGEIPAPSETPWLSPDPLFLEQRRVREAKTEEDGPANTEQKLKSFPEDPQHLGEWGHLDPAEENLKSYRKLLLWGYQLSQPDAASRLDTEELRLVERDPQGSSLPGGRRQESAGCACEEAAPAGVLPELPTEAPPGDALADPPSGTTEEEEEQPGKAPDPQDPQDAESDSATGSQRQSVIQQPAPDRGTAKLGTKRPHPEDGDGQSLEGVSSSGDSAGLEAGQGPGADEPGLSRGKPYACGECGEAFAWLSHLMEHHSSHGGRKRYACQGCWKTFHFSLALAEHQKTHEKEKSYALGGARGPQPSTREAQAGARAGGPPESVEGEAPPAPPEAQR

SEQ ID NO: 58611 - DNA, 1125 bp, Artificial Sequence
  derived and/or modified sequence
atgctgctgggcagccccgccggcagcagcagcatcctgagcgacggcgtgtacgagagacacatggaccccctgctgctgcccggcgagctggccagccccagccaggccctgggcgccggcgagatccccgcccccagcgagaccccctggctgagccccgaccccctgttcctggagcagagaagagtgagagaggccaagaccgaggaggacggccccgccaacaccgagcagaagctgaagagcttccccgaggacccccagcacctgggcgagtggggccacctggaccccgccgaggagaacctgaagagctacagaaagctgctgctgtggggctaccagctgagccagcccgacgccgccagcagactggacaccgaggagctgagactggtggagagagacccccagggcagcagcctgcccggcggcagaagacaggagagcgccggctgcgcctgcgaggaggccgcccccgccggcgtgctgcccgagctgcccaccgaggccccccccggcgacgccctggccgacccccccagcggcaccaccgaggaggaggaggagcagcccggcaaggcccccgacccccaggacccccaggacgccgagagcgacagcgccaccggcagccagagacagagcgtgatccagcagcccgcccccgacagaggcaccgccaagctgggcaccaagagaccccaccccgaggacggcgacggccagagcctggagggcgtgagcagcagcggcgacagcgccggcctggaggccggccagggccccggcgccgacgagcccggcctgagcagaggcaagccctacgcctgcggcgagtgcggcgaggccttcgcctggctgagccacctgatggagcaccacagcagccacggcggcagaaagagatacgcctgccagggctgctggaagaccttccacttcagcctggccctggccgagcaccagaagacccacgagaaggagaagagctacgccctgggcggcgccagaggcccccagcccagcaccagagaggcccaggccggcgccagagccggcggcccccccgagagcgtggagggcgaggccccccccgccccccccgaggcccagagatag

SEQ ID NO: 58612 - DNA, 1125 bp, Artificial Sequence
  derived and/or modified sequence
atgttgctggggagcccagctggatcatcttccattttgtcagacggtgtgtatgagcgacatatggatccgctcttgcttcccggagagctggcgtctccctctcaggctctgggtgcaggagaaatacccgcgccatctgaaactccgtggctctccccagatcctctgtttctggagcagcgacgcgtccgagaggctaaaacagaggaagatgggccagccaacaccgagcagaagctcaaatcctttcctgaagatccccagcatctcggggaatggggtcacctggatccagccgaggaaaatcttaaaagttacaggaagttgctgctttggggataccaactgagccagcccgatgccgccagtcgattggataccgaagaactgcggctggtcgagcgcgaccctcaagggtcctcacttccgggtggacgcaggcaagagagtgccgggtgtgcctgcgaagaggccgcccctgcgggcgttctacctgaactcccgactgaagctcctcccggcgatgcactggcggatccgcctagcggaaccacagaggaggaagaagagcaacccggaaaggctcccgaccctcaggatccacaggatgctgaatccgattcggccactggctctcagagacagagtgtgatccagcaacctgctccagacagaggaactgcaaaattgggcacaaaacgcccacatcccgaagatggggacggccaatctctcgaaggcgtctctagttctggtgacagtgccgggctggaggcgggccaggggcctggcgctgatgagccagggttatcacgcggcaagccctacgcatgtggcgagtgtggggaggcttttgcctggctgagtcacctaatggaacaccattctagccatgggggcagaaagcgctatgcctgccagggatgctggaaaacttttcacttctctcttgccctggcagagcaccagaagactcatgaaaaggagaagagttacgctttaggcggcgcaaggggcccgcaaccgtcgactagagaggctcaagctggggctcgtgccggaggcccaccagagagcgttgaaggcgaggcaccaccagctcccccagaagcgcagcgctag

SEQ ID NO: 58613 - DNA, 1125 bp, Artificial Sequence
  derived and/or modified sequence
atgctgctgggcagccctgctggcagcagcagcatcctgagtgatggagtgtatgaaagacacatggaccccctgctgctgcccggggagctggccagccccagccaggccctgggcgctggggagatcccagcccccagcgagaccccctggctgagcccagaccccctcttcctggagcagaggagagtgcgggaggccaagacagaagaagatggccctgccaacacagagcagaagctgaagagcttccctgaggacccccagcacctgggggagtggggccacctggaccctgctgaggagaacctgaagagctacaggaagctgctgctgtggggctaccagctgagccagccagatgctgccagccggctggacacagaggagctgcggctggtggagcgggacccccagggcagcagcctgcccggcggccggcggcaggagagcgctggctgtgcctgtgaggaggccgccccagctggggtgctgcctgagctgcccacagaggcccctcctggagatgccctggccgaccccccatctggcaccacagaggaggaggaggagcagcccgggaaggccccagacccccaggacccccaggatgctgagagtgacagcgccaccggcagccagaggcagagcgtcatccagcagcctgccccagaccggggcacagccaagctgggcaccaagaggccccacccagaagatggagatggccagagcctggagggcgtgagcagcagcggggacagcgctggcctggaggccggccagggccctggagcagatgagcccggcctgagccggggcaagccctatgcctgtggagaatgtggggaggcctttgcctggctgagccacctgatggagcaccacagcagccatggaggcaggaagagatatgcctgccagggctgctggaagaccttccacttcagcctggccctggccgagcaccagaagacccatgagaaggagaagagctatgccctgggcggggcccggggcccccagcccagcacccgggaggcccaggccggggcccgggccggcggccccccagagagcgtggagggggaggcccccccagcccctcctgaggcccagaggtag

SEQ ID NO: 58614 - DNA, 1125 bp, Artificial Sequence
  derived and/or modified sequence
atgctgctgggcagccccgccggcagcagcagcatcctgagcgacggggtttacgaacggcatatggatcccctgcttctgcccggcgaactggcctctccctctcaggcccttggagcaggggagattcccgcgccttccgaaaccccctggctgagcccggatccattattcctcgagcagagacgtgttcgagaagcaaaaaccgaggaggacgggcctgctaacacagagcagaaactcaagtcattccctgaggatccccaacatcttggagagtggggccatctggatcctgctgaagagaatctgaaaagttacagaaagttattactatggggttaccagctctcccagcctgatgctgcttcccgtctggacacggaggaactcaggcttgtggaaagggatccccagggatcatcccttccaggcggcagaaggcaggaatctgccggatgtgcctgtgaagaggccgccccagccggagtgttgcccgaactccccaccgaggctccacctggcgacgccctggccgatcccccctctggaacaaccgaggaagaggaggagcagccaggcaaggctccagaccctcaagacccccaggatgccgagtccgactctgcaaccggaagccagaggcagtcagtgatccagcaacccgctccagacaggggaacagcgaaactagggacaaagcgcccccatccagaggacggtgatgggcaatctttagagggagtttccagcagcggagactccgccggcctcgaggcagggcagggccctggagctgacgaacctggcctctcacgcggtaaaccttacgcatgcggcgaatgtggagaagccttcgcttggctaagccacctgatggagcatcactcaagtcacggcggcagaaaaaggtacgcttgtcaggggtgttggaaaacattccacttcagtctcgccctggccgagcaccaaaagacacacgagaaggagaagagttacgccttgggaggcgctcggggcccgcagcctagcaccagggaggcacaggcgggagcacgggccggtggccctcccgaatccgtggaaggcgaggcaccccccgcccccccggaggcccagcgatag

SEQ ID NO: 58615 - DNA, 1125 bp, Artificial Sequence
  derived and/or modified sequence
atgctactgggatcacccgctggaagctcaagtattctctcagacggcgtgtacgagcggcacatggatcccctcctgctccccggagaactagcctcaccgagccaggccctgggcgctggagagattccagcccctagtgaaacaccttggttaagcccagaccccctgtttctggagcagaggagagtgcgggaagccaaaaccgaagaagatggacccgcaaacactgagcagaagttgaaatctttcccagaagaccctcagcatctaggcgaatggggccacctggatccggctgaggagaatctgaaaagctatagaaaactcttattgtggggctatcagttaagtcagccagatgcggcaagtcgcctggacacagaggaactaaggctagtagagagggatccccaaggctcttctctgccaggtggaaggcggcaggaaagtgcaggttgtgcctgtgaggaagctgcccctgcaggcgttcttcctgagctgcccactgaggcaccccctggagatgcactggctgaccctcccagtggcaccaccgaggaggaggaagagcagcctggcaaagcgccagacccgcaggacccccaggacgctgaatctgactcagccaccggttcccagaggcagtcagttatacagcagcctgccccagaccgcggtaccgctaaattaggcaccaaaaggcctcatccagaggacggagacggacaaagtctggaaggtgttagcagtagcggtgatagcgctggtctggaagccggacaggggcctggtgcggatgaacccggactgtcacggggaaagccatacgcttgtggggagtgcggggaagcgttcgcgtggctttcccatctgatggagcaccacagctcccatggaggcaggaaacgctacgcctgccagggatgctggaaaaccttccatttcagcctggccctagcagagcaccaaaagacgcacgaaaaggagaagagttatgccctgggcggagccaggggacctcaacccagtacgagggaagctcaggcaggagcgagggctggcggtcctcccgagtccgtcgagggagaggccccacccgcaccgccagaggctcagcggtag

SEQ ID NO: 58616 - DNA, 2216 bp, Artificial Sequence
  derived and/or modified sequence
gcgtctgattggccatgcgcactgtcacctgtcacggctcccttgctcgccccggtgcgcggcacagcctcgcggcattgtgggagtcgtagtccgcggtgaggcccagtgcgcaggcgcagtttgccggccgccatcgcgcactggggctccgggcggctgggaccggcctggggtagctgcgcagcaggtgggtcggtcccggggatgcagcgcgggggtcagagagcgaccccaacagggtagacgggatgctgctgggctcccctgcgggctcatcctcaattcttagcgatggagtgtacgagaggcacatggaccctctgctgctaccaggcgagctcgcgagccccagccaggcccttggagctggggagatcccggcaccttctgagacaccctggctttctccggaccccctgtttctggaacagaggagggtcagagaagcaaagaccgaagaggacggccctgccaacaccgagcagaagctgaagtcctttccagaggaccctcagcacctgggggagtggggccacctggaccctgccgaggagaacctgaagagctaccggaagctgctcctgtgggggtatcagctttcccagcctgacgctgcctccaggctggacactgaggaactccggttggtggaaagagatccacaaggaagcagcctcccaggcgggaggcggcaggagagcgctgggtgcgcctgcgaggaggccgcccccgcgggggtgctgcctgagctgcctacggaggcgccccctggggacgcccttgccgatcccccgtcgggcaccactgaggaggaggaagagcagcctgggaaggccccggacccgcaggacccccaggacgcggagtccgactctgccaccggatcgcagaggcagtccgtcatccagcagcctgccccggacaggggcacggcgaaactgggaaccaagaggccgcaccccgaggatggggacgggcagagcctcgagggcgtctctagctccggcgacagcgcagggctggaggccgggcagggccctggggctgacgagccgggcttgtcccgcgggaagccctatgcctgcggcgagtgcggggaggccttcgcgtggctctcgcacctgatggagcaccacagcagccatggcggccggaagcgctacgcctgtcagggctgctggaagaccttccacttcagcctggccctagccgagcaccagaagacccacgagaaggagaaaagctacgcgctggggggcgcccggggcccccaaccgtccacccgcgaagcccaggcgggggctagggcgggcggtcccccagagagcgtggagggcgaggctccccccgcacccccagaggcgcagaggtgagccgctgtgctgtcccgttccggaggggccgctttgccggccgtgaatcccagacgaggcattgggcctttccacgcccctgggtggcggcttcctgtggtgtttgtggacgtcctctgcctgtgccctgaatccgctcctgaggctaagcgctcccaacgagaagggtccacgggaagccctcacctctgtaaacacaccctgggccagcgctcgcatccgaggggagccgccggatgtggaagaagactcggctttcctgcagccatttagtgccgccccatgctaggttatttgacattgtgcagtgtagagttgccttaaagtgcgtgatctgccagtgctttcttcaagtcacccttgccccgattcctcctgtttgcgctccccagggttgctcaagtggaaattttgtcagctgtttagccttttcgtacttggcgtgatgtcaacttcacttctaatctgcaaaagcagaagctgtttcctagtttacctcgcgtgtgtttacctatatggagtagctcgcagagatcacagaaatgcttgcagcctaaggcagggttttcagaccgtgggtcccagcccatttagtaaaatgggaaatcaattagcaagtggtcaccagcattacacagcaatgaagcagaataaagtaggccagaatgcatcatgtagtaaaggcaaatactgttttgtgaaacttttcacccatacatctaaatgtgagaactggttgcaatgtaagacatttcttgctgggaagttgtgagcaaaataagttgaaaacactaataaagatctgtctgtctgagcaaaggagactaaactccttgggct

SEQ ID NO: 58617 - protein, 49 aa, Artificial Sequence
  derived and/or modified sequence
MAPPSVPLVLLLVLLLSLAETPASAPAHRSSTFPKWVTKTERGRQPLRS

SEQ ID NO: 58618 - DNA, 150 bp, Artificial Sequence
  derived and/or modified sequence
atggctcctcccagcgttcctctcgttctgctccttgttctcttgcttagcctggccgaaaccccagccagcgctccagctcaccgctccagtacttttccaaaatgggttactaagaccgaacgcggacgccaacccctgagaagttag

SEQ ID NO: 58619 - DNA, 150 bp, Artificial Sequence
  derived and/or modified sequence
atggcaccaccatctgtgcctttagtcctcctgctagtcctgctgctgtccctggctgagacccccgcttcagcccccgcacatcgctcatctacattccccaaatgggttacaaaaacagaacgcggacgtcagcccctcagatcttag

SEQ ID NO: 58620 - DNA, 150 bp, Artificial Sequence
  derived and/or modified sequence
atggccccccccagcgtgcccctggtgctgctgctggtgctgctgctgagcctggccgagacccccgccagcgcccccgcccacagaagcagcaccttccccaagtgggtgaccaagaccgagagaggcagacagcccctgagaagctag

SEQ ID NO: 58621 - DNA, 150 bp, Artificial Sequence
  derived and/or modified sequence
atggctcccccttcagtgccactcgtgctcctgctcgtcttgcttttgtccctcgccgaaactccggctagcgcccccgctcaccggagttccactttccctaaatgggtgaccaagaccgaacgagggcgtcagcctcttcggagctag

SEQ ID NO: 58622 - DNA, 150 bp, Artificial Sequence
  derived and/or modified sequence
atggcccctccttctgtgcccctggtgctgctgctggtgctgctgctgagcctggccgagaccccagccagcgccccagcccacaggagcagcaccttccccaagtgggtgaccaagacagagcggggccggcagcccctgcggagctag

SEQ ID NO: 58623 - DNA, 150 bp, Artificial Sequence
  derived and/or modified sequence
atggccccccccagcgtgcccctggtgctgctgctggtgctgctgttgtcactggccgagaccccagcctccgcccccgcacacagatcatcgacctttccaaagtgggttaccaagacagaacgaggacgccaacctttgaggtcttag

SEQ ID NO: 58624 - RNA, 150 nt, Artificial Sequence
  derived and/or modified sequence
auggcaccaccaucugugccuuuaguccuccugcuaguccugcugcugucccuggcugagacccccgcuucagcccccgcacaucgcucaucuacauuccccaaauggguuacaaaaacagaacgcggacgucagccccucagaucuuag

SEQ ID NO: 58625 - protein, 225 aa, Artificial Sequence
  derived and/or modified sequence
  misc_feature (1)..(1): Xaa can be any naturally occurring amino acid
XPLADEYDPMFPNDYEKVVKRQREERQRQRELERQKEIEEREKRRKDRHEASGFARRPDPDSDEDEDYERERRKRSMGGAAIAPPTSLVEKDKELPRDFPYEEDSRPRSQSSKAAIPPPVYEEQDRPRSPTGPSNSFLANMGGTVAHKIMQKYGFREGQGLGKHEQGLSTALSVEKTSKRGGKIIVGDATEKGVSPGKRVTRGKGLAPSISDMASLDPHVSAGGQ

SEQ ID NO: 58626 - protein, 243 aa, Artificial Sequence
  derived and/or modified sequence
MGRVGRAGRSQRTKQSTVLAPVIDLKRGGSSDDRQIVDTPPHVAAGLKDPVPSGFSAGEVLIPLADEYDPMFPNDYEKVVKRQREERQRQRELERQKEIEEREKRRKDRHEASGFARRPDPDSDEDEDYERERRKRSMGGAAIAPPTSLVEKDKELPRDFPYEEDSRPRSQSSKAAIPPPVYEEQDRPRSPTGPSNSFLANMGGTVAHKIMQKYGFREGQGLGKHEQGLSTALSVEKTSKRGG

SEQ ID NO: 58627 - protein, 212 aa, Artificial Sequence
  derived and/or modified sequence
MSLYDDLGVETSDSKTEGWSKNFKLLQSQLQVKKAALTQAKSQRTKQSTVLAPVIDLKRGGSSDDRQIVDTPPHVAAGLKDPVPSGFSAGEVLIPLADEYDPMFPNDYEKVVKRQREERQRQRELERQKEIEEREKRRKDRHEASGFARRPDPDSDEDEDYERERRKRSMGGAAIAPPTSLVEKDKELPRDFPYEEDSRPRSQSSKAAIPPP

SEQ ID NO: 58628 - protein, 221 aa, Artificial Sequence
  derived and/or modified sequence
MSLYDDLGVETSDSKTEGWSKNFKLLQSQLQVKKAALTQAKSQRTKQSTVLAPVIDLKRGGSSDDRQIVDTPPHVAAGLKDPVPSGFSAGEVLIPLADEYDPMFPNDYEKVVKRQREERQRQRELERQKEIEEREKRKDRHEASGFARRPDPDSDEDEDYERERRKRSMGGAAIAPPTSLVEKDKELPRDFPYEEDSRPRSQSSKAAIPPPVYEEQDRPRS

SEQ ID NO: 58629 - protein, 401 aa, Artificial Sequence
  derived and/or modified sequence
MSLYDDLGVETSDSKTEGWSKNFKLLQSQLQVKKAALTQAKSQRTKQSTVLAPVIDLKRGGSSDDRQIVDTPPHVAAGLKDPVPSGFSAGEVLIPLADEYDPMFPNDYEKVVKRQREERQRQRELERQKEIEEREKRRKDRHEASGFARRPDPDSDEDEDYERERRKRSMGGAAIAPPTSLVEKDKELPRDFPYEEDSRPRSQSSKAAIPPPVYEEQDRPRSPTGPSNSFLANMGGTVAHKIMQKYGFREGQGLGKHEQGLSTALSVEKTSKRGGKIIVGDATEKDASKKSDSNPLTEILKCPTKVVLLRNMVGAGEVDEDLEVETKEECEKYGKVGKCVIFEIPGAPDDEAVRIFLEFERVESAIKAVVDLNGRYFGGRVVKACFYNLDKFRVLDLAEQV

SEQ ID NO: 58630 - DNA, 676 bp, Artificial Sequence
  derived and/or modified sequence
ttcccttagctgacgaatatgaccctatgtttcctaatgattatgagaaagtagtgaagcgccaaagagaggaacgacagagacagcgggagctggaaagacaaaaggaaatagaagaaagggaaaaaaggcgtaaagacagacatgaagcaagtgggtttgcaaggagaccagatccagattctgatgaagatgaagattatgagcgagagaggaggaaaagaagtatgggcggagctgccattgccccacccacttctctggtagagaaagacaaagagttaccccgagattttccttatgaagaggactcaagacctcgatcacagtcttccaaagcagccattcctcccccagtgtacgaggaacaagacagaccgagatctccaaccggacctagcaactccttcctcgctaacatggggggcacggtggcgcacaagatcatgcagaagtacggcttccgggagggccagggtctggggaagcatgagcagggcctgagcactgccttgtcagtggagaagaccagcaagcgtggcggcaagatcatcgtgggcgacgccacagagaaaggtgtgtccccagggaagcgtgtgactagagggaaaggactggccccatccatatcagacatggccagtcttgatcctcatgtgtcagcagggggacaatg

SEQ ID NO: 58631 - DNA, 844 bp, Artificial Sequence
  derived and/or modified sequence
gcgccgccgagcgccctgaggactcagcgaagggtgggcgccgccgaggcctcctgccgctggcgggtttccgcggagtgccgcccggctccgctctgccgccggcgcggctcatgggcagagtcggccgggcgggccggagccaaaggacgaaacaaagtacagtcctcgccccagtcattgacctgaagcgaggtggctcctcagatgaccggcaaattgtggacactccaccgcatgtagcagctgggctgaaggatcctgttcccagtgggttttctgcaggggaagttctgattcccttagctgacgaatatgaccctatgtttcctaatgattatgagaaagtagtgaagcgccaaagagaggaacgacagagacagcgggagctggaaagacaaaaggaaatagaagaaagggaaaaaaggcgtaaagacagacatgaagcaagtgggtttgcaaggagaccagatccagattctgatgaagatgaagattatgagcgagagaggaggaaaagaagtatgggcggagctgccattgccccacccacttctctggtagagaaagacaaagagttaccccgagattttccttatgaagaggactcaagacctcgatcacagtcttccaaagcagccattcctcccccagtgtacgaggaacaagacagaccgagatctccaaccggacctagcaactccttcctcgctaacatggggggcacggtggcgcacaagatcatgcagaagtacggcttccgggagggccagggtctggggaagcatgagcagggcctgagcactgccttgtcagtggagaagaccagcaagcgtggcggcaa

SEQ ID NO: 58632 - DNA, 3192 bp, Artificial Sequence
  derived and/or modified sequence
gcaggcgcaggcgcaggcggggcgcaggcgcgggcgcgctctcccggcagcccgcgctccctgaccccgcgccgccgagcgccctgaggactcagcgaagggtgggcgccgccgaggcctcctgccgctggcgggtttccgcggagtgccgcccggctccgctctgccgccggcgcggctcatgggcagagtcggccgggcgggccggagccaaaggacgaaacaaagtacagtcctcgccccagtcattgacctgaagcgaggtggctcctcagatgaccggcaaattgtggacactccaccgcatgtagcagctgggctgaaggatcctgttcccagtgggttttctgcaggggaagttctgattcccttagctgacgaatatgaccctatgtttcctaatgattatgagaaagtagtgaagcgccaaagagaggaacgacagagacagcgggagctggaaagacaaaaggaaatagaagaaagggaaaaaaggcgtaaagacagacatgaagcaagtgggtttgcaaggagaccagatccagattctgatgaagatgaagattatgagcgagagaggaggaaaagaagtatgggcggagctgccattgccccacccacttctctggtagagaaagacaaagagttaccccgagattttccttatgaagaggactcaagacctcgatcacagtcttccaaagcagccattcctcccccagtgtacgaggaacaagacagaccgagatctccaaccggacctagcaactccttcctcgctaacatggggggcacggtggcgcacaagatcatgcagaagtacggcttccgggagggccagggtctggggaagcatgagcagggcctgagcactgccttgtcagtggagaagaccagcaagcgtggcggcaagatcatcgtgggcgacgccacagagaaagatgcatccaagaagtcagattcaaatccgctgactgaaatacttaagtgtcctactaaagtggtcttactaaggaacatggttggtgcgggagaggtggatgaagacttggaagttgaaaccaaggaagaatgtgaaaaatatggcaaagttggaaaatgtgtgatatttgaaattcctggtgcccctgatgatgaagcagtacggatatttttagaatttgagagagttgaatcagcaattaaagcggttgttgacttgaatgggaggtattttggtggacgggtggtaaaagcatgtttctacaatttggacaaattcagggtcttggatttggcagaacaagtttgattttaagaactagagcacgagtcatctccggtgatccttaaatgaactgcaggctgagaaaagaaggaaaaaggtcacagcctccatggctgttgcataccaagactcttggaaggacttctaagatatatgttgattgatcccttttttattttgtggttttttaatatagtataaaaatccttttaaaaaaacaacaatctgtgtgcctctctggttgtttctcttttttattattactcctgagttgatgacattttttgttagatttcatggtaattctcaagtgcttcaatgatgcagcatttcttgcactaaaaaaaaaaaaaaaaaaaaaactagaaagttttgggacatggggttatattaaattattctttgtttttctttttcttttaataaagcctgcaagttactaaattgtagtttcataaattctgtagtaaagtatcatcttggcagtgtgccaaaggtgaaaatgatgctttctctaacagagaaattcttagtgactccagtcgtagaaaaacgtctttacaacctgaataagattgaagaattgtgaacataccatggcctattggatgaatcatttgccgtaggctaaatcagactgtagggtttgtgatggatttatggagtatgtgggtatagaaatcatgaatctagcatttgttttcagagattcaagcatagtcttaagggtagatcagaaatgacaaatgaattcaaaacctagcaggtgcattgtaaatgtgtgcccagttatgttttggaaatggcagttccttggggtcatgtttctactggcaaaatttgcaatagtgttctattgtatgtaattttaaaatttataagattatccacgttggccaagtaaactgtactgccaatagaattctggaattgtgagaaattgtatcattgaagttcagtaggatgtgtggcttaaaaatttatcaggaccacaaaaaagaaaacaaaaatatttggtactgaggttcattgccagggcaggaggtatttccagaaaatactcatgcctgtgttctgttccttgctttcccaaatactgcatgtgactttcctaagcggcagctgaaagactcgagcccgtgctgtctcctttggttattatgacatgaaagtgtatcaagaactcagcatttctttgcatccatggacttggtttggagacataaggaatattctgaccctttttaaaaaaggattttctcatgtttttatttaacataaataaaagaataacattttatcttttgtggtattattttattgaataaaattgagttttatgataaaagtgcacctgttctgtaaagtaagttggggttaaggaatgtgaggtaaattacataattgaacattgtggaagacagaatcaaaagcagccctggaacttcagttatctatggaattaggcataccattcctcaagtggaaaccatgtttgtgcttacaagtaccggagtgtgcttgtttaattttagaaactaatggttccaacccacctttcatgcatgcatttattgttgttatgctttgtaaaacattgtttgcacctaaatgggtggcttttcctaacattctcatggtcagcaaccagagagttgcaaccaactcatactacttgatttccgttcgcatgaggacagcttggtgtgtgcctttctccccagtcttttatttttaaaataactgtgttaatcagttagtgctttatttataatgaatttctgatagtcgaataatttctaaatctcctgcaagttagtacttgagaaatttgaaattaattttcaatattaacatttaagctaatataaaaattttaaatttcaataaaaattaaaaattatgtaagctacaatgtaactggc

SEQ ID NO: 58633 - DNA, 792 bp, Artificial Sequence
  derived and/or modified sequence
aatggtaccaggagcctgggcctctgttgctgaaaggtcctggaccttttacctctaaaatttcatgatacttattttaacatgaaaagcctttattgaattgtgcattctttaatccccaccccttttgcctttcagcattaaactgaagaaaagatgtccctgtacgatgacctaggagtggagaccagtgactcaaaaacagaaggctggtccaaaaacttcaaacttctgcagtctcagcttcaggtgaagaaggcagctctcactcaggcaaagagccaaaggacgaaacaaagtacagtcctcgccccagtcattgacctgaagcgaggtggctcctcagatgaccggcaaattgtggacactccaccgcatgtagcagctgggctgaaggatcctgttcccagtgggttttctgcaggggaagttctgattcccttagctgacgaatatgaccctatgtttcctaatgattatgagaaagtagtgaagcgccaaagagaggaacgacagagacagcgggagctggaaagacaaaaggaaatagaagaaagggaaaaaaggcgtaaagacagacatgaagcaagtgggtttgcaaggagaccagatccagattctgatgaagatgaagattatgagcgagagaggaggaaaagaagtatgggcggagctgccattgccccacccacttctctggtagagaaagacaaagagttaccccgagattttccttatgaagaggactcaagacctcgatcacagtcttccaaagcagccattcctccccca

SEQ ID NO: 58634 - DNA, 805 bp, Artificial Sequence
  derived and/or modified sequence
gaggactcagcgaagggtgggcgccgccgaggcctcctgccgctggcgggtttccgcggagtgccgcccggctccgctctgccgccggcgcggctcatgggcagagtcggccgggcgggccggcattaaactgaagaaaagatgtccctgtacgatgacctaggagtggagaccagtgactcaaaaacagaaggctggtccaaaaacttcaaacttctgcagtctcagcttcaggtgaagaaggcagctctcactcaggcaaagagccaaaggacgaaacaaagtacagtcctcgccccagtcattgacctgaagcgaggtggctcctcagatgaccggcaaattgtggacactccaccgcatgtagcagctgggctgaaggatcctgttcccagtgggttttctgcaggggaagttctgattcccttagctgacgaatatgaccctatgtttcctaatgattatgagaaagtagtgaagcgccaaagagaggaacgacagagacagcgggagctggaaagacaaaaggaaatagaagaaagggaaaagcgtaaagacagacatgaagcaagtgggtttgcaaggagaccagatccagattctgatgaagatgaagattatgagcgagagaggaggaaaagaagtatgggcggagctgccattgccccacccacttctctggtagagaaagacaaagagttaccccgagattttccttatgaagaggactcaagacctcgatcacagtcttccaaagcagccattcctcccccagtgtacgaggaacaagacagaccgagatctc

SEQ ID NO: 58635 - DNA, 2755 bp, Artificial Sequence
  derived and/or modified sequence
caggcgcaggcgcaggcggggcgcaggcgcgggcgcgctctcccggcagcccgcgctccctgaccccgcgccgccgagcgccctgaggactcagcgaagggtgggcgccgccgaggcctcctgccgctggcgggtttccgcggagtgccgcccggctccgctctgccgccggcgcggctcatgggcagagtcggccgggcgggccggcattaaactgaagaaaagatgtccctgtacgatgacctaggagtggagaccagtgactcaaaaacagaaggctggtccaaaaacttcaaacttctgcagtctcagcttcaggtgaagaaggcagctctcactcaggcaaagagccaaaggacgaaacaaagtacagtcctcgccccagtcattgacctgaagcgaggtggctcctcagatgaccggcaaattgtggacactccaccgcatgtagcagctgggctgaaggatcctgttcccagtgggttttctgcaggggaagttctgattcccttagctgacgaatatgaccctatgtttcctaatgattatgagaaagtagtgaagcgccaaagagaggaacgacagagacagcgggagctggaaagacaaaaggaaatagaagaaagggaaaaaaggcgtaaagacagacatgaagcaagtgggtttgcaaggagaccagatccagattctgatgaagatgaagattatgagcgagagaggaggaaaagaagtatgggcggagctgccattgccccacccacttctctggtagagaaagacaaagagttaccccgagattttccttatgaagaggactcaagacctcgatcacagtcttccaaagcagccattcctcccccagtgtacgaggaacaagacagaccgagatctccaaccggacctagcaactccttcctcgctaacatggggggcacggtggcgcacaagatcatgcagaagtacggcttccgggagggccagggtctggggaagcatgagcagggcctgagcactgccttgtcagtggagaagaccagcaagcgtggcggcaagatcatcgtgggcgacgccacagagaaagatgcatccaagaagtcagattcaaatccgctgactgaaatacttaagtgtcctactaaagtggtcttactaaggaacatggttggtgcgggagaggtggatgaagacttggaagttgaaaccaaggaagaatgtgaaaaatatggcaaagttggaaaatgtgtgatatttgaaattcctggtgcccctgatgatgaagcagtacggatatttttagaatttgagagagttgaatcagcaattaaagcggttgttgacttgaatgggaggtattttggtggacgggtggtaaaagcatgtttctacaatttggacaaattcagggtcttggatttggcagaacaagtttgattttaagaactagagcacgagtcatctccggtgatccttaaatgaactgcaggctgagaaaagaaggaaaaaggtcacagcctccatggctgttgcataccaagactcttggaaggacttctaagatatatgttgattgatcccttttttattttgtggttttttaatatagtataaaaatccttttaaaaaaacaacaatctgtgtgcctctctggttgtttctcttttttattattactcctgagttgatgacattttttgttagatttcatggtaattctcaagtgcttcaatgatgcagcatttcttgcactaaaaaaaaaaaaaaaaaaaaaactagaaagttttgggacatggggttatattaaattattctttgtttttctttttcttttaataaagcctgcaagttactaaattgtagtttcataaattctgtagtaaagtatcatcttggcagtgtgccaaaggtgaaaatgatgctttctctaacagagaaattcttagtgactccagtcgtagaaaaacgtctttacaacctgaataagattgaagaattgtgaacataccatggcctattggatgaatcatttgccgtaggctaaatcagactgtagggtttgtgatggatttatggagtatgtgggtatagaaatcatgaatctagcatttgttttcagagattcaagcatagtcttaagggtagatcagaaatgacaaatgaattcaaaacctagcaggtgcattgtaaatgtgtgcccagttatgttttggaaatggcagttccttggggtcatgtttctactggcaaaatttgcaatagtgttctattgtatgtaattttaaaatttataagattatccacgttggccaagtaaactgtactgccaatagaattctggaattgtgagaaattgtatcattgaagttcagtaggatgtgtggcttaaaaatttatcaggaccacaaaaaagaaaacaaaaatatttggtactgaggttcattgccagggcaggaggtatttccagaaaatactcatgcctgtgttctgttccttgctttcccaaatactgcatgtgactttcctaagcggcagctgaaagactcgagcccgtgctgtctcctttggttattatgacatgaaagtgtatcaagaactcagcatttctttgcatccatggacttggtttggagacataaggaatattctgaccctttttaaaaaaggattttctcatgtttttatttaacataaataaaagaataacattttatcttttgtggtattattttattgaataaaattgagttttatgataaaa

SEQ ID NO: 58636 - DNA, 3751 bp, Artificial Sequence
  derived and/or modified sequence
agtccccgcggcgggcgctggtctctccacgcggctgcggcccggtaccctccgcccgccgccgcctctggtgaccctggccctgaccttctccctcttcccttcctcctcctcctcctcatgtctgcctcgggctgtttggtgctgaagagcgtttcttctccgtctcgtgcaccgcatcctgacgaaattgtctggtcaccagaaccgagtagcccgtagcgtgtcccccctggccctgcacggttgcccctctctggggctcggagccggttcctcccggggtctcagaactgggagtgcagacgttggcgtttctcagactccggagctgcccgggacaggaatgcagccctaaccccggcgtcgcctcggctcgtgcagtttgagcggtgtttcagcgctcacgtccgaccccaggcagtctttgagcttcgcctcttgccccgagaatgtgtaatgatcggagaatgcaggtggaatgaggttctgcccctgcttgcaggagtttggtttctgggaaagcaggcgtgaaaacccaggcccgggttgatttgagaaacgcaagtggggtctggaaggacctctcttgagagaggaggtcatgcttatgttgagtcttgaagcattaaactgaagaaaagatgtccctgtacgatgacctaggagtggagaccagtgactcaaaaacagaaggctggtccaaaaacttcaaacttctgcagtctcagcttcaggtgaagaaggcagctctcactcaggcaaagagccaaaggacgaaacaaagtacagtcctcgccccagtcattgacctgaagcgaggtggctcctcagatgaccggcaaattgtggacactccaccgcatgtagcagctgggctgaaggatcctgttcccagtgggttttctgcaggggaagttctgattcccttagctgacgaatatgaccctatgtttcctaatgattatgagaaagtagtgaagcgccaaagagaggaacgacagagacagcgggagctggaaagacaaaaggaaatagaagaaagggaaaaaaggcgtaaagacagacatgaagcaagtgggtttgcaaggagaccagatccagattctgatgaagatgaagattatgagcgagagaggaggaaaagaagtatgggcggagctgccattgccccacccacttctctggtagagaaagacaaagagttaccccgagattttccttatgaagaggactcaagacctcgatcacagtcttccaaagcagccattcctcccccagtgtacgaggaacaagacagaccgagatctccaaccggacctagcaactccttcctcgctaacatggggggcacggtggcgcacaagatcatgcagaagtacggcttccgggagggccagggtctggggaagcatgagcagggcctgagcactgccttgtcagtggagaagaccagcaagcgtggcggcaagatcatcgtgggcgacgccacagagaaagatgcatccaagaagtcagattcaaatccgctgactgaaatacttaagtgtcctactaaagtggtcttactaaggaacatggttggtgcgggagaggtggatgaagacttggaagttgaaaccaaggaagaatgtgaaaaatatggcaaagttggaaaatgtgtgatatttgaaattcctggtgcccctgatgatgaagcagtacggatatttttagaatttgagagagttgaatcagcaattaaagcggttgttgacttgaatgggaggtattttggtggacgggtggtaaaagcatgtttctacaatttggacaaattcagggtcttggatttggcagaacaagtttgattttaagaactagagcacgagtcatctccggtgatccttaaatgaactgcaggctgagaaaagaaggaaaaaggtcacagcctccatggctgttgcataccaagactcttggaaggacttctaagatatatgttgattgatcccttttttattttgtggttttttaatatagtataaaaatccttttaaaaaaacaacaatctgtgtgcctctctggttgtttctcttttttattattactcctgagttgatgacattttttgttagatttcatggtaattctcaagtgcttcaatgatgcagcatttcttgcactaaaaaaaaaaaaaaaaaaaaaactagaaagttttgggacatggggttatattaaattattctttgtttttctttttcttttaataaagcctgcaagttactaaattgtagtttcataaattctgtagtaaagtatcatcttggcagtgtgccaaaggtgaaaatgatgctttctctaacagagaaattcttagtgactccagtcgtagaaaaacgtctttacaacctgaataagattgaagaattgtgaacataccatggcctattggatgaatcatttgccgtaggctaaatcagactgtagggtttgtgatggatttatggagtatgtgggtatagaaatcatgaatctagcatttgttttcagagattcaagcatagtcttaagggtagatcagaaatgacaaatgaattcaaaacctagcaggtgcattgtaaatgtgtgcccagttatgttttggaaatggcagttccttggggtcatgtttctactggcaaaatttgcaatagtgttctattgtatgtaattttaaaatttataagattatccacgttggccaagtaaactgtactgccaatagaattctggaattgtgagaaattgtatcattgaagttcagtaggatgtgtggcttaaaaatttatcaggaccacaaaaaagaaaacaaaaatatttggtactgaggttcattgccagggcaggaggtatttccagaaaatactcatgcctgtgttctgttccttgctttcccaaatactgcatgtgactttcctaagcggcagctgaaagactcgagcccgtgctgtctcctttggttattatgacatgaaagtgtatcaagaactcagcatttctttgcatccatggacttggtttggagacataaggaatattctgaccctttttaaaaaaggattttctcatgtttttatttaacataaataaaagaataacattttatcttttgtggtattattttattgaataaaattgagttttatgataaaagtgcacctgttctgtaaagtaagttggggttaaggaatgtgaggtaaattacataattgaacattgtggaagacagaatcaaaagcagccctggaacttcagttatctatggaattaggcataccattcctcaagtggaaaccatgtttgtgcttacaagtaccggagtgtgcttgtttaattttagaaactaatggttccaacccacctttcatgcatgcatttattgttgttatgctttgtaaaacattgtttgcacctaaatgggtggcttttcctaacattctcatggtcagcaaccagagagttgcaaccaactcatactacttgatttccgttcgcatgaggacagcttggtgtgtgcctttctccccagtcttttatttttaaaataactgtgttaatcagttagtgctttatttataatgaatttctgatagtcgaataatttctaaatctcctgcaagttagtacttgagaaatttgaaattaattttcaatattaacatttaagctaatataaaaattttaaatttcaataaaaattaaaaattatgtaagctacaatgtaactggc

SEQ ID NO: 58637 - DNA, 732 bp, Artificial Sequence
  derived and/or modified sequence
atgggcagagtgggtagagccggtagatcacagaggacaaagcagtccacagtgctggcccccgtcatcgacctgaaacgtggaggcagcagtgacgaccgccaaatcgtagatacacccccacacgtcgccgccggacttaaggaccctgtgccttctggattctccgccggcgaggtcctcataccacttgctgacgaatacgatccgatgttccctaacgattatgagaaagtcgttaaacggcagagagaggagaggcaaaggcagcgcgaactggaacgacaaaaggaaatcgaggagagggagaaacggagaaaagacaggcacgaagcgtctggtttcgctcgcaggcccgaccctgattcggacgaggatgaagactacgagcgggagcgcaggaagagatccatggggggtgcggcaatcgcccctcccacgagcctcgtcgagaaagataaggagctgcctcgtgattttccctacgaggaagattcacggcctaggagccagagcagtaaggccgccatcccaccgcctgtatatgaagaacaggatcgcccgagatcacccaccggcccctccaacagtttccttgcaaatatgggcggcaccgttgcacacaagatcatgcagaagtacggttttagggaaggacagggactgggcaaacacgagcaagggctgagtacagcgctcagtgtcgagaagacatctaaacggggagggtag

SEQ ID NO: 58638 - DNA, 1206 bp, Artificial Sequence
  derived and/or modified sequence
atgtcactctacgacgacttaggcgtggagacttcagattctaaaacggaaggttggagcaagaacttcaaattgcttcagtcacagcttcaagtgaagaaggccgccttaactcaggccaagtctcaaagaactaagcagagcacagtcctggctccggttattgacctgaagagaggcggctcttctgatgaccggcagattgtagacacgccccctcatgttgccgccggactgaaagacccggtccctagcggattcagcgccggcgaggtgctaatcccacttgccgacgaatacgacccaatgtttcctaatgactatgagaaggttgtcaaacgccagcgcgaagaaagacagagacagagggaattggagcggcagaaggagatcgaagaaagagagaagaggagaaaagatcgtcacgaagcatcgggatttgctcgtaggcctgacccagacagtgacgaagatgaggattatgaacgggagcgtagaaagaggtccatggggggagccgccattgcccctccaacaagcttggttgaaaaggataaagaactgcctcgagattttccatacgaggaagatagcagaccgcggtcacagtccagcaaggctgccattccaccccctgtctacgaggaacaggatcggccgaggagcccaaccgggccgtcaaactctttccttgctaatatgggcggcacagtggcacacaagataatgcagaaatacgggttcagagaagggcaggggttgggcaaacacgagcaaggcctaagtacagccctctccgtggaaaaaacgagcaaaagggggggaaaaattattgtgggtgatgcgactgaaaaggacgcatccaaaaaatccgattctaatcctctgaccgagattctcaagtgtcctaccaaagtagtgctacttcgtaacatggtcggcgcgggggaggtggatgaagacctggaggttgagactaaagaggaatgtgaaaagtatggcaaggtgggcaaatgtgtgattttcgaaattcccggagcccccgacgatgaggccgtgcgtatattccttgagttcgagcgagtcgaatccgccattaaagcagttgtggacctgaatggtcggtatttcggtggacgggttgtcaaggcctgtttctataacctggataagtttagggtgttggacctggccgagcaggtgtag

SEQ ID NO: 58639 - DNA, 639 bp, Artificial Sequence
  derived and/or modified sequence
atgagtctttatgatgatctgggcgtggaaacatcggattccaaaactgaaggttggagcaagaacttcaagctgcttcagtcccaactgcaggtaaagaaggccgccctgacgcaggccaaatcccagagaaccaagcagtcaaccgtgctagccccagtcattgatttaaagcggggcgggtcctccgatgatcggcagatcgttgatacacccccgcacgtggccgcgggcctcaaagacccagtgccttccggattcagtgccggcgaagtcttgatccctctggccgatgagtatgaccctatgtttcccaacgattacgagaaagtggtgaagcgccagcgcgaagaaaggcagcgacagagggaactcgaaagacaaaaagaaatagaagagcgggagaaaaggagaaaagacaggcacgaagcatcagggttcgcccgtcggccagaccctgactccgacgaagacgaagattatgagagggagaggcggaaacggagcatgggcggggctgcaattgccccacctactagcctagtggagaaagataaagagctgccaagagactttccttatgaggaggatagcagaccccggtcccagagttcaaaggcagcaatcccacctccttag

SEQ ID NO: 58640 - DNA, 666 bp, Artificial Sequence
  derived and/or modified sequence
atgagcctttacgatgacctcggagtggaaaccagcgactctaaaacagaaggatggagtaagaacttcaaactgttgcagtctcagctccaggtgaagaaggcagcattaacacaggcgaaatctcagaggactaagcagagcactgtccttgcgcccgtcatcgatctgaagaggggggggagctctgatgataggcagatagttgacaccccgccacatgtggccgctggcctgaaagacccagtgccatccgggttttcagctggagaggtgctcataccactcgccgatgaatatgatcccatgttccccaacgattacgagaaagtggtgaagcggcagcgggaggaaaggcagaggcagcgcgagctggaaaggcaaaaagagatcgaagaacgggagaagcgcaaggaccgccatgaggcatctgggtttgcccggcggccggatcctgattctgacgaggatgaagactacgagagggaacgcaggaaaaggtctatgggtggagccgccattgccccccctacgtctctcgtggagaaggataaggaattgcctcgtgactttccttacgaagaagatagcaggccaaggagccaatctagcaaagcggccatccccccacccgtatatgaagaacaggatcgcccccgctcttag

SEQ ID NO: 58641 - DNA, 732 bp, Artificial Sequence
  derived and/or modified sequence
atggggcgtgttggtagagctggccgcagtcaacgaacaaagcagtccacagttctggccccagtgatcgacttaaaacgcggaggatccagcgatgaccggcagattgtggatactccgccccacgtggctgccggtctcaaagatccagtccccagcgggttcagtgccggcgaggtcctgataccactagccgatgagtacgacccaatgttccctaatgactacgagaaagttgttaagcggcagagagaggagcggcaaagacagcgcgaactggagcgacagaaggagattgaagagcgagagaaaagacggaaagaccggcatgaagcttccgggttcgccaggaggcccgatccagattccgatgaggacgaggactatgaacgggagaggcgtaagagaagtatggggggtgccgcgatagcaccccctaccagcttggtggaaaaagataaggaactgccgcgcgatttcccgtatgaagaagattccaggcctaggagccagtccagcaaggccgccattccaccccccgtgtatgaggagcaagacagacctcgatcccccactgggccatccaactcttttcttgccaacatgggagggaccgtggctcacaagatcatgcagaagtacgggtttcgagagggacaaggtctgggtaaacatgagcaggggctgagtacagccctctctgtcgaaaaaacttccaagcggggaggctag

SEQ ID NO: 58642 - DNA, 1206 bp, Artificial Sequence
  derived and/or modified sequence
atgagcctgtacgatgaccttggcgtcgaaacgtcagacagcaaaacagagggctggtccaaaaattttaaactgctccagtcccaactgcaggttaaaaaggcagcactgactcaagcaaaatctcagcgaaccaagcagtctaccgtgcttgctccagtcattgaccttaaaagggggggcagctccgatgacagacagattgttgacactcctccgcacgtggcggctggcctgaaggaccctgtacctagtggatttagcgctggcgaggtcctgattccactcgccgacgagtatgaccccatgtttcccaatgactacgagaaggtggtaaagagacagagagaagagagacagagacagcgggagctggagagacagaaggagattgaggaaagagagaagcgccgaaaggacaggcacgaagcttccggcttcgctcgcaggccagacccagacagtgacgaggacgaggattacgagcgcgagagacgcaagcggagcatgggcggcgcggcaattgccccgcctactagtctggtggagaaggataaagaactacctcgggactttccatatgaagaagatagtagaccgcggagtcagagctccaaggccgctattcctcctccagtgtacgaagagcaggaccggccccggtcaccgaccggccccagcaacagctttctcgccaatatgggcggaacggtggctcataaaattatgcaaaaatatggattccgggaagggcagggactgggaaagcatgagcaggggctgtcaacggccctctccgttgaaaagacatccaaaagggggggaaagatcatcgttggagacgcgacagagaaggatgcatccaagaagagcgactccaacccactgaccgaaatcttaaagtgtcccactaaagttgtgctgctgcgcaacatggttggagccggtgaagtggacgaggacctggaagttgaaactaaagaagagtgtgaaaaatacggcaaggtgggcaagtgtgtgattttcgaaattccgggggctcctgatgatgaagcagtgcgcattttcctggagtttgagagagtggaatccgctattaaggctgtagtggatttaaacggccgctacttcggaggacgtgttgtcaaagcctgcttttacaacctcgataagtttagagtgctggatttggctgagcaggtatag

SEQ ID NO: 58643 - DNA, 678 bp, Artificial Sequence
  derived and/or modified sequence
taaccactggccgatgaatatgatcctatgtttccaaatgactatgaaaaggtggtgaagaggcagcgcgaggagcgtcaaagacagagagagctcgaaaggcagaaagagattgaagagcgcgagaagcgtcgaaaagataggcacgaagccagcggcttcgcccgcagaccagatcctgattcagacgaggatgaagactacgagcgggagcgtcggaagcgatctatgggcggggcagccatcgcaccccccacctctttggtggaaaaggacaaggaactgccccgtgattttccgtacgaggaagatagccgtcctaggagccagtctagtaaggcggccatacccccccctgtctatgaagaacaggatagaccacggagtccaacaggccctagtaattcttttttggccaacatggggggcaccgtggcccacaagataatgcaaaagtacggattccgcgaagggcaggggttaggaaaacacgagcagggtctgtcaacggccctcagtgttgaaaagacttcgaagcgcggcggaaagattatagtgggtgatgccaccgagaaaggcgtctcaccgggcaagcgtgtcacccgtggcaagggtctggcacccagcatcagcgatatggcttctcttgacccccacgtgtccgcaggcggacaatag

SEQ ID NO: 58644 - DNA, 732 bp, Artificial Sequence
  derived and/or modified sequence
atgggccgggtgggccgggccggccgcagccagaggaccaagcagagcacagtgctggcccctgtgattgacctgaagaggggcggcagcagtgatgaccggcagatcgtggacaccccaccccacgtggccgccggcctgaaggaccctgtgcccagcggcttctctgctggggaggtgctgatccccctggctgatgaatatgaccccatgttccccaatgactatgagaaggtggtgaagaggcagcgggaggagcggcagaggcagcgggagctggagcggcagaaggagattgaggagcgggagaagaggaggaaggacagacatgaggccagcggctttgcccggcggccagaccctgacagtgatgaagatgaagattatgagcgggagaggaggaagaggtccatgggcggggccgccatcgccccacccaccagcctggtggagaaggacaaggagctgccccgggacttcccctatgaggaggacagccggcccaggagccagagcagcaaggccgccatccccccacctgtgtatgaggagcaggaccggcccaggagccccaccggccccagcaacagcttcctggccaacatgggcggcaccgtggcccacaagatcatgcagaagtatggcttccgggagggccagggcctgggcaagcatgagcagggcctgagcacagccctgtctgtggagaagaccagcaagaggggcggctag

SEQ ID NO: 58645 - DNA, 1206 bp, Artificial Sequence
  derived and/or modified sequence
atgagcctgtatgatgacctgggcgtggagaccagtgacagcaagacagagggctggagcaagaacttcaagctgctgcagagccagctgcaggtgaagaaggccgccctgacccaggccaagagccagaggaccaagcagagcacagtgctggcccctgtgattgacctgaagaggggcggcagcagtgatgaccggcagatcgtggacaccccaccccacgtggccgccggcctgaaggaccctgtgcccagcggcttctctgctggggaggtgctgatccccctggctgatgaatatgaccccatgttccccaatgactatgagaaggtggtgaagaggcagcgggaggagcggcagaggcagcgggagctggagcggcagaaggagattgaggagcgggagaagaggaggaaggacagacatgaggccagcggctttgcccggcggccagaccctgacagtgatgaagatgaagattatgagcgggagaggaggaagaggtccatgggcggggccgccatcgccccacccaccagcctggtggagaaggacaaggagctgccccgggacttcccctatgaggaggacagccggcccaggagccagagcagcaaggccgccatccccccacctgtgtatgaggagcaggaccggcccaggagccccaccggccccagcaacagcttcctggccaacatgggcggcaccgtggcccacaagatcatgcagaagtatggcttccgggagggccagggcctgggcaagcatgagcagggcctgagcacagccctgtctgtggagaagaccagcaagaggggcggcaagatcatcgtgggagatgccacagagaaggatgccagcaagaagagtgacagcaaccccctgacagagatcctgaagtgccccaccaaggtggtgctgctgaggaacatggtgggcgctggggaggtggatgaggacctggaggtggagaccaaggaggagtgtgagaagtatggcaaggtgggcaaatgtgtgatctttgagatccctggggccccagatgatgaggccgtgcgcatcttcctggagtttgagcgggtggagagcgccatcaaggctgtggtggacctgaatggccgctactttggaggccgggtggtgaaggcctgcttctacaacctggacaagttccgggtgctggacctggccgagcaggtgtag

SEQ ID NO: 58646 - DNA, 639 bp, Artificial Sequence
  derived and/or modified sequence
atgagcctgtatgatgacctgggcgtggagaccagtgacagcaagacagagggctggagcaagaacttcaagctgctgcagagccagctgcaggtgaagaaggccgccctgacccaggccaagagccagaggaccaagcagagcacagtgctggcccctgtgattgacctgaagaggggcggcagcagtgatgaccggcagatcgtggacaccccaccccacgtggccgccggcctgaaggaccctgtgcccagcggcttctctgctggggaggtgctgatccccctggctgatgaatatgaccccatgttccccaatgactatgagaaggtggtgaagaggcagcgggaggagcggcagaggcagcgggagctggagcggcagaaggagattgaggagcgggagaagaggaggaaggacagacatgaggccagcggctttgcccggcggccagaccctgacagtgatgaagatgaagattatgagcgggagaggaggaagaggtccatgggcggggccgccatcgccccacccaccagcctggtggagaaggacaaggagctgccccgggacttcccctatgaggaggacagccggcccaggagccagagcagcaaggccgccatccccccaccctag

SEQ ID NO: 58647 - DNA, 666 bp, Artificial Sequence
  derived and/or modified sequence
atgagcctgtatgatgacctgggcgtggagaccagtgacagcaagacagagggctggagcaagaacttcaagctgctgcagagccagctgcaggtgaagaaggccgccctgacccaggccaagagccagaggaccaagcagagcacagtgctggcccctgtgattgacctgaagaggggcggcagcagtgatgaccggcagatcgtggacaccccaccccacgtggccgccggcctgaaggaccctgtgcccagcggcttctctgctggggaggtgctgatccccctggctgatgaatatgaccccatgttccccaatgactatgagaaggtggtgaagaggcagcgggaggagcggcagaggcagcgggagctggagcggcagaaggagattgaggagcgggagaagaggaaggacagacatgaggccagcggctttgcccggcggccagaccctgacagtgatgaagatgaggactatgaaagagagaggaggaagaggtccatgggcggggccgccatcgccccacccaccagcctggtggagaaggacaaggagctgccccgggacttcccctatgaggaggacagccggcccaggagccagagcagcaaggccgccatccccccacctgtgtatgaggagcaggaccggcccaggagctag

SEQ ID NO: 58648 - DNA, 678 bp, Artificial Sequence
  derived and/or modified sequence
tgacccctggctgatgaatatgaccccatgttccccaatgactatgagaaggtggtgaagaggcagcgggaggagcggcagaggcagcgggagctggagcggcagaaggagattgaggagcgggagaagaggaggaaggacagacatgaggccagcggctttgcccggcggccagaccctgacagtgatgaagatgaggactatgaaagagagaggaggaagaggtccatgggcggggccgccatcgccccacccaccagcctggtggagaaggacaaggagctgccccgggacttcccctatgaggaggacagccggcccaggagccagagcagcaaggccgccatccccccacctgtgtatgaggagcaggaccggcccaggagccccaccggccccagcaacagcttcctggccaacatgggcggcaccgtggcccacaagatcatgcagaagtatggcttccgggagggccagggcctgggcaagcatgagcagggcctgagcacagccctgtctgtggagaagaccagcaagagaggaggcaagatcatcgtgggagatgccacagagaagggcgtgtcccctgggaagagggtgacccggggcaagggcctggcccccagcatcagtgacatggccagcctggacccccacgtgtctgctgggggccagtag

SEQ ID NO: 58649 - DNA, 732 bp, Artificial Sequence
  derived and/or modified sequence
atgggccgggtgggccgggccggccggagccagcggaccaagcagtccacagttttggcccccgtcattgaccttaagcggggcggttcctccgacgacaggcaaatagtggacactccccctcacgtcgcagctggccttaaagacccggtccccagcggattctccgccggcgaagtgctgataccacttgctgacgagtatgaccctatgttccctaacgactatgaaaaggtggtgaagcgccagagggaggaacggcagcgccagagagaacttgaaaggcagaaagaaatcgaggaaagggagaaaaggaggaaagaccgacacgaagcctcaggctttgcacgcaggcccgacccagactccgacgaagacgaggattatgagagagaacggaggaagagatcgatgggcggtgcagcaatcgctcctccgacatctctggtggagaaggacaaagagcttccaagggacttcccatacgaggaggattctagaccacgctctcagagtagcaaggccgctattcctcccccggtttatgaggaacaagataggcctaggtccccgacggggcctagcaacagcttcctcgcaaacatgggaggaacagtggctcataagatcatgcagaagtacggcttccgcgaagggcagggtctgggaaaacacgagcagggcctgtcgacagcgcttagcgtggaaaagacttctaagcggggaggctag

SEQ ID NO: 58650 - DNA, 1206 bp, Artificial Sequence
  derived and/or modified sequence
atgagcctgtacgacgacctgggcgtggagaccagcgacagcaagacggagggatggagtaagaactttaaactgcttcagtcccagcttcaggtgaagaaagctgctttgactcaagccaaaagccagaggaccaagcaaagtacagttctggcgcctgttattgacctaaagcgggggggctccagtgacgacaggcagattgttgataccccacctcacgtcgcagctggccttaaggacccggtcccctcaggcttctccgcgggagaagttctgatacctctggccgacgagtacgatcccatgttccctaacgactatgagaaagtagtcaaaaggcagcgggaagagagacagcgccagagagaattagagaggcagaaggagatcgaggagcgggaaaaaaggcggaaggatcggcatgaggcttccggctttgctagaaggccggatcccgactcagacgaagacgaggattacgagagggagcgcaggaagcgctcaatgggaggggccgcaattgcacctccaacatccctggttgaaaaggataaggaactcccaagggactttccgtatgaagaggactccagacctcggagccaaagttcgaaagctgccatccctcctccagtctatgaggagcaggaccgcccacgctccccaactggaccaagcaattcgtttctagctaacatgggtggcactgtggcacacaaaattatgcaaaagtacggattcagagagggccaggggctcgggaaacacgaacaaggactgagtacagccttatcagttgaaaagaccagcaaaagaggcgggaaaattattgttggcgacgcgacagaaaaggatgcgtccaaaaagtcagactccaatcccttaacagagatcctcaaatgccctactaaagtggttcttctgagaaatatggtgggcgcaggggaggtggatgaagacctcgaggtggagaccaaagaggagtgtgagaaatatggcaaggttgggaagtgcgtgatttttgagataccgggcgcccccgacgatgaggccgtgagaatcttcttggagttcgagagagtagaatctgccattaaggccgtcgtggatctcaacgggagatacttcggagggcgagtggtgaaagcttgtttctataacctggacaaattccgcgtcctagacttggccgagcaggtctag

SEQ ID NO: 58651 - DNA, 639 bp, Artificial Sequence
  derived and/or modified sequence
atgagcctgtacgacgacctgggcgtggagaccagcgacagcaagacagaaggttggtccaagaactttaaactgctgcagagccagctccaggtgaagaaagccgcactaacacaagcaaagagccagagaacaaaacagtctaccgttctggccccagttatcgatctaaagcggggcggttcaagtgatgatagacagatagttgatactccacctcacgtcgctgctggtctcaaagacccagtgccctccggtttctccgccggggaggtgttgatccctttggcagacgagtacgaccctatgttcccaaatgactatgaaaaggtcgtgaagagacagagagaagagcgtcaacggcagcgggaactcgagcggcagaaagagatagaggagagggaaaaacggaggaaagacagacatgaagcttcaggatttgcacgtcggcccgatcccgactcagacgaagatgaggactacgaaagagagagacggaagcgctcgatgggaggagcggccattgctcctcctacatcattagttgaaaaggataaggagctgcccagagatttcccgtatgaggaagactcccgcccacggagtcagtcatctaaggccgctatcccaccaccctag

SEQ ID NO: 58652 - DNA, 666 bp, Artificial Sequence
  derived and/or modified sequence
atgagcctgtacgacgacctgggcgtggagaccagcgacagcaagacagagggctggtctaagaactttaaactgctccaatcccaactccaggtgaagaaggccgcgctcacacaagctaagtcccaaaggactaagcagagtacagtgctagcacccgtgatagacctcaagaggggggggtcaagtgatgacaggcagattgtggacacaccaccacatgttgccgctggtcttaaggatcccgttccctccggattttctgcaggggaggttctgatccctcttgccgacgagtatgaccccatgttcccaaacgattacgagaaagttgtcaagcggcagagagaggaacggcagaggcagcgcgagcttgagcggcagaaagaaattgaagagcgagagaaaaggaaagatcgtcacgaagcttctggcttcgcccgccgcccagacccagattccgacgaggatgaagactacgagcgggagcgtagaaagagatcaatgggcggagccgcaatcgcccctcctacttcgctcgtggagaaggacaaagaacttcctagagattttccgtatgaagaggactccaggccacgatcacagtccagcaaagccgccatcccaccaccagtttacgaggaacaggatcgtcctcgctcctag

SEQ ID NO: 58653 - DNA, 732 bp, Artificial Sequence
  derived and/or modified sequence
atgggccgggtgggccgggccggccggagccagcggaccaagcagtccacggttttagctcctgtaatagaccttaaaagaggaggaagtagtgacgatagacagatcgttgatactcctccacatgtggcagcaggacttaaggaccccgtgccctctggcttttcggcaggagaggttctcatacctttggcagatgaatacgaccctatgttcccaaatgattatgaaaaggtggtcaagaggcagcgtgaagagcggcaaagacagcgagagctggagcggcaaaaggaaattgaggagagggaaaaacggcggaaggatcgccacgaagcctctgggttcgcccggcgacctgatccagactcagatgaggacgaagactacgaaagggagcgccgtaagcgcagcatgggtggtgccgctatcgcccccccaacttcgctagtcgagaaggataaggaactcccccgggatttcccatatgaagaggactcccggcctagaagtcagagcagtaaagccgcgatacctccgccagtctacgaggagcaggatagacccagatcccccactgggccttccaacagctttctcgcaaacatgggaggtacagtcgcacataaaatcatgcagaagtacggctttcgagaaggccagggacttggaaagcacgagcaggggctgtcaacagcgctgtcagtcgaaaagactagcaagcggggtggctag

SEQ ID NO: 58654 - DNA, 1206 bp, Artificial Sequence
  derived and/or modified sequence
atgagcctgtacgacgacctgggcgtggagaccagcgacagcaagacagagggatggtccaagaacttcaaacttttacaaagccagctccaagtgaagaaagcagccttgactcaagccaaatcacagcgaaccaagcagtctaccgtgcttgcgccggttatcgacctgaaaaggggaggctcctctgatgatcgacaaatcgtggacacacccccccacgtagctgctggcctgaaggacccagtgccatcaggattctccgctggcgaagttctgatccccctggctgacgaatacgacccaatgtttcccaacgactatgagaaagtggtcaagagacagagagaggaaagacaacggcagcgcgagctggaaagacaaaaggaaattgaagagcgcgagaaaaggcggaaggatcggcacgaggcttctggatttgcaaggaggccagatcccgacagtgacgaagacgaggattacgagcgggagaggcggaaacgaagcatgggaggggctgccattgccccccctacttctctcgtagagaaagacaaggagctgcccagagactttccctacgaagaggattctaggcctagatctcagagttccaaagcggccatcccacccccggtgtatgaagaacaagatcgcccccgatctccaaccggtccttccaacagctttctggccaatatgggcggtaccgtagctcacaagattatgcagaagtacggattccgcgaggggcagggactcggcaagcatgaacaaggactgagtacagccctatctgtggagaaaaccagcaagagaggcggtaaaatcatagtcggcgatgctacggaaaaagatgctagcaaaaaatcggactcaaatccccttacagagattctgaaatgccccacaaaggtggttcttctgcggaacatggtgggggccggagaagtggatgaggacctcgaagtagaaaccaaggaagagtgtgagaaatatggaaaagtggggaagtgtgtgatcttcgaaatacccggcgccccagacgacgaagccgtacgcatcttcttagagtttgaacgcgtcgagtccgctatcaaggctgttgttgacctgaatggtagatattttggaggcagagtggttaaagcatgtttttataatctagacaaattccgagtgttagatctcgctgagcaagtatag

SEQ ID NO: 58655 - DNA, 678 bp, Artificial Sequence
  derived and/or modified sequence
tgacccctggccgacgagtacgaccccatgttccccaacgactacgagaaggtggtgaaaagacagagagaggagagacagcggcaacgagagctcgagcggcaaaaagaaatagaggagcgcgaaaaaagacggaaagaccgacatgaggcaagtggctttgctagacgccctgaccctgactctgacgaagacgaagactacgaaagggagcggcggaagcggtctatgggcggggccgcaattgcccctccgaccagtcttgtggaaaaagacaaggagctgccccgtgatttcccctacgaagaggacagtcgcccaagaagccaaagctcaaaggctgccatccccccccccgtctacgaggaacaggataggccacggagccccactgggccaagcaattcatttctggctaatatgggagggactgtcgcccataagatcatgcagaagtacggattcagggagggccagggactgggcaagcacgagcaggggctgagtacagccctttccgttgaaaaaacatctaaaaggggcggtaagattattgttggggacgccactgaaaaaggggtttcacccggaaagcgggtgaccagaggaaaaggtctcgctccctctatttcagacatggcatcactcgatccacacgtgtctgcgggtggacagtag

SEQ ID NO: 58656 - DNA, 732 bp, Artificial Sequence
  derived and/or modified sequence
atgggaagggtggggagggccggtcgtagtcagcgaactaagcagtcaaccgttctggcgcctgtaatagacctgaagagaggaggctcctcagatgatcgacaaatcgttgacaccccaccccacgtggccgcaggcctgaaggacccagtccccagcgggttttctgcaggcgaggtcctcatccccttagccgatgagtatgatccaatgtttcccaacgattacgagaaggtcgtgaaaagacagcgggaggaacggcaacgccaaagagaactggagcggcagaaagaaattgaggagcgggaaaaaaggaggaaggaccgccatgaagcctcaggattcgctcgtagaccagaccccgactctgatgaagatgaggattatgagcgtgagcgtcgcaaacgcagtatgggtggcgcagctattgctcctccaacctcgctggtcgaaaaggataaggaactacccagagatttcccttacgaggaggattctaggccacgaagtcagagcagtaaggcagccattcccccacccgtgtatgaggaacaagatcgccctaggagtccgaccgggccttcgaattctttcttagccaacatgggcggaacggtggcccacaagatcatgcagaagtacgggtttagagagggtcagggcctcggaaagcatgagcaaggactcagcaccgctctttctgttgaaaagacctcaaaacgcggagggtag

SEQ ID NO: 58657 - DNA, 1206 bp, Artificial Sequence
  derived and/or modified sequence
atgtccctttatgatgatcttggagttgagactagcgattcgaaaaccgaagggtggtcaaaaaactttaagctgctgcagagccagcttcaggtcaaaaaggcagcactcactcaggcaaagtctcagcggaccaagcaaagcaccgtgctggcccctgtgattgatctcaagagaggcggatcgtccgatgatcggcagatcgtcgatacccctccacacgtagcagccggtctcaaggaccctgtgccctccgggttcagcgctggcgaagtccttatcccgctcgcagacgaatacgatcctatgttccccaatgactatgaaaaagtcgtcaaaagacaaagagaagagagacagcgtcagcgggagctggagcgacagaaggagatcgaagaacgcgaaaagcgacgcaaagataggcacgaggccagtgggttcgctcgtcgcccagaccccgactctgatgaggacgaggactacgagagggagcgcaggaagcggtccatgggtggcgctgcaatcgcgccacctaccagccttgtcgagaaggataaagagctgcctcgggatttcccatacgaggaggattctagacccaggtctcaaagctccaaggccgctatcccgccacccgtttatgaagagcaggatcgtcctagaagtcccaccgggccaagtaattcatttctggcaaatatgggcggaacagtagcgcataaaataatgcagaagtatggcttccgagagggtcagggcttagggaagcacgagcagggacttagcaccgcattgtccgtggaaaaaacaagcaaacggggaggaaaaataatagtaggcgatgctacggaaaaagacgcttcaaagaagtccgatagcaaccctcttaccgagatcctgaagtgtcccaccaaggtagtgttactgcgaaacatggtgggagctggagaggtagatgaggatcttgaggtggaaactaaggaggaatgcgaaaagtacggcaaagttggcaagtgtgtcattttcgagatcccgggagccccagatgatgaggcagtcaggatatttttagaatttgagcgcgttgagtccgccattaaggctgtggtcgacctgaatggcagatatttcgggggacgcgtggttaaagcgtgcttctataatttagacaagttccgcgtgctagatctcgcagaacaagtctag

SEQ ID NO: 58658 - DNA, 639 bp, Artificial Sequence
  derived and/or modified sequence
atgagcttgtatgatgatttgggcgttgagacatccgactcaaagacagaagggtggagtaagaatttcaagcttctgcagtctcagctacaggtcaaaaaggcggcattgacacaggcaaaatcccagcggacaaagcagtcaacagtactcgcacctgttatcgacctcaaaagggggggatcaagcgacgacagacagatcgtagacaccccaccacatgtggccgctggcttaaaggaccccgtcccctccgggttttctgcaggcgaagttctcatcccactggccgacgaatatgatccgatgtttcccaatgactacgaaaaggtcgtgaaacgtcagcgcgaagagcgccagcggcagcgggagctggaaaggcaaaaagagatcgaggaaagagaaaaacgtaggaaggacaggcatgaggcatccggctttgcccgaagacccgacccggactccgatgaagatgaagattacgagcgggaacgcagaaaaaggtcaatgggcggtgccgctatcgcaccacccaccagccttgtggagaaggacaaggagcttccgagagattttccctatgaggaggactcaagacccaggagtcagtccagtaaggcagccatcccccctccatag

SEQ ID NO: 58659 - DNA, 666 bp, Artificial Sequence
  derived and/or modified sequence
atgagcctctacgacgatttgggtgtagagacttcagattcaaagaccgaaggctggagtaagaacttcaagttattacagtcacagctgcaggtcaagaaggcggcactaacgcaggctaagtcacagcgcaccaagcagagcacggtgctggcgcctgtgatcgatcttaagagaggaggctcttcggatgataggcaaatcgtggacactccgccacacgttgccgcaggcctgaaggaccctgtcccttcaggcttcagtgctggcgaggtcctcattcctctggcagatgaatatgaccccatgtttccaaatgattatgagaaggtggtcaagcgccagagagaggaacgtcagcggcagagggagttagagcggcaaaaggaaatcgaggaacgcgaaaagcgcaaagacagacacgaggctagtggcttcgcaaggcgcccagaccctgactcggatgaggatgaagactatgagagagagagacgaaaacgaagcatggggggagccgctatcgcaccgcctacttcactcgtcgaaaaggacaaggaactcccgagagacttcccatacgaggaggactcacgccctcggtctcagtcttcaaaagccgctattcccccaccagtctatgaggagcaggataggccccgttcctag

SEQ ID NO: 58660 - DNA, 732 bp, Artificial Sequence
  derived and/or modified sequence
atggggagagtgggcagagctggccgtagtcaaaggacaaaacagtcaacagtgctggctcccgtgatagacctaaaaagaggaggctcttccgacgaccggcagattgtggacaccccgccacacgtggccgctggcctgaaggaccctgttcccagcggtttctcagctggggaagtgctgattccacttgcagacgaatatgatcctatgttcccaaacgattacgagaaggtagtcaagaggcagcgggaggaacgccagcggcagcgagagctcgagcggcagaaagagatcgaagagagagagaaacgaagaaaggatcgacacgaggcctccggattcgcacgaaggcccgatcccgacagcgatgaagatgaagactacgaaagggaacgccgaaaacgtagtatgggaggagcggctattgcccctccgaccagtctcgtcgaaaaagacaaggaactcccacgtgattttccctacgaagaggattccaggccccgatcacagagttctaaggccgctatcccaccacccgtgtacgaggagcaagaccgtccacggtctccgacagggccttccaattcattcctggctaacatgggtgggacggtggcgcataagatcatgcagaagtacggtttcagggagggccagggcctggggaagcacgaacagggactgtccacagcgctgagtgtggagaagacatctaagagggggggatag

SEQ ID NO: 58661 - DNA, 1206 bp, Artificial Sequence
  derived and/or modified sequence
atgtcactgtacgacgatttgggggtggaaaccagcgattctaagaccgaagggtggagtaaaaacttcaagctgttgcagtctcaacttcaagtcaagaaggccgctctgactcaagcaaaaagccaaaggacaaaacaatcgactgtgctcgcgcctgtgatagacctgaaacgcggagggagcagtgacgataggcagatcgtggacaccccccctcacgtcgccgctggcctgaaagacccggtcccaagtggcttctcagccggagaggtcctcatcccccttgcagatgaatacgaccctatgtttcccaatgactatgagaaagtcgttaagcgacagcgggaggagcgccaaagacaaagggagcttgaacgccagaaagagattgaggaacgagagaagcggaggaaggatcggcacgaagccagtgggttcgcccgtaggcccgatcccgacagcgacgaagatgaagattacgagagagagcggagaaagaggagcatgggcggagcggcaatcgcccctcccactagccttgttgagaaggataaagaattgcctagagatttcccctacgaagaagattctagacctcggtctcagtcctccaaggcagctattccacctccggtatacgaagagcaagatcggccaaggagccctaccggcccatccaactcattcctcgccaatatgggcggtacggtcgctcacaaaatcatgcaaaagtacgggtttcgagaaggtcagggcctgggcaagcatgagcagggcctgagtactgcattgagcgtagagaaaacatcaaaacggggtggcaaaatcattgtcggtgacgcaactgaaaaggatgcctctaagaaatccgactccaacccattgactgagatactgaagtgcccaacaaaggtggttcttttacgaaacatggttggggcaggcgaggtcgacgaggatcttgaggtggagaccaaagaagaatgcgaaaagtatggaaaggtaggtaagtgcgtgatctttgagattcctggagccccagacgatgaagctgtccgaatctttctggaatttgagcgcgttgagtccgccattaaggccgtggtggatcttaacggaagatactttggagggagagtggtgaaagcctgcttctataacctcgacaagttccgggtgttggatctagctgagcaggtgtag

SEQ ID NO: 58662 - DNA, 678 bp, Artificial Sequence
  derived and/or modified sequence
taacccttggcggatgaatacgacccaatgtttccaaatgactatgagaaggtagtaaaacgccagcgagaggaacgacaacgtcagcgggagctggagcgccaaaaggaaatcgaagagcgggagaaacgaaggaaagatcgacatgaggcttctggttttgcaagacgacctgaccccgattcagacgaggatgaggattatgagagggagaggcgcaaaagatcaatgggaggggctgccatagctccccctacaagcctagttgagaaagacaaggagttacccagggacttcccatatgaagaggattctaggccacggtcccagagcagtaaagctgctatccccccaccagtctacgaagagcaagataggcctagatcccctacaggtcccagtaatagctttctggctaacatgggagggaccgtcgctcataaaattatgcaaaagtatggcttcagagagggccaggggttgggcaaacacgagcagggactgtcaacagccctcagcgtggaaaagacctcaaagcgcggtggcaaaatcattgtcggagatgcgacagagaaaggcgtctcccctgggaagagggtaacgcgtggaaagggactggcacccagtatcagcgatatggcatccttggatccacacgtgagcgcgggtggtcagtag

SEQ ID NO: 58663 - DNA, 732 bp, Artificial Sequence
  derived and/or modified sequence
atgggcagagtgggcagagccggcagaagccagagaaccaagcagagcaccgtgctggcccccgtgatcgacctgaagagaggcggcagcagcgacgacagacagatcgtggacacccccccccacgtggccgccggcctgaaggaccccgtgcccagcggcttcagcgccggcgaggtgctgatccccctggccgacgagtacgaccccatgttccccaacgactacgagaaggtggtgaagagacagagagaggagagacagagacagagagagctggagagacagaaggagatcgaggagagagagaagagaagaaaggacagacacgaggccagcggcttcgccagaagacccgaccccgacagcgacgaggacgaggactacgagagagagagaagaaagagaagcatgggcggcgccgccatcgccccccccaccagcctggtggagaaggacaaggagctgcccagagacttcccctacgaggaggacagcagacccagaagccagagcagcaaggccgccatccccccccccgtgtacgaggagcaggacagacccagaagccccaccggccccagcaacagcttcctggccaacatgggcggcaccgtggcccacaagatcatgcagaagtacggcttcagagagggccagggcctgggcaagcacgagcagggcctgagcaccgccctgagcgtggagaagaccagcaagagaggcggctag

SEQ ID NO: 58664 - DNA, 1206 bp, Artificial Sequence
  derived and/or modified sequence
atgagcctgtacgacgacctgggcgtggagaccagcgacagcaagaccgagggctggagcaagaacttcaagctgctgcagagccagctgcaggtgaagaaggccgccctgacccaggccaagagccagagaaccaagcagagcaccgtgctggcccccgtgatcgacctgaagagaggcggcagcagcgacgacagacagatcgtggacacccccccccacgtggccgccggcctgaaggaccccgtgcccagcggcttcagcgccggcgaggtgctgatccccctggccgacgagtacgaccccatgttccccaacgactacgagaaggtggtgaagagacagagagaggagagacagagacagagagagctggagagacagaaggagatcgaggagagagagaagagaagaaaggacagacacgaggccagcggcttcgccagaagacccgaccccgacagcgacgaggacgaggactacgagagagagagaagaaagagaagcatgggcggcgccgccatcgccccccccaccagcctggtggagaaggacaaggagctgcccagagacttcccctacgaggaggacagcagacccagaagccagagcagcaaggccgccatccccccccccgtgtacgaggagcaggacagacccagaagccccaccggccccagcaacagcttcctggccaacatgggcggcaccgtggcccacaagatcatgcagaagtacggcttcagagagggccagggcctgggcaagcacgagcagggcctgagcaccgccctgagcgtggagaagaccagcaagagaggcggcaagatcatcgtgggcgacgccaccgagaaggacgccagcaagaagagcgacagcaaccccctgaccgagatcctgaagtgccccaccaaggtggtgctgctgagaaacatggtgggcgccggcgaggtggacgaggacctggaggtggagaccaaggaggagtgcgagaagtacggcaaggtgggcaagtgcgtgatcttcgagatccccggcgcccccgacgacgaggccgtgagaatcttcctggagttcgagagagtggagagcgccatcaaggccgtggtggacctgaacggcagatacttcggcggcagagtggtgaaggcctgcttctacaacctggacaagttcagagtgctggacctggccgagcaggtgtag

SEQ ID NO: 58665 - DNA, 639 bp, Artificial Sequence
  derived and/or modified sequence
atgagcctgtacgacgacctgggcgtggagaccagcgacagcaagaccgagggctggagcaagaacttcaagctgctgcagagccagctgcaggtgaagaaggccgccctgacccaggccaagagccagagaaccaagcagagcaccgtgctggcccccgtgatcgacctgaagagaggcggcagcagcgacgacagacagatcgtggacacccccccccacgtggccgccggcctgaaggaccccgtgcccagcggcttcagcgccggcgaggtgctgatccccctggccgacgagtacgaccccatgttccccaacgactacgagaaggtggtgaagagacagagagaggagagacagagacagagagagctggagagacagaaggagatcgaggagagagagaagagaagaaaggacagacacgaggccagcggcttcgccagaagacccgaccccgacagcgacgaggacgaggactacgagagagagagaagaaagagaagcatgggcggcgccgccatcgccccccccaccagcctggtggagaaggacaaggagctgcccagagacttcccctacgaggaggacagcagacccagaagccagagcagcaaggccgccatcccccccccctag

SEQ ID NO: 58666 - DNA, 666 bp, Artificial Sequence
  derived and/or modified sequence
atgagcctgtacgacgacctgggcgtggagaccagcgacagcaagaccgagggctggagcaagaacttcaagctgctgcagagccagctgcaggtgaagaaggccgccctgacccaggccaagagccagagaaccaagcagagcaccgtgctggcccccgtgatcgacctgaagagaggcggcagcagcgacgacagacagatcgtggacacccccccccacgtggccgccggcctgaaggaccccgtgcccagcggcttcagcgccggcgaggtgctgatccccctggccgacgagtacgaccccatgttccccaacgactacgagaaggtggtgaagagacagagagaggagagacagagacagagagagctggagagacagaaggagatcgaggagagagagaagagaaaggacagacacgaggccagcggcttcgccagaagacccgaccccgacagcgacgaggacgaggactacgagagagagagaagaaagagaagcatgggcggcgccgccatcgccccccccaccagcctggtggagaaggacaaggagctgcccagagacttcccctacgaggaggacagcagacccagaagccagagcagcaaggccgccatccccccccccgtgtacgaggagcaggacagacccagaagctag

SEQ ID NO: 58667 - DNA, 678 bp, Artificial Sequence
  derived and/or modified sequence
tgacccctggccgacgagtacgaccccatgttccccaacgactacgagaaggtggtgaagagacagagagaggagagacagagacagagagagctggagagacagaaggagatcgaggagagagagaagagaagaaaggacagacacgaggccagcggcttcgccagaagacccgaccccgacagcgacgaggacgaggactacgagagagagagaagaaagagaagcatgggcggcgccgccatcgccccccccaccagcctggtggagaaggacaaggagctgcccagagacttcccctacgaggaggacagcagacccagaagccagagcagcaaggccgccatccccccccccgtgtacgaggagcaggacagacccagaagccccaccggccccagcaacagcttcctggccaacatgggcggcaccgtggcccacaagatcatgcagaagtacggcttcagagagggccagggcctgggcaagcacgagcagggcctgagcaccgccctgagcgtggagaagaccagcaagagaggcggcaagatcatcgtgggcgacgccaccgagaagggcgtgagccccggcaagagagtgaccagaggcaagggcctggcccccagcatcagcgacatggccagcctggacccccacgtgagcgccggcggccagtag

SEQ ID NO: 58668 - protein, 345 aa, Artificial Sequence
  derived and/or modified sequence
MQPSGHRLRDVEHHPLLAENDNYDSSSSSSSEADVADRVWFIRDGCGMICAVMTWLLVAYADFVVTFVMLLPSKDFWYSVVNGVIFNCLAVLALSSHLRTMLTDPEKSSDCRPSACTVKTGLDPTLVGICGEGTESVQSLLLGAVPKGNATKEYMESLQLKPGEVIYKCPKCCCIKPERAHHCSICKRCIRKMDHHCPWVNNCVGEKNQRFFVLFTMYIALSSVHALILCGFQFISCVRGQWTECSDFSPPITVILLIFLCLEGLLFFTFTAVMFGTQIHSICNDETEIERLKSEKPTWERRLRWEGMKSVFGGPPSLLWMNPFVGFRFRRLPTRPRKGGPEFSV

SEQ ID NO: 58669 - DNA, 1038 bp, Artificial Sequence
  derived and/or modified sequence
atgcagcccagcggccacagactgagagacgtggagcaccaccccctgctggccgagaacgacaactacgacagcagcagcagcagcagcagcgaggccgacgtggccgacagagtgtggttcatcagagacggctgcggcatgatctgcgccgtgatgacctggctgctggtggcctacgccgacttcgtggtgaccttcgtgatgctgctgcccagcaaggacttctggtacagcgtggtgaacggcgtgatcttcaactgcctggccgtgctggccctgagcagccacctgagaaccatgctgaccgaccccgagaagagcagcgactgcagacccagcgcctgcaccgtgaagaccggcctggaccccaccctggtgggcatctgcggcgagggcaccgagagcgtgcagagcctgctgctgggcgccgtgcccaagggcaacgccaccaaggagtacatggagagcctgcagctgaagcccggcgaggtgatctacaagtgccccaagtgctgctgcatcaagcccgagagagcccaccactgcagcatctgcaagagatgcatcagaaagatggaccaccactgcccctgggtgaacaactgcgtgggcgagaagaaccagagattcttcgtgctgttcaccatgtacatcgccctgagcagcgtgcacgccctgatcctgtgcggcttccagttcatcagctgcgtgagaggccagtggaccgagtgcagcgacttcagcccccccatcaccgtgatcctgctgatcttcctgtgcctggagggcctgctgttcttcaccttcaccgccgtgatgttcggcacccagatccacagcatctgcaacgacgagaccgagatcgagagactgaagagcgagaagcccacctgggagagaagactgagatgggagggcatgaagagcgtgttcggcggcccccccagcctgctgtggatgaaccccttcgtgggcttcagattcagaagactgcccaccagacccagaaagggcggccccgagttcagcgtgtag

SEQ ID NO: 58670 - DNA, 1038 bp, Artificial Sequence
  derived and/or modified sequence
atgcagccctctggacaccgcttacgcgacgtcgaacatcacccactccttgccgaaaacgacaactatgactcctcatcatcaagtagctcagaggccgacgtcgcagatcgcgtgtggtttatacgggatgggtgtggaatgatatgtgccgtgatgacctggctgttggtcgcatacgccgactttgttgtcacattcgtcatgttgctcccttccaaagatttttggtactccgtagtgaatggcgtgattttcaactgcctggcggttcttgctctatcttcacacctgcgtactatgcttaccgacccagaaaagagctcagattgccggccttcagcgtgtacagtgaagacagggttggatcctaccctggttgggatttgtggcgaggggactgagtctgtacaaagcctactgctgggtgctgtacctaaaggcaatgccacgaaggagtacatggagagcctacagctgaagccgggagaagtcatttacaagtgccctaaatgttgctgcatcaaacctgagagggcacaccattgttctatctgcaaacggtgtatccgtaagatggaccaccattgtccatgggtgaacaactgcgttggtgagaagaatcagaggttttttgttctttttacaatgtatatcgcactgtctagcgtacacgcgcttatcctgtgcggatttcagtttatctcatgtgtgagaggtcaatggactgagtgcagtgacttctctccaccaattacagtcatccttctcatctttttgtgtctggaaggcttattgttttttaccttcaccgcagtgatgtttggaacccagatacactccatctgcaatgatgaaacagaaatcgaaaggcttaaaagcgagaaaccgacttgggaacggcgcttgagatgggagggcatgaaaagcgttttcggcgggcccccttcattactctggatgaacccattcgtcgggtttcgctttaggagactgcccacccggcctagaaaaggaggccctgagttcagcgtctag

SEQ ID NO: 58671 - DNA, 1038 bp, Artificial Sequence
  derived and/or modified sequence
atgcagcccagcggccaccggctgagagatgtggagcaccaccccctgctggctgaaaatgacaactatgacagcagcagcagcagcagcagcgaggctgatgtggccgacagagtgtggttcatcagagatggctgcggcatgatctgtgctgtgatgacctggctgctggtggcctatgctgactttgtggtgacctttgtgatgctgctgcccagcaaggacttctggtacagcgtggtgaatggagtcatcttcaactgcctggccgtgctggccctgagcagccacctgcggaccatgctgacagatcctgagaagagcagtgactgccggcccagcgcctgcaccgtgaagacaggcctggaccccaccctggtgggcatctgtggggagggcacagagagcgtgcagagcctgctgctgggcgctgtgcccaagggaaatgccaccaaggagtacatggagagcctgcagctgaagccaggagaggtgatctacaagtgccccaagtgctgctgcatcaagccagagcgggcccaccactgcagcatctgcaagcgctgcatcaggaagatggaccaccactgcccctgggtgaacaactgtgtgggggagaagaaccagcgcttctttgtgctcttcaccatgtacatcgccctgagctctgtgcacgccctgatcctgtgtggcttccagttcatcagctgtgtgcggggccagtggacagagtgcagcgacttcagcccccccatcaccgtcatcctgctgatcttcctgtgcctggagggcctgctcttcttcaccttcaccgctgtgatgtttggcacccagatccacagcatctgcaatgatgaaacagaaattgagcggctgaagtctgagaagcccacctgggagcggcggctgcgctgggagggcatgaagtctgtgtttggaggcccccccagcctgctgtggatgaacccctttgtgggcttccgcttccggcggctgcccacccggcccaggaagggcggccctgagttctctgtgtag

SEQ ID NO: 58672 - DNA, 1038 bp, Artificial Sequence
  derived and/or modified sequence
atgcagcccagcggccaccggctgcgggacgtggagcaccaccccctcttagcagaaaatgacaactacgactcctcttcctcctccagcagtgaggcagatgtggctgacagagtctggttcatccgtgatgggtgcggcatgatctgcgccgtgatgacttggctgcttgtggcttacgcagatttcgtggtcacatttgtcatgctccttccctctaaggatttttggtactctgtggttaatggcgtgattttcaactgccttgctgtcctggctctcagctcccatctaaggactatgcttactgatcctgagaagtcttccgattgtaggcctagcgcctgtacagtaaaaaccggtctggaccccacgttggttgggatatgtggcgagggtacagagtccgtgcagagcctgctcctgggggccgtgccaaagggaaatgccacaaaagaatatatggagtcactgcagctgaagcccggggaggtcatttacaaatgccctaagtgctgttgtatcaaaccagagagggcacaccattgtagcatttgcaagcgctgtattcgcaaaatggatcatcattgcccttgggtgaataattgtgtcggcgaaaagaaccagcgtttttttgtactgtttacaatgtatattgctctgtcttctgtccacgccctaattctgtgcgggttccagttcatcagctgcgtaagaggccagtggacagagtgctccgatttttcaccacccattacggtgattttattgattttcttgtgcctggagggcttgcttttttttacttttacagccgtcatgttcggaacacagatccatagtatttgcaatgatgagacagagatcgaaagactcaagagcgagaagcccacatgggagcgcaggctgcgatgggaagggatgaaaagtgtttttgggggccctcccagcctcctatggatgaacccattcgtaggctttaggttccggcggttgcccacaagacctcgaaaaggggggcctgaattttctgtgtag

SEQ ID NO: 58673 - DNA, 1038 bp, Artificial Sequence
  derived and/or modified sequence
atgcagcctagcggacatcgactccgggatgtagaacaccatccactgctggccgaaaatgacaattatgatagcagttcatcgtctagcagtgaggctgacgtggctgatcgggtatggttcattcgtgatggttgcggcatgatctgcgcagtgatgacgtggctgctggtagcctacgcggattttgtggtgacattcgttatgctcctgccttcaaaggatttctggtattcagtagtgaatggggttattttcaattgccttgctgtgctggcgctgagcagccacctgaggacgatgctgaccgatcctgaaaagtcatctgattgtaggccatctgcttgcactgtgaagaccggcttggatcctacattggtgggcatttgcggggagggtaccgagtcagtgcagtccctgcttctgggtgccgtccccaaaggcaatgcgaccaaagaatacatggagtccttacaactgaagccaggggaagtcatctacaagtgtcccaagtgctgctgtattaaaccggaacgcgctcaccattgctctatatgcaaaagatgcatccgcaagatggaccatcactgtccctgggttaataactgtgttggagaaaaaaaccagcggttcttcgtccttttcactatgtatatcgccttatcttctgtgcacgccctgatcctttgtggctttcaatttatctcatgcgtcagaggtcagtggacagagtgcagcgacttttccccccctattactgttatcctactcatcttcctatgcctcgaggggctactgttctttacatttaccgctgtgatgtttggtacccaaattcatagcatctgtaacgatgagactgagatagagcgtctgaaatcagagaagccaacatgggagcgtaggctccgctgggaagggatgaagagtgtctttggcggtcctccttccctgctgtggatgaatcccttcgtgggatttcgcttccgtcgattgcctactagacccagaaaaggaggaccagagttcagcgtgtag

SEQ ID NO: 58674 - DNA, 3271 bp, Artificial Sequence
  derived and/or modified sequence
acttccggcgctcgcaccgccccgctctccagccaaggctccgggctgaggcatttgcttggctgcagcctccttccgacctgcccggcgggacccaggggaccaagccgagccgagccgcggggcccgctccagcccggccatgagcgcggccgcatgatgcgtccctgcctcggccgctgcagtcgccgccgccgccgccgcaggccgggaggagccgcagcgccgggcgaccccgcccgggcctcggatccgatcacataggacagtatgcaccttaagatcctgaagaaacggcacaaaatgttcaagtgatgtttagaaataacttgtgagggtgcgtcagggaaatcatgcagccatcaggacacaggctccgggacgtcgagcatcatcctctcctggctgaaaatgacaactatgactcttcatcgtcctcctcctccgaggctgacgtggctgaccgggtctggttcatccgtgacggctgcggcatgatctgtgctgtcatgacgtggcttctggtcgcctatgcagacttcgtggtgactttcgtcatgctgctgccttccaaagacttctggtactctgtggtcaacggggtcatctttaactgcttggccgtgcttgccctgtcatcccacctgagaaccatgctcaccgaccctgaaaaatccagtgactgccgaccatctgcctgcacagtgaaaactgggctggacccaacccttgtgggcatttgtggtgagggaaccgagtctgtgcaaagcctcctgcttggggcagtacccaaaggaaacgctacgaaagaatacatggagagcttgcagctgaagcccggggaagtcatctacaagtgccccaagtgctgctgtattaaacccgagcgcgcccaccactgcagtatttgcaaaagatgtattcggaaaatggatcatcactgcccgtgggtgaacaattgtgtaggagaaaagaatcaaagattttttgtgctcttcactatgtatatagctctgtcttcagtccatgctctgatcctttgtggatttcagttcatctcctgtgtccgagggcagtggactgaatgcagtgatttttcacctccgataactgtaatcctgttgatcttcctgtgccttgagggtcttctgtttttcactttcactgcagttatgtttggcacccaaatccactccatatgcaacgacgagacggagatcgagcgattgaaaagtgagaagcccacatgggagcggaggctgcgatgggaagggatgaagtccgtctttggggggcccccctcactcctctggatgaatccctttgtgggcttccgatttaggcgactgcccacgagacccagaaaaggtggcccggagttctcagtgtgaggcgtggctcatcagactgaaacttgctcacagacttccagttatttatttggggtctgaaggatatcaacagctcatctgtgaccaacagggcaactggaacctacacaaaccaattgcttgcagcaagcagagttttatatatttatagtcacagatggcagaggaagaggctctcagtccccacctgtacaacaacggaaaggtgtgtggccacacgaagaagccaaacgccgtggcctcctgcagagctggggcttctgtggagaatacttcgggttattacatgggttattcaaatcctgggtcctgagctgctgtttccaatcatgaagaaaaacagtgaatccagtgaacagggattctccaagcagtcatttcagggggctcctgctgaccccgccactcagcagtgcactccccggatcacagcagggcgtttacatagaaagacgttttggtctcgattagctccgatgctttgcactgaagttgcaaaagatctgtgcactgaacagtgaaggtggcttccggcacactccccgctgccccggaagagacatcctttgaccctctcagcaagtctgtgtgtgtgcgtgtctgtgcgtgtgcgcgcgtgtgtgcatgtgtgtcaaaattgccagtgttgtttaggcaatgtaacatttaccggctgtgtacagcaaacaagctattttttagaaaccgacgtttcagggaagaggggagagagccgcggggtcctgcccgtggttactatgaatgtattgctgttggaggacatctcgatccaaagaacagccgttcctgtgcggcccttcgttgccctcctgctttcattttttaaagaaatcttgagtgcttgagggccttggaactgattttttttttttgttccagccaaattagcagtgtataaatggcacctaggtaagagcagagctgcggctcggtgacttgatacttggggcagcccgatgctgtgtgtggggcaggggaggcatccttactggagaggcagggcccagccattgggcacctctgggaaggggaggggaccatgaggcagccagcccctggcaggggcgactgtgccaccgcaggcagcgctccagtcgggaatggccaggatggcgccctcttgttggagtttttggttagcttttacgttttcttctccacccacggcacaggtgataaaataggatccttggtgcggagcttaaaattatgccagaaagccaacagctcccctcgtggggccttgccttaaacttgcctggtttgtacattttttgccggacgcatcaagaagcaatctgtgacaaagtctgagggtcttcctttatgcttgccctccacactaagagaagttggcgtctccctcctgggaattgttttgcctttctgttcatctgtgaactgttttttgtttttaattactctgtaccccatccgaatcagggcttctaccactgctgatgcaaaaccacaaagggacctacctgagccaccgtcctagccaagcgagcaaacctgcagggggtttggaagtggacttggtcaccgcagaagcgtgtgcgccgttgggggaagagctgcgtcacagccagagggacaaagtgtgggtgatcctggagacgccagtttccgagattgttctgcatattcatttgcacattgttgtctgggttggacatgcgtgtgggcttcagtgtgaggcttttaatatgtatatcctgttatcaataaaacaattatccaagtggttgaatcctgtgagacttggcaagtgtgtgcaaatcaagtatacttgacttttcaacctcttctttcaatgtaacttttatatgaaataaagtaatcaattaacagttctc

SEQ ID NO: 58675 - protein, 324 aa, Artificial Sequence
  derived and/or modified sequence
MEDAKVYVAKVDCTAHSDVCSAQGVRGYPTLKLFKPGQEAVKYQGPRDFQTLENWMLQTLNEEPVTPEPEVEPPSAPELKQGLYELSASNFELHVAQGDHFIKFFAPWCGHCKALAPTWEQLALGLEHSETVKIGKVDCTQHYELCSGNQVRGYPTLLWFRDGKKVDQYKGKRDLESLREYVESQLQRTETGATETVTPSEAPVLAAEPEADKGTVLALTENNFDDTIAEGITFIKFYAPWCGHCKTLAPTWEELSKKEFPGLAGVKIAEVDCTAERNICSKYSVRGYPTLLLFRGGKKVSEHSGGRDLDSLHRFVLSQAKDEL

SEQ ID NO: 58676 - DNA, 975 bp, Artificial Sequence
  derived and/or modified sequence
atggaggacgccaaggtgtacgtggccaaggtggactgcaccgcccacagcgacgtgtgcagcgcccagggcgtgagaggctaccccaccctgaagctgttcaagcccggccaggaggccgtgaagtaccagggccccagagacttccagaccctggagaactggatgctgcagaccctgaacgaggagcccgtgacccccgagcccgaggtggagccccccagcgcccccgagctgaagcagggcctgtacgagctgagcgccagcaacttcgagctgcacgtggcccagggcgaccacttcatcaagttcttcgccccctggtgcggccactgcaaggccctggcccccacctgggagcagctggccctgggcctggagcacagcgagaccgtgaagatcggcaaggtggactgcacccagcactacgagctgtgcagcggcaaccaggtgagaggctaccccaccctgctgtggttcagagacggcaagaaggtggaccagtacaagggcaagagagacctggagagcctgagagagtacgtggagagccagctgcagagaaccgagaccggcgccaccgagaccgtgacccccagcgaggcccccgtgctggccgccgagcccgaggccgacaagggcaccgtgctggccctgaccgagaacaacttcgacgacaccatcgccgagggcatcaccttcatcaagttctacgccccctggtgcggccactgcaagaccctggcccccacctgggaggagctgagcaagaaggagttccccggcctggccggcgtgaagatcgccgaggtggactgcaccgccgagagaaacatctgcagcaagtacagcgtgagaggctaccccaccctgctgctgttcagaggcggcaagaaggtgagcgagcacagcggcggcagagacctggacagcctgcacagattcgtgctgagccaggccaaggacgagctgtag

SEQ ID NO: 58677 - DNA, 975 bp, Artificial Sequence
  derived and/or modified sequence
atggaagatgctaaggtttatgtggccaaagtggactgcactgcacactcagatgtgtgctctgcacagggggttcgcggttaccccaccctgaagctgttcaaaccaggtcaggaagccgtgaagtaccagggtcctagggatttccaaacactcgagaactggatgctgcagaccttgaatgaagagcccgtgacccctgagcccgaggtggagcccccaagcgctcctgaactgaaacagggcctgtacgagttatctgcgtcaaatttcgagctgcacgtggcacaaggtgaccactttataaaattctttgcaccttggtgcggccattgcaaggctctcgctcccacctgggaacagctcgcattagggctggagcactccgagaccgtcaaaatcggtaaagtggattgcacccagcattacgagttgtgcagcgggaatcaagtgagagggtaccccacactcctttggtttcgggacggtaagaaagtggaccagtataagggtaagcgcgatcttgagtccctgagggaatacgtcgagagtcagcttcagcgaacagaaaccggagcgaccgagacagtcaccccgagtgaggcacctgtgctagcagccgagcctgaggcagacaagggcacagtcctcgcccttactgaaaacaactttgatgataccatcgcggaagggataaccttcatcaagttttatgccccatggtgtggccactgcaagacgctggcacccacttgggaagagctctccaaaaaggaattccccggcctggcaggcgtgaagattgccgaagtcgactgcacagcggaaagaaatatctgtagtaagtatagtgttcgcggttatcccacattattgctgtttcgaggcggaaaaaaggtctctgaacacagcgggggccgggacctggattcgcttcatcggtttgttttaagtcaggctaaggacgagctgtag

SEQ ID NO: 58678 - DNA, 975 bp, Artificial Sequence
  derived and/or modified sequence
atggaggatgccaaggtgtatgtggccaaggtggactgcacagcccacagtgatgtgtgcagcgcccagggcgtgcggggctaccccaccctgaagctgttcaagccaggccaggaggccgtgaagtaccagggcccccgggacttccagaccctggagaactggatgctgcagaccctgaatgaggagcctgtgaccccagagcctgaggtggagcccccatctgcccctgagctgaagcagggcctgtatgagctgagcgccagcaactttgagctgcacgtggcccagggcgaccacttcatcaagttctttgccccctggtgtggccactgcaaggccctggcccccacctgggagcagctggccctgggcctggagcacagcgagaccgtgaagattggcaaggtggactgcacccagcactatgagctgtgcagcggcaaccaggtgcggggctaccccaccctgctgtggttcagagatggcaagaaggtggaccagtacaagggcaagagggacctggagagcctgcgggagtatgtggagagccagctgcagaggacagaaacaggagccacagagaccgtgacccccagcgaggcccctgtgctggccgctgagcctgaggccgacaagggcaccgtgctggccctgacagagaacaactttgatgacaccatcgccgagggcatcaccttcatcaagttctacgccccctggtgtggccactgcaagaccctggcccccacctgggaggagctgagcaagaaggagttccctggcctggccggcgtgaagattgctgaggtggactgcacagctgagaggaacatctgcagcaagtacagcgtgcggggctaccccaccctgctgctcttccggggcggcaagaaggtgtctgagcacagcggcggccgggacctggacagcctgcacagatttgtgctgagccaggccaaggatgagctgtag

SEQ ID NO: 58679 - DNA, 975 bp, Artificial Sequence
  derived and/or modified sequence
atggaggacgccaaggtgtacgtggccaaggtggactgcaccgcccatagtgatgtgtgctccgcccaaggggtgcggggctacccaaccctgaaacttttcaagccaggacaggaggctgttaaatatcaggggcccagagatttccaaaccctcgaaaactggatgctccaaacccttaatgaggagccagttacaccagagccggaggtagagcccccatccgcgccagaactgaaacagggtttatacgaactctcagcttcaaatttcgaacttcacgttgctcagggcgaccacttcattaaattcttcgctccctggtgtggccattgtaaggcactcgcacccacatgggagcagctcgctctgggcctggaacacagcgaaaccgtgaaaatcggaaaagtagattgtacccagcactacgaactctgtagcgggaatcaagtgcgcggttatccaactctcctgtggtttagagacggtaagaaggtcgatcagtacaagggaaaaagggatctggaaagtctgcgcgaatatgtggaaagccaattgcaacgcaccgagacaggagcaaccgagactgtgaccccgagcgaggcccccgtgctcgcagcagaacccgaagctgataagggtaccgtgctcgctctgacagaaaataattttgatgataccatagccgaaggtatcacttttattaagttctacgccccctggtgtgggcattgtaagaccctggcacctacatgggaggaattatctaagaaagaattccccgggttggctggtgtcaagatcgccgaagtcgattgcaccgccgagcggaacatctgcagtaagtattcagtgcgcggctaccctaccttactgctattcagagggggtaagaaagttagcgaacatagcggtggccgagatttggacagcctgcataggtttgtgctgtcacaggcgaaggatgagctctag

SEQ ID NO: 58680 - DNA, 975 bp, Artificial Sequence
  derived and/or modified sequence
atggaggacgccaaggtttatgtggcgaaggtggactgtaccgctcattcagatgtatgttccgcacagggagtgcgaggctaccctactctgaagctcttcaaaccaggacaggaggccgttaagtaccagggccctcgcgattttcagacgcttgagaactggatgctccagactctgaacgaagagcctgtgacccctgaaccggaagtcgagccgccatccgcccctgagctgaagcagggcctctatgagctgagcgccagcaactttgagttgcacgtagcacagggagatcattttataaaattttttgccccatggtgtggacactgcaaggctttagcacccacatgggagcagctggctttgggtcttgagcatagcgagactgtgaagataggaaaggtcgattgtactcagcattatgagttgtgcagcggaaaccaggtgcgagggtaccccaccctcttgtggttccgtgatggaaaaaaggtcgatcagtacaaagggaagcgagacctggaatctcttcgggagtacgtggagtcccaattgcagcggactgagacgggtgctacagagactgtgactccctctgaagcgcctgtcctcgccgctgaacccgaggctgacaaggggactgtactcgctctgaccgaaaataacttcgatgatacaatagctgagggcataacctttatcaaattttatgccccatggtgcggacactgtaagacgttagcgccaacctgggaggaattaagcaagaaagagtttccaggcctggcaggggtgaaaattgccgaggttgactgtactgctgaacgcaacatctgttcgaaatattccgttcgaggttatcccacgttgctcctgttcagaggtgggaagaaggtgtccgaacacagcggtggtcgagacctggacagtctacaccgcttcgtactgtcccaagccaaagacgaactttag

SEQ ID NO: 58681 - protein, 652 aa, Artificial Sequence
  derived and/or modified sequence
MEASCLELALEGERLCKAGDFKTGVAFFEAAVQVGTEDLKTLSAIYSQLGNAYFYLKEHGRALEYHKHDLLLARTIGDRMGEAKASGNLGNTLKVLGRFDEAAVCCQRHLSIAQEQGDKVGEARALYNIGNVYHAKGKQLSWNAANATQDPGHLPPDVRETLCKASEFYERNLSLVKELGDRAAQGRAYGNLGNTHYLLGNFTEATTFHKERLAIAKEFGDKAAERRAYSNLGNAHVFLGRFDVAAEYYKKTLQLSRQLRDQAVEAQACYSLGNTYTLLQDYERAAEYHLRHLLIAQELADRVGEGRACWSLGNAYVSMGRPAQALTFAKKHLQISQEIGDRHGELTARMNVAQLQLVLGRLTSPAASEKPDLAGYEAQGARPKRTQRLSAETWDLLRLPLEREQNGDSHHSGDWRGPSRDSLPLPVRSRKYQEGPDAERRPREGSHSPLDSADVRVHVPRTSIPRAPSSDEECFFDLLTKFQSSRMDDQRCPLDDGQAGAAEATAAPTLEDRIAQPSMTASPQTEEFFDLIASSQSRRLDDQRASVGSLPGLRITHSNAGHLRGHGEPQEPGDDFFNMLIKYQSSRIDDQRCPPPDVLPRGPTMPDEDFFSLIQRVQAKRMDEQRVDLAGGPEQGAGGPPEPQQQCQPGAS

SEQ ID NO: 58682 - protein, 675 aa, Artificial Sequence
  derived and/or modified sequence
MAGPAPPVADELPGPAARRLYSRMEASCLELALEGERLCKAGDFKTGVAFFEAAVQVGTEDLKTLSAIYSQLGNAYFYLKEHGRALEYHKHDLLLARTIGDRMGEAKASGNLGNTLKVLGRFDEAAVCCQRHLSIAQEQGDKVGEARALYNIGNVYHAKGKQLSWNAANATQDPGHLPPDVRETLCKASEFYERNLSLVKELGDRAAQGRAYGNLGNTHYLLGNFTEATTFHKERLAIAKEFGDKAAERRAYSNLGNAHVFLGRFDVAAEYYKKTLQLSRQLRDQAVEAQACYSLGNTYTLLQDYERAAEYHLRHLLIAQELADRVGEGRACWSLGNAYVSMGRPAQALTFAKKHLQISQEIGDRHGELTARMNVAQLQLVLGRLTSPAASEKPDLAGYEAQGARPKRTQRLSAETWDLLRLPLEREQNGDSHHSGDWRGPSRDSLPLPVRSRKYQEGPDAERRPREGSHSPLDSADVRVHVPRTSIPRAPSSDEECFFDLLTKFQSSRMDDQRCPLDDGQAGAAEATAAPTLEDRIAQPSMTASPQTEEFFDLIASSQSRRLDDQRASVGSLPGLRITHSNAGHLRGHGEPQEPGDDFFNMLIKYQSSRIDDQRCPPPDVLPRGPTMPDEDFFSLIQRVQAKRMDEQRVDLAGGPEQGAGGPPEPQQQCQPGAS

SEQ ID NO: 58683 - DNA, 2028 bp, Artificial Sequence
  derived and/or modified sequence
atggccggccccgccccccccgtggccgacgagctgcccggccccgccgccagaagactgtacagcagaatggaggccagctgcctggagctggccctggagggcgagagactgtgcaaggccggcgacttcaagaccggcgtggccttcttcgaggccgccgtgcaggtgggcaccgaggacctgaagaccctgagcgccatctacagccagctgggcaacgcctacttctacctgaaggagcacggcagagccctggagtaccacaagcacgacctgctgctggccagaaccatcggcgacagaatgggcgaggccaaggccagcggcaacctgggcaacaccctgaaggtgctgggcagattcgacgaggccgccgtgtgctgccagagacacctgagcatcgcccaggagcagggcgacaaggtgggcgaggccagagccctgtacaacatcggcaacgtgtaccacgccaagggcaagcagctgagctggaacgccgccaacgccacccaggaccccggccacctgccccccgacgtgagagagaccctgtgcaaggccagcgagttctacgagagaaacctgagcctggtgaaggagctgggcgacagagccgcccagggcagagcctacggcaacctgggcaacacccactacctgctgggcaacttcaccgaggccaccaccttccacaaggagagactggccatcgccaaggagttcggcgacaaggccgccgagagaagagcctacagcaacctgggcaacgcccacgtgttcctgggcagattcgacgtggccgccgagtactacaagaagaccctgcagctgagcagacagctgagagaccaggccgtggaggcccaggcctgctacagcctgggcaacacctacaccctgctgcaggactacgagagagccgccgagtaccacctgagacacctgctgatcgcccaggagctggccgacagagtgggcgagggcagagcctgctggagcctgggcaacgcctacgtgagcatgggcagacccgcccaggccctgaccttcgccaagaagcacctgcagatcagccaggagatcggcgacagacacggcgagctgaccgccagaatgaacgtggcccagctgcagctggtgctgggcagactgaccagccccgccgccagcgagaagcccgacctggccggctacgaggcccagggcgccagacccaagagaacccagagactgagcgccgagacctgggacctgctgagactgcccctggagagagagcagaacggcgacagccaccacagcggcgactggagaggccccagcagagacagcctgcccctgcccgtgagaagcagaaagtaccaggagggccccgacgccgagagaagacccagagagggcagccacagccccctggacagcgccgacgtgagagtgcacgtgcccagaaccagcatccccagagcccccagcagcgacgaggagtgcttcttcgacctgctgaccaagttccagagcagcagaatggacgaccagagatgccccctggacgacggccaggccggcgccgccgaggccaccgccgcccccaccctggaggacagaatcgcccagcccagcatgaccgccagcccccagaccgaggagttcttcgacctgatcgccagcagccagagcagaagactggacgaccagagagccagcgtgggcagcctgcccggcctgagaatcacccacagcaacgccggccacctgagaggccacggcgagccccaggagcccggcgacgacttcttcaacatgctgatcaagtaccagagcagcagaatcgacgaccagagatgccccccccccgacgtgctgcccagaggccccaccatgcccgacgaggacttcttcagcctgatccagagagtgcaggccaagagaatggacgagcagagagtggacctggccggcggccccgagcagggcgccggcggcccccccgagccccagcagcagtgccagcccggcgccagctag

SEQ ID NO: 58684 - DNA, 2028 bp, Artificial Sequence
  derived and/or modified sequence
atggcaggacccgcccctccggtggccgatgaattgccagggcccgcagcgcggcggctttattcgaggatggaggcatcctgtctggagctggccttggagggggagaggctatgcaaagctggagactttaaaacaggcgttgccttcttcgaggctgccgtgcaggtggggaccgaggatctgaaaactttgtccgccatttattcccagctggggaacgcctatttctatctgaaggagcatggtcgtgctcttgaataccataaacacgacctcctactcgccaggactatcggcgaccgcatgggtgaagctaaggcttctggcaatttgggtaataccctgaaggtgcttggaaggtttgacgaggccgccgtctgctgtcagagacacttatccattgcacaggagcagggggataaagtgggcgaagctagggccctgtacaacatcggaaatgtgtaccacgccaaggggaagcagttgtcatggaacgccgccaatgctacgcaggatcctgggcatctcccacccgatgtgcgcgagaccctgtgcaaggcttccgaattctatgaacggaatctgtctctggtgaaagaattgggtgatcgcgcggctcaggggagggcatatggaaacttagggaacacccattatctgcttggcaattttactgaagctactactttccacaaagaacggctcgcaatcgccaaagagtttggagacaaggccgcagagcgcagggcatattctaacctcggcaatgcccatgtctttctaggacggttcgacgtggcagcagagtactacaagaagacgctgcagctctctcggcaactgagagaccaagccgtggaggctcaggcttgctattccctgggaaacacctacactcttctgcaggactacgaacgcgcagcggagtatcatttacggcatctgttgatagcccaggagttagccgatcgggttggggagggacgcgcttgttggtctcttggcaacgcctatgtctccatgggacggcccgctcaggcattgactttcgctaagaaacacttgcagatttctcaggaaattggggataggcatggcgaactgacagctagaatgaatgtggcccagctgcagctggtcttgggcaggctgacttcgccagccgcttctgagaagcccgatctcgcggggtatgaagctcaaggagcacgccctaagaggacgcaaaggctaagtgctgagacctgggatctcttgcggctgcccctggaacgcgagcaaaacggcgattcccaccactctggggactggcgagggccgagcagggattccctccccctgccagtgaggagccgaaagtaccaagagggaccagacgccgaacggaggccacgtgaaggaagccatagtcccctggattccgccgatgttagggtgcacgtaccccgaacttcaatacctagggccccttcttctgacgaggaatgtttcttcgacctgctgacgaagttccagagctcccgaatggacgatcagagatgccccttagatgatggacaggcgggagccgcggaggcaacagcagccccgactcttgaggaccgaatagcccagccatcaatgactgcctcaccgcagactgaggagttctttgacctgatagcaagttctcaatcgagacggctggacgatcagagagcctctgtaggctccctgcccgggctgcgaatcacccacagcaacgctggccatttgcggggtcacggggaaccccaggagcctggcgatgacttctttaatatgctcatcaaatatcagtcctctagaattgatgaccagaggtgtccaccacctgacgttcttccccgcgggccaaccatgccggatgaggactttttttcactgattcaacgtgtgcaggccaaacggatggatgaacagagggtggatctcgccggaggtccagagcagggggccggcggcccccccgaaccacagcagcagtgtcaaccaggagcttcctag

SEQ ID NO: 58685 - DNA, 2114 bp, Artificial Sequence
  derived and/or modified sequence
gtgacacgttctgggggaggggtagccgacagggggcaggttagagtcccgatcttggccagggtctcagaagtgtgtgtggcctgggcaagcagcccccggtctcgtctgggggtctgcggggctagctttggctgcggtgaccccactccctccccagagcatcccgagggccccgtcttcggacgaggagtgcttctttgacctgttgaccaagttccagagcagccgcatggacgaccagcgttgtcccctggacgatggccaggccggggctgccgaggccacggccgcccccaccctggaggacaggatcgcccagccctcgatgacggcctcgccccagaccgaggaattcttcgacctcatcgccagctcccagagccgccggctggacgaccagcgggccagcgtgggcagcctgccggggctgcgaatcacccacagcaatgcagggcacctccgaggccacggcgagccccaggagccgggggacgacttcttcaacatgctcatcaagtaccagtcctccaggatcgatgaccagcgctgcccgccacctgacgtactgccccggggccctaccatgccggacgaggacttcttcagcctcattcagagggtgcaggctaagcgcatggacgagcagcgggtggacctcgccgggggcccggagcagggggcaggcggcccgcccgagccccagcagcagtgccagcctggtgcgagctaaggccctgtgcccaccgccaggcccaccctgcccccactcctggacgccggtctcacagtcacagccacgtcctcccgaggccattgccgaggacaggcactgggcatgcagccccacggcctccccgacccagggcgacaggctcaggccaagctgcccgtggtgggagggcgtgcttccatcccgggctggcccccatggccctcagcttcctcccttctgcccctgccgcaggccggacggggccttcggcatgtcggccccgacctggtgctgtcagactcccgcatcctctcccccaagcccttcccgttctgccctgccctgccaaatgtgaaaccctgctgtctcccccaccctccccaaaggtgtctctgagccgcctcttggggccaccaaggacagggccatgttctgtccccccagagctggtcttgggatggccgtgtgacaggcatgctccacccctccagcttcgtcctggggcagggctccctccaagcctgtctccccactccccggccagaggtcagcaaccacagaaggccccccagaccacgcatggcagaccaggctgcagtggcagccctgaggtgccccccgccgagtcccagggccctgcaggggcctcgacaggagccgggcctatctctaaagcagagggaatggctgggcatgaacttcgacattccaaaaccccaagccaggaaaaagggcagggcctggtcctagggatgcttactggcagcaagagcagtgcccagtcagggtgggaggtagcaccaggctctgtgaccctcacccaagtgggggggtggtcagtggaagctggggaggcttcactcagctcaaccctgcagaccccccatatgagaacccccctcctcccaccagctgggggagatgacatcactgctctctccatggggagggggctcacagggcaccaagttcgggatcctaggactggcaggacctgctggagcctgagatgggccccaggggcctgaggttgcctcctcctgtccagacccagccttggcacctcccaagactgccaagggccctaccatggccccacagcccccagggctggcagttccatctaggagggtgcctctaggccccactctcaggctaggatggagaggcagatctgggcctggtgaggtgacctgcttctggaggggcagggccgcacccgagagcagggacaggtgcccgaacacagggtctccaggacgtagcgcccccccgcatacttgaatgtatgtgcgtatttattgctcacgtctgtgccatgttgtcaatgggtcctttccaacccaagaggtacatttgtttttctgtttttcctgaaaaataaagtcggccaagtgag

SEQ ID NO: 58686 - DNA, 1111 bp, Artificial Sequence
  derived and/or modified sequence
ctgtgtagggcatggacacagggagctcatggcagggctgacacagggtgtggtgggcacagggacaggaggcacgggaggcttcccgggatgtctgggaagtgttccaggccaaggctggggaggctggcccagggcaggtgacggacagaggcctggactggggtagcacccatgagaggggagaagtccggggcagtcggcgggtgccgaggagcatcccgagggccccgtcttcggacgaggagtgcttctttgacctgttgaccaagttccagagcagccgcatggacgaccagcgttgtcccctggacgatggccaggccggggctgccgaggccacggccgcccccaccctggaggacaggatcgcccagccctcgatgacggcctcgccccagaccgaggaattcttcgacctcatcgccagctcccagagccgccggctggacgaccagcgggccagcgtgggcagcctgccggggctgcgaatcacccacagcaatgcagggcacctccgaggccacggcgagccccaggagccgggggacgacttcttcaacatgctcatcaagtaccagtcctccaggatcgatgaccagcgctgcccgccacctgacgtactgccccggggccctaccatgccggacgaggacttcttcagcctcattcagagggtgcaggctaagcgcatggacgagcagcgggtggacctcgccgggggcccggagcagggggcaggcggcccgcccgagccccagcagcagtgccagcctggtgcgagctaaggccctgtgcccaccgccaggcccaccctgcccccactcctggacgccggtctcacagtcacagccacgtcctcccgaggccattgccgaggacaggcactgggcatgcagccccacggcctccccgacccagggcgacaggctcaggccaagctgcccgtggtgggagggcgtgcttccatcccgggctggcccccatggccctcagcttcctcccttctgcccctgccgcaggccggacggggccttcggcatgtcggccccgacctggtgctgtcagactcccgcatcctctcccccaagcccttcccgttctgccctgc

SEQ ID NO: 58687 - DNA, 2057 bp, Artificial Sequence
  derived and/or modified sequence
ggcggtggtggccctgggcaccttgtgtcctgcctgcgctctgtgtggccaagcacccagcgtggctccctgctgctgtggagacagcctgtgatccgcagcatcccgagggccccgtcttcggacgaggagtgcttctttgacctgttgaccaagttccagagcagccgcatggacgaccagcgttgtcccctggacgatggccaggccggggctgccgaggccacggccgcccccaccctggaggacaggatcgcccagccctcgatgacggcctcgccccagaccgaggaattcttcgacctcatcgccagctcccagagccgccggctggacgaccagcgggccagcgtgggcagcctgccggggctgcgaatcacccacagcaatgcagggcacctccgaggccacggcgagccccaggagccgggggacgacttcttcaacatgctcatcaagtaccagtcctccaggatcgatgaccagcgctgcccgccacctgacgtactgccccggggccctaccatgccggacgaggacttcttcagcctcattcagagggtgcaggctaagcgcatggacgagcagcgggtggacctcgccgggggcccggagcagggggcaggcggcccgcccgagccccagcagcagtgccagcctggtgcgagctaaggccctgtgcccaccgccaggcccaccctgcccccactcctggacgccggtctcacagtcacagccacgtcctcccgaggccattgccgaggacaggcactgggcatgcagccccacggcctccccgacccagggcgacaggctcaggccaagctgcccgtggtgggagggcgtgcttccatcccgggctggcccccatggccctcagcttcctcccttctgcccctgccgcaggccggacggggccttcggcatgtcggccccgacctggtgctgtcagactcccgcatcctctcccccaagcccttcccgttctgccctgccctgccaaatgtgaaaccctgctgtctcccccaccctccccaaaggtgtctctgagccgcctcttggggccaccaaggacagggccatgttctgtccccccagagctggtcttgggatggccgtgtgacaggcatgctccacccctccagcttcgtcctggggcagggctccctccaagcctgtctccccactccccggccagaggtcagcaaccacagaaggccccccagaccacgcatggcagaccaggctgcagtggcagccctgaggtgccccccgccgagtcccagggccctgcaggggcctcgacaggagccgggcctatctctaaagcagagggaatggctgggcatgaacttcgacattccaaaaccccaagccaggaaaaagggcagggcctggtcctagggatgcttactggcagcaagagcagtgcccagtcagggtgggaggtagcaccaggctctgtgaccctcacccaagtgggggggtggtcagtggaagctggggaggcttcactcagctcaaccctgcagaccccccatatgagaacccccctcctcccaccagctgggggagatgacatcactgctctctccatggggagggggctcacagggcaccaagttcgggatcctaggactggcaggacctgctggagcctgagatgggccccaggggcctgaggttgcctcctcctgtccagacccagccttggcacctcccaagactgccaagggccctaccatggccccacagcccccagggctggcagttccatctaggagggtgcctctaggccccactctcaggctaggatggagaggcagatctgggcctggtgaggtgacctgcttctggaggggcagggccgcacccgagagcagggacaggtgcccgaacacagggtctccaggacgtagcgcccccccgcatacttgaatgtatgtgcgtatttattgctcacgtctgtgccatgttgtcaatgggtcctttccaacccaagaggtacatttgtttttctgtttttcctgaaaaataaagtcggccaagtgagtgtg

SEQ ID NO: 58688 - DNA, 3633 bp, Artificial Sequence
  derived and/or modified sequence
gcgcgggcggcggtgacatcacggccacggcggcgggaggggcggcggcgccccgcgcacatcacttcctcggcgcctccccgggggaggacgggcgaacgaggcgcggacggacaggcggacagcagggcggacagcagggaggacagcagggcgggcagggggcggacggccacggcgcggggggcgctcccggctcccgctcccgcgtccccgacccatggcgggcccggccccgcccgtggccgacgagctcccgggcccggccgccaggcgcctctactccaggatggaggcgtcctgcctagagctggcgctggagggcgagcgtctgtgcaaggcgggcgacttcaagacaggcgtggccttctttgaggctgctgtgcaggtgggcaccgaggacctgaagacactgagtgccatctacagccagctgggcaacgcctacttctacctgaaggagcacggccgggcgctggaataccacaagcatgacctcctgctggcgcggaccatcggtgaccgcatgggggaggccaaggccagtggaaacctgggaaacacactcaaggtcctggggcgcttcgacgaggctgccgtctgctgccagcggcatctgagcatcgcccaagagcagggagacaaggttggggaggcgagggccctctacaacatcgggaacgtgtaccacgccaaaggcaagcaactgtcctggaacgccgcaaacgccacgcaggaccccgggcacctgccgcccgatgtccgagagaccctgtgcaaggcctccgagttctacgagaggaacctgtccctggtgaaggagctgggcgaccgtgcggcgcagggcagggcctacggcaacctgggcaacacccactatttgttggggaacttcacagaggccacgaccttccacaaggagcgcctggccattgctaaggagtttggagacaaggcagccgagaggagggcctacagcaacctggggaacgcccacgtcttcctggggcgctttgacgtggccgccgagtactacaagaagacgctgcaactgtctcggcagctcagggaccaggcagtggaggcgcaggcctgctacagtctgggcaacacctacacgctgctgcaggactacgagcgcgcggccgagtaccacctgcggcacctgctcattgcccaggagctggccgacagagtgggcgagggccgggcgtgctggagcctgggaaatgcctacgtgtccatggggcgcccagcgcaggccctgaccttcgccaagaagcacctgcagatctcccaggagatcggggaccgccatggggagctcacggcccgcatgaacgtggcgcagctgcagctggtgctcggccgcctgaccagcccggcagcctcagagaagcctgacctggccggctatgaggcccagggggccagacccaagaggacgcagaggctgagcgcggagacctgggacctgctgagactccccctggagcgggagcagaatggagacagccaccattcaggggactggcgggggcccagcagggactcgctacccctccccgtgaggagcaggaagtaccaggaaggcccggacgctgagaggaggccccgggagggcagccactccccgctggacagcgccgacgtccgggtgcacgtgccacgcacgagcatcccgagggccccgtcttcggacgaggagtgcttctttgacctgttgaccaagttccagagcagccgcatggacgaccagcgttgtcccctggacgatggccaggccggggctgccgaggccacggccgcccccaccctggaggacaggatcgcccagccctcgatgacggcctcgccccagaccgaggaattcttcgacctcatcgccagctcccagagccgccggctggacgaccagcgggccagcgtgggcagcctgccggggctgcgaatcacccacagcaatgcagggcacctccgaggccacggcgagccccaggagccgggggacgacttcttcaacatgctcatcaagtaccagtcctccaggatcgatgaccagcgctgcccgccacctgacgtactgccccggggccctaccatgccggacgaggacttcttcagcctcattcagagggtgcaggctaagcgcatggacgagcagcgggtggacctcgccgggggcccggagcagggggcaggcggcccgcccgagccccagcagcagtgccagcctggtgcgagctaaggccctgtgcccaccgccaggcccaccctgcccccactcctggacgccggtctcacagtcacagccacgtcctcccgaggccattgccgaggacaggcactgggcatgcagccccacggcctccccgacccagggcgacaggctcaggccaagctgcccgtggtgggagggcgtgcttccatcccgggctggcccccatggccctcagcttcctcccttctgcccctgccgcaggccggacggggccttcggcatgtcggccccgacctggtgctgtcagactcccgcatcctctcccccaagcccttcccgttctgccctgccctgccaaatgtgaaaccctgctgtctcccccaccctccccaaaggtgtctctgagccgcctcttggggccaccaaggacagggccatgttctgtccccccagagctggtcttgggatggccgtgtgacaggcatgctccacccctccagcttcgtcctggggcagggctccctccaagcctgtctccccactccccggccagaggtcagcaaccacagaaggccccccagaccacgcatggcagaccaggctgcagtggcagccctgaggtgccccccgccgagtcccagggccctgcaggggcctcgacaggagccgggcctatctctaaagcagagggaatggctgggcatgaacttcgacattccaaaaccccaagccaggaaaaagggcagggcctggtcctagggatgcttactggcagcaagagcagtgcccagtcagggtgggaggtagcaccaggctctgtgaccctcacccaagtgggggggtggtcagtggaagctggggaggcttcactcagctcaaccctgcagaccccccatatgagaacccccctcctcccaccagctgggggagatgacatcactgctctctccatggggagggggctcacagggcaccaagttcgggatcctaggactggcaggacctgctggagcctgagatgggccccaggggcctgaggttgcctcctcctgtccagacccagccttggcacctcccaagactgccaagggccctaccatggccccacagcccccagggctggcagttccatctaggagggtgcctctaggccccactctcaggctaggatggagaggcagatctgggcctggtgaggtgacctgcttctggaggggcagggccgcacccgagagcagggacaggtgcccgaacacagggtctccaggacgtagcgcccccccgcatacttgaatgtatgtgcgtatttattgctcacgtctgtgccatgttgtcaatgggtcctttccaacccaagaggtacatttgtttttctgtttttcctgaaaaataaagtcggccaagtgagtgtg

SEQ ID NO: 58689 - DNA, 2028 bp, Artificial Sequence
  derived and/or modified sequence
atggccggccctgcccctcctgtggctgatgagctgcccggccctgctgcccggcggctgtacagcaggatggaggccagctgcctggagctggccctggagggggagcggctgtgcaaggccggggacttcaagacaggagtggccttctttgaagctgctgtgcaggtgggcacagaggacctgaagaccctgagcgccatctacagccagctgggcaatgcctacttctacctgaaggagcacggccgggccctggagtaccacaagcatgacctgctgctggcccggaccatcggggacaggatgggagaggccaaggccagcggcaacctgggcaacaccctgaaggtgctgggccgctttgatgaagctgctgtgtgctgccagaggcacctgagcatcgcccaggagcagggcgacaaggtgggggaggcccgggccctgtacaacattggaaatgtgtaccacgccaagggcaagcagctgtcctggaatgctgccaatgccacccaggaccccggccacctgcccccagatgtgcgggagaccctgtgcaaggccagcgagttctatgaaagaaacctgagcctggtgaaggagctgggggaccgggccgcccagggccgggcctacggcaacctgggcaacacccactacctgctgggcaacttcacagaggccaccaccttccacaaggagcggctggccatcgccaaggagtttggagacaaggctgctgagcggcgggcctacagcaacctgggcaatgcccacgtgttcctgggccgctttgatgtggccgctgagtactacaagaagaccctgcagctgagccggcagctgcgggaccaggccgtggaggcccaggcctgctacagcctgggcaacacctacaccctgctgcaggactatgaaagagctgctgagtaccacctgcggcacctgctgattgcccaggagctggccgacagagtgggggagggccgggcctgctggagcctgggcaatgcctacgtgtccatgggccgcccagcccaggccctgacctttgccaagaagcacctgcagatcagccaggagatcggggacagacatggagagctgacagccaggatgaatgtggcccagctgcagctggtgctgggccgcctgaccagccctgctgccagcgagaagccagacctggccggctatgaggcccagggcgcccggcccaagaggacccagaggctgtctgctgagacctgggacctgctgcggctgcccctggagcgggagcagaatggagacagccaccacagcggggactggaggggccccagccgggacagcctgcccctgcctgtgcgcagcaggaagtaccaggagggcccagatgctgagcggcggccccgggagggcagccacagccccctggacagcgcagatgtgcgggtgcacgtgcccaggaccagcatcccccgggcccccagcagtgatgaggagtgcttctttgacctgctgaccaagttccagagcagcaggatggatgaccagcgctgccccctggatgatggccaggccggggctgctgaggccacagctgcccccaccctggaggacagaattgcccagcccagcatgacagccagcccccagacagaggagttctttgacctgattgccagcagccagagccggcggctggatgaccagagggcctctgtgggcagcctgcccggcctgcgcatcacccacagcaatgccggccacctgcggggccatggagagccccaggagcctggagatgacttcttcaacatgctgatcaagtaccagagcagcagaattgatgaccagcgctgccccccaccagatgtgctgccccggggccccaccatgccagatgaggacttcttcagcctcatccagagggtgcaggccaagaggatggatgagcagagggtggacctggccggcggccctgagcagggcgctgggggccccccagagccccagcagcagtgccagcccggggccagctag

SEQ ID NO: 58690 - DNA, 2028 bp, Artificial Sequence
  derived and/or modified sequence
atggccggccccgccccccccgtggccgacgagctgcccggccccgcagccaggagactttacagtcgcatggaagcgtcctgcctggaattagctcttgaaggcgaaagactgtgcaaagcaggcgattttaagacaggggtggcatttttcgaggctgctgtgcaggtggggacggaggatctcaaaacacttagtgcaatatactctcaactgggtaacgcctatttctacttgaaagaacatggacgtgcactggaatatcacaagcatgaccttctcctcgcaaggaccattggcgaccgtatgggggaagcgaaagcaagcggtaacctcggcaataccttaaaggtcttgggccggtttgacgaggccgccgtgtgttgccagagacacctcagcattgcccaagagcaaggcgacaaagtgggggaggcccgcgcgctctataacatcgggaatgtgtaccacgccaaggggaaacagctctcctggaatgcggcgaatgcaacccaagacccaggacatctgccccccgatgtgcgggagacactgtgtaaggccagtgaattctacgaacggaacctgagtctggtaaaagagctgggagaccgcgccgctcaaggccgggcctacggaaatctgggaaatactcactacctgctgggcaactttactgaggcgactactttccacaaggaacgcttggccattgccaaggagttcggggataaagctgccgagagacgcgcctactctaacttgggaaacgcacacgtgtttctggggcgatttgatgtggccgcagagtattacaagaaaaccctgcagctctctcggcagctgcgtgaccaggccgtggaggcccaagcctgctactctctgggaaacacatataccctcctccaggactatgaacgggcggctgaataccatttgcgccacctgctcattgctcaggagttggcagatcgagtgggagaaggccgcgcatgctggagtttggggaatgcctatgtcagcatgggcagaccagctcaggctcttacttttgctaagaagcatttacagatttcacaagaaataggcgatcggcatggggagttaactgcaaggatgaacgtcgcacagctgcaactcgttctgggacgtcttacatcgcccgccgcgagcgagaagcctgatttagcgggatatgaggctcagggtgcgcgaccaaaacgcacccagcggctgtcagcggagacatgggacctgcttaggctccccctggagcgagagcagaatggagacagtcaccattcaggggactggagggggccaagcagggactctctgcccctgcctgtgaggtcacgtaagtatcaggaagggcctgatgcggagagaagacccagagagggatctcactctccgcttgacagcgctgacgtccgcgtgcatgtgccacgcacctccattccccgggcaccgtcctccgatgaggagtgcttctttgacctgctgacaaagtttcagtcctccagaatggatgatcagagatgtccactcgatgacggacaggctggagctgccgaggcaactgccgcgccaactctggaggacagaatcgcacagccctcaatgaccgcctcccctcagacagaggaattttttgacttgatagcctcttctcagtctaggagactcgatgatcaacgggcctccgtgggtagtctcccaggactcaggatcacgcacagcaatgcgggtcatctgcgggggcacggagagcctcaagagcctggtgacgacttctttaacatgcttatcaaataccaaagctcacgcattgacgatcagcggtgcccaccgcccgacgtccttccgaggggacccaccatgccagacgaggattttttctccctaatccagcgggttcaggccaaaagaatggacgaacaaagggttgatctggctggaggccctgagcagggtgctggcggcccacctgaaccacagcagcagtgccagcctggggcctcttag

SEQ ID NO: 58691 - DNA, 2028 bp, Artificial Sequence
  derived and/or modified sequence
atggctggtcccgctccccctgtggccgacgagctgcccggacctgccgcacgcaggctatattcaaggatggaggcatcctgtctcgaactcgctctcgagggagaaagactttgtaaggcaggcgacttcaaaactggcgtggctttctttgaagctgctgttcaggtggggacagaggacctgaagacactttctgccatatattcccagttagggaacgcatacttttacctaaaagagcacggcagggctctcgaataccacaaacacgacttgttgttggccagaaccatcggtgaccgcatgggcgaggcaaaggccagcggaaatttgggcaatactttgaaagttctgggcagattcgatgaagccgctgtgtgctgtcagagacacctgagcattgctcaagagcagggagataaggtgggcgaagcacgcgctctgtataatattgggaacgtgtaccatgctaagggtaaacagctctcctggaacgctgcaaatgcaacgcaggatcccggacaccttccacccgacgtgcgggaaacattgtgcaaagcatctgagttttacgaaaggaatttgtccctagttaaggagcttggagatagagccgctcaggggagggcttatgggaacttggggaatacacattacctactgggcaattttaccgaggccaccacgtttcacaaagagcggctggcaattgccaaggaattcggggataaggccgcagagcgtagagcatactcaaacctgggaaacgcacacgtgttcctgggcaggttcgatgtggccgcagaatattacaagaaaaccttgcaattatccaggcagttgcgtgatcaagccgtggaagcgcaggcatgctactcactgggaaatacttatacgctacttcaggattatgaacgagcagctgagtaccacttgcggcaccttctcattgctcaggagcttgcagaccgtgtcggcgaaggccgagcatgctggtctctggggaacgcctatgttagtatggggcgtcccgctcaggccctgacatttgccaagaagcatctccagatctcgcaggagataggagacaggcatggggaactgacagccagaatgaacgtagcccagctgcagctggtcctcgggcgacttacaagtcccgcagcgtctgagaagccagatctcgcagggtacgaagcacaaggagctagacctaaaagaacccagaggctttcagcagaaacctgggatctgctgcgactgcctctggaacgcgagcaaaacggagacagccaccactctggcgattggcgaggaccaagccgagactccttgccactgccagtccggtcgcggaagtatcaagaggggcctgatgccgaacgaagacccagggaaggatcccattctccactggacagtgctgacgtgagagtccatgtccccaggacatcaattccgcgagcgccaagcagcgatgaagaatgctttttcgatttacttacaaaattccaatcctcacgtatggacgatcagagatgtccactggacgatggacaggccggagcagccgaggccactgcagcccctacactggaagaccggattgcccaaccaagcatgaccgcctctcctcaaacagaggagttcttcgatctcatcgcatctagccagagtcggagattggatgatcagagagcttcggtcgggtcgcttccaggcctgcggatcactcattctaacgcaggccacttacgtggccacggcgagccacaggaacccggagacgacttctttaacatgctgattaagtatcagagctctcgaattgacgatcaaaggtgtcccccacccgatgtcctgccaagaggtccaaccatgccggacgaggactttttctccctcatccagcgtgtgcaggccaaacgaatggacgagcaaagagttgaccttgccggaggcccagagcagggagcgggtggtccacccgaacctcagcaacagtgtcaacctggagctagctag

SEQ ID NO: 58692 - protein, 70 aa, Artificial Sequence
  derived and/or modified sequence
MATSQYFDFAQGGGPQYSPEVETTPPALASGLPCALPWTVGCSGSDAVTALCPSLRGLACICSILWDPAW

SEQ ID NO: 58693 - DNA, 866 bp, Artificial Sequence
  derived and/or modified sequence
gaagacgccaagatggcgacgagtcagtatttcgacttcgcgcagggcggcggcccgcagtacagtccagaagtggagaccactcccccggcccttgcatctgggcttccttgtgccctgccttggacagttggctgcagtggaagtgacgctgtgactgccctgtgcccaagcttaagaggccttgcctgcatctgctccatcttatgggaccctgcctggtgaaggacccaaggctggcctgctggaggaggagatataaggagaagagtcacagtgccccatccaacaggtagctgccctccaggggcagagaagcccagccatggtcaggagagccacccagctgaggcccacctccaccaggattgccacccagctgaaccccacctcagccaggagagccacccagctgagccccatctggccaggagagccatccagctgagccccacctctgccaggattgccacccagctgagccccgccttggccaggagagccacccagctgagccccgcctgggccagaagagccacccagctgagccccgccttggccagaagagccacccagctgagcaccgccttggccagaagaggcacccagctgagccccgcctggccaggagagctgcccagctgatccccgcctgcagaatcacaagtgaaataaatgattgttgctttgagtcagaggtcagcggaccttttctgtaaaaagccacatagtaaatatctttggctttgtgagccacaccatgtctgtcacattagtgaaccctgctattgtattgcaagatgagccgtggacaatgtgtcatccagtgggcttggctgtgtgccaataaaactttatttttttgg

SEQ ID NO: 58694 - DNA, 213 bp, Artificial Sequence
  derived and/or modified sequence
atggccaccagccagtacttcgacttcgcccagggcggcggcccccagtacagccccgaggtggagaccaccccccccgccctggccagcggcctgccctgcgccctgccctggaccgtgggctgcagcggcagcgacgccgtgaccgccctgtgccccagcctgagaggcctggcctgcatctgcagcatcctgtgggaccccgcctggtag

SEQ ID NO: 58695 - DNA, 213 bp, Artificial Sequence
  derived and/or modified sequence
atggccacctcccagtacttcgactttgctcagggaggcggaccacagtattcgccagaggtagagacaacgccccctgccttggccagcgggctcccatgtgctctaccatggacagtcggctgctcaggttctgatgctgtaacagctctgtgcccatcattaagaggcctcgcctgtatttgttcaatcttgtgggatcccgcgtggtag

SEQ ID NO: 58696 - DNA, 213 bp, Artificial Sequence
  derived and/or modified sequence
atggccaccagccagtactttgattttgcccagggcggcggcccccagtacagccctgaggtggagaccaccccaccagccctggccagcggcctgccctgtgccctgccctggacagtgggctgcagcggcagtgatgctgtgacagccctgtgccccagcctgcggggcctggcctgcatctgcagcatcctgtgggaccctgcctggtag

SEQ ID NO: 58697 - DNA, 213 bp, Artificial Sequence
  derived and/or modified sequence
atggccaccagccagtacttcgacttcgcccagggcggcggcccccagtactctcccgaggtcgaaaccactccccccgccctggccagtggactgccatgtgcacttccatggacagtgggttgctcaggcagcgacgcggtgaccgccctctgtcccagcctccgcggactcgcctgcatatgttctatcctttgggatcctgcctggtag

SEQ ID NO: 58698 - DNA, 213 bp, Artificial Sequence
  derived and/or modified sequence
atggccacttcgcagtatttcgacttcgcacagggaggtggccctcagtattcaccagaagtcgagactacgccgccagccctggcgtctgggctgccttgtgcccttccatggacggtgggatgcagcgggtctgatgcagtcacagccctgtgcccttccctccgcggactggcctgtatctgcagcattctatgggaccccgcttggtag

SEQ ID NO: 58699 - protein, 927 aa, Artificial Sequence
  derived and/or modified sequence
MQSILYHGLIRDQACRRQTDYWQFVKDIRWLSPHSALHVEKFISVHENDQSSADGASERAVAELWLQHSLQYHCLSAQLRPLLGDRQYIRKFYTDAAFLLSDAHVTAMLQCLEAVEQNNPRLLAQIDASMFARKHESPLLVTKSQSLTALPSSTYTPPNSYAQHSYFGSFSSLHQSVPNNGSERRSTSFPLSGPPRKPQESRGHVSPAEDQTIQAPPVSVSALARDSPLTPNEMSSSTLTSPIEASWVSSQNDSPGDASEGPEYLAIGNLDPRGRTASCQSHSSNAESSSSNLFSSSSSQKPDSAASSLGDQEGGGESQLSSVLRRSSFSEGQTLTVTSGAKKSHIRSHSDTSIASRGAPGGPRNITIIVEDPIAESCNDKAKLRGPLPYSGQSSEVSTPSSLYMEYEGGRYLCSGEGMFRRPSEGQSLISYLSEQDFGSCADLEKENAHFSISESLIAAIELMKCNMMSQCLEEEEVEEEDSDREIQELKQKIRLRRQQIRTKNLLPMYQEAEHGSFRVTSSSSQFSSRDSAQLSDSGSADEVDEFEIQDADIRRNTASSSKSFVSSQSFSHCFLHSTSAEAVAMGLLKQFEGMQLPAASELEWLVPEHDAPQKLLPIPDSLPISPDDGQHADIYKLRIRVRGNLEWAPPRPQIIFNVHPAPTRKIAVAKQNYRCAGCGIRTDPDYIKRLRYCEYLGKYFCQCCHENAQMAIPSRVLRKWDFSKYYVSNFSKDLLIKIWNDPLFNVQDINSALYRKVKLLNQVRLLRVQLCHMKNMFKTCRLAKELLDSFDTVPGHLTEDLHLYSLNDLTATRKGELGPRLAELTRAGATHVERCMLCQAKGFICEFCQNEDDIIFPFELHKCRTCEECKACYHKACFKSGSCPRCERLQARREALARQSLESYLSDYEEEPAEALALEAAVLEAT

SEQ ID NO: 58700 - DNA, 2784 bp, Artificial Sequence
  derived and/or modified sequence
atgcaatctattctttatcatggcctgattagagatcaggcctgccggaggcagaccgattactggcaatttgtgaaagacataaggtggctgagccctcactccgccctccacgtggagaaatttataagtgtacatgagaatgaccagtcctccgccgacggagcaagtgaaagggcagtagcggagctatggttgcagcattcactgcagtatcattgtctgagcgcccaattacggccgctactaggtgaccgccaatacattcgtaagttttacacggatgcagcgttcctgctgtccgatgcacacgtgaccgccatgctccagtgtttggaagccgtagaacagaataatcctcgactcttagctcagattgatgccagcatgttcgcacgtaaacacgaaagcccattgttggtcactaaatcccaatcccttaccgctctgccatcttccacctacacaccccctaattcatatgcacagcattcttacttcgggtcattcagttctctccatcagagtgtgccaaacaatggatccgaaagaagaagtacaagcttccccctctctggcccccctaggaagccgcaagagtcacggggtcacgtttcgcccgccgaagatcaaaccatccaggctccacctgtgtctgtcagtgcactagcccgagactcccctctgacccccaacgaaatgagtagcagcactttaacctctcccatagaagcaagctgggtgagctcccaaaatgattcaccaggtgatgcatcagaggggcctgaatatctggccatcggaaatctggatcctagaggtcggacagcctcctgccagtcacatagcagtaatgccgagtcctcaagcagcaatctcttttcgtccagtagtagccagaagcccgatagcgctgccagctccctcggtgatcaggagggggggggagaaagtcagcttagcagtgtgctccggcggagctctttctctgagggacaaacattaacagtcaccagcggagccaaaaaatctcacattcgctctcattcggacacctcaatcgcctcccggggagcgcctggcggtccccggaatataaccattattgtcgaggatcccatagccgagtcatgcaacgataaggccaagctgaggggtcccctcccatacagcggacagtcatcagaagtgagcacaccctcaagtctttacatggagtacgagggcggccgttacctttgctcaggtgagggcatgttccgccggccctccgaaggtcagagtctcatatcttatttgtccgagcaggatttcggaagctgcgccgatctggagaaggagaatgcccacttttcaatttcagagtccctcatcgctgcgatcgaacttatgaagtgtaacatgatgtcacagtgcctggaagaagaggaggtggaagaggaggacagtgatcgagagattcaggagctcaagcagaaaattaggctgagaagacagcagattcgcactaagaatctcctgcccatgtatcaggaagccgaacacggtagctttagagttactagttcctcgtcacagttctcatcgagggacagtgcacagttatccgacagcggaagtgctgacgaagtggatgagtttgaaatacaagatgcggatattaggaggaacactgcctcctccagcaagagtttcgtgtccagccagagcttttcccattgctttctgcattcgacatcagccgaagctgtggcaatgggcctcttgaaacagttcgaggggatgcagcttcccgctgcatctgaactggaatggctcgttcccgaacacgatgctccacagaagctcctccccataccagacagcctaccaataagccctgatgacggccagcacgcagatatctacaagctgcgtatacgcgtcaggggcaacctcgaatgggcacctccaagaccgcaaattatctttaacgtgcatccagccccaacccggaagattgccgtagcaaaacagaactatcgttgtgccggatgcggcattagaaccgatcccgactacattaaacgtctgagatattgtgagtatttgggaaagtacttctgccaatgctgccacgagaacgctcagatggccattcccagtagggtcctgcgcaaatgggacttttctaaatattacgtgagcaacttctcaaaggacctgctgataaagatttggaacgaccccctctttaacgtccaggatattaatagtgccttgtaccgcaaagtgaagctgcttaatcaggttcggctgctccgcgtccagctttgccatatgaaaaatatgtttaaaacttgccgcctggcaaaggaactgttggattccttcgacacagtacctgggcatctgactgaggatttgcacctatattcattgaatgatttgacagccacgcgcaagggagaactcggcccacggttagcggagctaacacgcgcaggcgctacgcacgttgagagatgtatgctgtgccaggctaaaggctttatttgtgaattttgccaaaatgaggacgatattatctttccctttgagcttcataaatgcagaacgtgcgaagagtgcaaggcttgctaccacaaagcatgttttaaatccggatcctgccctaggtgtgaacggttacaagccaggcgcgaggccctggcacgccagtctctggagagctacttgtccgattatgaggaagaacctgccgaggctctggccctggaagcagccgtgctagaggcgacctag

SEQ ID NO: 58701 - DNA, 2784 bp, Artificial Sequence
  derived and/or modified sequence
atgcagagcatcctgtaccacggcctcatccgggaccaggcctgccggcggcagacagactactggcagtttgtgaaggacatccgctggctgagcccccacagcgccctgcacgtggagaagttcatctctgtgcatgaaaatgaccagagcagcgcagatggagccagcgagagagctgtggccgagctgtggctgcagcacagcctgcagtaccactgcctgagcgcccagctgcggcccctgctgggggaccggcagtacatcaggaagttctacacagatgctgccttcctgctgagtgatgcccacgtgacagccatgctgcagtgcctggaggccgtggagcagaacaacccccggctgctggcccagattgatgcctccatgtttgccaggaagcatgagagccccctgctggtgaccaagagccagagcctgacagccctgcccagcagcacctacaccccacccaacagctatgcccagcacagctacttcggcagcttcagcagcctgcaccagagcgtgcccaacaacggcagcgagcggcgcagcaccagcttccccctgagcggcccccccaggaagccccaggagagccggggccacgtgtccccagctgaggaccagaccatccaggcccctcctgtgtctgtgtctgccctggcccgggacagccccctgaccccaaatgagatgagcagcagcaccctgaccagccccatcgaggcctcctgggtgagcagccagaatgacagccctggagatgccagcgagggccctgagtacctggccatcggcaacctggacccccggggccgcacagccagctgccagagccacagcagcaatgctgagagcagcagcagcaacctcttcagcagcagcagcagccagaagccagacagcgctgccagcagcctgggggaccaggagggcggcggggagagccagctgagctctgtgctgcggcgcagcagcttcagcgagggccagaccctgactgtgaccagcggggccaagaagagccacatccgcagccacagcgacaccagcatcgccagcagaggagcccctgggggccccaggaacatcaccatcatcgtggaggaccccatcgccgagagctgcaatgacaaggccaagctgcggggccccctgccctacagcggccagagcagcgaggtgtccacccccagcagcctgtacatggagtatgaaggaggccgctacctgtgcagcggggagggcatgttcagaagacccagcgagggccagagcctcatctcctacctgtctgagcaggactttggcagctgtgccgacctggagaaggaaaatgcccacttcagcatcagcgagagcctgattgctgccatcgagctgatgaagtgcaacatgatgagccagtgcctggaggaggaggaggtggaggaggaggacagcgaccgggagatccaggagctgaagcagaagatccggctgcggcggcagcagatccgcaccaagaacctgctgcccatgtaccaggaggccgagcacggcagcttccgggtgaccagcagcagcagccagttcagcagccgggacagcgcccagctgagtgacagcggcagcgcagatgaggtggatgaatttgagatccaggatgctgacatcagaagaaacacagccagcagcagcaagagctttgtgagcagccagagcttcagccactgcttcctgcacagcaccagcgctgaggccgtggccatgggcctgctgaagcagtttgagggcatgcagctgcctgctgccagcgagctggagtggctggtgcctgagcatgatgccccccagaagctgctgcccatcccagacagcctgcccatcagcccagatgatggccagcacgccgacatctacaagctgcgcatccgggtgcggggcaacctggagtgggccccaccccggccccagatcatcttcaacgtgcacccagcccccaccaggaagattgctgtggccaagcagaactaccgctgtgccggctgcggcatcagaacagatcctgactacatcaagaggctgcgctactgtgagtacctgggcaagtacttctgccagtgctgccatgaaaatgcccagatggccatccccagccgggtgctgaggaagtgggacttcagcaagtactacgtgagcaacttcagcaaggacctgctgatcaagatctggaatgaccccctcttcaacgtgcaggacatcaacagcgccctgtacaggaaggtgaagctgctgaaccaggtgcggctgctgcgggtgcagctgtgccacatgaagaacatgttcaagacctgccgcctggccaaggagctgctggacagctttgacacagtgcccggccacctgacagaggacctgcacctgtacagcctgaatgacctgacagccaccaggaaaggagagctgggcccccggctggccgagctgacccgggccggggccacccacgtggagcgctgcatgctgtgccaggccaagggcttcatctgtgagttctgccagaatgaagatgacatcatcttcccctttgagctgcacaagtgcaggacctgtgaggagtgcaaggcctgctaccacaaggcctgcttcaagagcggcagctgcccccgctgtgagcggctgcaggcccggcgggaggccctggcccggcagagcctggagagctacctgagtgactatgaggaggagcctgctgaggccctggccctggaggccgctgtgctggaggccacctag

SEQ ID NO: 58702 - DNA, 2784 bp, Artificial Sequence
  derived and/or modified sequence
atgcagagcatcctgtaccacggcctgatccgggaccaggcctgccgcaggcagaccgactactggcagttcgttaaagacatcaggtggttatccccccacagcgcccttcatgtggagaagtttatatccgtccacgagaacgatcagtctagcgccgacggagcatccgagcgtgccgtagccgagctttggctgcaacactcgctgcagtatcattgcctgagtgctcagctcaggcctctgcttggggaccgccaatacattagaaaattctacaccgatgcagcgtttctgttatcagatgctcacgttaccgcaatgcttcaatgtctggaagccgtggaacagaataatccccgcctcctggcgcagatcgatgccagcatgtttgcacggaagcacgaatcccccttgttagttacgaaatctcagagcctcaccgcgctgccttcctctacatacactcctccaaatagctatgcccaacattcttattttggctcgttcagttctctgcatcaaagcgtgcctaataatggatctgaacgtaggagtacatcttttcccctgagcggtcctcctcgaaagcctcaggaaagtcgcggccacgtcagtcccgcagaggatcagacgattcaggcccctcccgtttctgtgagcgctctggcccgtgacagccctctcacgcccaacgaaatgtcttcctccaccctgacctcccctatcgaggcaagttgggtcagctcccaaaatgactccccgggagacgccagcgagggccccgagtacctcgccatcgggaacctggatcctagagggcgaaccgcaagctgtcagagccatagctccaatgcagaaagttcctctagcaatctgttcagctctagtagctcccagaagccagactctgccgcctccagtctgggggatcaggaaggcggaggcgaatctcagctgagttctgttctccgaagatcgtccttctcagaagggcagaccctgactgtaacctcaggagccaagaaatcacatatcaggagccattccgacactagcatagccagccgaggtgcacccggcggaccaaggaacataacaatcattgtggaggacccgatcgccgaatcctgcaacgacaaggccaaattgagaggcccgcttccttattcaggccagtcatcagaagtgagtactcctagcagtctgtatatggagtacgagggagggcgttacttgtgttctggcgagggaatgtttaggcgcccctcggaaggacagagtctgatatcctatctgtctgaacaggactttggcagctgcgcggatctggaaaaggagaatgcacacttcagtatctccgaaagccttatcgccgcgatcgagctaatgaaatgtaacatgatgagtcaatgtcttgaagaggaagaggtagaggaggaggactccgaccgcgagatacaagagctcaagcagaaaattcgactaagacgccaacagatcaggactaaaaacttactccccatgtaccaggaagccgaacacggatccttcagagtcacatctagtagtagccagttctcctcccgcgactcagcccagctttcagacagtggaagcgccgatgaggttgatgagtttgagatccaagatgctgacataagaaggaataccgcttcttcgtctaagtcttttgttagttcccagtctttctcgcattgcttcctgcacagtaccagcgccgaggccgttgctatggggctgctgaaacagtttgaggggatgcaactgcctgccgccagcgaactcgagtggctggtccctgaacatgacgccccacagaagctgttgccgatccccgactcactgccgatatcacccgacgacggacaacacgctgatatatacaagctgcgaatcagagttaggggcaatcttgaatgggcacctcctaggccgcagattatattcaacgtgcatcccgcccccactagaaaaatagccgtcgctaagcagaactaccgatgcgcaggttgcggaatccggactgatcccgattatattaagaggttaagatattgtgagtacctggggaaatatttctgtcagtgctgccatgaaaatgcccagatggctattccatcaagagtgctccggaagtgggacttctctaaatattatgtgtcaaatttcagtaaagacctcctgattaagatatggaacgacccattgttcaatgtgcaagatataaatagcgccttatataggaaggtcaaactcctcaatcaggtgcggctcttacgcgtgcagctctgccatatgaagaatatgtttaagacatgcaggctcgcaaaggagctgctggactcgttcgacaccgtcccaggccatcttaccgaggatctccacctatattcactgaacgacctaactgcaacaaggaaaggagagctgggaccccgccttgccgaactaactagagctggagccactcatgtggagcgatgtatgttgtgtcaagcaaagggtttcatttgcgaattttgtcagaacgaagacgatattattttcccatttgagctccataagtgcaggacatgcgaagagtgtaaagcttgctaccataaggcgtgttttaagagtgggtcctgtcctagatgtgagcggctgcaggctaggcgggaggccttagccaggcagtctctcgagagttacctgtccgattatgaggaggagcccgcggaggcactcgcactcgaggctgcagtgttggaggccacctag

SEQ ID NO: 58703 - DNA, 2784 bp, Artificial Sequence
  derived and/or modified sequence
atgcaaagcatcctgtaccatgggctgattagggaccaggcttgtaggcgtcagaccgactattggcagttcgtgaaggatattagatggctcagcccacacagtgccctacacgtggagaaattcatctccgtccacgagaacgaccagagttccgctgatggtgcttccgaacgtgcagtcgctgagctctggctgcagcacagtttacagtaccactgcttatccgctcaactgaggcctctactgggagatagacaatacattaggaaattctacactgatgccgcattcctgctgagcgatgctcacgtaactgcgatgttacagtgtctcgaagctgtggagcagaataatccacgactcttagcacagatcgatgcatctatgttcgcaagaaagcacgagagcccactcctggtgactaagagccagtccctgacagccctgcccagcagtacctataccccccctaatagttatgcgcagcattcttacttcggatcctttagctctctgcatcagagcgtgcctaacaacggctcagaaagaagatccacctcattccctctgtcaggtccgccacggaagccccaggagtctagaggacatgtgagccctgctgaggaccagaccatccaggccccacctgtctctgttagtgcactcgcacgcgatagtcctctgacgcccaatgagatgagtagctctaccttaacaagtcctatcgaggcgtcctgggttagctcccaaaatgactctcccggagacgccagtgagggtcccgaatacttggcaataggaaatcttgatcccagaggaagaacggccagctgccagtcacattcatcaaatgcggaatcatcaagctctaatctgttctcaagtagtagcagccagaaacccgacagcgccgctagctcactgggcgaccaggaggggggaggtgagagccaacttagcagcgtattgagacgctcctcattcagcgaagggcagacactcactgttacatctggcgctaagaaatctcacattagatcacacagtgacaccagcatcgccagtcggggagccccaggtggaccacgcaacattacgatcatcgtggaagacccgatcgcagagtcgtgcaacgacaaagcaaaactccgcggtcccttaccctacagtggccagagtagcgaagtttcgacaccttcttcgctgtacatggagtatgaggggggtcggtacttatgttctggggagggcatgttccgcagaccctcagaaggtcagagtctgatttcctacctgtccgagcaggacttcgggagttgcgccgacctggaaaaagaaaacgctcacttttcaatcagcgaatccttgatcgcagccatcgaactgatgaaatgcaacatgatgagtcaatgcctcgaggaagaggaggttgaggaagaagactctgatagagaaatccaagagctgaaacagaagatccggctgcgcagacagcagatcaggaccaagaatctattgcctatgtaccaagaggcagaacacggatcatttcgggtgacctcttcttccagccagttttcttccagagacagcgcccagctatcagactctggatccgcggatgaagttgacgaattcgaaattcaggacgccgatattcgcagaaatacagcatcctcgagcaaatcattcgtctcctcgcagtcattttcccattgctttctccactccactagcgcggaggctgtggcgatgggacttctgaagcaattcgaggggatgcagctgccagcagcatcagagctcgaatggctagtcccggagcacgatgccccacagaaactgttgcccatccctgactcactacccatttctccagacgacggacagcatgcggacatctataagctgagaattcgggtgcgaggaaatttagaatgggctcccccacggcctcaaattatcttcaacgtgcatcctgctccgacacgcaagatcgccgtcgctaaacaaaattatcggtgtgcaggatgcgggatcaggacagacccagactacattaaacggctcaggtattgcgagtatctgggcaaatacttttgccagtgctgccacgagaacgcgcagatggccatcccgagccgagtgctccgcaaatgggatttttccaagtattacgtcagtaacttttccaaggatcttctgattaaaatctggaacgatcccttgtttaatgttcaggacattaactctgctctgtacagaaaggtaaaactgctgaatcaagtgaggttgttacgggtgcaactgtgtcatatgaaaaacatgtttaaaacttgccgcttggctaaggagttgctagattcattcgatacagtcccgggacatctgactgaggaccttcacctgtattcactcaacgaccttacagccacgcgaaagggagaacttggtccaaggctggccgaactgacaagggccggagctacgcacgtggagcgatgcatgctgtgtcaggctaagggcttcatttgtgaattctgccaaaacgaggacgacatcatttttcccttcgagctgcacaaatgccgtacatgtgaggaatgtaaggcatgttaccataaagcatgtttcaaatcaggatcttgcccgcgttgtgaacggctgcaagctcggcgtgaagcactcgcgaggcaatctctggaaagctacttgagcgattacgaggaggagccagccgaggccctcgccctagaagcagcagtactcgaagctacatag

SEQ ID NO: 58704 - DNA, 2784 bp, Artificial Sequence
  derived and/or modified sequence
atgcagagcatcctgtaccacggcctgatcagagaccaggcctgcagaagacagaccgactactggcagttcgtgaaggacatcagatggctgagcccccacagcgccctgcacgtggagaagttcatcagcgtgcacgagaacgaccagagcagcgccgacggcgccagcgagagagccgtggccgagctgtggctgcagcacagcctgcagtaccactgcctgagcgcccagctgagacccctgctgggcgacagacagtacatcagaaagttctacaccgacgccgccttcctgctgagcgacgcccacgtgaccgccatgctgcagtgcctggaggccgtggagcagaacaaccccagactgctggcccagatcgacgccagcatgttcgccagaaagcacgagagccccctgctggtgaccaagagccagagcctgaccgccctgcccagcagcacctacaccccccccaacagctacgcccagcacagctacttcggcagcttcagcagcctgcaccagagcgtgcccaacaacggcagcgagagaagaagcaccagcttccccctgagcggcccccccagaaagccccaggagagcagaggccacgtgagccccgccgaggaccagaccatccaggccccccccgtgagcgtgagcgccctggccagagacagccccctgacccccaacgagatgagcagcagcaccctgaccagccccatcgaggccagctgggtgagcagccagaacgacagccccggcgacgccagcgagggccccgagtacctggccatcggcaacctggaccccagaggcagaaccgccagctgccagagccacagcagcaacgccgagagcagcagcagcaacctgttcagcagcagcagcagccagaagcccgacagcgccgccagcagcctgggcgaccaggagggcggcggcgagagccagctgagcagcgtgctgagaagaagcagcttcagcgagggccagaccctgaccgtgaccagcggcgccaagaagagccacatcagaagccacagcgacaccagcatcgccagcagaggcgcccccggcggccccagaaacatcaccatcatcgtggaggaccccatcgccgagagctgcaacgacaaggccaagctgagaggccccctgccctacagcggccagagcagcgaggtgagcacccccagcagcctgtacatggagtacgagggcggcagatacctgtgcagcggcgagggcatgttcagaagacccagcgagggccagagcctgatcagctacctgagcgagcaggacttcggcagctgcgccgacctggagaaggagaacgcccacttcagcatcagcgagagcctgatcgccgccatcgagctgatgaagtgcaacatgatgagccagtgcctggaggaggaggaggtggaggaggaggacagcgacagagagatccaggagctgaagcagaagatcagactgagaagacagcagatcagaaccaagaacctgctgcccatgtaccaggaggccgagcacggcagcttcagagtgaccagcagcagcagccagttcagcagcagagacagcgcccagctgagcgacagcggcagcgccgacgaggtggacgagttcgagatccaggacgccgacatcagaagaaacaccgccagcagcagcaagagcttcgtgagcagccagagcttcagccactgcttcctgcacagcaccagcgccgaggccgtggccatgggcctgctgaagcagttcgagggcatgcagctgcccgccgccagcgagctggagtggctggtgcccgagcacgacgccccccagaagctgctgcccatccccgacagcctgcccatcagccccgacgacggccagcacgccgacatctacaagctgagaatcagagtgagaggcaacctggagtgggccccccccagaccccagatcatcttcaacgtgcaccccgcccccaccagaaagatcgccgtggccaagcagaactacagatgcgccggctgcggcatcagaaccgaccccgactacatcaagagactgagatactgcgagtacctgggcaagtacttctgccagtgctgccacgagaacgcccagatggccatccccagcagagtgctgagaaagtgggacttcagcaagtactacgtgagcaacttcagcaaggacctgctgatcaagatctggaacgaccccctgttcaacgtgcaggacatcaacagcgccctgtacagaaaggtgaagctgctgaaccaggtgagactgctgagagtgcagctgtgccacatgaagaacatgttcaagacctgcagactggccaaggagctgctggacagcttcgacaccgtgcccggccacctgaccgaggacctgcacctgtacagcctgaacgacctgaccgccaccagaaagggcgagctgggccccagactggccgagctgaccagagccggcgccacccacgtggagagatgcatgctgtgccaggccaagggcttcatctgcgagttctgccagaacgaggacgacatcatcttccccttcgagctgcacaagtgcagaacctgcgaggagtgcaaggcctgctaccacaaggcctgcttcaagagcggcagctgccccagatgcgagagactgcaggccagaagagaggccctggccagacagagcctggagagctacctgagcgactacgaggaggagcccgccgaggccctggccctggaggccgccgtgctggaggccacctag

SEQ ID NO: 58705 - protein, 266 aa, Artificial Sequence
  derived and/or modified sequence
MDDSTEREQSRLTSCLKKREEMKLKECVSILPRKESPSVRSSKDGKLLAATLLLALLSCCLTVVSFYQVAALQGDLASLRAELQGHHAEKLPAGAGAPKAGLEEAPAVTAGLKIFEPPAPGEGNSSQNSRNKRAVQGPEETGSYTFVPWLLSFKRGSALEEKENKILVKETGYFFIYGQVLYTDKTYAMGHLIQRKKVHVFGDELSLVTLFRCIQNMPETLPNNSCYSAGIAKLEEGDELQLAIPRENAQISLDGDVTFFGALKLL

SEQ ID NO: 58706 - DNA, 801 bp, Artificial Sequence
  derived and/or modified sequence
atggacgacagcaccgagagagagcagagcagactgaccagctgcctgaagaagagagaggagatgaagctgaaggagtgcgtgagcatcctgcccagaaaggagagccccagcgtgagaagcagcaaggacggcaagctgctggccgccaccctgctgctggccctgctgagctgctgcctgaccgtggtgagcttctaccaggtggccgccctgcagggcgacctggccagcctgagagccgagctgcagggccaccacgccgagaagctgcccgccggcgccggcgcccccaaggccggcctggaggaggcccccgccgtgaccgccggcctgaagatcttcgagccccccgcccccggcgagggcaacagcagccagaacagcagaaacaagagagccgtgcagggccccgaggagaccggcagctacaccttcgtgccctggctgctgagcttcaagagaggcagcgccctggaggagaaggagaacaagatcctggtgaaggagaccggctacttcttcatctacggccaggtgctgtacaccgacaagacctacgccatgggccacctgatccagagaaagaaggtgcacgtgttcggcgacgagctgagcctggtgaccctgttcagatgcatccagaacatgcccgagaccctgcccaacaacagctgctacagcgccggcatcgccaagctggaggagggcgacgagctgcagctggccatccccagagagaacgcccagatcagcctggacggcgacgtgaccttcttcggcgccctgaagctgctgtag

SEQ ID NO: 58707 - DNA, 801 bp, Artificial Sequence
  derived and/or modified sequence
atggatgacagtaccgaaagagagcaaagtcgactgacgtcgtgtctgaagaagcgggaggagatgaagctgaaagagtgcgtgagcattctacctaggaaggagtccccatcagtccggagctccaaagacggcaaattgctcgccgcaacactcctgctcgcactcctctcctgctgtttgactgtggtgtcattttatcaggtggccgcattgcaaggggacctcgcttctctcagggccgaactgcagggtcatcacgccgaaaagctaccagcaggagctggggcccccaaagccggtctagaggaggcacctgccgttactgcgggtcttaaaatttttgaaccccccgcacctggggagggcaattctagtcagaatagccgaaacaaacgcgcagtacagggacctgaggaaaccgggagttatactttcgtgccatggctccttagttttaagaggggatccgctctcgaggagaaagaaaacaagatccttgtcaaagagaccggctacttcttcatctacggtcaagtgttgtacactgacaaaacttacgccatgggccaccttatacagcgcaagaaagttcacgtcttcggggatgagctgtctcttgtaaccctgttcaggtgcattcagaatatgccagagaccctccctaacaatagctgttattctgccggcatcgcaaagcttgaagagggagatgagctgcagctggctatcccacgagagaatgcacaaatatctctagacggtgatgtcacgttctttggggcccttaagctgctctag

SEQ ID NO: 58708 - DNA, 801 bp, Artificial Sequence
  derived and/or modified sequence
atggatgacagcacagagcgggagcagagccggctgaccagctgcctgaagaagcgggaggagatgaagctgaaggaatgtgtgtccatcctgcccaggaaggagagccccagcgtgcgcagcagcaaggatggcaagctgctggccgccaccctgctgctggccctgctgagctgctgcctgactgtggtgtccttctaccaggtggccgccctgcagggcgacctggccagcctgcgggcagagctgcagggccaccacgccgagaagctgcctgctggagctggggcccccaaggccggcctggaggaggccccagctgtgacagctggcctgaagatctttgagcccccagcccctggagagggcaacagcagccagaacagcaggaacaagagagctgtgcagggccctgaggagaccggcagctacacctttgtgccctggctgctgtccttcaagaggggcagcgccctggaggagaaggagaacaagatcctggtgaaggagaccggctacttcttcatctacggccaggtgctgtacacagacaagacctacgccatgggccacctgatccagaggaagaaggtgcacgtgtttggagatgagctgagcctggtgaccctcttccgctgcatccagaacatgcctgagaccctgcccaacaacagctgctacagcgctggcatcgccaagctggaggagggagatgagctgcagctggccatccccagagaaaatgcccagatcagcctggatggagatgtgaccttcttcggggccctgaagctgctgtag

SEQ ID NO: 58709 - DNA, 801 bp, Artificial Sequence
  derived and/or modified sequence
atggacgacagcaccgagcgggagcagagccggctgaccagctgcctaaagaagcgggaggaaatgaagctcaaggaatgcgttagcattctccctagaaaggaatcgccttccgtcagaagtagcaaggacggcaagctcctcgctgctactttgttactcgccctgctgtcctgctgcctcaccgttgtgagtttctatcaggtggcagctcttcagggagacctagcctctctgagagcagagctgcagggccaccacgcggaaaaacttcccgcaggcgcgggcgctcctaaggcagggctggaggaggcaccggccgtgaccgcgggcctcaaaatctttgagcctcctgctcctggggaaggaaatagttcccagaatagccgaaacaagagggccgtgcagggcccggaggaaacaggctcatacacatttgtcccatggctattgtctttcaagaggggatccgccctcgaggagaaggaaaacaaaatcttggtgaaggagacggggtacttttttatttatgggcaagtcctctataccgacaaaacctacgcaatggggcacctgatccagaggaagaaagtccatgtctttggtgatgaacttagcctcgtgacactctttcgctgtatccagaacatgccagaaacactgcctaataacagctgttactctgccgggattgccaaactcgaggaaggcgatgaactgcagctggcaatacccagggagaacgctcaaatctctttggacggagacgtgacgttctttggggccctgaaactgctttag

SEQ ID NO: 58710 - DNA, 801 bp, Artificial Sequence
  derived and/or modified sequence
atggatgactccacggaacgggaacaatctcgcctaaccagctgcctcaaaaagagagaggagatgaaactgaaagagtgcgtcagtatcctgccacggaaggagtcacctagtgtgcggagtagtaaggacggcaagcttctcgcagccacgctattgcttgcactcctgtcttgctgcttaactgtggtctcattctatcaagttgctgcgcttcagggtgacctagcctcgctgcgcgcagagctacaaggccaccatgcagaaaagctgcccgcaggcgcaggggcacccaaggcaggactggaggaggctcccgctgtcactgccggattaaagatctttgaaccacccgctcctggtgaagggaactcaagccaaaactcacgcaacaagcgcgctgtacagggccctgaagagaccgggtcatacaccttcgtgccttggcttttgagtttcaagagagggtccgccctggaggagaaggaaaacaagatcctcgtgaaagagaccggctactttttcatttatgggcaggtgctgtataccgacaaaacatatgcgatgggacatctgatacaacgcaaaaaagtacatgtgtttggcgacgagctatctctggtgacccttttccggtgtatacagaacatgccagagaccctgccgaataatagctgctacagtgccggtattgccaaattggaggagggggacgagctgcagcttgctattcctcgcgagaacgcgcaaatcagtctcgatggggatgtgaccttttttggtgccctcaaactcctctag

SEQ ID NO: 58711 - DNA, 1147 bp, Artificial Sequence
  derived and/or modified sequence
gaaattcttacaaaaactgaaagtgaaatgaggaagacagattgagcaatccaatcggagggtaaatgccagcaaacctactgtacagtaggggtagagatgcagaaaggcagaaaggagaaaattcaggataactctcctgaggggtgagccaagccctgccatgtagtgcacgcaggacatcaacaaacacagataacaggaaatgatccattccctgtggtcacttattctaaaggccccaaccttcaaagttcaagtagtgatatggatgactccacagaaagggagcagtcacgccttacttcttgccttaagaaaagagaagaaatgaaactgaaggagtgtgtttccatcctcccacggaaggaaagcccctctgtccgatcctccaaagacggaaagctgctggctgcaaccttgctgctggcactgctgtcttgctgcctcacggtggtgtctttctaccaggtggccgccctgcaaggggacctggccagcctccgggcagagctgcagggccaccacgcggagaagctgccagcaggagcaggagcccccaaggccggcctggaggaagctccagctgtcaccgcgggactgaaaatctttgaaccaccagctccaggagaaggcaactccagtcagaacagcagaaataagcgtgccgttcagggtccagaagaaacaggatcttacacatttgttccatggcttctcagctttaaaaggggaagtgccctagaagaaaaagagaataaaatattggtcaaagaaactggttacttttttatatatggtcaggttttatatactgataagacctacgccatgggacatctaattcagaggaagaaggtccatgtctttggggatgaattgagtctggtgactttgtttcgatgtattcaaaatatgcctgaaacactacccaataattcctgctattcagctggcattgcaaaactggaagaaggagatgaactccaacttgcaataccaagagaaaatgcacaaatatcactggatggagatgtcacattttttggtgcattgaaactgctgtgacctacttacaccatgtctgtagctattttcctccctttctctgtacctctaagaagaaagaatctaactgaaaatacca

SEQ ID NO: 58712 - protein, 81 aa, Artificial Sequence
  derived and/or modified sequence
MTAAVFFGCAFIAFGPALALYVFTIATEPLRIIFLIAGRRVETCKNTEAPDCASPSGSLSFLLVGVSTDFVPCLVHGKSHY

SEQ ID NO: 58713 - protein, 216 aa, Artificial Sequence
  derived and/or modified sequence
MTAAVFFGCAFIAFGPALALYVFTIATEPLRIIFLIAGAFFWLVSLLISSLVWFMARVIIDNKDGPTQKYLLIFGAFVSVYIQEMFRFAYYKLLKKASEGLKSINPGETAPSMRLLAYAFMTLVIILLHVFWGIVFFDGCEKKKWGILLIVLLTHLLVSAQTFISSYYGINLASAFIILVLMGTWAFLAAGGSCRSLKLCLLCQDKNFLLYNQRSR

SEQ ID NO: 58714 - DNA, 246 bp, Artificial Sequence
  derived and/or modified sequence
atgaccgctgcagtgttttttggttgcgcgttcatcgccttcggccctgccttagcattgtacgttttcacaatcgccaccgagcctctgcgtatcattttcttaatcgcagggaggagggtggaaacatgtaagaatacagaagctccagattgtgcttctcccagcgggtctctgtcctttttattggtaggagtcagcaccgatttcgtcccatgtctggtgcatgggaagagccattactag

SEQ ID NO: 58715 - DNA, 651 bp, Artificial Sequence
  derived and/or modified sequence
atgactgctgccgtgttttttggctgtgcctttatagcttttggaccagctctcgctttatacgtctttaccattgccaccgaacctctgagaatcattttccttattgcaggagcattcttttggctcgtcagcctgctcataagttccttggtttggtttatggccagagtgataatcgataacaaagacggcccaacccagaaatacctgcttattttcggcgcctttgtcagcgtgtacatccaggagatgtttcggttcgcctactataagctcttgaaaaaggccagcgagggcttgaagtctatcaatcccggagaaacagccccctcaatgcggttgttagcgtatgccttcatgactcttgtaatcattttgttgcatgtgttttgggggatcgtctttttcgatggctgtgaaaagaagaagtggggcattttactcatcgtgctgttgactcatctcctggtgagcgcacaaacattcatctcctcctattacggaattaacctcgcttctgcatttatcatcctggtgctcatgggcacatgggcatttcttgctgcgggaggctcttgccggtcactaaagttgtgcctgctgtgccaggataagaatttcttgctgtataaccagcgcagccggtag

SEQ ID NO: 58716 - DNA, 246 bp, Artificial Sequence
  derived and/or modified sequence
atgacagctgctgtgttcttcggctgtgccttcatcgccttcggccctgccctggccctgtatgtgttcaccatcgccacagagcccctgcgcatcatcttcctgattgctggaagaagagtggagacctgcaagaacacagaggccccagactgtgccagccccagcggcagcctgtccttcctgctggtgggcgtgtccacagactttgtgccctgcctggtgcacggcaagagccactactag

SEQ ID NO: 58717 - DNA, 651 bp, Artificial Sequence
  derived and/or modified sequence
atgacagctgctgtgttcttcggctgtgccttcatcgccttcggccctgccctggccctgtatgtgttcaccatcgccacagagcccctgcgcatcatcttcctgattgctggggccttcttctggctggtgtccctgctgatcagcagcctggtgtggttcatggcccgggtcatcatcgacaacaaggatggccccacccagaagtacctgctgatctttggagcctttgtgtctgtgtacatccaggagatgttccgctttgcctactacaagctgctgaagaaggccagcgagggcctgaagagcatcaaccctggagaaacagcccccagcatgaggctgctggcctatgccttcatgaccctggtgatcatcctgctgcacgtgttctggggcatcgtgttctttgatggctgtgagaagaagaagtggggcatcctgctgattgtgctgctgacccacctgctggtgtctgcccagaccttcatcagcagctactacggcatcaacctggccagcgccttcatcatcctggtgctgatgggcacctgggccttcctggccgccggcggcagctgccgcagcctgaagctgtgcctgctgtgccaggacaagaacttcctgctgtacaaccagaggagcaggtag

SEQ ID NO: 58718 - DNA, 246 bp, Artificial Sequence
  derived and/or modified sequence
atgaccgccgccgtgttcttcggctgcgccttcatcgccttcggccctgctttagctttatacgtgtttacaatcgccactgaacctcttcggattatcttcctgatagctggtaggcgagtggaaacctgcaagaacaccgaagctcccgactgtgccagtccctcagggtcactctcctttctgctggttggggtgagcaccgacttcgtgccctgtctggtacacggtaagagccactattag

SEQ ID NO: 58719 - DNA, 651 bp, Artificial Sequence
  derived and/or modified sequence
atgaccgccgccgtgttcttcggctgcgccttcatcgccttcggccctgcccttgccttgtacgtttttacaattgcaacagaacccctgcgtatcatatttcttatcgccggcgcatttttctggttggtaagcctgttgattagctctctggtgtggttcatggctcgcgtgattatcgacaacaaggatggccctactcagaaatacttgcttattttcggggctttcgtgtccgtgtacatccaggaaatgttccggtttgcttactataaactcctgaagaaggcgtcggaaggattaaaaagtattaatcctggcgaaaccgccccctctatgaggctcttagcttatgctttcatgaccctagtcatcatcctgctccatgtattttgggggattgtgttctttgacggatgcgagaaaaaaaaatgggggattctccttattgttctgctgacgcacctcctggtgtcggcacagaccttcatatcgtcctactacgggatcaacttggccagtgcttttattattctggtgcttatgggaacatgggcgttcctcgccgctggtgggtcctgtcggtcccttaaactttgtctgctgtgccaagataaaaatttcctgttgtacaatcagcgatccaggtag

SEQ ID NO: 58720 - DNA, 246 bp, Artificial Sequence
  derived and/or modified sequence
atgaccgcggcagtgttcttcggctgcgcttttattgcatttggcccagccctggccttatatgtcttcacaatcgccacagagcctctgcgaattatcttccttatcgcaggcaggcgtgttgaaacttgcaaaaatacagaggccccagactgcgcttccccatctggcagtctcagcttcctcttggttggcgtctctactgacttcgttccctgtctagtacatggcaagtctcattattag

SEQ ID NO: 58721 - DNA, 651 bp, Artificial Sequence
  derived and/or modified sequence
atgacagccgctgtgttttttggctgtgcatttatcgccttcggccctgctctggctctgtatgtcttcaccatcgccacagagcccctcagaattattttcttgatcgccggagccttcttctggctggtgtcactgcttatttccagccttgtctggttcatggccagagtgattatagataacaaagatgggcctacacagaagtatttgctgatattcggcgcattcgtgtccgtttacattcaggagatgtttagattcgcttattacaagttattgaaaaaggccagtgaaggtttgaaaagcattaacccaggagaaacggctccatcgatgcggttactcgcttacgccttcatgacattggttataatcttactccacgtgttctggggcatcgtgttctttgacggctgcgaaaagaaaaagtggggcatattgttgatcgtgttactaacacacctcttagtgtctgcgcagacctttatttcctcctactacgggattaatctcgcttctgcatttatcatcctggttttaatgggaacttgggcgtttctggccgctggcggatcctgcaggtcactgaagctgtgtctgttgtgtcaggataaaaactttttgttgtacaaccagcggagccgctag

SEQ ID NO: 58722 - DNA, 685 bp, Artificial Sequence
  derived and/or modified sequence
tttccgcggtggccatgactgcggccgtgttcttcggctgcgccttcattgccttcgggcctgcgctcgccctttatgtcttcaccatcgccaccgagccgttgcgtatcatcttcctcatcgccggagctttcttctggttggtgtctctactgatttcgtcccttgtttggttcatggcaagagtcattattgacaacaaagatggaccaacacagaaatatctgctgatctttggagcgtttgtctctgtctatatccaagaaatgttccgatttgcatattataaactcttaaaaaaagccagtgaaggtttgaagagtataaacccaggtgagacagcaccctctatgcgactgctggcctatgctttcatgacgctggtcattatcttgctgcatgtattctggggcattgtattttttgatggctgtgagaagaaaaagtggggcatcctccttatcgttctcctgacccacctgctggtgtcagcccagaccttcataagttcttattatggaataaacctggcgtcagcatttataatcctggtgctcatgggcacctgggcattcttagctgcgggaggcagctgccgaagcctgaaactctgcctgctctgccaagacaagaactttcttctttacaaccagcgctccagataacctcagggaaccagcacttc

SEQ ID NO: 58723 - DNA, 246 bp, Artificial Sequence
  derived and/or modified sequence
atgaccgccgccgtgttcttcggctgcgccttcatcgccttcggccccgccctggccctgtacgtgttcaccatcgccaccgagcccctgagaatcatcttcctgatcgccggcagaagagtggagacctgcaagaacaccgaggcccccgactgcgccagccccagcggcagcctgagcttcctgctggtgggcgtgagcaccgacttcgtgccctgcctggtgcacggcaagagccactactag

SEQ ID NO: 58724 - DNA, 651 bp, Artificial Sequence
  derived and/or modified sequence
atgaccgccgccgtgttcttcggctgcgccttcatcgccttcggccccgccctggccctgtacgtgttcaccatcgccaccgagcccctgagaatcatcttcctgatcgccggcgccttcttctggctggtgagcctgctgatcagcagcctggtgtggttcatggccagagtgatcatcgacaacaaggacggccccacccagaagtacctgctgatcttcggcgccttcgtgagcgtgtacatccaggagatgttcagattcgcctactacaagctgctgaagaaggccagcgagggcctgaagagcatcaaccccggcgagaccgcccccagcatgagactgctggcctacgccttcatgaccctggtgatcatcctgctgcacgtgttctggggcatcgtgttcttcgacggctgcgagaagaagaagtggggcatcctgctgatcgtgctgctgacccacctgctggtgagcgcccagaccttcatcagcagctactacggcatcaacctggccagcgccttcatcatcctggtgctgatgggcacctgggccttcctggccgccggcggcagctgcagaagcctgaagctgtgcctgctgtgccaggacaagaacttcctgctgtacaaccagagaagcagatag

SEQ ID NO: 58725 - protein, 1257 aa, Artificial Sequence
  derived and/or modified sequence
MQKGIRLNDGHVASLGLLARKDGTRKGYLSKRSSDNTKWQTKWFALLQNLLFYFESDSSSRPSGLYLLEGCVCDRAPSPKPALSAKEPLEKQHYFTVNFSHENQKALELRTEDAKDCDEWVAAIAHASYRTLATEHEALMQKYLHLLQIVETEKTVAKQLRQQIEDGEIEIERLKAEITSLLKDNERIQSTQTVAPNDEDSDIKKIKKVQSFLRGWLCRRKWKTIIQDYIRSPHADSMRKRNQVVFSMLEAEAEYVQQLHILVNNFLRPLRMAASSKKPPITHDDVSSIFLNSETIMFLHQIFYQGLKARISSWPTLVLADLFDILLPMLNIYQEFVRNHQYSLQILAHCKQNRDFDKLLKHYEAKPDCEERTLETFLTYPMFQIPRYILTLHELLAHTPHEHVERNSLDYAKSKLEELSRIMHDEVSETENIRKNLAIERMIIEGCEILLDTSQTFVRQGSLIQVPMSEKGKITRGRLGSLSLKKEGERQCFLFSKHLIICTRGSGGKLHLTKNGVISLIDCTLLEEPESTEEEAKGSGQDIDHLDFKIGVEPKDSPPFTVILVASSRQEKAAWTSDISQCVDNIRCNGLMMNAFEENSKVTVPQMIKSDASLYCDDVDIRFSKTMNSCKVLQIRYASVERLLERLTDLRFLSIDFLNTFLHSYRVFTTAIVVLDKLITIYKKPISAIPARSLELLFASGQNNKLLYGEPPKSPRATRKFSSPPPLSITKTSSPSRRRKLSLNIPIITGGKALDLAALSCNSNGYTSMYSAMSPFSKATLDTSKLYVSSSFTNKIPDEGDTTPEKPEDPSALSKQSSEVSMREESDIDQNQSDDGDTETSPTKSPTTPKSVKNKNSSEFPLFSYNNGVVMTSCRELDNNRSALSAASAFAIATAGANEGTPNKEKYRRMSLASAGFPPDQRNGDKEFVIRRAATNRVLNVLRHWVSKHSQDFETNDELKCKVIGFLEEVMHDPELLTQERKAAANIIRTLTQEDPGDNQITLEEITQMAEGVKAEPFENHSALEIAEQLTLLDHLVFKKIPYEEFFGQGWMKLEKNERTPYIMKTTKHFNDISNLIASEIIRNEDINARVSAIEKWVAVADICRCLHNYNAVLEITSSMNRSAIFRLKKTWLKVSKQTKALIDKLQKLVSSEGRFKNLREALKNCDPPCVPYLGMYLTDLAFIEEGTPNYTEDGLVNFSKMRMISHIIREIRQFQQTAYKIEHQAKVTQYLLDQSFVMDEESLYESSLRIEPKLPT

SEQ ID NO: 58726 - DNA, 3774 bp, Artificial Sequence
  derived and/or modified sequence
atgcagaagggcatcagactgaacgacggccacgtggccagcctgggcctgctggccagaaaggacggcaccagaaagggctacctgagcaagagaagcagcgacaacaccaagtggcagaccaagtggttcgccctgctgcagaacctgctgttctacttcgagagcgacagcagcagcagacccagcggcctgtacctgctggagggctgcgtgtgcgacagagcccccagccccaagcccgccctgagcgccaaggagcccctggagaagcagcactacttcaccgtgaacttcagccacgagaaccagaaggccctggagctgagaaccgaggacgccaaggactgcgacgagtgggtggccgccatcgcccacgccagctacagaaccctggccaccgagcacgaggccctgatgcagaagtacctgcacctgctgcagatcgtggagaccgagaagaccgtggccaagcagctgagacagcagatcgaggacggcgagatcgagatcgagagactgaaggccgagatcaccagcctgctgaaggacaacgagagaatccagagcacccagaccgtggcccccaacgacgaggacagcgacatcaagaagatcaagaaggtgcagagcttcctgagaggctggctgtgcagaagaaagtggaagaccatcatccaggactacatcagaagcccccacgccgacagcatgagaaagagaaaccaggtggtgttcagcatgctggaggccgaggccgagtacgtgcagcagctgcacatcctggtgaacaacttcctgagacccctgagaatggccgccagcagcaagaagccccccatcacccacgacgacgtgagcagcatcttcctgaacagcgagaccatcatgttcctgcaccagatcttctaccagggcctgaaggccagaatcagcagctggcccaccctggtgctggccgacctgttcgacatcctgctgcccatgctgaacatctaccaggagttcgtgagaaaccaccagtacagcctgcagatcctggcccactgcaagcagaacagagacttcgacaagctgctgaagcactacgaggccaagcccgactgcgaggagagaaccctggagaccttcctgacctaccccatgttccagatccccagatacatcctgaccctgcacgagctgctggcccacaccccccacgagcacgtggagagaaacagcctggactacgccaagagcaagctggaggagctgagcagaatcatgcacgacgaggtgagcgagaccgagaacatcagaaagaacctggccatcgagagaatgatcatcgagggctgcgagatcctgctggacaccagccagaccttcgtgagacagggcagcctgatccaggtgcccatgagcgagaagggcaagatcaccagaggcagactgggcagcctgagcctgaagaaggagggcgagagacagtgcttcctgttcagcaagcacctgatcatctgcaccagaggcagcggcggcaagctgcacctgaccaagaacggcgtgatcagcctgatcgactgcaccctgctggaggagcccgagagcaccgaggaggaggccaagggcagcggccaggacatcgaccacctggacttcaagatcggcgtggagcccaaggacagcccccccttcaccgtgatcctggtggccagcagcagacaggagaaggccgcctggaccagcgacatcagccagtgcgtggacaacatcagatgcaacggcctgatgatgaacgccttcgaggagaacagcaaggtgaccgtgccccagatgatcaagagcgacgccagcctgtactgcgacgacgtggacatcagattcagcaagaccatgaacagctgcaaggtgctgcagatcagatacgccagcgtggagagactgctggagagactgaccgacctgagattcctgagcatcgacttcctgaacaccttcctgcacagctacagagtgttcaccaccgccatcgtggtgctggacaagctgatcaccatctacaagaagcccatcagcgccatccccgccagaagcctggagctgctgttcgccagcggccagaacaacaagctgctgtacggcgagccccccaagagccccagagccaccagaaagttcagcagccccccccccctgagcatcaccaagaccagcagccccagcagaagaagaaagctgagcctgaacatccccatcatcaccggcggcaaggccctggacctggccgccctgagctgcaacagcaacggctacaccagcatgtacagcgccatgagccccttcagcaaggccaccctggacaccagcaagctgtacgtgagcagcagcttcaccaacaagatccccgacgagggcgacaccacccccgagaagcccgaggaccccagcgccctgagcaagcagagcagcgaggtgagcatgagagaggagagcgacatcgaccagaaccagagcgacgacggcgacaccgagaccagccccaccaagagccccaccacccccaagagcgtgaagaacaagaacagcagcgagttccccctgttcagctacaacaacggcgtggtgatgaccagctgcagagagctggacaacaacagaagcgccctgagcgccgccagcgccttcgccatcgccaccgccggcgccaacgagggcacccccaacaaggagaagtacagaagaatgagcctggccagcgccggcttcccccccgaccagagaaacggcgacaaggagttcgtgatcagaagagccgccaccaacagagtgctgaacgtgctgagacactgggtgagcaagcacagccaggacttcgagaccaacgacgagctgaagtgcaaggtgatcggcttcctggaggaggtgatgcacgaccccgagctgctgacccaggagagaaaggccgccgccaacatcatcagaaccctgacccaggaggaccccggcgacaaccagatcaccctggaggagatcacccagatggccgagggcgtgaaggccgagcccttcgagaaccacagcgccctggagatcgccgagcagctgaccctgctggaccacctggtgttcaagaagatcccctacgaggagttcttcggccagggctggatgaagctggagaagaacgagagaaccccctacatcatgaagaccaccaagcacttcaacgacatcagcaacctgatcgccagcgagatcatcagaaacgaggacatcaacgccagagtgagcgccatcgagaagtgggtggccgtggccgacatctgcagatgcctgcacaactacaacgccgtgctggagatcaccagcagcatgaacagaagcgccatcttcagactgaagaagacctggctgaaggtgagcaagcagaccaaggccctgatcgacaagctgcagaagctggtgagcagcgagggcagattcaagaacctgagagaggccctgaagaactgcgaccccccctgcgtgccctacctgggcatgtacctgaccgacctggccttcatcgaggagggcacccccaactacaccgaggacggcctggtgaacttcagcaagatgagaatgatcagccacatcatcagagagatcagacagttccagcagaccgcctacaagatcgagcaccaggccaaggtgacccagtacctgctggaccagagcttcgtgatggacgaggagagcctgtacgagagcagcctgagaatcgagcccaagctgcccacctag

SEQ ID NO: 58727 - DNA, 3774 bp, Artificial Sequence
  derived and/or modified sequence
atgcagaagggtattcgcctgaacgatggccatgtcgccagtctaggtcttctcgccagaaaagatggaactaggaagggatacctatccaaacgtagcagtgacaacacgaaatggcagacgaagtggttcgctttattgcagaacctgttgttctattttgagagtgattccagttcaagaccgagcggcttgtacctgctggaggggtgcgtgtgtgatagggcaccctcccctaagcccgccctgagcgcaaaagaacccctggagaagcagcattattttaccgtgaatttttcgcatgaaaatcaaaaggcgctggaactccggacagaagacgcgaaggattgcgacgaatgggtggcggctatagcccatgcctcctatcggacattggctacagaacacgaggctctcatgcagaaatatcttcatctactccagattgtcgaaaccgaaaaaaccgttgcaaagcagttgcgccagcagattgaagatggagagattgaaatcgagaggttaaaagcggagatcaccagtctgctgaaagacaatgaacgcattcagtcaactcagacagtagcgcccaacgacgaagactccgatattaaaaagataaagaaggtacaaagcttccttcgcggatggctctgtagacggaagtggaaaacgatcattcaggattacatcaggtccccacacgctgacagcatgcgcaagagaaaccaggtagtattttctatgctcgaggccgaggctgagtatgtccagcagctacatattctcgtgaacaatttcctgagaccccttaggatggcggcctccagtaaaaagcccccgataacacacgatgatgtgagttcaattttcctaaactccgaaaccatcatgtttctccatcagatattttatcaggggctgaaggctcgcatttcttcttggccaaccttagtactcgcggaccttttcgatatactgctgcctatgctcaacatatatcaggaattcgtgcgcaaccaccagtattcattgcagattctggctcactgtaaacagaaccgtgactttgacaaactcttgaagcactatgaagctaaaccagattgtgaggagaggaccctggagacctttctcacataccccatgttccagattccgaggtacatcttgacattacacgagctgctggcccataccccgcacgagcatgtagagcgtaactcactggactacgcaaagtccaagctagaagagcttagtaggatcatgcatgacgaagtgagcgaaactgaaaacattcgcaagaatttagcaattgaaagaatgataatcgagggttgtgagatcctcctcgacacttcccagacttttgtacgccaggggtctttgatccaggtccccatgagtgagaaagggaaaattacacggggcagattaggatccctgtccctaaagaaagagggtgagagacagtgctttctgttctcaaaacacctcattatttgcactcgtggatctggcggcaaactccatctcacaaaaaacggcgttatttctctgatcgattgtacattacttgaagagcctgaatcaactgaggaagaagccaagggctcgggccaggacatcgaccacctagacttcaagataggcgttgagccaaaggactccccgccatttaccgttatcctcgtggcatcctcacgacaggaaaaggccgcctggacctctgacatctctcagtgtgtagacaacatcaggtgtaacggcctcatgatgaatgccttcgaagaaaacagcaaggtgactgtgcctcagatgatcaagagtgatgcaagtctgtactgtgatgatgtggacattcgcttctctaaaactatgaatagctgtaaggtgctccagatcagatacgccagtgttgaaaggttactggagagactcacagatctgagattcctgtcaattgattttctcaataccttccttcattcctatagagtttttaccaccgccattgtagtcttggacaaattgatcaccatctataaaaagccgatcagcgctatacccgctcgctctttagagctcctttttgcatcgggccaaaacaacaagctgctctacggtgagccccccaaatctccgagggcaacccgcaaattttccagtcccccacctttgtctatcactaagactagtagcccgtcaaggcggcgcaagctttccctcaatatccccatcatcaccggcggaaaagcccttgatctcgctgctcttagctgcaactctaatgggtacactagcatgtacagcgctatgagcccgtttagcaaggcaactctcgacactagcaagctgtatgtgtcctcgtcctttacaaacaagattcccgatgaaggagacactacgcctgagaagccagaggaccctagtgccctgtctaaacagtctagcgaagttagcatgagggaggaatccgatatcgaccaaaaccagtccgacgacggggataccgagaccagcccaactaagagcccaacaacacctaagtcggtcaagaacaagaacagctccgaattccccttattttcttataataacggggtagtgatgacatcttgcagagaactcgataacaatcgctctgcactgtccgcggcatctgcgttcgctatagccacagccggtgctaatgaaggtacccccaataaagaaaagtacaggagaatgagtcttgcctcagccggttttccaccggatcaacgtaacggagacaaggagttcgtaataagaagggcagccacaaatcgagtcctgaacgtactgaggcactgggtgtctaaacatagtcaggacttcgaaactaacgatgaactgaagtgtaaggtgattggctttttggaggaggttatgcacgatccagagctgttgacccaagagcgtaaggccgccgcgaatatcattcggaccctgactcaggaggatccgggcgataaccagattactctcgaagaaataacccagatggcagagggggtgaaggctgaaccatttgaaaatcatagtgcccttgaaatagcagaacaactgacacttttagatcatctcgtctttaaaaaaattccctatgaggagttttttggtcaaggctggatgaagctcgaaaagaacgaaagaactccctatattatgaagacaacaaagcacttcaacgatatttcgaacctcatcgcttccgagatcatcagaaacgaggatataaacgcacgcgtatccgccattgagaagtgggtcgccgtcgctgacatttgtagatgcctgcacaactataatgctgtgctggagatcacctcaagtatgaatcgaagcgccatatttaggcttaaaaagacctggctgaaggtgagcaagcaaactaaggccctgatcgataaattacagaagttagtcagttctgaggggaggtttaagaatttgcgggaggcactcaagaactgtgacccaccctgcgtgccatacctcggaatgtatctgacggatctcgctttcatagaggaaggaacacccaactacaccgaagacgggttagtgaacttcagcaagatgcggatgatcagtcatatcatcagagagattcgccagtttcagcaaactgcttacaaaatcgagcatcaggccaaagtgacacagtatctgctggaccaaagctttgtcatggacgaggagtccctgtatgaatcctccctgcgaattgagccaaagctgcctacttag

SEQ ID NO: 58728 - DNA, 3774 bp, Artificial Sequence
  derived and/or modified sequence
atgcagaagggcatccggctgaatgatggccacgtggccagcctgggcctgctggccaggaaggatggcaccaggaagggctacctgagcaagaggagcagtgacaacaccaagtggcagaccaagtggtttgccctgctgcagaacctgctcttctactttgaaagtgacagcagcagccggcccagcggcctgtacctgctggagggctgtgtgtgtgaccgggcccccagccccaagccagccctgagcgccaaggagcccctggagaagcagcactacttcaccgtgaacttcagccatgagaaccagaaggccctggagctgaggacagaagatgccaaggactgtgatgagtgggtggccgccatcgcccacgccagctaccgcaccctggccacagagcacgaggccctgatgcagaagtacctgcacctgctgcagatcgtggagacagagaagacagtggccaagcagctgcggcagcagattgaagatggagaaattgaaattgagcggctgaaggccgagatcaccagcctgctgaaggacaatgaaagaatccagagcacccagacagtggccccaaatgatgaagattctgacatcaagaagatcaagaaggtgcagagcttcctgcggggctggctgtgcaggaggaagtggaagaccatcatccaggactacatccgcagcccccatgctgacagcatgaggaagaggaaccaggtggtgttctccatgctggaggccgaggccgagtatgtgcagcagctgcacatcctggtgaacaacttcctgcggcccctgaggatggccgccagcagcaagaagccacccatcacccatgatgatgtgagcagcatcttcctgaacagcgagaccatcatgttcctgcaccagatcttctaccagggcctgaaggcccgcatcagctcctggcccaccctggtgctggccgacctgtttgacatcctgctgcccatgctgaacatctaccaggagtttgtgaggaaccaccagtacagcctgcagatcctggcccactgcaagcagaacagagactttgacaagctgctgaagcactatgaggccaagccagactgtgaggagaggaccctggagaccttcctgacctaccccatgttccagatcccccgctacatcctgaccctgcacgagctgctggcccacacccctcatgaacatgtggagaggaacagcctggactatgccaagagcaagctggaggagctgagccgcatcatgcatgatgaggtgtctgaaacagagaacatcaggaagaacctggccattgaaagaatgatcatcgagggctgtgagatcctgctggacaccagccagacctttgtgcggcagggcagcctcatccaggtgcccatgtctgagaagggcaagatcacccggggccgcctgggcagcctgagcctgaagaaggagggggagcggcagtgcttcctgttcagcaagcacctgatcatctgcacccggggcagcggcggcaagctgcacctgaccaagaatggagtcatcagcctgattgactgcaccctgctggaggagcctgagagcacagaggaggaggccaagggcagcggccaggacatcgaccacctggacttcaagattggagtggagcccaaggacagcccccccttcaccgtcatcctggtggccagcagccggcaggagaaggccgcctggaccagtgacatcagccagtgtgtggacaacatccgctgcaatggcctgatgatgaatgcctttgaggagaacagcaaggtgacagtgccccagatgatcaagagtgatgccagcctgtactgtgatgatgtggacatccgcttcagcaagaccatgaacagctgcaaggtgctgcagatccgctatgcctctgtggagcggctgctggagcggctgacagacctgcgcttcctgagcattgacttcctgaacaccttcctgcacagctacagagtcttcaccacagccatcgtggtgctggacaagctgatcaccatctacaagaagcccatcagcgccatcccagcccggagcctggagctgctgtttgccagcggccagaacaacaagctgctgtatggagagccccccaagagcccccgggccaccaggaagttcagcagccccccacccctgagcatcaccaagaccagcagccccagcagaagaaggaagctgagcctgaacatccccatcatcactggaggcaaggccctggacctggccgccctgagctgcaacagcaatggctacacctccatgtacagcgccatgagccccttcagcaaggccaccctggacaccagcaagctgtatgtgagcagcagcttcaccaacaagatcccagatgaaggagacaccaccccagagaagccagaggaccccagcgccctgagcaagcagagcagcgaggtgtccatgagggaggagagtgacatcgaccagaaccagagtgatgatggagacacagagaccagccccaccaagagccccaccacccccaagtctgtgaagaacaagaacagcagcgagttccccctcttctcctacaacaatggagtggtgatgaccagctgccgggagctggacaacaacagaagtgccctgtctgctgccagcgcctttgccatcgccacagctggggccaatgaaggcacccccaacaaggagaagtacagaaggatgagcctggccagcgctggcttccccccagaccagagaaatggagacaaggagtttgtgatcagaagagctgccaccaacagagtgctgaatgtgctgcggcactgggtgtccaagcacagccaggactttgagaccaatgatgagctgaagtgcaaggtgattggcttcctggaggaggtgatgcatgaccctgagctgctgacccaggagaggaaggccgccgccaacatcatccgcaccctgacccaggaggaccccggggacaaccagatcaccctggaggagatcacccagatggccgagggcgtgaaggccgagccctttgagaaccacagcgccctggagattgctgagcagctgaccctgctggaccacctggtgttcaagaagatcccctatgaggagttcttcggccagggctggatgaagctggagaagaatgaaagaacaccctacatcatgaagaccaccaagcacttcaatgacatcagcaacctgattgccagcgagatcatcagaaatgaagacatcaatgcccgggtgtctgccatcgagaagtgggtggccgtggccgacatctgccgctgcctgcacaactacaatgctgtgctggagatcaccagctccatgaacagaagtgccatcttccggctgaagaagacctggctgaaggtgtccaagcagaccaaggccctgattgacaagctgcagaagctggtgagcagcgagggccgcttcaagaacctgcgggaggccctgaagaactgtgaccccccctgtgtgccctacctgggcatgtacctgacagacctggccttcatcgaggagggcacccccaactacacagaagatggcctggtgaacttcagcaagatgaggatgatcagccacatcatccgggagatccggcagttccagcagacagcctacaagattgagcaccaggccaaggtgacccagtacctgctggaccagagctttgtgatggatgaggagagcctgtatgagagcagcctgagaattgagcccaagctgcccacctag

SEQ ID NO: 58729 - DNA, 3774 bp, Artificial Sequence
  derived and/or modified sequence
atgcagaagggcatccggctgaacgacggccacgtggccagcctgggacttctcgctcggaaggacggcacccggaagggctacctgtcaaaaaggtcctcagataatactaagtggcagacaaagtggttcgcgctcttgcaaaacctcctgttctattttgagtcagatagttcaagtcgcccctccgggctgtatctgctggagggctgcgtctgtgaccgcgcaccctcaccaaagccggccttgtccgccaaggagcccttagagaaacaacactactttaccgtaaattttagccacgaaaaccaaaaagccctggaactgagaaccgaagatgcgaaggactgtgatgaatgggttgccgcgatcgcacatgctagctaccgtaccctcgctacagaacacgaagctctgatgcagaagtaccttcacctcctgcagattgtcgagacagagaagacagtagcgaaacagttacggcaacagatcgaggacggggagatcgagatcgagagactgaaagccgaaatcacaagtttacttaaagacaacgaacgaatccagagcacccagacagtcgccccaaacgacgaagactcagacattaagaagattaagaaggttcaaagcttcctcagaggatggctgtgtaggagaaaatggaagaccattatccaagattacatcagatcaccccacgccgattcaatgagaaagcgcaaccaggttgtgttttcaatgctggaggccgaagcggagtacgtccagcagctgcacatcctcgttaacaactttctgcgcccacttcggatggccgcctcaagtaaaaagccccccataacccacgacgacgtgtcctcaatctttttgaattccgagacgatcatgtttctgcatcaaatcttctaccaggggttgaaagccagaataagtagctggcctacactggttctcgctgatctgttcgatatcttgcttcctatgctaaatatataccaggaattcgtacggaaccatcagtacagtctgcagatactggctcattgtaagcagaaccgagactttgataagctgctgaaacactacgaggccaaacctgactgtgaggaacgtacgcttgagaccttcctcacataccccatgtttcagatcccacgctacatccttacattacacgagctgttggcccatacaccccatgaacatgtggaaaggaattctctcgattatgccaagtctaagctcgaagaactgagccgaatcatgcacgatgaggtctctgagaccgagaacatcagaaagaatcttgctatcgagaggatgattatcgaagggtgcgagatactgctggacacgagccagactttcgtgcgccaagggtctttaatacaagtacccatgtctgaaaaggggaaaataacgagaggacgcctcgggagtttgagcctcaagaaggagggggagcgccagtgcttccttttctctaagcacctcattatctgcacacgagggagcgggggtaagcttcatttaacgaagaatggcgtgatctccctgatcgactgcaccctactcgaggagcccgaatcaactgaggaagaggccaagggcagcggccaggacatcgaccacttagatttcaagattggcgtcgaaccaaaagacagcccaccatttaccgttatcctggtggcatcctccaggcaggaaaaggctgcctggacttccgatatttcccagtgtgtagataatatccgttgcaacggtctgatgatgaatgcgttcgaggaaaattctaaagtaacagtccctcagatgattaagtctgacgcctccttatattgcgatgatgtcgacatccgcttctcgaaaaccatgaatagctgcaaagtgctccagatccgctacgcctcagttgaaaggcttctggaacggctaaccgatctcaggttcctgtctatagatttcctgaacacattcctgcacagctatcgcgtgttcactacagcaatcgtagtgttggataagctgatcaccatctataagaagccgattagcgccatcccagccaggtccctggaactgttatttgcgagtggtcagaacaacaagttgttgtacggagagcccccaaagagcccacgcgcgacacgaaagttcagttctccacctccgcttagcattactaagacaagcagtccctctcgcagacggaagttaagcctgaatatcccaataattaccggtggcaaagctctggatctggctgccctcagctgcaattcaaacggttatacctcaatgtatagtgccatgtcacccttcagcaaagcaacgctggacacttctaaactgtatgtgtctagcagcttcaccaacaaaatccctgacgagggcgatactacccccgaaaaaccggaagatccttcggcgctatccaagcagtccagcgaagtgagcatgcgggaagagagcgacatcgatcagaaccaatccgacgatggagacactgaaactagccctacaaagagcccaacaacaccgaaatccgtgaagaacaaaaatagcagcgaattccctctattttcttataacaacggggttgtaatgaccagctgtagagaattggataacaaccggagcgcactgagcgctgcaagtgctttcgcgattgctaccgcaggggcaaatgaagggacccccaataaagaaaaatacaggcgcatgtccctcgcatccgcggggttcccccccgatcagagaaacggcgataaggagtttgtaattcgtagagccgcgactaacagggtgctaaacgtgctccggcactgggtgtctaaacactcccaggatttcgagactaatgatgaacttaagtgtaaagtgattgggttcttggaagaggtgatgcacgatccagaacttttgactcaggagcgcaaggcagcagctaacattatccggactctcacacaggaggacccgggggataaccagataacactggaggagattacacagatggctgaaggcgtgaaggccgaaccatttgaaaaccattccgctcttgaaattgcggagcaactaaccctactggatcatctagtgtttaaaaagatcccttatgaagagttcttcgggcagggctggatgaaactggagaagaacgaacgcacaccctatataatgaaaacaacgaagcacttcaacgatatctcaaatttgattgcttccgagattataagaaacgaggacataaacgccagagtttctgctattgaaaagtgggtcgccgtggcggacatctgtaggtgccttcataattacaatgccgtgcttgagatcaccagctcgatgaacaggagcgcaatcttcagactaaagaaaacatggttgaaggtgagcaagcaaactaaggcgctcattgataaactgcagaagctagtttcatctgagggacggtttaagaatctacgggaggcactaaagaactgcgatcctccatgtgtgccctacctgggcatgtatctgactgacctggctttcatagaggagggtaccccaaactatacggaagacggcctggtaaacttctctaagatgagaatgatatcacacattatccgcgaaattagacagtttcaacagacagcttacaaaatagagcaccaggctaaagtgacccagtacctgctggatcagtcttttgtgatggacgaggaaagcctctatgagtcatccttaagaatcgaaccgaagctgccaacatag

SEQ ID NO: 58730 - DNA, 3774 bp, Artificial Sequence
  derived and/or modified sequence
atgcagaagggcatcagactaaacgacggtcatgttgcctccctgggacttctggccaggaaggatggcacacgtaaaggctacctcagcaagaggagcagcgataacaccaagtggcaaacaaagtggtttgcactcctccaaaatttgctgttttacttcgagtccgactcctctagtcggccttctggactgtaccttctggagggctgtgtgtgcgaccgcgctccatctccgaagccggcactttccgccaaggagccactcgagaagcagcactatttcacagtgaattttagccacgaaaatcagaaagctctcgaacttaggaccgaggacgccaaagattgcgacgaatgggttgcggctatcgcacatgcttcctaccgtaccctggcaactgagcacgaggcgctgatgcagaagtatcttcacctcctgcagattgtggagactgaaaagacagtggctaagcagctcagacaacagatagaagatggggagatcgagattgagcgactgaaagcggagatcacatcattactgaaagacaacgagaggattcagtccacacagaccgttgctccaaatgatgaggattcagacattaaaaagatcaagaaggttcagtcctttctgcgcggatggctgtgcagaagaaagtggaagaccatcatacaggattacattaggtccccacacgctgactcgatgcgaaagcggaatcaggtagttttctcaatgttggaggccgaagccgagtacgtgcaacaactccacattttagtgaacaactttctgagacccttgcggatggccgctagttcaaaaaagcctcccattacccacgacgatgttagttcaatcttcctgaactccgaaaccatcatgtttctacaccagatcttttatcagggactaaaagccagaatttctagttggcccacccttgtgctcgccgatctgtttgatatccttctccctatgctgaatatctatcaggagtttgttcgcaaccatcagtactctctacagattttagcccattgcaagcagaaccgggacttcgacaagctgctgaagcattatgaagcgaagccagattgcgaggaaagaacactcgaaactttcctgacttatccaatgttccagattcctcgctacatcctgacccttcacgagctactggcgcacacacctcacgagcacgttgagcggaattcgctcgactatgccaagtccaaactcgaggaactgtcacgaatcatgcatgacgaggtgtcagagacagaaaatatacggaagaatctggccatcgaaaggatgattattgagggctgtgaaatccttcttgatacatctcaaacatttgtaaggcaagggtcgctgatccaagtacccatgagcgagaagggcaaaattacgcggggtcgcttaggcagtctgagtttgaaaaaagagggcgagcgccaatgcttcctgttttctaaacacctgattatttgcactagggggtccggcggaaaactgcacctgactaagaatggcgtgatcagcttgatcgattgtaccttgttggaagagcccgagtcgaccgaggaagaggcgaaaggctctgggcaggacatcgatcatctggacttcaagatcggggttgagcctaaggacagccccccttttacggtgatacttgtcgcaagctccagacaggagaaggctgcttggacctcagacatttcacaatgcgtggataacatccgttgtaacggcctgatgatgaatgccttcgaggaaaattcgaaggtgactgtcccccaaatgatcaagtcagacgcctccctgtattgtgatgacgtggacataaggttttctaagactatgaacagttgcaaagtccttcagatcagatacgcttccgtagagagactactagaaagactgactgatttgaggtttctctctattgacttcctgaatacgttcttgcattcatatcgggtcttcaccaccgcaatcgtggtgctagataaactcataactatttataagaaacccattagcgccatacctgctcggtccctggaattgctgttcgctagtgggcagaacaataaattgttgtacggagaaccacccaaaagtccccgagccacacgcaaattcagctctcctcctcccctgagtataaccaagacctcatccccctccagacggagaaagctctctttgaacatccctataatcactggaggaaaagctctggatttagctgcgctcagctgtaattccaatggctacacctccatgtactctgccatgtcaccattttcaaaggcaaccctcgatacctcaaaattgtatgtgtcctcttcattcactaacaagatccccgatgagggggacacaacacctgaaaagccagaggatcccagtgctctgagcaaacagtctagcgaagttagtatgagggaggaaagtgatatcgaccagaatcaatccgatgacggagatacagagacatcacccacgaaatcacctacgactcccaaatctgttaagaacaaaaactcctctgagttcccactcttttcttacaacaacggggtggtgatgaccagttgccgggagctggacaataataggagtgcattgtcagctgccagcgcctttgctattgctaccgccggagctaacgaagggacccccaacaaagagaagtacagacgcatgtccctggccagcgccggatttccccctgaccagcgcaacggcgacaaagaattcgtcatcaggcgggctgcaacaaacagggtcctgaatgtgttgcggcattgggtctcgaagcacagccaggacttcgagaccaatgacgagctgaagtgcaaggtgatcggcttcctagaggaggtgatgcatgatcctgaactgttaacgcaggagcgtaaagctgcagctaatatcatcaggacattgactcaagaagatcctggagataatcaaattactttagaggagataacacagatggccgagggcgtgaaagcggaaccttttgagaatcactcggcacttgaaatagccgagcaattgacactcctcgatcatctcgtctttaaaaagatcccatatgaggagttttttggacaaggatggatgaaactagagaaaaatgaacgcaccccttacatcatgaaaaccactaaacacttcaatgatattagcaacctgattgcatcggagatcattaggaacgaggatataaacgcacgtgtgtccgccatcgaaaaatgggtcgccgtcgccgatatttgccgttgtctgcacaactataacgcagttttggagatcacttcatcaatgaatcggagcgccattttccgacttaagaagacctggctaaaggtatcaaagcagacaaaggccctgatcgacaagctgcagaaactggtttcctctgagggaagatttaagaatctgcgagaggctctgaagaattgcgatcccccatgcgtgccttatctcggtatgtatctgactgatttggccttcatcgaagaaggcactcccaattacacagaggatggattggtcaactttagtaagatgagaatgatatctcacataatcagagagatacggcagttccagcagacggcctataagatcgagcatcaggctaaagttacccaataccttctcgaccagtcatttgtgatggatgaagagagtctatacgagtcatccttgcggatcgagccaaagttgccgacatag

SEQ ID NO: 58731 - DNA, 6344 bp, Artificial Sequence
  derived and/or modified sequence
gtgcgtgtgtccctgtccgcgctgctgaaacgggctcttcgagggatcggcgtcacatgactccgcctgcccctcgccagcgcgcagatcgccagtccctcagtttgcccggcaccggaggagggtcgggcggcatcttccgggtactggggctctgcggagcggagaagaggttccagcggggaatggtatatctggattcaagaagccgcggctcggcgccagatcctggagtgtagatatttggggggaggggagagctagagggagcgagcgagcgagcgccagagagaggcagcgcgcagcgcgcacggacggggggctgctgcgcggagaagatgtaagcgcgtggggtctcgctggcctctgagcaccatgcagaaggggatccggctgaatgatggccacgtcgcgtccctgggactgctggcgcgcaaggacggcacgcgcaaaggctacctgagcaagcggagttcggacaacacaaaatggcaaaccaagtggttcgcgctgctgcagaacctgctcttctacttcgagagcgactcgagctcgcggccctcggggctttacctgctggagggctgcgtctgcgaccgcgcgccctcccccaagccggcgctgtcggccaaggagccgctggagaaacagcattacttcacggtgaacttcagccatgagaaccagaaagccttggagctgaggacagaggacgcaaaagattgtgacgaatgggtggcagccattgcacatgccagctacaggaccctcgccacagagcatgaggcattaatgcagaaatacctgcacctgctgcagatcgtggagacagagaagaccgtggccaagcagcttcggcagcagatcgaggatggggagatcgagatcgagcggctgaaggcagagatcacatccctgctcaaggacaatgagcgcatccagtccacccagactgtcgcccccaacgatgaagacagcgacatcaagaaaattaagaaggtgcagagcttcctgcggggctggctgtgccggcggaagtggaagaccatcatccaggactacatccggtcaccccatgctgacagcatgcgcaagaggaaccaggtggtgttcagcatgctggaggctgaggctgagtacgtgcagcagctgcacatccttgtcaacaatttcctgcgcccgctgcggatggccgccagctccaagaagcctcccatcacacacgacgacgtcagcagcatcttcctgaacagcgaaaccatcatgtttttacatcagatcttttaccaaggcctgaaggcccgcatctccagctggcccacgctggtcctggctgacctatttgacatcctgctgcccatgctcaacatctaccaagagttcgtccgcaaccaccagtacagcctgcagatcctggcccactgcaagcagaaccgtgacttcgacaagctgctgaagcactacgaggccaagcctgactgcgaggagaggacgctggagaccttcctcacctaccccatgttccagatccccaggtacatcctgaccctccatgagctcctggcccacacgcctcatgagcacgttgagcgcaacagcctggactacgccaagtccaaactggaggagctgtccagaataatgcacgatgaagtaagtgagacggagaacatccggaaaaacctggccatcgagcgcatgatcatcgaaggctgtgagatcctcctggacaccagccagacctttgtgagacaaggttccctcattcaggtgcccatgtctgaaaagggcaagatcaccagggggcgcctggggtctctctccctaaagaaagagggcgagcgacagtgcttcctgttttctaagcatctgattatctgtaccagaggctctggagggaagcttcacttgaccaagaatggagtcatatccctcattgactgcactttattggaggagccagaaagcacggaggaggaagccaaaggatccggccaagacatagatcacttggattttaaaatcggggtggagccaaaggattccccgccctttacagtcatcctagtggcctcgtccagacaggagaaggcagcgtggaccagtgacatcagccagtgtgtggataacatccgatgcaatgggctcatgatgaacgcatttgaagaaaattccaaggtcactgtgccgcagatgatcaagtccgacgcctccttatattgtgatgatgttgacattcgcttcagcaaaaccatgaactcctgcaaagtgctgcagatccgctacgccagtgtggagcggctgctggagaggctgacggacctgcgcttcctgagcatcgacttcctcaacaccttcctgcactcctaccgcgtcttcaccaccgccatcgtggtcctggacaagctcattaccatctacaagaagcctatcagtgccattcctgccaggtcgctggagctcctgtttgccagtggccagaacaataagctcctgtacggtgaaccccccaagtccccgcgcgccacccgcaagttctcctcgccgccacctctgtccatcaccaagacatcgtcaccgagccgccggcggaagctctccctgaacatccccatcatcactggcggcaaggccctggacctggccgccctcagctgcaactccaatggctacaccagcatgtactcggccatgtcacccttcagcaaggccacgctggacaccagcaagctctatgtgtccagcagcttcaccaacaagattccagatgagggcgatacgacccctgagaagcccgaagacccttcagcgctcagcaagcagagctcagaagtctccatgagagaggagtcagatattgatcaaaaccagagtgatgatggtgatactgaaacatcaccaactaaatctccaacaacacccaaatcagtcaaaaacaaaaattcttcagagttcccactcttttcctataacaatggagtcgtcatgacctcctgtcgtgaactggacaataaccgcagtgccttgtcggccgcctctgcctttgccatagcaaccgccggggccaacgagggcaccccaaacaaggagaagtaccggaggatgtccttagccagtgcagggtttcccccagaccagaggaatggagacaaggagtttgtgatccgcagagcagccaccaatcgtgtcttgaacgtgctccgccactgggtgtccaagcactctcaggactttgagaccaacgatgagctcaaatgcaaggtgatcggcttcctggaagaagtcatgcacgacccggagctcctgacccaggagcggaaggctgcagccaacatcatcaggactctgacccaggaggacccaggtgacaaccagatcacgctggaggagatcacgcagatggctgaaggcgtgaaggctgagccctttgaaaaccactcagccctggagatcgcggagcagctgaccctgctagatcacctcgtcttcaagaagattccttatgaggagttcttcggacaaggatggatgaaactggaaaagaatgaaaggaccccttatatcatgaaaaccactaagcacttcaatgacatcagtaacttgattgcttcagaaatcatccgcaatgaggacatcaacgccagggtgagcgccatcgagaagtgggtggccgtagctgacatatgccgctgcctccacaactacaatgccgtactggagatcacctcgtccatgaaccgcagtgcaatcttccggctcaaaaagacgtggctcaaagtctctaagcagactaaagctttgattgataagctccaaaagcttgtgtcatctgagggcagatttaagaatctcagagaagctctgaaaaattgtgacccaccctgtgtcccttacctggggatgtacctcaccgacctggccttcatcgaggaggggacgcccaattacacggaagacggcctggtcaacttctccaagatgaggatgatatcccatattatccgagagattcgccagtttcaacaaactgcctacaaaatagagcaccaagcaaaggtaacgcaatatttactggaccaatcttttgtaatggatgaagaaagcctctacgagtcttctctccgaatagaaccaaaactccccacctgaagctgagcccagcccagacccagctgctcccggggacatgtgctagatgatactgtacatattcgtttggtttcactggattttcttcttcagtatgtgcttctccaagaatacaaatcgtccttgttcttagattcctgtagaaccggaatatgaatttctgcaccgtttcagacttcgcccacccatccctcccctcgtctcctgcagtgcctgtttcttttaaacagctgtactcttggtccctcttccctagactcctcactcttctcagaggggaaacagcacccttgcatacaagaatcttagactccagtcctgcttccgtccctccccagcccaggctcctgggttgaggtggccacccaggcatcctcccagcatgttccatgtagttgttataactgggtggggggtggggggcggcgggagggggaaaccataccctgaagtccagtcattgacaaatcttcccgctgatggtgatgtcaatttccaaagcagcttctccagccaaaatcgcaggtctcaaaactccccatgtgtctcccagtaacctggacggaagggagtcctctctgctcagaaccacacccctcgtaccaatgctgccatctcgttcaggccccacgtcgctccttgctctaggattaacaccagatagcatgaatagcagtctcaatacaactggatgaggccctagacttcccgaggaaatggagtcacaaacaccaagccacgtcgactcttgccgaccactggcccagcatccactgaaagtcgggaacacaaaaatgtcacttttcctctttaagctgcctaacggtcactacaagcttacattgagatgctctaagtctgtataccttgtgataattagtaccacactgtagaattaggaaatcaataaccaagtgtttttattgcatatactgtagtcctgtctaaatgccttctagcaggaatatagtaatgtagtgcttattctgtgaatattaccatgtattttttacactgtacagtatagaaaacacaggttaactccgaagtggcaggcatgctccactacaacagacagacaacttttgctgtaagcaatacctagtggtatgagaattctatttcaagtcctaaaatatttcaacttacagcttgtttggaaaaaaatttccatttttgtaaaaatatatgtttcctgattacctcttgctaataaatctattctatctcagggtgaacagcgagttttgatgggtttcattcgttcagtcaaggaatatttgatgagcacttgctccttacccagcccagcctgggaccggagatccagagtgtcaaggacaccatacctgctttttaggcaccaacagtttggtggggaagactgtttcagttgcctattgcaccaagaacaagccactccaaaacataatggcttaaaaccatttttgttacctttcacagttctatgggttgactgggtccagctgtcagttcttatttggagtctctcatgaagtttcagtcactcagcaactgggactggagtcatctgaaggctcaactggaccgggtggtgctctagttggtgcaccaagatggcgctgtcacatggctggatgttgatgtctgctgggctgcactggggctgttcatgggagcatccacacgtggcctctctgtgtggcttgggctcctcacagtccggaagctgggttccaagagcgactgttccagcagcctcaggcagaagctacaaggctgcccagatgccatcctgcccagatgtgtcctcactgtcacccaggaagggaagccccggaacaccaccctcagtcacaggcatggggcccactgcaaggcacaacccactccagagctcccaaggccgcctcccctgggacctgcagccagctggctccataactgcttttccgtttcctccaggcattttcatcctagccctactttgtgctgggatctgagggggatagcaagcggagaaagaagggatctagagggagaagattctagatccttcttttgactgccagctgattttgattgccagctttacctgcttcatgagctcagccaagtcacttaacctctcagagcttcactgttctcatctgaaaaatggggatgaaaatggtatctcattacagagtagaattaaatgaattattataatt

SEQ ID NO: 58732 - protein, 480 aa, Artificial Sequence
  derived and/or modified sequence
MEVAPEQPRWMAHPAVLNAQHPDSHHPGLAHNYMEPAQLLPPDEVDVFFNHLDSQGNPYYANPAHARARVSYSPAHARLTGGQMCRPHLLHSPGLPWLDGGKAALSAAAAHHHNPWTVSPFSKTPLHPSAAGGPGGPLSVYPGAGGGSGGGSGSSVASLTPTAAHSGSHLFGFPPTPPKEVSPDPSTTGAASPASSSAGGSAARGEDKDGVKYQVSLTESMKMESGSPLRPGLATMGTQPATHHPIPTYPSYVPAAAHDYSSGLFHPGGFLGGPASSFTPKQRSKARSCSEGRECVNCGATATPLWRRDGTGHYLCNACGLYHKMNGQNRPLIKPKRRLSAARRAGTCCANCQTTTTTLWRRNANGDPVCNACGLYYKLHNVNRPLTMKKEGIQTRNRKMSNKSKKSKKGAECFEELSKCMQEKSSPFSAAALAGHMAPVGHLPPFSHSGHILPTPTPIHPSSSLSFGHPHPSSMVTAMG

SEQ ID NO: 58733 - protein, 150 aa, Artificial Sequence
  derived and/or modified sequence
MEVAPEQPRWMAHPAVLNAQHPDSHHPGLAHNYMEPAQLLPPDEVDVFFNHLDSQGNPYYANPAHARARVSYSPAHARLTGGQMCRPHLLHSPGLPWLDGGKAALSAAAAHHHNPWTVSPFSKTPLHPSAAGGPGGPLSVYPGAGGGSGG

SEQ ID NO: 58734 - DNA, 2729 bp, Artificial Sequence
  derived and/or modified sequence
tcgagatccattgtgctctaaagggagtcggcagctggcgccagggcggccggaggatgccgaggggccggagccgggcgggcccgagcgcgaggcgcactctacccccagctcctaccctgtaagccccgccagcctccggacgtgctgtccctgggcccgtcgccctcggggctcccgccggaactccttcactctcagaggccgagtccctcccctccccacggctgcgtgtggccgttgccgtctgcacccagaccctgagccgcccgcgccggccatggaggtggcgccggagcagcccggctggatggcgcacccggccgtgctgaatgcgcacgaccccgactcacaccacccgggcctggcgcacaactacatggaacccgcgcacgtgctgcctccagacgaggtggacgtcttcttcaatcacctcgactcgcagggcaacccctactatgccaaccccgctcacgcgcgggcggccgtctcctacagccccgcgcacgcccgcctgaccgggagccagatgtgccgcccacacttgttgcacagcccgggtttgccctggctggacgggggcaaagcagccctctctgccgctgcggcccaccaccacaacccctggaccgtgagccccttctccaagacgccactgcacccctcagctgctggaggccctggaggcccactctctgtgtacccaggggctgggggtgggagcgggggaggcagcgggagctcagtggcctccctcacccctacagcagcccactctggctcccaccttttcggcttcccacccacgccacccaaagaagtgtctcctgaccctagcaccacgggggctgcgtctccagcctcatcttccgcggggggtagtgcagcccgaggagaggacaaggacggcgtcaagtaccaggtgtcactgacggagagcatgaagatggaaagtggcagtcccctgcgcccaggcctagctactatgggcacccagcctgctacacaccaccccatccccacctacccctcctatgtgccggcggctgcccacgactacagcagcggactcttccaccccggaggcttcctggggggaccggcctccagcttcacccctaagcagcgcagcaaggctcgttcctgttcagaaggccgggagtgtgtcaactgtggggccacagccacccctctctggcggcgggacggcaccggccactacctgtgcaatgcctgtggcctctaccacaagatgaatgggcagaaccgaccactcatcaagcccaagcgaagactgtcggccgccagaagagccggcacctgttgtgcaaattgtcagacgacaaccaccaccttatggcgccgaaacgccaacggggaccctgtctgcaacgcctgtggcctctactacaagctgcacaatgttaacaggccactgaccatgaagaaggaagggatccagactcggaaccggaagatgtccaacaagtccaagaagagcaagaaaggggcggagtgcttcgaggagctgtcaaagtgcatgcaggagaagtcatcccccttcagtgcagctgccctggctggacacatggctcctgtgggccacctcccgcccttcagccactccggacacatcctgcccactccgacgcccatccacccctcctccagcctctccttcggccacccccacccgtccagcatggtgaccgccatgggctagggaacagatggacgtcgaggaccgggcactcccggatgggtggaccaaacccttagcagcccagcatttcccgaagccgacaccactcctgcctgcccggctcggcccagcaccccctctcctggagggcgcccagcagcctgccagcagttactgtgaatgttccccaccgctgagaggctgcctccgcacctgaccgctgcccaggtggggtttcctgcatggacagttgtttggagaacaacaaggacaactttatgtagagaaaaggaggggacgggacagacgaaggcaaccatttttagaaggaaaaaggattaggcaaaaataatttattttgctcttgtttctaacaaggacttggagacttggtggtctgagctgtcccaagtcctccggttcttcctcgggattggcgggtccacttgccagggctctgggggcagatttgtggggacctcagcctgcaccctcttctcctctggcttccctctctgaaatagccgaactccaggctgggctgagccaaagccagagtggccacggccagggagggtgagctggtgcctgctttgacgggccaggcctggagggagagacaatcacgggcggtcctgcacagattcccaggccagggctgggtcacaggaaggaaacaacattttcttgaaaggggaaacgtctcccagatcgctcccttggctttgaggccgaagctgctgtgactgtgtccccttactgagcgcaagcacagcctgtcttgtcaggtggaccctgtaaatacatccttttttctgctaacccttcaaccccctcgcctcctactctgagacaaaagaaaaaatattaaaaaaatgcataggcttaactcgctgatgagttaattgttttatttttaaactcttttggggtccagttgattgtacgtagccacaggagccctgctatgaaaggaataaaacctaaggttgggagctttgcaattctttttgggaaaaggggcctt

SEQ ID NO: 58735 - DNA, 1443 bp, Artificial Sequence
  derived and/or modified sequence
atggaggtcgcacccgagcagcctagatggatggcccaccctgcagtgctgaatgcacaacacccggactctcatcatccaggcctggcgcataattatatggagccagcacaactcctgccacctgacgaggtcgatgtcttctttaatcacttggattctcagggaaacccttactacgctaaccctgcacatgctagagcccgagttagctatagtcctgctcacgcgcggctgaccggagggcagatgtgccggcctcacctgttacattcacctggtttgccgtggctggacggcggtaaggctgctttatccgcagccgccgcccaccaccacaatccctggacagtcagccccttctccaagacccccttacatccctcggctgcgggcggccccggaggtcctctttcagtgtacccaggggcaggaggtggttccggaggggggagcggttcgagtgtagcatcactgacccccactgccgcgcactcggggagtcatctgttcgggtttccgcccacacctccaaaggaggtgtctcctgatcctagcacaactggagccgctagtcccgcctcaagttcagccggcggctccgctgcccgtggagaagacaaggatggcgtcaagtatcaggtgagcctcaccgaaagcatgaagatggagagcggcagcccattgcggcccggcctggcaactatgggcacccaacccgcaacacaccaccccatcccaacttacccatcctacgttcctgccgcggcacacgactattcttccggtctgtttcaccccgggggatttctcgggggccctgctagttctttcactccaaaacagaggtctaaagcccgctcttgcagtgaagggcgcgagtgtgttaattgtggcgctactgcaacacccctgtggcgacgggatgggaccggtcactacctatgtaacgcctgtggattgtatcacaaaatgaatgggcaaaaccgacctttgattaagcccaagagacgactgagcgcagcccgccgcgcagggacatgctgcgcaaattgccaaacaacgactacaactctctggagaagaaacgcgaacggcgaccctgtatgcaatgcttgcggattatactataagttacacaatgtgaacaggcctctcacaatgaagaaagagggtattcaaactcggaatagaaagatgtccaacaagtctaaaaagtctaaaaaaggcgctgagtgctttgaagaactctcaaagtgcatgcaagagaagagctccccattcagtgcagcggcgttggctggacatatggcgcccgtcggccaccttccaccattcagtcatagtggccatatcctgcctactcctactccaatccacccaagcagtagtttaagttttggccacccccacccaagtagtatggtcaccgcaatgggatag

SEQ ID NO: 58736 - DNA, 1443 bp, Artificial Sequence
  derived and/or modified sequence
atggaagtcgcccccgaacagccccgctggatggcccacccagccgtcctcaatgctcagcatcccgattcacaccatcctgggctagcacataattacatggagcctgcccagctcttgcccccggatgaggtggatgtcttcttcaatcatctagactcccaaggcaacccttactacgcaaatcctgctcacgctagagctcgcgtctcctactccccggcccacgccagactcacagggggtcagatgtgtaggccccacctacttcactcgccaggcctcccctggctcgacggcggcaaagctgctcttagcgccgccgccgcgcaccatcacaatccttggacagtctcccccttctcaaagacccccctgcaccctagcgctgcgggcggacccgggggaccattaagcgtttaccccggagccgggggagggtccggcggaggatccggatcttccgtcgcatcactgactcctactgccgctcatagcggaagccatctcttcggctttccacccactccacccaaagaggtgtcacctgaccctagtaccaccggggctgcgtcacccgcctcgtcctccgccggcggatccgccgcacggggagaggataaggacggagtcaaataccaggttagtctgaccgagtccatgaaaatggagagcggctcacccctgagaccaggtctggcgaccatgggaactcagccagcgacccatcaccccatcccaacctatcccagctacgtcccagccgctgcacatgattattcttccggacttttccatccagggggctttctcggaggccctgcctccagtttcaccccaaagcaaagatccaaggctcgctcatgttctgaaggcagagaatgcgttaactgcggtgctacagcaacccccttgtggcgtcgcgacgggaccggccattacctgtgtaatgcctgtggactctaccacaaaatgaacggccagaacaggccccttatcaaaccaaagagaaggctgtctgcggcccgtagagccggcacttgttgtgctaactgccagaccacgactactaccctgtggaggagaaatgccaatggagacccagtctgcaatgcatgcggcctttactataagctgcacaatgtcaaccgccctcttactatgaagaaggaaggcatacagacacgtaaccgcaaaatgtcaaacaaaagcaaaaaaagcaagaaaggagctgagtgtttcgaggagcttagcaagtgcatgcaagagaaatcttctcctttcagtgccgcagctttggcaggccacatggcacctgtcggacacctgccacccttttctcattcagggcacatcctacctaccccaacccccatccacccaagctcgagcttgtcgttcgggcacccccatccctcgagcatggtgactgccatgggctag

SEQ ID NO: 58737 - DNA, 3367 bp, Artificial Sequence
  derived and/or modified sequence
gagcgccaggaaggtagcgaggccagcgtcgccccgggactcgctgctcaagtctgtctattgcctgccgccacatccatcctagcagggccccgtcgcccaccaggcggacaaaagcggtccgctgaacaccatgcggccgctcggcgtgccgcccaggctctgctggtgagcgccgccaccccgcgcccaggtcccgcgagcccgcctgccgcgcacctcgccctgctcccagctctactccaggccccgtccgcccgggggcgccgcccaccgcgcctcgctcgggccgttgccgtctgcacccagaccctgagccgccgccgccggccatggaggtggcgcccgagcagccgcgctggatggcgcacccggccgtgctgaatgcgcagcaccccgactcacaccacccgggcctggcgcacaactacatggaacccgcgcagctgctgcctccagacgaggtggacgtcttcttcaatcacctcgactcgcagggcaacccctactatgccaaccccgctcacgcgcgggcgcgcgtctcctacagccccgcgcacgcccgcctgaccggaggccagatgtgccgcccacacttgttgcacagcccgggtttgccctggctggacgggggcaaagcagccctctctgccgctgcggcccaccaccacaacccctggaccgtgagccccttctccaagacgccactgcacccctcagctgctggaggccctggaggcccactctctgtgtacccaggggctgggggtgggagcgggggaggcagcgggagctcagtggcctccctcacccctacagcagcccactctggctcccaccttttcggcttcccacccacgccacccaaagaagtgtctcctgaccctagcaccacgggggctgcgtctccagcctcatcttccgcggggggtagtgcagcccgaggagaggacaaggacggcgtcaagtaccaggtgtcactgacggagagcatgaagatggaaagtggcagtcccctgcgcccaggcctagctactatgggcacccagcctgctacacaccaccccatccccacctacccctcctatgtgccggcggctgcccacgactacagcagcggactcttccaccccggaggcttcctggggggaccggcctccagcttcacccctaagcagcgcagcaaggctcgttcctgttcagaaggccgggagtgtgtcaactgtggggccacagccacccctctctggcggcgggacggcaccggccactacctgtgcaatgcctgtggcctctaccacaagatgaatgggcagaaccgaccactcatcaagcccaagcgaagactgtcggccgccagaagagccggcacctgttgtgcaaattgtcagacgacaaccaccaccttatggcgccgaaacgccaacggggaccctgtctgcaacgcctgtggcctctactacaagctgcacaatgttaacaggccactgaccatgaagaaggaagggatccagactcggaaccggaagatgtccaacaagtccaagaagagcaagaaaggggcggagtgcttcgaggagctgtcaaagtgcatgcaggagaagtcatcccccttcagtgcagctgccctggctggacacatggcacctgtgggccacctcccgcccttcagccactccggacacatcctgcccactccgacgcccatccacccctcctccagcctctccttcggccacccccacccgtccagcatggtgaccgccatgggctagggaacagatggacgtcgaggaccgggcactcccgggatgggtggaccaaacccttagcagcccagcatttcccgaaggccgacaccactcctgccagcccggctcggcccagcaccccctctcctggagggcgcccagcagcctgccagcagttactgtgaatgttccccaccgctgagaggctgcctccgcacctgaccgctgcccaggtggggtttcctgcatggacagttgtttggagaacaacaaggacaactttatgtagagaaaaggaggggacgggacagacgaaggcaaccatttttagaaggaaaaaggattaggcaaaaataatttattttgctcttgtttctaacaaggacttggagacttggtggtctgagctgtcccaagtcctccggttcttcctcgggattggcgggtccacttgccagggctctgggggcagatttgtggggacctcagcctgcaccctcttctcctctggcttccctctctgaaatagccgaactccaggctgggctgagccaaagccagagtggccacggcccagggagggtgagctggtgcctgctttgacgggccaggccctggagggcagagacaatcacgggcggtcctgcacagattcccaggccagggctgggtcacaggaaggaaacaacattttcttgaaaggggaaacgtctcccagatcgctcccttggctttgaggccgaagctgctgtgactgtgtccccttactgagcgcaagccacagcctgtcttgtcaggtggaccctgtaaatacatcctttttctgctaacccttcaaccccctcgcctcctactctgagacaaaagaaaaaatattaaaaaaatgcataggcttaactcgctgatgagttaattgttttatttttaaactctttttgggtccagttgattgtacgtagccacaggagccctgctatgaaaggaataaaacctacacacaaggttggagctttgcaattctttttggaaaagagctgggatcccacagccctagtatgaaagctgggggtggggaggggcctttgctgcccttggtttctgggggctggttggcatttgctggcctggcagggggtgaaggcaggagttgggggcaggtcaggaccaggacccagggagaggctgtgtccctgctggggtctcaggtccagctttactgtggctgtctggatccttcccaaggtacagctgtatataaacgtgtcccgagcttagattctgtatgcggtgacggcggggtgtggtggcctgtgaggggcccctggcccaggaggaggattgtgctgatgtagtgaccaagtgcaatatgggcgggcagtcgctgcagggagcaccacggccagaagtaacttattttgtactagtgtccgcataagaaaaagaatcggcagtattttctgtttttatgttttatttggcttgttttattttggattagtgaactaagttattgttaattatgtacaacatttatatattgtctgtaaaaaatgtatgctatcctcttattcctttaaagtgagtactgttaagaataataaaatactttttgtgaa

SEQ ID NO: 58738 - DNA, 1878 bp, Artificial Sequence
  derived and/or modified sequence
actgggtcaagcacagccctgagcggccgcgtgtccgaggcccaggtgccctctagagccctgtagttcctgcccctctctgcccctctcggctcctgctgttccgccgctgtcgtccgaaccatcccaacccccagtccacccagacagcgcccgagctaggggagggaacggtctgggagtcggcagctggcgccagggcggccggaggatgccgaggggccggagccgggagggcccgaggccgaggcgcactctacccccagctcctaccctgtaagccccgccagcctccggacgtgctgtccctgggcccgtcgccctcggggctcccgccggaactccttcactctcagaggccgagtccctcccctccccacggctgcgtgtggccgttgccgtctgcacccagaccctgagccgccgccgccggccatggaggtggcgcccgagcagccgcgctggatggcgcacccggccgtgctgaatgcgcagcaccccgactcacaccacccgggcctggcgcacaactacatggaacccgcgcagctgctgcctccagacgaggtggacgtcttcttcaatcacctcgactcgcagggcaacccctactatgccaaccccgctcacgcgcgggcgcgcgtctcctacagccccgcgcacgcccgcctgaccggaggccagatgtgccgcccacacttgttgcacagcccgggtttgccctggctggacgggggcaaagcagccctctctgccgctgcggcccaccaccacaacccctggaccgtgagccccttctccaagacgccactgcacccctcagctgctggaggccctggaggcccactctctgtgtacccaggggctgggggtgggagcgggggaggcagcgggagctcagtggcctccctcacccctacagcagcccactctggctcccaccttttcggcttcccacccacgccacccaaagaagtgtctcctgaccctagcaccacgggggctgcgtctccagcctcatcttccgcggggggtagtgcagcccgaggagaggacaaggacggcgtcaagtaccaggtgtcactgacggagagcatgaagatggaaagtggcagtcccctgcgcccaggcctagctactatgggcacccagcctgctacacaccaccccatccccacctacccctcctatgtgccggcggctgcccacgactacagcagcggactcttccaccccggaggcttcctggggggaccggcctccagcttcacccctaagcagcgcagcaaggctcgttcctgttcagaaggccgggagtgtgtcaactgtggggccacagccacccctctctggcggcgggacggcaccggccactacctgtgcaatgcctgtggcctctaccacaagatgaatgggcagaaccgaccactcatcaagcccaagcgaagactgtcggccgccagaagagccggcacctgttgtgcaaattgtcagacgacaaccaccaccttatggcgccgaaacgccaacggggaccctgtctgcaacgcctgtggcctctactacaagctgcacaatgttaacaggccactgaccatgaagaaggaagggatccagactcggaaccggaagatgtccaacaagtccaagaagagcaagaaaggggcggagtgcttcgaggagctgtcaaagtgcatgcaggagaagtcatcccccttcagtgcagctgccctggctggacacatggcacctgtgggccacctcccgcccttcagccactccggacacatcctgcccactccgacgcccatccacccctcctccagcctctccttcggccacccccacccgtccagcatggtgaccgccatgggctag

SEQ ID NO: 58739 - DNA, 1443 bp, Artificial Sequence
  derived and/or modified sequence
atggaggtggcccctgagcagccccgctggatggcccaccctgctgtgctgaatgcccagcacccagacagccaccaccctggcctggcccacaactacatggagcccgcccagctgctgcccccagatgaggtggatgtgttcttcaaccacctggacagccagggcaacccctactatgccaacccagcccacgcccgggcccgggtgtcctacagccctgcccacgcccggctgaccggcggccagatgtgccggccccacctgctgcacagccctggcctgccctggctggatggcggcaaggccgccctgtctgctgctgctgcccaccaccacaacccctggacagtgagccccttcagcaagacccccctgcaccccagcgctgctgggggccctgggggccccctgtctgtgtacccaggggccggcggcggcagcggcggcggcagcggcagctctgtggccagcctgacccccacagctgcccacagcggcagccacctgtttggcttcccccccaccccacccaaggaggtgtccccagaccccagcaccaccggggccgccagccctgccagcagcagcgctgggggcagcgctgcccggggggaggacaaggatggagtgaagtaccaggtgtccctgacagagagcatgaagatggagagcggcagccccctgcggcccggcctggccaccatgggcacccagcctgccacccaccaccccatccccacctaccccagctatgtgcctgctgctgcccatgactacagcagcggcctcttccaccctgggggcttcctgggcggccctgccagcagcttcacccccaagcagaggagcaaggcccggagctgcagcgagggccgggagtgtgtgaactgtggggccacagccacccccctgtggaggagagatggcaccggccactacctgtgcaatgcctgtggcctgtaccacaagatgaatggccagaaccggcccctcatcaagcccaagaggcggctgtctgctgccaggagagctggcacctgctgtgccaactgccagaccaccaccaccaccctgtggaggagaaatgccaatggagaccctgtgtgcaatgcctgtggcctgtactacaagctgcacaacgtgaaccggcccctgaccatgaagaaggagggcatccagaccaggaacaggaagatgagcaacaagagcaagaagagcaagaagggagctgagtgctttgaggagctgagcaagtgcatgcaggagaagagcagccccttctctgctgctgccctggccggccacatggcccctgtgggccacctgccccccttcagccacagcggccacatcctgcccacccccacccccatccaccccagcagcagcctgagctttggccacccccaccccagctccatggtgacagccatgggctag

SEQ ID NO: 58740 - DNA, 1443 bp, Artificial Sequence
  derived and/or modified sequence
atggaggtggcccccgagcagccccggtggatggcccaccccgccgttctgaacgctcaacatcccgactcgcaccaccccggcctggcacacaactacatggaaccagcccagctcctcccccctgacgaagtcgacgtgttcttcaatcacctggacagccagggcaacccatattatgccaaccctgcccacgcccgcgccagagtcagttattcccctgctcacgctcgtttgactggaggtcagatgtgccgtccccacctcttacattcacccggactcccttggttagacggcggtaaagccgccctgtcggccgccgccgctcaccaccacaacccctggactgtgtcaccttttagtaaaacacctttgcacccatccgccgcaggtggccctggtgggcccctgtcggtgtatccaggcgcggggggcggcagtggcggaggaagcggcagcagcgttgcctctttaacccccaccgccgcacactcgggttcacacttgtttggtttccccccaacaccccccaaggaggtgagcccagacccaagcacaaccggggcggctagcccagcgtcctcctcagcaggcgggtcagcagctaggggagaagataaggacggggtaaaataccaagtgtctttgactgagagcatgaagatggagtccgggagccctcttcggccgggcttggccactatgggcacgcaacctgcaacccaccaccctattcccacttaccctagctacgtgccagcggccgcacacgattactccagcgggttgttccatcccggagggtttctcggtggtcccgcctcttcattcactcctaaacagaggtccaaggcccgctcttgttccgagggaagggagtgcgtcaattgcggagccaccgcgacccccttatggcggagggacggcaccgggcactatctgtgtaatgcctgtggactgtaccacaaaatgaacggacaaaatagacctctcatcaaacccaaaagacggttatccgccgccagacgggcaggcacctgctgcgccaattgccagaccacaaccactactttgtggagaaggaacgctaacggcgaccccgtctgtaacgcctgcggcttgtattacaaactgcacaatgtaaataggccactgaccatgaaaaaagagggcatccagacaaggaataggaaaatgtccaataagagcaagaaatcaaaaaagggggcggaatgtttcgaggaattaagcaagtgtatgcaggagaaatcaagtcctttttccgctgccgctcttgctggccatatggcacctgtgggccatctgccaccattttcacattctggccacatcctcccaacccctacacctattcatccctccagctctctgtccttcggacacccgcatccaagcagcatggtcaccgctatgggctag

SEQ ID NO: 58741 - DNA, 1443 bp, Artificial Sequence
  derived and/or modified sequence
atggaggtggcccccgagcagccccggtggatggcccaccccgccgttctgaacgcacagcatccagactcacaccacccaggcctggcgcataattatatggagccagctcagctcctgccccccgatgaggtagatgtgttcttcaatcatctggattcgcagggaaacccttactacgctaatcccgctcacgctagggcgagggtcagctactcacccgctcatgccaggctgactggaggacagatgtgccggccccatctgcttcattcccctggcttgccttggctggatggcgggaaggcagcacttagcgcagctgcagcccatcaccataatccatggaccgtgtccccgttttccaagactccgctgcacccatccgctgccggcggccctgggggtccactgtctgtttaccctggggccggaggaggttctggggggggatcggggagctccgtggcaagcttaacacccacggccgcccactctggcagccacctttttggctttcctcctactccccctaaagaggtgtcccctgacccttctacaacaggcgccgctagcccagcaagtagcagtgccggcggctcggctgcaaggggcgaggacaaggacggagtcaaataccaggttagcctcacggaatctatgaaaatggagtcgggatctcctctgcgaccaggcctggcaacaatgggcactcagccggccacccatcaccctatacctacataccccagctacgtgccggccgccgctcacgactattctagcggcctcttccacccgggagggttcctgggtggaccagcgtcttctttcaccccaaagcagcgcagtaaagctcgctcctgctccgagggtagggagtgcgttaactgcggcgccactgcaactcctctgtggcgccgcgatgggacgggtcactatctgtgcaatgcgtgtggactctaccacaagatgaacggccagaacaggcctttaataaaaccaaaaagacgattaagcgctgctcgcagggctggaacttgctgtgcaaattgccagactacaacaaccaccctgtggaggaggaacgcaaatggcgatcctgtgtgcaacgcttgcgggctgtattataaactacataatgtcaaccgtcccttgacgatgaaaaaagaaggtatacagaccaggaatcggaagatgtctaacaaaagcaaaaagtctaaaaagggcgccgaatgttttgaagaacttagcaagtgcatgcaagagaaaagctctcctttttccgcggccgcactcgcgggccatatggccccggtgggccaccttccaccgtttagccacagcggacatattctccccacccctacccctatccacccatcaagctctctttccttcggtcacccccatccttcttccatggtaacagcgatgggatag

SEQ ID NO: 58742 - DNA, 1443 bp, Artificial Sequence
  derived and/or modified sequence
atggaggtggcacctgaacagccgcgatggatggcacatccagccgtcttaaacgcccagcatccagactctcaccacccaggtctggcacacaattatatggaaccagcacagctgctgccacccgacgaggtggacgtcttcttcaatcacctggatagtcagggcaacccttattatgcaaaccctgcacatgcacgcgcaagagtgagctattctcccgcacacgcaagactaaccggcggacagatgtgcagaccacatctactgcatagtcctggtttgccctggctagatggtgggaaggcagcccttagcgccgcagctgctcatcatcataatccttggactgtcagccccttcagcaagactccattgcacccctctgcagcaggcggaccaggaggcccactctcagtctatcctggcgcaggcggtgggagcggtggcggatctggttcttctgttgcaagtctcacccccactgccgcacattcgggcagtcacctctttggcttccctcctacaccgccaaaagaagtgtccccagacccaagcacgaccggtgcagcgtcccccgcaagctcttctgcgggtgggtctgcagccaggggcgaagacaaagacggggtgaagtaccaggtctcactgacagagagcatgaaaatggagagcggcagtcctttgagaccaggtctggccaccatgggcacgcagcccgcaactcatcatccaatcccaacctatcctagttacgtcccagctgctgctcatgattactcctctggattgttccaccccggaggtttccttggaggcccagcttcctcctttacgcccaagcagcggtccaaggcaaggagctgctcagaaggtcgggagtgtgtcaactgcggggctaccgccactcccctttggaggcgcgacggtactggccactacctttgcaatgcttgtggcctctatcacaagatgaatggacagaatcgccctctgataaagcccaagcgcagactgtccgccgctaggcgagccggtacatgttgcgctaactgtcagacaaccacgactacactttggcgtcgaaacgctaatggagacccggtgtgtaatgcctgtgggttatactacaagctgcacaatgtaaatcgccctctaactatgaagaaggaagggatccagactagaaacaggaagatgtcaaataaaagtaagaaatctaagaagggtgctgaatgtttcgaggaactttccaaatgtatgcaggagaagagctcccctttttcagcagcagctctggcgggacacatggctccggtcggccacctccctcctttcagccatagtgggcatatcctgcctacaccgacaccaatccacccatccagctctctctcgttcggccatccccacccctctagcatggtgacagcaatgggatag

SEQ ID NO: 58743 - DNA, 1443 bp, Artificial Sequence
  derived and/or modified sequence
atggaggttgccccagagcagccacgctggatggcccatcccgcagtcctcaacgcacagcatcctgactcacaccatcctggactggcacacaactacatggaacccgcacaactcctgcccccagatgaggtcgacgtgtttttcaaccacttggacagtcaagggaatccttactacgccaacccagcccacgcccgagccagagtttcttactctcccgcacatgcccgtttaaccggcggacagatgtgccggcctcatttgctccactcaccgggactgccatggttagacggagggaaagcagcactgtcagcagcagccgctcatcaccacaacccctggacagttagtccattttccaagactccgctgcatcctagcgccgcaggcggaccaggtggaccgttgtcagtttatcctggggcagggggagggagcggcggtggttccgggagttccgtcgccagcctaactccaacggccgctcattccggcagtcacctatttggctttccccctacccctcccaaagaagtgtctcctgacccttctaccacgggtgcagcctccccagccagctcatccgctggcggatccgctgccagaggcgaagacaaggacggcgtgaagtaccaagtgtccttgacggaatccatgaaaatggaatccggcagtcccctgcggcctggactcgctacaatggggactcagcctgcaacccatcatccaattccgacatacccctcatatgtgcccgcagccgcacatgattacagttcaggactgtttcatcccggtggctttttaggaggacccgcttcaagttttacccccaagcagaggtccaaggctcggagctgctctgagggcagagaatgtgtgaattgcggcgctacagcgactcctctttggaggagggatggaaccggtcactatctctgcaacgcctgcggtctctatcacaaaatgaatggtcagaacaggcctctgatcaaacccaagagacgcctctctgccgcacggagggcgggaacttgttgtgcaaactgccagacaacaaccactactctgtggcgcaggaacgccaatggggacccggtctgcaacgcctgcggtctctactacaaacttcacaatgtcaatcgacccctcacaatgaaaaaagagggaattcagacgcggaatcggaagatgtcaaataagtctaagaagtctaaaaaaggcgctgaatgttttgaagagctctccaaatgcatgcaggagaaaagctctccttttagcgcagccgcactggcgggacacatggcaccggtgggacatctccccccattctcccactctggtcacatactgccaacacctactcctatccacccctcctcttcactgagtttcggccacccacatcctagctctatggttacagcaatgggatag

SEQ ID NO: 58744 - DNA, 1443 bp, Artificial Sequence
  derived and/or modified sequence
atggaggtggcccccgagcagcccagatggatggcccaccccgccgtgctgaacgcccagcaccccgacagccaccaccccggcctggcccacaactacatggagcccgcccagctgctgccccccgacgaggtggacgtgttcttcaaccacctggacagccagggcaacccctactacgccaaccccgcccacgccagagccagagtgagctacagccccgcccacgccagactgaccggcggccagatgtgcagaccccacctgctgcacagccccggcctgccctggctggacggcggcaaggccgccctgagcgccgccgccgcccaccaccacaacccctggaccgtgagccccttcagcaagacccccctgcaccccagcgccgccggcggccccggcggccccctgagcgtgtaccccggcgccggcggcggcagcggcggcggcagcggcagcagcgtggccagcctgacccccaccgccgcccacagcggcagccacctgttcggcttcccccccaccccccccaaggaggtgagccccgaccccagcaccaccggcgccgccagccccgccagcagcagcgccggcggcagcgccgccagaggcgaggacaaggacggcgtgaagtaccaggtgagcctgaccgagagcatgaagatggagagcggcagccccctgagacccggcctggccaccatgggcacccagcccgccacccaccaccccatccccacctaccccagctacgtgcccgccgccgcccacgactacagcagcggcctgttccaccccggcggcttcctgggcggccccgccagcagcttcacccccaagcagagaagcaaggccagaagctgcagcgagggcagagagtgcgtgaactgcggcgccaccgccacccccctgtggagaagagacggcaccggccactacctgtgcaacgcctgcggcctgtaccacaagatgaacggccagaacagacccctgatcaagcccaagagaagactgagcgccgccagaagagccggcacctgctgcgccaactgccagaccaccaccaccaccctgtggagaagaaacgccaacggcgaccccgtgtgcaacgcctgcggcctgtactacaagctgcacaacgtgaacagacccctgaccatgaagaaggagggcatccagaccagaaacagaaagatgagcaacaagagcaagaagagcaagaagggcgccgagtgcttcgaggagctgagcaagtgcatgcaggagaagagcagccccttcagcgccgccgccctggccggccacatggcccccgtgggccacctgccccccttcagccacagcggccacatcctgcccacccccacccccatccaccccagcagcagcctgagcttcggccacccccaccccagcagcatggtgaccgccatgggctag

SEQ ID NO: 58745 - protein, 466 aa, Artificial Sequence
  derived and/or modified sequence
MEVAPEQPRWMAHPAVLNAQHPDSHHPGLAHNYMEPAQLLPPDEVDVFFNHLDSQGNPYYANPAHARARVSYSPAHARLTGGQMCRPHLLHSPGLPWLDGGKAALSAAAAHHHNPWTVSPFSKTPLHPSAAGGPGGPLSVYPGAGGGSGGGSGSSVASLTPTAAHSGSHLFGFPPTPPKEVSPDPSTTGAASPASSSAGGSAARGEDKDGVKYQVSLTESMKMESGSPLRPGLATMGTQPATHHPIPTYPSYVPAAAHDYSSGLFHPGGFLGGPASSFTPKQRSKARSCSEGRECVNCGATATPLWRRDGTGHYLCNACGLYHKMNGQNRPLIKPKRRLTTTTTLWRRNANGDPVCNACGLYYKLHNVNRPLTMKKEGIQTRNRKMSNKSKKSKKGAECFEELSKCMQEKSSPFSAAALAGHMAPVGHLPPFSHSGHILPTPTPIHPSSSLSFGHPHPSSMVTAMG

SEQ ID NO: 58746 - DNA, 1401 bp, Artificial Sequence
  derived and/or modified sequence
atggaggtggcccccgaacagccacgctggatggctcatcccgctgttcttaacgcccaacaccctgatagccaccatcccggtctagcccacaactatatggaacctgcacagctgctgccaccagacgaagttgatgtcttcttcaaccaccttgactcccagggaaatccgtactacgcaaaccccgcacacgctcgcgcgcgggtgagttactcgccagcccacgctagactgacaggaggacagatgtgtagacctcacctgctgcacagccccggactgccatggctggacggaggtaaagctgcactgtcggcggccgcggcgcaccatcacaatccgtggactgtgagtccattttccaaaactccattgcaccccagtgcggcaggcggccctggcggacccctgtccgtctatccaggcgccggcggggggtcaggcgggggcagcggctcttcggtggccagccttacaccaacagccgcacacagtgggtcacacttattcggctttccccccacaccccccaaggaggtatctcctgacccttctactaccggcgcagcttctccggcctcaagcagcgcaggcggatcggctgcccgcggcgaggacaaggacggtgtgaagtaccaggtgagccttacggaaagcatgaagatggagtccggttctccactgaggcctgggctggctacaatgggcacccagcctgctacccaccacccaatccccacctatcctagctacgttccagcagccgctcatgactattcatctggattgttccacccaggtgggtttctgggcggacccgcaagctcatttacccctaaacagagatccaaggctcggtcatgttccgagggacgtgagtgcgtaaattgcggcgccaccgccacccccttgtggaggcgcgatggcaccggccattatctgtgtaatgcttgcggactgtaccataagatgaacggccagaacagaccactaattaagcccaagagacgcttgaccacaactacaaccctgtggcgtcggaatgcaaatggggatcctgtgtgtaacgcctgcgggctgtattataagctacataacgttaaccggcctctgactatgaaaaaggagggaatccaaacacgaaatcgcaaaatgagcaacaaatcaaagaagagtaaaaagggcgcagaatgttttgaggaactgtcaaaatgcatgcaagaaaagagttcccccttctcagcagccgccctggctggccacatggctccagtagggcatctccctcctttttctcattccggccacatcttaccaacacctacccctatccacccatctagctccctgagctttggccacccacaccccagttcgatggtgactgctatgggctag

SEQ ID NO: 58747 - DNA, 453 bp, Artificial Sequence
  derived and/or modified sequence
atggaggttgcccctgaacagccacgctggatggcccacccggccgtacttaatgcacagcaccctgactcacaccatccaggcctggcacacaattatatggagcccgcacagctcctccccccggacgaggtagatgtcttctttaaccacctggatagccaaggcaacccttattacgcaaatcccgcgcacgccagagcccgggtgtcatatagccccgcccacgccaggctcacaggcggacagatgtgtcggccacacctgttacactctccaggcttgccatggttggacggcggcaaagctgctttaagcgccgccgctgcccaccaccacaacccctggactgtatcgcctttttctaagactcctctgcacccaagcgccgccgggggtcccggaggccccctgagtgtgtacccaggggctggcggggggtccggaggctag

SEQ ID NO: 58748 - DNA, 2525 bp, Artificial Sequence
  derived and/or modified sequence
ggcagctggcgccagggcggccggaggatgccgaggggccggagccgggagggcccgaggccgaggcgcactctacccccagctcctaccctgtaagccccgccagcctccggacgtgctgtccctgggcccgtcgccctcggggctcccgccggaactccttcactctcagaggccgagtccctcccctccccacggctgcgtgtggccgttgccgtctgcacccagaccctgagccgccgccgccggccatggaggtggcgcccgagcagccgcgctggatggcgcacccggccgtgctgaatgcgcagcaccccgactcacaccacccgggcctggcgcacaactacatggaacccgcgcagctgctgcctccagacgaggtggacgtcttcttcaatcacctcgactcgcagggcaacccctactatgccaaccccgctcacgcgcgggcgcgcgtctcctacagccccgcgcacgcccgcctgaccggaggccagatgtgccgcccacacttgttgcacagcccgggtttgccctggctggacgggggcaaagcagccctctctgccgctgcggcccaccaccacaacccctggaccgtgagccccttctccaagacgccactgcacccctcagctgctggaggccctggaggcccactctctgtgtacccaggggctgggggtgggagcgggggaggcagcgggagctcagtggcctccctcacccctacagcagcccactctggctcccaccttttcggcttcccacccacgccacccaaagaagtgtctcctgaccctagcaccacgggggctgcgtctccagcctcatcttccgcggggggtagtgcagcccgaggagaggacaaggacggcgtcaagtaccaggtgtcactgacggagagcatgaagatggaaagtggcagtcccctgcgcccaggcctagctactatgggcacccagcctgctacacaccaccccatccccacctacccctcctatgtgccggcggctgcccacgactacagcagcggactcttccaccccggaggcttcctggggggaccggcctccagcttcacccctaagcagcgcagcaaggctcgttcctgttcagaaggccgggagtgtgtcaactgtggggccacagccacccctctctggcggcgggacggcaccggccactacctgtgcaatgcctgtggcctctaccacaagatgaatgggcagaaccgaccactcatcaagcccaagcgaagactgacgacaaccaccaccttatggcgccgaaacgccaacggggaccctgtctgcaacgcctgtggcctctactacaagctgcacaatgttaacaggccactgaccatgaagaaggaagggatccagactcggaaccggaagatgtccaacaagtccaagaagagcaagaaaggggcggagtgcttcgaggagctgtcaaagtgcatgcaggagaagtcatcccccttcagtgcagctgccctggctggacacatggcacctgtgggccacctcccgcccttcagccactccggacacatcctgcccactccgacgcccatccacccctcctccagcctctccttcggccacccccacccgtccagcatggtgaccgccatgggctagggaacagatggacgtcgaggaccgggcactcccgggatgggtggaccaaacccttagcagcccagcatttcccgaaggccgacaccactcctgccagcccggctcggcccagcaccccctctcctggagggcgcccagcagcctgccagcagttactgtgaatgttccccaccgctgagaggctgcctccgcacctgaccgctgcccaggtggggtttcctgcatggacagttgtttggagaacaacaaggacaactttatgtagagaaaaggaggggacgggacagacgaaggcaaccatttttagaaggaaaaaggattaggcaaaaataatttattttgctcttgtttctaacaaggacttggagacttggtggtctgagctgtcccaagtcctccggttcttcctcgggattggcgggtccacttgccagggctctgggggcagatttgtggggacctcagcctgcaccctcttctcctctggcttccctctctgaaatagccgaactccaggctgggctgagccaaagccagagtggccacggcccagggagggtgagctggtgcctgctttgacgggccaggccctggagggcagagacaatcacgggcggtcctgcacagattcccaggccagggctgggtcacaggaaggaaacaacattttcttgaaaggggaaacgtctcccagatcgctcccttggctttgaggccgaagctgctgtgactgtgtccccttactgagcgcaagccacagcctgtcttgtcaggtggaccctgtaaatacatcctttttctgctaacccttcaaccccctcgcctcctactctgagacaaaagaaaaaatattaaaaaaatgcataggcttaa

SEQ ID NO: 58749 - DNA, 844 bp, Artificial Sequence
  derived and/or modified sequence
gtcgagcgcgggtccctctttattggccagctgggcgccctgctacttggcgtcgcatttctctctcccaggcgggttcgtttccgccagagaatgcagcagtcccgcatcctacgcaggacctgcaaccgaggtggaggcttcggtcaagccggctcctgcctgcgttgtcgaggaaggcaaccccaaggcctgaaaggacctggcagaactcctgtttcctttttttcctctacaccggattgcgggcaaggaggctggttcgggtctcccgaggcccctgctcaagcactccttaaccgtcctgctaagcccctctgtgcggcgattttctgagctgccgagcgggggccgttgccgtctgcacccagaccctgagccgccgccgccggccatggaggtggcgcccgagcagccgcgctggatggcgcacccggccgtgctgaatgcgcagcaccccgactcacaccacccgggcctggcgcacaactacatggaacccgcgcagctgctgcctccagacgaggtggacgtcttcttcaatcacctcgactcgcagggcaacccctactatgccaaccccgctcacgcgcgggcgcgcgtctcctacagccccgcgcacgcccgcctgaccggaggccagatgtgccgcccacacttgttgcacagcccgggtttgccctggctggacgggggcaaagcagccctctctgccgctgcggcccaccaccacaacccctggaccgtgagccccttctccaagacgccactgcacccctcagctgctggaggccctggaggcccactctctgtgtacccaggggctgggggtgggagcggggga

SEQ ID NO: 58750 - DNA, 1401 bp, Artificial Sequence
  derived and/or modified sequence
atggaggtggcccctgagcagccccgctggatggcccaccctgctgtgctgaatgcccagcacccagacagccaccaccctggcctggcccacaactacatggagcccgcccagctgctgcccccagatgaggtggatgtgttcttcaaccacctggacagccagggcaacccctactatgccaacccagcccacgcccgggcccgggtgtcctacagccctgcccacgcccggctgaccggcggccagatgtgccggccccacctgctgcacagccctggcctgccctggctggatggcggcaaggccgccctgtctgctgctgctgcccaccaccacaacccctggacagtgagccccttcagcaagacccccctgcaccccagcgctgctgggggccctgggggccccctgtctgtgtacccaggggccggcggcggcagcggcggcggcagcggcagctctgtggccagcctgacccccacagctgcccacagcggcagccacctgtttggcttcccccccaccccacccaaggaggtgtccccagaccccagcaccaccggggccgccagccctgccagcagcagcgctgggggcagcgctgcccggggggaggacaaggatggagtgaagtaccaggtgtccctgacagagagcatgaagatggagagcggcagccccctgcggcccggcctggccaccatgggcacccagcctgccacccaccaccccatccccacctaccccagctatgtgcctgctgctgcccatgactacagcagcggcctcttccaccctgggggcttcctgggcggccctgccagcagcttcacccccaagcagaggagcaaggcccggagctgcagcgagggccgggagtgtgtgaactgtggggccacagccacccccctgtggaggagagatggcaccggccactacctgtgcaatgcctgtggcctgtaccacaagatgaatggccagaaccggcccctcatcaagcccaagaggcggctgaccaccaccaccaccctgtggaggagaaatgccaatggagaccctgtgtgcaatgcctgtggcctgtactacaagctgcacaacgtgaaccggcccctgaccatgaagaaggagggcatccagaccaggaacaggaagatgagcaacaagagcaagaagagcaagaagggagctgagtgctttgaggagctgagcaagtgcatgcaggagaagagcagccccttctctgctgctgccctggccggccacatggcccctgtgggccacctgccccccttcagccacagcggccacatcctgcccacccccacccccatccaccccagcagcagcctgagctttggccacccccaccccagctccatggtgacagccatgggctag

SEQ ID NO: 58751 - DNA, 453 bp, Artificial Sequence
  derived and/or modified sequence
atggaggtggcccctgagcagccccgctggatggcccaccctgctgtgctgaatgcccagcacccagacagccaccaccctggcctggcccacaactacatggagcccgcccagctgctgcccccagatgaggtggatgtgttcttcaaccacctggacagccagggcaacccctactatgccaacccagcccacgcccgggcccgggtgtcctacagccctgcccacgcccggctgaccggcggccagatgtgccggccccacctgctgcacagccctggcctgccctggctggatggcggcaaggccgccctgtctgctgctgctgcccaccaccacaacccctggacagtgagccccttcagcaagacccccctgcaccccagcgctgctgggggccctgggggccccctgtctgtgtacccaggggccggcggcggcagcggcggctag

SEQ ID NO: 58752 - DNA, 1401 bp, Artificial Sequence
  derived and/or modified sequence
atggaggtggcccccgagcagccccggtggatggcccaccccgccgtgctaaatgctcagcaccctgacagtcatcatcccgggctcgcacataactacatggaacctgctcagctgctgccgccggacgaagtggatgtcttttttaaccacctcgactcacagggtaacccatattacgccaatcccgcccacgcccgcgctcgagtgtcttacagtccagcacacgcgcgcttgacagggggccagatgtgtcgccctcatctgctccattccccgggattgccctggctggatggcggtaaagctgcactgagcgcagccgcagcacatcaccacaatccgtggacggtaagcccatttagcaagacaccgctgcatcccagcgcagcaggggggccaggcgggccgctctcagtctacccaggcgccggcgggggctcaggcggtgggtctggaagctctgtagctagcctgacccctaccgccgcccactctggcagccacctgttcggctttccaccaacaccacccaaggaggtttcaccagacccgtccacaacaggtgcagcctcacccgcatcatcgtccgccgggggtagtgcagcaagaggcgaggacaaagacggggtgaagtaccaggtttctttgactgagtcaatgaaaatggaatctggatctcctctccgcccgggactagctactatggggacacagccagctacacatcaccccattccaacttacccaagctacgtcccagcagctgcacacgactactcgagtggactgtttcatcccggcggctttctaggtggtcctgccagcagttttacacccaagcagcgcagtaaagcacgctcatgttcagagggtagagagtgcgttaattgcggcgccactgccactccgctgtggcgtagggatggtaccgggcactacctctgtaacgcctgcgggctttaccataaaatgaatgggcagaaccgccctctcatcaagcccaaacggcggctcacaactaccaccacactgtggaggaggaacgctaacggcgacccggtgtgtaacgcctgtggcctgtattacaaactccataatgttaatcggcccctaactatgaaaaaagagggaattcagacccgaaaccgcaagatgtcaaataaatctaaaaaaagcaagaaaggcgctgagtgtttcgaagagctttctaaatgcatgcaggagaaatccagtcccttctctgctgcagctctagctgggcatatggctccagtggggcacctgcctcccttctcccatagcggacacatcctgccgaccccaacacctatccacccatcttcctcattatccttcgggcaccctcacccatcaagcatggtgaccgctatggggtag

SEQ ID NO: 58753 - DNA, 453 bp, Artificial Sequence
  derived and/or modified sequence
atggaggtggcccccgagcagccccggtggatggcccaccccgccgtgctcaacgcacagcacccagatagccaccacccaggactggctcataactacatggagccggcacagctgttaccccctgacgaagtggacgtgttttttaatcatttggatagccagggcaacccatactatgctaatcccgcacatgcccgggccagagtgtcttactctccagcccacgcaagattgaccgggggacagatgtgtcgtccccacctcttgcattctcccggtctgccgtggctggacgggggaaaggccgccctatcggcggccgcagcccaccaccataatccatggaccgtttcacccttttccaaaacgcccttgcatcctagcgcagccggtggcccaggaggacctctgtctgtttatccaggggcaggcggcggatcagggggatag

SEQ ID NO: 58754 - DNA, 1401 bp, Artificial Sequence
  derived and/or modified sequence
atggaagtagcccctgaacagccaagatggatggcacatcctgctgtcttaaacgctcagcacccggatagtcatcatcctggactcgcgcataactatatggagccggcacagcttctcccgcctgacgaggtcgatgttttctttaatcacctggattcccaaggaaacccgtattatgccaatccagcccacgctagagccagagtttcgtattcaccagctcacgcaagactgacaggcggacagatgtgccgcccacacctcctgcattcccctggcctgccctggctggacggagggaaagccgcactgtctgccgctgcggctcatcaccataacccttggacggtctcaccattcagcaagacccctttgcacccttcagcagccggaggacctgggggtcctctgagtgtttaccccggtgcaggcggaggctcgggagggggaagtggcagttccgtggcaagtctgacgccaacagccgctcattcagggtcccacctctttgggttccctccaacacccccaaaggaggtgagtcccgatccttccacaacaggagctgcttctcccgcatctagctccgccggaggctctgccgcacgcggagaggacaaggacggtgtgaaataccaagtaagcttaactgaaagtatgaagatggagtcaggcagccccctcaggcccggattagccactatgggaacacaacccgctacccaccaccctatccccacttacccatcgtacgtgcccgcagcagcacacgattacagttcaggattatttcatcctgggggatttctcggcggaccagccagtagtttcacaccaaagcagaggtccaaggctagaagttgttcagagggcagggaatgcgtgaactgcggcgcaacagctaccccactgtggcggcgagacggaacgggacattatttgtgtaacgcgtgtggattgtatcacaaaatgaatggtcagaataggcctctcatcaaaccgaagcgcaggctgaccaccaccaccaccctgtggagacgcaatgcaaatggtgacccagtatgtaatgcatgtggactgtattataaattacacaacgtgaatagaccactgactatgaaaaaggagggcatccagactagaaatagaaaaatgagcaacaagagcaagaagagcaagaagggagctgaatgcttcgaagagctgtctaaatgcatgcaggagaagtcctcaccgttctctgcggctgcgctcgccggtcatatggcgcctgttggacatcttcctccattttcgcattctggccatatactgcccacacctacccctattcacccgagttcctccctgagcttcggccatccccacccaagctccatggtgacagccatgggttag

SEQ ID NO: 58755 - DNA, 453 bp, Artificial Sequence
  derived and/or modified sequence
atggaagtggctccagagcagcctagatggatggcacatcccgcagtcctgaatgcccaacaccctgactcgcaccaccccggactggcacataactacatggagccagcccagctcctcccccctgatgaggtagacgtgttcttcaatcacctcgacagtcaggggaacccatattacgcaaaccctgcacatgcacgagccagggtttcatatagtcctgcacacgccagattgacgggcggtcagatgtgccgccctcatcttctccatagccctggccttccatggctggatggaggaaaggcggctctgtccgcagcagcggcacaccaccacaacccttggacagtgagcccattttcaaaaacccctctgcatccctcagccgctggaggaccgggaggaccactgtccgtgtacccgggagcaggtggcggtagtggaggatag

SEQ ID NO: 58756 - DNA, 1401 bp, Artificial Sequence
  derived and/or modified sequence
atggaggtggcccccgagcagcccagatggatggcccaccccgccgtgctgaacgcccagcaccccgacagccaccaccccggcctggcccacaactacatggagcccgcccagctgctgccccccgacgaggtggacgtgttcttcaaccacctggacagccagggcaacccctactacgccaaccccgcccacgccagagccagagtgagctacagccccgcccacgccagactgaccggcggccagatgtgcagaccccacctgctgcacagccccggcctgccctggctggacggcggcaaggccgccctgagcgccgccgccgcccaccaccacaacccctggaccgtgagccccttcagcaagacccccctgcaccccagcgccgccggcggccccggcggccccctgagcgtgtaccccggcgccggcggcggcagcggcggcggcagcggcagcagcgtggccagcctgacccccaccgccgcccacagcggcagccacctgttcggcttcccccccaccccccccaaggaggtgagccccgaccccagcaccaccggcgccgccagccccgccagcagcagcgccggcggcagcgccgccagaggcgaggacaaggacggcgtgaagtaccaggtgagcctgaccgagagcatgaagatggagagcggcagccccctgagacccggcctggccaccatgggcacccagcccgccacccaccaccccatccccacctaccccagctacgtgcccgccgccgcccacgactacagcagcggcctgttccaccccggcggcttcctgggcggccccgccagcagcttcacccccaagcagagaagcaaggccagaagctgcagcgagggcagagagtgcgtgaactgcggcgccaccgccacccccctgtggagaagagacggcaccggccactacctgtgcaacgcctgcggcctgtaccacaagatgaacggccagaacagacccctgatcaagcccaagagaagactgaccaccaccaccaccctgtggagaagaaacgccaacggcgaccccgtgtgcaacgcctgcggcctgtactacaagctgcacaacgtgaacagacccctgaccatgaagaaggagggcatccagaccagaaacagaaagatgagcaacaagagcaagaagagcaagaagggcgccgagtgcttcgaggagctgagcaagtgcatgcaggagaagagcagccccttcagcgccgccgccctggccggccacatggcccccgtgggccacctgccccccttcagccacagcggccacatcctgcccacccccacccccatccaccccagcagcagcctgagcttcggccacccccaccccagcagcatggtgaccgccatgggctag

SEQ ID NO: 58757 - DNA, 453 bp, Artificial Sequence
  derived and/or modified sequence
atggaggtggcccccgagcagcccagatggatggcccaccccgccgtgctgaacgcccagcaccccgacagccaccaccccggcctggcccacaactacatggagcccgcccagctgctgccccccgacgaggtggacgtgttcttcaaccacctggacagccagggcaacccctactacgccaaccccgcccacgccagagccagagtgagctacagccccgcccacgccagactgaccggcggccagatgtgcagaccccacctgctgcacagccccggcctgccctggctggacggcggcaaggccgccctgagcgccgccgccgcccaccaccacaacccctggaccgtgagccccttcagcaagacccccctgcaccccagcgccgccggcggccccggcggccccctgagcgtgtaccccggcgccggcggcggcagcggcggctag

SEQ ID NO: 58758 - protein, 473 aa, Artificial Sequence
  derived and/or modified sequence
MYEIYVETCGQNTENQVNPATFGKCEDHSPMKTDPVGSPLSEFRRCPFLEQEQAKKYSCNMMAFLADEYCNYCRDILRNVEDLLTSFWKSLQQDTVMLMSLPDVCQLFKCYDVQLYKGIEDVLLHDFLEDVSIQYLKSVQLFSKKFKLWLLNALEGVPALLQISKLKEVTLFVKRLRRKTYLSNMAKTMRMVLKSKRRVSVLKSDLQAIINQGTLATSKKALASDRSGADELENNPEMKCLRNLISLLGTSTDLRVFLSCLSSHLQAFVFQTSRSKEEFTKLAASFQLRWNLLLTAVSKAMTLCHRDSFGSWHLFHLLLLEYMIHILQSCLEEEEEEEDMGTVKEMLPDDPTLGQPDQALFHSLNSSLSQACASPSMEPLGVMPTHMGQGRYPVGVSNMVLRILGFLVDTAMGNKLIQVLLEDETTESAVKLSLPMGQEALITLKDGQQFVIQISDVPQSSEDIYFRENNANV

SEQ ID NO: 58759 - protein, 45 aa, Artificial Sequence
  derived and/or modified sequence
MYEIYVETCGQNTENQVNPATFGKMAFLADEYCNYCRDILRNVRN

SEQ ID NO: 58760 - DNA, 1422 bp, Artificial Sequence
  derived and/or modified sequence
atgtacgagatctacgtcgaaacctgtgggcagaacaccgagaatcaggtcaatcctgctacatttggaaagtgcgaggatcattccccaatgaaaactgatcctgtgggatcccccctcagcgaatttcgccggtgcccattcttggaacaagaacaggccaagaaatacagttgcaatatgatggcgtttctggcagacgaatactgcaactattgtcgggatatcctgcgcaatgtcgaggatctcttgaccagcttttggaaatccctgcaacaggacacggttatgctgatgtctctgcccgatgtctgtcaactcttcaagtgctatgatgtgcagctgtataaaggtatcgaggacgtactgttgcatgattttctggaggacgtgtccattcaatacctcaaatctgtacagttgtttagcaagaagttcaagttatggcttctgaatgccttagagggtgtccctgcattattgcagatatcaaaactaaaggaagttacgctatttgttaagaggctgcggcggaagacgtacctgtcaaatatggcaaagacgatgcggatggtgttaaaatccaagaggcgggtcagcgtgctcaaatctgacctacaagctattatcaaccagggcacactcgccacgtcgaaaaaagcacttgctagtgatcgcagtggggctgacgagcttgagaacaatccggagatgaagtgtttgaggaacctgatctctctgctcgggacaagtaccgatctgcgggtttttctttcctgcctctccagccacctccaggcatttgtcttccaaacaagtcggtcaaaggaggaatttaccaagctggctgcctccttccaactacgctggaaccttctgcttacagcagtctcaaaggccatgaccctgtgccaccgcgatagctttggcagctggcaccttttccatctcctgttattagagtatatgatccacattttgcaatcttgcctcgaggaggaagaggaagaggaggacatgggcaccgtgaaagaaatgctcccggatgatcccaccctgggccagcctgaccaggcactgttccatagtttgaactcatccctctcccaggcctgcgctagcccctcgatggagccactaggcgtgatgcctacccacatggggcaagggcggtacccagttggggtttcaaacatggtgctccgcatattaggatttttggtggacacagctatgggtaataaattgatacaggtgttacttgaagacgagacaacagagtcagccgtcaagttatctctgcctatgggccaggaagccctcatcacactgaaggacgggcagcagttcgttatacaaatctcagatgtcccccagagttcagaggacatctactttcgtgagaacaacgctaacgtatag

SEQ ID NO: 58761 - DNA, 138 bp, Artificial Sequence
  derived and/or modified sequence
atgtatgagatctatgtagagacatgcggccagaataccgagaaccaggtaaaccccgctacctttggaaaaatggcattcctcgcagacgaatactgcaattactgcagagacattctcaggaacgtacgtaactag

SEQ ID NO: 58762 - DNA, 1422 bp, Artificial Sequence
  derived and/or modified sequence
atgtatgagatctacgtggagacctgtggccagaacacagagaaccaggtgaacccagccaccttcggcaaatgtgaggaccacagccccatgaagacagatcctgtgggcagccccctgtctgagttccgccgctgccccttcctggagcaggagcaggccaagaagtacagctgcaacatgatggccttcctggctgatgagtactgcaactactgccgggacatcctgagaaatgtggaggacctgctgaccagcttctggaagagcctgcagcaggacacagtgatgctgatgagcctgcctgatgtgtgccagctgttcaagtgctatgatgtgcagctgtacaagggcattgaagatgtgctgctgcatgacttcctggaggatgtgtccatccagtacctgaagtctgtgcagctgttcagcaagaagttcaagctgtggctgctgaatgccctggagggcgtgcctgccctgctgcagatcagcaagctgaaggaggtgaccctgtttgtgaagaggctgcggaggaagacctacctgagcaacatggccaagaccatgaggatggtgctgaagagcaagagaagagtgtctgtgctgaagagtgacctgcaggccatcatcaaccagggcaccctggccaccagcaagaaggccctggccagtgacagaagtggagcagatgagctggagaacaaccctgagatgaagtgcctgaggaacctgatcagcctgctgggcaccagcacagacctgcgggtcttcctgagctgcctgagcagccacctgcaggcctttgtgttccagaccagccgcagcaaggaggagttcaccaagctggccgccagcttccagctgcgctggaacctgctgctgacagctgtgtccaaggccatgaccctgtgccaccgggacagctttggctcctggcacctgttccacctgctgctgctggagtacatgatccacatcctgcagagctgcctggaggaggaggaggaggaggaggacatgggcaccgtgaaggagatgctgcctgatgaccccaccctgggccagcctgaccaggccctcttccacagcctgaacagcagcctgagccaggcctgtgccagccccagcatggagcccctgggcgtgatgcccacccacatgggccagggccgctaccctgtgggcgtgagcaacatggtgctgcgcatcctgggcttcctggtggacacagccatgggcaacaagctgatccaggtgctgctggaggatgagaccacagagagcgctgtgaagctgagcctgcccatgggccaggaggccctgatcaccctgaaggatggccagcagtttgtgatccagatcagtgatgtgccccagagcagcgaggacatctacttccgggagaacaatgccaacgtgtag

SEQ ID NO: 58763 - DNA, 138 bp, Artificial Sequence
  derived and/or modified sequence
atgtatgagatctacgtggagacctgtggccagaacacagagaaccaggtgaacccagccaccttcggcaagatggccttcctggctgatgagtactgcaactactgccgggacatcctgagaaatgtgaggaactag

SEQ ID NO: 58764 - DNA, 1686 bp, Artificial Sequence
  derived and/or modified sequence
ataactccaacgctcaagcaagtcaaggacacccacggactcaacaccgcgaccagattggaaaaggtgttggtcgacaacttctgcatttgcgaagagtgcagcgtccctcgctgtctcatgtatgagatttacgtggagacctgtgggcaaaacactgagaaccaagtcaacccggccacctttgggaagtgtgaagatcattcaccgatgaagacagacccagttggatcccctttgtctgaattcaggagatgtccatttctggagcaagaacaggcaaagaaatactcctgtaatatgatggccttccttgctgacgaatactgcaactattgtcgagacattttacgaaatgtggaggacttgcttacttccttctggaagtctctgcagcaagacacagtcatgctgatgtcattgcctgacgtgtgccagctctttaaatgctacgacgtccagctgtacaagggaattgaggatgttctccttcatgacttcttggaagatgtttctattcagtacctgaaatctgtgcagttatttagtaagaaatttaagctgtggctccttaatgctttggaaggtgttccagccctcttgcagatctccaaactcaaagaagttactctatttgtcaaaagactaagaagaaagacgtacctttccaacatggctaagactatgcgaatggtattgaaaagtaagaggcgtgtcagcgttttgaagtcagatctacaggccatcatcaatcaaggcactttggctacttctaagaaagccctggcaagtgaccggagtggcgcagatgaactggagaacaacccagagatgaaatgtttaagaaacttaatttctttgctgggaacatcaacagatctcagggtattcctcagctgtctgtcttcacatctccaagcatttgtgttccagacaagcagaagcaaagaagagtttaccaaattggccgccagcttccagctgagatggaatcttcttctcactgctgtaagcaaagccatgaccctctgccacagagatagttttggctcctggcatctgtttcacttgttgcttttggaatatatgattcatatacttcagtcatgcctagaggaggaagaggaggaggaggacatggggactgtcaaggaaatgctaccagatgacccgactctcggccagccagaccaggcacttttccattctctgaattcctcactgtcgcaggcgtgtgccagccccagcatggagccactgggggtgatgcccacacacatgggccagggccgatatcccgtgggtgtgagcaacatggtcctcaggatcctgggcttcctggtggacactgccatgggcaataagctcatccaggtgctgttggaagatgaaaccactgaaagcgcagttaaactcagccttcctatgggacaagaagccctcataaccctaaaagatggacaacaatttgtgattcagatatcagatgtaccccaaagctctgaagatatttatttcagagaaaacaatgctaatgtgtgagattatttatttgaatagagaataagaaaactgatagacttgcattcttaaaaatattaaatactaaagtttttctattgacgaaagatgatgttatgtatataatagatgtagcattgtctattttatgtttatatgtatttc

SEQ ID NO: 58765 - DNA, 278 bp, Artificial Sequence
  derived and/or modified sequence
aactccaacgctcaagcaagtcaaggacacccacggactcaacaccgcgaccagattggaaaaggtgttggtcgacaacttctgcatttgcgaagagtgcagcgtccctcgctgtctcatgtatgagatttacgtggagacctgtgggcaaaacactgagaaccaagtcaacccggccacctttgggaagatggccttccttgctgacgaatactgcaactattgtcgagacattttacgaaatgtgaggaactgagaacttgagagggtggaggact

SEQ ID NO: 58766 - DNA, 1422 bp, Artificial Sequence
  derived and/or modified sequence
atgtacgagatctacgtggagacctgcggccagaacaccgagaaccaagtcaatcccgccaccttcggaaagtgtgaggatcattcccccatgaagacagacccggtcgggagtcctttgtccgaatttagacggtgcccatttttggagcaggagcaggcgaaaaagtatagctgcaacatgatggccttcttggccgatgagtattgcaactattgcagagatattctacgcaacgtagaggacctgttgacatccttttggaagtcacttcaacaggacacagtgatgcttatgtccctcccagacgtctgccagctgtttaagtgttacgacgtgcagctgtacaaggggatcgaggacgtgttgctgcatgatttcttggaggatgtgtctatccagtacctgaaatctgtgcagcttttttctaaaaaatttaaattgtggctgctaaatgccctcgagggcgtccctgccttgctgcaaatttccaagcttaaagaggttacgttgtttgtcaagaggctgcggagaaaaacttacctctcaaacatggccaaaacaatgcggatggtcctgaagtccaagaggcgggtgagcgtcctcaagtcagatttacaggcaatcataaaccaggggaccctggccacctccaaaaaagccctggctagcgatcgttccggggctgatgaattggagaacaaccccgaaatgaagtgtcttaggaacctgataagcctgttgggtactagtacagacttgcgggtttttctctcctgtctcagttcacacttgcaggcattcgtctttcagacatctagatcaaaagaggaattcacaaagctcgcggcttccttccagctgcgctggaacttactgctcaccgccgtttcgaaagcaatgactttatgccacagagattcattcggatcctggcatctatttcatctactcctacttgagtatatgattcacatactgcagagctgtctcgaggaggaggaagaggaggaagacatgggcacagtcaaagaaatgcttcccgacgaccctactttgggccagcctgatcaggctctctttcattccctgaatagtagcctttcccaggcttgtgcctcaccttccatggaacccctcggagtgatgccaacacacatgggccaggggcggtaccctgtaggggtgtccaacatggtcctcaggatcttggggttcctcgtagatactgccatggggaataagctaattcaggtgctcctggaagatgaaacaaccgagagcgcagtgaaattgtcgctgcctatgggtcaagaggctctgatcaccctgaaggatggccaacagtttgtgatccagatttcagacgtgccccagtcgagcgaagacatctattttcgcgagaataacgccaatgtgtag

SEQ ID NO: 58767 - DNA, 138 bp, Artificial Sequence
  derived and/or modified sequence
atgtacgagatctacgtggagacctgcggccagaacaccgagaaccaagtcaatcctgcaaccttcgggaagatggcatttctggccgatgagtattgtaattactgccgtgacatcctccgcaacgtgaggaactag

SEQ ID NO: 58768 - DNA, 1422 bp, Artificial Sequence
  derived and/or modified sequence
atgtatgagatctacgtggaaacgtgtggccaaaacactgagaaccaggtgaaccctgcaacttttggcaaatgcgaagaccattcccctatgaagaccgaccctgtgggctccccgctctctgaattcagaagatgtccatttcttgagcaggaacaggccaaaaagtattcctgtaacatgatggccttcctcgcagacgaatactgtaattattgtagggacattctgaggaacgtcgaagacctactgacgtctttctggaagtccttgcagcaggatacagtgatgctaatgagcttaccagacgtctgccagctctttaagtgttacgacgtgcagctttacaagggtattgaagacgtgttactgcacgattttcttgaagacgtatctatccagtacctcaagtcagtccagttgtttagcaagaaattcaagctctggctgctgaatgccctcgaaggtgttccagctctacttcagatatctaaactcaaagaggtcacactgtttgtcaagcggttgcgccgaaaaacatacttgagtaacatggcaaagaccatgcgcatggtgttaaagagcaagagacgcgtgagcgttctgaaatcggatttgcaggcaatcataaaccaaggcactctggccacatcgaaaaaagctttggccagtgaccgcagcggagcggatgagctcgagaacaaccctgagatgaagtgcctgagaaatctgatctcgttactgggcactagcacagatcttcgggtcttcctgagctgtttgagctcacacctgcaagccttcgttttccaaacttctcggtctaaggaagagttcacaaagctggctgcctccttccagctccggtggaacctattactcaccgccgtcagcaaggcaatgacgttgtgtcatagagacagttttgggagctggcatctttttcatttgttactgctggaatacatgattcatattttgcagtcctgcttggaggaggaggaggaagaggaggatatggggactgtaaaggaaatgcttccagacgacccaaccctgggacagcccgaccaagctctcttccactctttgaatagttctctgtctcaagcatgcgcatcccctagtatggagcctctcggcgtcatgcctacgcatatggggcagggtcgctatcccgtgggtgtcagcaacatggtgctacgcatcctgggctttctcgtcgacactgccatgggtaacaaactgatccaggtcctcctggaagatgagaccaccgagagtgccgtcaagctttctctcccgatgggccaggaagccctgattacactcaaggacggccaacaattcgtcatacagatctccgatgttccacagtccagtgaggatatctacttcagagagaacaatgcgaacgtgtag

SEQ ID NO: 58769 - DNA, 138 bp, Artificial Sequence
  derived and/or modified sequence
atgtacgagatttatgtagagacttgcggccagaatacggaaaatcaggtgaaccccgcaacctttggcaaaatggccttcctggccgacgagtattgtaattattgtagggatatactccggaatgttaggaactag

SEQ ID NO: 58770 - DNA, 1422 bp, Artificial Sequence
  derived and/or modified sequence
atgtacgagatctacgtggagacctgcggccagaacaccgagaaccaggtgaaccccgccaccttcggcaagtgcgaggaccacagccccatgaagaccgaccccgtgggcagccccctgagcgagttcagaagatgccccttcctggagcaggagcaggccaagaagtacagctgcaacatgatggccttcctggccgacgagtactgcaactactgcagagacatcctgagaaacgtggaggacctgctgaccagcttctggaagagcctgcagcaggacaccgtgatgctgatgagcctgcccgacgtgtgccagctgttcaagtgctacgacgtgcagctgtacaagggcatcgaggacgtgctgctgcacgacttcctggaggacgtgagcatccagtacctgaagagcgtgcagctgttcagcaagaagttcaagctgtggctgctgaacgccctggagggcgtgcccgccctgctgcagatcagcaagctgaaggaggtgaccctgttcgtgaagagactgagaagaaagacctacctgagcaacatggccaagaccatgagaatggtgctgaagagcaagagaagagtgagcgtgctgaagagcgacctgcaggccatcatcaaccagggcaccctggccaccagcaagaaggccctggccagcgacagaagcggcgccgacgagctggagaacaaccccgagatgaagtgcctgagaaacctgatcagcctgctgggcaccagcaccgacctgagagtgttcctgagctgcctgagcagccacctgcaggccttcgtgttccagaccagcagaagcaaggaggagttcaccaagctggccgccagcttccagctgagatggaacctgctgctgaccgccgtgagcaaggccatgaccctgtgccacagagacagcttcggcagctggcacctgttccacctgctgctgctggagtacatgatccacatcctgcagagctgcctggaggaggaggaggaggaggaggacatgggcaccgtgaaggagatgctgcccgacgaccccaccctgggccagcccgaccaggccctgttccacagcctgaacagcagcctgagccaggcctgcgccagccccagcatggagcccctgggcgtgatgcccacccacatgggccagggcagataccccgtgggcgtgagcaacatggtgctgagaatcctgggcttcctggtggacaccgccatgggcaacaagctgatccaggtgctgctggaggacgagaccaccgagagcgccgtgaagctgagcctgcccatgggccaggaggccctgatcaccctgaaggacggccagcagttcgtgatccagatcagcgacgtgccccagagcagcgaggacatctacttcagagagaacaacgccaacgtgtag

SEQ ID NO: 58771 - DNA, 138 bp, Artificial Sequence
  derived and/or modified sequence
atgtacgagatctacgtggagacctgcggccagaacaccgagaaccaggtgaaccccgccaccttcggcaagatggccttcctggccgacgagtactgcaactactgcagagacatcctgagaaacgtgagaaactag

SEQ ID NO: 58772 - protein, 1192 aa, Artificial Sequence
  derived and/or modified sequence
MAACGRVRRMFRLSAALHLLLLFAAGAEKLPGQGVHSQGQGPGANFVSFVGQAGGGGPAGQQLPQLPQSSQLQQQQQQQQQQQQPQPPQPPFPAGGPPARRGGAGAGGGWKLAEEESCREDVTRVCPKHTWSNNLAVLECLQDVRELLWNYKLNLTTDPKFESVAREVCKSTITEIKECADEPVGKGYMVSCLVDHRGNITEYQCHQYITKMTAIIFSDYRLICGFMDDCKNDINILKCGSIRLGEKDAHSQGEVVSCLEKGLVKEAEEREPKIQVSELCKKAILRVAELSSDDFHLDRHLYFACRDDRERFCENTQAGEGRVYKCLFNHKFEESMSEKCREALTTRQKLIAQDYKVSYSLAKSCKSDLKKYRCNVENLPRSREARLSYLLMCLESAVHRGRQVSSECQGEMLDYRRMLMEDFSLSPEIILSCRGEIEHHCSGLHRKGRTLHCLMKVVRGEKGNLGMNCQQALQTLIQETDPGADYRIDRALNEACESVIQTACKHIRSGDPMILSCLMEHLYTEKMVEDCEHRLLELQYFISRDWKLDPVLYRKCQGDASRLCHTHGWNETSEFMPQGAVFSCLYRHAYRTEEQGRRLSRECRAEVQRILHQRAMDVKLDPALQDKCLIDLGKWCSEKTETGQELECLQDHLDDLVVECRDIVGNLTELESEDIQIEALLMRACEPIIQNFCHDVADNQIDSGDLMECLIQNKHQKDMNEKCAIGVTHFQLVQMKDFRFSYKFKMACKEDVLKLCPNIKKKVDVVICLSTTVRNDTLQEAKEHRVSLKCRRQLRVEELEMTEDIRLEPDLYEACKSDIKNFCSAVQYGNAQIIECLKENKKQLSTRCHQKVFKLQETEMMDPELDYTLMRVCKQMIKRFCPEADSKTMLQCLKQNKNSELMDPKCKQMITKRQITQNTDYRLNPMLRKACKADIPKFCHGILTKAKDDSELEGQVISCLKLRYADQRLSSDCEDQIRIIIQESALDYRLDPQLQLHCSDEISSLCAEEAAAQEQTGQVEECLKVNLLKIKTELCKKEVLNMLKESKADIFVDPVLHTACALDIKHHCAAITPGRGRQMSCLMEALEDKRVRLQPECKKRLNDRIEMWSYAAKVAPADGFSDLAMQVMTSPSKNYILSVISGSICILFLIGLMCGRITKRVTRELKDRLQYRSETMAYKGLVWSQDVTGSPA

SEQ ID NO: 58773 - DNA, 3579 bp, Artificial Sequence
  derived and/or modified sequence
atggccgcctgtgggagagtcaggaggatgttcagactgtctgcagccctgcacttgctgcttttgtttgccgctggagcagagaaactccccggccaaggcgtccacagtcagggccagggacccggtgccaattttgttagtttcgtggggcaagcaggcggcggcgggcccgccggtcagcaacttccgcaactgcctcagtccagccagctgcagcagcagcagcagcagcagcaacagcaacagcagccacagccaccacagccaccatttcctgctggaggacccccagctcgaagagggggcgctggggcgggaggcgggtggaagctcgcagaggaagagagttgcagagaggacgttacacgcgtgtgtccaaagcacacctggagcaataacctcgcagtgctagaatgcctacaggacgtaagggaactgctgtggaactataagctcaaccttacaaccgatcctaaattcgaatccgtcgctcgcgaagtttgtaagtccacaattactgagattaaagaatgcgcggacgaacctgtgggaaagggatatatggttagctgtctcgtggatcacagagggaacattaccgagtaccaatgtcatcaatacattacaaagatgaccgccatcatcttctccgactatagactgatttgcggtttcatggatgattgcaaaaatgacataaatatattgaaatgtggaagtatacgcttgggagaaaaggatgcgcattctcagggcgaggtggtaagctgcctggaaaaggggctcgtgaaggaagccgaggagcgggagcctaagattcaggtctcggaactgtgcaaaaaggccatcttgcgcgtagccgagctgtcatctgatgatttccatctagaccggcatctttatttcgcatgcagagatgaccgggaacgtttttgcgagaatacacaagccggcgagggacgcgtttataagtgtctgtttaatcataaattcgaagaaagcatgagcgagaagtgcagagaagcactgacaaccaggcaaaagctgatcgcccaggattataaggttagctattccttggctaagtcctgcaagtcggacctcaaaaaatatagatgtaacgtggagaacctgcctcgctccagagaggctagattgagttaccttctcatgtgcctcgagtcagctgtgcatagagggcgccaggtgtcctccgaatgtcagggagagatgcttgattacagacgcatgctgatggaagatttttcactctctccagagattattttgtcctgccgaggcgaaattgaacatcattgctcaggtctacatcgaaagggcagaactctccactgtctcatgaaggtcgttagaggcgagaagggaaatctgggaatgaattgccagcaagccctgcaaacactgatccaagaaaccgatccaggcgctgattacagaatcgacagagcgctcaatgaggcatgcgaaagcgtgatacaaactgcctgtaagcatatcagaagcggggatcctatgatcctcagctgcctgatggagcacctgtatacggaaaagatggtggaagattgtgagcacaggctgctggaattgcagtatttcataagtcgagactggaagctcgaccctgtgctctatcgtaagtgccagggggatgcctctagattatgccacactcatgggtggaacgaaacatctgaattcatgccccagggtgctgttttctcatgtctttacagacacgcgtatcgcactgaggagcagggccgacgcctgtctagagagtgcagggccgaagtccagcggatcctccaccaacgtgccatggatgttaagctcgaccctgcgctgcaggacaagtgcctgatagacctcggtaaatggtgttccgaaaaaaccgagacaggtcaggaactggagtgcctgcaggaccacttggatgatttggtggtggagtgtagagacatagtcggcaacctaaccgaactcgagagtgaggacatccagatagaagcgttattgatgagagcctgtgaacctattatccagaacttctgtcatgacgtggcagacaatcagattgacagcggggacctcatggagtgtctgatccagaataaacaccagaaagatatgaacgaaaaatgtgctatcggagtaacccatttccaattagtacagatgaaggactttcggttttcttacaaattcaaaatggcttgcaaggaagacgtgctaaagctttgcccgaatattaagaagaaagtcgatgtggtgatttgcctatctacgaccgtgaggaatgatacacttcaagaagctaaggagcaccgcgtgagtttgaaatgccggaggcagctcagagtcgaagaactggagatgactgaggatatcagacttgagccagatttatacgaggcctgtaaaagtgacatcaaaaatttttgcagcgcagtccagtacggtaatgcacagattatcgaatgcttgaaggagaataagaagcagctgagcacacggtgccatcaaaaggtattcaagctccaggaaacagagatgatggaccccgaactggattatacacttatgagagtttgcaaacagatgattaaaagattctgtccagaagcagacagtaaaaccatgcttcagtgtttgaaacagaacaaaaacagtgagctcatggatcccaagtgtaaacagatgattactaaaagacagatcacccagaatacagactacaggctcaaccctatgctgagaaaagcatgcaaagccgacattcctaagttttgtcatgggattttgacgaaggccaaggacgacagcgaattagaagggcaggtcattagctgcctgaagctacgctatgccgatcagcgcctgtctagtgattgtgaagaccaaattagaataataatccaggagtccgctctcgattaccgcctggacccacagcttcagctccattgcagtgatgagatcagcagtctgtgtgctgaagaggctgccgcacaggaacaaactggccaggttgaagagtgcctgaaggtgaacctgctcaaaatcaagactgagctgtgtaagaaagaagtcctaaatatgctaaaagagagtaaagccgacatctttgtggacccagttctgcacaccgcttgcgccctagacatcaaacaccattgcgctgcgattacccctggtcgaggaaggcaaatgtcgtgtctgatggaggctctagaggataaaagggtgcgactgcagcccgagtgcaaaaagcgcttaaacgaccgcatcgagatgtggagctatgccgctaaggtggcccctgcggacggatttagcgatctggctatgcaggtcatgacgtccccttccaaaaattatattctgtcggtgatcagcgggtctatctgcattctttttctgattggcctgatgtgcggcagaattacaaagagggtgacaagggaactgaaagatcgactacagtaccgcagtgagaccatggcatacaagggtctggtgtggagccaggacgtaaccggctcacctgcatag

SEQ ID NO: 58774 - DNA, 8255 bp, Artificial Sequence
  derived and/or modified sequence
atttaaatacgcggcgccggcgagtgcgtcgagctcgccgcggactcaagatggcggcgtgtggacgtgtacggaggatgttccgcttgtcggcggcgctgcatctgctgctgctattcgcggccggggccgagaaactccccggccagggcgtccacagccagggccagggtcccggggccaactttgtgtccttcgtagggcaggccggaggcggcggcccggcgggtcagcagctgccccagctgcctcagtcatcgcagcttcagcagcaacagcagcagcagcaacagcaacagcagcctcagccgccgcagccgcctttcccggcgggtgggcctccggcccggcggggaggagcgggggctggtgggggctggaagctggcggaggaagagtcctgcagggaggacgtgacccgcgtgtgccctaagcacacctggagcaacaacctggcggtgctcgagtgcctgcaggatgtgagggagttgttgtggaattataagctgaacctaactacagatcccaaatttgaatctgtggccagagaggtttgcaaatctactataacagagattaaagaatgtgctgatgaaccggttggaaaaggttacatggtttcctgcttggtggatcaccgaggcaacatcactgagtatcagtgtcaccagtacattaccaagatgacggccatcatttttagtgattaccgtttaatctgtggcttcatggatgactgcaaaaatgacatcaacattctgaaatgtggcagtattcggcttggagaaaaggatgcacattcacaaggtgaggtggtatcatgcttggagaaaggcctggtgaaagaagcagaagaaagagaacccaagattcaagtttctgaactctgcaagaaagccattctccgggtggctgagctgtcatcggatgactttcacttagaccggcatttatattttgcttgccgagatgatcgggagcgtttttgtgaaaatacacaagctggtgagggcagagtgtataagtgcctctttaaccataaatttgaagaatccatgagtgaaaagtgtcgagaagcacttacaacccgccaaaagctgattgcccaggattataaagtcagttattcattggccaaatcctgtaaaagtgacttgaagaaataccggtgcaatgtggaaaaccttccgcgatcgcgtgaagccaggctctcctacttgttaatgtgcctggagtcagctgtacacagagggcgacaagtcagcagtgagtgccagggggagatgctggattaccgacgcatgttgatggaagacttttctctgagccctgagatcatcctaagctgtcggggggagattgaacaccattgttccggattacatcgaaaagggcggaccctacactgtctgatgaaagtagttcgaggggagaaggggaaccttggaatgaactgccagcaggcgcttcaaacactgattcaggagactgaccctggtgcagattaccgcattgatcgagctttgaatgaagcttgtgaatctgtaatccagacagcctgcaaacatataagatctggagacccaatgatcttgtcgtgcctgatggaacatttatacacagagaagatggtagaagactgtgaacaccgtctcttagagctgcagtatttcatctcccgggattggaagctggaccctgtcctgtaccgcaagtgccagggagacgcttctcgtctttgccacacccacggttggaatgagaccagtgaatttatgcctcagggagctgtgttctcttgtttatacagacacgcctaccgcactgaggaacagggaaggaggctctcacgggagtgccgagctgaagtccaaaggatcctacaccagcgtgccatggatgtcaagctggatcctgccctccaggataagtgcctgattgatctgggaaaatggtgcagtgagaaaacagagactggacaggagctggagtgccttcaggaccatctggatgacttggtggtggagtgtagagatatagttggcaacctcactgagttagaatcagaggatattcaaatagaagccttgctgatgagagcctgtgagcccataattcagaacttctgccacgatgtggcagataaccagatagactctggggacctgatggagtgtctgatacagaacaaacaccagaaggacatgaacgagaagtgtgccatcggagttacccacttccagctggtgcagatgaaggattttcggttttcttacaagtttaaaatggcctgcaaggaggacgtgttgaagctttgcccaaacataaaaaagaaggtggacgtggtgatctgcctgagcacgaccgtgcgcaatgacactctgcaggaagccaaggagcacagggtgtccctgaagtgccgcaggcagctccgtgtggaggagctggagatgacggaggacatccgcttggagccagatctatacgaagcctgcaagagtgacatcaaaaacttctgttccgctgtgcaatatggcaacgctcagattatcgaatgtctgaaagaaaacaagaagcagctaagcacccgctgccaccaaaaagtatttaagctgcaggagacagagatgatggacccagagctagactacaccctcatgagggtctgcaagcagatgataaagaggttctgtccggaagcagattctaaaaccatgttgcagtgcttgaagcaaaataaaaacagtgaattgatggatcccaaatgcaaacagatgataaccaagcgccagatcacccagaacacagattaccgcttaaaccccatgttaagaaaagcctgtaaagctgacattcctaaattctgtcacggtatcctgactaaggccaaggatgattcagaattagaaggacaagtcatctcttgcctgaagctgagatatgctgaccagcgcctgtcttcagactgtgaagaccagatccgaatcattatccaggagtccgccctggactaccgcctggatcctcagctccagctgcactgctcagacgagatctccagtctatgtgctgaagaagcagcagcccaagagcagacaggtcaggtggaggagtgcctcaaggtcaacctgctcaagatcaaaacagaattgtgtaaaaaggaagtgctaaacatgctgaaggaaagcaaagcagacatctttgttgacccggtacttcatactgcttgtgccctggacattaaacaccactgcgcagccatcacccctggccgcgggcgtcaaatgtcctgtctcatggaagcactggaggataagcgggtgaggttacagcccgagtgcaaaaagcgcctcaatgaccggattgagatgtggagttacgcagcaaaggtggccccagcagatggcttctctgatcttgccatgcaagtaatgacgtctccatctaagaactacattctctctgtgatcagtgggagcatctgtatattgttcctgattggcctgatgtgtggacggatcaccaagcgagtgacacgagagctcaaggacaggctacaatacaggtcagagacaatggcttataaaggtttagtgtggtctcaggatgtgacaggcagtccagcctgacctttctgcacactccagacaaacttcccagacaagctcctttgtgcctctacgtggagagggtgtggaaagttatcacattaaaagatggaggatttgctctgttttttttctttctgtccatttgctgcgtgtacccactctagtaggcattggctaaatgttgtattttggcgattcatcaacctttgcagaatatgggctttatagaagcaatattcttggccatcccgcctcattcctccagtgtggagatgacaagtctgggtgtgagagggaggggtccgggcatcatggttcagcgtggcactcctttggttgagtttggggcatgagatcacagtggctgcacaagagagcagtgtgtacagtaggagagacatttatgtaatatatattttattaacctgttagatgtccacaaagtattataaatcacgtgcctaaaactgtccatgtagaccaaggcctgccctcggcgccccccactcttgcctctgctctgcacagtccacgtgcactgcaggaccggagcgacacatgtcttccctgaagggtgttcagtacaaggcgtgtcagtttgtggatcagttgatccaagttactccttgtctaacctgactgacatatatttgaatactgtggttttctttcttttttttctatttgctgcccttcctggaggcagtgggttccagaagccaactgattgtccccctgccaagtcaccaagggaagctgctaagctgcttagtcccctcggtcctgcttgtagggtcttcctgattgtcaacagctgtctgggatgcttcagtctcctaaaactggaaacgcagggtgcgagcagcacacactgcctcccgccactgccagccggagtgagcggcccgagagtctctgcaggttcccctgggggctgggggccgctgaggcctaatatcaagagccaggaatgtcatgtacatggaggtgcctacggacgtgcctggtgtggtttgcaggtaggatggatgttcactgtttgaccgggtggggtatccttcctctctgcagtctccttcccagtatgcgtaaacacccttatagttctaattgtgttgatatttctgttctttctgaattgagagaaaatcccattcgttgtctgcagatttggaagtttgatgaggaatttggttcttgaaacatctgtctttttttttttttttgagacagagtatctctctgttgcccaggctgcagtgcagtggcgcgatctcagctccctgcaacctccacctcctgggttcaagcaattctctgcctcagcctcctgagtagctgggattccaggcacccgccaccacgcctggcttatttttgtatttttagtagagatggggtttcaccatcttggccaggctggtcttgaactcctgatctcatgatccacccgcctcagcttcccaaagtgctgggattacaggtgtgagccaccctgcctggccaaaacatttgtcatctttataaatggtcagaatagaaaagttagctctgccagtatcttcaattacttattacaagaatgtctttcatcatcttacttggagcattttccaatgactggctcttgagagccccaggcagggccccgagcaagtttttctaagtgccaaggccagcaaagtctgaactggccgcactcattaagtccctcatttggcaaaacaaaacagggcctggggcacccctggttcctggccttataggtcagtcaactggctgagaaatggtcaagaaaagaaacaatgacccttctgtggatgtgagtggatgatggactctggcctgtgtctactctcctgatgtgtagcccaccaacagtaatagaagtagagggtagggggttttgccaaggctaaggcttcaggtacttgctaacagttatagcagctgggtcactgtcatctggacttaccagttcatgccagtgtccctgtgacttatgcatagtgtgcgccacagccctctagaggtacctggagcccggactgccaggctggaggctctggggtactgaaggtgagctgtctgggcaaactattaagaacaagacgaactgttcacaatggagcttctcccacagatggggagctctgtgaggccttcacctgggtgcatgttggacttccattgctgttgctgttgtccctagacaagcccgttagcaagaagcaccggcaggggagccatgcactccataggcttgggatcacccccgggaaagcgatcttccccgggctaccacccccagctgcagttctgtgttagtgcatccttcaaagctaggagaattctagggtgaccagtgagctaatgttgagtgagcaggtattgacttgaacacactgcaggcctttggctgtctcatgctgtccttactcttcttgggaacagtgagtcactcagctggccagggtggggatgcatcctggtgaagagacagctttccctgaagatgctacagaaagttactgtcagatttcatttgtttctgtttcctgagatcaactaacagaagaatctaatggtgagagtgtcttcattcatgttttacgttttatcaaggcacactggaaagggaattatgtggctgacttcccttggccttcccaagagaagattctgttcttatgtcagtgtggcttctggaagtgtctcctatcctcccatcctccaggcctgtggtgtgacttctgccccgaagttcctactatagtgagtcatctggggagaggccactgaaaagaggccttcccttcccatttcctcccctgcctccttagaacacactctaagtcagaacttaatctaagaagaaggaagctggaccaggaaccttggaagtcagccagccctagaacagtcagcctaaattttggccgtaatggcttttttggttttttgttttgtttctgagatggagtctcactccgttgccaggctggagtgctgtggcgctatctcagcttaccgaatcctccgactccctggttcaagcgattgtcctgcctcagcctccggagtagctgggattacaggcatgcaccaccacacccagctaatttttgtatttttagtagagacggggtttcaccgtgttgtccaggatggtctccatctcctgacctcatgatgtgcccacttcggccttccaaagtggccgcaaagtggcccacttcggccaaagtgcacttcggccttccaaagtgcattacaggcgtgagccaccacgcccggcctggccttttttttttttttcttttgagacacagtttcactcgttgcccaggctggagtgcagtggcgcaatctcggctcactgcaacttctgcctcctaggttcaagcagttctcctgcctcagcctcccaagtagttgggattacgggcatgcaccaccatgcctggataattttttcttatttttagtagagacaggatttcatcatgttggccacgctggtttcgaactcctgaccacatgtggtccacccaccttggcctcaattatgtgcattttggtatatttacttgtatttcaacatcttgtgagtttgaaaaacctgaaaggccagaatgcttccttttatttctcaccatttgggcagcacctaagtggttttgtaaaatgcagcatctggtgctgtgggtctctctcaggccttgagggacacttccttcctccccactcgcctcctctccactagactttggttcctagagggcgtggggccgggtctgaggttcttgcctgccttccctcccattggtctttggttgctcatccctctaactgcaccccttcttggtccttcctccacagacttcagataatagataagtcattagcaaaccagaccgaatctttagggtgaagagctccccaaagccatctggtgaggtcattgtggggaccagggactgattatttgtcacctggatcacaaagatgggactgtctgctcaggctggtggtgacaggatcctgacccgtggtcctctcccgctccctctgctccaccaggacacatgtataggacactgtgctgtgtgcagtggagaaatctccctgggccaggggaaagttcagacagtgcctctagattgtgttttgcctcctccaatgtagagttgacatctggaccccagagcccagcagggctttctgtcagacatgctagggtggtagaaatgggccctccaggtccccctgcagtgcactgggcagagacctccggaaagccggcagcgggagcgcttcctgggcagcttcccccagcacagtgttcccaaaccagtccatccggaaaacagtctgtacagcaaatgctgtgtgagatcttaggcttttcactttttttgttttgttttgtttttgaaagaaagaaaaaaatacaattaacaagcctcttttgtaaatgggtttcctttctatgtataaaatcgtggtggtcccttgtttttacatgttcatgctgtgtaattttgagatgttactgagatatgttctgaacataatgtgcatttttttctgtacagatgaaatgggagaatttaataaagagtttgcaggtttttacttgtt

SEQ ID NO: 58775 - DNA, 3579 bp, Artificial Sequence
  derived and/or modified sequence
atggccgcctgtggccgggtgcggaggatgttccggctgtctgctgccctgcacctgctgctgctgtttgctgctggagctgagaagctgcccggccagggcgtgcacagccagggccagggccctggggccaactttgtgtcctttgtgggccaggccggcggcggcggccctgctggccagcagctgccccagctgccccagagcagccagctgcagcagcagcagcagcagcagcagcagcagcagcagccccagcccccccagccccccttccctgctgggggccccccagcccggcggggcggggccggggccggcggcggctggaagctggccgaggaggagagctgccgggaggatgtgaccagggtgtgccccaagcacacctggagcaacaacctggccgtgctggagtgcctgcaggatgtgcgggagctgctgtggaactacaagctgaacctgaccacagaccccaagtttgaatctgtggcccgggaggtgtgcaagagcaccatcacagagatcaaggaatgtgctgatgagcctgtgggcaagggctacatggtgtcctgcctggtggaccaccggggcaacatcacagagtaccagtgccaccagtacatcaccaagatgacagccatcatcttcagtgactaccgcctcatctgtggcttcatggatgactgcaagaatgacatcaacatcctgaagtgtggcagcatccggctgggggagaaggatgcccacagccagggcgaggtggtgtcctgcctggagaagggcctggtgaaggaggccgaggagcgggagcccaagatccaggtgtctgagctgtgcaagaaggccatcctgcgggtggccgagctgagcagtgatgacttccacctggacagacacctgtactttgcctgcagagatgaccgggagcgcttctgtgagaacacccaggccggggagggccgggtgtacaagtgcctcttcaaccacaagtttgaggagagcatgtctgagaagtgccgggaggccctgaccacccggcagaagctgattgcccaggactacaaggtgtcctacagcctggccaagagctgcaagagtgacctgaagaagtaccgctgcaatgtggagaacctgcccaggagccgggaggcccggctgagctacctgctgatgtgcctggagagcgctgtgcaccggggccggcaggtgtcctctgagtgccagggcgagatgctggactacagaaggatgctgatggaggacttcagcctgagccctgagatcatcctgagctgccgcggggagattgagcaccactgcagcggcctgcacaggaaaggaagaaccctgcactgcctgatgaaggtggtgcggggggagaagggcaacctgggcatgaactgccagcaggccctgcagaccctcatccaggagacagaccccggggctgactacagaattgaccgggccctgaatgaggcctgtgagagcgtcatccagacagcctgcaagcacatccgcagcggggaccccatgatcctgagctgcctgatggagcacctgtacacagagaagatggtggaggactgtgagcaccggctgctggagctgcagtacttcatcagccgggactggaagctggaccctgtgctgtacaggaagtgccagggagatgccagccggctgtgccacacccacggctggaatgagaccagcgagttcatgccccagggcgctgtgttcagctgcctgtacagacatgcctacagaacagaggagcagggccgccgcctgagccgggagtgcagagctgaggtgcagaggatcctgcaccagagggccatggatgtgaagctggaccctgccctgcaggacaagtgcctgattgacctgggcaagtggtgcagcgagaagacagagaccggccaggagctggagtgcctgcaggaccacctggatgacctggtggtggagtgccgggacatcgtgggcaacctgacagagctggagagcgaggacatccagatcgaggccctgctgatgagggcctgtgagcccatcatccagaacttctgccatgatgtggccgacaaccagattgattctggggacctgatggagtgcctgatccagaacaagcaccagaaggacatgaatgagaagtgtgccatcggcgtgacccacttccagctggtgcagatgaaggacttccgcttctcctacaagttcaagatggcctgcaaggaggatgtgctgaagctgtgccccaacatcaagaagaaggtggatgtggtgatctgcctgagcaccaccgtgagaaatgacaccctgcaggaggccaaggagcaccgggtgtccctgaagtgccggcggcagctgcgggtggaggagctggagatgacagaggacatccggctggagccagacctgtatgaggcctgcaagagtgacatcaagaacttctgcagcgctgtgcagtatggaaatgcccagatcattgaatgtctgaaggagaacaagaagcagctgagcacccgctgccaccagaaggtgttcaagctgcaggagacagagatgatggaccctgagctggactacaccctgatgagggtgtgcaagcagatgatcaagcgcttctgcccagaggccgacagcaagaccatgctgcagtgcctgaagcagaacaagaacagcgagctgatggaccccaagtgcaagcagatgatcaccaagaggcagatcacccagaacacagactaccgcctgaaccccatgctgaggaaggcctgcaaggctgacatccccaagttctgccacggcatcctgaccaaggccaaggatgacagcgagctggagggccaggtgatcagctgcctgaagctgcgctatgctgaccagaggctgagcagtgactgtgaggaccagatccgcatcatcatccaggagagcgccctggactaccgcctggacccccagctgcagctgcactgcagtgatgagatcagcagcctgtgtgccgaggaggccgccgcccaggagcagacaggccaggtggaggagtgcctgaaggtgaacctgctgaagatcaagacagagctgtgcaagaaggaggtgctgaacatgctgaaggagagcaaggctgacatctttgtggaccctgtgctgcacacagcctgtgccctggacatcaagcaccactgtgccgccatcaccccaggccggggccggcagatgagctgcctgatggaggccctggaggacaagagggtgcggctgcagcctgagtgcaagaagaggctgaatgacagaattgagatgtggagctatgctgccaaggtggccccagcagatggcttcagtgacctggccatgcaggtgatgaccagccccagcaagaactacatcctgagcgtcatcagcggcagcatctgcatcctcttcctgattggcctgatgtgtggccgcatcaccaagagggtgacccgggagctgaaggaccggctgcagtacagaagtgagaccatggcctacaagggcctggtgtggagccaggatgtgacaggcagccctgcctag

SEQ ID NO: 58776 - DNA, 3579 bp, Artificial Sequence
  derived and/or modified sequence
atggccgcctgcggccgggtgcggcggatgttccggctgagcgccgcacttcacctgctgttacttttcgcggccggtgcggaaaaacttcctggccagggtgtgcactcacagggccaaggacccggcgccaatttcgtgtcctttgtgggccaagccggaggggggggcccagctggccagcaactgccccagctgccgcagtcaagccagctccagcagcagcagcagcagcagcagcagcagcagcagcctcaacctccacagcctcctttccccgcgggaggacctccagcccggaggggcggcgccggcgctggcgggggctggaagttagccgaagaggagtcttgccgcgaggacgtcacccgagtctgccctaagcatacatggtctaacaatttggctgtactcgagtgtcttcaggatgttcgggagctcctgtggaattacaagctgaatctcaccacagatcctaagtttgaatctgtcgctcgggaggtctgcaaaagcaccatcactgagatcaaggaatgtgccgacgagccagtgggcaaagggtatatggtctcctgtctggtcgaccacagggggaacatcaccgaataccagtgtcaccaatatatcaccaagatgaccgccattatcttctctgactacagattgatctgcgggttcatggacgattgtaagaacgacattaacatcctgaagtgtggctccatccgcctcggggaaaaggacgcacacagtcagggagaggtagttagttgtctggagaaggggcttgtgaaggaggcagaagagagggaaccaaaaatacaggtctcagaactctgcaaaaaagctattctgagggtggcggagctgtcatccgatgactttcatcttgatcggcatctttactttgcttgtagagacgaccgggaacgtttctgtgagaatacccaggccggcgaaggcagagtgtacaaatgcctgttcaaccacaaatttgaggagtcgatgagcgaaaagtgtagggaagcgctaaccacaaggcagaaactcatagctcaagactataaagtgagctatagtctcgcgaaatcttgtaaaagcgatttgaagaagtatcgatgcaacgttgagaatttgcccagaagcagggaagccagactgagctatttgctcatgtgcctggagtctgccgtgcaccgaggaagacaggtgtcctcagagtgccagggcgaaatgctcgactacaggcgaatgcttatggaggatttttccctgtcgcccgagattatcctcagttgccggggggagatcgaacatcactgctccggtctgcatagaaaaggcaggacattgcactgcctaatgaaggtagttcgaggggaaaagggaaatctaggaatgaactgccagcaagcccttcagaccttaatccaagagacagaccccggggcagattaccgtatcgatagagcgcttaatgaggcctgtgagtccgttattcagactgcctgcaagcacatccgctcaggcgatccgatgatcctttcatgtctgatggaacatctgtacacggagaaaatggtcgaggactgcgagcatcggttgctggagctccagtactttattagtcgggactggaagctggaccctgtgctgtaccgaaagtgtcagggtgacgccagccgactttgtcacactcatggatggaacgagacgtctgagttcatgccacaaggagccgttttcagttgtctataccgccatgcttataggaccgaggaacaggggagacggttgtcccgcgagtgccgagctgaggtccaaagaatcctgcaccaaagagctatggacgtgaaactcgatcccgccttgcaggataaatgtctgatcgaccttggcaaatggtgttcagaaaagactgagacaggacaagagctagaatgtctgcaagaccatcttgatgacctcgtggtggagtgtcgcgatattgtgggtaatttaactgagctggaaagcgaggacatccagatcgaggctttgctcatgcgtgcctgtgagccgatcattcagaacttctgccatgatgttgccgacaatcagattgactcaggggacctgatggaatgcctgatccagaacaaacaccaaaaggacatgaacgaaaagtgtgccataggggtgactcattttcagttagtgcaaatgaaagacttccgttttagctacaaattcaagatggcttgtaaagaggatgtgttaaaactgtgtcctaacatcaaaaagaaggtggacgtcgttatctgcctgtccactaccgttaggaatgatacgcttcaggaggctaaggagcatcgtgtctctcttaagtgccgcaggcagttgcgcgtagaagaacttgaaatgacagaagatataaggctagaaccagacctatatgaggcttgtaaaagtgacatcaaaaatttttgcagcgctgtgcaatatggaaacgcccagataatcgaatgtttgaaagaaaacaaaaaacagctgtctactcgatgccaccagaaggtgttcaagctgcaggaaactgaaatgatggaccctgaactagattatacactcatgcgtgtgtgtaagcagatgatcaaaaggttctgcccagaagccgactcaaagactatgctgcagtgtttaaagcagaataaaaacagcgaactgatggacccaaagtgtaagcagatgatcactaagcgacaaattacacagaacaccgattaccggcttaatcccatgcttaggaaggcttgtaaggcggatattcccaaattttgccacggcatcctgacgaaagcaaaggatgatagtgaactggagggacaggtgatcagctgtctcaagttgcgatatgccgaccagaggttgagctccgattgcgaagatcagatacggattatcatccaggagtctgcactggactaccgactcgatccccaactgcagctgcactgtagcgatgagatcagttccctctgcgctgaagaggcggccgcccaggagcaaacaggacaagttgaagagtgtttaaaggttaacctgctcaagataaaaaccgagctttgcaaaaaggaggtcttaaatatgcttaaggagtccaaggcggacatctttgtcgatcccgtgttacacacagcttgcgctctggacattaagcaccattgtgccgctattacaccaggtaggggcagacagatgtcctgcctgatggaggccctggaggataaacgggtccgcctccagcctgagtgtaagaaaaggttgaatgatagaatcgaaatgtggtcctatgctgctaaggtggcgccagcagatggatttagtgacctggccatgcaggtgatgaccagccccagcaagaattacatactgtccgtgatatctggaagtatctgtatcctgtttttgatcggccttatgtgcgggagaatcacaaagagagtgacccgggagctgaaggatagactgcagtaccgtagcgagaccatggcatacaaaggtttggtgtggagtcaggatgtgaccggatcccccgcctag

SEQ ID NO: 58777 - DNA, 3579 bp, Artificial Sequence
  derived and/or modified sequence
atggccgcatgcggcagggtgcggcgtatgttccgcctgtccgctgccctacatttgcttctgttgttcgccgctggagccgagaagctccctggtcagggggtacatagtcaggggcagggccctggcgcaaactttgtgagctttgtgggtcaagccggtggtggaggaccggcaggacagcaattaccacaactcccacagagctcccaactgcaacagcagcaacagcagcaacagcaacagcagcagccgcaaccaccacagcctcctttccctgccggaggacctccagctaggcgaggcggagctggcgcaggcggagggtggaagctggcggaggaagagtcttgccgtgaggacgtgactcgagtgtgtcccaaacacacatggtctaataacttggcagtgctagagtgccttcaagacgttcgcgagttactatggaattacaaactgaatttaaccactgacccaaaattcgaatcagtcgctcgcgaggtctgcaagagcactataaccgagatcaaggagtgcgcagatgaaccagttgggaagggttacatggtatcctgcctcgttgatcaccgcggaaatataacagagtatcagtgccatcagtatatcactaaaatgacagcgatcatcttctcagattacagactgatctgcgggtttatggacgattgcaagaacgatatcaacatcctcaaatgtggcagcatccgcttaggggagaaggacgcccattctcaaggtgaagttgtgagttgtctagagaagggccttgtaaaggaagctgaggaacgcgagcctaagatccaggtttctgagctgtgtaagaaagcgatcctcagagtggccgagctgtcttccgacgactttcatctggaccgacacttatacttcgcttgcagagatgatcgggagcgtttttgtgagaatacacaggcgggagaagggcgtgtatacaagtgtctctttaaccacaagtttgaggagtccatgtcggaaaaatgtcgcgaagctttaacaactagacaaaagctcattgcccaggactataaagtctcatactccctggccaagagttgtaaatccgacctcaagaaatatcgttgtaatgtcgagaatcttcctagatcacgggaagcgaggctcagctaccttctgatgtgccttgaatccgccgtccacagaggcaggcaggtgtcatccgaatgtcagggggaaatgcttgattacagacgcatgctgatggaagattttagccttagtccagagattatacttagctgccggggagaaatcgagcatcattgttccggtctgcacaggaaagggcgaaccctccactgtctcatgaaagtcgtgcgcggagagaagggcaatctgggaatgaactgccagcaagctctgcagaccctcatccaggagaccgaccctggggcagattaccgcatcgacagggccctcaatgaggcatgcgaatccgtgattcagacagcctgtaagcatatacgtagcggggaccctatgatcttgtcttgtctgatggagcacctgtataccgaaaaaatggtggaagattgcgaacatcgacttctggaactgcaatatttcattagtcgtgattggaagcttgaccccgtgctgtatagaaagtgtcagggcgacgcatcgaggttatgccacactcacggttggaacgagacatcagagttcatgccgcagggagctgttttctcgtgtttgtatcgccacgcttacaggaccgaagagcagggccgtagactgtcaagagaatgccgggcagaggtccaaaggatcttgcatcaacgcgctatggacgtgaaattagatccagctctccaggataagtgcctgatcgatctcgggaaatggtgcagtgagaagacagaaacaggtcaagagctcgagtgtctccaagatcatctggacgatctggtggtggaatgtagggacatcgttgggaacctgacagaactcgaaagcgaggatatacaaatcgaggcgctgttgatgcgcgcttgtgagcctataatccagaatttttgccatgacgttgccgataatcaaattgattcaggagatcttatggaatgccttatacagaacaagcaccagaaggatatgaatgaaaaatgcgccatcggggtcacacactttcagctcgtgcagatgaaggattttcggtttagttacaagtttaagatggcatgtaaagaggacgtgctgaaactatgtccaaacattaagaagaaggtggacgtggtcatttgtctttcaacaacagttaggaatgacacactgcaagaggccaaggagcaccgcgtcagtttgaaatgtcgaagacagctgcgggtggaggagctggagatgaccgaggatattaggctcgaacctgatctctatgaggcctgcaaatccgatatcaaaaatttctgtagtgccgtccagtacggaaacgcgcagatcattgagtgtctaaaagagaacaaaaaacagctttcaactcgctgccaccaaaaagtcttcaagctgcaggagacagagatgatggatcctgagctcgactatacgctcatgcgggtctgtaaacagatgatcaaacgtttctgccccgaggccgacagcaagaccatgctacagtgtttgaaacagaacaaaaatagtgagctcatggacccaaagtgcaagcagatgattactaagaggcaaatcacacagaacactgactatcgactaaaccctatgctgagaaaagcatgcaaggctgacatccctaagttttgccacggaattcttaccaaagccaaggacgattctgagctggaggggcaggtcatctcctgcttgaaacttagatatgcagaccaaaggctcagctctgactgtgaagatcagatacggatcattatccaggagagtgctctggattacagactcgacccccagctacaactgcactgcagtgacgaaatcagttccctttgtgcagaggaagccgctgcccaagagcaaacaggacaagtcgaggagtgcctcaaggtcaatttgctgaagattaagacggagctttgtaagaaggaggttctgaatatgctgaaggaaagcaaggcagatatctttgtggacccggtgctgcacactgcatgcgccttggatattaaacaccactgtgctgccattacacctggcagaggcaggcagatgtcctgtctgatggaggccctagaggacaagagggttcgcctgcaaccagagtgcaagaagagactgaatgacaggatagagatgtggagctatgcagccaaagtggcaccggcagatgggttcagcgacttggccatgcaagtaatgacaagcccctcaaagaattacatactttcagtaataagcggatccatttgcatcctgtttttgatcggactcatgtgcgggagaattacgaagcgcgtaaccagggaactcaaggatcgactgcaatacagatccgagactatggcatataagggcctggtgtggagccaggacgtaacaggaagtcccgcatag

SEQ ID NO: 58778 - DNA, 3579 bp, Artificial Sequence
  derived and/or modified sequence
atggccgcctgcggcagagtgagaagaatgttcagactgagcgccgccctgcacctgctgctgctgttcgccgccggcgccgagaagctgcccggccagggcgtgcacagccagggccagggccccggcgccaacttcgtgagcttcgtgggccaggccggcggcggcggccccgccggccagcagctgccccagctgccccagagcagccagctgcagcagcagcagcagcagcagcagcagcagcagcagccccagcccccccagccccccttccccgccggcggcccccccgccagaagaggcggcgccggcgccggcggcggctggaagctggccgaggaggagagctgcagagaggacgtgaccagagtgtgccccaagcacacctggagcaacaacctggccgtgctggagtgcctgcaggacgtgagagagctgctgtggaactacaagctgaacctgaccaccgaccccaagttcgagagcgtggccagagaggtgtgcaagagcaccatcaccgagatcaaggagtgcgccgacgagcccgtgggcaagggctacatggtgagctgcctggtggaccacagaggcaacatcaccgagtaccagtgccaccagtacatcaccaagatgaccgccatcatcttcagcgactacagactgatctgcggcttcatggacgactgcaagaacgacatcaacatcctgaagtgcggcagcatcagactgggcgagaaggacgcccacagccagggcgaggtggtgagctgcctggagaagggcctggtgaaggaggccgaggagagagagcccaagatccaggtgagcgagctgtgcaagaaggccatcctgagagtggccgagctgagcagcgacgacttccacctggacagacacctgtacttcgcctgcagagacgacagagagagattctgcgagaacacccaggccggcgagggcagagtgtacaagtgcctgttcaaccacaagttcgaggagagcatgagcgagaagtgcagagaggccctgaccaccagacagaagctgatcgcccaggactacaaggtgagctacagcctggccaagagctgcaagagcgacctgaagaagtacagatgcaacgtggagaacctgcccagaagcagagaggccagactgagctacctgctgatgtgcctggagagcgccgtgcacagaggcagacaggtgagcagcgagtgccagggcgagatgctggactacagaagaatgctgatggaggacttcagcctgagccccgagatcatcctgagctgcagaggcgagatcgagcaccactgcagcggcctgcacagaaagggcagaaccctgcactgcctgatgaaggtggtgagaggcgagaagggcaacctgggcatgaactgccagcaggccctgcagaccctgatccaggagaccgaccccggcgccgactacagaatcgacagagccctgaacgaggcctgcgagagcgtgatccagaccgcctgcaagcacatcagaagcggcgaccccatgatcctgagctgcctgatggagcacctgtacaccgagaagatggtggaggactgcgagcacagactgctggagctgcagtacttcatcagcagagactggaagctggaccccgtgctgtacagaaagtgccagggcgacgccagcagactgtgccacacccacggctggaacgagaccagcgagttcatgccccagggcgccgtgttcagctgcctgtacagacacgcctacagaaccgaggagcagggcagaagactgagcagagagtgcagagccgaggtgcagagaatcctgcaccagagagccatggacgtgaagctggaccccgccctgcaggacaagtgcctgatcgacctgggcaagtggtgcagcgagaagaccgagaccggccaggagctggagtgcctgcaggaccacctggacgacctggtggtggagtgcagagacatcgtgggcaacctgaccgagctggagagcgaggacatccagatcgaggccctgctgatgagagcctgcgagcccatcatccagaacttctgccacgacgtggccgacaaccagatcgacagcggcgacctgatggagtgcctgatccagaacaagcaccagaaggacatgaacgagaagtgcgccatcggcgtgacccacttccagctggtgcagatgaaggacttcagattcagctacaagttcaagatggcctgcaaggaggacgtgctgaagctgtgccccaacatcaagaagaaggtggacgtggtgatctgcctgagcaccaccgtgagaaacgacaccctgcaggaggccaaggagcacagagtgagcctgaagtgcagaagacagctgagagtggaggagctggagatgaccgaggacatcagactggagcccgacctgtacgaggcctgcaagagcgacatcaagaacttctgcagcgccgtgcagtacggcaacgcccagatcatcgagtgcctgaaggagaacaagaagcagctgagcaccagatgccaccagaaggtgttcaagctgcaggagaccgagatgatggaccccgagctggactacaccctgatgagagtgtgcaagcagatgatcaagagattctgccccgaggccgacagcaagaccatgctgcagtgcctgaagcagaacaagaacagcgagctgatggaccccaagtgcaagcagatgatcaccaagagacagatcacccagaacaccgactacagactgaaccccatgctgagaaaggcctgcaaggccgacatccccaagttctgccacggcatcctgaccaaggccaaggacgacagcgagctggagggccaggtgatcagctgcctgaagctgagatacgccgaccagagactgagcagcgactgcgaggaccagatcagaatcatcatccaggagagcgccctggactacagactggacccccagctgcagctgcactgcagcgacgagatcagcagcctgtgcgccgaggaggccgccgcccaggagcagaccggccaggtggaggagtgcctgaaggtgaacctgctgaagatcaagaccgagctgtgcaagaaggaggtgctgaacatgctgaaggagagcaaggccgacatcttcgtggaccccgtgctgcacaccgcctgcgccctggacatcaagcaccactgcgccgccatcacccccggcagaggcagacagatgagctgcctgatggaggccctggaggacaagagagtgagactgcagcccgagtgcaagaagagactgaacgacagaatcgagatgtggagctacgccgccaaggtggcccccgccgacggcttcagcgacctggccatgcaggtgatgaccagccccagcaagaactacatcctgagcgtgatcagcggcagcatctgcatcctgttcctgatcggcctgatgtgcggcagaatcaccaagagagtgaccagagagctgaaggacagactgcagtacagaagcgagaccatggcctacaagggcctggtgtggagccaggacgtgaccggcagccccgcctag

SEQ ID NO: 58779 - DNA, 3540 bp, Artificial Sequence
  derived and/or modified sequence
atggccgcatgtgggcgcgtgcgaagaatgttccgcctgtcagcggcgctgcatttgctgctgttatttgccgccggtgccgagaaacttcccggacagggtgtccactcgcaggggcaaggcccgggcgccaattttgtgtcctttgttgggcaagctggtggaggcgggccagcagggcagcagctgccgcagcttccacaatcctctcagttgcagcagcaacagcagcagcaacagcagcagcagcagcctcagcctcctcagccacctttcccagccggcggtccaccagctaggagaggaggggcaggcgcaggcggtggttggaaattagcagaagaggagtcatgtagagaagacgtcacacgcgtatgtccaaaacacacctggtctaataatcttgccgttctcgagtgtctacaggatgtgcgcgagcccgagaatgaaatctcctctgattgtaatcatctgctgtggaattataagcttaacctgacaaccgatcccaaatttgagtccgtggcaagagaagtgtgcaagtccacgataactgagataaaggaatgcgcggatgaacccgtcggaaagggctacatggtgtcctgcctggtggaccatcgcggaaatatcaccgaataccaatgtcatcagtatatcaccaaaatgacagctataatattctcggactatcgccttatttgtggcttcatggatgattgtaaaaatgatatcaatattctgaaatgcggttcaatacggctgggcgagaaggatgcacacagccagggagaagtggtgagctgcttagagaaggggctggtgaaggaggcggaagaaagagagcctaaaatccaagtctcagagctgtgcaaaaaggccattctcagggtcgcagagttgtcatccgatgatttccacttggatcgccatctgtacttcgcatgccgagacgacagggagaggttttgtgaaaacacacaagctggggagggccgtgtctacaagtgcttgtttaatcataagttcgaagaatcaatgagcgagaaatgcagagaagctctgaccacaagacaaaaactgatcgctcaagactacaaggtgagttatagtctagcgaagtcgtgtaagagcgacctcaaaaagtatcgctgtaatgtggagaatctgcctcggtccagggaggcccggttgtcttacttgctgatgtgccttgagtcagctgttcaccggggcagacaggtcagcagtgagtgccagggcgaaatgctggactacagacgaatgctgatggaggatttcagcctgtcaccagaaatcattctctcctgcaggggggagatcgaacatcattgtagcggactccaccgcaagggacggacgttgcattgcctcatgaaggtggtaagaggcgaaaagggaaacttaggtatgaactgccagcaagcgttacagaccctgatccaagagactgaccctggggcggactacagaattgaccgagcactgaatgaggcatgtgagtcagtcatccagactgcctgcaagcatatacgttccggcgacccaatgattctgtcctgccttatggaacatttatacacagagaagatggttgaggattgcgagcacagactgctagagcttcaatattttattagccgtgactggaagcttgaccccgtcctataccgaaagtgtcagggagatgcatcacggctttgccacactcacgggtggaatgaaacctccgagtttatgccccagggcgccgtgttcagctgcttgtatagacacgcctatcgtaccgaggaacaaggaaggcggttgagcagagagtgtcgcgctgaagtgcagcggattctgcatcaaagagctatggacgtaaagctggatccagctctacaggacaaatgtctcattgatctcgggaagtggtgcagcgaaaagacggaaactgggcaggaactggagtgcctccaagatcacttggacgatctggtggttgagtgcagggacattgtcggtaacttgacggaactggaatcggaggacattcaaatcgaagcgttactgatgcgggcctgcgaaccaattatccagaacttttgtcacgatgtagccgataatcaaatagattccggggatctcatggagtgcctgattcaaaacaagcaccaaaaggacatgaacgagaagtgcgccatcggagtgactcactttcaactggtgcagatgaaagactttcgtttctcttataagtttaagatggcgtgcaaagaagacgtgctgaagctgtgtcccaatatcaagaagaaagtggatgtggtcatttgtctgtcaacgacagttaggaacgacacacttcaagaggctaaagaacaccgggtttctctgaaatgcagacggcagctaagagttgaagagcttgaaatgacggaggatatcaggcttgagcccgatctgtatgaggcgtgcaaatctgacatcaagaatttctgttctgcagttcaatatggaaatgcacaaatcatcgaatgcctgaaggagaataagaagcagttgtcaacacgctgtcaccagaaggtgttcaagttgcaagagacagagatgatggaccccgaactcgactatacccttatgagagtttgtaagcagatgattaaaaggttctgccctgaggcggactccaagaccatgcttcagtgcctgaagcagaacaagaactctgaactaatggatcccaaatgtaaacaaatgattaccaagagacagatcactcaaaatactgattatcgcctgaatcctatgctgcggaaggcatgcaaagccgacatacccaagttttgtcacggtatactgaccaaggccaaagatgattctgagctggaagggcaggtgatctcctgtctgaagctgcggtacgcggaccagaggcttagcagtgattgcgaagaccagatccgtatcatcatacaagaatctgccctcgattaccgactcgaccctcagctccagctccattgctcagatgagatcagttcattatgtgccgaagaagcggcggctcaggaacagacaggccaagtagaagaatgccttaaggtgaacctgttaaaaataaaaaccgagctgtgcaaaaaggaggttttgaacatgctgaaggagtcgaaggcggatatatttgtcgaccctgtcctgcacacggcctgcgctttggacattaagcatcattgtgccgctattactcccggtcggggtaggcagatgagttgcttgatggaggcactcgaggataagagagtgaggctacagcccgaatgtaagaagagactcaacgacagaattgagatgtggtcctacgccgccaaggtggccccagctgacggcttttctgatctggccatgcaggttatgacatccccaagcaaaaactatattctgtccgtgatctccggatctatttgcatactgttcctgattggtctaatgtgtggtaggatcacaaaaagagtcaccagagaattgaaggacagatag

SEQ ID NO: 58780 - DNA, 9327 bp, Artificial Sequence
  derived and/or modified sequence
atttaaatacgcggcgccggcgagtgcgtcgagctcgccgcggactcaagatggcggcgtgtggacgtgtacggaggatgttccgcttgtcggcggcgctgcatctgctgctgctattcgcggccggggccgagaaactccccggccagggcgtccacagccagggccagggtcccggggccaactttgtgtccttcgtagggcaggccggaggcggcggcccggcgggtcagcagctgccccagctgcctcagtcatcgcagcttcagcagcaacagcagcagcagcaacagcaacagcagcctcagccgccgcagccgcctttcccggcgggtgggcctccggcccggcggggaggagcgggggctggtgggggctggaagctggcggaggaagagtcctgcagggaggacgtgacccgcgtgtgccctaagcacacctggagcaacaacctggcggtgctcgagtgcctgcaggatgtgagggagcctgaaaatgaaatttcttcagactgcaatcatttgttgtggaattataagctgaacctaactacagatcccaaatttgaatctgtggccagagaggtttgcaaatctactataacagagattaaagaatgtgctgatgaaccggttggaaaaggttacatggtttcctgcttggtggatcaccgaggcaacatcactgagtatcagtgtcaccagtacattaccaagatgacggccatcatttttagtgattaccgtttaatctgtggcttcatggatgactgcaaaaatgacatcaacattctgaaatgtggcagtattcggcttggagaaaaggatgcacattcacaaggtgaggtggtatcatgcttggagaaaggcctggtgaaagaagcagaagaaagagaacccaagattcaagtttctgaactctgcaagaaagccattctccgggtggctgagctgtcatcggatgactttcacttagaccggcatttatattttgcttgccgagatgatcgggagcgtttttgtgaaaatacacaagctggtgagggcagagtgtataagtgcctctttaaccataaatttgaagaatccatgagtgaaaagtgtcgagaagcacttacaacccgccaaaagctgattgcccaggattataaagtcagttattcattggccaaatcctgtaaaagtgacttgaagaaataccggtgcaatgtggaaaaccttccgcgatcgcgtgaagccaggctctcctacttgttaatgtgcctggagtcagctgtacacagagggcgacaagtcagcagtgagtgccagggggagatgctggattaccgacgcatgttgatggaagacttttctctgagccctgagatcatcctaagctgtcggggggagattgaacaccattgttccggattacatcgaaaagggcggaccctacactgtctgatgaaagtagttcgaggggagaaggggaaccttggaatgaactgccagcaggcgcttcaaacactgattcaggagactgaccctggtgcagattaccgcattgatcgagctttgaatgaagcttgtgaatctgtaatccagacagcctgcaaacatataagatctggagacccaatgatcttgtcgtgcctgatggaacatttatacacagagaagatggtagaagactgtgaacaccgtctcttagagctgcagtatttcatctcccgggattggaagctggaccctgtcctgtaccgcaagtgccagggagacgcttctcgtctttgccacacccacggttggaatgagaccagtgaatttatgcctcagggagctgtgttctcttgtttatacagacacgcctaccgcactgaggaacagggaaggaggctctcacgggagtgccgagctgaagtccaaaggatcctacaccagcgtgccatggatgtcaagctggatcctgccctccaggataagtgcctgattgatctgggaaaatggtgcagtgagaaaacagagactggacaggagctggagtgccttcaggaccatctggatgacttggtggtggagtgtagagatatagttggcaacctcactgagttagaatcagaggatattcaaatagaagccttgctgatgagagcctgtgagcccataattcagaacttctgccacgatgtggcagataaccagatagactctggggacctgatggagtgtctgatacagaacaaacaccagaaggacatgaacgagaagtgtgccatcggagttacccacttccagctggtgcagatgaaggattttcggttttcttacaagtttaaaatggcctgcaaggaggacgtgttgaagctttgcccaaacataaaaaagaaggtggacgtggtgatctgcctgagcacgaccgtgcgcaatgacactctgcaggaagccaaggagcacagggtgtccctgaagtgccgcaggcagctccgtgtggaggagctggagatgacggaggacatccgcttggagccagatctatacgaagcctgcaagagtgacatcaaaaacttctgttccgctgtgcaatatggcaacgctcagattatcgaatgtctgaaagaaaacaagaagcagctaagcacccgctgccaccaaaaagtatttaagctgcaggagacagagatgatggacccagagctagactacaccctcatgagggtctgcaagcagatgataaagaggttctgtccggaagcagattctaaaaccatgttgcagtgcttgaagcaaaataaaaacagtgaattgatggatcccaaatgcaaacagatgataaccaagcgccagatcacccagaacacagattaccgcttaaaccccatgttaagaaaagcctgtaaagctgacattcctaaattctgtcacggtatcctgactaaggccaaggatgattcagaattagaaggacaagtcatctcttgcctgaagctgagatatgctgaccagcgcctgtcttcagactgtgaagaccagatccgaatcattatccaggagtccgccctggactaccgcctggatcctcagctccagctgcactgctcagacgagatctccagtctatgtgctgaagaagcagcagcccaagagcagacaggtcaggtggaggagtgcctcaaggtcaacctgctcaagatcaaaacagaattgtgtaaaaaggaagtgctaaacatgctgaaggaaagcaaagcagacatctttgttgacccggtacttcatactgcttgtgccctggacattaaacaccactgcgcagccatcacccctggccgcgggcgtcaaatgtcctgtctcatggaagcactggaggataagcgggtgaggttacagcccgagtgcaaaaagcgcctcaatgaccggattgagatgtggagttacgcagcaaaggtggccccagcagatggcttctctgatcttgccatgcaagtaatgacgtctccatctaagaactacattctctctgtgatcagtgggagcatctgtatattgttcctgattggcctgatgtgtggacggatcaccaagcgagtgacacgagagctcaaggacaggtagagccaccttgaccaccaaaggaactacctatccagtgcccagtttgtacagccctcttgtatagcatccccactcacctcgctcttctcagaagtgacaccaaccccgtgttagagcattagcagatgtccactgcgttgtcccatccagcctccactcgtgtccatggtgtcctcctcctcctcaccgtgcagcagcagcagctggtcgctggggttactgcctttgtttggcaaacttgggtttacctgcctgtagacaagtctctctcataccaacagaacttccggtacttccagaaccaactcacctgacctgcaactcaaaggcttttttaagaaaaccaccaaaaaaaaaaatttttttaaagaaaaaaatgtatatagtaacgcatctcctccaggcttgatttgggcaatggggttatgtctttcatatgactgtgtaaaacaaagacaggacttggaggggaagcacaccacccagtgtgccatgactgaggtgtctcgttcatctctcagaagcaccttggggcctcgccagggccgtggtcttcaccgaggcgtgggtgggcagccgttccccaggctgtgtggggtcctgctttcttctgctgagacagtgacgctttccagtttccaccctaatcagccactgctggtcacagccccacagccatgggtatttctgtggtctcctcgcttcattgaagcaaagcatgagccttcctagacaagggcagctggggaggggaagggaccggaagtttgtgaagttgaacagtccatccatctgcactgagaggctggatcctgagtcccggggcagcaggatcccaggaaccttcctcctccagggcagcacaggactcagccatgtctggaccggccctgctgaggctacagtcactctggaagctctgcgcttcatcaggaggcaggactgtggcgggaggggtccttgaagatgggtgtggggagcagtgggtcaggaagtgggagccagaggtttgactcactttgctttatttttcaggctacaatacaggtcagagacaatggcttataaaggtttagtgtggtctcaggatgtgacaggcagtccagcctgacctttctgcacactccagacaaacttcccagacaagctcctttgtgcctctacgtggagagggtgtggaaagttatcacattaaaagatggaggatttgctctgttttttttctttctgtccatttgctgcgtgtacccactctagtaggcattggctaaatgttgtattttggcgattcatcaacctttgcagaatatgggctttatagaagcaatattcttggccatcccgcctcattcctccagtgtggagatgacaagtctgggtgtgagagggaggggtccgggcatcatggttcagcgtggcactcctttggttgagtttggggcatgagatcacagtggctgcacaagagagcagtgtgtacagtaggagagacatttatgtaatatatattttattaacctgttagatgtccacaaagtattataaatcacgtgcctaaaactgtccatgtagaccaaggcctgccctcggcgccccccactcttgcctctgctctgcacagtccacgtgcactgcaggaccggagcgacacatgtcttccctgaagggtgttcagtacaaggcgtgtcagtttgtggatcagttgatccaagttactccttgtctaacctgactgacatatatttgaatactgtggttttctttcttttttttctatttgctgcccttcctggaggcagtgggttccagaagccaactgattgtccccctgccaagtcaccaagggaagctgctaagctgcttagtcccctcggtcctgcttgtagggtcttcctgattgtcaacagctgtctgggatgcttcagtctcctaaaactggaaacgcagggtgcgagcagcacacactgcctcccgccactgccagccggagtgagcggcccgagagtctctgcaggttcccctgggggctgggggccgctgaggcctaatatcaagagccaggaatgtcatgtacatggaggtgcctacggacgtgcctggtgtggtttgcaggtaggatggatgttcactgtttgaccgggtggggtatccttcctctctgcagtctccttcccagtatgcgtaaacacccttatagttctaattgtgttgatatttctgttctttctgaattgagagaaaatcccattcgttgtctgcagatttggaagtttgatgaggaatttggttcttgaaacatctgtctttttttttttttttgagacagagtatctctctgttgcccaggctgcagtgcagtggcgcgatctcagctccctgcaacctccacctcctgggttcaagcaattctctgcctcagcctcctgagtagctgggattccaggcacccgccaccacgcctggcttatttttgtatttttagtagagatggggtttcaccatcttggccaggctggtcttgaactcctgatctcatgatccacccgcctcagcttcccaaagtgctgggattacaggtgtgagccaccctgcctggccaaaacatttgtcatctttataaatggtcagaatagaaaagttagctctgccagtatcttcaattacttattacaagaatgtctttcatcatcttacttggagcattttccaatgactggctcttgagagccccaggcagggccccgagcaagtttttctaagtgccaaggccagcaaagtctgaactggccgcactcattaagtccctcatttggcaaaacaaaacagggcctggggcacccctggttcctggccttataggtcagtcaactggctgagaaatggtcaagaaaagaaacaatgacccttctgtggatgtgagtggatgatggactctggcctgtgtctactctcctgatgtgtagcccaccaacagtaatagaagtagagggtagggggttttgccaaggctaaggcttcaggtacttgctaacagttatagcagctgggtcactgtcatctggacttaccagttcatgccagtgtccctgtgacttatgcatagtgtgcgccacagccctctagaggtacctggagcccggactgccaggctggaggctctggggtactgaaggtgagctgtctgggcaaactattaagaacaagacgaactgttcacaatggagcttctcccacagatggggagctctgtgaggccttcacctgggtgcatgttggacttccattgctgttgctgttgtccctagacaagcccgttagcaagaagcaccggcaggggagccatgcactccataggcttgggatcacccccgggaaagcgatcttccccgggctaccacccccagctgcagttctgtgttagtgcatccttcaaagctaggagaattctagggtgaccagtgagctaatgttgagtgagcaggtattgacttgaacacactgcaggcctttggctgtctcatgctgtccttactcttcttgggaacagtgagtcactcagctggccagggtggggatgcatcctggtgaagagacagctttccctgaagatgctacagaaagttactgtcagatttcatttgtttctgtttcctgagatcaactaacagaagaatctaatggtgagagtgtcttcattcatgttttacgttttatcaaggcacactggaaagggaattatgtggctgacttcccttggccttcccaagagaagattctgttcttatgtcagtgtggcttctggaagtgtctcctatcctcccatcctccaggcctgtggtgtgacttctgccccgaagttcctactatagtgagtcatctggggagaggccactgaaaagaggccttcccttcccatttcctcccctgcctccttagaacacactctaagtcagaacttaatctaagaagaaggaagctggaccaggaaccttggaagtcagccagccctagaacagtcagcctaaattttggccgtaatggcttttttggttttttgttttgtttctgagatggagtctcactccgttgccaggctggagtgctgtggcgctatctcagcttaccgaatcctccgactccctggttcaagcgattgtcctgcctcagcctccggagtagctgggattacaggcatgcaccaccacacccagctaatttttgtatttttagtagagacggggtttcaccgtgttgtccaggatggtctccatctcctgacctcatgatgtgcccacttcggccttccaaagtggccgcaaagtggcccacttcggccaaagtgcacttcggccttccaaagtgcattacaggcgtgagccaccacgcccggcctggccttttttttttttttcttttgagacacagtttcactcgttgcccaggctggagtgcagtggcgcaatctcggctcactgcaacttctgcctcctaggttcaagcagttctcctgcctcagcctcccaagtagttgggattacgggcatgcaccaccatgcctggataattttttcttatttttagtagagacaggatttcatcatgttggccacgctggtttcgaactcctgaccacatgtggtccacccaccttggcctcaattatgtgcattttggtatatttacttgtatttcaacatcttgtgagtttgaaaaacctgaaaggccagaatgcttccttttatttctcaccatttgggcagcacctaagtggttttgtaaaatgcagcatctggtgctgtgggtctctctcaggccttgagggacacttccttcctccccactcgcctcctctccactagactttggttcctagagggcgtggggccgggtctgaggttcttgcctgccttccctcccattggtctttggttgctcatccctctaactgcaccccttcttggtccttcctccacagacttcagataatagataagtcattagcaaaccagaccgaatctttagggtgaagagctccccaaagccatctggtgaggtcattgtggggaccagggactgattatttgtcacctggatcacaaagatgggactgtctgctcaggctggtggtgacaggatcctgacccgtggtcctctcccgctccctctgctccaccaggacacatgtataggacactgtgctgtgtgcagtggagaaatctccctgggccaggggaaagttcagacagtgcctctagattgtgttttgcctcctccaatgtagagttgacatctggaccccagagcccagcagggctttctgtcagacatgctagggtggtagaaatgggccctccaggtccccctgcagtgcactgggcagagacctccggaaagccggcagcgggagcgcttcctgggcagcttcccccagcacagtgttcccaaaccagtccatccggaaaacagtctgtacagcaaatgctgtgtgagatcttaggcttttcactttttttgttttgttttgtttttgaaagaaagaaaaaaatacaattaacaagcctcttttgtaaatgggtttcctttctatgtataaaatcgtggtggtcccttgtttttacatgttcatgctgtgtaattttgagatgttactgagatatgttctgaacataatgtgcatttttttctgtacagatgaaatgggagaatttaataaagagtttgcaggtttttacttgtt

SEQ ID NO: 58781 - DNA, 3540 bp, Artificial Sequence
  derived and/or modified sequence
atggccgcctgtggccgggtgcggaggatgttccggctgtctgctgccctgcacctgctgctgctgtttgctgctggagctgagaagctgcccggccagggcgtgcacagccagggccagggccctggggccaactttgtgtcctttgtgggccaggccggcggcggcggccctgctggccagcagctgccccagctgccccagagcagccagctgcagcagcagcagcagcagcagcagcagcagcagcagccccagcccccccagccccccttccctgctgggggccccccagcccggcggggcggggccggggccggcggcggctggaagctggccgaggaggagagctgccgggaggatgtgaccagggtgtgccccaagcacacctggagcaacaacctggccgtgctggagtgcctgcaggatgtgcgggagccagaaaatgagatcagcagtgactgcaaccacctgctgtggaactacaagctgaacctgaccacagaccccaagtttgagagcgtggcccgggaggtgtgcaagagcaccatcacagagatcaaggaatgtgctgatgagcctgtgggcaagggctacatggtgtcctgcctggtggaccaccggggcaacatcacagagtaccagtgccaccagtacatcaccaagatgacagccatcatcttcagtgactaccgcctcatctgtggcttcatggatgactgcaagaatgacatcaacatcctgaagtgtggcagcatccggctgggggagaaggatgcccacagccagggcgaggtggtgtcctgcctggagaagggcctggtgaaggaggccgaggagcgggagcccaagatccaggtgtctgagctgtgcaagaaggccatcctgcgggtggccgagctgagcagtgatgacttccacctggacagacacctgtactttgcctgcagagatgaccgggagcgcttctgtgagaacacccaggccggggagggccgggtgtacaagtgcctcttcaaccacaagtttgaggagagcatgtctgagaagtgccgggaggccctgaccacccggcagaagctgattgcccaggactacaaggtgtcctacagcctggccaagagctgcaagagtgacctgaagaagtaccgctgcaatgtggagaacctgcccaggagccgggaggcccggctgagctacctgctgatgtgcctggagagcgctgtgcaccggggccggcaggtgtcctctgagtgccagggcgagatgctggactacagaaggatgctgatggaggacttcagcctgagccctgagatcatcctgagctgccgcggggagattgagcaccactgcagcggcctgcacaggaagggccgcaccctgcactgcctgatgaaggtggtgcggggggagaagggcaacctgggcatgaactgccagcaggccctgcagaccctcatccaggagacagatcctggagctgactacagaattgaccgggccctgaatgaggcctgtgagagcgtcatccagacagcctgcaagcacatccgcagcggggaccccatgatcctgagctgcctgatggagcacctgtacacagagaagatggtggaggactgtgagcaccggctgctggagctgcagtacttcatcagccgggactggaagctggaccctgtgctgtacaggaagtgccagggagatgccagccggctgtgccacacccacggctggaatgagaccagcgagttcatgccccagggcgctgtgttcagctgcctgtacagacatgcctacagaacagaggagcagggccggcggctgagcagagaatgtagagctgaggtgcagaggatcctgcaccagagggccatggatgtgaagctggaccctgccctgcaggacaagtgcctgattgacctgggcaagtggtgcagcgagaagacagaaacaggccaggagctggagtgcctgcaggaccacctggatgacctggtggtggagtgccgggacatcgtgggcaacctgacagagctggagagcgaggacatccagatcgaggccctgctgatgagggcctgtgagcccatcatccagaacttctgccatgatgtggccgacaaccagattgacagcggggacctgatggagtgcctgatccagaacaagcaccagaaggacatgaatgaaaaatgtgccatcggcgtgacccacttccagctggtgcagatgaaggacttccgcttctcctacaagttcaagatggcctgcaaggaggatgtgctgaagctgtgccccaacatcaagaagaaggtggatgtggtgatctgcctgagcaccaccgtgagaaatgacaccctgcaggaggccaaggagcaccgggtgtccctgaagtgccggcggcagctgcgggtggaggagctggagatgacagaggacatccggctggagccagacctgtatgaggcctgcaagagtgacatcaagaacttctgcagcgctgtgcagtatggaaatgcccagatcatcgagtgcctgaaggagaacaagaagcagctgagcacccgctgccaccagaaggtgttcaagctgcaggagacagagatgatggaccctgagctggactacaccctgatgagggtgtgcaagcagatgatcaagcgcttctgcccagaggccgacagcaagaccatgctgcagtgcctgaagcagaacaagaacagcgagctgatggaccccaagtgcaagcagatgatcaccaagaggcagatcacccagaacacagactaccgcctgaaccccatgctgaggaaggcctgcaaggctgacatccccaagttctgccacggcatcctgaccaaggccaaggatgattctgagctggagggccaggtgatcagctgcctgaagctgcgctatgctgaccagaggctgagcagtgactgtgaggaccagatccgcatcatcatccaggagagcgccctggactaccgcctggacccccagctgcagctgcactgcagtgatgagatcagcagcctgtgtgccgaggaggccgccgcccaggagcagacaggccaggtggaggagtgcctgaaggtgaacctgctgaagatcaagacagagctgtgcaagaaggaggtgctgaacatgctgaaggagagcaaggctgacatctttgtggaccctgtgctgcacacagcctgtgccctggacatcaagcaccactgtgccgccatcaccccaggccggggccggcagatgagctgcctgatggaggccctggaggacaagagggtgcggctgcagcctgagtgcaagaagaggctgaatgaccgcatcgagatgtggagctatgctgccaaggtggccccagcagatggcttcagtgacctggccatgcaggtgatgaccagccccagcaagaactacatcctgagcgtcatcagcggcagcatctgcatcctcttcctgattggcctgatgtgtggccgcatcaccaagagggtgacccgggagctgaaggacagatag

SEQ ID NO: 58782 - DNA, 3540 bp, Artificial Sequence
  derived and/or modified sequence
atggccgcctgcggccgggtgcggcggatgttccggctgagcgccgccctgcatttgttactgttgttcgcagccggggccgaaaagttgccagggcagggcgttcacagtcaaggacaagggccgggcgcaaacttcgtatctttcgttgggcaggcgggtggaggtgggccagctggccaacagcttccccagctgccccaaagcagtcagctgcagcaacagcagcagcagcaacagcagcagcaacagccacagccaccccagcccccatttcctgctggtgggcctcctgctaggaggggcggcgcaggcgccggtggtggctggaagctcgcagaggaagagtcttgtcgcgaagacgtaacacgggtctgtccaaaacacacatggtccaacaatctggcagtgcttgaatgtctccaggacgtgcgagaacctgaaaatgagataagttcggactgtaatcacctactgtggaactacaagctaaacctcacaactgaccctaaattcgaatctgtggcacgagaagtctgtaagtctacaataaccgagattaaggagtgcgccgacgagcctgtgggtaagggatatatggtgtcatgtttggtagatcaccgcgggaacatcactgagtaccagtgtcaccagtatatcaccaagatgacggcgattatttttagcgattaccgacttatttgcggatttatggacgactgcaaaaatgacatcaatatattgaaatgcggctcaattaggctcggagaaaaggatgcccacagccagggtgaagtggtgtcctgcctggagaagggcttggtcaaagaggcagaggagagagaaccaaagatccaggtatccgagctgtgcaaaaaagccatccttagggtggccgagctttcatcagatgattttcacttggatcgccacctctactttgcctgtcgcgacgacagggaaaggttctgcgagaacactcaggccggcgagggacgggtttataagtgtctcttcaatcacaaattcgaggaaagtatgagtgagaaatgcagagaggcacttacaacacggcagaagctgattgcacaggactacaaagtttcgtattcactggctaaatcttgcaagagcgacctgaagaaatatagatgcaatgtggagaatctcccccgctctcgcgaggcgcggctgtcctacttactcatgtgcttggaaagtgcggtacacaggggtaggcaggtaagttccgagtgtcaaggtgagatgctagactaccgccgaatgttaatggaggacttttcattatcaccagagatcatactgtcttgtaggggagagatcgagcaccactgtagtggattacatcggaaaggtcgcaccctgcactgcttaatgaaggtcgtgagaggtgagaagggcaacctcggcatgaactgccagcaagccctccagaccctgatccaggaaacagatccaggcgctgattatagaattgaccgcgcacttaatgaagcctgtgagtcagtcatccagaccgcctgtaaacatatccgctctggagaccctatgattctgagctgcctgatggaacatctttacaccgaaaagatggtagaggactgcgagcacagactgctggagttacagtacttcattagccgcgactggaaattggacccagtgctgtaccggaagtgtcaaggtgacgccagtcgactttgccatacgcacggatggaatgagacgagcgagtttatgccacaaggagctgtcttctcctgtctgtatcggcacgcctaccgcaccgaagaacagggtcggcgattgtctcgggagtgtcgcgccgaagtgcagagaatccttcaccagagggctatggacgtgaaactggatccagctctgcaggacaagtgccttatagacctgggcaagtggtgctccgagaagaccgagacggggcaggagctggagtgcctgcaggatcatctggatgatttagtagtggaatgcagggacattgtgggtaatctgaccgaactagaaagcgaggacatacagatcgaagctcttctaatgcgtgcctgtgagcccataatccaaaacttctgtcatgatgtggccgacaatcaaattgacagtggggacttaatggaatgtttgatccaaaacaagcaccagaaagatatgaacgagaagtgcgccataggtgtgactcacttccagttggtgcaaatgaaggatttcagattctcctacaaatttaaaatggcttgcaaggaggatgtgttgaaattgtgcccgaacataaaaaagaaggtcgatgtggtcatttgcttgtctaccactgtccggaacgacaccctgcaagaagccaaggaacaccgagtgtcactaaaatgtcgccgccagcttcgggtggaggagctggagatgaccgaggatatacggcttgaaccagatctgtacgaggcttgcaaatccgacatcaagaacttctgcagtgccgttcagtacggcaatgctcagataattgaatgtctaaaagagaataaaaagcagctcagtacaagatgtcaccagaaggtcttcaaactccaggagaccgaaatgatggaccccgagctggactacaccctgatgcgcgtgtgtaagcagatgattaagagattctgccctgaggccgattccaaaaccatgctgcagtgtctgaaacagaataagaactcggaactcatggaccccaagtgcaaacagatgatcaccaagcgccaaattactcagaacaccgattacagactcaaccctatgcttaggaaggcatgtaaggccgacatccccaaattttgtcacgggattctgactaaggctaaggacgacagcgagttggaggggcaggtcatatcatgtcttaaattacgatatgcagatcaaagactgagttctgattgcgaggatcaaattcggataataatccaggagagtgccctggattaccgattggatccccagctgcaattgcactgctcggatgagattagcagcctgtgtgccgaagaggcagccgcgcaagagcagaccgggcaggtggaagagtgcctgaaggtgaacctcctgaaaattaagaccgagttatgcaagaaagaagtgctcaacatgctgaaagagtcgaaagccgatatttttgtcgaccccgtgctccacacagcctgtgcgctcgacatcaagcatcactgcgccgctattactccaggcagggggaggcagatgtcctgcctcatggaggctctggaggataagagggtccgtctgcagccagaatgcaagaagagactcaatgatcggatcgagatgtggtcttacgctgcaaaagtggcacctgccgacggatttagcgatctcgcaatgcaggtaatgacctccccaagcaaaaattacattcttagcgtgatctcagggtccatctgtatactgtttctcatcggtcttatgtgcggtcgcatcacaaagcgtgtcacaagggagttaaaggaccgatag

SEQ ID NO: 58783 - DNA, 3540 bp, Artificial Sequence
  derived and/or modified sequence
atggccgcatgtggcagggtccgcagaatgtttcgcctgtctgctgccctacatctccttctcttgtttgcggctggagctgaaaagctaccaggtcagggtgtgcactcccaaggtcagggaccaggcgcaaattttgttagcttcgtgggccaggctggcggaggaggtccagcaggccagcagctaccacaactgcctcagagcagtcagctgcaacagcaacaacaacagcagcaacagcaacagcagccccagccaccccagcccccatttccagccggtggacccccagcccgaagagggggagcaggcgcagggggaggatggaaactggctgaggaagaaagctgccgggaggacgtgactagggtgtgccccaagcacacatggagcaacaatttagctgttttggagtgtctacaggatgtgcgtgaaccagaaaacgaaatcagctcagactgcaaccatttgctgtggaattacaagctgaatctaacgacagatccgaaattcgaatctgtagctagagaggtgtgcaaatctaccataacggaaataaaggagtgtgcagatgaacctgtgggtaagggctatatggtctcttgcctcgtagaccatcggggtaacataaccgaataccagtgccaccagtacatcactaaaatgaccgctatcatcttttccgactaccgcctcatatgtggtttcatggatgactgtaagaatgacattaatatactgaaatgtggttcaattaggcttggggagaaagatgctcactcccaaggggaagtagtgagctgcctagaaaaaggcttagtcaaggaggccgaggagcgcgagcccaagatccaagtgtctgagctgtgcaaaaaagcgatcctccgcgtggccgaacttagcagtgacgatttccatctcgacagacacctgtactttgcctgccgtgacgatcgagagcgattttgtgagaatacccaggcaggtgagggaagagtgtacaaatgtttatttaaccataagttcgaggaaagcatgtctgagaaatgtagagaggccctaacgacaaggcagaaactcattgctcaagactacaaggtcagctacagtctggcgaaatcctgtaaaagtgatctgaaaaaatataggtgtaacgtagaaaacctgccccgttctcgagaggctcgactgagttacctcctgatgtgcctggaatccgctgtgcatcgaggaagacaggtgagcagcgaatgccaaggtgagatgcttgattataggagaatgctcatggaagacttctctctaagccctgaaataatcttgtcttgccggggagagatagaacaccattgttcgggccttcatcgtaagggtcgcacactccattgtttgatgaaagtagtaagaggcgaaaaaggcaacctgggtatgaattgccagcaagctctacagacccttattcaagaaacagatccaggcgcagattatcgaattgacagagccctcaacgaagcctgcgaatccgtcattcagactgcatgtaaacatatccgtagcggagatccgatgattctaagctgccttatggaacatctgtacaccgaaaagatggtcgaggactgcgaacatcggttgttggagctgcagtacttcatatcgagggactggaaactggacccggtcctgtaccgcaaatgccagggggacgcctctagattgtgtcacactcacggctggaatgaaacaagcgagtttatgccacagggcgctgtcttttcatgcctgtatcgccacgcttaccgaacagaggaacaggggaggcgactgagccgtgagtgtcgggcagaggtccagagaatactgcaccagcgggcaatggatgtgaaacttgaccccgcactacaagataagtgtcttatcgacctgggaaagtggtgcagcgaaaaaacagaaactgggcaagaactggaatgcctgcaggatcacctggatgacctggtggtggagtgccgggacatagtcgggaatctgaccgaactagagagcgaagatatccaaatcgaggccctcctgatgagggcttgtgagccaataatacaaaatttctgtcacgatgtggccgataatcagatcgactccggcgacctgatggagtgtctcattcagaacaagcaccagaaggatatgaatgagaagtgtgctataggggtcacacacttccaactagtacagatgaaagacttcagattcagttacaaattcaaaatggcatgtaaggaggatgttctaaaactatgccctaatatcaaaaagaaagtggatgttgtcatctgcctgagtacaaccgtgcggaacgataccctgcaggaagctaaagaacatcgtgtgtctctgaaatgtaggaggcagctgagagtagaggagctcgaaatgactgaggacataagactggaacccgatctttacgaagcatgtaaaagtgatattaagaatttttgctctgctgtgcagtacggaaatgcccagatcatcgagtgccttaaagagaataaaaaacagctatctactagatgtcaccagaaagtcttcaaacttcaggagaccgaaatgatggacccagagcttgactatacactaatgagggtgtgcaaacagatgatcaaacgattttgcccagaagcggactccaagaccatgctacaatgccttaagcaaaacaagaattccgagctgatggatccgaaatgtaagcagatgatcacaaagaggcagatcacacaaaacactgattatcgattaaaccccatgcttagaaaagcctgcaaggcagacatccccaaattttgtcacggcatccttaccaaagctaaggatgactctgagttggagggtcaggtgatctcttgcctcaagctacggtacgcagaccaacggctcagttctgattgcgaggatcagatacggatcattatccaggaatcagccctggattacagactggatccacaactgcagctgcattgctcggacgagatcagttctttgtgcgctgaagaagctgctgcacaggagcaaaccggccaggtggaagaatgcttgaaggtaaaccttctaaaaatcaagaccgagctgtgcaagaaggaggtgttaaacatgctgaaagagagtaaggcggacattttcgtcgacccagtgctacacaccgcttgcgctcttgacatcaagcaccactgtgcggctatcacccctgggagagggaggcagatgagctgtctgatggaagctctagaagataagagggtgcgtctccagcccgagtgcaagaaacggctcaatgaccgaattgagatgtggtcctacgctgccaaagtcgccccagcagatggcttctccgacttggcaatgcaggtcatgacttctccgtcaaaaaattacatcctgtccgtgatcagcggttcaatctgcattcttttccttattggcctaatgtgcggcagaataaccaagcgagtgacacgggaattgaaggacagatag

SEQ ID NO: 58784 - DNA, 3540 bp, Artificial Sequence
  derived and/or modified sequence
atggccgcctgcggcagagtgagaagaatgttcagactgagcgccgccctgcacctgctgctgctgttcgccgccggcgccgagaagctgcccggccagggcgtgcacagccagggccagggccccggcgccaacttcgtgagcttcgtgggccaggccggcggcggcggccccgccggccagcagctgccccagctgccccagagcagccagctgcagcagcagcagcagcagcagcagcagcagcagcagccccagcccccccagccccccttccccgccggcggcccccccgccagaagaggcggcgccggcgccggcggcggctggaagctggccgaggaggagagctgcagagaggacgtgaccagagtgtgccccaagcacacctggagcaacaacctggccgtgctggagtgcctgcaggacgtgagagagcccgagaacgagatcagcagcgactgcaaccacctgctgtggaactacaagctgaacctgaccaccgaccccaagttcgagagcgtggccagagaggtgtgcaagagcaccatcaccgagatcaaggagtgcgccgacgagcccgtgggcaagggctacatggtgagctgcctggtggaccacagaggcaacatcaccgagtaccagtgccaccagtacatcaccaagatgaccgccatcatcttcagcgactacagactgatctgcggcttcatggacgactgcaagaacgacatcaacatcctgaagtgcggcagcatcagactgggcgagaaggacgcccacagccagggcgaggtggtgagctgcctggagaagggcctggtgaaggaggccgaggagagagagcccaagatccaggtgagcgagctgtgcaagaaggccatcctgagagtggccgagctgagcagcgacgacttccacctggacagacacctgtacttcgcctgcagagacgacagagagagattctgcgagaacacccaggccggcgagggcagagtgtacaagtgcctgttcaaccacaagttcgaggagagcatgagcgagaagtgcagagaggccctgaccaccagacagaagctgatcgcccaggactacaaggtgagctacagcctggccaagagctgcaagagcgacctgaagaagtacagatgcaacgtggagaacctgcccagaagcagagaggccagactgagctacctgctgatgtgcctggagagcgccgtgcacagaggcagacaggtgagcagcgagtgccagggcgagatgctggactacagaagaatgctgatggaggacttcagcctgagccccgagatcatcctgagctgcagaggcgagatcgagcaccactgcagcggcctgcacagaaagggcagaaccctgcactgcctgatgaaggtggtgagaggcgagaagggcaacctgggcatgaactgccagcaggccctgcagaccctgatccaggagaccgaccccggcgccgactacagaatcgacagagccctgaacgaggcctgcgagagcgtgatccagaccgcctgcaagcacatcagaagcggcgaccccatgatcctgagctgcctgatggagcacctgtacaccgagaagatggtggaggactgcgagcacagactgctggagctgcagtacttcatcagcagagactggaagctggaccccgtgctgtacagaaagtgccagggcgacgccagcagactgtgccacacccacggctggaacgagaccagcgagttcatgccccagggcgccgtgttcagctgcctgtacagacacgcctacagaaccgaggagcagggcagaagactgagcagagagtgcagagccgaggtgcagagaatcctgcaccagagagccatggacgtgaagctggaccccgccctgcaggacaagtgcctgatcgacctgggcaagtggtgcagcgagaagaccgagaccggccaggagctggagtgcctgcaggaccacctggacgacctggtggtggagtgcagagacatcgtgggcaacctgaccgagctggagagcgaggacatccagatcgaggccctgctgatgagagcctgcgagcccatcatccagaacttctgccacgacgtggccgacaaccagatcgacagcggcgacctgatggagtgcctgatccagaacaagcaccagaaggacatgaacgagaagtgcgccatcggcgtgacccacttccagctggtgcagatgaaggacttcagattcagctacaagttcaagatggcctgcaaggaggacgtgctgaagctgtgccccaacatcaagaagaaggtggacgtggtgatctgcctgagcaccaccgtgagaaacgacaccctgcaggaggccaaggagcacagagtgagcctgaagtgcagaagacagctgagagtggaggagctggagatgaccgaggacatcagactggagcccgacctgtacgaggcctgcaagagcgacatcaagaacttctgcagcgccgtgcagtacggcaacgcccagatcatcgagtgcctgaaggagaacaagaagcagctgagcaccagatgccaccagaaggtgttcaagctgcaggagaccgagatgatggaccccgagctggactacaccctgatgagagtgtgcaagcagatgatcaagagattctgccccgaggccgacagcaagaccatgctgcagtgcctgaagcagaacaagaacagcgagctgatggaccccaagtgcaagcagatgatcaccaagagacagatcacccagaacaccgactacagactgaaccccatgctgagaaaggcctgcaaggccgacatccccaagttctgccacggcatcctgaccaaggccaaggacgacagcgagctggagggccaggtgatcagctgcctgaagctgagatacgccgaccagagactgagcagcgactgcgaggaccagatcagaatcatcatccaggagagcgccctggactacagactggacccccagctgcagctgcactgcagcgacgagatcagcagcctgtgcgccgaggaggccgccgcccaggagcagaccggccaggtggaggagtgcctgaaggtgaacctgctgaagatcaagaccgagctgtgcaagaaggaggtgctgaacatgctgaaggagagcaaggccgacatcttcgtggaccccgtgctgcacaccgcctgcgccctggacatcaagcaccactgcgccgccatcacccccggcagaggcagacagatgagctgcctgatggaggccctggaggacaagagagtgagactgcagcccgagtgcaagaagagactgaacgacagaatcgagatgtggagctacgccgccaaggtggcccccgccgacggcttcagcgacctggccatgcaggtgatgaccagccccagcaagaactacatcctgagcgtgatcagcggcagcatctgcatcctgttcctgatcggcctgatgtgcggcagaatcaccaagagagtgaccagagagctgaaggacagatag

SEQ ID NO: 58785 - DNA, 282 bp, Artificial Sequence
  derived and/or modified sequence
atgagctactaccagagacccttcagccccagcgcctacagcctgcccgccagcctgaacagcagcatcgtgatgcagcacggcaccagcctggacagcaccgacacctacccccagcacgcccagagcctggacggcaccaccagcagcagcatccccctgtacagaagcagcgaggaggagaagagagtgaccgtgatcaaggccccccactaccccggcatcggccccgtggacgagagcggcatccccaccgccatcagaaccaccgtggacagatag

SEQ ID NO: 58786 - DNA, 270 bp, Artificial Sequence
  derived and/or modified sequence
atgagctactaccagagacccttcagccccagcgcctacagcctgcccgccagcctgaacagcagcatcgtgatgcagcacggcaccagcctggacagcaccgacacctacccccagcacgcccagagcctggacggcaccaccagcagcagcatccccctgtacagaagcagcgaggaggagaagagagtgaccgtgatcaaggccccccactaccccggcatcggccccgtggacgagagcggcatccccaccgccatcagaacctag

SEQ ID NO: 58787 - DNA, 207 bp, Artificial Sequence
  derived and/or modified sequence
atgagctactaccagagacccttcagccccagcgcctacagcctgcccgccagcctgaacagcagcatcgtgatgcagcacggcaccagcctggacagcaccgacacctacccccagcacgcccagagcctggacggcaccaccagcagcagcatccccctgtacagaagcagcgaggaggagaagagagtgaccgtgatcaagtag

SEQ ID NO: 58788 - DNA, 303 bp, Artificial Sequence
  derived and/or modified sequence
atgagctactaccagagacccttcagccccagcgcctacagcctgcccgccagcctgaacagcagcatcgtgatgcagcacggcaccagcctggacagcaccgacacctacccccagcacgcccagagcctggacggcaccaccagcagcagcatccccctgtacagaagcagcgaggaggagaagagagtgaccgtgatcaaggccccccactaccccggcatcggccccgtggacgagagcggcatccccaccgccatcagaaccaccgtggacagacccaaggactggtacaagacctag

SEQ ID NO: 58789 - DNA, 1935 bp, Artificial Sequence
  derived and/or modified sequence
atgagcgtgaccctgaccagcgtgaagagagtgcagagcagccccaacctgctggccgccggcagagacagccagagccccgacagcgcctggagaagctacaacgacggcaaccaggagaccctgaacggcgacgccacctacagcagcctggccgccaagggcttcagaagcgtgagacccaacctgcaggacaagagaagccccacccagagccagatcaccgtgaacggcaacagcggcggcgccgtgagccccatgagctactaccagagacccttcagccccagcgcctacagcctgcccgccagcctgaacagcagcatcgtgatgcagcacggcaccagcctggacagcaccgacacctacccccagcacgcccagagcctggacggcaccaccagcagcagcatccccctgtacagaagcagcgaggaggagaagagagtgaccgtgatcaaggccccccactaccccggcatcggccccgtggacgagagcggcatccccaccgccatcagaaccaccgtggacagacccaaggactggtacaagaccatgttcaagcagatccacatggtgcacaagcccggcctgtacaaccccccctacagcgcccagagccaccccgccgccaagacccagacctacagacccctgagcaagagccacagcgacaacagccccaacgccttcaaggacgccagcagccccgtgccccccccccacgtgcccccccccgtgccccccctgagacccagagacagaagcagcaccgagaagcacgactgggacccccccgacagaaaggtggacaccagaaagttcagaagcgagcccagaagcatcttcgagtacgagcccggcaagagcagcatcctgcagcacgagagacccgccagcctgtaccagagcagcatcgacagaagcctggagagacccatgagcagcgccagcatggccagcgacttcagaaagagaagaaagagcgagcccgccgtgggcccccccagaggcctgggcgaccagagcgccagcagaaccagccccggcagagtggacctgcccggcagcagcaccaccctgaccaagagcttcaccagcagcagccccagcagccccagcagagccaaggacagagagagccccagaagctacagcagcaccctgaccgacatgggcagaagcgcccccagagagagaagaggcacccccgagaaggagaagctgcccgccaaggccgtgtacgacttcaaggcccagaccagcaaggagctgagcttcaagaagggcgacaccgtgtacatcctgagaaagatcgaccagaactggtacgagggcgagcaccacggcagagtgggcatcttccccatcagctacgtggagaagctgaccccccccgagaaggcccagcccgccagaccccccccccccgcccagcccggcgagatcggcgaggccatcgccaagtacaacttcaacgccgacaccaacgtggagctgagcctgagaaagggcgacagagtgatcctgctgaagagagtggaccagaactggtacgagggcaagatccccggcaccaacagacagggcatcttccccgtgagctacgtggaggtggtgaagaagaacaccaagggcgccgaggactaccccgacccccccatcccccacagctacagcagcgacagaatccacagcctgagcagcaacaagccccagagacccgtgttcacccacgagaacatccagggcggcggcgagcccttccaggccctgtacaactacacccccagaaacgaggacgagctggagctgagagagagcgacgtgatcgacgtgatggagaagtgcgacgacggctggttcgtgggcaccagcagaagaaccaagttcttcggcaccttccccggcaactacgtgaagagactgtag

SEQ ID NO: 58790 - DNA, 222 bp, Artificial Sequence
  derived and/or modified sequence
atgagctactaccagagacccttcagccccagcgcctacagcctgcccgccagcctgaacagcagcatcgtgatgcagcacggcaccagcctggacagcaccgacacctacccccagcacgcccagagcctggacggcaccaccagcagcagcatccccctgtacagaagcagcgaggaggagaagagagtgaccgtgatcaaggccccccactacccctag

SEQ ID NO: 58791 - DNA, 171 bp, Artificial Sequence
  derived and/or modified sequence
atgagctactaccagagacccttcagccccagcgcctacagcctgcccgccagcctgaacagcagcatcgtgatgcagcacggcaccagcctggacagcaccgacacctacccccagcacgcccagagcctggacggcaccaccagcagcagcatccccctgtacagatag

SEQ ID NO: 58792 - DNA, 180 bp, Artificial Sequence
  derived and/or modified sequence
atgagctactaccagagacccttcagccccagcgcctacagcctgcccgccagcctgaacagcagcatcgtgatgcagcacggcaccagcctggacagcaccgacacctacccccagcacgcccagagcctggacggcaccaccagcagcagcatccccctgtacagaagcagcgagtag

SEQ ID NO: 58793 - DNA, 282 bp, Artificial Sequence
  derived and/or modified sequence
atgtcatattatcaacggcctttcagtccttccgcatactcactgccagcatccctgaactcttcaatcgttatgcaacacgggaccagcttagattcaacagacacatacccccagcacgctcagtccctggacggtacaacttcctcatccattcccctgtatcggagcagcgaggaggagaaacgcgtgactgtgatcaaagccccccactaccccgggattggcccagtggacgagtctggcattcctaccgccatcagaactacagtcgacaggtag

SEQ ID NO: 58794 - DNA, 270 bp, Artificial Sequence
  derived and/or modified sequence
atgtcctactatcaacggcctttttctcccagtgcgtactcattgccagccagccttaactcctctattgttatgcagcacggaacctctctggactcaacagacacctacccccaacacgctcagtcactggacgggactactagctcttcaattccactgtacaggtcttctgaggaggaaaagagagtgacagtcatcaaggccccgcattacccggggattggccctgtcgacgaaagcggtattcctactgctattagaacctag

SEQ ID NO: 58795 - DNA, 207 bp, Artificial Sequence
  derived and/or modified sequence
atgagttactatcaaaggcccttcagcccaagcgcctactccctcccagcttcgctgaatagttccatcgttatgcagcatggcacatctctggacagcactgacacgtacccgcagcatgctcagtcactagatggcaccacctccagctcgatccctctgtaccgatctagcgaggaagagaagcgcgtaaccgtgattaaatag

SEQ ID NO: 58796 - DNA, 303 bp, Artificial Sequence
  derived and/or modified sequence
atgtcctactaccagcgtccttttagtccttccgcctatagcctccccgcctcactgaatagctcgatcgtcatgcagcatggtactagtctggactccaccgatacctacccgcagcacgcccagtctctcgacggcactacatcttcttccattccactgtatcgaagcagtgaggaggagaagagagtaaccgtgattaaggcaccccattaccctggaatcggacccgtagatgagagtgggataccaactgccatccgtacaactgtggaccgccctaaggactggtacaaaacctag

SEQ ID NO: 58797 - DNA, 1935 bp, Artificial Sequence
  derived and/or modified sequence
atgtcagtcacccttacgtcagtgaaaagggttcagagttctcccaacttgctagcagcgggccgcgacagtcagagccctgacagcgcttggcggtcatataatgacggaaatcaggagaccctcaacggggacgctacctactcatccctcgctgccaagggctttcgatcagtgcggccgaacctgcaggataagcggtcccctacacagtcacaaataacggtgaatggcaactcaggaggagccgtttcccctatgtcatattatcagcggcccttctcaccctccgcatattctctgcctgcgtccctgaactcatcgatagtgatgcaacatgggaccagtctggactcgactgatacctatcctcagcacgcccagagtttggacggcacaacctcctctagcattcctctgtatcgatcgtcagaagaggagaaacgggtcacagtgatcaaggccccccattacccgggcatcgggcccgtggatgagtctggtattccaaccgccattagaaccacggtcgaccgacccaaggactggtacaagaccatgtttaagcaaattcacatggttcacaaacccggcctttacaatccgccttattcggcacagtcccatccagctgcgaaaacccagacatatcggcccctgagtaagtcccattctgacaatagtcctaacgcctttaaagacgcttccagcccagtcccccccccacacgttcctccacctgtaccccccttacgtccacgcgaccgctcatcaaccgaaaagcatgactgggatcctcccgacagaaaagttgatacccgtaagttcagatctgaaccgcggtcgatcttcgaatatgaaccaggcaagtcttccattctgcagcatgagaggccagcatctttgtaccagagctcgattgacagaagtctcgaacggcctatgtccagtgctagcatggcctccgactttaggaagcgaaggaaatccgagcctgctgtaggtccccccagagggcttggggaccaatccgcgagcaggactagtcctggtagggttgatctgcctggatctagtactacgctgacaaagagcttcacaagcagctccccttcctcccccagccgcgccaaagatcgggagagtcccagaagctattcctccacactgactgatatgggccgttccgcacctcgggagcgtcgaggtacccctgaaaaggagaagctcccggccaaggccgtttatgattttaaggcccagacatcgaaggagttatcctttaagaagggcgatactgtgtacattcttaggaaaattgaccagaattggtatgaaggggaacatcacggccgcgtgggcatctttcccatttcatatgtcgagaagctgacccctcccgagaaggctcagcctgctcgtccacccccaccggcacagcctggggagatcggcgaagcaatcgccaagtacaatttcaatgcagataccaatgtcgaactgagtctgcgtaagggagatcgcgttattctcctcaagcgcgtggaccagaattggtatgaaggaaaaattcctggcacaaataggcagggtatcttcccagtcagttatgttgaggtagtgaagaaaaacacgaagggcgcagaggactatccagatccaccaatcccccacagctacagtagtgatcgcattcattccttgtccagcaataagccacagcgacctgtgtttacccacgaaaacatacagggcgggggagagccctttcaggctctgtacaattacacaccccggaacgaagatgagctggagctcagggaaagtgatgtgatcgacgtcatggagaagtgcgatgacggatggttcgtgggaaccagccgcaggacaaaattcttcgggaccttcccgggcaattacgttaagcggctgtag

SEQ ID NO: 58798 - DNA, 222 bp, Artificial Sequence
  derived and/or modified sequence
atgtcttactatcagcgacctttctctccctcagcttactctctgcctgctagcctgaatagctcaattgtgatgcagcatggtacatccctcgactctactgatacatatccacaacacgcccagtccctggacgggaccactagttcatctattcccctgtacagatcctccgaggaggagaagagggtgaccgtgatcaaggccccccattatccgtag

SEQ ID NO: 58799 - DNA, 171 bp, Artificial Sequence
  derived and/or modified sequence
atgagctattatcagaggccgttttctcccagcgcttacagtctgcctgcaagcctgaattcttctatcgtcatgcagcacggaacttccctggacagtaccgatacatacccccaacacgcccagagcctggatgggactacctcttcctctatccccctgtacaggtag

SEQ ID NO: 58800 - DNA, 180 bp, Artificial Sequence
  derived and/or modified sequence
atgagttactaccagcgaccgttctcgccttccgcctattccctgccagcatccttaaactccagcatcgtgatgcagcatggaacctcattggatagcactgatacgtacccccagcacgcgcaaagcttggatggaaccacgtccagctccatcccactctaccgctcaagtgagtag

SEQ ID NO: 58801 - DNA, 282 bp, Artificial Sequence
  derived and/or modified sequence
atgagctactaccagaggcccttcagccccagcgcctacagcctgcctgccagcctgaacagcagcatcgtgatgcagcacggcaccagcctggacagcacagacacctacccccagcacgcccagagcctggatggcaccaccagcagcagcatccccctgtaccgcagcagcgaggaggagaagagggtgaccgtcatcaaggccccccactacccaggcatcggccctgtggatgaaagtggcatccccacagccatccgcaccaccgtggacagatag

SEQ ID NO: 58802 - DNA, 270 bp, Artificial Sequence
  derived and/or modified sequence
atgagctactaccagaggcccttcagccccagcgcctacagcctgcctgccagcctgaacagcagcatcgtgatgcagcacggcaccagcctggacagcacagacacctacccccagcacgcccagagcctggatggcaccaccagcagcagcatccccctgtaccgcagcagcgaggaggagaagagggtgaccgtcatcaaggccccccactacccaggcatcggccctgtggatgaaagtggcatccccacagccatccgcacctag

SEQ ID NO: 58803 - DNA, 207 bp, Artificial Sequence
  derived and/or modified sequence
atgagctactaccagaggcccttcagccccagcgcctacagcctgcctgccagcctgaacagcagcatcgtgatgcagcacggcaccagcctggacagcacagacacctacccccagcacgcccagagcctggatggcaccaccagcagcagcatccccctgtaccgcagcagcgaggaggagaagagggtgaccgtcatcaagtag

SEQ ID NO: 58804 - DNA, 303 bp, Artificial Sequence
  derived and/or modified sequence
atgagctactaccagaggcccttcagccccagcgcctacagcctgcctgccagcctgaacagcagcatcgtgatgcagcacggcaccagcctggacagcacagacacctacccccagcacgcccagagcctggatggcaccaccagcagcagcatccccctgtaccgcagcagcgaggaggagaagagggtgaccgtcatcaaggccccccactacccaggcatcggccctgtggatgaaagtggcatccccacagccatccgcaccaccgtggaccggcccaaggactggtacaagacctag

SEQ ID NO: 58805 - DNA, 1935 bp, Artificial Sequence
  derived and/or modified sequence
atgtctgtgaccctgacctctgtgaagagggtgcagagcagccccaacctgctggccgccggccgggacagccagagcccagattctgcctggaggagctacaatgatggcaaccaggagaccctgaatggagatgccacctacagcagcctggccgccaagggcttccgctctgtgcggcccaacctgcaggacaagaggagccccacccagagccagatcaccgtgaatggaaacagcggcggcgctgtgagccccatgagctactaccagaggcccttcagccccagcgcctacagcctgcctgccagcctgaacagcagcatcgtgatgcagcacggcaccagcctggacagcacagacacctacccccagcacgcccagagcctggatggcaccaccagcagcagcatccccctgtaccgcagcagcgaggaggagaagagggtgaccgtcatcaaggccccccactacccaggcatcggccctgtggatgaaagtggcatccccacagccatccgcaccaccgtggaccggcccaaggactggtacaagaccatgttcaagcagatccacatggtgcacaagccaggcctgtacaaccccccctacagcgcccagagccaccctgctgccaagacccagacctaccggcccctgagcaagagccacagcgacaacagccccaatgccttcaaggatgccagcagccctgtgcccccacctcatgtgcccccacctgtgccccccctgcggccccgggacaggagcagcacagagaagcatgactgggaccccccagacaggaaggtggacaccaggaagttccgctctgagcccaggagcatctttgaatatgagcccgggaagagcagcatcctgcagcacgagaggcctgccagcctgtaccagagcagcattgacaggagcctggagcggcccatgagcagcgcctccatggccagtgacttcaggaagaggaggaagtctgagcctgctgtgggccccccccggggcctgggggaccagagcgccagcaggaccagccctggccgggtggacctgcccggcagcagcaccaccctgaccaagagcttcaccagcagcagccccagcagccccagccgggccaaggaccgggagagccccaggagctacagcagcaccctgacagacatgggccgcagcgccccccgggagcggcggggcaccccagagaaggagaagctgcctgccaaggctgtgtatgacttcaaggcccagaccagcaaggagctgtccttcaagaagggggacacagtgtacatcctgaggaagattgaccagaactggtatgaaggagagcaccacggccgggtgggcatcttccccatctcctatgtggagaagctgaccccacctgagaaggcccagcctgcccggcccccacctccagcccagcctggagagatcggggaggccatcgccaagtacaacttcaatgctgacaccaacgtggagctgagcctgaggaaaggagacagagtcatcctgctgaagagggtggaccagaactggtatgagggcaagatccctggcaccaaccggcagggcatcttccctgtgtcctatgtggaggtggtgaagaagaacaccaagggagctgaggactacccagacccccccatcccccacagctacagcagtgaccgcatccacagcctgagcagcaacaagccccagaggcctgtgttcacccatgagaacatccagggcggcggggagcccttccaggccctgtacaactacaccccaagaaatgaagatgagctggagctgcgggagagtgatgtgattgatgtgatggagaagtgtgatgatggctggtttgtgggcaccagcaggaggaccaagttcttcggcaccttccctggcaactacgtgaagaggctgtag

SEQ ID NO: 58806 - DNA, 222 bp, Artificial Sequence
  derived and/or modified sequence
atgagctactaccagaggcccttcagccccagcgcctacagcctgcctgccagcctgaacagcagcatcgtgatgcagcacggcaccagcctggacagcacagacacctacccccagcacgcccagagcctggatggcaccaccagcagcagcatccccctgtaccgcagcagcgaggaggagaagagggtgaccgtcatcaaggccccccactacccctag

SEQ ID NO: 58807 - DNA, 171 bp, Artificial Sequence
  derived and/or modified sequence
atgagctactaccagaggcccttcagccccagcgcctacagcctgcctgccagcctgaacagcagcatcgtgatgcagcacggcaccagcctggacagcacagacacctacccccagcacgcccagagcctggatggcaccaccagcagcagcatccccctgtacagatag

SEQ ID NO: 58808 - DNA, 180 bp, Artificial Sequence
  derived and/or modified sequence
atgagctactaccagaggcccttcagccccagcgcctacagcctgcctgccagcctgaacagcagcatcgtgatgcagcacggcaccagcctggacagcacagacacctacccccagcacgcccagagcctggatggcaccaccagcagcagcatccccctgtaccgcagcagcgagtag

SEQ ID NO: 58809 - DNA, 282 bp, Artificial Sequence
  derived and/or modified sequence
atgagctactaccagcggcccttcagccccagcgcctacagcctgcccgcatcactgaactcctctatcgtgatgcagcatgggaccagcctcgacagcacagacacatatccccagcatgcccagtctctcgacggcacaactagctctagcattccactttacagaagcagcgaggaggaaaagcgagttacagtgatcaaggccccacactaccccggaattgggcctgtcgatgagagcggtattcccaccgccatcaggacgacggtggatcggtag

SEQ ID NO: 58810 - DNA, 270 bp, Artificial Sequence
  derived and/or modified sequence
atgagctactaccagcggcccttcagccccagcgcctacagcctgcccgcctcgttgaacagttcaatagtgatgcagcacggcacaagcttagattctacggacacatacccccagcatgcccagtcattagatggtacaacctcctctagtattcccctctatcgttccagcgaagaggaaaagagagtgacagtaattaaagccccccactacccaggcatcggccccgtggacgagtcaggcataccaacggccattcggacatag

SEQ ID NO: 58811 - DNA, 207 bp, Artificial Sequence
  derived and/or modified sequence
atgagctactaccagcggcccttcagccccagcgcctacagcctgcccgcctccctcaattcaagcatagtcatgcagcacggcaccagcctcgattctaccgacacttatccccaacacgcccagtctctggatggtactactagctccagcattccgctatatagaagctcagaagaagagaagagagttactgtaattaaatag

SEQ ID NO: 58812 - DNA, 303 bp, Artificial Sequence
  derived and/or modified sequence
atgagctactaccagcggcccttcagccccagcgcctacagcctgcctgcgagtctgaattcaagtatagtcatgcagcatgggactagcctggactccaccgacacctaccctcagcacgctcagagcctggacgggaccacaagctcatctatccccctgtacagatcctcagaagaagagaaacgcgtcaccgtgattaaggcccctcactacccagggattggacccgtcgacgaatcagggatcccaactgccattcgcacgaccgtcgatcggccgaaagactggtataagacctag

SEQ ID NO: 58813 - DNA, 1935 bp, Artificial Sequence
  derived and/or modified sequence
atgagcgtgaccctgaccagcgtgaagcgggtgcagagcagccccaacctgctggctgcaggcagggactcacaatcccctgactctgcgtggagatcatataatgatggcaatcaggagacactcaacggggatgctacgtactcctcacttgcagcaaaaggattcaggagcgtccggccaaacctgcaagataagcggtctccaactcaatcccagataacagtaaacggcaactcaggcggcgccgtgagtccgatgagctattaccagaggccctttagcccctcggcatattcacttcctgctagcttgaactcttctatcgtaatgcagcacggaacaagcctggacagcactgacacttacccgcagcatgcccagagcctggatggcacaaccagtagctccatccccctgtaccgcagctctgaggaagaaaaaagggtgaccgtcataaaagcgccccattatccaggcatcgggcccgtggatgagtcgggtatccccaccgccatcaggactacagtggatagaccgaaggattggtacaagaccatgttcaagcagatccatatggttcacaaacccggcctgtataacccaccttactctgcccagtcccaccctgcagctaaaacccaaacatacaggcctctgagtaaatctcatagcgataatagccccaacgcctttaaagacgctagcagtcccgtgcctcctccccacgtcccccctccggtgccccctctacgccctcgggataggtcgagcactgagaaacacgactgggacccccccgatagaaaagtcgacacccgcaagtttagatctgaacctagaagtatatttgaatacgagccaggtaagtcctcaatactacagcatgaaagaccagccagcttataccaaagctcaatcgaccgctccttggagagaccaatgagctcagcaagtatggcatccgacttccgcaagagacgaaagtcagagcctgccgtgggccctcccaggggcctgggcgaccaaagtgccagcagaaccagtcccggaagagtggatcttcccgggagtagcactaccctgaccaaatcttttaccagttcctctccgagctcaccctcacgagccaaagaccgagaatctcccagatcatactcaagtacgctgaccgacatgggccggagtgcacccagagagaggcggggcaccccagaaaaggaaaaactgcccgccaaagccgtgtacgattttaaggctcaaacctcaaaagaactatcctttaaaaaaggagacacggtctacattctgcgtaaaatcgaccagaattggtacgagggtgaacatcacgggagggtggggatctttccaatctcatatgtagaaaagctgactccgccagagaaggcccagccagctcgcccaccgccccctgctcagcccggagaaattggcgaggctattgcgaaatacaatttcaatgcggacacgaatgtggaactctctctacggaaaggggatagggtcatactgttaaagcgcgtggaccagaattggtacgagggcaaaatcccaggaaccaacagacaaggcattttccccgtatcatacgtcgaggtggtaaagaagaatacaaagggagctgaggactatcctgaccctcccatcccacatagctattcatctgataggattcacagtctgtccagcaacaaaccacagaggcccgtgttcacccatgagaatattcaaggcgggggagaaccctttcaagccctgtataactatacgccccgcaacgaggacgaactggagctgagggagtcagacgtgattgacgtcatggagaaatgcgacgatggttggttcgtggggacatctagacgaacgaagttttttggtacctttccaggtaactacgtgaagcgcctgtag

SEQ ID NO: 58814 - DNA, 222 bp, Artificial Sequence
  derived and/or modified sequence
atgagctactaccagcggcccttcagccccagcgcctacagcctgccagcaagtctcaacagttccatcgtcatgcagcatggcacgtcgcttgactcgacagacacttacccccagcacgctcagtcacttgatggcacgacctctagctcaatcccactttaccgaagcagtgaagaggaaaaaagagtgacagtcatcaaggctccgcactatccttag

SEQ ID NO: 58815 - DNA, 171 bp, Artificial Sequence
  derived and/or modified sequence
atgagctactaccagcggcccttcagccccagcgcctacagcctgcccgcttccctaaattccagtattgtcatgcagcatgggactagcctggacagcacagacacctatccacagcacgctcagagcctggatgggaccacatcctcttcaatccctctgtaccggtag

SEQ ID NO: 58816 - DNA, 180 bp, Artificial Sequence
  derived and/or modified sequence
atgagctactaccagcggcccttcagccccagcgcctacagcctgccggcatctctgaacagcagcattgtgatgcagcacggaaccagcctggactccacggatacttacccccaacacgcacagagcttggacggcacaacctcatcttcaatcccattatatcggagcagcgaatag

SEQ ID NO: 58817 - DNA, 282 bp, Artificial Sequence
  derived and/or modified sequence
atgtcttactatcaacgtcccttctcaccatctgcgtactcactgccagcgtccctcaatagctccatcgtcatgcagcacggaacttcgctggactctactgacacttatccccaacacgcgcagtctctggacggcacaacatctagcagcatccctctttacagatcctcagaggaggaaaaacgtgtcacagtcatcaaagcaccccattatcctggaatcggacctgttgatgaatccggaatcccaactgctatccgtacgactgttgatcgatag

SEQ ID NO: 58818 - DNA, 270 bp, Artificial Sequence
  derived and/or modified sequence
atgagttattaccagaggcccttttcaccttcggcctactcactccccgctagtctgaactctagcattgtgatgcagcatggtactagcttagactccaccgacacttatccccagcacgctcagagtttagatggtacaacttcctctagcattccgctgtataggtccagcgaagaagaaaaacgggtgactgttatcaaggctccccactacccagggattggacccgtggatgagagcggcattcccacggcaatacgcacttag

SEQ ID NO: 58819 - DNA, 207 bp, Artificial Sequence
  derived and/or modified sequence
atgtcttattaccaacgaccctttagcccctcagcttacagtctgccagcatcactgaattcctcaattgtgatgcagcatggcacttctctcgattccaccgatacgtacccgcagcatgctcaaagcctggacgggactaccagtagcagcataccgttgtatcgatctagcgaggaggagaaacgggttactgtgattaaatag

SEQ ID NO: 58820 - DNA, 303 bp, Artificial Sequence
  derived and/or modified sequence
atgtcatactaccaaagacccttttccccttctgcctacagtctgccagcatccttgaattcttccattgtgatgcagcacggtaccagcctggattccaccgacacttatccccagcacgcccaaagtctggacggcactacaagttcctctattccactgtacagatcatccgaagaggagaaacgtgttactgtgattaaggcaccccactacccaggtatcgggcctgttgacgagtctggcatcccaacagcaatccgcaccacggtagaccggccaaaagactggtataagacatag

SEQ ID NO: 58821 - DNA, 1935 bp, Artificial Sequence
  derived and/or modified sequence
atgagtgtgacccttacatccgtaaaacgggtccaatcctctccaaatctcctggccgcagggagagactcgcagtcaccagattctgcctggcgcagctacaacgacggcaaccaggagaccttaaacggtgacgctacctatagctcactggccgcaaagggatttcgctcagtccgccctaatctccaggacaaacgaagtccaacccagtcccagatcacagttaatggaaattccggtggtgctgtgagcccgatgtcttactatcaaaggccattctctccctccgcatattccctgccagcctcattgaactcatcgattgtgatgcagcacggcacaagcctcgattctacagatacctacccacaacatgcacaatctctcgacggcaccactagctcctcaatacctctgtacaggtcaagcgaagaggagaagcgtgtcacggtcatcaaggcaccgcattatccaggaattggccctgtggacgagtctggaatccctacagcaattcggacgacggtcgaccgcccaaaggactggtacaagactatgttcaaacagatacatatggtacacaaaccaggtctctacaatccaccatacagcgcccagtctcatcctgcggcaaaaacgcagacctacaggcctttgtcgaagtctcattccgataactctcccaatgcgttcaaagacgcctcatctccagtgccgcctcctcacgtgccgcctccagtgccccctctcagaccaagggatagatcatccaccgagaaacacgattgggacccaccggacagaaaagtcgacaccagaaagttccggtccgaaccccgttcaattttcgaatacgaaccaggtaagtctagtatcttacagcatgagcggccagcatcactgtaccaatctagcatagataggtccctggaacgaccaatgtcaagtgcaagcatggcgtcagacttcaggaaaaggcgcaaatcagagcctgccgtggggccaccgaggggactgggcgaccagtctgcctctcgaacatctccaggtagagttgatctgcccggaagctccacaaccttgaccaaatccttcacctcttccagtcccagctcaccaagtagggcaaaagaccgggaatcaccacggagctactctagcacactgaccgacatgggcaggtccgctccgcgagagcggagaggcaccccagagaaggaaaagttacctgccaaggccgtgtatgacttcaaggcgcagacatccaaggagctgagctttaagaagggtgacacagtttacatactgcgcaaaattgatcagaattggtacgaaggggagcaccacggcagggtgggtatctttcctatatcctatgtggagaagctgactcctcccgagaaagctcagcccgctagacccccaccaccagcccagcctggagaaattggagaggctattgctaagtacaacttcaacgccgatacaaatgtcgaactgagtctgagaaagggagatcgtgtaattctgctgaagcgagtcgaccaaaattggtacgagggcaagattcctggaaccaacaggcagggaatcttcccagtatcttatgtggaggtagtcaagaaaaataccaagggagcagaagactacccagacccacctattccccatagctacagctccgatcggatccacagcttgagttccaataagccacaaagacccgtcttcacacatgagaatatccagggtggcggtgaacctttccaagccctgtataattacaccccacgcaatgaagatgaattggaattacgcgaaagtgatgttatcgacgttatggaaaagtgtgacgatgggtggttcgtgggcaccagtcggagaactaaatttttcggcacttttcctggtaactacgtgaaacggctgtag

SEQ ID NO: 58822 - DNA, 222 bp, Artificial Sequence
  derived and/or modified sequence
atgagctactatcaacggccattcagccctagtgcatacagccttcccgcaagtctgaacagcagtattgtaatgcagcacgggacttcgctcgatagcactgatacatacccccagcacgctcaaagcctggatggtacaacatcatctagcattcctctctacaggtcaagcgaggaagaaaagcgagtgactgtcattaaagcccctcattacccatag

SEQ ID NO: 58823 - DNA, 171 bp, Artificial Sequence
  derived and/or modified sequence
atgtcttattaccagcgccctttttccccatctgcttacagtctaccggcttcactcaatagctccatcgtaatgcagcatggcacgagcctcgatagcacagacacatacccacagcacgcacaatcccttgacggcaccacaagttcctccatacccctgtatcggtag

SEQ ID NO: 58824 - DNA, 180 bp, Artificial Sequence
  derived and/or modified sequence
atgtcttattaccagcgcccattctctcccagtgcttactccctgcctgcttcgctgaactcttccattgtgatgcagcacggaacctccttggatagcactgatacttacccccaacatgctcagagccttgatggtacgaccagctccagtatcccactctatcggagctccgaatag

SEQ ID NO: 58825 - DNA, 565 bp, Artificial Sequence
  derived and/or modified sequence
aacagattgtgggctcccagggcatatgtctgcacgctgaggccgaggcggagaaggggcttcctgagcgtcccagtacactgacagagggcgtgattctcagtcaccagactcagcttggagatcttacaatgatggcaatcaggagacactgaacggagatgctacatattcctctcttgcagcaaaaggttttagaagcgttcgaccaaacctacaagataaaagatcaccaactcagagccagataacagtgaatggaaactcaggaggtgccgtgagtcccatgagttactatcagaggccgttttccccctcggcatattctctcccagcctcactcaactccagcattgtcatgcagcacggcacatccctcgattccacagacacatatccccagcatgcgcagtctctggatggcaccaccagcagctctatccccctgtaccgatcctcagaggaagagaagagagtgacagtcatcaaagccccgcattacccagggatcgggcccgtggatgaatccggaatccccacagcaattagaacgacagtcgaccgg

SEQ ID NO: 58826 - DNA, 760 bp, Artificial Sequence
  derived and/or modified sequence
tggcgatctgggcaaggcattttcatccctttgcagacaaccccggctgctgttaatgctgaaaatagctcaaatgctctcagaacagtagcaccacccagcagctgggattctttccctctctcatttgcctctctcttgctttttttccttcagacacttggattggacttaatcttaaacctctggagttcaagaccttttaaaaagggctaaataaacaatctctacatgtaaaaggccactgactcctacttcctctgtatagagcaactgttgaactcagctgcctgtagggcgtgattctcagtcaccagactcagcttggagatcttacaatgatggcaatcaggagacactgaacggagatgctacatattcctctcttgcagcaaaaggttttagaagcgttcgaccaaacctacaagataaaagatcaccaactcagagccagataacagtgaatggaaactcaggaggtgccgtgagtcccatgagttactatcagaggccgttttccccctcggcatattctctcccagcctcactcaactccagcattgtcatgcagcacggcacatccctcgattccacagacacatatccccagcatgcgcagtctctggatggcaccaccagcagctctatccccctgtaccgatcctcagaggaagagaagagagtgacagtcatcaaagccccgcattacccagggatcgggcccgtggatgaatccggaatccccacagcaattagaacg

SEQ ID NO: 58827 - DNA, 574 bp, Artificial Sequence
  derived and/or modified sequence
tttttttccttcagacacttggattggacttaatcttaaacctctggagttcaagaccttttaaaaagggctaaataaacaatctctacatgtaaaaggccactgactcctacttcctctgtatagagcaactgttgaactcagctgcctgtagagcgagaataggacagactcgtataccattctgatctgggtgcatttcttcagaagggcgtgattctcagtcaccagactcagcttggagatcttacaatgatggcaatcaggagacactgaacggagatgctacatattcctctcttgcagcaaaaggttttagaagcgttcgaccaaacctacaagataaaagatcaccaactcagagccagataacagtgaatggaaactcaggaggtgccgtgagtcccatgagttactatcagaggccgttttccccctcggcatattctctcccagcctcactcaactccagcattgtcatgcagcacggcacatccctcgattccacagacacatatccccagcatgcgcagtctctggatggcaccaccagcagctctatccccctgtaccg

SEQ ID NO: 58828 - DNA, 2196 bp, Artificial Sequence
  derived and/or modified sequence
atgtccgtcacacttacttctgtgaaaagggtgcagtcttctcccaatctgctggccgcaggtagagacagtcagtcgccagacagcgcatggcgcagctacaatgatggcaaccaggagaccctgaatggtgatgcgacgtactcttccctcgccgctaaaggttttagatccgttcgccccaacctccaagataaaagatcccccactcaaagccaaatcacagtgaatggcaattcagggggggctgtatcaccgatgagttattaccagagacccttcagccctagtgcatattcactgcctgcatcccttaatagcagcattgtcatgcagcacggaacctccctggactccactgacacatatccgcagcatgctcagtctctggacggcactacgtcttcctcaatccctctctaccgcagttcagaggaagagaagagagtaacagtcattaaggcccctcactaccccggtattggacctgtggacgagagcggcatccctactgctattagaaccaccgtcgaccgacccaaggattggtataagacaatgttcaagcagatacacatggtgcacaaacccgatgacgacactgacatgtacaacaccccctacacctataatgcggggctgtataaccccccgtattcagcccaatcgcacccagcagccaagactcaaacctaccggcctcttagcaaatctcactccgacaactccccaaacgcctttaaagacgccagttccccggtgccaccacctcacgtgccaccaccagtgccccctctgagacctcgtgaccgtagcagcacagagaagcatgattgggatcctcccgatcggaaggtggacacacggaagtttcgaagtgagcctcgaagcatttttgagtatgagccaggcaaaagttccatccttcagcatgagcggcctccccctctacctactactccaactcccgtacctagagagcctggacggaaacctctgtcttcatcacgccttggagaagtgacaggctccccttcgcccccacccagatccggtgcccccaccccatctagcagggcgcccgccctctcacctacacgcccccctaagaagcctttagactacgtgcaggaccacagttctggcgtgtttaatgaggcctccctttaccagtctagcattgatcggtcgttggaaagacctatgtctagcgcatctatggcatccgattttaggaagagacggaagtccgagcctgcagtcggcccgccaagaggactgggagatcagagtgcgtctagaacgtctcccggaagagttgatctgccaggcagctcgaccactctgaccaaatcctttacttcttctagtccatcttctccttcacgcgcaaaagacagagaaagcccccgatcctactcgagcacgctgacagacatgggaagaagcgcccctagagagcgacgaggaactccagaaaaggaaaagctgcccgcgaaggcagtttatgattttaaagctcaaactagtaaagagctctcatttaagaaaggggacactgtatacattctgcgaaagatagaccagaattggtatgaaggtgagcaccatggccgcgtggggatcttcccaataagttacgtggagaaactgacacccccagagaaagcccagcctgcacgcccacccccacccgcccagccaggagagatcggcgaggctattgccaaatataacttcaatgccgacacaaatgtggaactgtccctgcgcaaaggcgatcgagtcatcctactcaagcgtgttgaccagaattggtacgaaggtaaaattcccggcacgaacaggcagggaatctttccagttagttatgttgaagtggtgaagaagaacaccaagggcgccgaggattatcctgatccgcctattccacactcatattcctccgatagaatccacagcctcagttccaataagccacagcgccccgtgtttacacatgagaacatccaggggggcggtgaaccctttcaggccctgtataattacacccctagaaatgaagatgaattggaactgcgggagagcgatgttatcgatgttatggaaaagtgcgacgacggctggttcgtaggaacatctcgacgcaccaaattctttgggaccttccccggcaattatgtcaagaggctgtag

SEQ ID NO: 58829 - DNA, 2196 bp, Artificial Sequence
  derived and/or modified sequence
atgtctgtgaccctgacctctgtgaagagggtgcagagcagccccaacctgctggccgccggccgggacagccagagcccagattctgcctggaggagctacaatgatggcaaccaggagaccctgaatggagatgccacctacagcagcctggccgccaagggcttccgctctgtgcggcccaacctgcaggacaagaggagccccacccagagccagatcaccgtgaatggaaacagcggcggcgctgtgagccccatgagctactaccagaggcccttcagccccagcgcctacagcctgcctgccagcctgaacagcagcatcgtgatgcagcacggcaccagcctggacagcacagacacctacccccagcacgcccagagcctggatggcaccaccagcagcagcatccccctgtaccgcagcagcgaggaggagaagagggtgaccgtcatcaaggccccccactacccaggcatcggccctgtggatgaaagtggcatccccacagccatccgcaccaccgtggaccggcccaaggactggtacaagaccatgttcaagcagatccacatggtgcacaagccagatgatgacacagacatgtacaacaccccctacacctacaatgccggcctgtacaaccccccctacagcgcccagagccaccctgctgccaagacccagacctaccggcccctgagcaagagccacagcgacaacagccccaatgccttcaaggatgccagcagccctgtgcccccaccccacgtgcccccacctgtgccccccctgcggccccgggacaggagcagcacagagaagcatgactgggaccccccagacaggaaggtggacaccaggaagttccgctctgagcccaggagcatctttgaatatgagcccgggaagagcagcatcctgcagcacgagcggcccccacccctgcccaccacccccacccctgtgccccgggagcccggcaggaagcccctgagcagcagccggctgggggaggtgacaggcagccccagccccccacccaggtctggggcccccacccccagcagccgggccccagccctgagccccacccggccccccaagaagcccctggactatgtgcaggaccacagcagtggagtcttcaatgaggccagcctgtaccagagcagcattgacaggagcctggagcggcccatgagcagcgcctccatggccagtgacttcaggaagaggaggaagtctgagcctgctgtgggccccccccggggcctgggggaccagagcgccagcaggaccagccctggccgggtggacctgcccggcagcagcaccaccctgaccaagagcttcaccagcagcagccccagcagccccagccgggccaaggaccgggagagccccaggagctacagcagcaccctgacagacatgggccgcagcgccccccgggagcggcggggcaccccagagaaggagaagctgcctgccaaggctgtgtatgacttcaaggcccagaccagcaaggagctgtccttcaagaagggggacacagtgtacatcctgaggaagattgaccagaactggtatgaaggagagcaccacggccgggtgggcatcttccccatctcctatgtggagaagctgaccccacctgagaaggcccagcctgcccggcccccacctccagcccagcccggggagattggagaggccatcgccaagtacaacttcaatgctgacaccaacgtggagctgagcctgaggaagggggacagagtcatcctgctgaagagggtggaccagaactggtatgagggcaagatccctggcaccaaccggcagggcatcttccctgtgtcctatgtggaggtggtgaagaagaacaccaagggagctgaggactacccagacccccccatcccccacagctacagcagtgaccgcatccacagcctgagcagcaacaagccccagaggcctgtgttcacccatgagaacatccagggcggcggggagcccttccaggccctgtacaactacaccccaagaaatgaagatgagctggagctgcgggagagtgatgtgattgatgtgatggagaagtgtgatgatggctggtttgtgggcaccagcaggaggaccaagttcttcggcaccttccctggcaactacgtgaagaggctgtag

SEQ ID NO: 58830 - DNA, 2196 bp, Artificial Sequence
  derived and/or modified sequence
atgagcgtgaccctgaccagcgtgaagcgggtgcagagcagccccaatcttctcgctgctggacgagattcccagtctccagactctgcttggcggagttacaatgatgggaaccaggaaacactaaacggagatgcaacttactcttctctggccgccaaaggcttccggagtgtaagacccaacctgcaagataaaagatcccctacccaatcccagatcaccgtgaacggcaatagtggcggagccgtgtctcctatgtcttactaccagcgtcctttttcccccagcgcttactcgctgcccgcatccttgaactctagcattgtcatgcagcacggtaccagtttagattcaacagatacctacccacagcatgctcagagcctcgatgggactacctcatcctccatccccctctatagatctagtgaggaggaaaaacgagttaccgtgattaaggctccccactacccaggaatcggccctgtcgatgaaagcggtatccctaccgcgatccgaaccacggttgatcgcccaaaagattggtacaaaacgatgttcaagcagatccacatggtgcataagcccgacgacgacacggatatgtacaacacaccttatacctataatgccggtttatataatccaccttactctgctcagagccatccggccgctaaaacccaaacatacaggcctcttagcaaaagccattcggacaattccccaaacgcctttaaggacgcatcttctccagtccctccaccgcatgttcctcctcccgtgccaccactgcgccctagggatcggtctagtacagagaaacacgactgggatcctcctgatcgcaaagtggacactcgaaaattcaggtccgaaccccggagtatctttgaatatgagcccgggaaatcttccatcttgcagcacgagcggcccccacctctgcccaccaccccaacacctgtgccaagggagccagggcgcaagccattatcctccagtcggctgggggaggtcactggttctccctcgccgcctccccgtagcggggcccctacacccagcagcagggccccagcactgtctccgacacgccccccgaagaaaccactggattatgtccaggaccattctagtggcgtgtttaacgaggcctcgttataccagtcatcgatcgaccgatccctggagcggcccatgagtagcgctagcatggcttcagatttcagaaagcgcagaaaatctgaacctgcagttggaccaccaagagggctgggagatcaaagtgcttcaaggacttcacccgggagagtggacctgcccggatccagcacgactcttactaagagtttcactagcagcagcccttccagcccctctcgagcgaaggatcgagagtcaccccgcagttacagttccactcttaccgacatgggccggtccgcccctcgcgaacgccgcggcacccccgagaaggaaaaattgcctgcgaaggcagtttatgattttaaagctcagacatccaaggaactgtctttcaagaagggcgataccgtttacatacttaggaagattgatcagaactggtacgagggcgagcaccacggacgcgttggtatattccctatctcgtacgtggagaagcttactccgccggagaaagcccagccagctagacccccaccacctgcgcagccaggggagatcggtgaggccatagcgaagtacaattttaatgctgatacgaatgtggagctgagtttgcgtaaaggcgatcgggttattttattgaaacgagttgaccagaattggtacgagggcaaaatcccaggtaccaaccggcagggaatcttccctgtcagctacgtggaggtggtaaagaagaacactaagggagccgaagattaccccgatcctccgatacctcattcatactcatcggatcgcattcacagcctatcttcaaacaagcctcagcggcccgtcttcacacacgagaacattcagggaggcggggagccatttcaggcgctatataactacaccccccgcaacgaagatgaactcgagctacgcgagtccgacgttattgatgtgatggaaaagtgcgacgatgggtggttcgtcggaaccagtagaagaactaaatttttcggaacctttcctggcaattacgtgaagcgcctatag

SEQ ID NO: 58831 - DNA, 2196 bp, Artificial Sequence
  derived and/or modified sequence
atgagcgtgacactgaccagcgtcaagagggtccagtcctctccgaatctcctcgccgcagggcgtgactcccagagccctgattccgcgtggcgctcatacaatgatggcaaccaggagacactgaacggagatgcaacctacagttcacttgctgccaaaggcttcagatcagtgcggccaaatctccaagacaaacgttcccccacgcagtcccaaatcaccgtgaatgggaacagcggaggtgctgtgtccccgatgagttactaccaacgcccttttagccctagcgcatatagtcttccggctagcctaaacagctcaattgttatgcagcacggaacttcactggactctacagacacgtacccacaacatgcacaatcccttgatggaactaccagcagcagcattccactctatcgatccagcgaagaagaaaaacgggtgaccgttatcaaggcccctcactatccaggtatcgggccagtggatgaatcaggcattccaacagccatccgtacaacagtagaccgcccaaaggattggtataaaaccatgttcaaacagattcacatggtccacaaacctgacgacgacactgatatgtacaataccccctatacctacaacgccggactctacaacccaccatatagcgcccagagccaccccgcagccaagacacagacataccgtccgctgtcaaagagccatagcgacaattctcctaatgcttttaaggatgcttcctcccccgtccctccccctcatgtcccacctcctgtccctcccctacggccacgggacaggtcatccacagagaaacacgattgggatccaccggacagaaaggtggacacacggaaatttcgctctgagccaagatccatatttgagtacgaaccgggaaaatcctcaatactccagcacgagcggccaccaccattgcccactaccccaactcccgtgccgcgagaacctggacgtaagcccctgtctagcagcaggctgggggaggttacaggtagcccatcgcctcctccgcgatccggagctcccacgccctctagccgggctccagcacttagcccaacacgaccccctaagaagcctctggattacgtacaggaccactcaagcggtgtgtttaatgaggccagtctgtatcaatcctccatcgaccgctccctggaaagacctatgagttctgcatctatggctagtgactttcggaaacgccgaaaatctgaaccggcagtcggccctcccagaggccttggcgaccagtccgcctcacggacgtcaccaggaagggtggaccttcctggatcatctacgaccctaaccaagagcttcacctccagtagcccatcttccccgagccgcgcaaaggacagagagtccccccgatcctactctagcacgctgactgacatgggacggagcgctccgcgagaacggcgaggaaccccggagaaggagaagctacccgctaaggcagtatatgatttcaaagcccaaacatctaaggagctttctttcaaaaagggtgataccgtatatatactccgcaagattgaccagaattggtacgaaggggagcaccatggcagagttggcattttccctatcagctacgtcgagaagctcactccaccagaaaaagcacagcctgccagacccccaccaccagcacagcctggtgagattggcgaggcaatcgccaaatataatttcaatgctgatactaatgtagagctgagcctcaggaagggagacagggtgatcctgctgaagagagtcgaccagaattggtatgaaggcaaaatcccaggcaccaaccgacagggtatctttccggtatcctatgttgaagtggttaagaaaaacaccaaaggagcggaggattatccagacccccctattccgcacagctactcttccgacagaatccacagtctctcctcaaacaaaccacagcgacctgtattcacccacgagaacatacaggggggaggggagccatttcaggccctttacaactacacacccaggaatgaggatgaacttgaattgcgggaatcagacgtgatcgacgttatggagaagtgcgatgacgggtggtttgttgggacttctcgtcgaaccaagttttttggaactttccctgggaattatgtcaagcggctgtag

SEQ ID NO: 58832 - DNA, 2196 bp, Artificial Sequence
  derived and/or modified sequence
atgagcgtgaccctgaccagcgtgaagagagtgcagagcagccccaacctgctggccgccggcagagacagccagagccccgacagcgcctggagaagctacaacgacggcaaccaggagaccctgaacggcgacgccacctacagcagcctggccgccaagggcttcagaagcgtgagacccaacctgcaggacaagagaagccccacccagagccagatcaccgtgaacggcaacagcggcggcgccgtgagccccatgagctactaccagagacccttcagccccagcgcctacagcctgcccgccagcctgaacagcagcatcgtgatgcagcacggcaccagcctggacagcaccgacacctacccccagcacgcccagagcctggacggcaccaccagcagcagcatccccctgtacagaagcagcgaggaggagaagagagtgaccgtgatcaaggccccccactaccccggcatcggccccgtggacgagagcggcatccccaccgccatcagaaccaccgtggacagacccaaggactggtacaagaccatgttcaagcagatccacatggtgcacaagcccgacgacgacaccgacatgtacaacaccccctacacctacaacgccggcctgtacaaccccccctacagcgcccagagccaccccgccgccaagacccagacctacagacccctgagcaagagccacagcgacaacagccccaacgccttcaaggacgccagcagccccgtgccccccccccacgtgcccccccccgtgccccccctgagacccagagacagaagcagcaccgagaagcacgactgggacccccccgacagaaaggtggacaccagaaagttcagaagcgagcccagaagcatcttcgagtacgagcccggcaagagcagcatcctgcagcacgagagacccccccccctgcccaccacccccacccccgtgcccagagagcccggcagaaagcccctgagcagcagcagactgggcgaggtgaccggcagccccagccccccccccagaagcggcgcccccacccccagcagcagagcccccgccctgagccccaccagaccccccaagaagcccctggactacgtgcaggaccacagcagcggcgtgttcaacgaggccagcctgtaccagagcagcatcgacagaagcctggagagacccatgagcagcgccagcatggccagcgacttcagaaagagaagaaagagcgagcccgccgtgggcccccccagaggcctgggcgaccagagcgccagcagaaccagccccggcagagtggacctgcccggcagcagcaccaccctgaccaagagcttcaccagcagcagccccagcagccccagcagagccaaggacagagagagccccagaagctacagcagcaccctgaccgacatgggcagaagcgcccccagagagagaagaggcacccccgagaaggagaagctgcccgccaaggccgtgtacgacttcaaggcccagaccagcaaggagctgagcttcaagaagggcgacaccgtgtacatcctgagaaagatcgaccagaactggtacgagggcgagcaccacggcagagtgggcatcttccccatcagctacgtggagaagctgaccccccccgagaaggcccagcccgccagaccccccccccccgcccagcccggcgagatcggcgaggccatcgccaagtacaacttcaacgccgacaccaacgtggagctgagcctgagaaagggcgacagagtgatcctgctgaagagagtggaccagaactggtacgagggcaagatccccggcaccaacagacagggcatcttccccgtgagctacgtggaggtggtgaagaagaacaccaagggcgccgaggactaccccgacccccccatcccccacagctacagcagcgacagaatccacagcctgagcagcaacaagccccagagacccgtgttcacccacgagaacatccagggcggcggcgagcccttccaggccctgtacaactacacccccagaaacgaggacgagctggagctgagagagagcgacgtgatcgacgtgatggagaagtgcgacgacggctggttcgtgggcaccagcagaagaaccaagttcttcggcaccttccccggcaactacgtgaagagactgtag

SEQ ID NO: 58833 - protein, 661 aa, Artificial Sequence
  derived and/or modified sequence
MNTGRDSQSPDSAWRSYNDGNQETLNGDATYSSLAAKGFRSVRPNLQDKRSPTQSQITVNGNSGGAVSPMSYYQRPFSPSAYSLPASLNSSIVMQHGTSLDSTDTYPQHAQSLDGTTSSSIPLYRSSEEEKRVTVIKAPHYPGIGPVDESGIPTAIRTTVDRPKDWYKTMFKQIHMVHKPDDDTDMYNTPYTYNAGLYNPPYSAQSHPAAKTQTYRPLSKSHSDNSPNAFKDASSPVPPPHVPPPVPPLRPRDRSSTEKHDWDPPDRKVDTRKFRSEPRSIFEYEPGKSSILQHERPPPKKPLDYVQDHSSGVFNEASLYQSSIDRSLERPMSSASMASDFRKRRKSEPAVGPPRGLGDQSASRTSPGRVDLPGSSTTLTKSFTSSSPSSPSRAKDRESPRSYSSTLTDMGRSAPRERRGTPEKEKLPAKAVYDFKAQTSKELSFKKGDTVYILRKIDQNWYEGEHHGRVGIFPISYVEKLTPPEKAQPARPPPPAQPGEIGEAIAKYNFNADTNVELSLRKGDRVILLKRVDQNWYEGKIPGTNRQGIFPVSYVEVVKKNTKGAEDYPDPPIPHSYSSDRIHSLSSNKPQRPVFTHENIQGGGEPFQALYNYTPRNEDELELRESDVIDVMEKCDDGWFVGTSRRTKFFGTFPGNYVKRL

SEQ ID NO: 58834 - DNA, 1986 bp, Artificial Sequence
  derived and/or modified sequence
atgaacaccggcagagacagccagagccccgacagcgcctggagaagctacaacgacggcaaccaggagaccctgaacggcgacgccacctacagcagcctggccgccaagggcttcagaagcgtgagacccaacctgcaggacaagagaagccccacccagagccagatcaccgtgaacggcaacagcggcggcgccgtgagccccatgagctactaccagagacccttcagccccagcgcctacagcctgcccgccagcctgaacagcagcatcgtgatgcagcacggcaccagcctggacagcaccgacacctacccccagcacgcccagagcctggacggcaccaccagcagcagcatccccctgtacagaagcagcgaggaggagaagagagtgaccgtgatcaaggccccccactaccccggcatcggccccgtggacgagagcggcatccccaccgccatcagaaccaccgtggacagacccaaggactggtacaagaccatgttcaagcagatccacatggtgcacaagcccgacgacgacaccgacatgtacaacaccccctacacctacaacgccggcctgtacaaccccccctacagcgcccagagccaccccgccgccaagacccagacctacagacccctgagcaagagccacagcgacaacagccccaacgccttcaaggacgccagcagccccgtgccccccccccacgtgcccccccccgtgccccccctgagacccagagacagaagcagcaccgagaagcacgactgggacccccccgacagaaaggtggacaccagaaagttcagaagcgagcccagaagcatcttcgagtacgagcccggcaagagcagcatcctgcagcacgagagacccccccccaagaagcccctggactacgtgcaggaccacagcagcggcgtgttcaacgaggccagcctgtaccagagcagcatcgacagaagcctggagagacccatgagcagcgccagcatggccagcgacttcagaaagagaagaaagagcgagcccgccgtgggcccccccagaggcctgggcgaccagagcgccagcagaaccagccccggcagagtggacctgcccggcagcagcaccaccctgaccaagagcttcaccagcagcagccccagcagccccagcagagccaaggacagagagagccccagaagctacagcagcaccctgaccgacatgggcagaagcgcccccagagagagaagaggcacccccgagaaggagaagctgcccgccaaggccgtgtacgacttcaaggcccagaccagcaaggagctgagcttcaagaagggcgacaccgtgtacatcctgagaaagatcgaccagaactggtacgagggcgagcaccacggcagagtgggcatcttccccatcagctacgtggagaagctgaccccccccgagaaggcccagcccgccagaccccccccccccgcccagcccggcgagatcggcgaggccatcgccaagtacaacttcaacgccgacaccaacgtggagctgagcctgagaaagggcgacagagtgatcctgctgaagagagtggaccagaactggtacgagggcaagatccccggcaccaacagacagggcatcttccccgtgagctacgtggaggtggtgaagaagaacaccaagggcgccgaggactaccccgacccccccatcccccacagctacagcagcgacagaatccacagcctgagcagcaacaagccccagagacccgtgttcacccacgagaacatccagggcggcggcgagcccttccaggccctgtacaactacacccccagaaacgaggacgagctggagctgagagagagcgacgtgatcgacgtgatggagaagtgcgacgacggctggttcgtgggcaccagcagaagaaccaagttcttcggcaccttccccggcaactacgtgaagagactgtag

SEQ ID NO: 58835 - DNA, 1986 bp, Artificial Sequence
  derived and/or modified sequence
atgaatacaggcagagactctcagtcacccgatagcgcttggagatcatacaacgacgggaaccaggagaccctcaacggtgatgcgacatactctagcctggcagcaaagggttttcgatctgttaggcctaacttgcaggacaagaggtcgcccacccaatcccaaattaccgtcaatggtaattcagggggggcagtatctcctatgtcctactaccagaggccgttttccccatcggcatattcactgccagcttctcttaatagttccatcgtcatgcaacacggtacctccctggactctacggacacctacccacagcatgcccagagcctagacggaactacatcttcgtctattcctctgtaccggagcagtgaggaggaaaaacgggttaccgtgattaaggctccccactatcccggaatcggccccgtggacgaaagtggtatccccaccgccatccggacgaccgtcgatcgcccaaaggactggtataaaacgatgttcaaacaaattcatatggtgcataagcctgacgacgacaccgacatgtacaacaccccgtacacatacaatgccggcctgtataaccctccctattccgcccaatctcatccggctgctaagactcagacatataggcctttatccaagtctcactccgataattcgccaaatgcttttaaagacgctagtagccccgtgcccccccctcacgtaccaccccctgtcccgcccctccggccacgggacagatccagtacagagaagcacgactgggatccccccgacaggaaagtggatacgaggaaatttagatccgagccaagaagcatctttgagtacgagcctggcaaaagctccatcttgcagcatgaaagaccacctcctaagaaacctctcgactatgttcaggaccactcctcaggtgttttcaacgaggccagcctgtatcaatctagcatcgatcggagtcttgagcggccaatgtctagcgcctctatggcgtccgacttccggaagcgcaggaaaagcgaaccagcggtggggcctccaagaggtctgggcgatcagagtgcctcaaggacttccccagggagggttgatcttcccggatcttcaacgactctgacgaagagttttaccagttccagtcctagcagcccctctagagcaaaagatagggaatctcctcgctcctactcttctacgctcacagacatgggaagaagtgcccctcgcgagcgccggggcacccccgaaaaagagaagctaccagcaaaggctgtgtacgattttaaggctcaaacgagtaaggagttatcttttaagaagggggatacggtttatatcctgaggaaaatcgaccagaactggtatgagggcgaacaccacggccgggtgggaatttttccgatctcctacgtggaaaaattgactccgcccgaaaaagcccaacccgccagacctcctcctcctgcccaaccaggcgagatcggcgaagctatagccaaatataattttaatgctgacactaacgtcgagctgtcgctcagaaaaggggacagagtgattctcttaaaacgtgtggatcagaactggtacgagggcaaaatacccggcaccaatcgacaaggcattttcccagtttcttatgtagaggtcgtcaagaagaacacaaagggagctgaggattaccccgatcctccaatcccgcatagttactctagtgaccgcattcactcgctgtccagcaacaagcctcagcgccctgtgtttacacatgagaacatccaggggggaggagagcctttccaagccctgtataattacacacctcgcaatgaggatgaactggagttaagagagagcgatgtaatcgacgttatggagaagtgcgacgacggatggttcgtcggtacctcaagaaggacaaagttcttcggcactttcccaggcaactacgttaagcgtctatag

SEQ ID NO: 58836 - DNA, 1986 bp, Artificial Sequence
  derived and/or modified sequence
atgaacacaggccgggacagccagagcccagacagcgcctggaggagctacaatgatggcaaccaggagaccctgaatggagatgccacctacagcagcctggccgccaagggcttccgctctgtgcggcccaacctgcaggacaagaggagccccacccagagccagatcaccgtgaatggaaattctggaggagctgtgagccccatgagctactaccagaggcccttcagccccagcgcctacagcctgcctgccagcctgaacagcagcatcgtgatgcagcacggcaccagcctggacagcacagacacctacccccagcacgcccagagcctggatggcaccaccagcagcagcatccccctgtaccgcagcagcgaggaggagaagagggtgaccgtcatcaaggccccccactacccaggcatcggccctgtggatgagagcggcatccccacagccatccgcaccaccgtggaccggcccaaggactggtacaagaccatgttcaagcagatccacatggtgcacaagccagatgatgacacagacatgtacaacaccccctacacctacaatgccggcctgtacaaccccccctacagcgcccagagccaccctgctgccaagacccagacctaccggcccctgagcaagagccacagcgacaacagccccaatgccttcaaggatgccagcagccctgtgcccccacctcatgtgcccccacctgtgccccccctgcggccccgggacaggagcagcacagagaagcatgactgggaccccccagacaggaaggtggacaccaggaagttccgctctgagcccaggagcatctttgaatatgagcccgggaagagcagcatcctgcagcacgagcggcccccacccaagaagcccctggactatgtgcaggaccacagcagtggagtcttcaatgaggccagcctgtaccagagcagcattgacaggagcctggagcggcccatgagcagcgcctccatggccagtgacttcaggaagaggaggaagtctgagcctgctgtgggccccccccggggcctgggggaccagagcgccagcaggaccagccctggccgggtggacctgcccggcagcagcaccaccctgaccaagagcttcaccagcagcagccccagcagccccagccgggccaaggaccgggagagccccaggagctacagcagcaccctgacagacatgggccgcagcgccccccgggagcggcggggcaccccagagaaggagaagctgcctgccaaggctgtgtatgacttcaaggcccagaccagcaaggagctgtccttcaagaagggggacacagtgtacatcctgaggaagattgaccagaactggtatgaaggagagcaccacggccgggtgggcatcttccccatctcctatgtggagaagctgaccccacctgagaaggcccagcctgcccggcccccacctccagcccagcccggggagattggagaggccatcgccaagtacaacttcaatgctgacaccaacgtggagctgagcctgaggaagggggacagagtcatcctgctgaagagggtggaccagaactggtatgagggcaagatccctggcaccaaccggcagggcatcttccctgtgtcctatgtggaggtggtgaagaagaacaccaagggagctgaggactacccagacccccccatcccccacagctacagcagtgaccgcatccacagcctgagcagcaacaagccccagaggcctgtgttcacccatgagaacatccagggcggcggggagcccttccaggccctgtacaactacaccccaagaaatgaagatgagctggagctgcgggagagtgatgtgattgatgtgatggagaagtgtgatgatggctggtttgtgggcaccagcaggaggaccaagttcttcggcaccttccctggcaactacgtgaagaggctgtag

SEQ ID NO: 58837 - DNA, 1986 bp, Artificial Sequence
  derived and/or modified sequence
atgaacaccggccgggacagccagagccccgacagcgcctggcggtcctataacgatggaaaccaagaaacgctaaatggcgacgcaacctattcttccctggctgccaaaggcttcaggtccgtgcgccccaatctgcaggacaagaggtcacctacacagagtcaaatcacagtgaatggcaattctgggggagccgtgagtcctatgtcctactaccaaaggcccttcagtcccagtgcctactcacttcctgcctctctgaactcctccatcgttatgcagcatggcaccagcctggactccactgatacgtacccccagcacgcacagagcctggacgggactacttctagttccattcccctgtacaggagttccgaagaggagaagagagtgactgtaatcaaagcaccgcattatccggggatcggaccagtcgatgagagcgggatacccactgctatcagaacaactgtcgaccgtcccaaagattggtacaagacaatgttcaaacagatccacatggtgcataaacctgacgacgatacggatatgtataacaccccctatacctacaatgcgggtttgtacaacccaccgtatagcgctcagagtcaccctgccgcgaagactcagacctaccgccctctctctaagagtcattcagacaatagcccaaacgccttcaaagatgcaagctccccagtgccccctccccatgtgcctcctccagtccctccactgcgcccgcgggaccggtcgtccacagaaaagcacgactgggacccccctgacagaaaggtggataccagaaagttcagatctgagcccaggtccatctttgagtacgaaccaggtaagagtagcattctgcagcacgaacggcctccccccaaaaagcctctcgactacgtacaggatcattcctctggggtgttcaacgaggccagtctgtaccagagctccatcgacaggtccttagagagacccatgtcaagcgccagcatggcatctgacttcagaaaaaggcgcaagtcagagcccgctgttggtcctcccagagggttaggagatcagtccgcatcaaggacgtctccaggaagagttgacctacccggctccagtacaacacttactaaatcgttcactagttcatcacccagctctcctagccgggctaaagatcgcgaatccccccgcagctactcttccacccttacggatatggggcggtcagccccccgggagagaaggggcacgcccgagaaggaaaaattacccgccaaagctgtttatgactttaaagctcagacctccaaagagctgtctttcaagaagggagacaccgtgtacattctgcgcaaaatcgaccagaattggtatgaaggtgaacaccacggacgcgtgggcatatttcccatcagttacgtggagaagctgacccccccagaaaaagcccaacccgcgcgcccccctccacccgcacagcccggagaaattggggaagccatcgccaagtataattttaatgccgacaccaacgttgaactctctttgcggaagggagatagagtgatcctgctcaagcgtgttgaccagaattggtatgaaggaaagatccctggcaccaatagacagggtatctttccggtttcatacgtggaagttgtgaaaaagaataccaagggtgcagaagactatccagatcccccaatccctcacagttacagctccgatcggatacacagcctctcatcaaataagccacagaggcctgtgttcacccacgagaacatacaaggcggcggcgagcccttccaggccctctacaactatacgccccgaaatgaggatgagctggagctgagggagagtgatgtgatcgatgtgatggaaaagtgtgatgatggctggtttgtcggcacctcaaggcgcacaaaattcttcgggacctttcccggcaactatgtcaaacggttgtag

SEQ ID NO: 58838 - DNA, 1986 bp, Artificial Sequence
  derived and/or modified sequence
atgaataccgggcgagactcacagagtcctgactctgcctggcggtcctataatgacgggaatcaggaaacactgaatggagatgcgacttattcctcattggctgccaagggttttaggtccgtcagaccaaacctacaggacaagcgctcgcccacccagagccaaatcaccgttaatggaaatagtggtggggctgttagccctatgagttattaccaacgcccattttccccctccgcctactccctgccggcatcattgaattcaagcatcgtaatgcagcatgggacttcactcgattccaccgacacatatccacagcacgcccaaagtcttgacggaacgacatcgtcctcaatcccgctgtaccgcagcagcgaggaggagaagcgagtgacagtaatcaaggccccacactaccccggaattgggcctgtggatgagagcggcattcctaccgcgataagaaccaccgtcgatcgacctaaggactggtacaagacaatgttcaaacagattcatatggtgcataaaccagatgatgatactgatatgtataacactccctacacatacaacgccggattatacaaccccccatactctgctcaatcccatccagccgctaagacccagacatacaggccactgtcaaaatctcattctgacaattcacccaatgccttcaaagacgccagcagtcctgtgcctccccctcatgtcccaccacctgtgcccccattaagacccagggatcgttcctctacggagaagcacgattgggacccccctgacaggaaggtcgatacccgaaaattcaggagtgagcctaggtccattttcgagtacgaaccaggtaagtcatctatcctgcagcacgagaggcctcccccaaagaagcctcttgactatgtgcaagatcattccagcggggtgtttaatgaagccagtctgtatcagtcatccatagatagatcacttgagaggcccatgtcctcagccagcatggcatccgatttcagaaagaggcgaaagtcagaacccgcagttgggcctcctcgcggactgggtgatcagtccgcttctagaactagtcctggaagggtggatctgcctggatcaagtaccacccttaccaaatcattcacaagttctagtccctcgtcaccatcccgggcaaaagatagagagtccccgcgtagctactcttccaccctgacagatatgggcaggtcagcccctcgcgagagaagagggactcccgagaaggagaagctccccgctaaggcagtttacgactttaaggcccagacaagcaaagagctatcattcaaaaagggagataccgtctacatattgagaaaaatcgaccagaactggtatgagggcgaacatcacgggcgtgtgggaattttccccatttcttacgtcgaaaaactgaccccccctgagaaggcccagcccgctaggccacccccacctgcgcagcccggagagatcggtgaagcgattgccaagtataactttaatgcagacaccaatgtcgagctatcactccgaaaaggagatagagtgatccttctgaagcgggttgatcaaaactggtacgaaggaaagattccaggtaccaacagacaggggatctttccagtctcatacgtcgaggtcgttaagaaaaacactaaaggggcagaagattatccagacccgccaattccgcactcttatagctcagatagaatccacagcctgtccagcaacaaacctcagaggcccgtgtttacacacgagaatatccaggggggaggggaacctttccaggccttgtataactatacacccaggaatgaggacgaactcgagctgcgggagagtgacgttatcgacgtgatggaaaagtgtgatgacgggtggtttgtgggtacatctcggagaactaagttcttcggcaccttccctgggaactacgtgaagaggttgtag

SEQ ID NO: 58839 - DNA, 4356 bp, Artificial Sequence
  derived and/or modified sequence
aagcagataggtttcagagataaagagtgaaaccaaaaacaccgcacacctcatccaaatctgcgctcatacttgcagcaaatgtttgctgtcagttgcttcataataacagcacagaccccgaattgcaggaggaattgcctggtagaaaactgaagactttaataacaaactctccaaggtgaaaatgaacacagggcgtgattctcagtcaccagactcagcttggagatcttacaatgatggcaatcaggagacactgaacggagatgctacatattcctctcttgcagcaaaaggttttagaagcgttcgaccaaacctacaagataaaagatcaccaactcagagccagataacagtgaatggaaactcaggaggtgccgtgagtcccatgagttactatcagaggccgttttccccctcggcatattctctcccagcctcactcaactccagcattgtcatgcagcacggcacatccctcgattccacagacacatatccccagcatgcgcagtctctggatggcaccaccagcagctctatccccctgtaccgatcctcagaggaagagaagagagtgacagtcatcaaagccccgcattacccagggatcgggcccgtggatgaatccggaatccccacagcaattagaacgacagtcgaccggcccaaggactggtacaagacgatgtttaagcaaattcacatggtgcacaagccggatgatgacacagacatgtataatactccttatacatacaatgcaggtctgtacaacccaccctacagtgctcagtcacaccctgctgcaaagacccaaacctacagacctctttccaaaagccactccgacaacagccccaatgcctttaaggatgcgtcctccccagtgcctcccccacatgttccacctccagtcccgccgcttcgaccaagagatcggtcttcaacagaaaagcatgactgggatcctccagacagaaaagtggacacaagaaaatttcggtctgagccaaggagtatttttgaatatgaacctggcaagtcatcaattcttcagcatgaaagaccacctcctaaaaagcctctggactatgttcaagatcattcttctggtgttttcaatgaggcctccttgtatcagtcctctatagacagaagcctggaaagacccatgagttctgcaagcatggccagtgacttcaggaagcggaggaagagcgagcctgcagtgggtccaccacggggcttgggagatcaaagtgcgagcaggactagcccaggccgagtggacctcccaggatcaagcaccactcttacaaagtctttcactagctcttctccttcttccccatcaagagcaaaagaccgtgagtcccctagaagttactcatccactttgactgacatggggagaagtgcaccaagggaaagaagaggaactccagaaaaagagaaattgcctgcaaaagctgtttatgattttaaggctcagacatctaaggagttgtcatttaagaaaggagatactgtctacatcctcaggaaaattgatcaaaattggtatgagggagaacaccacgggagagtgggcatcttcccgatctcatacgtagagaaactcacacctcctgagaaagcacagcctgcaagaccacctccgccagcccagcccggagaaatcggagaagctatagccaaatacaacttcaacgcagacacaaatgtggagctgtcactgagaaagggagatagagttattcttcttaaaagagttgatcaaaactggtatgaaggtaaaatcccaggaaccaacagacaaggcatcttccctgtttcctatgtggaggtcgtcaagaagaacacaaaaggtgctgaggactaccctgaccctccaataccccacagctattctagtgataggattcacagcttgagctcaaataagccacagcgtcctgtgtttactcatgaaaatattcaaggtgggggggaaccgtttcaggctctgtataactatactcccaggaatgaagatgagctggagctcagagaaagtgatgtcattgatgtcatggaaaagtgtgatgacggctggtttgtggggacctcaagaagaaccaaattctttggtactttccccggaaactacgtcaagaggctgtgaattgcgctccctccttctgtagaggccgcctgccagccatgcacctgcgtcaacgcgcctgaaacaccccgcgggcctcccgttgtcatgccttacggtttccaatgcgccgtcaccatctccacctgccaccaaaccaccagcagagtagccgccgctgctgtgagcctggggacgacatggcaggctggtccccctccgtgaaagtgtggattcctacttcctgctctaagctttgacacgtcaaaatgtgggatcagaaagaaaaaaatcatgatatttaaaaatggtcaaatatttgaggcaaaaaaaaaaaaaaaaagtgtctccaggaggctgtccagcctcgtggctccatttcaacatctccccccaggcgatgttctcccccaagacgaccagaaaattgtttattggggaatgctgtggtttgcattttcatattcttcgcttggcagtgtgtattcttttcacaagtttgcctagtgtcttggtttacacaatatgacaactgtaactgtactttagctattgtttgcctgcacatacatgttgtaatatgcacagtgattacaacctttaaagcaagaggaggcgagttaatttggatgagtgtgattttgctgattgaatgtgagttttcaaataggagtctttttctgcaatttgtttgcattttttagaagtgcaaacagtaagtaaataaaagccttcggtaataatcatgacaatacaagaggctgagctaggctacaggggaaaactattgtgttgtaaagttgcatcgctattttatattaaaatgtaatgatcagcatcatgaacaatgagctcttagtgttttatttatctgaaaaaatgtaagtaaaagcagtgttagtgagaggtgcaaagaattattctaacagacacctgaaagtatctgtaagcaatactagtaggtaagatttcactgtgtgtacacatacacatttgagattgtatgagaacatataatccatatgatatgttgtacattttatggaaatgtaatagaatctcacacattattttatagaaatagagtacagaagcatcacaagtattaaagttggttttagcaaggattaggattactacaattatttttactataataattatttttcttctatggaactcagaatcctggctacatttgaggacaggaatatgttgagcctgattttcctggtgtgtgtaaaatatttcctaggaataaattaggcactttttagaagcaatgttaaatcattcaggttttattttctgccctgaagcagaaatttaaaaaatgatattgggacctggaaggtttaatatggttcacagtgcctgaattacacctgctccgaaaactagctttgtatttcttatgactttgcataagaactgttcatctttggatcttgagcaccttacagataaaactttttatggcatctctttcatggacagtgatattgatcttttcacaatgtacgtagcctctagaattttgtacatatgtttgctctttttttgtacagactagttgttgagaaaacaggggcgtttcctaatttggtctttatcctgcgacaacactttcagcagactagcctctccttatctcacagatcacaagcacccctagatagtgtgattctgtcagatagcatttatgcaaaaatctatgaagttaaaagatcgtagaagccaaatgaaatgtacatatctactgactgatgacaagggaatttcattaggaagaaggtaaagaaacatcgttgagtagcctaccttgatttctgtcaagttcataaccagcttcatattttaaaggcttcaggtttgaaattaagtcaactgcatgcagctttgctgataaatgaataattctctttgatgccatttatgagaaaagacttcaatatctgttgcctgtcatatttaagaaaaattactgtttctactctctgtatctgattttaaaagaaaaaactattcatacctggcttccaggtaattgactttgaattcttacaagcaaaggtcattgtgtttttcttgaatagacatctaataaattttgcttggaagtatacttcagtttttcttcttgacatttatctttataaaaattgtgtattttattccaacttgttaaactaagagaaaatgca

SEQ ID NO: 58840 - DNA, 2475 bp, Artificial Sequence
  derived and/or modified sequence
atgtacagcaacgaggacagcagacagaccatcgtgtacagcgaggagagcaacaccaccatgagctacacccagaagatcaccaaccccctgcccgccgccagcagcaccgaccccgcccccttcgccaacatcaacacccccgtgctgcaggaggactacagacaggacagccagaccagaagaatcagcaccctgaagctgacccacaaccaggacctgggcagcagcagccccatcagcaccccccagttcagcaagagcgtggaggtgcccagcttcctgaagagacccagaagcctgacccccaaccccgtgcccgagacccacaccgccagcctgagcatccagatcgcccccctgagcggccaggacctggagagccacaagcagctgcccgagctgagccccgagaccgccaagatccccctgcagcaggagagacagaagagcgccgtggccgccgccagccagagcagcgactgcagagtgagccagatcaccgtgaacggcaacagcggcggcgccgtgagccccatgagctactaccagagacccttcagccccagcgcctacagcctgcccgccagcctgaacagcagcatcgtgatgcagcacggcaccagcctggacagcaccgacacctacccccagcacgcccagagcctggacggcaccaccagcagcagcatccccctgtacagaagcagcgaggaggagaagagagtgaccgtgatcaaggccccccactaccccggcatcggccccgtggacgagagcggcatccccaccgccatcagaaccaccgtggacagacccaaggactggtacaagaccatgttcaagcagatccacatggtgcacaagcccgacgacgacaccgacatgtacaacaccccctacacctacaacgccggcctgtacaaccccccctacagcgcccagagccaccccgccgccaagacccagacctacagacccctgagcaagagccacagcgacaacagccccaacgccttcaaggacgccagcagccccgtgccccccccccacgtgcccccccccgtgccccccctgagacccagagacagaagcagcaccgagaagcacgactgggacccccccgacagaaaggtggacaccagaaagttcagaagcgagcccagaagcatcttcgagtacgagcccggcaagagcagcatcctgcagcacgagagacccccccccctgcccaccacccccacccccgtgcccagagagcccggcagaaagcccctgagcagcagcagactgggcgaggtgaccggcagccccagccccccccccagaagcggcgcccccacccccagcagcagagcccccgccctgagccccaccagaccccccaagaagcccctggactacgtgcaggaccacagcagcggcgtgttcaacgaggccagcctgtaccagagcagcatcgacagaagcctggagagacccatgagcagcgccagcatggccagcgacttcagaaagagaagaaagagcgagcccgccgtgggcccccccagaggcctgggcgaccagagcgccagcagaaccagccccggcagagtggacctgcccggcagcagcaccaccctgaccaagagcttcaccagcagcagccccagcagccccagcagagccaaggacagagagagccccagaagctacagcagcaccctgaccgacatgggcagaagcgcccccagagagagaagaggcacccccgagaaggagaagctgcccgccaaggccgtgtacgacttcaaggcccagaccagcaaggagctgagcttcaagaagggcgacaccgtgtacatcctgagaaagatcgaccagaactggtacgagggcgagcaccacggcagagtgggcatcttccccatcagctacgtggagaagctgaccccccccgagaaggcccagcccgccagaccccccccccccgcccagcccggcgagatcggcgaggccatcgccaagtacaacttcaacgccgacaccaacgtggagctgagcctgagaaagggcgacagagtgatcctgctgaagagagtggaccagaactggtacgagggcaagatccccggcaccaacagacagggcatcttccccgtgagctacgtggaggtggtgaagaagaacaccaagggcgccgaggactaccccgacccccccatcccccacagctacagcagcgacagaatccacagcctgagcagcaacaagccccagagacccgtgttcacccacgagaacatccagggcggcggcgagcccttccaggccctgtacaactacacccccagaaacgaggacgagctggagctgagagagagcgacgtgatcgacgtgatggagaagtgcgacgacggctggttcgtgggcaccagcagaagaaccaagttcttcggcaccttccccggcaactacgtgaagagactgtag

SEQ ID NO: 58841 - DNA, 2475 bp, Artificial Sequence
  derived and/or modified sequence
atgtactccaatgaggacagcagacagactatagtgtatagcgaagaatctaacaccactatgagttacactcaaaaaattaccaatcctttgccggccgcttcatcgacagaccctgctcccttcgccaatatcaatactcctgtgctgcaggaagattaccgccaggacagtcagacgagaaggatctctacacttaagctgactcataaccaggacctgggaagctcctctcctatttccactccacagttttctaaaagtgtcgaggtgccatcattccttaagaggcccaggtcgctgaccccaaaccccgtgcctgaaactcataccgcatcgttgagcattcaaatagcccccctttccggacaagatctcgaaagtcacaagcagctgccggagctgagccctgaaacagccaagattcctctgcagcaagagagacagaagagcgcagtcgctgccgcatctcaatcttctgactgtcgcgtgtcgcagatcacggtcaacggaaacagtgggggtgccgtgtccccgatgtcatactatcaacgcccgttttcacccagcgcttatagcttgcccgcgagtctcaactccagcatcgtcatgcagcacggcacaagtctcgatagcacagatacataccctcagcatgctcagtctctcgacggcacaaccagctctagtatccccctatacagatccagcgaggaagaaaaaagggtaaccgttatcaaagcaccacattacccaggcatagggcccgtggatgagtccggcataccgaccgccatccgcaccaccgtggataggccaaaggactggtacaaaacaatgtttaaacagattcacatggtccacaagcccgatgatgacaccgatatgtacaataccccatacacctataacgcagggctctacaatcctccatactcagctcagtcacatcccgcggcaaaaactcagacttataggcccctctctaagtctcactcggacaattcccctaacgcatttaaggatgcctccagccccgtcccgccacctcacgtacctccccctgttcctccactgcgtccccgcgaccggagctcaaccgagaagcacgactgggatccacctgatagaaaagttgatactaggaaatttcgctctgagccgcgttccatcttcgagtacgagcccgggaaaagcagtatcctgcagcatgaaagaccaccccctcttccaaccacacccacacccgtgccccgcgaaccaggccgaaagccgcttagcagttctcgtctcggggaagttactgggagtcctagcccaccgccccgttccggcgcaccaactccttccagtagagcacctgcgctatcccctactcgcccccctaaaaaaccgctggactatgttcaggaccacagcagcggcgtcttcaatgaggcctcactgtaccaatcctccattgaccgcagcctcgaacgccccatgagttccgctagtatggcctccgactttaggaagcgccggaaatcagagcccgccgttggccctccccgtgggttaggcgaccagtccgcctcaagaacgtctcccgggagagtggacctgcctgggtcgtcaacaacgctcacgaaatccttcacaagttcaagtccttcctcgccctcgcgcgccaaggacagggagtcaccacgctcgtatagctccacccttactgacatgggacgaagcgcccccagagaaaggcgcgggacacccgagaaggaaaagttacctgccaaagctgtgtatgatttcaaggctcagacatctaaagagttgagttttaagaaaggcgacaccgtgtacatacttcgcaaaatcgatcaaaactggtatgaaggtgaacatcacggcagggtggggatcttcccaattagctatgtggagaagctcactccacccgaaaaggcacagccagcccgcccacctcccccagcccagcccggggaaattggagaggccattgccaaatacaatttcaatgctgataccaatgtcgaattatcactccgaaagggagatcgggtgatactgctcaagcgtgtggaccaaaactggtatgaaggaaagattccaggcacgaaccgacagggcatcttcccagtgagctatgtggaagtcgtaaaaaaaaatacaaaaggcgcagaggactatccggatcctccaatccctcacagctacagctccgatcggatacattctctctccagcaacaagccacagcgccctgtgttcacacatgagaacattcagggaggaggcgagcctttccaagcgctgtataactacaccccacggaacgaagatgaactggaactgcgtgaatcagacgtaatcgacgtcatggagaagtgcgacgatggctggttcgtaggcaccagcaggcgaaccaagttcttcggaactttcccaggaaattacgtgaagcgtttatag

SEQ ID NO: 58842 - DNA, 2475 bp, Artificial Sequence
  derived and/or modified sequence
atgtacagcaatgaagacagccggcagaccatcgtgtacagcgaggagagcaacaccaccatgagctacacccagaagatcaccaaccccctgcctgctgccagcagcacagatcctgccccctttgccaacatcaacacccctgtgctgcaggaggactaccggcaggacagccagacccggcgcatcagcaccctgaagctgacccacaaccaggacctgggcagcagcagccccatcagcaccccccagttcagcaagtctgtggaggtgcccagcttcctgaagaggcccaggagcctgacccccaaccctgtgcctgagacccacacagccagcctgagcatccagatcgcccccctgagcggccaggacctggagagccacaagcagctgcctgagctgagccctgagacagccaagatccccctgcagcaggagcggcagaagtctgctgtggccgccgccagccagagcagtgactgccgggtgtcccagatcaccgtgaatggaaattctggaggagctgtgagccccatgagctactaccagaggcccttcagccccagcgcctacagcctgcctgccagcctgaacagcagcatcgtgatgcagcacggcaccagcctggacagcacagacacctacccccagcacgcccagagcctggatggcaccaccagcagcagcatccccctgtaccgcagcagcgaggaggagaagagggtgaccgtcatcaaggccccccactacccaggcatcggccctgtggatgagagcggcatccccacagccatccgcaccaccgtggaccggcccaaggactggtacaagaccatgttcaagcagatccacatggtgcacaagccagatgatgacacagacatgtacaacaccccctacacctacaatgccggcctgtacaaccccccctacagcgcccagagccaccctgctgccaagacccagacctaccggcccctgagcaagagccacagcgacaacagccccaatgccttcaaggatgccagcagccctgtgcccccacctcatgtgcccccacctgtgccccccctgcggccccgggacaggagcagcacagagaagcatgactgggaccccccagacaggaaggtggacaccaggaagttccgctctgagcccaggagcatctttgaatatgagcccgggaagagcagcatcctgcagcacgagcggcccccacccctgcccaccacccccacccctgtgccccgggagcccggcaggaagcccctgagcagcagccggctgggggaggtgacaggcagccccagccccccacccaggtctggggcccccacccccagcagccgggccccagccctgagccccaccaggcctcccaagaagcccctggactatgtgcaggaccacagcagcggggtcttcaatgaggccagcctgtaccagagcagcattgacaggagcctggagcggcccatgagcagcgcctccatggccagtgacttcaggaagaggaggaagtctgagcctgctgtgggccccccccggggcctgggggaccagagcgccagcaggaccagccctggccgggtggacctgcccggcagcagcaccaccctgaccaagagcttcaccagcagcagccccagcagccccagccgggccaaggaccgggagagccccaggagctacagcagcaccctgacagacatgggccgcagcgccccccgggagcggcggggcaccccagagaaggagaagctgcctgccaaggctgtgtatgacttcaaggcccagaccagcaaggagctgtccttcaagaagggggacacagtgtacatcctgaggaagattgaccagaactggtatgaaggagagcaccacggccgggtgggcatcttccccatctcctatgtggagaagctgaccccacctgagaaggcccagcctgcccggcccccacctccagcccagcctggagagatcggggaggccatcgccaagtacaacttcaatgctgacaccaacgtggagctgagcctgaggaaaggagacagagtcatcctgctgaagagggtggaccagaactggtatgagggcaagatccctggcaccaaccggcagggcatcttccctgtgtcctatgtggaggtggtgaagaagaacaccaagggagctgaggactacccagacccccccatcccccacagctacagcagtgaccgcatccacagcctgagcagcaacaagccccagaggcctgtgttcacccatgagaacatccagggcggcggggagcccttccaggccctgtacaactacaccccaagaaatgaagatgagctggagctgcgggagagtgatgtgattgatgtgatggagaagtgtgatgatggctggtttgtgggcaccagcaggaggaccaagttcttcggcaccttccctggcaactacgtgaagaggctgtag

SEQ ID NO: 58843 - DNA, 2475 bp, Artificial Sequence
  derived and/or modified sequence
atgtacagcaacgaggacagccggcagaccatcgtgtacagcgaggagtccaacaccacgatgagctacacacagaagatcaccaacccattgccagctgcctcctctactgatcccgcaccatttgccaatattaacactcccgttctgcaagaagattataggcaggatagccaaacacggcgtatcagcactctaaagctgacacacaatcaggatttaggtagttcttcgcccatcagcacaccccagttcagcaagtccgtggaggtgccttcatttctcaaacggccaaggagcctgacaccaaatcctgtgccagagacccatactgcgtccctttccattcagatagcacctctgagtggccaggatctcgaaagtcacaaacagctaccagaactttcccccgagactgctaaaatccccctacagcaggagcgccagaagtccgcagtagctgcagcatcccagtcctctgactgtcgagtaagccagatcacagtgaacgggaacagcggcggggccgtgagtcctatgagttattaccagcgacctttttcccccagtgcatattcactgcctgccagcctgaactccagcattgtcatgcagcacggcacttcattggactctacagacacctaccctcaacatgcgcagtctttggacggaaccacatcttcttccattcctctataccgctcttccgaagaagagaagcgcgtgaccgtgatcaaggcaccacattaccccgggattggtcctgtcgacgagagcggaattcctaccgccatacgtacaaccgttgaccgcccaaaggattggtataagaccatgttcaagcagatccacatggtacataaaccggacgacgacacagacatgtataacaccccctacacctacaacgctggactctacaaccctccctactcagctcagtctcaccctgcagcaaagacacagacctatcgccccctaagcaagtcccacagcgacaattctccgaatgcgttcaaggacgcctcatccccggtgcctccacctcatgttcctcctccagtgccaccgctgagacctcgtgatcggagcagcaccgaaaagcacgactgggatcctcccgaccgcaaggtagatacgaggaagttcaggtctgaaccacgctcaattttcgagtacgagcctggaaagtctagcatactgcagcatgaacgccccccacccctacctactaccccgacaccagtcccacgggagccggggaggaaacctctctcttcgagtcgccttggtgaagtaactggctctccaagtccgcccccacgcagtggtgctcctacacccagctcacgagccccagcactgagtcctacgcgcccacccaaaaaaccattggactacgtgcaggaccattcctcaggcgtctttaatgaagcatcactttatcagtcaagcatcgatagatccctggagcgtcctatgtctagcgcatcaatggcctccgatttcaggaagagaaggaagtccgagccagccgtcggaccccctaggggactaggagaccagtctgcctctcggacatcccccgggagagtcgatctgccagggagcagcaccaccttaaccaagtcatttactagtagtagtccctcctctcctagtagagctaaagacagggaaagtcctaggtcttacagctcaacacttactgacatggggagaagcgcccctagagagcgaaggggaactccagagaaagagaaactcccagctaaggccgtctacgatttcaaggctcaaacaagtaaggagctgtcattcaaaaaaggcgacactgtttatatcctcagaaagattgaccaaaactggtatgagggcgaacatcacggccgagtaggtatttttcctatctcgtacgttgagaagctcacacctccggaaaaagcgcagccagcgaggccaccgcccccagcacagccaggtgagattggggaagctatcgctaagtacaacttcaacgccgataccaacgtcgaactctccctgagaaagggcgatagagtcatcctccttaaaagagttgatcagaattggtacgaaggtaaaatacctggcacaaacagacagggaattttcccagtgtcctacgtcgaggtagtgaaaaaaaatacaaaaggagccgaagactacccagaccctcctataccccattcatactcttcagataggatccactcgctgtcctcaaacaaaccccagcgccccgtcttcacacacgaaaacatacagggaggcggcgaaccattccaggctctctataactatactccaaggaatgaggatgaactcgaattgcgcgaaagcgacgtgatcgacgtcatggagaaatgtgacgacggttggttcgtgggtacgtcaaggaggacaaagttcttcggtacgtttcctggcaactacgttaagagactttag

SEQ ID NO: 58844 - DNA, 2475 bp, Artificial Sequence
  derived and/or modified sequence
atgtattctaacgaggactccagacagactattgtatatagcgaggagtccaatactacgatgtcctatactcagaagatcacaaaccctctgcctgcggcaagctccactgatccagctcccttcgcgaacatcaatacgccagtattgcaggaggattatcgccaggactcccaaacaagaaggatcagcacactgaagctgacccacaatcaagaccttggctcctcgagcccaatttccactccacaattttctaaatccgttgaagttccatcctttcttaaaagaccaaggtccctgacccctaatcctgtgcccgagacccacacggcctctctctcaatccagattgcacccctctccggccaggacttagagtctcacaagcagcttcccgaactcagccccgaaaccgcaaagatccctttgcagcaggaacggcaaaaatctgccgttgctgcagccagtcagagtagtgattgcagagttagccagattacagttaatggcaacagtggcggagctgttagtcctatgagttattatcaaaggcccttttcgccttcagcctattccctacccgcatctctcaacagcagcatcgttatgcagcacggcacgtctctcgactcaactgatacatacccacagcacgctcagtctttggatggtacaactagttctagcatccccctgtaccgcagcagtgaagaggagaagagagtgactgtcatcaaggcccctcactatccagggatcgggcctgttgacgaaagcgggatacccaccgccatccgcactaccgtggacaggccaaaggattggtataagacaatgtttaaacagattcacatggtccacaagcctgacgacgacacagacatgtacaacaccccttacacctataatgccggtttgtacaaccccccttactccgcacagtctcatccggcagctaagacacagacgtaccgacctctgagcaagtctcattccgataactctcctaacgcattcaaagacgcttcaagtccagtgccgccaccacacgtgccgccaccagtgcctcctctccgaccacgcgatagatcatcaaccgaaaagcatgattgggatccccctgataggaaagtggatacccgcaaattccgttctgagcccaggagcatattcgagtatgagccgggaaagtcctcgattttgcaacatgagcggccacctcctctgcccacgacccccaccccagtgccacgagagccaggacgtaagccactaagcagttccaggttgggcgaggtaactggaagcccctcaccccctcctcggagtggagcccctaccccctcaagccgggctcctgcattgtcgccaactaggcctccaaaaaagcctctagattatgtgcaagaccattcttcgggcgtgtttaatgaagcatccctgtaccagtcctctattgaccgcagcctggagcggcctatgagttccgcaagtatggcgtctgactttcgaaagaggcggaaaagtgagcctgctgtagggcctccgaggggactcggggatcagagcgcatcgcgcacatcacctggccgagtggacctacccggatcgtcaacaactctgaccaagagcttcacttcaagttcacccagttctccaagcagagccaaagatcgggagagcccgagatcctactcctcgactctgacggacatggggagatctgcccctcgggaacgtcgcggaacccccgagaaggagaagctccccgctaaggccgtgtacgatttcaaggcgcaaacctctaaagaattatcatttaagaagggggatactgtgtacatcctcaggaaaatcgaccagaactggtatgagggggagcaccacggacgtgttggcattttccctataagctacgtggagaagctgactccacctgagaaggcacagcctgctagacctccacccccagcccagccaggggagataggggaggctatcgccaagtacaattttaacgcagataccaacgtcgaacttagcctgaggaaaggcgacagagtgatcctcttgaaaagggtcgatcagaactggtatgagggtaagattcccggaactaatcggcagggtatcttccctgtttcttatgtcgaggtcgtaaagaaaaacacgaagggcgcagaggattaccccgatcctcccatcccacactcatatagctctgatcggatccatagtctgagtagcaacaagccccagcgacccgtattcacgcacgaaaatatccagggcggaggtgaacctttccaggctctctacaactatacaccgagaaatgaagacgagctggagcttcgagagtcagatgtaatcgatgtgatggagaaatgcgacgatggctggtttgtgggaacctcgcgaagaaccaaatttttcgggacattcccgggaaattacgtgaaaagactctag

SEQ ID NO: 58845 - protein, 1004 aa, Artificial Sequence
  derived and/or modified sequence
MKATTPLQTVDRPKDWYKTMFKQIHMVHKPGLYNPPYSAQSHPAAKTQTYRPLSKSHSDNSPNAFKDASSPVPPPHVPPPVPPLRPRDRSSTEKHDWDPPDRKVDTRKFRSEPRSIFEYEPGKSSILQHERPASLYQSSIDRSLERPMSSASMASDFRKRRKSEPAVGPPRGLGDQSASRTSPGRVDLPGSSTTLTKSFTSSSPSSPSRAKGGDDSKICPSLCSYSGLNGNPSSELDYCSTYRQHLDVPRDSPRAISFKNGWQMARQNAEIWSSTEETVSPKIKSRSCDDLLNDDCDSFPDPKVKSESMGSLLCEEDSKESCPMAWGSPYVPEVRSNGRSRIRHRSARNAPGFLKMYKKMHRINRKDLMNSEVICSVKSRILQYESEQQHKDLLRAWSQCSTEEVPRDMVPTRISEFEKLIQKSKSMPNLGDDMLSPVTLEPPQNGLCPKRRFSIEYLLEEENQSGPPARGRRGCQSNALVPIHIEVTSDEQPRAHVEFSDSDQDGVVSDHSDYIHLEGSSFCSESDFDHFSFTSSESFYGSSHHHHHHHHHHHRHLISSCKGRCPASYTRFTTMLKHERARHENTEEPRRQEMDPGLSKLAFLVSPVPFRRKKNSAPKKQTEKAKCKASVFEALDSALKDICDQIKAEKKRGSLPDNSILHRLISELLPDVPERNSSLRALRRSPLHQPLHPLPPDGAIHCPPYQNDCGRMPRSASFQDVDTANSSCHHQDRGGALQDRESPRSYSSTLTDMGRSAPRERRGTPEKEKLPAKAVYDFKAQTSKELSFKKGDTVYILRKIDQNWYEGEHHGRVGIFPISYVEKLTPPEKAQPARPPPPAQPGEIGEAIAKYNFNADTNVELSLRKGDRVILLKRVDQNWYEGKIPGTNRQGIFPVSYVEVVKKNTKGAEDYPDPPIPHSYSSDRIHSLSSNKPQRPVFTHENIQGGGEPFQALYNYTPRNEDELELRESDVIDVMEKCDDGWFVGTSRRTKFFGTFPGNYVKRL

SEQ ID NO: 58846 - protein, 533 aa, Artificial Sequence
  derived and/or modified sequence
MISSSSVHSRTFNTSNALGPVCKHKKPLSAAKACISEILPSKFKPRLSAPSALLQEQKSILLPSEKAQSCENLCVSGSLNDSKRGLPLQVGGSIENLLMRSRRDYDSKSSSTMSLQEYSTSGRRPCPLSRKAGMQFTMLYRDMHQINRSGLFLGSISSSSSVRDLASHFEKSSLALSRGELGPSQEGSEHIPKHTVSSRITAFEQLIQRSRSMPSLDLSGRLSKSPTPVLSRGSLTSARSAESLLESTKLHPKEMDGMNSSGVYASPTCSNMAHHALSFRGLVPSEPLSTCSDDVDRCSNISTDSREGSGGSVHGDFPKHRLNKCKGTCPASYTRFTTIRKHEQQQTSRQPEWRLDARGDKSTLLRNIYLMSPLPFRLKKPLHHHPRQPSPGDSSGLLVGQKPDLPSQPHQDQPPSGGKPVVPTRLSSRHTMARLSRSSEPSQERPTALEDYPRAINNGNSVPYSDHSLDRNNNPQSELAPSRGGGILCVCLVSPARPSTLLALSRPPLCPWCSFSGLSFVFCLFCLAINHGS

SEQ ID NO: 58847 - DNA, 3015 bp, Artificial Sequence
  derived and/or modified sequence
atgaaggccaccacccccctgcagaccgtggacagacccaaggactggtacaagaccatgttcaagcagatccacatggtgcacaagcccggcctgtacaaccccccctacagcgcccagagccaccccgccgccaagacccagacctacagacccctgagcaagagccacagcgacaacagccccaacgccttcaaggacgccagcagccccgtgccccccccccacgtgcccccccccgtgccccccctgagacccagagacagaagcagcaccgagaagcacgactgggacccccccgacagaaaggtggacaccagaaagttcagaagcgagcccagaagcatcttcgagtacgagcccggcaagagcagcatcctgcagcacgagagacccgccagcctgtaccagagcagcatcgacagaagcctggagagacccatgagcagcgccagcatggccagcgacttcagaaagagaagaaagagcgagcccgccgtgggcccccccagaggcctgggcgaccagagcgccagcagaaccagccccggcagagtggacctgcccggcagcagcaccaccctgaccaagagcttcaccagcagcagccccagcagccccagcagagccaagggcggcgacgacagcaagatctgccccagcctgtgcagctacagcggcctgaacggcaaccccagcagcgagctggactactgcagcacctacagacagcacctggacgtgcccagagacagccccagagccatcagcttcaagaacggctggcagatggccagacagaacgccgagatctggagcagcaccgaggagaccgtgagccccaagatcaagagcagaagctgcgacgacctgctgaacgacgactgcgacagcttccccgaccccaaggtgaagagcgagagcatgggcagcctgctgtgcgaggaggacagcaaggagagctgccccatggcctggggcagcccctacgtgcccgaggtgagaagcaacggcagaagcagaatcagacacagaagcgccagaaacgcccccggcttcctgaagatgtacaagaagatgcacagaatcaacagaaaggacctgatgaacagcgaggtgatctgcagcgtgaagagcagaatcctgcagtacgagagcgagcagcagcacaaggacctgctgagagcctggagccagtgcagcaccgaggaggtgcccagagacatggtgcccaccagaatcagcgagttcgagaagctgatccagaagagcaagagcatgcccaacctgggcgacgacatgctgagccccgtgaccctggagcccccccagaacggcctgtgccccaagagaagattcagcatcgagtacctgctggaggaggagaaccagagcggcccccccgccagaggcagaagaggctgccagagcaacgccctggtgcccatccacatcgaggtgaccagcgacgagcagcccagagcccacgtggagttcagcgacagcgaccaggacggcgtggtgagcgaccacagcgactacatccacctggagggcagcagcttctgcagcgagagcgacttcgaccacttcagcttcaccagcagcgagagcttctacggcagcagccaccaccaccaccaccaccaccaccaccaccacagacacctgatcagcagctgcaagggcagatgccccgccagctacaccagattcaccaccatgctgaagcacgagagagccagacacgagaacaccgaggagcccagaagacaggagatggaccccggcctgagcaagctggccttcctggtgagccccgtgcccttcagaagaaagaagaacagcgcccccaagaagcagaccgagaaggccaagtgcaaggccagcgtgttcgaggccctggacagcgccctgaaggacatctgcgaccagatcaaggccgagaagaagagaggcagcctgcccgacaacagcatcctgcacagactgatcagcgagctgctgcccgacgtgcccgagagaaacagcagcctgagagccctgagaagaagccccctgcaccagcccctgcaccccctgccccccgacggcgccatccactgccccccctaccagaacgactgcggcagaatgcccagaagcgccagcttccaggacgtggacaccgccaacagcagctgccaccaccaggacagaggcggcgccctgcaggacagagagagccccagaagctacagcagcaccctgaccgacatgggcagaagcgcccccagagagagaagaggcacccccgagaaggagaagctgcccgccaaggccgtgtacgacttcaaggcccagaccagcaaggagctgagcttcaagaagggcgacaccgtgtacatcctgagaaagatcgaccagaactggtacgagggcgagcaccacggcagagtgggcatcttccccatcagctacgtggagaagctgaccccccccgagaaggcccagcccgccagaccccccccccccgcccagcccggcgagatcggcgaggccatcgccaagtacaacttcaacgccgacaccaacgtggagctgagcctgagaaagggcgacagagtgatcctgctgaagagagtggaccagaactggtacgagggcaagatccccggcaccaacagacagggcatcttccccgtgagctacgtggaggtggtgaagaagaacaccaagggcgccgaggactaccccgacccccccatcccccacagctacagcagcgacagaatccacagcctgagcagcaacaagccccagagacccgtgttcacccacgagaacatccagggcggcggcgagcccttccaggccctgtacaactacacccccagaaacgaggacgagctggagctgagagagagcgacgtgatcgacgtgatggagaagtgcgacgacggctggttcgtgggcaccagcagaagaaccaagttcttcggcaccttccccggcaactacgtgaagagactgtag

SEQ ID NO: 58848 - DNA, 3015 bp, Artificial Sequence
  derived and/or modified sequence
atgaaggccacgaccccactccaaacagtggaccggcccaaagactggtacaaaactatgtttaagcagatacatatggtgcataagccaggattatacaaccccccatacagcgcccaaagtcatccagccgccaagactcaaacatatcggcctttgagcaagtctcatagcgacaattcgcctaacgcgtttaaagatgcctcctcacccgtgccacctcctcacgtaccacctcccgtgccgcccttacggccacgtgaccgctcttccacagaaaagcacgattgggaccctccggatagaaaagtcgatacccggaagtttcgtagtgagccgcggtcaatttttgagtatgagcctggaaagagcagtattctacagcacgagaggcccgcctccctgtaccagagctctattgacaggtccttggagagaccaatgtcttctgcctccatggcctccgatttccgcaagcgccggaaatcagagccagccgttggacctcctagagggctgggagatcagagcgcctcacggaccagccctgggcgcgtcgatttgcccggctctagcacaacactgacaaagagtttcacaagctcaagtcccagcagccccagtagagctaagggcggagacgactcaaagatctgcccttccctgtgctcttatagtggcctgaacggcaatccttcttcagaacttgattactgttctacctatcgccaacatctggatgttccccgcgattctccccgagctatcagcttcaagaacggttggcagatggccaggcagaacgccgagatctggtcctctactgaggagaccgtcagccctaagataaagtcacggtcttgcgatgacctcctgaacgacgattgtgactccttccctgaccctaaggtcaaatcggagagcatggggtccctcctctgtgaagaggacagcaaggagtcttgcccgatggcgtggggtagcccctatgttccggaggtccgcagcaatggcagaagtcggatccgacaccgatccgcgaggaacgcaccagggttccttaaaatgtacaagaaaatgcatcgcatcaataggaaggaccttatgaattcagaggttatctgttctgtgaagtccagaatattgcagtacgagtcggaacagcagcataaagatctgctgcgggcttggtcccaatgcagcaccgaagaggtgcctcgtgacatggtgcctactcgcatatcggagttcgaaaagctgattcagaaaagtaagtctatgccaaacctaggcgatgatatgctatccccggtgactctggaaccccctcaaaacggactgtgcccgaagcgtaggttcagcatcgaatacctgttggaggaagagaaccaaagtggccctcctgccaggggtagaagaggttgccagtccaacgcactggtccccatacatatcgaggtgacaagtgatgagcaaccccgagcacacgttgagttctctgactccgatcaggacggtgtggtgtctgaccactccgactatatccatctggagggctcatcattctgcagcgagtcggacttcgatcacttctctttcacgtctagcgagtcattttatgggtcttctcaccaccatcatcatcaccaccaccaccaccaccgtcacctgatttcatcgtgcaaggggaggtgccccgcatcctacaccagattcactacaatgctaaaacacgagcgggctcgccatgagaacaccgaggagccacggcggcaagagatggaccccggcctgagtaaactcgccttccttgtcagcccagtgccttttcggcggaagaagaacagcgcccctaaaaagcagaccgagaaggcgaaatgcaaggcaagcgtgttcgaagccctcgacagcgccttgaaagatatttgtgatcagatcaaggcagaaaaaaaaaggggcagtttgccagataatagtatcctccatcgactaatttccgaactcttgcccgatgttcctgaaagaaattcatctttacgtgcccttagacggtcccctctacaccaacctctacatcctcttccgccagatggagctattcactgccccccttaccagaatgactgcgggaggatgcccaggagtgcatcattccaagatgtggacaccgctaactcttcctgtcaccaccaggacagagggggcgctttacaggatcgagaaagtcctcgaagctacagttctacccttacagacatgggacgcagcgccccccgggagcggaggggtactcctgagaaagagaagttgcctgccaaggcagtgtacgacttcaaagcccagacaagtaaagagctgtccttcaagaagggagacacggtgtatatactgcgcaaaattgaccagaattggtacgagggagagcaccatggccgggtgggcattttcccaatttcctatgtggaaaaattgactccgcccgaaaaggcacaaccggcaagacctcccccacctgctcagcccggtgagataggcgaggccatcgccaagtacaactttaacgccgataccaatgttgagctgagtctgaggaaaggcgatagggtcatcctcttaaagagggtggaccagaactggtatgagggaaaaatcccaggtactaataggcagggcatttttcccgtgagttatgtcgaggtagtcaaaaaaaacactaagggtgcagaggactatcctgatccacccatcccccatagttacagctccgaccgtatccactctctcagctcaaacaagccccaaagacctgtctttacccatgagaacatccagggcggaggggaaccctttcaggccctctacaactacaccccacggaatgaggacgaactggagttgagagaatccgatgtcatcgacgttatggagaaatgtgacgatggatggtttgtcggaacgagcagaaggactaagttttttggcactttcccagggaattacgtcaagagactgtag

SEQ ID NO: 58849 - DNA, 3015 bp, Artificial Sequence
  derived and/or modified sequence
atgaaggccaccacccccctgcagacagtggaccggcccaaggactggtacaagaccatgttcaagcagatccacatggtgcacaagccaggcctgtacaaccccccctacagcgcccagagccaccctgctgccaagacccagacctaccggcccctgagcaagagccacagcgacaacagccccaatgccttcaaggatgccagcagccctgtgcccccaccccacgtgcccccacctgtgccccccctgcggccccgggacaggagcagcacagagaagcatgactgggaccccccagacaggaaggtggacaccaggaagttccgctctgagcccaggagcatctttgaatatgagcccgggaagagcagcatcctgcagcacgagaggcctgccagcctgtaccagagcagcattgacaggagcctggagcggcccatgagcagcgcctccatggccagtgacttcaggaagaggaggaagtctgagcctgctgtgggccccccccggggcctgggggaccagagcgccagcaggaccagccctggccgggtggacctgcccggcagcagcaccaccctgaccaagagcttcaccagcagcagccccagcagccccagccgggccaagggaggagatgacagcaagatctgccccagcctgtgcagctacagcggcctgaatggaaaccccagcagcgagctggactactgcagcacctaccggcagcacctggatgtgccccgggacagcccccgggccatctccttcaagaatggctggcagatggcccggcagaatgctgagatctggagcagcacagaggagaccgtgagccccaagatcaagagccgcagctgtgatgacctgctgaatgatgactgtgacagcttcccagaccccaaggtgaagtctgagagcatgggcagcctgctgtgtgaggaggacagcaaggagagctgccccatggcctggggcagcccctacgtgcctgaggtgcgcagcaatggccgcagccgcatccgccacaggtctgccagaaatgcccctggcttcctgaagatgtacaagaagatgcaccgcatcaacaggaaggacctgatgaacagcgaggtgatctgcagcgtgaagagccgcatcctgcagtatgagagcgagcagcagcacaaggacctgctgcgggcctggagccagtgcagcacagaggaggtgccccgggacatggtgcccacccgcatcagcgagtttgagaagctgatccagaagagcaagtccatgcccaacctgggagatgacatgctgagccctgtgaccctggagcccccccagaatggcctgtgccccaagaggcgcttcagcattgagtacctgctggaggaggagaaccagagcggccccccagcccggggccggcggggctgccagagcaatgccctggtgcccatccacatcgaggtgaccagtgatgagcagccccgggcccacgtggagttcagtgacagcgaccaggatggagtggtgtctgaccacagcgactacatccacctggagggcagcagcttctgcagcgagagtgactttgaccacttctccttcaccagcagcgagagcttctacggcagcagccaccaccaccaccaccaccaccaccaccaccaccgccacctgatcagcagctgcaagggccgctgcccagccagctacacccgcttcaccaccatgctgaagcatgagcgggcccggcatgagaacacagaggagccccggcggcaggagatggaccccggcctgagcaagctggccttcctggtgtcccctgtgcccttccggaggaagaagaacagcgcccccaagaagcagacagagaaggccaagtgcaaggcctctgtgtttgaggccctggacagcgccctgaaggacatctgtgaccagatcaaggccgagaagaagaggggcagcctgcctgacaacagcatcctgcacaggctcatcagcgagctgctgcctgatgtgcctgagaggaacagcagcctgcgggccctgcggcgcagccccctgcaccagcccctgcaccccctgcccccagatggagccatccactgccccccctaccagaatgactgtggccgcatgcccaggtctgccagcttccaggatgtggacacagccaacagcagctgccaccaccaggaccggggcggggccctgcaggaccgggagagccccaggagctacagcagcaccctgacagacatgggccgcagcgccccccgggagcggcggggcaccccagagaaggagaagctgcctgccaaggctgtgtatgacttcaaggcccagaccagcaaggagctgtccttcaagaagggggacacagtgtacatcctgaggaagattgaccagaactggtatgaaggagagcaccacggccgggtgggcatcttccccatctcctatgtggagaagctgaccccacctgagaaggcccagcctgcccggcccccacctccagcccagcctggagagatcggggaggccatcgccaagtacaacttcaatgctgacaccaacgtggagctgagcctgaggaaaggagacagagtcatcctgctgaagagggtggaccagaactggtatgagggcaagatccctggcaccaaccggcagggcatcttccctgtgtcctatgtggaggtggtgaagaagaacaccaagggagctgaggactacccagacccccccatcccccacagctacagcagtgaccgcatccacagcctgagcagcaacaagccccagaggcctgtgttcacccatgagaacatccagggcggcggggagcccttccaggccctgtacaactacaccccaagaaatgaagatgagctggagctgcgggagagtgatgtgattgatgtgatggagaagtgtgatgatggctggtttgtgggcaccagcaggaggaccaagttcttcggcaccttccctggcaactacgtgaagaggctgtag

SEQ ID NO: 58850 - DNA, 3015 bp, Artificial Sequence
  derived and/or modified sequence
atgaaggccaccacccccctgcagaccgtggaccggcccaaggactggtacaaaacaatgtttaagcaaattcatatggtgcataagcctgggctgtacaacccaccatacagcgctcaaagtcacccggcagctaagacgcagacctataggccactgtccaagtcccatagcgataatagtcctaacgcgtttaaggatgctagcagcccagtgcctcccccacacgtgcctcctcccgttccgcccctccggcctcgggacagatctagtactgagaaacatgactgggacccgccagaccgtaaggttgacacacggaagttcagaagcgagccaagaagcattttcgaatatgagccagggaagagctctatcttgcagcatgaacgccctgcatccttgtatcaatccagcattgatcgctctctcgaaaggcctatgagctccgctagtatggcgtccgatttccgaaaacgccggaaatctgagcccgctgtgggccccccaagagggctgggagaccagtccgccagccgaacatcccccgggagagttgatttgccagggtccagcacaacattgactaaaagttttacttcttcgagtccctcatcaccctctcgggcaaaggggggtgacgacagcaaaatatgcccatctctttgttcctactcaggattaaacggaaatccgagctcagagctggattactgcagcacgtatcggcagcacttggacgtgccccgtgactcccctcgcgctataagtttcaaaaatggttggcaaatggcccggcagaatgccgagatttggagtagtacagaggagacagtgagtccaaagattaaaagccggtcatgcgacgatctccttaacgatgactgcgattcctttcctgatcctaaggtaaagtcagagtccatggggagtctcttgtgtgaagaagattccaaggagagttgccctatggcttggggcagtccttacgtccctgaggtacgctcgaatggtcgctcacgaattagacatagatccgctcgcaacgcacccgggttcctgaagatgtataagaaaatgcaccgtatcaaccggaaggatctaatgaactcggaggtgatttgtagcgtgaaaagcagaattctccagtatgaaagcgaacagcagcataaggacctgctgagagcctggtcacagtgctcgaccgaagaagtgccgagagacatggtgcctacccgtataagtgagtttgagaagctgatccagaaaagcaagtcaatgcccaatttgggagatgatatgctgagcccagtcaccctggaaccaccacagaacggactgtgtcccaaacgtagattctccatcgagtacctgctggaggaggagaaccagtccggtcccccagcacggggtcgaagaggttgtcagagcaacgcactggtcccaatacacatagaggtgacgtctgatgaacagcccagagcacacgtcgagttctctgattctgaccaggacggagttgtatcagaccattctgattatattcatctggagggctcttctttctgttctgagtccgactttgatcatttctcttttacatcttcagaatcattttatggctcttctcaccatcaccaccaccaccatcaccatcaccaccgtcatctcattagcagttgtaagggacggtgtcccgctagttacacccgctttactacgatgctcaaacatgagagagcccgccacgagaacacagaggaaccacggagacaggaaatggatcccggtctgagtaagttagccttcctagttagtcccgttccctttcgaagaaagaagaattctgctccgaagaagcagacagaaaaggccaaatgcaaggccagcgtttttgaagcattagactctgccctcaaagacatttgcgaccagataaaagcggaaaagaaaagaggctctctgcctgacaacagtatcctgcatcgactgatctcagagttgctgcctgatgtgcccgagagaaactcgtccctgagagccctcaggcgatctcctctgcatcagccactgcaccctcttcccccggacggagctattcactgtcctccttaccagaacgattgcggcagaatgccacgtagtgcgtcttttcaggacgtggatacggctaacagctcctgtcaccaccaggaccgcggaggggcccttcaggatagagaatcccctaggagctatagctctacccttaccgatatgggtagaagcgctcccagagagagacggggcacaccagaaaaggaaaaactgcccgccaaggcagtctatgatttcaaagcacagacctccaaggagctctcttttaagaaaggggacacagtgtacatattacgcaagatcgaccagaactggtatgaaggcgagcatcacggcagggtgggcatattcccaatcagctatgtcgaaaagctcacaccccctgagaaggctcagccagccagaccacccccccccgcacagcctggggagattggtgaggctatcgctaagtataattttaacgctgataccaatgttgaattgtcgctccggaaaggtgacagagtgattctgctgaagagggtggatcagaactggtatgagggaaaaatccctggtacaaaccggcagggcatttttccggtgtcttatgtagaagtggtgaaaaaaaacacaaaaggagccgaagactaccccgacccgccgattccccactcctactcctccgatcgaattcatagcctgtcatcaaataagccacagcgacccgtattcacccacgaaaatatacagggcggcggcgaaccttttcaggctctttacaactatacaccacgcaatgaagatgaactcgaactgagagagtcggatgtgatagacgtgatggagaaatgtgacgacggatggttcgtgggcacatcacgtagaacaaaattctttggcaccttccctggcaactacgtgaaacgcttgtag

SEQ ID NO: 58851 - DNA, 5529 bp, Artificial Sequence
  derived and/or modified sequence
gatttgggagttgggaggtgagatgattggagtgaagagagttaatgtcatggaaaggaaaagctgtctgaagaaaaatacacattttaatgtccctcttcagccgtgcctgctgagagctctcctgggatgataagtgaaagtgtttggatttttttttaagttttaaaactctgccaaagcattgctcagtgtatctgggcagccccttccggcaaaacgcagcagtagcagaggcagcttctgagagcctgggcaggcagcagctggctgaccaagtccactggaagagaaggcttgtgccagccgggagaaggaagccggggacaggatgaaagcaacaacacctttgcagacagtcgaccggcccaaggactggtacaagacgatgtttaagcaaattcacatggtgcacaagccgggtctgtacaacccaccctacagtgctcagtcacaccctgctgcaaagacccaaacctacagacctctttccaaaagccactccgacaacagccccaatgcctttaaggatgcgtcctccccagtgcctcccccacatgttccacctccagtcccgccgcttcgaccaagagatcggtcttcaacagaaaagcatgactgggatcctccagacagaaaagtggacacaagaaaatttcggtctgagccaaggagtatttttgaatatgaacctggcaagtcatcaattcttcagcatgaaagaccagcctccttgtatcagtcctctatagacagaagcctggaaagacccatgagttctgcaagcatggccagtgacttcaggaagcggaggaagagcgagcctgcagtgggtccaccacggggcttgggagatcaaagtgcgagcaggactagcccaggccgagtggacctcccaggatcaagcaccactcttacaaagtctttcactagctcttctccttcttccccatcaagagcaaaaggtggggatgatagcaaaatatgtccatccctttgcagttactcagggctcaacggcaacccctccagtgagttagattactgtagcacttacagacagcacttggatgtccctcgggactcaccaagagccattagtttcaagaacggctggcaaatggcccggcaaaacgcagaaatctggagcagcacggaagaaaccgtctctcccaaaatcaaatcccggagctgtgacgatctcctaaacgacgactgcgatagcttcccggacccgaaagtcaagtcggaaagcatgggctccctgttatgtgaggaggactccaaggagagctgccccatggcgtgggggtccccctacgtcccggaggttcgcagtaacggcagatcaaggatcagacacaggtcagcccgcaacgccccggggttcctgaagatgtacaagaaaatgcaccgcatcaaccgcaaggacctgatgaactccgaggtgatctgctccgtgaagtccaggattctgcagtacgagagcgagcagcagcacaaggacctgctgcgcgcctggagccagtgctccacggaggaggtgccccgggacatggtgcccacacgcatctccgaattcgaaaagctgatccagaagtccaaatccatgccaaatttaggggatgacatgctgtctcccgtaaccctagaaccaccgcaaaatggcctatgtcccaagaggcggttttccattgagtatttgctggaggaagaaaatcaaagcggcccccccgctcggggccggcgaggctgccagtctaacgccctggtgcccattcacattgaagtcaccagcgatgagcagccccgagcacacgtggagttttccgacagcgaccaggacggggttgtgtccgaccacagtgactacattcacctagaggggtcatccttctgcagtgaaagtgactttgatcacttttccttcacatcctccgaaagcttttacggatccagccaccaccaccaccatcaccaccaccaccaccaccgccacctcatcagctcctgcaaaggcaggtgcccggcctcctacactcgatttaccacaatgttaaaacacgaaagagccagacacgaaaacaccgaggagcccagaaggcaagaaatggaccctggcctttctaaacttgcttttctagtcagtcctgtgcctttccggaggaaaaaaaattcggctcctaagaaacagactgaaaaggcaaaatgtaaagcatctgtgtttgaggctctggactctgcccttaaagacatctgtgaccaaattaaagctgaaaagaaaagggggagcttgccggacaacagcatcctgcaccgcctcatcagtgagctgctgccagatgttcccgagaggaactcatccctgagagcgctgaggaggagccccctgcaccagcctctccacccactgcctcccgatggtgctattcattgtccaccctaccagaatgactgcgggagaatgccccgcagtgcctctttccaagacgtggacacagccaacagcagctgccaccaccaagaccgtggcggtgcactccaagaccgtgagtcccctagaagttactcatccactttgactgacatggggagaagtgcaccaagggaaagaagaggaactccagaaaaagagaaattgcctgcaaaagctgtttatgattttaaggctcagacatctaaggagttgtcatttaagaaaggagatactgtctacatcctcaggaaaattgatcaaaattggtatgagggagaacaccacgggagagtgggcatcttcccgatctcatacgtagagaaactcacacctcctgagaaagcacagcctgcaagaccacctccgccagcccagcccggagaaatcggagaagctatagccaaatacaacttcaacgcagacacaaatgtggagctgtcactgagaaagggagatagagttattcttcttaaaagagttgatcaaaactggtatgaaggtaaaatcccaggaaccaacagacaaggcatcttccctgtttcctatgtggaggtcgtcaagaagaacacaaaaggtgctgaggactaccctgaccctccaataccccacagctattctagtgataggattcacagcttgagctcaaataagccacagcgtcctgtgtttactcatgaaaatattcaaggtgggggggaaccgtttcaggctctgtataactatactcccaggaatgaagatgagctggagctcagagaaagtgatgtcattgatgtcatggaaaagtgtgatgacggctggtttgtggggacctcaagaagaaccaaattctttggtactttccccggaaactacgtcaagaggctgtgaattgcgctccctccttctgtagaggccgcctgccagccatgcacctgcgtcaacgcgcctgaaacaccccgcgggcctcccgttgtcatgccttacggtttccaatgcgccgtcaccatctccacctgccaccaaaccaccagcagagtagccgccgctgctgtgagcctggggacgacatggcaggctggtccccctccgtgaaagtgtggattcctacttcctgctctaagctttgacacgtcaaaatgtgggatcagaaagaaaaaaatcatgatatttaaaaatggtcaaatatttgaggcaaaaaaaaaaaaaaaaagtgtctccaggaggctgtccagcctcgtggctccatttcaacatctccccccaggcgatgttctcccccaagacgaccagaaaattgtttattggggaatgctgtggtttgcattttcatattcttcgcttggcagtgtgtattcttttcacaagtttgcctagtgtcttggtttacacaatatgacaactgtaactgtactttagctattgtttgcctgcacatacatgttgtaatatgcacagtgattacaacctttaaagcaagaggaggcgagttaatttggatgagtgtgattttgctgattgaatgtgagttttcaaataggagtctttttctgcaatttgtttgcattttttagaagtgcaaacagtaagtaaataaaagccttcggtaataatcatgacaatacaagaggctgagctaggctacaggggaaaactattgtgttgtaaagttgcatcgctattttatattaaaatgtaatgatcagcatcatgaacaatgagctcttagtgttttatttatctgaaaaaatgtaagtaaaagcagtgttagtgagaggtgcaaagaattattctaacagacacctgaaagtatctgtaagcaatactagtaggtaagatttcactgtgtgtacacatacacatttgagattgtatgagaacatataatccatatgatatgttgtacattttatggaaatgtaatagaatctcacacattattttatagaaatagagtacagaagcatcacaagtattaaagttggttttagcaaggattaggattactacaattatttttactataataattatttttcttctatggaactcagaatcctggctacatttgaggacaggaatatgttgagcctgattttcctggtgtgtgtaaaatatttcctaggaataaattaggcactttttagaagcaatgttaaatcattcaggttttattttctgccctgaagcagaaatttaaaaaatgatattgggacctggaaggtttaatatggttcacagtgcctgaattacacctgctccgaaaactagctttgtatttcttatgactttgcataagaactgttcatctttggatcttgagcaccttacagataaaactttttatggcatctctttcatggacagtgatattgatcttttcacaatgtacgtagcctctagaattttgtacatatgtttgctctttttttgtacagactagttgttgagaaaacaggggcgtttcctaatttggtctttatcctgcgacaacactttcagcagactagcctctccttatctcacagatcacaagcacccctagatagtgtgattctgtcagatagcatttatgcaaaaatctatgaagttaaaagatcgtagaagccaaatgaaatgtacatatctactgactgatgacaagggaatttcattaggaagaaggtaaagaaacatcgttgagtagcctaccttgatttctgtcaagttcataaccagcttcatattttaaaggcttcaggtttgaaattaagtcaactgcatgcagctttgctgataaatgaataattctctttgatgccatttatgagaaaagacttcaatatctgttgcctgtcatatttaagaaaaattactgtttctactctctgtatctgattttaaaagaaaaaactattcatacctggcttccaggtaattgactttgaattcttacaagcaaaggtcattgtgtttttcttgaatagacatctaataaattttgcttggaagtatacttcagtttttcttcttgacatttatctttataaaaattgtgtattttattccaacttgttaaactaagagaaaatgca

SEQ ID NO: 58852 - DNA, 3015 bp, Artificial Sequence
  derived and/or modified sequence
atgaaggccacaaccccccttcagacagtagatagaccaaaggactggtataaaacgatgttcaagcagatccatatggtgcataagcccggactctataatccaccctacagcgcccagtcgcatcccgcagccaaaacccagacataccggcctttgagcaagtctcactcagacaatagtcccaacgcatttaaagacgcttcctcaccggtaccaccgcctcacgtgcctcctcctgttccacccctgcgacccagagatcggagctccactgagaagcacgactgggacccgccagaccgcaaggttgacacccggaaattcaggtcagaaccacgttctatcttcgagtacgagcctggcaagtcatccattctccagcacgagagacccgcttctttataccagagctctatcgaccggtctttagaacgccctatgagctcagcttcaatggccagtgactttaggaagaggcgaaaatctgaaccagctgtcgggcctccacggggactcggcgatcagtccgctagtagaacctctcccggtagagtcgacctgccgggatcaagcacgacactaactaaatccttcacatcttcctcaccatcaagcccctcacgtgctaaaggaggagacgatagcaaaatttgccccagcctctgctcctatagcgggctaaatggtaatccgagtagcgagctcgactactgttcaacctaccggcaacacctggatgtccccagggacagcccacgtgctatttctttcaagaacggttggcaaatggcccgacagaacgccgagatttggtcatctactgaggaaacggtctctccaaaaattaaatccaggtcctgtgacgatctgcttaacgatgactgtgattccttccccgaccccaaggtcaagtccgagagcatgggatccttgctatgtgaagaggactcgaaagagtcgtgcccaatggcatggggctcaccctacgttcccgaagttaggtccaatgggaggtctcgaatccgacatcgtagcgcccgaaacgccccaggatttctcaagatgtacaaaaagatgcatagaatcaatcggaaagatctcatgaactcggaggttatctgcagcgtgaaatccaggatactccaatacgagtccgagcagcaacacaaagatctgttaagagcatggtctcaatgcagtacggaagaggtcccccgtgacatggtgcccacacgtatttcagagttcgagaaactgatccagaaaagtaaaagtatgcctaacctaggcgacgatatgctgagtcctgttactttggagccgcctcagaacgggctgtgtccaaaacggaggttttcaatcgagtatctgctcgaagaggagaaccagtctgggccaccagccaggggcagaagaggttgccagtccaatgccctggtgccaattcacatagaggtgacatctgatgaacagccacgcgcacatgtcgaattcagcgatagtgaccaggacggtgtagtgtctgaccactccgactacattcacctggaagggagcagcttctgcagtgagagcgacttcgaccatttctcgttcacatccagtgaatccttttacggaagcagccatcaccaccatcatcaccaccatcaccaccatcgacacctaatcagtagttgtaagggcaggtgcccggcttcatatacaaggtttacaaccatgcttaagcacgaaagggcccgacatgagaatacagaagagcctaggcggcaagagatggatcccggtctaagtaagctggccttcctagtgtcacctgtgccctttcggaggaaaaaaaacagtgcccctaaaaagcagaccgaaaaggctaaatgtaaagcttccgtctttgaggctctggattccgccttgaaggacatctgtgatcagatcaaggcagagaagaaacgtggctctctcccagataattccatattacaccgactcattagcgagctgctccctgacgtcccagaaaggaacagctctctccgggctttgaggcgctcccccctgcaccaaccgctgcaccccttaccccctgatggagccattcattgccccccttaccagaacgattgcggacgcatgcccagatccgctagtttccaagacgtggatactgccaacagctcttgccatcaccaggaccgaggcggtgcactccaggatcgagaatcacctaggagttattcgagcacattgacagacatggggaggtctgctccacgtgaaagaaggggtacccccgagaaagagaaactgcctgccaaggcagtgtacgatttcaaggctcagacgtccaaagaactgagcttcaagaaaggtgatactgtttatattttgagaaaaatcgatcagaattggtacgagggcgaacatcacggtcgggtgggcatttttcctatctcttacgtcgaaaaactcactccacctgagaaggcccaacctgccaggcctccgcctccagcgcagcccggtgaaataggggaggccatagcaaagtacaattttaatgcagacacaaacgttgaactaagtctgcgcaaaggagaccgcgtcattctgcttaaacgtgtggaccagaattggtacgaaggaaagatcccaggcacgaatagacaaggcatcttccccgtgagctatgttgaagtggtgaagaagaacacaaagggggctgaagactacccggatcctccgatcccacatagttattccagtgatcgtattcactctttaagcagtaataagcctcagcgcccagtgttcacacatgagaacatccagggcggtggggagcctttccaagcattatacaattacacaccacggaatgaggatgagttggagctgcgtgagagtgacgtgattgacgttatggagaaatgcgacgatggatggttcgttgggactagcaggagaacaaagttctttggaacgtttcctgggaattacgttaaacgcttgtag

SEQ ID NO: 58853 - DNA, 1602 bp, Artificial Sequence
  derived and/or modified sequence
atgatcagcagcagcagcgtgcacagcagaaccttcaacaccagcaacgccctgggccccgtgtgcaagcacaagaagcccctgagcgccgccaaggcctgcatcagcgagatcctgcccagcaagttcaagcccagactgagcgcccccagcgccctgctgcaggagcagaagagcatcctgctgcccagcgagaaggcccagagctgcgagaacctgtgcgtgagcggcagcctgaacgacagcaagagaggcctgcccctgcaggtgggcggcagcatcgagaacctgctgatgagaagcagaagagactacgacagcaagagcagcagcaccatgagcctgcaggagtacagcaccagcggcagaagaccctgccccctgagcagaaaggccggcatgcagttcaccatgctgtacagagacatgcaccagatcaacagaagcggcctgttcctgggcagcatcagcagcagcagcagcgtgagagacctggccagccacttcgagaagagcagcctggccctgagcagaggcgagctgggccccagccaggagggcagcgagcacatccccaagcacaccgtgagcagcagaatcaccgccttcgagcagctgatccagagaagcagaagcatgcccagcctggacctgagcggcagactgagcaagagccccacccccgtgctgagcagaggcagcctgaccagcgccagaagcgccgagagcctgctggagagcaccaagctgcaccccaaggagatggacggcatgaacagcagcggcgtgtacgccagccccacctgcagcaacatggcccaccacgccctgagcttcagaggcctggtgcccagcgagcccctgagcacctgcagcgacgacgtggacagatgcagcaacatcagcaccgacagcagagagggcagcggcggcagcgtgcacggcgacttccccaagcacagactgaacaagtgcaagggcacctgccccgccagctacaccagattcaccaccatcagaaagcacgagcagcagcagaccagcagacagcccgagtggagactggacgccagaggcgacaagagcaccctgctgagaaacatctacctgatgagccccctgcccttcagactgaagaagcccctgcaccaccaccccagacagcccagccccggcgacagcagcggcctgctggtgggccagaagcccgacctgcccagccagccccaccaggaccagccccccagcggcggcaagcccgtggtgcccaccagactgagcagcagacacaccatggccagactgagcagaagcagcgagcccagccaggagagacccaccgccctggaggactaccccagagccatcaacaacggcaacagcgtgccctacagcgaccacagcctggacagaaacaacaacccccagagcgagctggcccccagcagaggcggcggcatcctgtgcgtgtgcctggtgagccccgccagacccagcaccctgctggccctgagcagaccccccctgtgcccctggtgcagcttcagcggcctgagcttcgtgttctgcctgttctgcctggccatcaaccacggcagctag

SEQ ID NO: 58854 - DNA, 1602 bp, Artificial Sequence
  derived and/or modified sequence
atgatctccagctcctcagtccattcccgtacctttaataccagcaacgccctcggaccagtttgtaagcacaagaagccactatctgcagcaaaggcttgtattagtgagattctgcctagcaaattcaagcccaggctctccgctccttcagcactccttcaggaacagaagagcatcctgctaccctctgagaaggcacaatcttgcgagaatctatgtgtatccggcagtctgaacgactcaaaaaggggtctgcctctgcaggtgggaggtagtatcgaaaatctgttaatgcgaagcagacgggattatgattcaaaatcatcaagcacaatgagcctacaggaatattctacgagcggccgtaggccctgcccccttagccggaaggcaggcatgcagttcaccatgctttacagagacatgcatcagatcaatcgttctggactgttcctgggcagcatcagcagttcctccagcgtccgcgacctcgcttctcattttgagaaatctagtctcgccctgtctcggggggagttggggccaagtcaggaggggagcgagcacatccctaagcacaccgtcagttctcggattacagcgttcgagcagctcatccagcgcagccggtccatgcctagcctagatctgtcaggccgattatccaaatctccaaccccagtgctctcaagaggttctctgacgtccgcccgaagcgctgaatctctcctcgaatcaactaagctccatccgaaagagatggatggaatgaacagttcaggtgtgtatgctagccctacatgcagcaacatggcccatcacgctctgtccttcagggggctcgtcccatccgagcctctgtcaacatgttctgacgatgttgatcgctgtagcaatatctccacagactccagagagggctctgggggaagcgtgcacggcgatttccctaagcaccgcttgaacaagtgtaaaggaacttgccccgcctcctatactagattcacaaccatccgcaaacatgagcagcagcagacatcccgccagcctgagtggaggctcgacgctcgtggcgataagtcaaccctgttgcggaacatctatctgatgtctcctctcccctttagattgaaaaaacctctgcatcatcaccctcgacaacccagtcctggagacagttctggcctactggtgggccaaaaacctgatctgccatcgcagcctcaccaagatcagccacccagcgggggcaaacccgtcgtgccgacacgcctgagttccagacataccatggctcgcctgtccaggagctccgagccatcacaggaacgccctacggcattggaggactatcctcgcgccatcaacaatggtaacagcgtcccttatagtgatcactctctagaccgcaacaacaatcctcaaagtgagctggccccctctagagggggcggaattctgtgcgtgtgcctggtgtccccagctcggccatctactctgctggctctgtcgcgacctcccctgtgtccctggtgctccttctctggactttcgttcgtcttctgtctgttctgtctcgcaataaatcatggcagctag

SEQ ID NO: 58855 - DNA, 1602 bp, Artificial Sequence
  derived and/or modified sequence
atgatcagcagcagctctgtgcacagcaggaccttcaacaccagcaatgccctgggccctgtgtgcaagcacaagaagcccctgtctgctgccaaggcctgcatcagcgagatcctgcccagcaagttcaagccccggctgagcgcccccagcgccctgctgcaggagcagaagagcatcctgctgcccagcgagaaggcccagagctgtgagaacctgtgtgtgtctggcagcctgaatgacagcaagaggggcctgcccctgcaggtgggcggcagcattgagaacctgctgatgaggagccggcgggactatgacagcaagagcagcagcaccatgagcctgcaggagtacagcaccagcggcagaagaccctgccccctgagcaggaaggccggcatgcagttcaccatgctgtacagagacatgcaccagatcaacagaagtggcctcttcctgggcagcatcagcagcagcagctctgtgcgggacctggccagccactttgagaagagcagcctggccctgagcagaggagagctgggccccagccaggagggcagcgagcacatccccaagcacacagtgagcagccgcatcacagcctttgagcagctgatccagaggagccgctccatgcccagcctggacctgagcggccgcctgagcaagagccccacccctgtgctgagccggggcagcctgaccagcgcccggtctgctgagagcctgctggagagcaccaagctgcaccccaaggagatggatggcatgaacagcagtggagtgtatgccagccccacctgcagcaacatggcccaccacgccctgtccttccggggcctggtgcccagcgagcccctgagcacctgcagtgatgatgtggaccgctgcagcaacatcagcacagacagccgggagggcagcggcggctctgtgcacggggacttccccaagcaccggctgaacaagtgcaagggcacctgcccagccagctacacccgcttcaccaccatcaggaagcatgagcagcagcagaccagccggcagcctgagtggaggctggatgcccggggggacaagagcaccctgctgaggaacatctacctgatgagccccctgcccttccggctgaagaagcccctgcaccaccacccccggcagcccagccctggggacagcagcggcctgctggtgggccagaagccagacctgcccagccagccccaccaggaccagccccccagcggcggcaagcctgtggtgcccacccggctgagcagccgccacaccatggcccggctgagccgcagcagcgagcccagccaggagcggcccacagccctggaggactacccccgggccatcaacaacggcaacagcgtgccctacagcgaccacagcctggacaggaacaacaacccccagagcgagctggcccccagccggggcggcggcatcctgtgtgtgtgcctggtgtccccagcccggcccagcaccctgctggccctgagcaggcctcccctgtgcccctggtgcagcttcagcggcctgagctttgtgttctgcctcttctgcctggccatcaaccacggcagctag

SEQ ID NO: 58856 - DNA, 1602 bp, Artificial Sequence
  derived and/or modified sequence
atgatcagcagcagcagcgtgcacagccggaccttcaacaccagcaatgcgcttggtcccgtctgcaaacataagaagcccctttccgcggccaaagcttgtatcagtgagatactgccttctaaattcaagcctagactgtccgctccatccgcccttttacaggagcaaaagtctatcctcctgccatccgaaaaagcccaatcgtgtgaaaatctgtgtgtctctggtagcctgaatgacagcaaacgcggtttgcccttgcaggtcggtggcagtatcgaaaatttactgatgagatcccgccgcgactacgactccaaaagctcctctaccatgtctctccaggagtattcaaccagcgggcgccgcccatgtcctttaagcagaaaggccggaatgcagtttaccatgctctaccgcgacatgcaccaaataaaccgtagtggcctttttctgggctcaattagcagtagtagctcggtccgcgacctggcgtctcacttcgaaaaatctagtctggctctgtccaggggcgagctgggccccagccaggaaggcagcgagcatatccctaaacacacggtctcatctcgcataaccgctttcgagcaactgatccagcgatcacggtcaatgccttcgctggatttgagcgggagacttagcaagtcccccaccccggttctgtccaggggctctctgacctcagcccgatccgcagagtctctgttggagagcaccaaactgcaccccaaggaaatggatggtatgaacagctctggtgtgtatgcctcccccacatgtagcaatatggctcatcacgcattgagtttccgcgggctcgtgccttctgaaccactatctacctgttctgacgacgtcgaccgctgcagtaacatctccacggactcaagagaaggatccggaggatccgtccacggcgactttccaaagcacagactgaataagtgtaagggtacatgtcctgcttcatacacaaggtttaccacaattcgtaaacacgaacagcagcaaacctcaagacagcccgagtggcgcctggacgcccggggcgacaaatccacgctgctgagaaacatttacctgatgtctcccttaccttttcggctcaaaaaacctttacaccaccacccgcgccaaccctctccaggcgattcatcaggtttgttggtagggcagaaacccgatttgccgagccagcctcatcaggatcagcctccgtcggggggcaagccggttgtcccaactaggcttagctcccgccacacgatggcaagactgtcccgttctagcgagcctagtcaagagcgacccaccgctctggaagattatcctagggctatcaataatggaaactcagtcccttactctgaccacagcctggaccgaaataataatcctcagagcgaattagcaccctcccggggaggcggcattctctgcgtctgcctcgtgtctcctgcacgcccatccacccttctggccctgagccgaccccctctctgtccttggtgtagtttcagtggcttaagcttcgtcttttgcttgttttgtctagcaatcaaccatgggtcgtag

SEQ ID NO: 58857 - DNA, 2301 bp, Artificial Sequence
  derived and/or modified sequence
gattattttgcttccggacctcgactggaaattttttaaaagcccttatgacaaatgagcatgttacctctcctttttctttttagcagctttcagctttaacctaatgggtctatttattttattctgcatgcttaccagtggatcgtaaaggtgggaatgctcacatgatttcttcatcttcagtccatagccgaacgtttaacactagcaatgcgttaggccctgtgtgtaagcacaagaagcccctgtcagctgcgaaggcctgcatttcggaaatccttccatccaaattcaaacccaggctctctgctcccagcgctcttttgcaggaacagaagagtatcctcttgccctcagagaaggctcaaagctgtgagaacctttgtgtttctggttctttaaatgattccaaaagaggcctccccctccaagtgggagggagcattgagaacctgctcatgcgctcccgacgggattatgacagcaagtcgagcagtaccatgagcctccaggagtacagcaccagcggcaggaggccctgtcctctctcaagaaaggctgggatgcagttcaccatgctttatcgggacatgcaccagatcaaccgatctggcctcttcctgggctccatctcctcctcctcgagtgtgcgggatcttgcctcccactttgaaaagagtagcctggcattgtccaggggtgagctgggccccagccaggagggctcggaacacatccccaagcacaccgtctcttcccgcatcaccgcttttgagcagctgattcagcggtcccgttccatgccatccctggacctgtccggaaggctgagcaagtctcccacacctgtgctgtcccggggcagcctgacctcagcccgctcggccgagtccctacttgagtcaaccaagctccatcccaaggagatggatgggatgaactccagtggggtctatgcttccccaacatgtagcaatatggcacaccatgccttgagcttcaggggccttgtgccttctgagcctctctccacctgctctgatgacgtggaccgctgttcaaatatctccactgacagcagagaaggcagtggcggcagtgttcatggagatttccccaaacatcgcctcaacaagtgcaagggcacctgcccggcctcatacacccgcttcaccaccatccggaagcatgagcagcagcagacctctagacagcctgagtggcgcctggatgccagaggggacaagagcaccctcctcaggaacatctacctaatgagcccccttcctttccggctgaaaaagcccctccaccaccaccccagacaaccttcccctggtgactcctcaggcctcctggtgggccagaagccagacctccccagtcagccccatcaggaccagcccccttctggggggaagcccgtggttcccacacgcctgtcttcccgacacaccatggccaggcttagccgcagctcagagccctctcaggagagacccacggccctggaggactacccaagggccattaataatggaaactccgtgccatactcagaccacagcctggacaggaacaacaacccacaaagtgaactggcaccatcccgtggaggtggcattttgtgtgtttgcctagtctcacctgcccgtccctccactttgcttgcattatcccgtcctcctctgtgcccttggtgctcattttctggtctgtcctttgttttctgtttgttttgcttggcaattaatcatggctcgtagtggctgcacttctttaaaaacaaagcccccatgtcatttagactaaccaccaaactgtgtttcgaaagaaaaattggccgtttagctcaactgagaaatgtgttcatttgaactcttgaaccccttgctgtttgcaccaatccccaacataccccatggttttttgagaggcagcctctctcaatggccctatatgtgtgtgagtgtgtgccttgtccctataaggtcctgcacgcctctttgtagggacactttacaaagaaagttctctcattttgctcaccttttgccttttgagtagttttctttgcattaaactagttcacaaataaatccaaaaaatggggtggggggtggaatttttttttccttcagaattcgaccattgatcattaatcaagaatgacttcaaaattttgatatttataatagatgaaaggtgaactcttttcgcaagctggtttccagcgaaatctttgcctgttttaactctactttgttgttttaaagattcagaatcgccaagacattt

SEQ ID NO: 58858 - DNA, 1602 bp, Artificial Sequence
  derived and/or modified sequence
atgatcagctctagttcagtccattctaggacttttaatacctccaacgctctcggcccagtctgtaaacacaagaagcccctgtctgccgcaaaagcatgcatctccgagatcctcccctcaaaattcaagccaagactgtctgccccttcagcactgctccaggagcagaaaagcattcttctgccatctgaaaaagcccaaagctgcgagaacctatgtgtgtccggttcactaaacgatagcaagcgtggcttacccttgcaggtggggggtagtattgaaaatctgctgatgcgcagccgcagagactatgacagcaaatcctcttccaccatgtcactacaggaatactctacatccgggagaagaccctgccctctttcccgaaaggcgggaatgcagttcaccatgctgtatagagacatgcaccaaattaatcgttcaggactttttttgggatcaatctcttcctctagttctgtccgggaccttgccagccatttcgaaaaatccagcttggcactttcgcgtggggaactgggaccttcccaggaggggagcgagcatatccctaagcataccgtctcctcaagaataaccgcctttgagcaactgatccaacgctcccggagcatgccatcactcgatttatccggtcggctgtcgaagagccctacccctgtcctgtctaggggcagccttactagtgccagatcagctgaatcacttttggaaagcaccaagctacaccctaaagaaatggatggaatgaacagcagcggagtgtacgccagtccaacctgcagtaacatggcgcatcacgcactttcatttaggggcctggtgccatctgagcctttgagcacttgctctgacgacgtggatcgatgctctaatatttcaacagattcccgcgaaggcagtggaggatccgtgcatggtgatttcccaaagcataggttaaataagtgcaaggggacctgccccgctagttatacaaggtttaccacaatcaggaagcacgagcaacaacagaccagcagacagcccgagtggcggttggatgccaggggagacaaaagtactttgctgcggaatatttatctgatgagtcccctgcccttccgtctgaagaaacctcttcaccaccacccccgtcaaccctctcctggggacagttccggcctattggtgggacagaaacctgacctgccatcgcagccccatcaagatcagcccccttcaggcggtaagcctgtggtaccgacacgcttgtcatcaagacacacaatggccagactgtctagatccagcgagccatctcaggagcggcctaccgccctggaggattacccaagagcaataaataatggcaattcagtaccctattctgatcactccttggacagaaacaataatcctcaatctgagctggcccctagcaggggaggcggaatcctgtgcgtatgtctggtgtcccccgcacggccatcaacattgctggcgcttagccgaccccctctctgcccctggtgctctttctctgggttgagtttcgttttctgtctattttgtctggcaattaatcacgggagctag

SEQ ID NO: 58859 - DNA, 333 bp, Artificial Sequence
  derived and/or modified sequence
atgagctgccagcagaaccagcagcagtgccagcccccccccaagtgtccacctaaatgtacccccaaatgtcctcctaaatgtccaccaaaatgtctaccacaatgcccagcaccatgctcaccggctgtgagctcatgttgtggaccaatttcaggcggatgttgcggcccatcatccggtggctgctgcaacagtggggccggagggtgctgtttgtcacaccacagacccaggctgtttcacagacgccggcatcagtctccagattgctgtgagtccgagccctctggggggtccggctgctgtcattcttctggcggatgttgctag

SEQ ID NO: 58860 - protein, 1275 aa, Artificial Sequence
  derived and/or modified sequence
MDWDDEYSHNSFDLHCLLNSFPGDLEFEQIFSDIDEKIEQNAASIKHCIKEIQSEINKQCPGVQLQTTTDCFEWLTNYNYSTSESSFISHGDLIKFFKTLQDLLKNEQNQEEMTLDLLWDLSCHSSVSFPSTLSGTSFHFLSRTSLHSVEDNSSMDVKSMWDDIRLHLRRFLVSKLQSHNEINNSQQKILLKKQCLQQLLFLYPESEVIIKYQNIQNKLLANLLWNCFPSYNRDSNLDVIAHGYQSTMLKLYSVIKEDFNTLCEILAPSSMVKFIKETYLDTVTEEMAKFLENFCELQFRENAVRVVKTSKSSSKHRGAVHALVTTECPQKGRNFSLPLDKVEFLSQLIKSFMKLEKGVQELFDEILLSLKITRDTSGILEKSDREVVMEKPRANETNIPSEQSLPGKEATLLDFGWRSAFKEVSLPMAHCVVTAIEGFSTKILQQEQNERSSAVSYAMNLVNVQQVWQDSHMFPEEEQPKKIGKFCSDIMEKLDTMLPLALACRDDSFQEIRANLVEACCKVATAVLQRLQERAKEVPSKAPLKNLHTYLSTAVYVFQHFKRYDNLMKEMTKKPIFLVLVQRYQEFINTLQFQVTNYCVRVCATSILQDAESHHWDDYKAFYEGERCSFSIQMWHYFCWSLHYDLWTILPPKLAQEILVEVLEKSLSLLASRYARAHPSRKRTPQLRLDVTTILICTENMLWSVCTSVQKLLNPHQHTDDKIFKIHTHCNNLFTTLVILTSPLTELYKTFQHGLDESASDSLKSFFKQPLYWVSCISHFYPSLLRTPSAGGLKAEGQLKLLLSQPRCNWNLLLETLLHHDGLLLRILLKSSKQVSDTENNLNQGPSLMEAIFKILYHCSFSPQTFANVFVSYMEEEQLWDFLYNIPVSTCVEYELEVIRCLRLALTDAIKDTVQQIVSVMSSRRNCETNLNKHIVPDCLLESMPKEWNYSPKETNRKESCKSFTRLTAQAVSIVISKLPTVIACLPPPVKYFFFLSERKMSKKFVELKKAGLLVWNLIVIICRIFEDGNTVELLTGASLDRWSKEKLGLICMCLKSIMGDQTSIHNQMIQKVIQSIEQQKPNWIERQLLKARKLSTECAFMTIEKSTALQEGDVALELTEQKINTMVLDLCHKPGGREYLRQIYHIMQLNEEYLKEQLFSMNSSEEKPLPIRPLKTTLRSIEDQPSAFNPFHVYKAFSENMLDQSAITKWNWNWAKLLPNYLRLDKMTFSVLLKNRWEMKKDETLEEEEKAILEHLKQICTPQNSSASDNIEEQ

SEQ ID NO: 58861 - DNA, 3828 bp, Artificial Sequence
  derived and/or modified sequence
atggactgggacgacgagtacagccacaacagcttcgacctgcactgcctgctgaacagcttccccggcgacctggagttcgagcagatcttcagcgacatcgacgagaagatcgagcagaacgccgccagcatcaagcactgcatcaaggagatccagagcgagatcaacaagcagtgccccggcgtgcagctgcagaccaccaccgactgcttcgagtggctgaccaactacaactacagcaccagcgagagcagcttcatcagccacggcgacctgatcaagttcttcaagaccctgcaggacctgctgaagaacgagcagaaccaggaggagatgaccctggacctgctgtgggacctgagctgccacagcagcgtgagcttccccagcaccctgagcggcaccagcttccacttcctgagcagaaccagcctgcacagcgtggaggacaacagcagcatggacgtgaagagcatgtgggacgacatcagactgcacctgagaagattcctggtgagcaagctgcagagccacaacgagatcaacaacagccagcagaagatcctgctgaagaagcagtgcctgcagcagctgctgttcctgtaccccgagagcgaggtgatcatcaagtaccagaacatccagaacaagctgctggccaacctgctgtggaactgcttccccagctacaacagagacagcaacctggacgtgatcgcccacggctaccagagcaccatgctgaagctgtacagcgtgatcaaggaggacttcaacaccctgtgcgagatcctggcccccagcagcatggtgaagttcatcaaggagacctacctggacaccgtgaccgaggagatggccaagttcctggagaacttctgcgagctgcagttcagagagaacgccgtgagagtggtgaagaccagcaagagcagcagcaagcacagaggcgccgtgcacgccctggtgaccaccgagtgcccccagaagggcagaaacttcagcctgcccctggacaaggtggagttcctgagccagctgatcaagagcttcatgaagctggagaagggcgtgcaggagctgttcgacgagatcctgctgagcctgaagatcaccagagacaccagcggcatcctggagaagagcgacagagaggtggtgatggagaagcccagagccaacgagaccaacatccccagcgagcagagcctgcccggcaaggaggccaccctgctggacttcggctggagaagcgccttcaaggaggtgagcctgcccatggcccactgcgtggtgaccgccatcgagggcttcagcaccaagatcctgcagcaggagcagaacgagagaagcagcgccgtgagctacgccatgaacctggtgaacgtgcagcaggtgtggcaggacagccacatgttccccgaggaggagcagcccaagaagatcggcaagttctgcagcgacatcatggagaagctggacaccatgctgcccctggccctggcctgcagagacgacagcttccaggagatcagagccaacctggtggaggcctgctgcaaggtggccaccgccgtgctgcagagactgcaggagagagccaaggaggtgcccagcaaggcccccctgaagaacctgcacacctacctgagcaccgccgtgtacgtgttccagcacttcaagagatacgacaacctgatgaaggagatgaccaagaagcccatcttcctggtgctggtgcagagataccaggagttcatcaacaccctgcagttccaggtgaccaactactgcgtgagagtgtgcgccaccagcatcctgcaggacgccgagagccaccactgggacgactacaaggccttctacgagggcgagagatgcagcttcagcatccagatgtggcactacttctgctggagcctgcactacgacctgtggaccatcctgccccccaagctggcccaggagatcctggtggaggtgctggagaagagcctgagcctgctggccagcagatacgccagagcccaccccagcagaaagagaaccccccagctgagactggacgtgaccaccatcctgatctgcaccgagaacatgctgtggagcgtgtgcaccagcgtgcagaagctgctgaacccccaccagcacaccgacgacaagatcttcaagatccacacccactgcaacaacctgttcaccaccctggtgatcctgaccagccccctgaccgagctgtacaagaccttccagcacggcctggacgagagcgccagcgacagcctgaagagcttcttcaagcagcccctgtactgggtgagctgcatcagccacttctaccccagcctgctgagaacccccagcgccggcggcctgaaggccgagggccagctgaagctgctgctgagccagcccagatgcaactggaacctgctgctggagaccctgctgcaccacgacggcctgctgctgagaatcctgctgaagagcagcaagcaggtgagcgacaccgagaacaacctgaaccagggccccagcctgatggaggccatcttcaagatcctgtaccactgcagcttcagcccccagaccttcgccaacgtgttcgtgagctacatggaggaggagcagctgtgggacttcctgtacaacatccccgtgagcacctgcgtggagtacgagctggaggtgatcagatgcctgagactggccctgaccgacgccatcaaggacaccgtgcagcagatcgtgagcgtgatgagcagcagaagaaactgcgagaccaacctgaacaagcacatcgtgcccgactgcctgctggagagcatgcccaaggagtggaactacagccccaaggagaccaacagaaaggagagctgcaagagcttcaccagactgaccgcccaggccgtgagcatcgtgatcagcaagctgcccaccgtgatcgcctgcctgcccccccccgtgaagtacttcttcttcctgagcgagagaaagatgagcaagaagttcgtggagctgaagaaggccggcctgctggtgtggaacctgatcgtgatcatctgcagaatcttcgaggacggcaacaccgtggagctgctgaccggcgccagcctggacagatggagcaaggagaagctgggcctgatctgcatgtgcctgaagagcatcatgggcgaccagaccagcatccacaaccagatgatccagaaggtgatccagagcatcgagcagcagaagcccaactggatcgagagacagctgctgaaggccagaaagctgagcaccgagtgcgccttcatgaccatcgagaagagcaccgccctgcaggagggcgacgtggccctggagctgaccgagcagaagatcaacaccatggtgctggacctgtgccacaagcccggcggcagagagtacctgagacagatctaccacatcatgcagctgaacgaggagtacctgaaggagcagctgttcagcatgaacagcagcgaggagaagcccctgcccatcagacccctgaagaccaccctgagaagcatcgaggaccagcccagcgccttcaaccccttccacgtgtacaaggccttcagcgagaacatgctggaccagagcgccatcaccaagtggaactggaactgggccaagctgctgcccaactacctgagactggacaagatgaccttcagcgtgctgctgaagaacagatgggagatgaagaaggacgagaccctggaggaggaggagaaggccatcctggagcacctgaagcagatctgcaccccccagaacagcagcgccagcgacaacatcgaggagcagtag

SEQ ID NO: 58862 - DNA, 3828 bp, Artificial Sequence
  derived and/or modified sequence
atggattgggatgacgaatacagtcataactccttcgacctgcactgcttactgaactcttttccaggggacttggaatttgagcagatatttagtgacattgacgagaaaattgagcagaatgcagcctccattaagcactgcatcaaggaaatccaatccgagatcaacaagcagtgccctggcgtgcagctacagacaaccacagactgctttgagtggctgacgaactataattacagtacttccgaatccagtttcatcagccacggtgatctgattaaattcttcaagaccctgcaggacctgcttaagaatgaacagaaccaggaagagatgacccttgacctgctctgggatctgagttgccattcaagtgtgagtttcccatccacgctctcgggtacctcttttcatttcctgagtaggacatcactccacagcgtggaggacaatagtagcatggacgttaagagcatgtgggacgacatccgacttcatttacggcgctttctggtgtccaaactacaaagccataacgagatcaataactcccagcagaaaatactgctcaagaagcaatgtctacagcagctcctcttcctttacccggaatcagaggtgatcatcaagtaccagaacattcagaataaactcctggccaatcttctttggaactgtttccctagctataaccgagatagcaatctggacgtaatagctcatggttaccagagcaccatgctgaaactctactcagtgatcaaagaggatttcaataccctgtgcgaaatcctcgcaccttcctccatggtgaaattcatcaaggagacctacctggacactgtaactgaggaaatggcgaaattcctcgagaatttctgcgagctccagttccgcgagaacgcagttagagtggttaagacctccaaatccagctccaagcaccggggtgctgtgcatgcactggtgacaaccgaatgcccccaaaaagggaggaacttctcgctcccactggataaagtggagttcctttcccagctgataaagtcatttatgaagctggaaaagggtgtccaggagctatttgatgagatccttctgtctctgaagatcactcgggatacttcaggtatactcgaaaaatcagatagagaggtggtgatggaaaaaccaagagccaacgagacaaacattcccagcgaacagagtcttcccggaaaagaggccaccttgctggactttgggtggcggagcgcctttaaggaagtgagtttacctatggcccattgcgttgtgactgccattgagggttttagcaccaaaattctgcagcaggaacagaacgagagatctagcgccgttagctatgctatgaacctcgtaaacgtgcagcaggtttggcaggattcgcatatgtttcccgaagaggagcagccaaaaaagattggcaaattctgctctgacataatggagaaactggatactatgcttcccctggccctcgcgtgcagggatgactcctttcaggaaatccgggccaatcttgtcgaggcctgctgtaaagtcgcaactgccgtcctgcagagactacaggaaagagctaaagaagtgccctccaaagctccactgaagaacctgcacacttacctctctactgccgtgtacgtcttccagcacttcaaacggtatgataacctgatgaaagaaatgacgaagaaacccatcttcctcgtcctcgttcagaggtatcaggagttcatcaacacactgcagttccaggtgactaactattgcgtgagggtgtgtgctacaagtattttacaagatgccgagtcccatcattgggacgattacaaggcgttctatgaaggcgaaaggtgtagcttcagtattcagatgtggcattatttctgctggagcctgcattacgatttatggacaattctacctcccaagttggcacaggaaatcctggttgaggtgctcgagaagtctctgtcactgctggcctcacgctacgcccgcgctcacccaagtagaaaaagaaccccacagctgcggctggatgtcacgacaatcctaatttgcactgaaaatatgctgtggagcgtgtgcacctccgtgcagaaacttttgaatcctcatcaacatactgatgataagatcttcaagatccatactcactgcaacaacctctttacgacattggtgatactgactagccccctgactgagctgtacaaaacgtttcagcatggcctggacgaatcggcatctgattcactgaagtcctttttcaaacagcccttatactgggtttcctgcataagccacttttatcccagcttactccggacccctagcgctggggggctgaaggctgaagggcagctcaaactgttgttgagccagccacggtgtaattggaatctgctgctcgaaacccttctccaccatgatgggcttctcctgcgcatccttctcaaatcctccaaacaggtctccgacactgagaacaatctgaaccaggggccaagtctcatggaggccatctttaagatcctttaccactgctccttttctccccaaaccttcgccaacgtgtttgtgagttatatggaagaggaacagctgtgggatttcttgtacaatattccggttagcacttgcgtcgagtatgagctcgaggtaatccgctgtctcagactggcactcaccgacgccataaaagacacagtacagcagatagtgtctgtgatgtcttcccgacgcaactgcgaaaccaaccttaataagcacatcgtgcctgactgcctattagagagcatgccaaaagagtggaactatagcccaaaggagacaaacagaaaagagtcatgcaagagctttactcggctcacagctcaagctgtgtccatagtcatttccaagttaccgacagtcattgcctgtctgccaccgcccgtgaagtactttttcttcctttcagagaggaagatgtcgaagaagttcgtcgaactcaagaaagccgggctgcttgtctggaacctcatcgtaattatttgcaggattttcgaggacggcaacacagttgaacttctgacaggagcatccttagatagatggtccaaagaaaaactggggctgatctgcatgtgcctcaaaagcatcatgggagatcagaccagcattcataatcagatgatccagaaagtgattcaatccatcgaacagcagaagccaaactggattgagcggcaactcttgaaagcgcgtaaattgagcactgaatgcgcttttatgactatcgagaagagcaccgcgttacaagagggagatgtggcacttgagctgactgaacagaagatcaacactatggtgctcgacttgtgtcacaaaccaggcgggcgcgaatatctgagacagatctatcatattatgcaacttaatgaagaatacttaaaagagcaactattttcgatgaactcctctgaggaaaagcctctacctatacggccccttaagactactctcagaagtatcgaagatcagccatccgcttttaatccattccacgtttacaaggccttctccgaaaacatgctggaccagtcagctatcactaagtggaattggaactgggcgaaattactacctaactacctacgcttggacaagatgactttcagcgttctgttgaagaaccgttgggaaatgaaaaaagacgagactctcgaggaagaggaaaaggccattctggagcacctcaagcagatttgcacaccgcaaaacagttcagccagcgataatatcgaggagcagtag

SEQ ID NO: 58863 - DNA, 3828 bp, Artificial Sequence
  derived and/or modified sequence
atggattgggatgatgagtatagccacaatagcttcgatctgcattgcctcctgaactctttccccggagaccttgaattcgaacagatcttctccgacattgacgagaaaatcgaacagaacgctgccagcataaaacactgtatcaaggaaatccagtctgagattaataagcagtgcccaggcgtgcagttgcagaccactactgactgcttcgaatggctgaccaactataactactccacgtcagagtcctcatttatcagtcacggtgacctgatcaagttttttaagacactacaagacctccttaagaacgagcagaatcaggaagagatgacacttgatctcctgtgggacttgtcgtgccattcatctgtgagcttcccctcaacgctgagtggaacaagtttccactttctgagtcgtacctccctccatagcgtcgaagacaactcctccatggatgtgaagtctatgtgggacgacatcagactccacctgcggcgttttctcgtgtcaaagctgcagtcccacaatgaaatcaacaattcccagcaaaagatcctgttgaagaagcagtgcctgcagcagctgctattcctgtaccctgaatctgaagtgattattaaatatcagaatatccagaacaaactgctggcaaacctgctgtggaactgtttcccaagctataacagggatagtaatctggacgtcattgcccatggttaccagagcaccatgctaaaactctacagcgtcattaaagaagactttaatacgttgtgcgagatcttggccccatcatcaatggtgaagttcatcaaggaaacatatctcgatactgtgaccgaggagatggccaaattcctggagaacttctgtgaattgcaatttcgggaaaatgctgtgagggttgtgaagacatcgaagagtagttccaaacataggggcgctgtgcacgctctggtgaccaccgaatgtcctcagaaggggcggaatttcagcctgcctctggacaaggtcgaattccttagccagctcatcaagtcgtttatgaaacttgagaaaggcgtccaggaacttttcgacgagattcttctgtctctgaaaatcaccagggacacctccggtatcctagagaaaagcgacagagaagtggtcatggagaaaccccgtgctaatgagactaatattccttccgaacagagcctgcccggcaaggaagctacattgctggactttggttggaggtcggcgttcaaggaggttagtctgccaatggcacattgtgtggtaacagctatagagggtttttcaacaaagatccttcaacaggagcagaacgagcgaagctccgccgtgtcttatgccatgaatctcgtgaacgtccagcaggtatggcaagatagccacatgtttcccgaagaagaacagcccaaaaaaatcggtaagttctgcagcgatatcatggaaaaactcgataccatgctgcccctggctttggcatgccgtgacgacagcttccaggagatccgggcaaatttagtagaggcatgctgcaaagtagcaactgcagtcctccagaggctgcaagagcgcgccaaggaggttccaagtaaagctccccttaagaaccttcatacgtacctctcaacagccgtatatgtgtttcagcatttcaaacgatacgataatctgatgaaggagatgactaagaagccaatcttcttagtgctggtgcagcggtatcaagaatttattaataccctccagtttcaggtgaccaattactgcgtcagggtgtgcgctaccagcattctgcaggatgccgagtcacaccattgggatgactacaaggctttctacgaaggtgaacgctgctccttcagcattcagatgtggcactacttttgctggagtctgcactacgatctgtggaccatccttcctcccaaactggcccaggaaatcctggtcgaggtgctagagaaatccttatcgttgctggcttcccggtacgcccgcgcacacccgagccgaaaaagaactcctcagctccggctggacgttaccaccattctgatttgtactgagaatatgctttggagtgtatgcaccagcgtgcagaagcttctcaatcctcaccagcacaccgacgataaaatttttaagattcacacacactgcaacaatctgtttaccaccttggtgatactgacttcacccctcacagagctatacaagacctttcagcacggactcgacgaaagcgccagcgactcactgaaatccttctttaagcaacctctctattgggtaagttgcatctctcacttctacccctctctcctacggactccatctgccggcggtctgaaggctgagggtcagctgaagctgctgctttctcaacctcgctgcaattggaacctcctgttagaaactcttctccatcacgacggattactgctcaggatcctcttaaagagctctaaacaagtttccgacaccgaaaataacctcaatcaggggccatcgcttatggaggccatttttaaaattctgtatcattgttctttctctccgcagacgttcgccaacgtgttcgtctcgtatatggaagaggaacaactatgggattttctgtacaacatcccggtgtcaacctgcgtcgaatatgagctggaggtcattaggtgcctacgactggctctcaccgatgccattaaggatacagtgcaacagatcgtcagtgtgatgtcatccaggcgtaactgtgaaaccaacctgaacaagcacatcgtccccgattgcctacttgaaagcatgcccaaagagtggaactattcaccaaaagaaacaaacaggaaagagagttgtaagtcgttcacacggctgacagctcaggcagtcagtattgtcatatccaagctacccacagtgatcgcctgtctgcccccgcctgttaaatatttttttttcttatctgaacgtaaaatgtccaagaagttcgttgagcttaagaaagcaggcctgctggtgtggaaccttatcgttatcatttgcaggattttcgaagacggcaacaccgtcgagctgttgactggcgcgagtcttgacagatggtcaaaggaaaaactcggcttgatctgtatgtgcctcaaatcaatcatgggagaccagacttctatccacaaccagatgatccagaaagtgattcagagcattgagcagcagaaaccaaactggatagagcgtcaactgctgaaggcgaggaaattatctaccgaatgcgcatttatgactatcgagaaatcgacagccctacaggagggtgacgtggccctcgagctcacggagcagaagatcaacacaatggtcctcgatctgtgccataaacctggggggagagaatacttgcggcagatctaccacatcatgcagttgaatgaggagtacctaaaggagcagctgttcagcatgaactcctcagaggagaagccactgcccatccgccccctgaagacaaccctccgaagcatcgaggaccagccttccgcatttaacccgttccacgtgtataaggccttttccgaaaatatgcttgatcagtctgccattaccaagtggaattggaactgggccaagcttttaccaaactacctacgcctggataaaatgacttttagtgtgcttctcaaaaaccggtgggagatgaaaaaggatgagaccctggaggaggaggagaaggctatcctggagcacctgaagcaaatctgcacacctcaaaactcttcagcatccgacaatattgaagagcagtag

SEQ ID NO: 58864 - DNA, 3828 bp, Artificial Sequence
  derived and/or modified sequence
atggactgggatgatgagtacagccacaacagctttgacctgcactgcctgctgaacagcttccctggggacctggagtttgagcagatcttcagtgacattgatgagaagattgagcagaatgctgccagcatcaagcactgcatcaaggagatccagagcgagatcaacaagcagtgccctggggtgcagctgcagaccaccacagactgctttgagtggctgaccaactacaactacagcaccagcgagagcagcttcatcagccacggggacctgatcaagttcttcaagaccctgcaggacctgctgaagaatgagcagaaccaggaggagatgaccctggacctgctgtgggacctgagctgccacagctctgtgtccttccccagcaccctgagcggcaccagcttccacttcctgagcaggaccagcctgcacagcgtggaggacaacagctccatggatgtgaagtccatgtgggatgacatccggctgcacctgcggcgcttcctggtgtccaagctgcagagccacaatgagatcaacaacagccagcagaagatcctgctgaagaagcagtgcctgcagcagctgctcttcctgtacccagagagcgaggtgatcatcaagtaccagaacatccagaacaagctgctggccaacctgctgtggaactgcttccccagctacaacagagacagcaacctggatgtgattgcccacggctaccagagcaccatgctgaagctgtacagcgtcatcaaggaggacttcaacaccctgtgtgagatcctggcccccagctccatggtgaagttcatcaaggagacctacctggacacagtgacagaggagatggccaagttcctggagaacttctgtgagctgcagttcagagaaaatgctgtgcgggtggtgaagaccagcaagagcagcagcaagcacagaggagctgtgcacgccctggtgaccacagaatgtccccagaagggcaggaacttcagcctgcccctggacaaggtggagttcctgagccagctgatcaagagcttcatgaagctggagaagggcgtgcaggagctgtttgatgagatcctgctgagcctgaagatcacccgggacaccagcggcatcctggagaagagtgaccgggaggtggtgatggagaagccccgggccaatgagaccaacatccccagcgagcagagcctgcccgggaaggaggccaccctgctggactttggctggaggtctgccttcaaggaggtgtccctgcccatggcccactgtgtggtgacagccatcgagggcttcagcaccaagatcctgcagcaggagcagaatgaaagaagcagcgctgtgtcctatgccatgaacctggtgaatgtgcagcaggtgtggcaggacagccacatgtttcctgaggaggagcagcccaagaagattggcaagttctgcagcgacatcatggagaagctggacaccatgctgcccctggccctggcctgcagagatgacagcttccaggagatccgggccaacctggtggaggcctgctgcaaggtggccacagctgtgctgcagaggctgcaggagcgggccaaggaggtgcccagcaaggcccccctgaagaacctgcacacctacctgagcacagctgtgtatgtgttccagcacttcaagagatatgacaacctgatgaaggagatgaccaagaagcccatcttcctggtgctggtgcagcgctaccaggagttcatcaacaccctgcagttccaggtgaccaactactgtgtgcgggtgtgtgccaccagcatcctgcaggatgctgagagccaccactgggatgactacaaggccttctatgaaggagagcgctgcagcttcagcatccagatgtggcactacttctgctggagcctgcactatgacctgtggaccatcctgccccccaagctggcccaggagatcctggtggaggtgctggagaagagcctgagcctgctggccagccgctatgcccgggcccaccccagcaggaagaggaccccccagctgcggctggatgtgaccaccatcctgatctgcacagagaacatgctgtggagcgtgtgcacctctgtgcagaagctgctgaacccccaccagcacacagatgacaagatcttcaagatccacacccactgcaacaacctcttcaccaccctggtgatcctgaccagccccctgacagagctgtacaagaccttccagcacggcctggatgagagcgccagtgacagcctgaagagcttcttcaagcagcccctgtactgggtgtcctgcatcagccacttctaccccagcctgctgcggaccccatctgctgggggcctgaaggccgagggccagctgaagctgctgctgagccagccccgctgcaactggaacctgctgctggagaccctgctgcaccatgatggcctgctgctgcgcatcctgctgaagagcagcaagcaggtgtctgacacagagaacaacctgaaccagggccccagcctgatggaggccatcttcaagatcctgtaccactgcagcttcagcccccagacctttgccaacgtgtttgtgtcctacatggaggaggagcagctgtgggacttcctgtacaacatccctgtgtccacctgtgtggagtatgagctggaggtgatccgctgcctgcggctggccctgacagatgccatcaaggacacagtgcagcagatcgtgtctgtgatgagcagcagaagaaactgtgagaccaacctgaacaagcacatcgtgcctgactgcctgctggagagcatgcccaaggagtggaactacagccccaaggagaccaacaggaaggagagctgcaagagcttcacccggctgacagcccaggccgtgtccatcgtcatcagcaagctgcccaccgtgattgcctgcctgcccccacctgtgaagtacttcttcttcctgtctgagaggaagatgagcaagaagtttgtggagctgaagaaggccggcctgctggtgtggaacctgattgtcatcatctgccgcatctttgaagatggcaacacagtggagctgctgaccggggccagcctggaccgctggagcaaggagaagctgggcctcatctgcatgtgcctgaagagcatcatgggagaccagaccagcatccacaaccagatgatccagaaggtgatccagagcattgagcagcagaagcccaactggattgagcggcagctgctgaaggccaggaagctgagcacagaatgtgccttcatgaccatcgagaagagcacagccctgcaggagggagatgtggccctggagctgacagagcagaagatcaacaccatggtgctggacctgtgccacaagccaggcggccgggagtacctgcggcagatctaccacatcatgcagctgaatgaggagtacctgaaggagcagctgttctccatgaacagcagcgaggagaagcccctgcccatccggcccctgaagaccaccctgcggagcattgaggaccagcccagcgccttcaaccccttccacgtgtacaaggccttcagcgagaacatgctggaccagagcgccatcaccaagtggaactggaactgggccaagctgctgcccaactacctgcggctggacaagatgaccttctctgtgctgctgaagaaccgctgggagatgaagaaggatgagaccctggaggaggaggagaaggccatcctggagcacctgaagcagatctgcaccccccagaacagcagcgccagtgacaacatcgaggagcagtag

SEQ ID NO: 58865 - DNA, 3828 bp, Artificial Sequence
  derived and/or modified sequence
atggactgggacgacgagtacagccacaacagcttcgacctgcactgcctactcaattcttttcccggagacctcgaattcgagcaaattttctcagacatcgacgaaaaaattgaacagaacgctgcctctatcaagcactgtataaaggagatacagtctgaaataaacaaacaatgtccgggggtgcaactgcagaccaccacagattgttttgaatggctgaccaactacaactattccacttctgaaagtagttttatctcacatggagacttgattaagttctttaaaacattgcaggacctgctaaagaacgagcagaatcaagaagaaatgacattagatctactgtgggatttgtcttgtcattcttccgtgagcttcccctccacacttagtggaaccagcttccactttctgtcccggacctcccttcactctgtcgaggacaatagctccatggatgtaaagtccatgtgggacgatattaggctgcacttgcggcgctttttggtctctaagctacagtcccataatgagattaacaactcacagcagaaaatcctattaaagaaacagtgccttcagcagttgctctttctgtatcccgaatcggaggttattatcaagtaccaaaacatacagaataaactgctggcaaacttgttatggaactgcttccccagttacaaccgagattccaaccttgatgtaattgcccatgggtaccaaagcaccatgctcaagctgtactctgtgatcaaggaagacttcaatacactatgcgaaatcctggctccttcgtctatggtgaagtttatcaaggagacgtacctggacaccgtgacagaagaaatggccaaatttttggagaacttttgcgagcttcaatttcgggaaaacgctgttcgagtcgttaaaacaagtaaatctagctcaaagcacagaggggcagtgcacgcactggtgaccacggagtgtccccagaagggcaggaatttcagcctacccctagataaggtcgagtttctgtcacaactgattaagtcattcatgaagctggagaagggagtgcaagagctgtttgatgaaatattgttgagtcttaaaattacccgggatacttctgggatcctggaaaagtcggaccgcgaagtagtgatggagaagcccagagctaacgagaccaacatcccctctgagcagtctttacctggtaaagaagcaacactgttagactttggctggaggtctgcgtttaaagaggtcagtcttccaatggcccactgcgttgtgactgccatagagggctttagtacaaaaatcctgcaacaagaacagaacgaacggagcagtgccgtatcctatgccatgaatctggttaatgttcagcaggtctggcaagactcccacatgttcccagaggaggagcaacccaagaagattgggaagttctgcagcgacattatggagaagctcgacacaatgctgcctctggcactggcctgccgcgatgactcatttcaggagattcgggcaaaccttgtggaagcttgctgcaaggtcgccacagctgtgcttcagcggcttcaggaacgagcaaaggaggtgccaagcaaagcacccctaaaaaacttgcacacctatctatctactgcagtatatgtgttccagcacttcaaaaggtacgacaatctgatgaaagaaatgaccaagaagcctatttttttagtactagtccagcggtaccaggaattcatcaataccctccagttccaggtgaccaattactgtgtgagagtctgcgcaacctccatcctgcaggatgccgagagccaccactgggacgactacaaagccttctatgagggcgaaaggtgttcttttagcatccagatgtggcactatttctgctggtctctacattatgatctgtggactattctcccgcccaagctggcgcaggagatcctggtcgaagtgctcgaaaagagtttatcccttctcgcgtcaagatacgcaagggcccacccttctcgaaagcgtaccccgcagctgaggctcgatgttaccaccatcttgatttgcaccgaaaacatgctctggtccgtgtgtacctctgtgcagaagttgctgaatccacatcagcacaccgatgacaaaatttttaagatccacactcattgcaataacttgttcaccacacttgttatactcaccagccctctcaccgaactgtataagacttttcaacatgggctggacgagtccgcaagtgatagcctgaaatcttttttcaaacaaccgttgtactgggtgtcctgtattagccacttttatccctccctgttaaggacgccaagcgctggaggcctcaaggccgagggtcagttgaaactgttactgtctcaacctcggtgtaattggaatttgttattggagaccctgcttcatcatgatggcttactgctgcggatcctgctgaaaagcagtaagcaagtgtctgacaccgaaaataacttaaatcagggaccctcccttatggaggccatttttaaaatcctttaccactgttctttttcaccccagacttttgcaaatgttttcgtgtcttacatggaggaggagcagctgtgggacttcctttacaacataccagtcagcacatgcgtcgaatatgaacttgaggttatccggtgcctacggttggctcttacagacgccattaaagataccgtgcagcagattgtctcagtgatgagctcacgccggaattgtgaaacaaatctgaacaagcacatcgtgcccgactgtcttcttgagtcaatgcctaaggaatggaactattccccgaaggagaccaaccggaaggaatcatgcaaatcatttaccaggcttacggcccaggcagtaagcattgttataagcaaacttccaaccgttatcgcctgcctgcccccgcctgtaaagtacttctttttcctctccgaaagaaagatgagcaaaaagttcgtggaactgaagaaggctggtcttctggtatggaacctcatcgtgattatttgcaggattttcgaggatggaaacacagtggagctgttaactggtgccagcttagatagatggtcaaaggaaaaactgggactgatttgcatgtgtctcaagagcatcatgggcgatcagacttccatccataatcaaatgatacagaaagtgattcagtccattgagcaacaaaaaccaaattggattgagaggcaactcctcaaagctcgaaagttgtccaccgagtgcgcctttatgacgattgagaagagcacggccctgcaggaaggcgacgtggcgttggaactcaccgaacagaaaatcaacacaatggtgctcgacctgtgccataagccaggaggaagggagtacctaagacagatttaccacataatgcagttaaacgaggagtacttgaaggaacagctcttctctatgaattctagtgaggagaaaccactgcctattcgcccactcaagactacactgcggagcattgaggaccagcctagcgctttcaacccgttccacgtctataaagcattcagtgagaatatgctagaccaaagtgccattactaagtggaattggaattgggcaaaactcctaccaaactacttgcgccttgacaaaatgaccttcagtgtgcttctcaagaacagatgggagatgaagaaggatgaaaccttggaagaggaagaaaaagcaattcttgagcatctgaagcagatctgtacaccacagaattcttcagcctcagacaacatcgaggagcagtag

SEQ ID NO: 58866 - DNA, 3828 bp, Artificial Sequence
  derived and/or modified sequence
atggactgggacgacgagtacagccacaacagcttcgacctgcactgtctcctgaactcttttcccggcgacttggagttcgagcagatttttagtgacatcgacgaaaaaatcgagcagaacgcagctagcattaaacattgcattaaagaaatccagtccgagatcaacaagcagtgccctggcgtgcagttgcagacaacaacggattgcttcgagtggctcactaactacaactatagcacctctgaatctagtttcatctcccatggcgacctgattaaattttttaagacactccaagacctcctcaagaacgagcagaatcaggaagagatgaccttagatttgctctgggatctctcttgccactcctctgtgagctttccctccaccctgtctggaacttccttccattttctgtcccgaacatcacttcacagcgtggaggacaattcatcaatggacgtaaaaagcatgtgggatgacatacggctccacctgaggagattcttagtcagcaaactccagagtcacaatgagattaataatagccagcagaagatcctcctcaaaaagcagtgtttgcagcagctgttgttcctctatccagagagtgaagttatcattaagtaccagaacatccaaaacaagttacttgccaatttactgtggaactgctttccaagctataacagagattctaacctggatgtgatcgcccacgggtatcaaagcacgatgctgaaactctacagtgtaattaaggaagattttaacaccctatgcgagatcctcgctcctagcagtatggtgaagttcataaaagaaacatacctcgacacagtcacagaggagatggctaagttcctggagaacttctgcgaactccagtttcgagagaacgccgtacgggtggttaagaccagcaaatcttcttccaagcaccgcggagcagttcacgccttggtcactacagagtgtccacaaaagggccgtaatttctctctccccctggataaggtcgagttcttgtctcagctcatcaaatctttcatgaagctggaaaagggcgtccaggaacttttcgatgaaatccttctatcccttaagatcactcgggatacctcgggcatacttgaaaagagtgaccgggaggttgtaatggagaagccgagggctaacgagaccaatattcctagcgagcagtcactgcccggaaaagaggctactcttctggattttggatggaggtcagctttcaaagaggtctccctcccaatggcccactgtgttgtgactgcaatcgagggattttctaccaaaatcctgcagcaggaacaaaatgagcgtagtagcgcagtcagctacgcaatgaaccttgtgaatgtgcagcaggtgtggcaagattctcacatgttcccagaagaggagcagcccaagaagattggcaagttctgctcagacataatggagaagctggataccatgctgccactcgccctagcttgccgggacgatagtttccaggagattcgcgccaatctcgtggaggcgtgctgtaaagtcgcgaccgccgtgcttcagcggttacaggagcgtgccaaagaagttccgtccaaggctccacttaagaacctgcatacctacttgtctacagccgtatatgtgttccaacactttaagagatatgataatctgatgaaagaaatgactaaaaagccgattttcctggtgctggtacagagataccaagaatttataaatactcttcaattccaagttaccaattactgtgtgcgcgtatgcgccacatcaatattacaagacgctgaaagtcaccactgggacgattacaaagctttttacgagggtgaaagatgctctttttctatacaaatgtggcactatttctgctggtccctgcattatgacctttggacgattctgcctccgaaattagcccaggagatccttgtcgaagtgctggaaaaatcactctcactcctcgcctctcggtacgctcgtgctcacccctcacgcaagaggaccccccagctccgcctcgacgtgaccaccattctgatatgtaccgagaatatgctgtggtcagtctgtacctctgtacagaagctgctgaatccgcatcagcacaccgatgataagatttttaagatccacacacattgcaacaatctttttacaacattggtgatactcaccagtccactaaccgagctttacaaaacgtttcagcacggcctggacgagtccgcctccgactccctaaaatccttttttaaacagccactgtactgggtgagctgtatcagccatttctacccgtccctgctcagaactccaagtgctggcggcttaaaagccgaggggcaacttaaacttcttctttctcagccacggtgtaattggaacctcctcttggagacactgctgcatcatgacggcctgctgttgcgcattcttctgaaatcctccaaacaggtgtcagatacagagaacaatctaaaccaggggccaagcctgatggaggccatttttaaaattctctaccattgctcattttctccccagacattcgcaaacgtgttcgtgagctacatggaggaagagcagctgtgggactttctttataatattcccgtttcaacctgcgtggagtacgagttagaggtgattagatgcttacgcttagcattgaccgacgctataaaagatacggtgcaacagattgttagcgtcatgagttcgcggcgcaattgtgagacaaatctgaataaacacattgtccctgactgcctcctggaaagtatgccaaaagaatggaactactcacccaaggaaaccaataggaaggagtcatgtaaatcttttacgaggctgacggcccaggctgtgagcatagtcatatccaagctccctaccgtaatagcctgtctgccacctccagtcaaatatttcttcttcctgtctgaaagaaagatgagcaagaagttcgtggaattgaaaaaagccggactcctagtgtggaacctgatcgtgataatttgtcgtattttcgaagatggaaatacggttgagctgcttactggcgcttctctggatcggtggtccaaagagaaactggggctaatctgcatgtgcctcaaatccataatgggcgatcaaacctctatccacaaccagatgatacagaaagttatccaatctatagaacaacaaaaacccaactggatagaaaggcagctgctgaaggcccgcaaactgagtaccgagtgcgctttcatgacaattgagaaaagcacggccctccaagagggggatgtcgcactggagctgacggaacagaaaattaatacgatggtactcgacctgtgtcataagcctggcggtcgcgagtacctgaggcaaatttaccatatcatgcaactcaatgaggagtatctcaaggagcagctgtttagtatgaacagttctgaagagaagcccctccctatcagacccctcaagacgaccctgcgctccatcgaagaccagccctcggcatttaacccttttcacgtgtacaaggcattttcagaaaacatgttggaccagtcagccatcaccaaatggaactggaattgggctaagctgctgcccaattatctcaggttggacaagatgactttctccgttctgctgaagaacaggtgggagatgaagaaggacgaaacgttggaggaagaggaaaaggctatcctggagcatctgaagcagatttgcacaccccagaactcatcagcttccgacaatattgaggaacagtag

SEQ ID NO: 58867 - DNA, 3828 bp, Artificial Sequence
  derived and/or modified sequence
atggactgggacgatgagtactctcacaattcctttgatttgcactgcctgctgaactcttttccaggggacctcgagtttgaacaaattttttctgacattgatgagaaaatcgagcagaatgccgcatctattaagcactgtattaaggaaatccaatccgagatcaataaacagtgccctggtgtgcagctgcagacgactacagactgctttgaatggttgacaaactacaattacagtacaagtgagagtagctttatatcacacggagatctaataaagttctttaaaacgctgcaggatcttctaaaaaacgaacagaaccaggaggagatgacgcttgacctgctgtgggatctcagctgccactcttcagtcagctttccttccactctgagcggtacgagctttcactttcttagccgaaccagcttacactcggtcgaggataattccagcatggacgtgaagagtatgtgggatgacatcagacttcacctccgaaggttcctggtttcgaagctccagagccacaatgagataaacaacagccaacagaaaatcctgctgaaaaaacagtgcctgcagcaattgctgttcctgtatccagagagcgaggtcatcataaagtaccagaacatccagaataaactgctggctaacctgctttggaattgtttcccttcatataatcgtgacagcaatcttgatgtcattgctcacggttaccaaagcacaatgctgaaactatatagtgtgatcaaagaggactttaataccctgtgcgaaatcttggcacccagctcaatggtcaagtttattaaagaaacttatctcgatacagtgaccgaggaaatggccaaatttcttgagaacttttgtgagctacagtttcgggaaaatgccgtgagggtggtgaaaacatctaaaagcagtagcaagcaccgcggtgccgttcacgctttagtcactaccgaatgtccccagaagggacggaatttttccctcccacttgacaaggttgaatttctgtcccagctgatcaagagttttatgaagctcgaaaaaggcgtccaagagttattcgacgagattctcttgagcctgaagattactcgcgacaccagtggcatactcgagaagtccgatagagaggtcgtgatggagaaacccagagcaaacgagactaacatcccgagcgagcagagcctgccaggaaaggaggccacactgctcgatttcgggtggcggtcagccttcaaagaggtcagtttgccgatggcacattgtgtggtgacagcaatcgaaggcttttcaaccaagatcctgcagcaggagcagaatgaacgaagtagcgctgtgtcttacgccatgaacttggtgaatgtccaacaagtgtggcaggactctcacatgtttcccgaagaagaacagcccaaaaaaattggcaaattctgtagcgacatcatggaaaagttagacacgatgctgcccttggcactggcatgccgagatgacagcttccaggagataagggctaatctcgtggaagcctgctgcaaggtggcaacagctgtactgcagcgactgcaggagagagccaaggaggtgccatccaaggcgccactaaaaaatctccacacctacctgagcacagccgtgtacgtgtttcagcacttcaaacgatatgacaaccttatgaaagagatgaccaaaaaaccaattttcctggtgcttgtccagaggtaccaagagttcataaacactttgcagtttcaggtgacaaactattgcgttagagtgtgtgccacctcaattttacaagacgcagaatcccatcactgggatgactataaagcattctatgagggtgagaggtgttcattctcaatccagatgtggcactacttttgttggtcattgcattatgatctgtggactattctgccacccaagcttgcccaagagattttggtagaggttctagagaaatctctgtctttactcgcttcacgatacgctcgcgcacatcccagtcgaaagagaacccctcagcttcgcctcgacgtgaccactattctcatctgtaccgaaaacatgctgtggtcggtatgcacatctgtgcagaaacttcttaatccacatcagcatactgatgacaagatatttaaaatccacacgcattgtaacaatctcttcactaccctggtgattctaacatctcccttgactgagttgtataaaacctttcagcacggcctggacgagtcggcgtctgacagcctgaagtcttttttcaagcagcctctttactgggtgtcctgcatcagccatttctatccctccttgctgaggactcctagcgcaggagggctgaaggcggagggtcagctgaagttgttgctgagtcagccccgttgcaattggaaccttctcctggagaccctgctgcaccatgatggcctgctgcttagaatccttcttaaaagtagtaaacaggtgagcgacacagagaacaacctgaatcaaggcccatcactgatggaggcgatttttaagatcttgtatcactgttctttctcgccgcagaccttcgcaaatgtgtttgtgtcctatatggaggaggagcagctgtgggacttcctttacaacatcccggtgtcaacatgtgtggaatatgaactcgaagtgataagatgcttgcggcttgccctgactgacgccatcaaggacactgttcaacagatcgtgtccgttatgtcttctcggaggaattgtgagactaacttgaacaagcacattgttcccgattgtctcttggaatcaatgcccaaagagtggaattactcaccgaaggaaacaaatcgcaaagagtcttgcaagtctttcacccggttgactgcccaggctgtgtccatcgtcatcagcaaattgcccaccgtgatcgcttgcctccctccacctgtaaaatacttcttttttctctctgagaggaaaatgagcaagaagttcgtggaactgaagaaagctggcctgcttgtgtggaacctcatagtgattatttgccgtatatttgaggacggtaatactgtggagttactcaccggcgcatccttggataggtggagtaaagaaaaactaggcttaatctgtatgtgcctcaagtccatcatgggcgaccagacgtcaatacacaatcagatgatccagaaagttatacaaagcattgagcagcagaaaccaaattggatcgaacgacagctcctgaaagctcgcaaattgtcaactgaatgcgcatttatgactatcgagaagtcgactgcactccaagagggcgacgtcgccctagaactcactgagcagaagatcaacaccatggtgttggatctgtgccacaaacccggaggccgtgagtatctccggcaaatctaccatataatgcagctcaatgaagaatatcttaaggaacagctattcagtatgaatagttccgaggaaaaacccctccccatacgccctcttaaaaccactttacggtcaattgaagaccaaccaagtgcattcaatccctttcatgtgtataaagctttttcagagaatatgttagatcagtcagcaatcaccaagtggaactggaattgggctaagttactccctaactacttacgcctggataagatgactttctccgtcttacttaagaatcgctgggagatgaaaaaggatgaaacacttgaggaggaggagaaggccatactagaacatctgaagcagatttgtacccctcagaatagcagcgccagtgacaatatcgaggagcagtag

SEQ ID NO: 58868 - DNA, 3828 bp, Artificial Sequence
  derived and/or modified sequence
atggactgggacgatgagtacagtcacaactcattcgatcttcactgtttactgaacagtttcccaggcgatctggagtttgaacaaatcttctctgatatcgatgaaaaaattgaacagaatgcagcttccattaaacattgcatcaaagagatccagtcagagataaataagcagtgtccaggagtgcagcttcagacaaccactgactgttttgagtggcttactaactataattactccacatccgaatcttccttcatttctcatggtgacctgatcaagttttttaaaacgctgcaagacctgctgaagaacgaacagaatcaggaggagatgactctggacttgctgtgggatcttagctgtcacagcagcgtgagtttcccttccactttgagtggcactagctttcacttcctgagccgaacatctctgcactcagttgaggataacagttctatggatgtcaagtccatgtgggacgacatccggttacatcttaggcgttttctcgtcagtaagcttcagtcccacaatgagatcaacaactcccaacagaaaatcctactaaagaaacagtgtttacagcaactgctgttcctgtacccagagtccgaggttatcataaaatatcagaatatccagaataaactccttgctaatctgctgtggaactgcttcccctcctacaatcgggattcaaacttggatgttatcgctcacgggtaccagagtactatgctcaagctatattccgtgataaaggaggacttcaacactctctgtgagattctggcccctagctcgatggtaaagtttattaaagagacatacctcgacaccgttaccgaggaaatggctaagtttctggagaacttttgtgaattgcagtttagagagaatgctgtgagggttgtgaagacatccaagagtagctcaaagcatcgtggcgcagtgcacgctcttgtaaccacagagtgcccacagaaggggagaaatttcagtctgcctcttgacaaagtcgagttcctgtcacaactgataaagtcattcatgaagctggagaagggcgtacaagagctgtttgacgaaatccttctctctctaaaaattactcgggatacaagtggcatattggagaagtccgaccgggaagtggtgatggagaagccaagggctaacgaaactaacataccctccgagcagagtctgccaggtaaagaggccaccctgctggattttggatggcgcagtgctttcaaagaagtgtccttgcccatggctcactgtgtcgtgactgccatcgagggattctcgacaaaaattctccagcaggaacagaacgaaagaagttcggcggtgagctatgctatgaacctcgtcaacgtgcagcaggtgtggcaggactcgcatatgttccctgaggaggagcaaccaaaaaaaatcgggaagttttgctctgacatcatggagaagctggacactatgctcccactagcactggcatgccgagatgatagttttcaggaaatcagggccaatttggttgaggcgtgctgtaaagtggctaccgctgttctgcagcgacttcaggagagagcgaaagaggtcccctctaaagcacctctgaaaaacctccacacatatctgagcacagctgtgtacgtttttcagcactttaaaagatatgacaacctaatgaaagaaatgacaaagaaacccatcttcctcgttctcgtgcagcggtaccaggaatttataaacacgctgcagttccaagtcaccaactactgcgtgagagtatgtgccaccagcatcctgcaggatgctgagtcccaccactgggacgactacaaagccttttacgagggggagaggtgttcattttccatccaaatgtggcattacttttgctggagtctgcactatgacctttggaccatcctcccacccaagcttgcgcaggagatattggtggaggttctcgaaaagtccctctctctgctcgctagtcgttatgcccgtgctcatccctctcgcaagcggactccgcaactacgcctggatgtcaccaccattctgatttgtaccgaaaacatgctgtggtcagtctgtacctctgtacagaagttactcaatcctcatcagcataccgacgacaaaattttcaagattcatacacattgtaataatctgttcacgaccctagtgatccttacgagccccctcacggaattgtacaagaccttccaacatgggctcgatgagtccgcttctgattcactgaaatccttcttcaagcaacctctttactgggtgagctgcattagtcacttctatccttccctcttacgaaccccgagcgccggtggactgaaagctgaagggcagttaaaactgcttttgtcgcagcctagatgtaactggaaccttttacttgaaactctgctgcaccacgatggcttattgctgcggattctgctgaagtcctccaaacaggtttcggatacggagaataatctcaaccaagggccatcattgatggaagctatttttaaaatcctgtatcattgcagttttagcccccagacatttgcgaacgtctttgtgagctacatggaggaggagcaactgtgggattttctttacaacatcccagtgagtacctgcgtggaatatgagctcgaagtgatccggtgtcttagactggccctgactgacgctatcaaagacacagtgcagcaaatcgtcagtgtcatgtcaagcagacggaactgcgaaacaaatttgaacaaacatattgtgccggattgtctgctggagtctatgccgaaggagtggaactattcccctaaagaaacgaaccggaaagagagctgcaagagctttactcgcttgacagcacaggccgtttcaatcgtgatttccaagctccccacggtgatagcctgcctccccccaccagtcaagtactttttcttcttatctgagaggaaaatgtctaaaaagttcgtcgagctgaagaaagccggactgctggtgtggaacctaatcgtgatcatatgtcgcatcttcgaggatggcaataccgtcgagctactgaccggggcatccctcgaccgctggtcaaaggagaagttaggcttgatttgcatgtgtctgaagtccatcatgggcgaccagacttccattcataaccagatgatccagaaagtgatccagtccatcgaacagcagaagcccaactggatagagagacagctgttgaaagcccgtaaactgtcaaccgaatgtgcctttatgactatcgagaagtccaccgcactgcaggaaggggacgtagctcttgagttgacagagcagaaaattaatacaatggtcttagatctgtgccataagccaggcggtcgggagtatctgcgacagatctatcacataatgcagcttaacgaagagtatctgaaggaacaattgttctctatgaattcatcggaggagaagccgctgccaattaggccattaaaaactactttgagatctattgaagatcagcctagcgctttcaacccgtttcacgtttataaggcctttagcgaaaatatgctcgaccaaagtgccattacaaagtggaattggaactgggcaaaactcctacccaactatctgcggctggacaaaatgactttttcagtactcctgaagaatcgctgggaaatgaaaaaggatgaaactctggaagaggaagagaaagcaatcctagaacacctcaaacagatttgcacaccccagaatagctctgcatccgataacatagaggagcagtag

SEQ ID NO: 58869 - DNA, 3828 bp, Artificial Sequence
  derived and/or modified sequence
atggattgggatgatgaatattctcataattcttttgacctacattgtttgttaaactcatttcctggagacttggagtttgagcagatcttcagtgacattgatgaaaagattgaacaaaatgctgcaagcataaaacattgcattaaagagatacagtccgaaattaacaaacaatgtccaggtgtgcagctgcaaacaacaactgactgctttgaatggctaactaactataattacagtacatctgaatcatctttcatttctcatggagacttgataaaatttttcaaaacactgcaagatttgttgaagaatgaacaaaatcaagaagaaatgacattggatttactttgggacctctcctgccacagcagcgtttcattcccatcaaccctaagtggaacatctttccatttcctctctaggacgtctcttcattctgttgaagataattcctctatggatgtcaagtctatgtgggatgatataagactgcatcttcgacgcttcttagtgagcaaattacaaagccataatgaaataaacaattcacagcaaaaaattttattgaaaaagcagtgcttacaacaactcttgtttctttatccagaatcagaagttataatcaaataccaaaacatacagaataaactgttggctaatcttctgtggaactgctttccttcttacaacagagattcaaatttagatgtaatagctcatggatatcaaagtacaatgcttaagttatactcagtaataaaagaggattttaacacactatgtgaaattttagctccatcttcaatggtgaaattcattaaagaaacttacctggatactgttacagaagaaatggcaaaatttcttgaaaatttttgtgagctgcagttcagagaaaatgctgttcgtgtggttaaaacaagcaagagctccagcaagcatagaggagcagtgcatgctttggttactactgaatgcccacagaaaggaagaaacttctctctccctttagacaaagtcgaattcttatcgcagctcataaaatcctttatgaaactggaaaaaggtgttcaagaattgtttgacgaaatacttttatcactcaagataaccagggatacttcaggaattttggagaaatccgatagagaggttgtaatggaaaaacctagagcaaacgaaaccaatattccttccgagcaatcactaccaggaaaagaggctaccttactagattttggctggagaagtgcatttaaagaagtgtctcttcccatggcgcactgcgtagtaactgcaattgaaggtttttccacaaaaattctccaacaggaacagaatgaaaggtcttcagctgtgagctatgctatgaaccttgtaaatgtccagcaagtttggcaagacagccatatgtttcctgaggaggaacaaccaaagaaaattggaaaattttgttctgacatcatggaaaaacttgacacaatgcttccactggctctggcatgcagagatgattcttttcaggaaattagagcaaacttggtggaggcctgttgtaaagtggcaacagctgtcctgcagagactgcaagagagagccaaggaggttccttccaaagcacccctgaaaaacttgcacacatacctctccacagcggtgtatgtcttccagcatttcaagcgatatgataatttgatgaaggaaatgactaaaaaacccatattcctggtgcttgtccaacgatatcaggaattcatcaacactctacagtttcaggttacgaactactgcgtcagagtttgtgctacaagcattttacaggatgctgagagccaccactgggatgactacaaagctttttatgagggggaaagatgttccttctcgatccagatgtggcattatttctgctggtctcttcattacgatctctggaccattctgcctcctaagttagcccaggagattctagtggaagtgctggagaaatctttgagtctactggcctccagatacgctcgggcccaccccagccgtaaaagaactccacagttaagacttgatgtcacaacaattttgatatgcactgagaacatgttatggtcagtttgtacatctgtacagaaacttttgaatcctcatcagcatacagatgataaaatttttaaaattcacactcattgtaataatctgtttacaacattagtcattttgacttcaccattaacagaattatataagacttttcagcatggcctggatgagtctgcttcagattccttaaaatcattttttaagcaaccattatattgggtttcttgcatatcacatttctacccttctttactcaggactccatcagctggaggactgaaagccgagggtcagttgaaactgctcttatcccagccacgttgtaactggaacttgcttctggaaaccctactgcatcatgatggacttttactgagaatcttgctgaagagctcaaaacaagtttccgacacagaaaataacctgaaccaaggacccagcttgatggaagccatctttaaaatattgtaccattgcagtttttctccacaaacatttgcaaacgtttttgtgagctacatggaagaagagcaattatgggactttttatataacatcccagtctcaacgtgcgtggagtacgagctagaggtcatccgatgcttgagactggcactgaccgatgccatcaaggacactgtacagcagatagtatctgtaatgagttctaggagaaactgtgagacaaacctaaacaagcacattgttcctgattgtttgcttgagagcatgccaaaggaatggaattatagtccaaaagaaactaacaggaaagaatcatgcaaaagcttcacaaggcttactgctcaggcagtatctattgtaatcagcaagttacctacggtgattgcatgtttgcctcccccagttaaatacttcttttttctgtctgagagaaaaatgtcaaaaaaatttgttgaattgaagaaagctggcctgcttgtctggaacttgattgtaattatatgtcggatatttgaggacggaaacactgtggaacttttaacaggtgcctctcttgacagatggagtaaagaaaaattgggtttaatttgtatgtgtttgaaaagcatcatgggagaccagacaagtatccataatcaaatgatccaaaaggtcatacagagcattgagcagcagaagcccaactggattgaacgtcaattgttgaaagcaaggaaactgagcactgaatgtgcatttatgacaatagagaaaagcacggccttacaagaaggagatgttgctcttgaactgactgagcagaaaataaacacgatggtcctggatctctgccacaaaccaggtggcagggagtacctgaggcaaatttatcacatcatgcagctcaatgaggaatatttaaaagaacagctgttttctatgaatagttcagaggaaaagccattacccatccgacctttaaagacgaccttgaggagtatagaagatcagccttctgcctttaaccctttccatgtgtataaggcgtttagtgaaaacatgctagatcagtcagccatcacaaaatggaactggaattgggcaaagttgctgccaaattatctgagactggataagatgaccttcagtgtgctgctcaaaaacaggtgggaaatgaagaaggatgaaacactagaagaggaagaaaaagcaatactggagcacttaaaacaaatttgcaccccacagaactcttctgcctcagataacatagaggaacagtaa

SEQ ID NO: 58870 - DNA, 5119 bp, Artificial Sequence
  derived and/or modified sequence
ctccggagccgtcgccagggtggtaatacctggtgcagagcttgagtctggccagcgggtcaggctcttgctagatcagcaccggaggtggaagactggtacattttacatactttgggaaaaaaaaacgttgctgaagttactagaaaagagacagttcttctgctgacaactcttcaggaaataattttctacctccttaggattcgaagaccagttcattcttagtgtcttctgaaataaaattagaatggattgggatgatgaatattctcataattcttttgacctacattgtttgttaaactcatttcctggagacttggagtttgagcagatcttcagtgacattgatgaaaagattgaacaaaatgctgcaagcataaaacattgcattaaagagatacagtccgaaattaacaaacaatgtccaggtgtgcagctgcaaacaacaactgactgctttgaatggctaactaactataattacagtacatctgaatcatctttcatttctcatggagacttgataaaatttttcaaaacactgcaagatttgttgaagaatgaacaaaatcaagaagaaatgacattggatttactttgggacctctcctgccacagcagcgtttcattcccatcaaccctaagtggaacatctttccatttcctctctaggacgtctcttcattctgttgaagataattcctctatggatgtcaagtctatgtgggatgatataagactgcatcttcgacgcttcttagtgagcaaattacaaagccataatgaaataaacaattcacagcaaaaaattttattgaaaaagcagtgcttacaacaactcttgtttctttatccagaatcagaagttataatcaaataccaaaacatacagaataaactgttggctaatcttctgtggaactgctttccttcttacaacagagattcaaatttagatgtaatagctcatggatatcaaagtacaatgcttaagttatactcagtaataaaagaggattttaacacactatgtgaaattttagctccatcttcaatggtgaaattcattaaagaaacttacctggatactgttacagaagaaatggcaaaatttcttgaaaatttttgtgagctgcagttcagagaaaatgctgttcgtgtggttaaaacaagcaagagctccagcaagcatagaggagcagtgcatgctttggttactactgaatgcccacagaaaggaagaaacttctctctccctttagacaaagtcgaattcttatcgcagctcataaaatcctttatgaaactggaaaaaggtgttcaagaattgtttgacgaaatacttttatcactcaagataaccagggatacttcaggaattttggagaaatccgatagagaggttgtaatggaaaaacctagagcaaacgaaaccaatattccttccgagcaatcactaccaggaaaagaggctaccttactagattttggctggagaagtgcatttaaagaagtgtctcttcccatggcgcactgcgtagtaactgcaattgaaggtttttccacaaaaattctccaacaggaacagaatgaaaggtcttcagctgtgagctatgctatgaaccttgtaaatgtccagcaagtttggcaagacagccatatgtttcctgaggaggaacaaccaaagaaaattggaaaattttgttctgacatcatggaaaaacttgacacaatgcttccactggctctggcatgcagagatgattcttttcaggaaattagagcaaacttggtggaggcctgttgtaaagtggcaacagctgtcctgcagagactgcaagagagagccaaggaggttccttccaaagcacccctgaaaaacttgcacacatacctctccacagcggtgtatgtcttccagcatttcaagcgatatgataatttgatgaaggaaatgactaaaaaacccatattcctggtgcttgtccaacgatatcaggaattcatcaacactctacagtttcaggttacgaactactgcgtcagagtttgtgctacaagcattttacaggatgctgagagccaccactgggatgactacaaagctttttatgagggggaaagatgttccttctcgatccagatgtggcattatttctgctggtctcttcattacgatctctggaccattctgcctcctaagttagcccaggagattctagtggaagtgctggagaaatctttgagtctactggcctccagatacgctcgggcccaccccagccgtaaaagaactccacagttaagacttgatgtcacaacaattttgatatgcactgagaacatgttatggtcagtttgtacatctgtacagaaacttttgaatcctcatcagcatacagatgataaaatttttaaaattcacactcattgtaataatctgtttacaacattagtcattttgacttcaccattaacagaattatataagacttttcagcatggcctggatgagtctgcttcagattccttaaaatcattttttaagcaaccattatattgggtttcttgcatatcacatttctacccttctttactcaggactccatcagctggaggactgaaagccgagggtcagttgaaactgctcttatcccagccacgttgtaactggaacttgcttctggaaaccctactgcatcatgatggacttttactgagaatcttgctgaagagctcaaaacaagtttccgacacagaaaataacctgaaccaaggacccagcttgatggaagccatctttaaaatattgtaccattgcagtttttctccacaaacatttgcaaacgtttttgtgagctacatggaagaagagcaattatgggactttttatataacatcccagtctcaacgtgcgtggagtacgagctagaggtcatccgatgcttgagactggcactgaccgatgccatcaaggacactgtacagcagatagtatctgtaatgagttctaggagaaactgtgagacaaacctaaacaagcacattgttcctgattgtttgcttgagagcatgccaaaggaatggaattatagtccaaaagaaactaacaggaaagaatcatgcaaaagcttcacaaggcttactgctcaggcagtatctattgtaatcagcaagttacctacggtgattgcatgtttgcctcccccagttaaatacttcttttttctgtctgagagaaaaatgtcaaaaaaatttgttgaattgaagaaagctggcctgcttgtctggaacttgattgtaattatatgtcggatatttgaggacggaaacactgtggaacttttaacaggtgcctctcttgacagatggagtaaagaaaaattgggtttaatttgtatgtgtttgaaaagcatcatgggagaccagacaagtatccataatcaaatgatccaaaaggtcatacagagcattgagcagcagaagcccaactggattgaacgtcaattgttgaaagcaaggaaactgagcactgaatgtgcatttatgacaatagagaaaagcacggccttacaagaaggagatgttgctcttgaactgactgagcagaaaataaacacgatggtcctggatctctgccacaaaccaggtggcagggagtacctgaggcaaatttatcacatcatgcagctcaatgaggaatatttaaaagaacagctgttttctatgaatagttcagaggaaaagccattacccatccgacctttaaagacgaccttgaggagtatagaagatcagccttctgcctttaaccctttccatgtgtataaggcgtttagtgaaaacatgctagatcagtcagccatcacaaaatggaactggaattgggcaaagttgctgccaaattatctgagactggataagatgaccttcagtgtgctgctcaaaaacaggtgggaaatgaagaaggatgaaacactagaagaggaagaaaaagcaatactggagcacttaaaacaaatttgcaccccacagaactcttctgcctcagataacatagaggaacagtaatctgcagaaaacagcaacagctttattttaggaaacaatcccatgtaatggagtaggattttttaccatagtcagaatgaacctcatatgtgctgtgaagcatgaaaccaatgactgagtaatctctgtactgaaaaggaatacagcacataaaggataaggtgctacatatttttttattttaaaaataatttcaaatgtttttctttccccaatctttctctttatatgatataactgctgccatctcgtgttccctttgaattatttttttctcctttcagtcttgaagtatctatgacaacaggaagaaatgttcagaaattttttaaaggattttttaaatacaacatttggatgttaagttgagtggagtcacatagccccaggaggtcatctgaaatttttaatttaattttgttgtagctgtagcccaagtcccaattttaattgcctttactatccacaattgtgtcaactttcctcattcaatttatctaattatagtcaaaaaaaagcattctcctgaactataactttagtcacacctctgcttgtagtggttttcagtcttcctcctaaaccagaatcaaatttctactcatacatattcaggtcctataccaaatggctccatgttcagacaattgcttgccatcctcttggttcaagtcacatgcttgccatgttttcccaatcagaatccatctttcttccaaaattaggctcaaaactaattccagcaatctttaccccaaagctcattagctcatataatgtgttactttaaaattttttcattgtattgatacacacacacaaaataagaaaacagaacatgctctagtaccctctctgccaaggacaattatagatatttattatttccttcctatcactgcctgatattagattataaagacattgaagatattatgatataatatgaagtctccctttataactccctgtatgcctactacagtgttatttcatcaagtggacagttaacgaacacaattgattaaatagctgccaatg

SEQ ID NO: 58871 - protein, 299 aa, Artificial Sequence
  derived and/or modified sequence
MVEKEEAGGGISEEEAAQYDRQIRLWGLEAQKRLRASRVLLVGLKGLGAEIAKNLILAGVKGLTMLDHEQVTPEDPGAQFLIRTGSVGRNRAEASLERAQNLNPMVDVKVDTEDIEKKPESFFTQFDAVCLTCCSRDVIVKVDQICHKNSIKFFTGDVFGYHGYTFANLGEHEFVEEKTKVAKVSQGVEDGPDTKRAKLDSSETTMVKKKVVFCPVKEALEVDWSSEKAKAALKRTTSDYFLLQGPVSAGPSSQQLLLLRWHEGEWDCGVPWPQVNSRFGSPRDANCSMPTCIPCPLPS

SEQ ID NO: 58872 - DNA, 900 bp, Artificial Sequence
  derived and/or modified sequence
atggtggagaaggaggaggccggcggcggcatcagcgaggaggaggccgcccagtacgacagacagatcagactgtggggcctggaggcccagaagagactgagagccagcagagtgctgctggtgggcctgaagggcctgggcgccgagatcgccaagaacctgatcctggccggcgtgaagggcctgaccatgctggaccacgagcaggtgacccccgaggaccccggcgcccagttcctgatcagaaccggcagcgtgggcagaaacagagccgaggccagcctggagagagcccagaacctgaaccccatggtggacgtgaaggtggacaccgaggacatcgagaagaagcccgagagcttcttcacccagttcgacgccgtgtgcctgacctgctgcagcagagacgtgatcgtgaaggtggaccagatctgccacaagaacagcatcaagttcttcaccggcgacgtgttcggctaccacggctacaccttcgccaacctgggcgagcacgagttcgtggaggagaagaccaaggtggccaaggtgagccagggcgtggaggacggccccgacaccaagagagccaagctggacagcagcgagaccaccatggtgaagaagaaggtggtgttctgccccgtgaaggaggccctggaggtggactggagcagcgagaaggccaaggccgccctgaagagaaccaccagcgactacttcctgctgcagggccccgtgagcgccggccccagcagccagcagctgctgctgctgagatggcacgagggcgagtgggactgcggcgtgccctggccccaggtgaacagcagattcggcagccccagagacgccaactgcagcatgcccacctgcatcccctgccccctgcccagctag

SEQ ID NO: 58873 - DNA, 900 bp, Artificial Sequence
  derived and/or modified sequence
atggtggaaaaggaagaggccggcggcggcatttctgaggaagaggccgcgcaatacgaccgacagattcggctctgggggctcgaagcacagaaaaggcttagggcctcaagagtgttgcttgtggggttaaaaggactcggggcagagatcgccaaaaatctaatactggctggagttaaagggctgacaatgctggatcacgaacaggtcacaccggaggaccccggagcccagtttttgatccggaccggtagcgtaggcagaaacagggcagaggcctccctggagcgggcacagaacctcaaccctatggtggacgtaaaggtcgacacagaagacatagagaaaaaaccagagtcattttttacgcagttcgacgccgtgtgcttaacctgctgttcccgagatgtgattgtgaaggtggatcagatttgccacaagaacagtatcaaattcttcacgggcgatgtgtttgggtaccatgggtacacctttgccaatctgggggagcacgagttcgtcgaggaaaagacaaaggtggctaaggtgagtcagggcgttgaagatggacctgacacgaagagagctaaactggatagcagtgagacaaccatggtgaaaaaaaaagtggtcttttgccccgtcaaagaggcgttggaagtagattggtcctccgaaaaggccaaagccgcccttaagcgcacaacatctgactattttctcttacaaggccctgtgtcagccggtccttctagccagcaactcctccttctgagatggcacgagggtgaatgggattgcggagtgccgtggccccaggtgaattcccggtttgggtcgcctcgcgatgctaattgctctatgcccacgtgtattccatgtcctctgccttcatag

SEQ ID NO: 58874 - DNA, 900 bp, Artificial Sequence
  derived and/or modified sequence
atggtggagaaggaggaggccggcggcggcatcagcgaggaggaggccgcccagtatgaccggcagatccggctgtggggcctggaggcccagaagaggctgcgggccagccgggtgctgctggtgggcctgaagggcctgggcgctgagatcgccaagaacctgatcctggccggcgtgaagggcctgaccatgctggaccacgagcaggtgaccccagaggaccccggggcccagttcctgatcagaacaggctctgtgggcaggaacagagctgaggccagcctggagcgggcccagaacctgaaccccatggtggatgtgaaggtggacacagaagatattgagaagaagccagagagcttcttcacccagtttgatgctgtgtgcctgacctgctgcagcagagatgtgattgtgaaggtggaccagatctgccacaagaacagcatcaagttcttcaccggagatgtgtttggctaccacggctacacctttgccaacctgggggagcacgagtttgtggaggagaagaccaaggtggccaaggtgtcccagggcgtggaggatggccctgacaccaagagggccaagctggacagcagcgagaccaccatggtgaagaagaaggtggtgttctgccctgtgaaggaggccctggaggtggactggagcagcgagaaggccaaggccgccctgaagaggaccaccagtgactacttcctgctgcagggccctgtgtctgctggccccagcagccagcagctgctgctgctgcgctggcatgaaggagagtgggactgtggggtgccctggccccaggtgaacagcagatttggcagccccagagatgccaactgcagcatgcccacctgcatcccctgccccctgcccagctag

SEQ ID NO: 58875 - DNA, 900 bp, Artificial Sequence
  derived and/or modified sequence
atggtggagaaggaggaggccggcggcggcatcagcgaggaggaggcagcccagtacgacagacagatccggctgtggggcctggaagcccagaagaggcttagagcctcgcgtgtcttgctggtcgggctcaaaggactcggagccgagatagcgaagaacttgattctggctggtgtcaagggattaaccatgttggatcatgagcaggtgactccagaggacccaggggcccaattccttatcaggacaggctccgttggcagaaacagagcagaggcctctcttgagagagcacagaatctgaacccaatggtcgatgtgaaggtggatactgaagatatcgagaagaagccagaaagcttcttcactcagtttgacgccgtgtgcctgacctgctgcagtcgggatgtgatagttaaagttgaccagatatgtcataaaaactcaatcaaattttttaccggagatgtcttcggctaccatggatatacgttcgctaacctgggggaacatgaattcgtggaggagaagactaaagtcgcaaaagtgtcccagggcgtagaagatgggccagacaccaaaagggccaaactggacagcagcgagactaccatggtgaagaagaaggtcgtcttttgccccgtaaaggaggctctggaggtcgactggtcctcagaaaaagcgaaagccgctctcaagagaacaaccagcgattacttcctgcttcagggtccggttagtgctggcccgtcttcccaacaactcttgctgctccgttggcacgagggtgagtgggactgtggtgtgccgtggccccaggttaactctagattcggatccccaagggacgcaaactgctcaatgcccacctgtattccttgccccttacccagctag

SEQ ID NO: 58876 - DNA, 900 bp, Artificial Sequence
  derived and/or modified sequence
atggtagagaaggaggaagctgggggaggaatctccgaagaggaagccgctcagtatgatcgacagattaggctatggggtcttgaggctcagaaacgcttgcgggcatcacgagtgctactggtcggacttaaggggttgggggctgagattgctaagaacctaattctagcgggtgtgaagggattgaccatgctggaccatgaacaggtcactccggaggatcctggggcacaatttcttatccggaccggcagtgttggcagaaacagggccgaagcttcactcgaaagggcccagaatctgaaccccatggtcgacgtgaaggttgataccgaagatattgagaagaagccagaatcgttcttcacccagttcgatgcagtgtgcctgacatgctgttccagagatgtgatcgtgaaagtggatcaaatttgccacaaaaattccattaaattctttacaggtgatgtgtttggataccacggttacacctttgccaatctaggcgaacacgagtttgttgaggaaaagacgaaggtggctaaggtgtcccaaggagtcgaggatgggccagataccaaaagagcgaagctggacagctcggaaactacaatggtcaagaagaaggtagtcttctgtcctgtgaaagaagctctcgaagttgattggagcagcgagaaggccaaagctgccctcaagcgcactacgagcgattactttctgctccaggggcctgtgtctgctggacccagtagtcagcagttattgctgctgagatggcacgaaggtgagtgggattgtggtgtcccttggcctcaggtcaatagcagattcggatcccctagagatgccaattgcagcatgccgacttgcatcccttgtccactgccttcatag

SEQ ID NO: 58877 - DNA, 2318 bp, Artificial Sequence
  derived and/or modified sequence
atgcgcagaagcactccgggcgtgctgccggcggcggtaggtggcgcgcgggtccggcgggcggttggcttgagcgggaccggagctgaggcaggaagagccggcgccatggtggagaaggaggaggctggcggcggcattagcgaggaggaggcggcacagtatgaccggcagatccgcctgtggggactggaggcccagaaacggctgcgggcctctcgggtgcttcttgtcggcttgaaaggacttggggctgaaattgccaagaatctcatcttggcaggagtgaaaggactgaccatgctggatcacgaacaggtaactccagaagatcccggagctcagttcttgattcgtactgggtctgttggccgaaatagggctgaagcctctttggagcgagctcagaatctcaaccccatggtggatgtgaaggtggacactgaggatatagagaagaaaccagagtcatttttcactcaattcgatgctgtgtgtctgacttgctgctccagggatgtcatagttaaagttgaccagatctgtcacaaaaatagcatcaagttctttacaggagatgtttttggctaccatggatacacatttgccaatctaggagagcatgagtttgtagaggagaaaactaaagttgccaaagttagccaaggagtagaagatgggcccgacaccaagagagcaaaacttgattcttctgagacaacgatggtcaaaaagaaggtggtcttctgccctgttaaagaagccctggaggtggactggagcagtgagaaagcaaaggctgctctgaagcgcacgacctccgactactttctccttcaaggccctgtctcagcgggaccctcctcacaacaacttcttcttcttcgatggcatgaaggggaatgggattgtggagtgccttggccccaagtgaactcaagatttggcagccccagagatgccaactgcagcatgcccacctgtattccctgtccccttccttcatgaaggcatctccaggcaaggaaaactgaagtcattggcccgatacaaaacatttcctgcaacgaaggaggtggtgccgacgtgctgcttcccatcaccagcagctgctcgacaaggggcgcagggtggctgtctttgttccagcactgttcaggctgcctgtcatcccgggcctgccagctcccctgagtgatgagcacttccaagcacccctctgccctttctctgtccttatgctgtcccggcctcgccagccctctggggcattgtgggagatgcctgccaggaatgagcaagctctgttgctcgggagcctcttgtcaccttcttggacttattccccacctgataccttatagagaaaagtgtgaattcaggtggagagtaggcccaggccccatgaggcaccagtggaagcacagctccaagttcagacaggtgcccttagagaggaaaaccatgacaggcaaatgcatttcctctggagtttgagaccctgacaaacaacaggtggcatctggtgtgctgttcttgagttttcgtttaggattagttgagttccagctgggttttgggagaaaggagatgctaccaagtcttggatgttagggcgagaccctgcaagttgagtattagagagcttgtctttcaaggcaggttcctggggcttcagggctaggagggaggagcctgcccttttaacagaaccccagtcacatgcggctcaagtcactcagaggctgttgcatttcagggctatgttggtcctttgtttacctcctaaaccacagctgtttgtgtttcacatatgttgtgaattttccttggttctttttaaaggaatgataataaagttacttgctttaggatttgcttgtttttcttccacttcagaagcttctgagagggaatgggatgatcctaccagttgccttttcagacctgaggctctaactcaagagattcctcctctccctcaccattcctgccaccattttttctgggtgatgcagcaagagttaaattgttcacattctagaatgtgtagaagcttctggctccagttgtctaatggataattcagctaaatagtggctattttcagtggcaagaattataataataaagggaagtcaaaagtgatgcttcatatgccccaagtgccacagccgctacgggtcagagcttttattggaagaccaggtttgccttgatgcagccaaagtgcgttccagttcaccccactcttgcttgtgtttcttctttatgtaaattgtgtgatgtttcaataaatcagtctctttcctattctg

SEQ ID NO: 58878 - protein, 266 aa, Artificial Sequence
  derived and/or modified sequence
MVEKEEAGGGISEEEAAQYDRQIRLWGLEAQKRLRASRVLLVGLKGLGAEIAKNLILAGVKGLTMLDHEQVTPEDPGAQFLIRTGSVGRNRAEASLERAQNLNPMVDVKVDTEDIEKKPESFFTQFDAVCLTCCSRDVIVKVDQICHKNSIKFFTGDVFGYHGYTFANLGEHEFVEEKTKVAKVSQGVEDGPDTKRAKLDSSETTMVKKKVVFCPVKEALEVDWSSEKAKAALKRTTSDYFLLQGTASPRWPQCVRWLEGFWHRKL

SEQ ID NO: 58879 - DNA, 801 bp, Artificial Sequence
  derived and/or modified sequence
atggtggagaaggaggaggccggcggcggcatcagcgaggaggaggccgcccagtacgacagacagatcagactgtggggcctggaggcccagaagagactgagagccagcagagtgctgctggtgggcctgaagggcctgggcgccgagatcgccaagaacctgatcctggccggcgtgaagggcctgaccatgctggaccacgagcaggtgacccccgaggaccccggcgcccagttcctgatcagaaccggcagcgtgggcagaaacagagccgaggccagcctggagagagcccagaacctgaaccccatggtggacgtgaaggtggacaccgaggacatcgagaagaagcccgagagcttcttcacccagttcgacgccgtgtgcctgacctgctgcagcagagacgtgatcgtgaaggtggaccagatctgccacaagaacagcatcaagttcttcaccggcgacgtgttcggctaccacggctacaccttcgccaacctgggcgagcacgagttcgtggaggagaagaccaaggtggccaaggtgagccagggcgtggaggacggccccgacaccaagagagccaagctggacagcagcgagaccaccatggtgaagaagaaggtggtgttctgccccgtgaaggaggccctggaggtggactggagcagcgagaaggccaaggccgccctgaagagaaccaccagcgactacttcctgctgcagggcaccgccagccccagatggccccagtgcgtgagatggctggagggcttctggcacagaaagctgtag

SEQ ID NO: 58880 - DNA, 801 bp, Artificial Sequence
  derived and/or modified sequence
atggtggagaaagaagaagctgggggaggaataagtgaagaagaggcagcgcagtatgatcggcagattagactgtgggggctggaggctcagaaaaggctccgggcctccagggttctcctggtgggtttgaaaggtcttggcgccgagattgccaaaaatctgattctggccggagtgaaggggctcacgatgctcgaccacgagcaagtcaccccggaagatccaggggctcagtttttgatcaggactgggagcgtgggcaggaatagagccgaggcgtccttggaacgggcccagaatctgaatccaatggtggacgtgaaggtcgacacggaggacatagaaaagaagcccgagtcgttttttacgcagttcgatgccgtgtgcctgacttgctgctcccgcgacgtaattgtcaaggtggatcagatatgccacaagaacagtatcaagtttttcactggagacgtttttggataccacgggtacactttcgcaaacttaggagaacacgagttcgtggaagagaaaactaaagtggccaaggtgtcccagggagtggaggatggcccggatacaaagagggcaaagctagattctagtgaaactactatggtgaagaagaaagttgtcttctgtcccgtgaaagaagcacttgaggtcgattggtcctctgagaaagctaaagccgccttaaaacggaccacttccgattatttcctgctgcagggcacggccagcccacggtggcctcagtgtgtgcggtggctagaaggcttttggcacaggaagttatag

SEQ ID NO: 58881 - DNA, 801 bp, Artificial Sequence
  derived and/or modified sequence
atggtggagaaggaggaggccggcggcggcatcagcgaggaggaggccgcccagtatgaccggcagatccggctgtggggcctggaggcccagaagaggctgcgggccagccgggtgctgctggtgggcctgaagggcctgggcgctgagatcgccaagaacctgatcctggccggcgtgaagggcctgaccatgctggaccacgagcaggtgaccccagaggaccccggggcccagttcctgatcagaacaggctctgtgggcaggaacagagctgaggccagcctggagcgggcccagaacctgaaccccatggtggatgtgaaggtggacacagaagatattgagaagaagccagagagcttcttcacccagtttgatgctgtgtgcctgacctgctgcagcagagatgtgattgtgaaggtggaccagatctgccacaagaacagcatcaagttcttcaccggagatgtgtttggctaccacggctacacctttgccaacctgggggagcacgagtttgtggaggagaagaccaaggtggccaaggtgtcccagggcgtggaggatggccctgacaccaagagggccaagctggacagcagcgagaccaccatggtgaagaagaaggtggtgttctgccctgtgaaggaggccctggaggtggactggagcagcgagaaggccaaggccgccctgaagaggaccaccagtgactacttcctgctgcagggcacagccagcccccgctggccccagtgtgtgcgctggctggagggcttctggcacaggaagctgtag

SEQ ID NO: 58882 - DNA, 801 bp, Artificial Sequence
  derived and/or modified sequence
atggtggagaaggaggaggccggcggcggcatcagcgaggaggaggctgcccagtatgacaggcagattcgcctttgggggctggaggcacagaaacggctgcgcgcttcccgagtcctgctcgtgggactcaagggtctgggagcggagatagctaagaatttgatcctcgctggcgtgaaagggctgactatgctggatcacgaacaagtaacacctgaggaccctggagctcagttcctgatacgaacaggctcagttgggcgcaatcgtgcggaggctagtctagaaagagctcagaatctgaaccccatggtcgacgtgaaggtggatacggaggacatcgaaaagaagccagagagcttttttacgcaattcgatgccgtctgtctgacatgttgctccagagacgtgatcgtgaaggtggatcaaatctgccacaagaacagtatcaagtttttcacaggcgatgtgtttggctaccacgggtacacatttgccaacctcggcgaacatgagtttgtcgaagagaagacgaaggttgccaaagtgtcccagggtgttgaagacggtccggacacaaagagagctaagctggactcatccgaaacgacgatggtcaaaaagaaggtggtcttctgtcccgtgaaggaggcactggaagtcgattggtcaagcgagaaggccaaggctgccctgaagcgcacaaccagcgactactttctgttgcaaggcactgcatcccctaggtggccccagtgtgtgcgatggctggaaggcttttggcatcggaaactttag

SEQ ID NO: 58883 - DNA, 801 bp, Artificial Sequence
  derived and/or modified sequence
atggtcgagaaggaggaggccggtggcggaatctctgaggaggaagccgctcaatacgatcgccagatccgcctctggggcctggaagcccagaagcggctgcgtgcttcacgtgtgctgctcgtaggtctcaaaggattaggtgctgagattgccaagaatttaatactggccggagtgaaagggcttacaatgctggaccacgagcaagtcacacctgaggatcctggcgctcaattccttatcagaaccggctccgtggggaggaaccgggctgaggcaagccttgagcgggcacaaaacttgaacccaatggtggatgttaaggtggataccgaggatattgagaagaaacctgagtcattttttacccagttcgatgctgtatgcttgacttgctgctctcgggatgtgatagtgaaggttgatcagatctgtcataagaattccattaagttcttcaccggagacgttttcggttatcacggatacacctttgctaatctcggtgagcacgagttcgtggaagaaaagacaaaagtagcaaaggtcagccagggagtggaagacgggccagatacaaagagggccaagctggactcaagtgaaacaactatggtgaagaagaaagtggtgttttgccccgtgaaggaggccttggaagtcgattggtcttctgagaaagctaaggccgctctcaaacgtacaacaagcgactattttctgctccaggggactgcatccccccgatggccgcagtgcgttcgttggcttgagggattttggcacagaaaattgtag

SEQ ID NO: 58884 - DNA, 2388 bp, Artificial Sequence
  derived and/or modified sequence
atgcgcagaagcactccgggcgtgctgccggcggcggtaggtggcgcgcgggtccggcgggcggttggcttgagcgggaccggagctgaggcaggaagagccggcgccatggtggagaaggaggaggctggcggcggcattagcgaggaggaggcggcacagtatgaccggcagatccgcctgtggggactggaggcccagaaacggctgcgggcctctcgggtgcttcttgtcggcttgaaaggacttggggctgaaattgccaagaatctcatcttggcaggagtgaaaggactgaccatgctggatcacgaacaggtaactccagaagatcccggagctcagttcttgattcgtactgggtctgttggccgaaatagggctgaagcctctttggagcgagctcagaatctcaaccccatggtggatgtgaaggtggacactgaggatatagagaagaaaccagagtcatttttcactcaattcgatgctgtgtgtctgacttgctgctccagggatgtcatagttaaagttgaccagatctgtcacaaaaatagcatcaagttctttacaggagatgtttttggctaccatggatacacatttgccaatctaggagagcatgagtttgtagaggagaaaactaaagttgccaaagttagccaaggagtagaagatgggcccgacaccaagagagcaaaacttgattcttctgagacaacgatggtcaaaaagaaggtggtcttctgccctgttaaagaagccctggaggtggactggagcagtgagaaagcaaaggctgctctgaagcgcacgacctccgactactttctccttcaaggtactgcttctccgagatggccccagtgtgtgcggtggttggagggattttggcacaggaaattgtgaaggccctgtctcagcgggaccctcctcacaacaacttcttcttcttcgatggcatgaaggggaatgggattgtggagtgccttggccccaagtgaactcaagatttggcagccccagagatgccaactgcagcatgcccacctgtattccctgtccccttccttcatgaaggcatctccaggcaaggaaaactgaagtcattggcccgatacaaaacatttcctgcaacgaaggaggtggtgccgacgtgctgcttcccatcaccagcagctgctcgacaaggggcgcagggtggctgtctttgttccagcactgttcaggctgcctgtcatcccgggcctgccagctcccctgagtgatgagcacttccaagcacccctctgccctttctctgtccttatgctgtcccggcctcgccagccctctggggcattgtgggagatgcctgccaggaatgagcaagctctgttgctcgggagcctcttgtcaccttcttggacttattccccacctgataccttatagagaaaagtgtgaattcaggtggagagtaggcccaggccccatgaggcaccagtggaagcacagctccaagttcagacaggtgcccttagagaggaaaaccatgacaggcaaatgcatttcctctggagtttgagaccctgacaaacaacaggtggcatctggtgtgctgttcttgagttttcgtttaggattagttgagttccagctgggttttgggagaaaggagatgctaccaagtcttggatgttagggcgagaccctgcaagttgagtattagagagcttgtctttcaaggcaggttcctggggcttcagggctaggagggaggagcctgcccttttaacagaaccccagtcacatgcggctcaagtcactcagaggctgttgcatttcagggctatgttggtcctttgtttacctcctaaaccacagctgtttgtgtttcacatatgttgtgaattttccttggttctttttaaaggaatgataataaagttacttgctttaggatttgcttgtttttcttccacttcagaagcttctgagagggaatgggatgatcctaccagttgccttttcagacctgaggctctaactcaagagattcctcctctccctcaccattcctgccaccattttttctgggtgatgcagcaagagttaaattgttcacattctagaatgtgtagaagcttctggctccagttgtctaatggataattcagctaaatagtggctattttcagtggcaagaattataataataaagggaagtcaaaagtgatgcttcatatgccccaagtgccacagccgctacgggtcagagcttttattggaagaccaggtttgccttgatgcagccaaagtgcgttccagttcaccccactcttgcttgtgtttcttctttatgtaaattgtgtgatgtttcaataaatcagtctctttcctattctg

SEQ ID NO: 58885 - DNA, 1551 bp, Artificial Sequence
  derived and/or modified sequence
atgcctacgctagacgcccctgaggagcggaggagaaagtttaaatatagaggtaaggatgtgtctcttcggcggcagcagcgaatggcggtgtccttagaactccggaaagcaaaaaaagatgaacagacactcaagcggagaaatattaccagtttctgtcctgacactcctagtgaaaagacagcaaaaggtgtggcagtttcactgacacttggtgaaataattaaaggagttaattcatcagatcctgtgctgtgtttccaggccacacagactgcacgcaaaatgttatcccaggagaaaaaccccccactgaaattggtcatcgaagccggcctgatcccccgaatggtggagtttctgaaatcgagcctctacccttgtttacagtttgaggcagcatgggccctcacaaacatcgcaagtggcaccagtgagcagaccagggccgtggtggagggtggcgccatccagcctctcatcgagttgctgagctcaagtaatgttgccgtgtgcgagcaggccgtctgggctctcgggaatatcgccggagatgggcccgaatttcgggacaacgtcattacatcaaatgccatacctcacctcctggcactcatttcccccacactgccgataacgttcctccgaaatatcacatggactcttagtaacctgtgccggaataaaaacccttatccttgtgataccgcggttaagcagattctgcctgccttgttgcatttactacaacaccaggattctgaagtactcagcgacgcctgctgggcccttagctatctgactgacggctcaaacaagcgtatcggacaggttgtcaatacgggagtgctgccccggctggttgtgttgatgacttcaagcgaactcaatgtactaactcccagtctgaggacagtcggaaacattgtgactgggacagatgaacagactcagatggctattgatgccggaatgctgaatgtgcttcctcaactacttcagcataacaagccctccattcaaaaagaggccgcatgggcactatctaacgttgcggccggtccctgccaccatatccaacagttactggcttatgatgttctacccccactcgtggccctattgaaaaatggtgagttcaaagtgcagaaggaagccgtttggatggtggccaattttgccactggcgcaaccatggatcagctgatccagctcgtgcatagcggagtgctcgagcccctcgtcaacctactgaccgctcccgatgtgaagattgtgctgattatactcgatgtgatttcttgtatcctgcaggccgccgagaagagatctgagaaagaaaatttgtgtctgctgattgaagaattgggcggcatagataggattgaagctcttcagttgcacgagaaccggcagattggacagtccgcccttaacatcattgagaagcattttggtgaggaggaagatgagagccagacactactgtcgcaggtgatcgatcaggattatgaatttatcgattacgagtgcttagcaaaaaagtag

SEQ ID NO: 58886 - DNA, 1551 bp, Artificial Sequence
  derived and/or modified sequence
atgcccaccctggatgcccctgaggagaggaggaggaagttcaagtaccggggcaaggatgtgtccctgcggcggcagcagaggatggctgtgtccctggagctgaggaaggccaagaaggatgagcagaccctgaagagaagaaacatcaccagcttctgcccagacaccccatctgagaagacagccaagggcgtggccgtgtccctgaccctgggggagatcatcaagggcgtgaacagcagtgaccctgtgctgtgcttccaggccacccagacagccaggaagatgctgagccaggagaagaacccccccctgaagctggtgattgaggccggcctcatccccaggatggtggagttcctgaagagcagcctgtacccctgcctgcagtttgaggccgcctgggccctgaccaacatcgccagcggcaccagcgagcagaccagggctgtggtggagggcggggccatccagcccctcatcgagctgctgagcagcagcaatgtggccgtgtgtgagcaggccgtgtgggccctgggcaacattgctggagatggccctgagttccgggacaacgtcatcaccagcaatgccatcccccacctgctggccctgatcagccccaccctgcccatcaccttcctgaggaacatcacctggaccctgagcaacctgtgcaggaacaagaacccctacccctgtgacacagctgtgaagcagatcctgcctgccctgctgcacctgctgcagcaccaggacagcgaggtgctgagtgatgcctgctgggccctgagctacctgacagatggcagcaacaagagaattggccaggtggtgaacacaggagtgctgccccggctggtggtgctgatgaccagcagcgagctgaatgtgctgacccccagcctgaggacagtgggcaacatcgtgactggaacagatgagcagacccagatggccattgatgctggcatgctgaatgtgctgccccagctgctgcagcacaacaagcccagcatccagaaggaggccgcctgggccctgagcaatgtggccgccggcccctgccaccacatccagcagctgctggcctatgatgtgctgccccccctggtggccctgctgaagaatggagagttcaaggtgcagaaggaggccgtgtggatggtggccaactttgccaccggggccaccatggaccagctgatccagctggtgcacagcggcgtgctggagcccctggtgaacctgctgacagccccagatgtgaagatcgtgctgatcatcctggatgtgatcagctgcatcctgcaggccgctgagaagaggtctgagaaggagaacctgtgcctgctgattgaggagctgggcggcatcgacagaattgaggccctgcagctgcacgagaaccggcagatcggccagagcgccctgaacatcatcgagaagcactttggagaggaggaggatgagagccagaccctgctgagccaggtgattgaccaggactatgagttcatcgactatgaatgtctggccaagaagtag

SEQ ID NO: 58887 - DNA, 1551 bp, Artificial Sequence
  derived and/or modified sequence
atgcccaccctggacgcccccgaggagcggcggcggaagttcaagtatagagggaaagatgtctcactgaggagacaacagcggatggccgtctcactggagctcaggaaggccaagaaagacgagcagactctcaagaggcgtaatattacaagcttttgcccagatacaccatctgagaaaactgccaagggggttgctgtttctctcacacttggcgagataattaaaggggttaacagcagcgatcccgtgttatgtttccaggcgacccaaaccgcccgcaagatgctgtcacaggagaaaaatccccccctgaaactcgtgattgaggctggacttattccaaggatggtagagtttctgaagtcttctctatatccttgcttgcagttcgaagccgcctgggccctcaccaatatcgcctccggcaccagcgagcagacacgcgccgtggtggaagggggtgccatccagccacttattgagttgctgtccagctcaaacgtggccgtgtgcgagcaggctgtatgggccctcggcaatatagcaggcgacggaccggaattccgggacaacgttatcacgtcaaacgctatacctcatttgttggctctaatctccccgaccctaccaatcacctttctcaggaacattacgtggaccttgtcaaatttgtgtagaaataaaaatccatatccgtgtgacaccgccgtgaagcagatcctgcctgcactgctgcatctacttcagcaccaagatagtgaggttctaagtgacgcttgctgggctctgtcatatctgaccgacggcagcaacaaacggatcggacaggtggttaacacaggcgtccttccccggctggttgttcttatgacctcaagcgaactcaacgttctcacgccttccctgcggacagttggtaacatcgtcactgggacagacgaacagacccagatggcaatagacgccggaatgttaaacgtgctgccccaactccttcagcacaataaacccagcatccagaaagaagccgcgtgggctctctctaacgtagcggcaggaccttgccaccacatacagcaattgctggcctacgacgtcttacctcctcttgtcgcattgctgaaaaatggcgaattcaaggtccagaaagaggccgtgtggatggtggcaaactttgccactggcgcaacaatggaccagctgatccagcttgtccactccggggtgcttgaaccgttggtgaacctcctaaccgcacctgacgtaaaaatcgtgctgataattctggatgtcatctcttgtatcctgcaggcagctgagaagcgcagtgaaaaagagaatttgtgtctgctgattgaagaactgggtggcattgataggatcgaggcactgcagctgcatgagaatcggcagatcggacagagcgcactgaatatcatcgagaaacatttcggggaggaggaggacgagtcccaaacactgctaagccaggtcatcgaccaagactatgagtttatcgattatgagtgcttggcaaagaaatag

SEQ ID NO: 58888 - DNA, 1551 bp, Artificial Sequence
  derived and/or modified sequence
atgccaactctcgatgcacctgaggaacggcgacggaagtttaaatatcgtggtaaggacgttagcttacgtcgccagcagcgcatggccgtgagccttgagctcagaaaggctaaaaaagacgagcagactctgaagcggaggaacatcacttctttttgcccagacacaccttcggagaaaacagccaaaggcgtggccgtgtcactgaccttaggcgaaattattaagggcgtgaatagctccgatcctgtgctttgtttccaggctactcaaaccgcaagaaaaatgcttagccaggaaaagaacccccctctgaaattggtgatcgaagccggtcttatccccaggatggttgaattcctgaagagctcactgtatccttgcctgcagtttgaagccgcatgggctctcacaaacatcgccagtggcaccagcgaacagactagagcagtggtagagggtggggctatacagccactgatagaattactttcctcttctaatgtggccgtttgtgaacaggccgtgtgggccctgggcaatatagccggagacggcccagagttccgtgataatgtgattacatccaacgccatcccccacctcttggcacttatctccccaaccctgccaataacctttctacggaacatcacatggacgctctcaaacctgtgcaggaataaaaatccatatccctgtgacacagccgtgaagcagatcctgccggcacttctgcacttactgcagcatcaggatagtgaggttttatctgatgcttgttgggctctgagctacctgaccgacggctcgaataaacggataggtcaggtggtgaacaccggggtgttgccccgattggtggtgctgatgacaagctctgaactgaacgtcctgacaccgagcctccgcaccgttggaaatatcgtgaccggcaccgatgagcagactcaaatggctatagacgctggtatgctgaatgttttaccccaactgctacagcacaacaagcccagtattcagaaagaagccgcttgggcgctcagtaatgtggctgcgggtccctgtcaccatatccaacagttgttggcttatgacgtgcttccacccttagtggcccttctaaagaatggcgagtttaaggtccagaaggaggctgtctggatggtggctaacttcgccactggcgcaaccatggatcagttgatccaattagtgcatagcggagtgctggaacccctagttaatctgctcactgcccctgatgttaagatagttctgatcatcttagacgtgattagttgtattctgcaggcggcagaaaaacgttccgaaaaggaaaatctgtgtttgctgattgaggaactgggaggtatcgacaggattgaagcactccagttgcacgaaaataggcagattggccagagtgcattaaacattatcgagaaacacttcggagaagaggaagacgaaagccagacactgttatcacaggtgatcgaccaggactatgaatttatcgattacgagtgtctggctaagaaatag

SEQ ID NO: 58889 - DNA, 1551 bp, Artificial Sequence
  derived and/or modified sequence
atgcccaccctggacgcccccgaggagagaagaagaaagttcaagtacagaggcaaggacgtgagcctgagaagacagcagagaatggccgtgagcctggagctgagaaaggccaagaaggacgagcagaccctgaagagaagaaacatcaccagcttctgccccgacacccccagcgagaagaccgccaagggcgtggccgtgagcctgaccctgggcgagatcatcaagggcgtgaacagcagcgaccccgtgctgtgcttccaggccacccagaccgccagaaagatgctgagccaggagaagaacccccccctgaagctggtgatcgaggccggcctgatccccagaatggtggagttcctgaagagcagcctgtacccctgcctgcagttcgaggccgcctgggccctgaccaacatcgccagcggcaccagcgagcagaccagagccgtggtggagggcggcgccatccagcccctgatcgagctgctgagcagcagcaacgtggccgtgtgcgagcaggccgtgtgggccctgggcaacatcgccggcgacggccccgagttcagagacaacgtgatcaccagcaacgccatcccccacctgctggccctgatcagccccaccctgcccatcaccttcctgagaaacatcacctggaccctgagcaacctgtgcagaaacaagaacccctacccctgcgacaccgccgtgaagcagatcctgcccgccctgctgcacctgctgcagcaccaggacagcgaggtgctgagcgacgcctgctgggccctgagctacctgaccgacggcagcaacaagagaatcggccaggtggtgaacaccggcgtgctgcccagactggtggtgctgatgaccagcagcgagctgaacgtgctgacccccagcctgagaaccgtgggcaacatcgtgaccggcaccgacgagcagacccagatggccatcgacgccggcatgctgaacgtgctgccccagctgctgcagcacaacaagcccagcatccagaaggaggccgcctgggccctgagcaacgtggccgccggcccctgccaccacatccagcagctgctggcctacgacgtgctgccccccctggtggccctgctgaagaacggcgagttcaaggtgcagaaggaggccgtgtggatggtggccaacttcgccaccggcgccaccatggaccagctgatccagctggtgcacagcggcgtgctggagcccctggtgaacctgctgaccgcccccgacgtgaagatcgtgctgatcatcctggacgtgatcagctgcatcctgcaggccgccgagaagagaagcgagaaggagaacctgtgcctgctgatcgaggagctgggcggcatcgacagaatcgaggccctgcagctgcacgagaacagacagatcggccagagcgccctgaacatcatcgagaagcacttcggcgaggaggaggacgagagccagaccctgctgagccaggtgatcgaccaggactacgagttcatcgactacgagtgcctggccaagaagtag

SEQ ID NO: 58890 - protein, 446 aa, Artificial Sequence
  derived and/or modified sequence
MVQMMRQFLYRVLPEDSYKVTTGKLHVSLTRLTDGENVVVSEFTSKEELIEALYCSCFVPVYCGLIPPTYRGVWAFLTLPPQRYIDGGFTGMQPCAFWTDAITISTFSGQQDICPRDCPAIFHDFRMFNCSFQFSLENIARMTHALFPPDLVILHDYYYRGYEDAVLYLRRLNAVYLNSSSKRVIFPRVEVYCQIELALGNECPERSQPSLRARQASLEGATQPHKEWVPKGDGRGSHGPPVSQPVQTLEFTCESPVSAPVSPLEQPPAQPLASSTPLSLSGMPPVSFPAVHKPPSSTPGSSLPTPPPGLSPLSPQQQVQPSGSPARSLHSQAPTSPRPSLGPSTVGAPQTLPRSSLSAFPAQPPVEELGQEQPQAVALLVSSKPKSAVPLVHVKETVSKPYVTESPAEDSNWVNKVFKKNKQKTSGTRKGFPRHSGSKKPSSKVQ

SEQ ID NO: 58891 - DNA, 1341 bp, Artificial Sequence
  derived and/or modified sequence
atggtccaaatgatgcgccagttcctttacagggtgctaccagaggattcttataaggtgacaacaggaaagctccatgtatccttgaccaggctgacagatggtgaaaacgttgtggtgtctgagttcacatccaaggaagagctgattgaggccctgtactgctcctgcttcgttccagtgtattgtggacttatccctcctacctaccgcggagtatgggcctttctcaccttaccgccacagaggtatattgatggcgggtttaccgggatgcagccgtgtgcattctggactgacgctatcacaatatcaacattttccggtcagcaggatatctgtcccagagattgcccagcgatattccatgattttaggatgttcaactgttcctttcagtttagcctcgaaaacattgcgcggatgactcatgcactcttcccaccggacctggtgatactacacgactattactatagaggctatgaagacgccgtcctgtacctccggcgcctgaatgctgtctacctcaattcaagcagtaaaagggttattttcccaagggttgaggtgtactgccaaattgaacttgccttaggcaacgaatgccccgagcggagccagccttcactgcgagcgagacaggcatccttggaaggagccacccaaccgcacaaggaatgggtgccgaaaggagatggccggggatctcacggacctccggtctcccagcccgttcagacactcgagtttacctgcgaatcccccgtctccgctcctgtgtcgcccctcgagcaaccgccagcacagcctcttgcgtcttctacccccctatcattgtcaggtatgccgcccgtgtctttccccgccgtgcataaaccaccatcgagcacccctggatcaagtttaccgacccctccgccgggcctgtctccgctttcaccgcagcagcaggtccagccctcaggcagtccagccaggagtctccatagccaggcgcctacttctcctaggccaagtctgggcccttctactgtcggggcccctcagacgcttccaaggagttcgctgtctgcctttcccgctcagccgccagtggaggagctaggccaagagcaaccccaggccgtcgcattgttagtgagtagtaaacccaagtcagccgtgccactggtgcatgttaaggaaaccgtgtctaaaccatatgtcacagaatctcccgccgaagactcaaactgggttaacaaggtgttcaagaagaataagcagaaaacatcagggaccagaaaaggctttccacgccatagtggttcgaagaaaccatcgtccaaggttcagtag

SEQ ID NO: 58892 - DNA, 1341 bp, Artificial Sequence
  derived and/or modified sequence
atggtgcagatgatgaggcagttcctgtacagagtgctgcctgaagattcctacaaggtgaccaccgggaagctgcacgtgtccctgacccggctgacagatggagaaaatgtggtggtgtctgagttcaccagcaaggaggagctgattgaggccctgtactgcagctgctttgtgcctgtgtactgcggcctcatcccccccacctaccggggcgtgtgggccttcctgaccctgcccccccagcgctacattgatggcggcttcaccggcatgcagccctgtgccttctggacagatgccatcaccatcagcaccttcagcggccagcaggacatctgcccccgggactgcccagccatcttccatgacttcaggatgttcaactgcagcttccagttcagcctggagaacatcgccaggatgacccacgccctcttccccccagacctggtgatcctgcatgactactactaccggggctatgaagatgctgtgctgtacctgcggcggctgaatgctgtgtacctgaacagcagcagcaagagggtcatcttcccccgggtggaggtgtactgccagatcgagctggccctgggcaatgaatgtcctgagaggagccagcccagcctgcgggcccggcaggccagcctggagggcgccacccagccccacaaggagtgggtgcccaagggagatggccggggcagccacggcccccctgtgtcccagcctgtgcagaccctggagttcacctgtgagagccctgtgtctgcccctgtgagccccctggagcagcccccagcccagcccctggccagcagcacccccctgagcctgagcggcatgcctcctgtgtccttccctgctgtgcacaagccacccagcagcaccccaggcagcagcctgcccaccccacctcctggcctgagccccctgagcccccagcagcaggtgcagcccagcggcagccctgcccggagcctgcacagccaggcccccaccagcccccggcccagcctgggccccagcacagtgggcgccccccagaccctgcccaggagcagcctgagcgccttccctgcccagccccctgtggaggagctgggccaggagcagccccaggccgtggccctgctggtgagcagcaagcccaagtctgctgtgcccctggtgcacgtgaaggagaccgtgtccaagccctacgtgacagagagccctgctgaggacagcaactgggtgaacaaggtgttcaagaagaacaagcagaagaccagcggcaccaggaagggcttccccaggcacagcggcagcaagaagcccagcagcaaggtgcagtag

SEQ ID NO: 58893 - DNA, 1341 bp, Artificial Sequence
  derived and/or modified sequence
atggtgcagatgatgcggcagttcctgtaccgggtgctgcccgaggattcttacaaggtgactaccggaaaattgcacgtgtcattaactcgcctcaccgacggagagaacgtagtcgtctctgaatttactagtaaagaggagcttattgaggcattgtattgttcctgctttgtcccagtgtactgcggcctcatcccccccacctaccggggggtgtgggctttcctcacattacctccccagagatacatcgatgggggattcaccggtatgcaaccctgtgccttttggaccgacgccatcacaatatcaacattcagcggccaacaggacatctgcccaagagactgcccagctattttccacgactttcggatgttcaactgctcattccagttctccctagagaacatcgcccgaatgacacacgcactttttccccctgaccttgttattctccacgattattactaccgaggatatgaggacgcagtgctctacctgaggaggttaaacgcagtctaccttaactcctcaagtaagcgcgtgatctttcccagggtcgaagtctactgtcaaatcgaacttgctctaggcaacgaatgcccagagcgctcccagcccagtctcagagcccgacaggccagtttggaaggcgcaacccagcctcacaaggagtgggtgccaaagggcgacggtcggggcagtcatggacctcctgtctctcagcctgttcagaccttagagttcacctgtgagagtccagtatctgctcctgtcagcccactggagcagccgccagcccaacccctggccagtagcaccccactttctctcagcggtatgccaccggttagctttcccgctgttcacaagcctcctagttctacgcccggcagctctctgcctaccccaccaccaggactgagccctctatccccccaacagcaggtacagcctagcgggagtcctgcaagatctctgcattcccaggcccccacaagcccacgtcctagcttgggacccagtacagtgggggcaccccagaccctgcctcggtcatccctaagcgcatttccggcccaacctcccgttgaggagcttggacaggaacagccgcaggcagtggccctgctcgtttccagtaagcctaagagtgcagtgcctcttgtgcacgtcaaggagaccgtgtccaaaccatacgtcactgaaagccccgccgaggatagtaactgggtgaacaaagtgtttaaaaaaaacaaacagaagactagcggaaccaggaagggttttccgaggcatagtggtagtaagaagccctcctccaaggtacagtag

SEQ ID NO: 58894 - DNA, 1341 bp, Artificial Sequence
  derived and/or modified sequence
atggttcaaatgatgaggcagtttttgtatcgtgtgcttcctgaagatagctacaaggtgactaccggcaaactgcatgttagcctaacccggctcaccgatggcgagaacgttgtggtgtctgagttcacaagtaaggaagaactgattgaggcgttatattgctcttgctttgtgcctgtctactgcgggctcattccccctacatataggggtgtctgggcattcctgaccctgcccccacagcgctacattgacggtgggtttactgggatgcagccatgtgccttctggacggacgctatcactatctcaacattctccggtcagcaggacatctgcccacgcgactgccctgccatcttccacgacttccgaatgttcaactgctcatttcagttttccctggaaaatatcgccaggatgactcatgctctgttcccacctgacctggtgatccttcacgattactactacagggggtatgaggacgccgtgctgtatctgaggagactgaacgcagtatatctgaattccagttcgaaacgtgttatctttccacgggtggaggtatactgtcagattgaactcgcactggggaacgagtgtcctgagcggagccagcctagcttaagagctcgccaagcttccctggagggggcaactcaaccacacaaggaatgggtgccaaaaggagacggcagagggtctcatggacctcccgtgtctcaaccagtgcagacacttgaatttacctgcgagtcccccgtctccgctccagtatcaccactggaacaacctcccgctcaaccactggcatcctcgacacctttgagcttgtccggaatgcctcctgtgtcatttcctgccgtacacaaaccaccatcatctaccccgggttcttctctgccaacaccgccacctggtttgtcacctctcagtccccagcaacaggttcaaccaagcggctcaccggctcgatccctgcacagtcaggcaccgacgtcaccgagaccctcccttggcccatccacagttggggcaccccagactttgcctcgctcatctctgtccgcctttcccgctcagcctccagtcgaagagttaggccaggaacagccccaggctgtcgccctgctggtctcctcaaaacccaagtccgctgttccactcgtccatgtcaaagaaacagttagcaagccatatgtgacagagagccctgccgaagattctaattgggtcaacaaagtgttcaagaagaacaaacagaagacttccggaaccagaaaaggatttcccaggcacagcggaagtaaaaaaccgtcaagcaaggtccagtag

SEQ ID NO: 58895 - DNA, 1341 bp, Artificial Sequence
  derived and/or modified sequence
atggtgcagatgatgagacagttcctgtacagagtgctgcccgaggacagctacaaggtgaccaccggcaagctgcacgtgagcctgaccagactgaccgacggcgagaacgtggtggtgagcgagttcaccagcaaggaggagctgatcgaggccctgtactgcagctgcttcgtgcccgtgtactgcggcctgatcccccccacctacagaggcgtgtgggccttcctgaccctgcccccccagagatacatcgacggcggcttcaccggcatgcagccctgcgccttctggaccgacgccatcaccatcagcaccttcagcggccagcaggacatctgccccagagactgccccgccatcttccacgacttcagaatgttcaactgcagcttccagttcagcctggagaacatcgccagaatgacccacgccctgttcccccccgacctggtgatcctgcacgactactactacagaggctacgaggacgccgtgctgtacctgagaagactgaacgccgtgtacctgaacagcagcagcaagagagtgatcttccccagagtggaggtgtactgccagatcgagctggccctgggcaacgagtgccccgagagaagccagcccagcctgagagccagacaggccagcctggagggcgccacccagccccacaaggagtgggtgcccaagggcgacggcagaggcagccacggcccccccgtgagccagcccgtgcagaccctggagttcacctgcgagagccccgtgagcgcccccgtgagccccctggagcagccccccgcccagcccctggccagcagcacccccctgagcctgagcggcatgccccccgtgagcttccccgccgtgcacaagccccccagcagcacccccggcagcagcctgcccacccccccccccggcctgagccccctgagcccccagcagcaggtgcagcccagcggcagccccgccagaagcctgcacagccaggcccccaccagccccagacccagcctgggccccagcaccgtgggcgccccccagaccctgcccagaagcagcctgagcgccttccccgcccagccccccgtggaggagctgggccaggagcagccccaggccgtggccctgctggtgagcagcaagcccaagagcgccgtgcccctggtgcacgtgaaggagaccgtgagcaagccctacgtgaccgagagccccgccgaggacagcaactgggtgaacaaggtgttcaagaagaacaagcagaagaccagcggcaccagaaagggcttccccagacacagcggcagcaagaagcccagcagcaaggtgcagtag

SEQ ID NO: 58896 - protein, 437 aa, Artificial Sequence
  derived and/or modified sequence
MVQMMRQFLYRVLPEDSYKVTTGKLHVSLTRLTDGENVVVSEFTSKEELIEALYCSCFVPVYCGLIPPTYRGVRYIDGGFTGMQPCAFWTDAITISTFSGQQDICPRDCPAIFHDFRMFNCSFQFSLENIARMTHALFPPDLVILHDYYYRGYEDAVLYLRRLNAVYLNSSSKRVIFPRVEVYCQIELALGNECPERSQPSLRARQASLEGATQPHKEWVPKGDGRGSHGPPVSQPVQTLEFTCESPVSAPVSPLEQPPAQPLASSTPLSLSGMPPVSFPAVHKPPSSTPGSSLPTPPPGLSPLSPQQQVQPSGSPARSLHSQAPTSPRPSLGPSTVGAPQTLPRSSLSAFPAQPPVEELGQEQPQAVALLVSSKPKSAVPLVHVKETVSKPYVTESPAEDSNWVNKVFKKNKQKTSGTRKGFPRHSGSKKPSSKVQ

SEQ ID NO: 58897 - protein, 532 aa, Artificial Sequence
  derived and/or modified sequence
MEEQVFKGDPDTPHSISFSGSGFLSFYQAGAVDALRDLAPRMLETAHRFAGTSAGAVIAALAICGIEMDEYLRVLNVGVAEVKKSFLGPLSPSCKMVQMMRQFLYRVLPEDSYKVTTGKLHVSLTRLTDGENVVVSEFTSKEELIEALYCSCFVPVYCGLIPPTYRGVRYIDGGFTGMQPCAFWTDAITISTFSGQQDICPRDCPAIFHDFRMFNCSFQFSLENIARMTHALFPPDLVILHDYYYRGYEDAVLYLRRLNAVYLNSSSKRVIFPRVEVYCQIELALGNECPERSQPSLRARQASLEGATQPHKEWVPKGDGRGSHGPPVSQPVQTLEFTCESPVSAPVSPLEQPPAQPLASSTPLSLSGMPPVSFPAVHKPPSSTPGSSLPTPPPGLSPLSPQQQVQPSGSPARSLHSQAPTSPRPSLGPSTVGAPQTLPRSSLSAFPAQPPVEELGQEQPQAVALLVSSKPKSAVPLVHVKETVSKPYVTESPAEDSNWVNKVFKKNKQKTSGTRKGFPRHSGSKKPSSKVQ

SEQ ID NO: 58898 - protein, 533 aa, Artificial Sequence
  derived and/or modified sequence
MEEQVFKGDPDTPHSISFSGSGFLSFYQAGAVDALRDLAPRMLETAHRFAGTSAGAVIAALAICGIEMDEYLRVLNVGVAEVKKSFLGPLSPSCKMVQMMRQFLYRVLPEDSYKVTTGKLHVSLTRLTDGENVVVSEFTSKEELIEAALYCSCFVPVYCGLIPPTYRGVRYIDGGFTGMQPCAFWTDAITISTFSGQQDICPRDCPAIFHDFRMFNCSFQFSLENIARMTHALFPPDLVILHDYYYRGYEDAVLYLRRLNAVYLNSSSKRVIFPRVEVYCQIELALGNECPERSQPSLRARQASLEGATQPHKEWVPKGDGRGSHGPPVSQPVQTLEFTCESPVSAPVSPLEQPPAQPLASSTPLSLSGMPPVSFPAVHKPPSSTPGSSLPTPPPGLSPLSPQQQVQPSGSPARSLHSQAPTSPRPSLGPSTVGAPQTLPRSSLSAFPAQPPVEELGQEQPQAVALLVSSKPKSAVPLVHVKETVSKPYVTESPAEDSNWVNKVFKKNKQKTSGTRKGFPRHSGSKKPSSKVQ

SEQ ID NO: 58899 - DNA, 1599 bp, Artificial Sequence
  derived and/or modified sequence
atggaggaacaagtgtttaaaggtgatcccgacaccccacactcgatctctttcagcgggtcaggattcctgtctttctaccaggctggcgccgtcgacgccctgagggacctcgctccaagaatgttagagacagcccatcgatttgcagggacaagcgcaggtgccgtgatagccgctttggctatctgcggaattgagatggatgagtaccttcgcgttctgaatgtgggggtggccgaagtaaaaaagtcttttttgggtcctctaagcccctcctgtaaaatggtgcagatgatgaggcaattcttgtatcgcgtgctccccgaggattcatacaaagtcacaactggcaaactgcacgtgtcactcacacgcttaacagacggcgaaaacgtcgtggtgtcagagttcaccagcaaggaagaattaattgaggcattgtattgcagctgttttgtgccagtatactgtgggttgattccgccaacttaccgtggtgtcagatacattgacgggggatttaccgggatgcagccctgtgcgttctggactgatgccatcaccatatcaaccttctcagggcagcaagatatttgccctcgggactgccctgccatcttccacgatttcagaatgttcaattgtagctttcaattctctttggagaacattgctcgcatgacgcatgcactattcccgccagatctggttatcttgcacgactattactaccgcgggtacgaagacgccgtgctgtatctgaggcgtctgaatgcagtctacctgaacagtagttccaagcgtgtgatttttccccgagttgaggtctattgccagattgaactggctcttgggaacgagtgccccgaaagatcgcagcctagcctgcgggctcgccaggcctcacttgagggcgccactcagcctcacaaagaatgggtccctaagggggatgggcgcgggtcccacggtcctcctgtgtcccagcctgtgcagaccttagaattcacgtgtgagtccccagtaagcgccccagtctctcctctggaacaaccccccgcccagccactggccagtagcacaccgctgtccctgtccggcatgccccccgtgtcgtttcccgcagtacataaacctcctagcagcactcctggctcctccctccccactcctccgcccgggctatcgcctctgagcccccagcagcaggtccagcccagtggctcccctgcaaggagcctgcattctcaggcgcccacatccccgcggcccagcctgggaccatctaccgtgggggcacctcagaccctgcctcgcagctccttgtcagcttttcccgcacagcccccagtggaagagctgggccaggagcagccacaggctgtggcgcttctggtgagtagcaagcccaaatccgccgtaccactagtgcatgtcaaggagacagtatccaaaccttatgtgactgagagtcctgccgaggactccaattgggtgaacaaagtgttcaagaaaaataagcagaaaacctccggtacgagaaagggcttccctcggcacagcggctctaaaaaaccatcatccaaagtccagtag

SEQ ID NO: 58900 - DNA, 1602 bp, Artificial Sequence
  derived and/or modified sequence
atggaggagcaggtttttaagggcgatcctgatacccctcattctatctctttttctggcagtggtttcttgtctttctaccaggccggtgccgttgacgccctcagggatcttgctccccggatgctggagacggctcataggttcgcaggaaccagtgcgggtgcggtaatcgccgctctcgctatatgtgggatcgagatggacgaatatctccgcgtcctcaacgtgggagtcgctgaggttaaaaaaagcttccttggcccactctcccccagctgtaagatggtgcaaatgatgagacaatttctgtaccgagtgctgcccgaggactcttataaggttaccacaggcaagctccatgtgagtctcaccagactcacggacggtgaaaatgtagtcgtctcagagttcaccagcaaagaggagctgattgaggctgccttgtactgcagctgtttcgtccccgtatattgcggattgattccccccacataccggggggtccggtatatcgatggcggctttaccggcatgcagccctgcgctttttggacagatgccattaccatcagtaccttcagtggacagcaggacatctgtcctagggattgtcccgccatatttcacgactttcgaatgttcaactgcagttttcagttcagcctggaaaacattgcccgcatgacacacgccttgttccccccagatctggtcatcttacacgactattactacaggggatacgaagacgctgtgctgtacctgcggcgtttaaacgccgtctacctgaactcttccagcaagcgagtcattttccctagggtcgaggtctactgtcagatcgaacttgcattgggaaatgaatgccctgagcggtcacagccttccctgcgggcacgacaagcgtccctcgaaggcgccacacagccgcacaaagaatgggttccaaagggagacggtagaggctctcatggaccaccagtttctcagcctgtccaaacattagaatttacttgcgaatcacctgtttcggctccagtttcccccctggagcaaccccctgctcagcccttagcttccagcactcccctgagcttgtcaggaatgccaccggttagcttccctgccgtgcacaagcccccaagttcaaccccaggcagctccctgcctactcctccaccgggactttctcctctgtctccccaacaacaggtgcagcctagcggttccccagcccgctccttgcattcccaagctccaacatctccaagaccatctctgggcccaagcactgtcggcgccccacaaactctgcccaggtcaagcctcagcgcctttccggcccagcctcctgtcgaagagcttgggcaggagcagccacaggccgtggctctgctggtgtcatccaaaccaaaaagtgctgttccgctggttcacgtaaaagagactgtctcgaagccctacgtgactgaaagccctgcggaagacagtaattgggtaaataaggtgtttaagaagaacaagcaaaagacttcaggaactaggaagggtttcccaagacactctggttcaaagaagccgtcttcaaaggtacaatag

SEQ ID NO: 58901 - DNA, 1599 bp, Artificial Sequence
  derived and/or modified sequence
atggaggagcaggtgttcaagggggaccctgacaccccccacagcatctccttcagcggcagcggcttcctgtccttctaccaggccggggctgtggatgccctgcgggacctggcccccaggatgctggagacagcccacagatttgctggcaccagcgctggagctgtgattgctgccctggccatctgtggcatcgagatggatgagtacctgcgggtgctgaatgtgggcgtggccgaggtgaagaagagcttcctgggccccctgagccccagctgcaagatggtgcagatgatgaggcagttcctgtacagagtgctgcctgaggacagctacaaggtgaccaccgggaagctgcacgtgtccctgacccggctgacagatggagaaaatgtggtggtgtctgagttcaccagcaaggaggagctgattgaggccctgtactgcagctgctttgtgcctgtgtactgcggcctcatcccccccacctacagaggagtgcgctacattgatggcggcttcaccggcatgcagccctgtgccttctggacagatgccatcaccatcagcaccttcagcggccagcaggacatctgcccccgggactgcccagccatcttccatgacttcaggatgttcaactgcagcttccagttcagcctggagaacatcgccaggatgacccacgccctcttccccccagacctggtgatcctgcatgactactactaccggggctatgaagatgctgtgctgtacctgcggcggctgaatgctgtgtacctgaacagcagcagcaagagggtcatcttcccccgggtggaggtgtactgccagatcgagctggccctgggcaatgaatgtcctgagaggagccagcccagcctgcgggcccggcaggccagcctggagggcgccacccagccccacaaggagtgggtgcccaagggagatggccggggcagccacggcccccctgtgtcccagcctgtgcagaccctggagttcacctgtgagagccctgtgtctgcccctgtgagccccctggagcagcccccagcccagcccctggccagcagcacccccctgagcctgagcggcatgcctcctgtgtccttccctgctgtgcacaagccacccagcagcaccccaggcagcagcctgcccaccccacctcctggcctgagccccctgagcccccagcagcaggtgcagcccagcggcagccctgcccggagcctgcacagccaggcccccaccagcccccggcccagcctgggccccagcacagtgggcgccccccagaccctgcccaggagcagcctgagcgccttccctgcccagccccctgtggaggagctgggccaggagcagccccaggccgtggccctgctggtgagcagcaagcccaagtctgctgtgcccctggtgcacgtgaaggagaccgtgtccaagccctacgtgacagagagccctgctgaggacagcaactgggtgaacaaggtgttcaagaagaacaagcagaagaccagcggcaccaggaagggcttccccaggcacagcggcagcaagaagcccagcagcaaggtgcagtag

SEQ ID NO: 58902 - DNA, 1602 bp, Artificial Sequence
  derived and/or modified sequence
atggaggagcaggtgttcaagggggaccctgacaccccccacagcatctccttcagcggcagcggcttcctgtccttctaccaggccggggctgtggatgccctgcgggacctggcccccaggatgctggagacagcccacagatttgctggcaccagcgctggagctgtgattgctgccctggccatctgtggcatcgagatggatgagtacctgcgggtgctgaatgtgggcgtggccgaggtgaagaagagcttcctgggccccctgagccccagctgcaagatggtgcagatgatgaggcagttcctgtacagagtgctgcctgaggacagctacaaggtgaccaccgggaagctgcacgtgtccctgacccggctgacagatggagaaaatgtggtggtgtctgagttcaccagcaaggaggagctgattgaagctgccctgtactgcagctgctttgtgcctgtgtactgcggcctcatcccccccacctaccggggcgtgcgctacattgatggcggcttcaccggcatgcagccctgtgccttctggacagatgccatcaccatcagcaccttcagcggccagcaggacatctgcccccgggactgcccagccatcttccatgacttcaggatgttcaactgcagcttccagttcagcctggagaacatcgccaggatgacccacgccctcttccccccagacctggtgatcctgcatgactactactaccggggctatgaagatgctgtgctgtacctgcggcggctgaatgctgtgtacctgaacagcagcagcaagagggtcatcttcccccgggtggaggtgtactgccagatcgagctggccctgggcaatgaatgtcctgagaggagccagcccagcctgcgggcccggcaggccagcctggagggcgccacccagccccacaaggagtgggtgcccaagggagatggccggggcagccacggcccccctgtgtcccagcctgtgcagaccctggagttcacctgtgagagccctgtgtctgcccctgtgagccccctggagcagcccccagcccagcccctggccagcagcacccccctgagcctgagcggcatgcctcctgtgtccttccctgctgtgcacaagccacccagcagcaccccaggcagcagcctgcccaccccacctcctggcctgagccccctgagcccccagcagcaggtgcagcccagcggcagccctgcccggagcctgcacagccaggcccccaccagcccccggcccagcctgggccccagcacagtgggcgccccccagaccctgcccaggagcagcctgagcgccttccctgcccagccccctgtggaggagctgggccaggagcagccccaggccgtggccctgctggtgagcagcaagcccaagtctgctgtgcccctggtgcacgtgaaggagaccgtgtccaagccctacgtgacagagagccctgctgaggacagcaactgggtgaacaaggtgttcaagaagaacaagcagaagaccagcggcaccaggaagggcttccccaggcacagcggcagcaagaagcccagcagcaaggtgcagtag

SEQ ID NO: 58903 - DNA, 1599 bp, Artificial Sequence
  derived and/or modified sequence
atggaggagcaggtgttcaagggcgaccccgacaccccccacagcatctcgttctccggcagcgggtttctttcgttttaccaagccggggccgtcgacgctctgagggatttagctccaaggatgctggaaaccgctcaccgatttgctgggacatcagcaggagcagtcatagctgccttggctatatgtggtattgagatggacgaatatttgagggtgctcaacgtgggcgtggctgaagtcaagaaatcatttcttgggcctctctccccctcctgtaaaatggtgcagatgatgaggcagtttctttacagagttttgccagaggactcatacaaagtcacaactgggaagttacacgtctctttgactagactgacggacggggagaatgtcgtagtgagcgaattcactagtaaggaggagctcattgaagccttgtattgcagttgcttcgttcccgtatattgtggtctgatcccacctacttatcggggggtgcggtacattgatggcggtttcactggaatgcagccatgtgcattctggaccgacgccattacaataagcaccttttcgggccagcaggatatttgtcccagagactgccctgccatttttcacgacttcagaatgttcaattgctctttccagtttagcctggagaacattgcaagaatgacacatgccttgttccctccagacctggtgatcctacacgactactactacaggggctacgaggacgcggtgctgtacctccgcaggctgaacgctgtctacctaaattcttcatcgaaacgagtgatcttccccagggtggaagtgtactgccagatcgagctggccctcggtaacgaatgtccggagcgttcccaaccaagtctacgcgctaggcaggcaagtctagagggcgcaacccagccacataaggaatgggtccccaagggggatgggcgaggcagtcacggtccgcctgtgagccaacctgtccagaccctcgagttcacttgcgaatcacccgtgagtgcacctgtttcgcctttggagcagccccccgctcaaccactggctagcagcactccactcagtctgtccggcatgccccccgtgtccttccctgctgtccacaagccaccttccagcacgcccggcagttccctccctaccccaccccccggtttgagccctctcagcccccaacagcaggtccagcctagcggctctccggctaggtcgctgcactctcaagccccaacatcccctagaccatccctgggaccgagcaccgtgggggctcctcagacactgcctagaagctcactttccgcctttccggcgcagcctcctgtggaagagttgggacaagagcagccacaggccgtcgctcttcttgtgtcaagcaagcccaaatcagccgtgcccctggtccacgtaaaagagaccgtctcaaaaccatatgtcacggagtctccggcggaagattctaattgggtgaataaggtctttaaaaaaaacaagcagaagactagtggcacgcgtaaaggcttcccccgacattctggcagcaagaagccatcctcaaaagtgcaatag

SEQ ID NO: 58904 - DNA, 1602 bp, Artificial Sequence
  derived and/or modified sequence
atggaggagcaggtgttcaagggcgaccccgacaccccccacagcatcagtttctctgggagcgggttcctgagtttctatcaagcaggcgctgtggatgctttaagggacttggccccccgtatgctcgagacagctcaccgattcgccggaacgagcgccggcgccgtcatcgctgctctggccatttgcgggattgaaatggatgagtacctccgggtgctgaatgtgggggtggcagaggtgaaaaagagctttctgggtcccctgtctcccagttgcaaaatggtgcagatgatgaggcagttcctctatagagttctgcctgaggacagttacaaggtgacaaccggtaaattgcatgtgagcctgacgcgcctgaccgatggcgaaaatgtggtggtgtccgagttcaccagtaaggaggagctcatagaggccgcgctttattgctcatgcttcgtgcctgtgtactgcggactaattccccccacctataggggagtccggtacatcgatgggggctttacagggatgcagccatgtgccttttggactgatgctattacaatcagcacattttccggtcaacaagacatatgcccccgcgactgcccagccatctttcatgattttcgaatgttcaactgtagcttccagtttagtctagagaatatcgcaagaatgacgcatgccctctttcctcctgatttagtgatccttcacgactattactatagaggttatgaagatgcggttctgtacctgcggcggcttaacgcggtttacttgaactccagcagcaaaagagttatttttcccagggtcgaggtgtattgccagatcgagcttgcgctgggcaacgaatgccccgaacgttcacaaccttcgcttcgagctagacaggcctccctggaaggcgccacgcagccacacaaagagtgggtacccaagggcgatggcagggggtcccacgggccccctgtcagccagcctgtgcagacattagaatttacttgtgaaagtccagtgtctgcaccagtaagccccctggaacaaccccccgcacaacctctggccagtagcacaccactgagtttgtccggaatgcctcctgtgtccttccctgctgtgcataagcccccttcctcaacgccaggttccagcttgcccactccaccacctggactgagcccgctgtccccacaacaacaagtgcagccctccggcagtccagctcgttcgctccacagtcaagcccctacatcaccccgtccgtctctgggtccttccaccgttggcgccccccaaactttgcctagatcaagcttgtccgcttttccagcacagccccctgtcgaagaactcggccaggaacagccgcaggcggtggcactcctggtcagttcaaaaccaaagagcgcagttccattggttcatgtgaaggagaccgtgtcaaaaccctatgtcactgagtcaccagctgaggacagtaattgggtcaacaaagtcttcaagaaaaacaaacaaaaaacctccggaacaagaaaaggattccccagacactccggctccaagaaaccttcctccaaagtgcaatag

SEQ ID NO: 58905 - DNA, 2332 bp, Artificial Sequence
  derived and/or modified sequence
gggcagtccacaatggaaggcttcttggaggaggagatgattgagctgcttctactaagatgagtatctcagagtcctcaacgtgggtgtggccgaggtgaagaaatccttcctggggcccttgtccccgtcctgtaagatggtgcagatgatgaggcagtttctgtaccgggtcctgcccgaggactcctacaaggtcaccacggggaagctccatgtgagcctcacccgcttaacggacggggagaatgtggtggtttcagagttcacgtccaaggaggagctcattgaggccctatactgcagctgcttcgtcccggtgtactgtggcctcatccccccgacttaccgcggtgtgaggtacatcgatgggggcttcacgggcatgcagccctgtgccttctggaccgacgccatcaccatctccaccttcagtgggcagcaggacatctgtccccgggactgcccggccatcttccacgacttccgcatgttcaactgctccttccagttctccctggagaacatcgccaggatgacccacgcattgttccccccggacctggtgatcctgcacgattactactaccgagggtacgaggatgcagttttgtacttgaggcggctgaatgctgtttatcttaattcttcctccaagagagtgattttcccccgggtggaagtgtactgccagatagaactcgcccttggcaatgagtgccctgaacgcagtcaaccaagccttcgagcacggcaggccagtctggaaggagccacacaacctcacaaggagtgggttcccaaaggggatggaaggggcagccatggtccgcctgtgtcccaacctgtgcagacacttgaattcacatgcgagtcacctgtttcagcaccagtctctccacttgagcagccacctgcacagccactggcctcttcaactccactttctctaagtggcatgccacctgtatcattcccagctgtgcacaagccacccagctccacacctggttcatcactgcccaccccaccacctggactgtcacctctgtcacctcagcagcaggtacaaccgtctggatcaccagccagatccctacactctcaggcacccacttcacccaggccatccctggggccttcaactgtgggggcacctcaaacactgccccgaagttctctttcagccttccctgctcagccacctgtggaggaactaggccaagaacagccccaagctgtagctcttcttgtctcttcaaaaccaaaaagcgccgtgcctctggttcatgtgaaggaaaccgtcagcaagccttatgtaacggagagccctgctgaagactcaaactgggtgaataaggtcttcaagaagaacaagcaaaagacaagtggcaccagaaaaggcttcccaagacattcgggatccaaaaaaccaagcagcaaagtgcagtgagcatgtctaatgttccttaaatcccacggagaggagcagctttgggaactgtgttcagagagattccgaggaatagaggagagtgtaagggagtagggggtgcagtgggagattgggctttggaacagacacatccgacataaaattcctgctctgccacagctccactcagggatcatggttgggacacttgctctccctgagcctccatttcctgtaaaatggggatgataccacttcataaagttgtgagagttaaatgtgatcgatgatgtaaattgcttcatagaatgcagaatgtgtaatagctcacaataagtaggtattatgtttacatattatgtttgtatttatgctacttaaatacaaaactggacaggccaggcatggtggctcatgcctgtaatcccagcactttgggaggctgaggtaggtggaaaacctgaggtcaggagttcaagaacagcctgaccaacatggtgaaactccatctctactaaaaatacaaaaattaaccaggcttgatggtgtgcacctgtaatctcagctactcgggaggctgaggcaagagaatcgcttgaacccaggaggcagaggttgcagtgcaccaagactgcgccattgcactccagcccgggcaacaagagcgaaaccccatctcgaaaaaaaacaaaacaaaactagacaagtgagtgcctacgtgacactcaaatgttgccagcatacagttaagggccctagtcaatgtaggcctgcttcttatagctttttgactatattatgctgtctttgacttagtcagtcaacacttattgagcacctactaagtgccaaacactctcctggactctggcaaaataaaaaatgaattaaaactct

SEQ ID NO: 58906 - DNA, 2478 bp, Artificial Sequence
  derived and/or modified sequence
atggaagaacaggtgttcaagggggacccggacacccctcactccatctccttctcgggcagtggattcctctccttctaccaggcgggggctgtggacgccctgcgggacctggccccccggatgctggaaacagcccaccgctttgcggggacatcggcaggtgctgtgatcgccgccctggccatctgcgggattgaaatggatgagtatctcagagtcctcaacgtgggtgtggccgaggtgaagaaatccttcctggggcccttgtccccgtcctgtaagatggtgcagatgatgaggcagtttctgtaccgggtcctgcccgaggactcctacaaggtcaccacggggaagctccatgtgagcctcacccgcttaacggacggggagaatgtggtggtttcagagttcacgtccaaggaggagctcattgaggccctatactgcagctgcttcgtcccggtgtactgtggcctcatccccccgacttaccgcggtgtgaggtacatcgatgggggcttcacgggcatgcagccctgtgccttctggaccgacgccatcaccatctccaccttcagtgggcagcaggacatctgtccccgggactgcccggccatcttccacgacttccgcatgttcaactgctccttccagttctccctggagaacatcgccaggatgacccacgcattgttccccccggacctggtgatcctgcacgattactactaccgagggtacgaggatgcagttttgtacttgaggcggctgaatgctgtttatcttaattcttcctccaagagagtgattttcccccgggtggaagtgtactgccagatagaactcgcccttggcaatgagtgccctgaacgcagtcaaccaagccttcgagcacggcaggccagtctggaaggagccacacaacctcacaaggagtgggttcccaaaggggatggaaggggcagccatggtccgcctgtgtcccaacctgtgcagacacttgaattcacatgcgagtcacctgtttcagcaccagtctctccacttgagcagccacctgcacagccactggcctcttcaactccactttctctaagtggcatgccacctgtatcattcccagctgtgcacaagccacccagctccacacctggttcatcactgcccaccccaccacctggactgtcacctctgtcacctcagcagcaggtacaaccgtctggatcaccagccagatccctacactctcaggcacccacttcacccaggccatccctggggccttcaactgtgggggcacctcaaacactgccccgaagttctctttcagccttccctgctcagccacctgtggaggaactaggccaagaacagccccaagctgtagctcttcttgtctcttcaaaaccaaaaagcgccgtgcctctggttcatgtgaaggaaaccgtcagcaagccttatgtaacggagagccctgctgaagactcaaactgggtgaataaggtcttcaagaagaacaagcaaaagacaagtggcaccagaaaaggcttcccaagacattcgggatccaaaaaaccaagcagcaaagtgcagtgagcatgtctaatgttccttaaatcccacggagaggagcagctttgggaactgtgttcagagagattccgaggaatagaggagagtgtaagggagtagggggtgcagtgggagattgggctttggaacagacacatccgacataaaattcctgctctgccacagctccactcagggatcatggttgggacacttgctctccctgagcctccatttcctgtaaaatggggatgataccacttcataaagttgtgagagttaaatgtgatcgatgatgtaaattgcttcatagaatgcagaatgtgtaatagctcacaataagtaggtattatgtttacatattatgtttgtatttatgctacttaaatacaaaactggacaggccaggcatggtggctcatgcctgtaatcccagcactttgggaggctgaggtaggtggaaaacctgaggtcaggagttcaagaacagcctgaccaacatggtgaaactccatctctactaaaaatacaaaaattaaccaggcttgatggtgtgcacctgtaatctcagctactcgggaggctgaggcaagagaatcgcttgaacccaggaggcagaggttgcagtgcaccaagactgcgccattgcactccagcccgggcaacaagagcgaaaccccatctcgaaaaaaaacaaaacaaaactagacaagtgagtgcctacgtgacactcaaatgttgccagcatacagttaagggccctagtcaatgtaggcctgcttcttatagctttttgactatattatgctgtctttgacttagtcagtcaacacttattgagcacctactaagtgccaaacactctcctggactctggcaaaataaaaaatgaattaaaactct

SEQ ID NO: 58907 - DNA, 1602 bp, Artificial Sequence
  derived and/or modified sequence
atggaagaacaggtgttcaagggggacccggacacccctcactccatctccttctcgggcagtggattcctctccttctaccaggcgggggctgtggacgccctgcgggacctggccccccggatgctggaaacagcccaccgctttgcggggacatcggcaggtgctgtgatcgccgccctggccatctgcgggattgaaatggatgagtatctcagagtcctcaacgtgggtgtggccgaggtgaagaaatccttcctggggcccttgtccccgtcctgtaagatggtgcagatgatgaggcagtttctgtaccgggtcctgcccgaggactcctacaaggtcaccacggggaagctccatgtgagcctcacccgcttaacggacggggagaatgtggtggtttcagagttcacgtccaaggaggagctcattgaggcagccctatactgcagctgcttcgtcccggtgtactgtggcctcatccccccgacttaccgcggtgtgaggtacatcgatgggggcttcacgggcatgcagccctgtgccttctggaccgacgccatcaccatctccaccttcagtgggcagcaggacatctgtccccgggactgcccggccatcttccacgacttccgcatgttcaactgctccttccagttctccctggagaacatcgccaggatgacccacgcattgttccccccggacctggtgatcctgcacgattactactaccgagggtacgaggatgcagttttgtacttgaggcggctgaatgctgtttatcttaattcttcctccaagagagtgattttcccccgggtggaagtgtactgccagatagaactcgcccttggcaatgagtgccctgaacgcagtcaaccaagccttcgagcacggcaggccagtctggaaggagccacacaacctcacaaggagtgggttcccaaaggggatggaaggggcagccatggtccgcctgtgtcccaacctgtgcagacacttgaattcacatgcgagtcacctgtttcagcaccagtctctccacttgagcagccacctgcacagccactggcctcttcaactccactttctctaagtggcatgccacctgtatcattcccagctgtgcacaagccacccagctccacacctggttcatcactgcccaccccaccacctggactgtcacctctgtcacctcagcagcaggtacaaccgtctggatcaccagccagatccctacactctcaggcacccacttcacccaggccatccctggggccttcaactgtgggggcacctcaaacactgccccgaagttctctttcagccttccctgctcagccacctgtggaggaactaggccaagaacagccccaagctgtagctcttcttgtctcttcaaaaccaaaaagcgccgtgcctctggttcatgtgaaggaaaccgtcagcaagccttatgtaacggagagccctgctgaagactcaaactgggtgaataaggtcttcaagaagaacaagcaaaagacaagtggcaccagaaaaggcttcccaagacattcgggatccaaaaaaccaagcagcaaagtgcagtga

SEQ ID NO: 58908 - DNA, 1518 bp, Artificial Sequence
  derived and/or modified sequence
gggcagtccacaatggaaggcttcttggaggaggagatgattgagctgcttctactaagatgagtatctcagagtcctcaacgtgggtgtggccgaggtgaagaaatccttcctggggcccttgtccccgtcctgtaagatggtgcagatgatgaggcagtttctgtaccgggtcctgcccgaggactcctacaaggtcaccacggggaagctccatgtgagcctcacccgcttaacggacggggagaatgtggtggtttcagagttcacgtccaaggaggagctcattgaggccctatactgcagctgcttcgtcccggtgtactgtggcctcatccccccgacttaccgcggtgtgtgggcatttctcactctgcccccacagaggtacatcgatgggggcttcacgggcatgcagccctgtgccttctggaccgacgccatcaccatctccaccttcagtgggcagcaggacatctgtccccgggactgcccggccatcttccacgacttccgcatgttcaactgctccttccagttctccctggagaacatcgccaggatgacccacgcattgttccccccggacctggtgatcctgcacgattactactaccgagggtacgaggatgcagttttgtacttgaggcggctgaatgctgtttatcttaattcttcctccaagagagtgattttcccccgggtggaagtgtactgccagatagaactcgcccttggcaatgagtgccctgaacgcagtcaaccaagccttcgagcacggcaggccagtctggaaggagccacacaacctcacaaggagtgggttcccaaaggggatggaaggggcagccatggtccgcctgtgtcccaacctgtgcagacacttgaattcacatgcgagtcacctgtttcagcaccagtctctccacttgagcagccacctgcacagccactggcctcttcaactccactttctctaagtggcatgccacctgtatcattcccagctgtgcacaagccacccagctccacacctggttcatcactgcccaccccaccacctggactgtcacctctgtcacctcagcagcaggtacaaccgtctggatcaccagccagatccctacactctcaggcacccacttcacccaggccatccctggggccttcaactgtgggggcacctcaaacactgccccgaagttctctttcagccttccctgctcagccacctgtggaggaactaggccaagaacagccccaagctgtagctcttcttgtctcttcaaaaccaaaaagcgccgtgcctctggttcatgtgaaggaaaccgtcagcaagccttatgtaacggagagccctgctgaagactcaaactgggtgaataaggtcttcaagaagaacaagcaaaagacaagtggcaccagaaaaggcttcccaagacattcgggatccaaaaaaccaagcagcaaagtgcagtgagcatgtctaatgttccttaaatcccacggagaggagca

SEQ ID NO: 58909 - DNA, 1599 bp, Artificial Sequence
  derived and/or modified sequence
atggaggaacaggtattcaaaggcgacccagacacaccacactcgatttccttctcaggctccggtttcctgagtttttatcaggcaggcgcagttgatgctcttcgagacctggctcccaggatgctggaaaccgctcataggttcgccggtacatccgctggagccgttattgcggctctcgcaatatgcgggatcgagatggatgaatacttacgtgttcttaatgtcggcgtggccgaggtgaagaagagtttcctaggccctctgtcgccttcatgcaaaatggtccagatgatgagacagtttctttaccgagtgttacccgaggatagctacaaagtgacaactggcaagttgcacgtgtctctgacaagacttaccgatggcgaaaatgttgtggttagtgagttcacgagcaaagaagaattgattgaagctctttactgtagctgtttcgtcccagtgtattgcggtctgataccaccaacttatcgcggagtgcgatacatcgatgggggttttactgggatgcagccttgtgctttttggaccgacgctatcaccatttctacattctccggccagcaagacatttgcccaagggactgccctgccattttccacgacttccgcatgttcaactgttcctttcagtttagcctggagaatatcgccaggatgacccatgccctgttccccccagatctggtaatcctgcacgactactactaccgtggatacgaggatgcagtactctaccttcgaaggctgaacgctgtgtacctcaacagttcttctaagagagtgattttcccaagggttgaggtatattgccaaatcgaactagcccttggtaacgagtgtcccgagcggtctcagccgtcactacgagctagacaggcatcgctggagggggctacccaaccccataaggagtgggtgccaaaaggcgatggtcgtggtagccacgggccacccgtgtcccaaccagtccagacgctggaatttacatgcgaaagtccagtgtcagccccagtgtctccactagaacaacccccagcacagccattggcttcaagcacaccgttaagcttgtcgggcatgccccctgtgagctttcctgccgtgcacaagcctccatcgtctaccccgggatcaagcctgcccacccctcccccaggcctgtccccattatccccccaacaacaggttcagccttctgggtcccccgcacgatctctccactcccaggcgcctacttctcctcgcccatcgcttggtccatccaccgtaggcgcaccgcagacgctccctcgtagttccttgtcagcatttcctgcccagccccctgtagaagagctaggccaggagcagcctcaagcagtggccctcctcgtctcctcaaaaccgaagtccgcagtccctctggtgcatgttaaagaaaccgtctctaaaccatacgtcaccgagtccccggctgaggactcgaactgggtgaataaggtcttcaaaaaaaataagcagaaaacctctggcactaggaagggatttccgagacactctgggagcaaaaaacccagttcaaaagttcagtag

SEQ ID NO: 58910 - DNA, 1602 bp, Artificial Sequence
  derived and/or modified sequence
atggaggaacaagtgttcaagggcgatcctgatacacctcattccattagcttcagcggaagcggctttctgtctttttaccaggctggggcagtggacgcacttcgcgacctggccccaagaatgctcgagactgcccatagatttgccggaacatcagctggggctgtgattgctgcactcgccatttgtggcattgagatggatgaataccttagggtgttgaatgtcggagtggcagaggtgaaaaaatcattcttagggcctctctccccatcttgcaaaatggtccagatgatgcggcagtttctgtaccgcgtgcttccggaggacagctataaagtcactaccggaaaacttcatgtttccctgactcgcctgactgacggagaaaacgtggtagtatctgagtttacctccaaagaagagttgatcgaagcagccttatactgctcttgcttcgtgcctgtttattgcggcctcattcccccaacctataggggggtcaggtatatcgacgggggattcaccggcatgcagccctgcgcgttctggactgatgccatcacaatttctacattttcaggtcaacaggacatttgcccaagggactgtccagctatctttcacgatttccggatgtttaactgctcctttcagttcagcctggaaaacatcgcacgtatgacccacgctctctttcctcctgatctcgtgattctgcatgattactattatagaggctacgaggatgcggtattatatcttaggagattaaacgcggtgtatctgaattcttcctcaaagagagtcatcttcccccgtgttgaggtgtattgccagattgaactcgctcttggtaacgagtgtcctgagcgcagtcaacctagcctccgagcgcgtcaggcgtctttagaaggagccactcagccccacaaagaatgggtgcccaaaggagacggcaggggcagccacggaccccctgtgagtcagcctgtgcagaccctggagtttacttgcgagtctcctgtctcagccccagtctccccgctggagcagcctcctgcccagcccctggcttccagcacccccctgtcactgagtggaatgccaccggtgagcttccccgcagtacataagccaccatcatcaacgcctggaagttctttacctacccctccaccaggcctgtcccctctctctccacaacaacaagtacagcctagcggttctcctgcccgatccctgcatagccaggcccctacatctcccaggccatccctgggacctagcactgtgggagctccgcagacacttcctcggtcatcactcagtgctttccccgctcagccacccgtagaggaactcggacaggaacaaccccaggccgtggccttgctggtcagctccaaaccaaaaagcgctgtgcctctcgttcacgtcaaagaaaccgtgagcaaaccatatgtgactgaaagccccgcagaggatagtaattgggtgaacaaggtgttcaaaaagaataaacagaaaacaagcggcacaagaaagggtttcccacgccattccgggagtaagaagccatcctcaaaagtgcagtag

SEQ ID NO: 58911 - DNA, 1599 bp, Artificial Sequence
  derived and/or modified sequence
atggaggagcaggtgttcaagggcgaccccgacaccccccacagcatcagcttcagcggcagcggcttcctgagcttctaccaggccggcgccgtggacgccctgagagacctggcccccagaatgctggagaccgcccacagattcgccggcaccagcgccggcgccgtgatcgccgccctggccatctgcggcatcgagatggacgagtacctgagagtgctgaacgtgggcgtggccgaggtgaagaagagcttcctgggccccctgagccccagctgcaagatggtgcagatgatgagacagttcctgtacagagtgctgcccgaggacagctacaaggtgaccaccggcaagctgcacgtgagcctgaccagactgaccgacggcgagaacgtggtggtgagcgagttcaccagcaaggaggagctgatcgaggccctgtactgcagctgcttcgtgcccgtgtactgcggcctgatcccccccacctacagaggcgtgagatacatcgacggcggcttcaccggcatgcagccctgcgccttctggaccgacgccatcaccatcagcaccttcagcggccagcaggacatctgccccagagactgccccgccatcttccacgacttcagaatgttcaactgcagcttccagttcagcctggagaacatcgccagaatgacccacgccctgttcccccccgacctggtgatcctgcacgactactactacagaggctacgaggacgccgtgctgtacctgagaagactgaacgccgtgtacctgaacagcagcagcaagagagtgatcttccccagagtggaggtgtactgccagatcgagctggccctgggcaacgagtgccccgagagaagccagcccagcctgagagccagacaggccagcctggagggcgccacccagccccacaaggagtgggtgcccaagggcgacggcagaggcagccacggcccccccgtgagccagcccgtgcagaccctggagttcacctgcgagagccccgtgagcgcccccgtgagccccctggagcagccccccgcccagcccctggccagcagcacccccctgagcctgagcggcatgccccccgtgagcttccccgccgtgcacaagccccccagcagcacccccggcagcagcctgcccacccccccccccggcctgagccccctgagcccccagcagcaggtgcagcccagcggcagccccgccagaagcctgcacagccaggcccccaccagccccagacccagcctgggccccagcaccgtgggcgccccccagaccctgcccagaagcagcctgagcgccttccccgcccagccccccgtggaggagctgggccaggagcagccccaggccgtggccctgctggtgagcagcaagcccaagagcgccgtgcccctggtgcacgtgaaggagaccgtgagcaagccctacgtgaccgagagccccgccgaggacagcaactgggtgaacaaggtgttcaagaagaacaagcagaagaccagcggcaccagaaagggcttccccagacacagcggcagcaagaagcccagcagcaaggtgcagtag

SEQ ID NO: 58912 - DNA, 1602 bp, Artificial Sequence
  derived and/or modified sequence
atggaggagcaggtgttcaagggcgaccccgacaccccccacagcatcagcttcagcggcagcggcttcctgagcttctaccaggccggcgccgtggacgccctgagagacctggcccccagaatgctggagaccgcccacagattcgccggcaccagcgccggcgccgtgatcgccgccctggccatctgcggcatcgagatggacgagtacctgagagtgctgaacgtgggcgtggccgaggtgaagaagagcttcctgggccccctgagccccagctgcaagatggtgcagatgatgagacagttcctgtacagagtgctgcccgaggacagctacaaggtgaccaccggcaagctgcacgtgagcctgaccagactgaccgacggcgagaacgtggtggtgagcgagttcaccagcaaggaggagctgatcgaggccgccctgtactgcagctgcttcgtgcccgtgtactgcggcctgatcccccccacctacagaggcgtgagatacatcgacggcggcttcaccggcatgcagccctgcgccttctggaccgacgccatcaccatcagcaccttcagcggccagcaggacatctgccccagagactgccccgccatcttccacgacttcagaatgttcaactgcagcttccagttcagcctggagaacatcgccagaatgacccacgccctgttcccccccgacctggtgatcctgcacgactactactacagaggctacgaggacgccgtgctgtacctgagaagactgaacgccgtgtacctgaacagcagcagcaagagagtgatcttccccagagtggaggtgtactgccagatcgagctggccctgggcaacgagtgccccgagagaagccagcccagcctgagagccagacaggccagcctggagggcgccacccagccccacaaggagtgggtgcccaagggcgacggcagaggcagccacggcccccccgtgagccagcccgtgcagaccctggagttcacctgcgagagccccgtgagcgcccccgtgagccccctggagcagccccccgcccagcccctggccagcagcacccccctgagcctgagcggcatgccccccgtgagcttccccgccgtgcacaagccccccagcagcacccccggcagcagcctgcccacccccccccccggcctgagccccctgagcccccagcagcaggtgcagcccagcggcagccccgccagaagcctgcacagccaggcccccaccagccccagacccagcctgggccccagcaccgtgggcgccccccagaccctgcccagaagcagcctgagcgccttccccgcccagccccccgtggaggagctgggccaggagcagccccaggccgtggccctgctggtgagcagcaagcccaagagcgccgtgcccctggtgcacgtgaaggagaccgtgagcaagccctacgtgaccgagagccccgccgaggacagcaactgggtgaacaaggtgttcaagaagaacaagcagaagaccagcggcaccagaaagggcttccccagacacagcggcagcaagaagcccagcagcaaggtgcagtag

SEQ ID NO: 58913 - protein, 309 aa, Artificial Sequence
  derived and/or modified sequence
MLPEDSGGSPDAAASDKHIQWLLGADGEVWVWIMGEGPGDKPYEEISEELIAERARLQAQREAEELWRQKEAEITKKFRDALANEKARILAEKWKVEMEDRKAAKVLEERIHEEFKRKEEEERKRGEEQIRLQEEQRAKELYWTLKQAQLHCQASEKEEREWEEQLRRSKAADEERSRRAQRARDEYRHHSLRAIQKGTVAGLSSMFRELGQSHEQEARLYHHLPDPGLPQPLALPVSRTWERPLRPVSRDVIVRWFKEEQLPRRAGFERNTKFIAPWFHGGNYHCFRRRVTSGTLRTEGQPTRLPSVV

SEQ ID NO: 58914 - DNA, 930 bp, Artificial Sequence
  derived and/or modified sequence
atgctgcccgaggacagcggcggcagccccgacgccgccgccagcgacaagcacatccagtggctgctgggcgccgacggcgaggtgtgggtgtggatcatgggcgagggccccggcgacaagccctacgaggagatcagcgaggagctgatcgccgagagagccagactgcaggcccagagagaggccgaggagctgtggagacagaaggaggccgagatcaccaagaagttcagagacgccctggccaacgagaaggccagaatcctggccgagaagtggaaggtggagatggaggacagaaaggccgccaaggtgctggaggagagaatccacgaggagttcaagagaaaggaggaggaggagagaaagagaggcgaggagcagatcagactgcaggaggagcagagagccaaggagctgtactggaccctgaagcaggcccagctgcactgccaggccagcgagaaggaggagagagagtgggaggagcagctgagaagaagcaaggccgccgacgaggagagaagcagaagagcccagagagccagagacgagtacagacaccacagcctgagagccatccagaagggcaccgtggccggcctgagcagcatgttcagagagctgggccagagccacgagcaggaggccagactgtaccaccacctgcccgaccccggcctgccccagcccctggccctgcccgtgagcagaacctgggagagacccctgagacccgtgagcagagacgtgatcgtgagatggttcaaggaggagcagctgcccagaagagccggcttcgagagaaacaccaagttcatcgccccctggttccacggcggcaactaccactgcttcagaagaagagtgaccagcggcaccctgagaaccgagggccagcccaccagactgcccagcgtggtgtag

SEQ ID NO: 58915 - DNA, 930 bp, Artificial Sequence
  derived and/or modified sequence
atgctccctgaggattctggcggcagtcccgatgcagccgcctctgataaacacattcagtggctgcttggagctgatggagaggtatgggtgtggattatgggtgagggaccaggcgacaagccctacgaggagatttcggaagagttgattgccgaaagagcacggctgcaggcccagcgcgaggccgaagaactgtggaggcagaaggaagccgagataacaaaaaagttcagagacgctcttgccaatgaaaaagctcgcatccttgctgagaagtggaaggtggagatggaagatcggaaagccgccaaggttctagaggagcgcatccacgaggaattcaaaaggaaggaagaggaagaacgaaaacgtggtgaggagcaaatccgtctgcaagaagaacagcgagcaaaagagctgtactggacacttaagcaagcacagctgcactgccaggcgtccgagaaagaagagagagaatgggaagaacagctgaggagatccaaggccgccgatgaggaacgaagtagacgcgcccagagagctcgcgacgagtatcgccatcactcccttcgcgcaatccaaaaagggactgtggcagggttatcctccatgttccgagagctaggtcagtcacatgagcaggaggctaggctataccatcacttaccagaccccgggcttcctcagcccctggccctgccggtaagccggacttgggagagacctctcagaccagtctctcgtgatgtgatcgtgcggtggttcaaagaggagcagttgcccagacgcgccgggtttgagagaaataccaaatttattgcaccttggtttcacggaggaaattaccactgttttaggagaagggttacaagcggaaccctgcgcaccgaaggacagcccaccaggctgccatctgtggtttag

SEQ ID NO: 58916 - DNA, 930 bp, Artificial Sequence
  derived and/or modified sequence
atgctgcctgaggacagcggcggcagcccagatgctgctgccagtgacaagcacatccagtggctgctgggcgcagatggagaggtgtgggtgtggatcatgggagagggccctggggacaagccctatgaggagatcagcgaggagctgattgctgagcgggcccggctgcaggcccagcgggaggccgaggagctgtggaggcagaaggaggccgagatcaccaagaagttcagagatgccctggccaatgagaaggcccgcatcctggccgagaagtggaaggtggagatggaggacaggaaggccgccaaggtgctggaggagcgcatccacgaggagttcaagaggaaggaggaggaggagaggaagagaggagaggagcagatccggctgcaggaggagcagagggccaaggagctgtactggaccctgaagcaggcccagctgcactgccaggccagcgagaaggaggagcgggagtgggaggagcagctgcggcgcagcaaggccgcagatgaggagaggagccggcgggcccagagggccagagatgagtaccgccaccacagcctgcgggccatccagaagggcaccgtggccggcctgagctccatgttccgggagctgggccagagccatgagcaggaggcccggctgtaccaccacctgcctgaccccggcctgccccagcccctggccctgcctgtgtccaggacctgggagcggcccctgcggcctgtgtccagagatgtgattgtgcgctggttcaaggaggagcagctgccccggcgggccggctttgagaggaacaccaagttcatcgccccctggttccacggcggcaactaccactgcttcagaagaagagtgaccagcggcaccctgaggacagagggccagcccacccggctgcccagcgtggtgtag

SEQ ID NO: 58917 - DNA, 930 bp, Artificial Sequence
  derived and/or modified sequence
atgctgcccgaggacagcggcggcagccccgacgccgccgccagcgacaagcatatccagtggctcctcggtgcagatggggaagtatgggtttggatcatgggagagggccccggcgacaaaccatatgaggagatttccgaggagcttatagcagagagagcccgtctacaggcccagcgggaagccgaagaactgtggagacagaaagaagcagaaatcacgaaaaaattccgggatgcattggctaatgagaaagctaggatcctggcagagaagtggaaagttgagatggaggaccggaaggccgcaaaagtgttggaggaaagaatccacgaggagtttaagaggaaagaagaagaagagagaaagaggggagaggaacagatcagattgcaggaggagcaaagggcaaaggagttatactggactttaaagcaagcacagctgcattgccaggcttctgaaaaggaagagcgagagtgggaggaacaattacgccgcagcaaagcagccgatgaggagcgctcccgtagggcccagcgcgcccgcgatgaatacagacaccattcacttcgcgccatacagaagggcacagttgccggtctctcctccatgtttcgagagctcgggcaatcgcatgagcaggaggcacgactatatcaccacctgccagacccagggctgccacagcccctggcactgcccgtttctagaacgtgggaaagaccattgaggcccgtgagccgcgacgttattgttcggtggttcaaggaggagcagcttccccggcgagccggctttgagcggaatactaagttcatagccccctggtttcacggcggaaactaccactgttttcggagacgagtaacaagcgggacgctgcgaacagagggtcagccaacccgtcttccaagtgtggtgtag

SEQ ID NO: 58918 - DNA, 930 bp, Artificial Sequence
  derived and/or modified sequence
atgctcccagaggattctgggggaagccccgatgccgcagccagtgataaacacatacaatggctgctgggggctgatggggaagtctgggtctggattatgggtgaggggccaggcgataaaccgtacgaggagatcagcgaggaactcattgctgagagggcgcgattgcaggcccagcgcgaggcggaagagctgtggcgccagaaggaggccgaaataactaaaaaattccgtgacgcactcgccaatgagaaggccaggatcctggccgagaagtggaaggtggagatggaggacaggaaggccgcaaaggtccttgaagagaggatccatgaggagttcaaacgcaaggaagaagaggagagaaagcggggtgaggaacaaatcaggctgcaggaggaacaacgtgctaaggaactctattggaccctgaaacaggctcagctgcattgccaggcatccgaaaaggaggaaagagaatgggaggagcagcttcggcgatccaaggcggcagacgaggagagatcaaggcgggctcagagggctagggacgagtacaggcatcactccctgcgcgcaatccagaaaggaaccgtcgccggactcagctcgatgtttagagagttaggacaaagtcatgagcaggaagcccgattataccaccatttgcccgaccctgggctcccacagcccctggctctccctgtgtcgagaacatgggaacgtccactccgcccagtgagcagggacgttatcgtcaggtggttcaaagaggagcagctccctaggcgagcgggtttcgaacgcaatacaaaattcatcgccccttggttccacggtgggaactaccactgctttcgcagacgcgtcacatctgggacgctccggaccgaaggacagcctactagattgccttccgtagtgtag

SEQ ID NO: 58919 - DNA, 3487 bp, Artificial Sequence
  derived and/or modified sequence
aaagcagccgtgccgtgtcccagggcgggaattgtgcggggacgggctccacggaggaatcttctcttccttcccttgatgttgccagaggactcaggaggctctccagatgctgcagcgagtgacaagcacatccaatggctcctaggggcagatggcgaggtctgggtctggatcatgggagaaggccctggtgacaagccctacgaagagatctctgaggagctgattgcagagagggcgcggctgcaggcacagagggaagctgaggagctctggagacagaaggaggcagagatcaccaagaagttccgggatgctctggccaatgagaaagcccggatcttggcggagaagtggaaagtggagatggaagaccgcaaggctgccaaagtcctggaggaacgcatccacgaggaattcaagaggaaagaggaagaggagaggaagcgaggagaagagcagattcgcctccaggaagagcagagggcgaaggagctctactggaccctgaagcaggctcagctgcattgccaagccagtgagaaagaggagcgagagtgggaagaacagttgcgccggtccaaggcggctgatgaggagaggagccgccgagcccagcgcgcccgggacgagtaccgacaccactcgctccgtgctatccagaagggcacggtcgctggcctcagctccatgttccgggagcttggccagagccatgagcaggaggcaagactctaccaccacctccccgacccgggtctgccgcagccccttgccctgccggtcagcaggacctgggagcgcccgctgcgcccagtctccagagatgtcatcgtccgctggtttaaggaggagcagctgcctcgccgagctggcttcgagaggaacaccaagttcatcgccccctggttccatggaggaaattatcactgtttcaggaggagagttacttcaggaaccctgcggacagagggacagcccaccagactaccatctgttgtttgaataatttttttccttatcaattggattcattttggtatcctgtttttgaactcagcttaagaacttctcatctcaaatcctatggccttctggaagatccaccactatccaaaggaaaaagtagattaatatgcctcaagggatatgacatctatggcatagggctactggtctcatcccagcgatcgggacagaaattgctaatagctcatgcaactctttcatgaagagcttagctatgaccttagaagacaaagcctgtttgtcatggctgccgtaaaccgagctcttacagtgcgtggaccatgttttaataatccaaaataattccagtgccgaaccctgaatttaacatatggtagacattcagtaaatgtttgttgaatgaatgcatgtcttctaaaagttttccaacacaaattagcagtggtttcttgtaaattatttcctactcgccactctataaaatcatggcaataatagaagattatgaaggatttctatggaggacataaatgctgcatctttcataatctccattatcaccctcattgatattatcattggaattatctaaggtgagccccagtttccagggcagctgattgacaccgtcctgccttccttatttaacctcttcttttgccactcgcctctatctttgaatcatattttggccttggttttgcaatggttttatgtcatcctacagatgtcttcaagacctggggtgagttatcaatgcaagaatggttcttagaaatctgatgaggcctctgctctctgggatgtggccctctctatgcaggttactccaatgattagctctgtcctcattgtccttttaattcccttgtcaacttaatctcagtatgttgcttatattaacaagaagactcacgcaataactcctcgataactctcagtgatggtatctgttggtgcatacttgtgttccacagttatggccatatacacagaggtagtatatgatgaagagaagattacagtctttacagtcaagaagacttgggttcatatcctaaccctggaacttactagcattataatgcttgcagcattgtgtttggtgagaggaaaagaatgaatggattctaggaatgttagggaacgatttactttacccgatggctgtatcaaacatctatgccccacttcttctcttgcctcacctattccttagattcttggtcacttctctaccacaagccaccagcactataaccagttttgcgtgggttctgctcttcctccctatgttgatcagtgtcatgtgagcataagccaatggtagcttgccacatgccccatctcccattgctgcagaggcataagacagaagagatgggaagtgaatgcccgatgtggtgaatctgggatgaatgggagtcataggctggtagatcgctttttcctccttcttcctcctggaggaactattctgagagtcatctgtttgtatggtcttgtagaagacagtcctgtaagatcgagcaaccagtcatgatgaaaccaagtggtggccggatcagtatgacaccctgctgcccccgtttttaattcttctctgccttgccctgctctctcctgttgctctgggattgcacttctgaatgaagtagcagctcataagcttttgccacaggctctgtcttttggggaatccaggataagaacccattatacagaagtgttcaataatatcaattttgcaactcactcagctccatggcttcccccggtctacctgtctcactacatgcataaagtgaaatgatggaaggaatctgctttctgaactctaatgtgccttcattgattatcattaaaattatcattaaaattgccttatttctatggactcagaggaatgatgttttagttttggctctctgatttaccaactatgtgactttgtccaagtcatttaacttcagtaaacctcggtatgactgaaaagggagttttctgtatggccgtcactaggtttttttgtgggttagttaaatgataaacatgaaagctctgtccaaatgaaaaaggtatttctaacaacaaccacaataacaataacaacttagtgcttagcccatgatgtatcaggggatatgatgtgatgattttcaaggtgttggaggcaacttctgttccaagaactcccagcagctttgaaagcagactgagatgagttgagaccctgaatccctgggctgttgttcctgtcacccctaattaatatgtgagagacaacagctgggttttccatccctaacacatttatttcattttatttggggcctgcaatttctgcatgtctcatatattttaggttttacctttttacctggctttaaaataaatcccttgtaagttgtcctgcaaatgaaattactgtctggaaaactgcaatttcatcttgagagttttattatgctaataaatgtcaggattctcatat

SEQ ID NO: 58920 - protein, 358 aa, Artificial Sequence
  derived and/or modified sequence
MSTAREQPIFSTRAHVFQIDPATKRNWIPAGKHALTVSYFYDATRNVYRIISIGGAKAIINSTVTPNMTFTKTSQKFGQWADSRANTVYGLGFASEQHLTQFAEKFQEVKEAARLAREKSQDGGELTSPALGLASHQVPPSPLVSANGPGEEKLFRSQSADAPGPTERERLKKMLSEGSVGEVQWEAEFFALQDSNNKLAGALREANAAAAQWRQQLEAQRAEAERLRQRVAELEAQAASEVTPTGEKEGLGQGQSLEQLEALVQTKDQEIQTLKSQTGGPREALEAAEREETQQKVQTRNAELEHQLRAMERSLEEARAERERARAEVGRAAQLLDVSLFELSELREGLARLAEAAP

SEQ ID NO: 58921 - DNA, 1077 bp, Artificial Sequence
  derived and/or modified sequence
atgtctaccgctagggaacaaccaattttttcgacccgcgcacacgtgtttcaaatcgacccagccaccaagcgaaactggatccccgctggcaagcacgcactgactgtgagctatttctacgacgcaacacgtaatgtgtacaggattatctcaatcggaggggccaaggcaattattaattccactgtcacccccaacatgaccttcaccaagaccagccagaaattcgggcagtgggctgatagcagagctaacaccgtctatggactcggattcgcatcagaacaacatctcacccagttcgcagagaagttccaggaagttaaggaggccgccaggttagcaagagaaaagtcccaggacggcggagaactgacttcacccgcattgggtctggcctcgcatcaggtgcccccatctcctctggtgtcagcgaacggcccaggggaagagaaactcttccgctctcagtcggcggatgcaccaggtccaacagagagggagcgtctgaagaagatgctgagtgagggcagcgtgggagaagtacagtgggaggccgaattctttgccctgcaggattcaaacaacaagctggccggcgccctgagagaggcaaatgccgctgctgcgcaatggcgacagcaattagaggctcagagggctgaggctgagcggctgagacagcgagtcgcggaacttgaagcacaggccgcatccgaggtgacccccacgggtgaaaaagagggattgggccagggacagtctcttgagcagctggaggccctcgtccagactaaggatcaagagatccagaccctgaagtcccagacggggggccccagagaagcacttgaggccgccgaacgcgaggaaacccagcaaaaagtgcaaacgcggaatgctgagcttgaacaccagctccgcgcgatggagcggtcccttgaggaggcaagggccgaaagagagagagcccgtgctgaggttgggagagccgcccagctgctggacgtgagtttattcgagctatctgaattgcgagaagggcttgccagattggctgaggccgctccatag

SEQ ID NO: 58922 - DNA, 438 bp, Artificial Sequence
  derived and/or modified sequence
atgtctactgctcgagagcagccgatatttagcacccgcgcccacgtgttccaaattgatccggcaaccaagagaaactggatacccgctggcaagcacgctctgaccgtgtcttatttttacgacgccactaggaacgtgtaccgaattatctctattggtggggccaaggcaataataaactccactgtcacaccaaacatgacgtttaccaaaactagtcagaaattcgggcagtgggccgattccagggctaatacggtttatggattggggttcgcatcagagcagcacctaacacaattcgcagagaaattccaagaagtcaaagaagctgccaggctggctcgggaaaagtcacaggacggctggggcggcccacaatctgccctggttgtcggctcatttggcgctgtctttgagctcctgattgtttag

SEQ ID NO: 58923 - DNA, 1077 bp, Artificial Sequence
  derived and/or modified sequence
atgagcacagctcgcgagcagccaatcttctccacccgggctcatgtctttcaaattgatccagctaccaagcgaaactggattcctgctggcaagcacgccctgacagtgtcatacttctacgatgcaactcgaaacgtgtaccgcatcatttcaattggtggagccaaagcgataatcaattctactgtgactcccaacatgaccttcaccaagacgagccagaaatttggccagtgggcggattcccgcgcaaacactgtgtatgggttgggttttgcttctgaacagcacctcacccagtttgcagagaaattccaagaggtcaaggaagctgccagacttgctagagaaaaaagtcaggatgggggcgaactgacttccccagcactgggccttgcctcccaccaggtcccccctagtccactcgtgtcagcaaacggcccaggcgaggaaaaactgtttcgctcacagtccgcagatgcccccgggcctaccgagagagagaggcttaagaagatgcttagcgaaggaagcgtgggagaagttcagtgggaggccgaattcttcgcactgcaggattctaacaataaactcgctggggccctccgcgaagccaatgctgccgctgcacagtggcgccagcagctggaggcacagcgagccgaggctgagcggctaagacagagggtcgctgaactggaggctcaagccgcgtccgaggtcacgccgaccggcgaaaaggaaggcctgggccagggccagtctctggaacagctggaagcactggtacagacaaaagatcaggaaatacagaccctgaagagccagaccggcggacctagagaggccctggaggccgcagagagggaagagacccagcagaaggttcaaacacggaatgccgaattggagcaccagttgcgggcaatggagcgctcgctcgaagaggcacgagcagagcgggaacgggcaagggctgaggtggggcgcgccgcgcagctgctagacgtgtccctatttgagctgtccgagctccgtgaagggctggctcgactagcagaggctgctccatag

SEQ ID NO: 58924 - DNA, 1284 bp, Artificial Sequence
  derived and/or modified sequence
acgggcggcgtggagggcggcgcggagggcgcgggcccgggagccagggagcgagcggggcgcccggcagcgcggagtcagcgccgcgggggccgcacccgactcgcgcctggacactcgcggggcgccgacctggcagggggccaaaccagtgctcctgccacctctctggctgccccctagagcctgcccatcccagcctgaccaatgtccacagccagggagcagccaatcttcagcacacgggcgcacgtgttccaaattgacccagccaccaagcgaaactggatcccagcgggcaagcacgcactcactgtctcctatttctacgatgccacccgcaatgtgtaccgcatcatcagcatcggaggcgccaaggccatcatcaacagcactgtcactcccaacatgaccttcaccaaaacttcccagaagttcgggcagtgggccgacagtcgcgccaacacagtctacggcctgggctttgcctctgaacagcatctgacacagtttgccgagaagttccaggaagtgaaggaagcagccaggctggccagggagaaatctcaggatggcggggagctcaccagtccagccctggggctcgcctcccaccaggtgcccccgagccctctcgtcagtgccaacggccccggcgaggaaaaactgttccgcagccagagcgctgatgcccccggccccacagagcgcgagcggctaaagaagatgttgtctgagggctccgtgggcgaggtacagtgggaggccgagtttttcgcactgcaggacagcaacaacaagctggcaggcgccctgcgagaggccaacgccgccgcagcccagtggaggcagcagctggaggctcagcgtgcagaggccgagcggctgcggcagcgggtggctgagctggaggctcaggcagcttcagaggtgacccccaccggtgagaaggaggggctgggccagggccagtcgctggaacagctggaagctctggtgcaaaccaaggaccaggagattcagaccctgaagagtcagactggggggccccgcgaggccctggaggctgccgagcgtgaggagactcagcagaaggtgcagacccgcaatgcggagttggagcaccagctgcgggcgatggagcgcagcctggaggaggcacgggcagagcgggagcgggcgcgggctgaggtgggccgggcagcgcagctgctggacgtcagcctgtttgagctgagtgagctgcgtgagggcctggcccgcctggctgaggctgcgccctga

SEQ ID NO: 58925 - DNA, 645 bp, Artificial Sequence
  derived and/or modified sequence
acgggcggcgtggagggcggcgcggagggcgcgggcccgggagccagggagcgagcggggcgcccggcagcgcggagtcagcgccgcgggggccgcacccgactcgcgcctggacactcgcggggcgccgacctggcagggggccaaaccagtgctcctgccacctctctggctgccccctagagcctgcccatcccagcctgaccaatgtccacagccagggagcagccaatcttcagcacacgggcgcacgtgttccaaattgacccagccaccaagcgaaactggatcccagcgggcaagcacgcactcactgtctcctatttctacgatgccacccgcaatgtgtaccgcatcatcagcatcggaggcgccaaggccatcatcaacagcactgtcactcccaacatgaccttcaccaaaacttcccagaagttcgggcagtgggccgacagtcgcgccaacacagtctacggcctgggctttgcctctgaacagcatctgacacagtttgccgagaagttccaggaagtgaaggaagcagccaggctggccagggagaaatctcaggatggctggggtgggccccagtcggctctggttgttggcagctttggggctgtttttgagcttctcattgtgtag

SEQ ID NO: 58926 - DNA, 1418 bp, Artificial Sequence
  derived and/or modified sequence
ggccggcggcatccgaggcgcatgactagttggggccaaaccagtgctcctgccacctctctggctgccccctagagcctgcccatcccagcctgaccaatgtccacagccagggagcagccaatcttcagcacacgggcgcacgtgttccaaattgacccagccaccaagcgaaactggatcccagcgggcaagcacgcactcactgtctcctatttctacgatgccacccgcaatgtgtaccgcatcatcagcatcggaggcgccaaggccatcatcaacagcactgtcactcccaacatgaccttcaccaaaacttcccagaagttcgggcagtgggccgacagtcgcgccaacacagtctacggcctgggctttgcctctgaacagcatctgacacagtttgccgagaagttccaggaagtgaaggaagcagccaggctggccagggagaaatctcaggatggcggggagctcaccagtccagccctggggctcgcctcccaccaggtgcccccgagccctctcgtcagtgccaacggccccggcgaggaaaaactgttccgcagccagagcgctgatgcccccggccccacagagcgcgagcggctaaagaagatgttgtctgagggctccgtgggcgaggtacagtgggaggccgagtttttcgcactgcaggacagcaacaacaagctggcaggcgccctgcgagaggccaacgccgccgcagcccagtggaggcagcagctggaggctcagcgtgcagaggccgagcggctgcggcagcgggtggctgagctggaggctcaggcagcttcagaggtgacccccaccggtgagaaggaggggctgggccagggccagtcgctggaacagctggaagctctggtgcaaaccaaggaccaggagattcagaccctgaagagtcagactggggggccccgcgaggccctggaggctgccgagcgtgaggagactcagcagaaggtgcagacccgcaatgcggagttggagcaccagctgcgggcgatggagcgcagcctggaggaggcacgggcagagcgggagcgggcgcgggctgaggtgggccgggcagcgcagctgctggacgtcagcctgtttgagctgagtgagctgcgtgagggcctggcccgcctggctgaggctgcgccctgagccggggctggttttctatgaacgattccggcctgggatgcgggccaggctgcaggcggcatagttgggcccattcgtcctggaaagggactggggggtcccaacttagccctgggtgggccgggccgggctgggctggggtgggccccagtcggctctggttgttggcagctttggggctgtttttgagcttctcattgtgtagaatttctagatcccccgattacatttctaagcgtggc

SEQ ID NO: 58927 - DNA, 1077 bp, Artificial Sequence
  derived and/or modified sequence
atgagcacagcccgggagcagcccatcttcagcacccgggcccacgtgttccagattgatcctgccaccaagaggaactggatcccagctgggaagcacgccctgactgtgtcctacttctatgatgccaccagaaatgtgtaccgcatcatcagcattggaggagccaaggccatcatcaacagcacagtgacccccaacatgaccttcaccaagaccagccagaagtttggccagtgggccgacagccgggccaacacagtgtatggcctgggctttgccagcgagcagcacctgacccagtttgctgagaagttccaggaggtgaaggaggccgcccggctggcccgggagaagagccaggacggcggggagctgaccagccctgccctgggcctggccagccaccaggtgccccccagccccctggtgtctgccaatggacctggagaggagaagctgttccgcagccagagcgcagatgcccctggccccacagagcgggagcggctgaagaagatgctgtctgagggctctgtgggggaggtgcagtgggaggccgagttctttgccctgcaggacagcaacaacaagctggccggggccctgcgggaggccaatgctgctgctgcccagtggaggcagcagctggaggcccagagagctgaggccgagcggctgcggcagagggtggccgagctggaggcccaggccgccagcgaggtgacccccactggagagaaggagggcctgggccagggccagagcctggagcagctggaggccctggtgcagaccaaggaccaggagatccagaccctgaagagccagacaggaggcccccgggaggccctggaggccgctgagcgggaggagacccagcagaaggtgcagaccagaaatgctgagctggagcaccagctgcgggccatggagaggagcctggaggaggcccgggcagagcgggagcgggcccgggcagaggtgggccgggccgcccagctgctggatgtgtccctgtttgagctgtctgagctgcgggagggcctggcccggctggccgaggccgccccctag

SEQ ID NO: 58928 - DNA, 438 bp, Artificial Sequence
  derived and/or modified sequence
atgagcacagcccgggagcagcccatcttcagcacccgggcccacgtgttccagattgatcctgccaccaagaggaactggatcccagctgggaagcacgccctgactgtgtcctacttctatgatgccaccagaaatgtgtaccgcatcatcagcattggaggagccaaggccatcatcaacagcacagtgacccccaacatgaccttcaccaagaccagccagaagtttggccagtgggccgacagccgggccaacacagtgtatggcctgggctttgccagcgagcagcacctgacccagtttgctgagaagttccaggaggtgaaggaggccgcccggctggcccgggagaagagccaggacggctggggcggcccccagagcgccctggtggtgggcagctttggagctgtgtttgagctgctgattgtgtag

SEQ ID NO: 58929 - DNA, 1077 bp, Artificial Sequence
  derived and/or modified sequence
atgagcaccgcccgggagcagcccatcttcagcacccgggcccacgtgtttcaaatcgaccctgccaccaagagaaactggatccccgcaggtaagcatgccctgactgttagctacttctacgatgcaacccgcaacgtgtacaggattatttcaatcggcggtgccaaagctattatcaactcgactgtgacccccaatatgacctttaccaaaacctcgcagaagttcggacaatgggcagacagccgggcaaatacggtatatggcctcggattcgcatcagagcaacacttgacccaatttgccgaaaagtttcaggaagtgaaagaagccgcccggctggcaagggagaagtcccaggatggaggggagctcacatctccggccctaggcctggcgtcacaccaggttccaccctctccactggtgagcgctaatggtcctggggaagaaaagctgtttcgatcccaatccgccgacgcacccggcccaacagaaagagaaaggttgaagaaaatgctgagtgagggctccgtcggagaggtgcagtgggaagctgagttctttgctctccaggacagcaacaacaaactagccggagcgctgcgcgaggccaatgctgctgcagcccaatggcggcaacaacttgaagcacagagagcagaagcagaaagactgcggcagagagtggcagagctagaagctcaggccgctagcgaagtgactcctacaggcgagaaggaaggtcttggccagggccaatcgctggaacagctcgaagcactggtacagactaaagaccaggaaattcagaccctcaagtcccagactggtggccctcgagaggccctggaggccgctgagagagaggagacccagcagaaggttcagacgaggaacgccgaattggaacaccagctacgcgctatggagagaagcctagaggaggcacgagccgagagagagcgcgcccgcgcagaagtcgggagggcagctcaactcttagatgtgtcactctttgaactgtcagaactgagagaaggattggctaggctcgccgaagctgctccttag

SEQ ID NO: 58930 - DNA, 438 bp, Artificial Sequence
  derived and/or modified sequence
atgagcaccgcccgggagcagcccatcttcagcacccgggcccacgtctttcagattgaccctgcaaccaagagaaattggatccccgccggaaaacacgccctaacagtgagctacttctacgatgccacaaggaacgtgtacagaattatctccatcggcggggctaaagctatcatcaattcaaccgtgacccctaatatgacctttacaaagacctctcagaagtttgggcagtgggccgactcaagagctaataccgtgtacggcctcggtttcgcctctgaacagcacttgacacagttcgctgaaaagttccaggaagtgaaagaggctgctcggctggcccgagagaagtcacaggatggatggggtgggccacagtcagcccttgtagtgggaagtttcggagcagtgtttgagctgctgatcgtttag

SEQ ID NO: 58931 - DNA, 1077 bp, Artificial Sequence
  derived and/or modified sequence
atgagcaccgcccgggagcagcccatcttcagcacccgggcccacgtcttccagatagatcctgctactaaacgcaactggatcccagcggggaaacacgcactcaccgtctcttacttctacgacgcaaccaggaacgtttacagaatcatttcgattggcggggccaaagcaatcataaattccacggtcacccccaatatgacctttaccaaaacctctcagaagtttggacagtgggccgatagtagggccaacacagtgtacggactgggcttcgctagcgaacagcatctgacccagtttgccgagaagttccaagaggtcaaagaggccgcccgactcgccagggagaaaagccaggatggcggagagttgacatctcccgcactgggcttggcctcccaccaggtgcctccttcacctctcgtgtccgccaacggccccggagaagaaaagctgttccgctcccaatctgcggatgcgccagggcccacagagagggaaaggctgaaaaagatgctcagtgagggcagcgtcggcgaagttcagtgggaggctgaattttttgcactgcaagattcgaacaacaaactggctggtgctctcagagaggctaacgcagcggcagcccagtggaggcagcagctggaggctcagagggccgaagccgaaagattgcgccagcgtgtggcagaattagaagcacaggctgcttcagaagtgacccccaccggagaaaaagagggcctcggccagggtcagtccttggaacagctggaagcactcgtgcagaccaaagatcaggagattcaaaccctcaagtcacagacaggcggaccaagagaggcccttgaagccgctgaaagagaggaaacccagcaaaaggtgcagaccaggaatgcggagctagagcatcagctgagagccatggagcggagtctcgaagaggccagagctgagagagagagagcccgagcagaggtcggacgggccgcgcagctcttagacgtctcgctatttgagcttagtgaattgagggaggggctcgccagactcgccgaggccgccccctag

SEQ ID NO: 58932 - DNA, 1077 bp, Artificial Sequence
  derived and/or modified sequence
atgtccacagccagagagcagcccatcttctcgacgcgggctcatgtattccagattgatccagctaccaagaggaactggattcccgctgggaagcatgcactcacagtatcttatttctacgacgccacaaggaacgtttacaggatcatctccataggcggagccaaggcaatcatcaactctactgtgactcccaatatgacctttactaaaacaagtcaaaagtttggacaatgggccgattctagggccaacactgtgtatggcctcggctttgccagtgagcaacacctcacgcagttcgctgagaaatttcaggaggtgaaggaggcagctagactggccagggaaaagtcccaggatggaggtgagctcacatcccctgccctgggacttgcctcgcaccaagtgccccctagccctcttgttagcgctaatggccctggagaggagaaactgtttcgcagccagagcgccgacgcgcctggacctacagagcgtgaacggctcaaaaaaatgctctccgaagggtccgtgggtgaagtgcagtgggaagccgaattcttcgccctccaggactcaaacaataagttggcgggtgccctgcgcgaagccaacgccgctgccgcacagtggcgccagcagctagaagcgcaacgagctgaagctgagaggctgaggcagcgcgttgccgagctggaggcccaggctgcctcagaagtcacccccaccggcgaaaaggaggggctaggacaaggacagagcctggaacagctcgaggctcttgtccagacaaaagatcaggaaattcagacactcaagagtcagaccggcggtcctagggaagctttagaggccgctgagcgggaggaaacgcaacaaaaagttcagactcgcaacgctgagctggaacaccaattacgggcaatggagagaagtctggaggaggccagggccgagagagagagggctcgagccgaagtagggagggcagcccagctgcttgacgtgagtctgtttgagctgtctgagctgagagagggcctggccagacttgctgaagcagctccttag

SEQ ID NO: 58933 - DNA, 438 bp, Artificial Sequence
  derived and/or modified sequence
atgtccaccgcaagagaacagccaatcttctctaccagggcgcatgtttttcagattgacccggcaaccaaaagaaactggattcctgctggtaagcacgcattgacggtttcctatttttacgatgctactcgaaacgtgtaccggatcatatccattgggggagcaaaagccattattaattccactgtcacccccaacatgacatttacaaaaacttcccagaagttcggacagtgggctgacagccgcgctaataccgtatacgggctgggattcgcttcggagcagcatcttacccagttcgctgagaaatttcaggaggttaaagaagccgcacggctggcaagagagaagtctcaggatggttggggcggaccccaatctgctttggttgtcgggtctttcggtgctgtattcgagcttctgatcgtctag

SEQ ID NO: 58934 - DNA, 1077 bp, Artificial Sequence
  derived and/or modified sequence
atgtctaccgcacgggaacaaccaatcttctctacacgtgcccatgtgttccaaatcgatcctgctacaaaaaggaactggattcctgccggtaagcacgcccttacggtgagttacttctacgatgctaccaggaatgtctataggattatctctattggtggagcaaaagccattatcaacagtactgtcaccccgaacatgaccttcacaaagacatcgcagaagtttggtcagtgggccgattcccgggcaaacaccgtctacgggctggggttcgcaagtgagcagcatctgacccagtttgctgagaaatttcaggaggtcaaggaggccgctagactggcacgcgagaagtcccaggatggcggagagctgacttcccccgcacttggtcttgccagccatcaggtgccgcctagtcctttagtttctgcaaacggacccggagaagagaagctgttccggagccagtctgccgatgccccaggaccaaccgaacgcgagcggctgaagaagatgctctcagaagggtccgtgggggaggttcaatgggaggctgaattcttcgccctgcaggatagcaacaacaagctggcaggcgcactcagggaagctaatgccgcagcagcccaatggcgacagcagctggaagcacagagggctgaagctgagcggttacggcaacgcgttgctgaactcgaagcacaggctgcctccgaggtgacccccaccggcgagaaggaaggcctgggacaaggtcaatccctggaacaactcgaagcactagtgcaaactaaggatcaagaaattcaaaccctgaagtcccagaccgggggaccccgtgaggccctggaggctgcagaacgcgaagagacgcagcagaaggtccagactagaaatgcggagctcgagcaccagttacgagccatggaacgttctcttgaggaggccagagccgaacgggaaagagcaagagcagaagtgggacgagccgctcagttacttgatgtatcactttttgagctctctgagctcagggaaggtcttgcacgactcgccgaagcagccccttag

SEQ ID NO: 58935 - DNA, 1077 bp, Artificial Sequence
  derived and/or modified sequence
atgagcaccgccagagagcagcccatcttcagcaccagagcccacgtgttccagatcgaccccgccaccaagagaaactggatccccgccggcaagcacgccctgaccgtgagctacttctacgacgccaccagaaacgtgtacagaatcatcagcatcggcggcgccaaggccatcatcaacagcaccgtgacccccaacatgaccttcaccaagaccagccagaagttcggccagtgggccgacagcagagccaacaccgtgtacggcctgggcttcgccagcgagcagcacctgacccagttcgccgagaagttccaggaggtgaaggaggccgccagactggccagagagaagagccaggacggcggcgagctgaccagccccgccctgggcctggccagccaccaggtgccccccagccccctggtgagcgccaacggccccggcgaggagaagctgttcagaagccagagcgccgacgcccccggccccaccgagagagagagactgaagaagatgctgagcgagggcagcgtgggcgaggtgcagtgggaggccgagttcttcgccctgcaggacagcaacaacaagctggccggcgccctgagagaggccaacgccgccgccgcccagtggagacagcagctggaggcccagagagccgaggccgagagactgagacagagagtggccgagctggaggcccaggccgccagcgaggtgacccccaccggcgagaaggagggcctgggccagggccagagcctggagcagctggaggccctggtgcagaccaaggaccaggagatccagaccctgaagagccagaccggcggccccagagaggccctggaggccgccgagagagaggagacccagcagaaggtgcagaccagaaacgccgagctggagcaccagctgagagccatggagagaagcctggaggaggccagagccgagagagagagagccagagccgaggtgggcagagccgcccagctgctggacgtgagcctgttcgagctgagcgagctgagagagggcctggccagactggccgaggccgccccctag

SEQ ID NO: 58936 - DNA, 438 bp, Artificial Sequence
  derived and/or modified sequence
atgagcaccgccagagagcagcccatcttcagcaccagagcccacgtgttccagatcgaccccgccaccaagagaaactggatccccgccggcaagcacgccctgaccgtgagctacttctacgacgccaccagaaacgtgtacagaatcatcagcatcggcggcgccaaggccatcatcaacagcaccgtgacccccaacatgaccttcaccaagaccagccagaagttcggccagtgggccgacagcagagccaacaccgtgtacggcctgggcttcgccagcgagcagcacctgacccagttcgccgagaagttccaggaggtgaaggaggccgccagactggccagagagaagagccaggacggctggggcggcccccagagcgccctggtggtgggcagcttcggcgccgtgttcgagctgctgatcgtgtag

SEQ ID NO: 58937 - protein, 325 aa, Artificial Sequence
  derived and/or modified sequence
MSTAREQPIFSTRAHVFQIDPATKRNWIPAGKHALTVSYFYDATRNVYRIISIGGAKAIINSTVTPNMTFTKTSQKFGQWADSRANTVYGLGFASEQHLTQVPPSPLVSANGPGEEKLFRSQSADAPGPTERERLKKMLSEGSVGEVQWEAEFFALQDSNNKLAGALREANAAAAQWRQQLEAQRAEAERLRQRVAELEAQAASEVTPTGEKEGLGQGQSLEQLEALVQTKDQEIQTLKSQTGGPREALEAAEREETQQKVQDLETRNAELEHQLRAMERSLEEARAERERARAEVGRAAQLLDVSLFELSELREGLARLAEAAP

SEQ ID NO: 58938 - DNA, 978 bp, Artificial Sequence
  derived and/or modified sequence
atgtccaccgcccgagaacagcctattttctctacaagggcacatgtgtttcagattgaccccgcaactaaacgcaattggattccggccgggaaacatgccctcaccgtgagttacttctatgatgctaccaggaatgtctacagaatcatcagtatcggcggtgcaaaagctatcattaatagtactgtcacgcctaacatgaccttcactaagaccagtcagaagttcggccagtgggccgattcccgagcgaacacagtttatggattgggatttgcctctgaacagcatctgacacaggtccccccctcacctctggtgtcagcaaacggacccggggaggaaaaactgtttaggtcccagagcgctgatgctcccggacccacagaaagagagcggttaaaaaagatgctaagtgagggcagtgtcggcgaggtacagtgggaggccgaatttttcgctcttcaagactccaataacaaactggctggagctctacgtgaagcaaatgccgctgcggcgcagtggcgccagcagctggaagcccagagggcagaagccgagagactccgccagcgagtggcagagctggaagcacaggccgcatctgaagtgacccctactggcgagaaggaagggctgggtcaagggcagtcactggagcagctggaagctctggttcagacgaaggatcaggagattcaaactttgaaatcccagacaggcggcccccgggaggcccttgaagcagcggaacgagaggaaacgcagcagaaggttcaagatctggaaacaaggaatgctgagctggagcatcagctgcgggccatggagagaagcttggaggaagctcgggcagagagagagagggcacgggctgaggttggccgagcggcacaacttctggatgtatctctgttcgagctgtctgagctgcgagaaggactggctaggctcgccgaagccgccccttag

SEQ ID NO: 58939 - DNA, 978 bp, Artificial Sequence
  derived and/or modified sequence
atgtctactgcacgggagcagccgatctttagcacccgtgcacatgtgtttcaaattgaccccgctacaaaacgcaattggattcctgcaggaaaacacgcgctgaccgtgtcttacttttatgacgcaacccggaacgtatacagaatcatttcaatcggcggagctaaagccatcatcaacagcactgtgacgcccaacatgaccttcacaaagaccagccagaagtttgggcagtgggccgactccagagcgaacacagtttacgggcttggattcgcaagcgagcaacatctaactcaagttcccccaagtcctctggtgtcagctaacgggcccggtgaagaaaaattgtttagatcccagtctgctgatgccccgggacctacggagcgagaacgtcttaagaagatgcttagtgaggggagtgttggggaagttcaatgggaagctgaattctttgcactccaggattcaaacaataaactggccggggctctgcgagaagccaacgccgccgcggctcagtggcgccaacagctggaagctcagcgagccgaagcagaaaggctgaggcagcgcgtcgccgagctggaagcccaagccgctagcgaagtgacccccaccggtgagaaagagggattagggcaggggcagtcactcgagcagcttgaggctcttgttcagactaaagaccaggaaatccagaccctgaagtctcaaacgggcggaccgagggaggcactcgaggcggcagagcgtgaggaaacacagcaaaaggtccaggatctggagacaaggaatgccgagcttgagcatcaattgcgagcaatggagcgatcccttgaagaggctagggctgagcgggagagggctcgtgccgaggtgggacgcgcggcccagctgcttgatgttagcttgttcgaactatcagagctacgcgagggcttggctagacttgccgaagccgccccttag

SEQ ID NO: 58940 - DNA, 1287 bp, Artificial Sequence
  derived and/or modified sequence
gggccaaaccagtgctcctgccacctctctggctgccccctagagcctgcccatcccagcctgaccaatgtccacagccagggagcagccaatcttcagcacacgggcgcacgtgttccaaattgacccagccaccaagcgaaactggatcccagcgggcaagcacgcactcactgtctcctatttctacgatgccacccgcaatgtgtaccgcatcatcagcatcggaggcgccaaggccatcatcaacagcactgtcactcccaacatgaccttcaccaaaacttcccagaagttcgggcagtgggccgacagtcgcgccaacacagtctacggcctgggctttgcctctgaacagcatctgacacaggtgcccccgagccctctcgtcagtgccaacggccccggcgaggaaaaactgttccgcagccagagcgctgatgcccccggccccacagagcgcgagcggctaaagaagatgttgtctgagggctccgtgggcgaggtacagtgggaggccgagtttttcgcactgcaggacagcaacaacaagctggcaggcgccctgcgagaggccaacgccgccgcagcccagtggaggcagcagctggaggctcagcgtgcagaggccgagcggctgcggcagcgggtggctgagctggaggctcaggcagcttcagaggtgacccccaccggtgagaaggaggggctgggccagggccagtcgctggaacagctggaagctctggtgcaaaccaaggaccaggagattcagaccctgaagagtcagactggggggccccgcgaggccctggaggctgccgagcgtgaggagactcagcagaaggtgcaggacctggagacccgcaatgcggagttggagcaccagctgcgggcgatggagcgcagcctggaggaggcacgggcagagcgggagcgggcgcgggctgaggtgggccgggcagcgcagctgctggacgtcagcctgtttgagctgagtgagctgcgtgagggcctggcccgcctggctgaggctgcgccctgagccggggctggttttctatgaacgattccggcctgggatgcgggccaggctgcaggcggcatagttgggcccattcgtcctggaaagggactggggggtcccaacttagccctgggtgggccgggccgggctgggctggggtgggccccagtcggctctggttgttggcagctttggggctgtttttgagcttctcattgtgtagaatttctagatcccccgattacatttctaagcgtggc

SEQ ID NO: 58941 - DNA, 982 bp, Artificial Sequence
  derived and/or modified sequence
atgtccacagccagggagcagccaatcttcagcacacgggcgcacgtgttccaaattgacccagccaccaagcgaaactggatcccagcgggcaagcacgcactcactgtctcctatttctacgatgccacccgcaatgtgtaccgcatcatcagcatcggaggcgccaaggccatcatcaacagcactgtcactcccaacatgaccttcaccaaaacttcccagaagttcgggcagtgggccgacagtcgcgccaacacagtctacggcctgggctttgcctctgaacagcatctgacacaggtgcccccgagccctctcgtcagtgccaacggccccggcgaggaaaaactgttccgcagccagagcgctgatgcccccggccccacagagcgcgagcggctaaagaagatgttgtctgagggctccgtgggcgaggtacagtgggaggccgagtttttcgcactgcaggacagcaacaacaagctggcaggcgccctgcgagaggccaacgccgccgcagcccagtggaggcagcagctggaggctcagcgtgcagaggccgagcggctgcggcagcgggtggctgagctggaggctcaggcagcttcagaggtgacccccaccggtgagaaggaggggctgggccagggccagtcgctggaacagctggaagctctggtgcaaaccaaggaccaggagattcagaccctgaagagtcagactggggggccccgcgaggccctggaggctgccgagcgtgaggagactcagcagaaggtgcaggacctggagacccgcaatgcggagttggagcaccagctgcgggcgatggagcgcagcctggaggaggcacgggcagagcgggagcgggcgcgggctgaggtgggccgggcagcgcagctgctggacgtcagcctgtttgagctgagtgagctgcgtgagggcctggcccgcctggctgaggctgcgccctgagccg

SEQ ID NO: 58942 - DNA, 978 bp, Artificial Sequence
  derived and/or modified sequence
atgagcacagcccgggagcagcccatcttcagcacccgggcccacgtgttccagattgatcctgccaccaagaggaactggatcccagctgggaagcacgccctgactgtgtcctacttctatgatgccaccagaaatgtgtaccgcatcatcagcattggaggagccaaggccatcatcaacagcacagtgacccccaacatgaccttcaccaagaccagccagaagtttggccagtgggccgacagccgggccaacacagtgtatggcctgggctttgccagcgagcagcacctgacccaggtgccccccagccccctggtgtctgccaatggacctggagaggagaagctgttccgcagccagagcgcagatgcccctggccccacagagcgggagcggctgaagaagatgctgtctgagggctctgtgggggaggtgcagtgggaggccgagttctttgccctgcaggacagcaacaacaagctggccggggccctgcgggaggccaatgctgctgctgcccagtggaggcagcagctggaggcccagagagctgaggccgagcggctgcggcagagggtggccgagctggaggcccaggccgccagcgaggtgacccccactggagagaaggagggcctgggccagggccagagcctggagcagctggaggccctggtgcagaccaaggaccaggagatccagaccctgaagagccagacaggaggcccccgggaggccctggaggccgctgagcgggaggagacccagcagaaggtgcaggacctggagaccagaaatgctgagctggagcaccagctgcgggccatggagaggagcctggaggaggcccgggcagagcgggagcgggcccgggcagaggtgggccgggccgcccagctgctggatgtgtccctgtttgagctgtctgagctgcgggagggcctggcccggctggccgaggccgccccctag

SEQ ID NO: 58943 - DNA, 978 bp, Artificial Sequence
  derived and/or modified sequence
atgagcaccgcccgggagcagcccatcttcagcacccgggcccacgtattccaaatcgacccagctaccaagcgcaattggattccagccggcaaacatgccctgactgtgagctacttctatgacgctactaggaatgtctaccgtattatttcaatcggtggggctaaggccatcattaactccaccgtcacacccaacatgacctttacgaaaacttctcaaaagttcgggcaatgggccgatagccgtgcaaacaccgtgtatggattaggcttcgcctccgaacaacacttgacacaggttccacctagtcctctcgtgtcggccaatggtcctggtgaggaaaagctgttccgctcccagagcgcagatgctccagggcccaccgaaagagagcggttgaaaaagatgctgtccgaaggctcagttggtgaagtgcagtgggaagccgagttttttgctctgcaggactctaacaacaagctcgccggggccttaagggaagccaacgccgctgccgcccagtggaggcaacagcttgaagctcagcgcgcagaggccgagcggctgcgccagcgcgtagcagaactcgaggcgcaggccgctagcgaggtgacgcctaccggagaaaaagaaggccttggtcagggccagagcttggagcaactagaagctctggtgcagactaaggaccaggaaatccagacgttgaagagccaaaccggtggccctcgagaagcccttgaggccgccgagagagaggaaacccagcagaaagtgcaggatctggagacccgcaacgctgaactggagcaccagctaagagctatggagcggtcccttgaagaggccagggccgaacgcgaaagagcccgagcggaggtcggacgcgctgcccagctgctggacgtttctcttttcgaactgagcgagctcagggaagggctggcaaggctggccgaggcagcaccatag

SEQ ID NO: 58944 - DNA, 978 bp, Artificial Sequence
  derived and/or modified sequence
atgagcaccgcccgggagcagcccatcttcagcacccgggcccacgttttccaaatagatcctgctaccaaacgaaactggattcctgctggcaaacatgccctaacagtcagctatttttatgatgctacccgcaatgtatatcgcattatttcaatcggcggagccaaggcaattataaatagcacggttactccaaacatgacttttactaagacatctcagaagtttggtcagtgggccgactccagggcaaacacagtttacggcctgggcttcgcaagtgagcagcacttgacgcaggtgcccccatcacccctggtgagtgccaacgggcccggcgaagagaaactgttcaggagtcagtccgcagacgctcccggcccaacagagagggagaggttaaagaagatgctgtcagagggcagcgtaggagaggtgcaatgggaggcagagttctttgccctgcaggactccaataataagctggcaggcgccttaagagaggccaacgcggcggctgcacagtggcgacagcaactggaggcccagcgggcagaagccgagagattacgtcagagagttgccgagctggaggcacaggctgcctctgaagttactcctacgggggaaaaagagggtctcggccaggggcaaagcctggagcagctggaggctttggtgcaaactaaagaccaggagatacagaccctcaagtcccaaaccggcgggccacgtgaggctcttgaagccgccgagcgcgaagagacacagcagaaagtgcaggatcttgaaacacgcaacgccgaactggaacaccagttacgcgctatggagagatctctcgaagaagcccgggctgagcgtgagcgcgcccgcgcggaggttggacgcgcggctcagttgctcgatgtcagccttttcgaattgtccgaactaagagaaggcttggcacgtttggcagaggccgcaccatag

SEQ ID NO: 58945 - DNA, 978 bp, Artificial Sequence
  derived and/or modified sequence
atgagcacagctagggaacagccgatctttagcactagggcacatgtttttcaaatagaccctgcaacaaaaaggaactggattcccgcagggaagcacgctctaactgtctcttatttttacgatgccacaagaaatgtgtaccggattatatcaatcggaggtgccaaggccattattaacagcactgtcactcctaacatgacgttcaccaagacctcccaaaaatttggccaatgggccgatagtcgggcaaatacagtgtacggactcggatttgcctctgaacagcacctgacacaagtgccccctagccccctggttagtgctaacggccctggagaggagaagttgttcagatctcaatctgcagatgcccctggacccacggagagagaaagattgaaaaaaatgctctcagagggaagtgtcggtgaagtgcaatgggaggccgagtttttcgccttacaggattcgaataacaaactcgcaggcgctctccgggaggccaatgcggcagccgcacaatggcgccagcagctcgaagctcagagagctgaggctgaacggctgagacaacgggtggccgagctggaagcacaagcggcaagtgaagttacccccacaggggaaaaggaaggtttgggccaagggcaaagcctggagcaactggaggcactcgtgcagactaaggatcaggaaatccagacgctcaagagccagaccggcggacccagggaggctctggaagccgcagagagggaagaaactcagcaaaaggtccaggatctggagaccaggaatgccgaattggagcaccagctacgcgcaatggagcggagtctggaggaggccagagcggagcgtgaacgggcacgagctgaagtgggacgggcagcgcagctgttagacgtaagtctctttgaactctctgaactgcgagagggattagcgcgactggctgaagcagcgccatag

SEQ ID NO: 58946 - DNA, 978 bp, Artificial Sequence
  derived and/or modified sequence
atgtctacggcccgagagcaacccattttctctactcgggctcatgtgtttcagatcgaccccgcaaccaaacggaattggatacctgctggcaaacatgccctgaccgtaagctatttctatgatgctacacggaacgtgtacagaatcatttccatagggggtgcaaaagctatcattaactcaaccgtgactcctaacatgacattcaccaagaccagtcagaagtttgggcagtgggctgactcaagggctaacacagtctacggtctggggtttgcttctgaacagcatctgactcaggtcccgccatccccactggtctctgccaacgggccaggcgaggagaagcttttccggtcccaatcggccgacgctcccggaccgacagaaagagagagactgaagaagatgttgagcgagggctccgtcggcgaggtccagtgggaagccgagtttttcgctcttcaggattctaacaacaagttagcaggagcattacgcgaggctaatgccgcagctgctcagtggcggcagcagctcgaagctcagagggctgaggcggaaagactgaggcaacgcgtggccgaattggaggcgcaggccgcttccgaggtcactccaaccggagagaaggaggggttgggacaggggcagtccctcgagcaactcgaagctctcgtgcagaccaaggatcaggagatccagactctgaaaagtcagaccggaggtccaagggaagccctggaggcagctgaacgcgaggagacgcagcagaaggtccaggacctggaaaccaggaacgccgaactagagcatcagctgcgcgctatggaaaggtccttagaagaggccagagccgagagggaaagagccagagccgaggtggggagagctgcccaactacttgacgtgtcattgttcgagctgtccgagctgagggagggcctggcgaggctagcggaggcggcaccctag

SEQ ID NO: 58947 - DNA, 978 bp, Artificial Sequence
  derived and/or modified sequence
atgagcaccgccagagagcagcccatcttcagcaccagagcccacgtgttccagatcgaccccgccaccaagagaaactggatccccgccggcaagcacgccctgaccgtgagctacttctacgacgccaccagaaacgtgtacagaatcatcagcatcggcggcgccaaggccatcatcaacagcaccgtgacccccaacatgaccttcaccaagaccagccagaagttcggccagtgggccgacagcagagccaacaccgtgtacggcctgggcttcgccagcgagcagcacctgacccaggtgccccccagccccctggtgagcgccaacggccccggcgaggagaagctgttcagaagccagagcgccgacgcccccggccccaccgagagagagagactgaagaagatgctgagcgagggcagcgtgggcgaggtgcagtgggaggccgagttcttcgccctgcaggacagcaacaacaagctggccggcgccctgagagaggccaacgccgccgccgcccagtggagacagcagctggaggcccagagagccgaggccgagagactgagacagagagtggccgagctggaggcccaggccgccagcgaggtgacccccaccggcgagaaggagggcctgggccagggccagagcctggagcagctggaggccctggtgcagaccaaggaccaggagatccagaccctgaagagccagaccggcggccccagagaggccctggaggccgccgagagagaggagacccagcagaaggtgcaggacctggagaccagaaacgccgagctggagcaccagctgagagccatggagagaagcctggaggaggccagagccgagagagagagagccagagccgaggtgggcagagccgcccagctgctggacgtgagcctgttcgagctgagcgagctgagagagggcctggccagactggccgaggccgccccctag

SEQ ID NO: 58948 - protein, 325 aa, Artificial Sequence
  derived and/or modified sequence
MQQPVRAGDIGVSRVQTHHNASPFSVPKKQDESPMIGDGEDYFLSLFGDSKKLTAHSNYTQKTLKYFSMILEEVGQFTSSSLGDVEIAEVNVKGLFVKLINSSLDKEMAIGDHILQQNVNGQTISLYRFLPNIVMQANSTVTVWAAASEAKHQPPSDFLWKEQDKFRASPDCITILCKPNGQAIAWYTPIHWKQAWEKLDADVEFNRCSVVSPTFRKRVFQWTASTATITKEKQDQPKKDISNYQVEQAQVLLKREKEIPPTVFPNRSPWCQNPYVSAHPYCPLIEPHNTSTAGGRLDRQPRTRSTRPNRASGSKKKKTSESQKQ

SEQ ID NO: 58949 - DNA, 978 bp, Artificial Sequence
  derived and/or modified sequence
atgcagcagcccgtgagagccggcgacatcggcgtgagcagagtgcagacccaccacaacgccagccccttcagcgtgcccaagaagcaggacgagagccccatgatcggcgacggcgaggactacttcctgagcctgttcggcgacagcaagaagctgaccgcccacagcaactacacccagaagaccctgaagtacttcagcatgatcctggaggaggtgggccagttcaccagcagcagcctgggcgacgtggagatcgccgaggtgaacgtgaagggcctgttcgtgaagctgatcaacagcagcctggacaaggagatggccatcggcgaccacatcctgcagcagaacgtgaacggccagaccatcagcctgtacagattcctgcccaacatcgtgatgcaggccaacagcaccgtgaccgtgtgggccgccgccagcgaggccaagcaccagccccccagcgacttcctgtggaaggagcaggacaagttcagagccagccccgactgcatcaccatcctgtgcaagcccaacggccaggccatcgcctggtacacccccatccactggaagcaggcctgggagaagctggacgccgacgtggagttcaacagatgcagcgtggtgagccccaccttcagaaagagagtgttccagtggaccgccagcaccgccaccatcaccaaggagaagcaggaccagcccaagaaggacatcagcaactaccaggtggagcaggcccaggtgctgctgaagagagagaaggagatcccccccaccgtgttccccaacagaagcccctggtgccagaacccctacgtgagcgcccacccctactgccccctgatcgagccccacaacaccagcaccgccggcggcagactggacagacagcccagaaccagaagcaccagacccaacagagccagcggcagcaagaagaagaagaccagcgagagccagaagcagtag

SEQ ID NO: 58950 - DNA, 978 bp, Artificial Sequence
  derived and/or modified sequence
atgcagcagcccgtacgcgccggcgacattggagtgtccagagtacagacgcaccacaatgcttctccttttagtgtgcccaaaaaacaggacgaatctccaatgatcggagacggtgaagactactttctgtctctatttggcgatagtaagaagctcaccgcccactctaactacacgcagaaaaccctgaagtatttctccatgatactggaggaggtgggacagtttacatcatctagcctgggcgatgtggagattgcagaggtcaatgttaaagggctattcgtgaagctgattaattcatccctggataaggaaatggccattggagaccacatcttgcagcaaaatgtgaacggacaaaccatatctctttaccgctttcttcctaatattgtaatgcaggctaatagcaccgtgactgtctgggcggctgcaagcgaggctaagcaccaacccccctccgatttcttgtggaaggagcaagataagttcagggccagtcccgactgtattactatcctctgtaagcccaacgggcaggccatcgcctggtatactcccatccattggaagcaagcgtgggaaaagctggatgccgatgtggagtttaaccgatgttctgtggtatcgcctaccttccgaaaacgcgtatttcagtggacagcctctaccgctacaattaccaaggaaaaacaggaccagcccaaaaaagatatctcaaactaccaggtggagcaggcccaggtcctactgaaaagggaaaaagagattccacctacagtcttccccaatcgatctccatggtgccagaacccatacgtgtcagcccatccatactgtcccctcatcgaaccacataataccagtaccgcaggcggacggctggatcgtcagcccaggacccgcagcactcggccgaacagagcgtccggcagcaagaagaagaagaccagcgagagtcagaaacagtag

SEQ ID NO: 58951 - DNA, 978 bp, Artificial Sequence
  derived and/or modified sequence
atgcagcagcctgtgcgggccggggacatcggcgtgtcccgggtgcagacccaccacaatgccagccccttctctgtgcccaagaagcaggatgagagccccatgattggagatggagaggactacttcctgagcctgtttggagacagcaagaagctgacagcccacagcaactacacccagaagaccctgaagtacttctccatgatcctggaggaggtgggccagttcaccagcagcagcctgggagatgtggagattgctgaggtgaatgtgaagggcctgtttgtgaagctgatcaacagcagcctggacaaggagatggccatcggggaccacatcctgcagcagaatgtgaatggccagaccatcagcctgtaccgcttcctgcccaacatcgtgatgcaggccaacagcacagtgacagtgtgggccgccgccagcgaggccaagcaccagccccccagcgacttcctgtggaaggagcaggacaagttccgggccagcccagactgcatcaccatcctgtgcaagcccaacggccaggccatcgcctggtacacccccatccactggaagcaggcctgggagaagctggatgctgatgtggagttcaaccgctgcagcgtggtgagccccaccttcaggaagagggtcttccagtggacagccagcacagccaccatcaccaaggagaagcaggaccagcccaagaaggacatcagcaactaccaggtggagcaggcccaggtgctgctgaagcgggagaaggagatcccccccaccgtcttccccaacagaagcccctggtgccagaacccctacgtgtctgcccacccctactgccccctgattgagccccacaacaccagcacagctgggggccgcctggaccggcagcccaggaccaggagcacccggcccaacagagccagcggcagcaagaagaagaagaccagcgagagccagaagcagtag

SEQ ID NO: 58952 - DNA, 978 bp, Artificial Sequence
  derived and/or modified sequence
atgcagcagcccgtgcgggccggcgacatcggcgtgagccgggtgcaaactcatcacaacgccagcccattcagtgtacctaagaaacaggacgagtcgcctatgatcggcgacggcgaggactactttctgtcactgtttggggactccaagaagttgacggcccattcgaactatacacagaaaacgctgaagtacttttcaatgatactagaagaggtgggacaatttacttccagctcattgggggatgtggagattgccgaggtgaacgtgaaggggttgttcgtgaagttgattaactcctccctggacaaagaaatggccatcggagaccacatactacagcaaaatgtcaacggtcagacaatttctctgtatcgatttcttcctaacatcgttatgcaggccaactccaccgttaccgtgtgggcagccgccagtgaagccaagcatcaaccgccctctgactttctctggaaggaacaagataagtttagagccagtcccgattgcatcacaatcctctgcaagccaaacggccaagctatagcctggtacacccctattcactggaaacaagcctgggaaaagttggacgcggatgttgaattcaacaggtgttcagtagtgagccccaccttcaggaagagggtgttccagtggacggcctctaccgccacgattactaaggagaaacaggatcagcccaagaaagatattagtaactaccaagtagagcaagctcaggtcttgttgaaacgagaaaaggagatcccaccaactgtgtttccaaatagatccccatggtgccagaacccctatgtttcggctcatccatactgcccactcatcgagccccataatacaagtaccgccggcggacggttggatcgccagcctaggacaaggagcacacggcccaatagggcatccgggagtaaaaagaagaagacctctgaatcacaaaaacagtag

SEQ ID NO: 58953 - DNA, 978 bp, Artificial Sequence
  derived and/or modified sequence
atgcagcaacctgtcagagctggggatatcggcgtgtcacgcgtgcaaacccaccataatgcttctccattttccgtgcctaagaaacaagacgaaagtcccatgataggagacggggaggattattttctgtccctgtttggagatagcaagaaactaacggctcatagcaactacacccagaaaacgttgaaatacttttccatgatactggaggaggttggccagtttacctctagctccctcggggatgtggaaatagcagaagttaatgtgaagggccttttcgtgaagctcatcaatagcagcctggacaaagagatggccattggtgaccacattctgcagcaaaatgtgaacggccaaacgatatctttataccggttcctccctaatatcgtgatgcaggccaatagcaccgtgactgtctgggccgctgccagtgaggctaagcaccagcctccctcagacttcctttggaaggagcaagataagtttcgcgcttcccccgactgtatcacgatattatgtaagcctaacggccaggctatcgcatggtacacaccaatccactggaaacaggcgtgggaaaaacttgacgccgacgtcgagttcaatcggtgttccgttgtgagcccaacctttcgcaagagagtgttccagtggaccgctagcacagctaccattacgaaggaaaaacaagatcaacccaagaaggacatctccaactatcaggttgagcaggctcaagtgctcttaaaacgcgagaaggagatcccacctactgttttccctaatcggtcaccctggtgccagaacccttacgtttccgcacacccgtattgccctctgatcgaaccccataatacatctactgctggcggtagactggatagacagcccaggacccgctctacacgccctaaccgtgcaagcggttccaagaaaaagaaaacgtctgagagtcagaaacaatag

SEQ ID NO: 58954 - DNA, 1285 bp, Artificial Sequence
  derived and/or modified sequence
tacatgcaacagccagtgagagcaggagacatcggtgtttccagagtccagacccaccacaatgccagccccttctcagttccgaagaaacaggatgaatcacccatgattggggatggagaagattatttcctttctttgtttggtgattcaaagaaacttacagcacactcaaactacactcagaaaactttaaaatacttttctatgattcttgaagaagttggccaatttacctccagttctcttggagatgttgaaatagctgaagtgaatgtcaagggtttgttcgtgaagctcattaactcttcccttgacaaagaaatggcaattggagatcatattctccagcaaaatgtgaatggacaaaccatttctttgtaccgattccttccaaacatcgtaatgcaggcaaattccacagtaacagtgtgggcagcagcatctgaagcaaagcatcaacctccatcagattttctttggaaggaacaagacaagtttagagcaagtcctgattgtataacaatcctgtgcaaaccgaacggtcaagccattgcgtggtacacccctatccactggaagcaagcgtgggaaaaattagatgctgacgttgaatttaacagatgttcagtagtatctccaacattccgaaagcgtgtgtttcagtggacagcatctacagctacaataactaaagaaaaacaagatcaacctaagaaagatatctcaaattatcaggtggaacaagctcaagttcttcttaagagagagaaggaaatcccaccaaccgttttccctaatcgcagcccttggtgccagaatccctatgtctctgcacatccttactgtcctctgattgaaccacacaatacatccaccgctggaggcagattggatagacagcccaggactcggtcaaccagacctaatcgagcctcagggtctaagaaaaagaagacatctgagtcacaaaagcaataagcagtcaactcaacctttaaagatggagtctcactctgttgcccaggctggagtgcagtggtgtgatctccactaactgcagcctccgcctcccaggttcaagtgagtctcctgcgtcagcctcccgagtagctgggattacaggcatccgccaccctgcatggctaatttttgtatttttagtagcaacgaggtttcaccatgttggccaggctggtctcgaattcctgacctcaggtgatctgcctgccttggcctcccaaagtgctgggattacacgcatgagccaccatgcccggcgcaa

SEQ ID NO: 58955 - DNA, 1729 bp, Artificial Sequence
  derived and/or modified sequence
gccctctcaagctgcttccagtgaatgctacacacctgcaccatggtttgtccgacatccttagccaagatcaggattggctatgttgaagagaagacaaacttggagtatattctttagtacatttttccccaaagatgttgggttcagttgccacaacactgccattgtcatcttcaaattccagtggaatgcctcttggttactatctgtctagtcctcagattagtagagtaactatatcaacaactggacaattgacttctaaagctactgtaggtagctgttccagagtggaaaacagcttgggaaaacggaaacttggaaaacttacatcacgtggcttagtaaatggcagaactgaaatataattacaagtctgtctaaatgcaagacacgttgttctttccacttcatcacgacgcgtctttgtaatatgccagccccttctcagttccgaagaaacaggatgaatcacccatgattggggatggagaagattatttcctttctttgtttggtgattcaaagaaacttacagcacactcaaactacactcagaaaactttaaaatacttttctatgattcttgaagaagttggccaatttacctccagttctcttggagatgttgaaatagctgaagtgaatgtcaagggtttgttcgtgaagctcattaactcttcccttgacaaagaaatggcaattggagatcatattctccagcaaaatgtgaatggacaaaccatttctttgtaccgattccttccaaacatcgtaatgcaggcaaattccacagtaacagtgtgggcagcagcatctgaagcaaagcatcaacctccatcagattttctttggaaggaacaagacaagtttagagcaagtcctgattgtataacaatcctgtgcaaaccgaacggtcaagccattgcgtggtacacccctatccactggaagcaagcgtgggaaaaattagatgctgacgttgaatttaacagatgttcagtagtatctccaacattccgaaagcgtgtgtttcagtggacagcatctacagctacaataactaaagaaaaacaagatcaacctaagaaagatatctcaaattatcaggtggaacaagctcaagttcttcttaagagagagaaggaaatcccaccaaccgttttccctaatcgcagcccttggtgccagaatccctatgtctctgcacatccttactgtcctctgattgaaccacacaatacatccaccgctggaggcagattggatagacagcccaggactcggtcaaccagacctaatcgagcctcagggtctaagaaaaagaagacatctgagtcacaaaagcaataagcagtcaactcaacctttaaagtaatctagtccaccctcaaccagctactagaaaagcaaaagagaactcaaatccctgaggcctgctctgcaacctccctgctattccatgagagggtgaagacatcacatttctatatggaaaaaggatccaaaatttgtattgctgtagaattggtgaattatagatgcttgatgaaatcacaagtcctaccactcctgccttccaaatccctgcagaaaacaagcagatggttagtattattcaatggataaaattgctatttgccttagatttctctttttgtaaacaaagttattttgggtacagaactcacaaaagaagagcacgtgcaattgtttaaccatttta

SEQ ID NO: 58956 - protein, 477 aa, Artificial Sequence
  derived and/or modified sequence
MEWKLERTAPRRVRTEEEMLWESIMRVLSKDLKQKRSQDSANVLDSVNATYSDFKSNFAKRLSAEVPVASSPITTRWQQSQTRALSSDSFGEEQSTTYLPEASGSVLKTPPEKETLTLGSRKEQLKTPSKGISETSNSALHFCKAPHAMDRDWKESVASKGQKCLKQLFVTQNVVQQANGKMQLCEQSECVWKGCKDGVRDESFHLKSSGDINDSILQPEVKIHITGLRNDYYLNILDWSFQNLVAIALGSAVYIWNGENHNGIENIDLSLTCNYISSVSWIKEGTCLAVGTSEGEVQLWDVVTKKRLRNMLGHLSVVGALSWNHFILSSGSRLGRVYHHDVRVAQHHVGTLRHKQAVCALKWSPDGRLLSSGCSDGLLTIWPHDPGASAQGQPLKVITQSTAVKICSLIWLPKTKEIATGQGTPKNDVTVWTCPTVSRSGGFFGHRGRVLHLSLSPDQTRVFSAAADGTASVWNCY

SEQ ID NO: 58957 - protein, 372 aa, Artificial Sequence
  derived and/or modified sequence
MEWKLERTAPRRVRTEEEMLWESIMRVLSKDLKQKRSQDSANVLDSVNATYSDFKSNFAKRLSAEVPVASSPITTRWQQSQTRALSSDSFGEEQSTTYLPEASGSVLKTPPEKETLTLGSRKEQLKTPSKGISETSNSALHFCKAPHAMDRDWKESVASKGQKCLKQLFVTQNVVQQANGKMQLCEQSECVWKGCKDGVRDESFHLKSSGDINDSILQPEVKIHITGLRNDYYLNILDWSFQNLVAIALGSAVYIWNGENHNGIENIDLSLTCNYISSVSWIKEGTCLAVGTSEGEVQLWDVVTKKRLRNMLGHLSVVGALSWNHFILSRLEFSGVISAHCNLHLPSSWDYRRPPPCLVGQDWGVFIITMFG

SEQ ID NO: 58958 - DNA, 1434 bp, Artificial Sequence
  derived and/or modified sequence
atggagtggaagctggagagaaccgcccccagaagagtgagaaccgaggaggagatgctgtgggagagcatcatgagagtgctgagcaaggacctgaagcagaagagaagccaggacagcgccaacgtgctggacagcgtgaacgccacctacagcgacttcaagagcaacttcgccaagagactgagcgccgaggtgcccgtggccagcagccccatcaccaccagatggcagcagagccagaccagagccctgagcagcgacagcttcggcgaggagcagagcaccacctacctgcccgaggccagcggcagcgtgctgaagaccccccccgagaaggagaccctgaccctgggcagcagaaaggagcagctgaagacccccagcaagggcatcagcgagaccagcaacagcgccctgcacttctgcaaggccccccacgccatggacagagactggaaggagagcgtggccagcaagggccagaagtgcctgaagcagctgttcgtgacccagaacgtggtgcagcaggccaacggcaagatgcagctgtgcgagcagagcgagtgcgtgtggaagggctgcaaggacggcgtgagagacgagagcttccacctgaagagcagcggcgacatcaacgacagcatcctgcagcccgaggtgaagatccacatcaccggcctgagaaacgactactacctgaacatcctggactggagcttccagaacctggtggccatcgccctgggcagcgccgtgtacatctggaacggcgagaaccacaacggcatcgagaacatcgacctgagcctgacctgcaactacatcagcagcgtgagctggatcaaggagggcacctgcctggccgtgggcaccagcgagggcgaggtgcagctgtgggacgtggtgaccaagaagagactgagaaacatgctgggccacctgagcgtggtgggcgccctgagctggaaccacttcatcctgagcagcggcagcagactgggcagagtgtaccaccacgacgtgagagtggcccagcaccacgtgggcaccctgagacacaagcaggccgtgtgcgccctgaagtggagccccgacggcagactgctgagcagcggctgcagcgacggcctgctgaccatctggccccacgaccccggcgccagcgcccagggccagcccctgaaggtgatcacccagagcaccgccgtgaagatctgcagcctgatctggctgcccaagaccaaggagatcgccaccggccagggcacccccaagaacgacgtgaccgtgtggacctgccccaccgtgagcagaagcggcggcttcttcggccacagaggcagagtgctgcacctgagcctgagccccgaccagaccagagtgttcagcgccgccgccgacggcaccgccagcgtgtggaactgctactag

SEQ ID NO: 58959 - DNA, 1119 bp, Artificial Sequence
  derived and/or modified sequence
atggagtggaagctggagagaaccgcccccagaagagtgagaaccgaggaggagatgctgtgggagagcatcatgagagtgctgagcaaggacctgaagcagaagagaagccaggacagcgccaacgtgctggacagcgtgaacgccacctacagcgacttcaagagcaacttcgccaagagactgagcgccgaggtgcccgtggccagcagccccatcaccaccagatggcagcagagccagaccagagccctgagcagcgacagcttcggcgaggagcagagcaccacctacctgcccgaggccagcggcagcgtgctgaagaccccccccgagaaggagaccctgaccctgggcagcagaaaggagcagctgaagacccccagcaagggcatcagcgagaccagcaacagcgccctgcacttctgcaaggccccccacgccatggacagagactggaaggagagcgtggccagcaagggccagaagtgcctgaagcagctgttcgtgacccagaacgtggtgcagcaggccaacggcaagatgcagctgtgcgagcagagcgagtgcgtgtggaagggctgcaaggacggcgtgagagacgagagcttccacctgaagagcagcggcgacatcaacgacagcatcctgcagcccgaggtgaagatccacatcaccggcctgagaaacgactactacctgaacatcctggactggagcttccagaacctggtggccatcgccctgggcagcgccgtgtacatctggaacggcgagaaccacaacggcatcgagaacatcgacctgagcctgacctgcaactacatcagcagcgtgagctggatcaaggagggcacctgcctggccgtgggcaccagcgagggcgaggtgcagctgtgggacgtggtgaccaagaagagactgagaaacatgctgggccacctgagcgtggtgggcgccctgagctggaaccacttcatcctgagcagactggagttcagcggcgtgatcagcgcccactgcaacctgcacctgcccagcagctgggactacagaagaccccccccctgcctggtgggccaggactggggcgtgttcatcatcaccatgttcggctag

SEQ ID NO: 58960 - DNA, 1434 bp, Artificial Sequence
  derived and/or modified sequence
atggaatggaaactggagcgtacagcccctcggagagtcaggacagaagaggaaatgctttgggagtccattatgagggtcctttctaaggacttgaagcagaagcgctcccaagacagcgctaacgttttggattccgtgaacgcaacctacagtgactttaagtctaacttcgctaaacgcttatcagcggaggttccagtggcttcctcccccatcactactcgctggcagcagtctcagacaagggctctcagtagtgatagcttcggcgaagaacagagcacaacttacctgcctgaagctagcgggtctgtactaaaaaccccgcctgaaaaggaaacactgactctcggaagcagaaaggagcagttgaaaacgccttccaagggcatcagcgaaacctccaacagtgctctgcatttctgtaaagccccccacgctatggaccgcgattggaaggaatcagtggcatcaaaagggcagaaatgccttaagcagctgttcgtcacccagaatgtcgtccagcaggccaacggaaaaatgcagctgtgtgagcaatcagaatgtgtctggaaggggtgtaaagatggcgtgcgtgacgagagcttccatctgaaatccagcggtgatattaatgactccatccttcagcccgaagtcaagattcatattaccggtctgcgtaatgattattacctcaacatccttgactggtcctttcaaaacctggtggccatagccctcggctccgcggtctatatctggaacggagaaaatcataatggcattgagaacattgacttgagcctgacctgcaattatatatcttcagtatcatggatcaaagaagggacttgcttggcggtaggcacgtccgaaggcgaagtccagctctgggatgtagtgaccaaaaaacgactgcggaacatgctgggccacctgtcagtcgtgggggcactgagttggaaccactttatcctctcgtccggttcaagattggggcgggtctaccatcatgacgtgcgagtggctcagcaccatgtgggaactctccgccataagcaagccgtgtgcgctctgaaatggagcccggatggccgacttctgagttctggatgcagcgacgggctgcttactatttggccgcacgatccaggggcgtccgctcagggacagcctctcaaggtgattacacagagtaccgccgttaagatctgtagtttgatctggttgcccaagactaaggagatagcaacaggacagggtacacccaaaaatgatgtgacagtctggacctgccctacggtgagccggagcggtggtttcttcgggcatcggggtagagtccttcacttgagtctctctccagaccagaccagagtattttccgccgcggctgatggtactgcctctgtgtggaactgctactag

SEQ ID NO: 58961 - DNA, 1119 bp, Artificial Sequence
  derived and/or modified sequence
atggagtggaaactggagagaacagctcccaggcgggtgagaacggaagaggagatgctatgggaatctatcatgagggtcctttctaaggatcttaagcagaaacggtcacaagattcagcaaatgtcctggattccgtcaacgcgacctacagcgatttcaaaagcaacttcgcaaaaaggctgagcgcagaggtgccggtcgcttctagtcccattaccacaagatggcagcagagccagactagagccctgagttccgatagcttcggcgaggagcagagcactacttacttgccggaagcatccggcagcgttctgaaaaccccgcccgaaaaggaaactctaaccctgggcagccgaaaggaacaactcaaaactccttcaaagggtatcagcgaaacttccaacagtgcactgcacttctgtaaagcccctcacgcgatggatcgagattggaaagagtcggtggcatctaaaggtcagaaatgtttgaagcaactctttgttacccaaaacgttgtccagcaagcaaacggaaagatgcagctttgtgagcagtccgagtgtgtatggaagggctgcaaagacggagtccgtgatgagtcgtttcacctcaaatctagtggagatattaatgattcgatcctgcagcccgaagtgaagatccacattacaggacttaggaatgattactatctaaacatcttggattggtcattccagaacctggtggctattgcgctgggcagcgctgtttacatctggaacggcgagaaccacaacggtatcgaaaatatcgatctgtccctgacctgcaactacatttcatcagtgtcctggataaaggagggtacgtgtctagcagtgggtacatccgaaggagaagtgcagttgtgggacgtagtgacgaagaagcggctcaggaatatgcttgggcatctgagcgtggtcggcgcccttagctggaatcacttcattcttagtcgactggagttctcgggagtcatatccgcccactgcaacctgcatctcccttcttcatgggattataggcgtccccccccgtgcctggttgggcaggactggggagtttttatcataacaatgtttgggtag

SEQ ID NO: 58962 - DNA, 1434 bp, Artificial Sequence
  derived and/or modified sequence
atggagtggaagctggagaggacagcccccaggagagtgaggacagaggaggagatgctgtgggagagcatcatgagggtgctgagcaaggacctgaagcagaagaggagccaggacagcgccaacgtgctggacagcgtgaatgccacctacagcgacttcaagagcaactttgccaagaggctgtctgctgaggtgcctgtggccagcagccccatcaccacccgctggcagcagagccagacccgggccctgagcagtgacagctttggagaggagcagagcaccacctacctgcctgaggccagcggctctgtgctgaagaccccacctgagaaggagaccctgaccctgggcagcaggaaggagcagctgaagacccccagcaagggcatcagcgagaccagcaacagcgccctgcacttctgcaaggcccctcatgccatggaccgggactggaaggagagcgtggccagcaagggccagaagtgcctgaagcagctgtttgtgacccagaatgtggtgcagcaggccaacgggaagatgcagctgtgtgagcagagtgaatgtgtgtggaagggctgcaaggatggagtgagagatgagagcttccacctgaagagcagcggggacatcaatgacagcatcctgcagcctgaggtgaagatccacatcaccggcctgagaaatgactactacctgaacatcctggactggagcttccagaacctggtggccatcgccctgggcagcgctgtgtacatctggaatggagagaaccacaacggcattgaaaatattgacctgagcctgacctgcaactacatcagctctgtgtcctggatcaaggagggcacctgcctggccgtgggcaccagcgagggggaggtgcagctgtgggatgtggtgaccaagaagaggctgaggaacatgctgggccacctgtctgtggtgggcgccctgtcctggaaccacttcatcctgagcagcggcagccggctgggccgggtgtaccaccatgatgtgcgggtggcccagcaccacgtgggcaccctgcggcacaagcaggccgtgtgtgccctgaagtggagcccagatggccgcctgctgagcagcggctgcagtgatggcctgctgaccatctggccccatgaccccggggccagcgcccagggccagcccctgaaggtgatcacccagagcacagctgtgaagatctgcagcctcatctggctgcccaagaccaaggagatcgccaccggccagggcacccccaagaatgatgtgacagtgtggacctgccccaccgtgagccgcagcggcggcttcttcggccaccggggccgggtgctgcacctgagcctgagcccagaccagaccagggtcttctctgctgctgctgatggaacagcctctgtgtggaactgctactag

SEQ ID NO: 58963 - DNA, 1119 bp, Artificial Sequence
  derived and/or modified sequence
atggagtggaagctggagaggacagcccccaggagagtgaggacagaggaggagatgctgtgggagagcatcatgagggtgctgagcaaggacctgaagcagaagaggagccaggacagcgccaacgtgctggacagcgtgaatgccacctacagcgacttcaagagcaactttgccaagaggctgtctgctgaggtgcctgtggccagcagccccatcaccacccgctggcagcagagccagacccgggccctgagcagtgacagctttggagaggagcagagcaccacctacctgcctgaggccagcggctctgtgctgaagaccccacctgagaaggagaccctgaccctgggcagcaggaaggagcagctgaagacccccagcaagggcatcagcgagaccagcaacagcgccctgcacttctgcaaggcccctcatgccatggaccgggactggaaggagagcgtggccagcaagggccagaagtgcctgaagcagctgtttgtgacccagaatgtggtgcagcaggccaacgggaagatgcagctgtgtgagcagagtgaatgtgtgtggaagggctgcaaggatggagtgagagatgagagcttccacctgaagagcagcggggacatcaatgacagcatcctgcagcctgaggtgaagatccacatcaccggcctgagaaatgactactacctgaacatcctggactggagcttccagaacctggtggccatcgccctgggcagcgctgtgtacatctggaatggagagaaccacaacggcattgaaaatattgacctgagcctgacctgcaactacatcagctctgtgtcctggatcaaggagggcacctgcctggccgtgggcaccagcgagggggaggtgcagctgtgggatgtggtgaccaagaagaggctgaggaacatgctgggccacctgtctgtggtgggcgccctgtcctggaaccacttcatcctgagccggctggagttcagcggggtcatcagcgcccactgcaacctgcacctgcccagctcctgggactaccgccggcccccaccctgcctggtgggccaggactggggcgtcttcatcatcaccatgtttggatag

SEQ ID NO: 58964 - DNA, 1434 bp, Artificial Sequence
  derived and/or modified sequence
atggagtggaagctggagcggaccgccccccggcgggtgcggaccgaggaggaaatgctttgggagtccattatgagggtgttgtccaaagaccttaagcagaagcgatcacaagactcggctaacgtactggactccgtcaacgcaacctactcagacttcaaatcaaacttcgccaagaggctctccgcagaagtgccagtcgcaagcagtccaatcactacacggtggcagcagtcacagaccagggccctttctagcgactcctttggggaggaacagtccaccacctacctgccagaggcctctggctccgtcctcaagacacctccggaaaaggaaaccctgactctgggctctcgcaaggagcagctcaaaacaccctctaagggtattagtgagaccagtaatagtgcactgcatttttgtaaagcacctcatgcgatggatcgcgattggaaggagagtgtcgcctcgaaaggccagaagtgcttgaagcaattgttcgttacacaaaatgtagtgcagcaggctaatggcaaaatgcagctctgcgaacaaagtgaatgtgtgtggaagggatgtaaggacggagtacgcgatgaatccttccatctcaagagctccggggacataaatgactcgatattacagccagaggttaaaattcacatcacgggtctccgaaacgattactatcttaatattctcgattggagttttcagaatcttgtagccatcgcgctgggctccgccgtctacatctggaatggagagaaccataacggtatcgaaaatattgatctcagcttgacttgcaattatatctcatccgtgtcatggattaaagagggaacctgccttgctgtggggacatctgagggcgaagtgcagttgtgggacgtcgttaccaagaaacgcctgcggaacatgctgggccatctgtccgttgttggcgcccttagctggaaccactttatactgagcagtggatcaagactaggcagggtctaccatcacgatgtcagggttgcccagcatcacgttgggaccttacggcataagcaggcggtgtgcgccctgaagtggagccccgatgggcgtctgttatcttccgggtgttcggatggcctgttgacgatttggcctcatgacccaggggcgagtgctcaaggccaacccctaaaagttatcacgcagtcaacagccgtcaagatttgttctttgatctggctgccaaagaccaaggagattgctaccgggcagggtacacccaaaaacgacgttactgtatggacctgtccaaccgtgagccgctccggagggttctttggccaccggggacgtgtacttcatctttcgctgtctccggaccagacaagagttttctcggccgccgccgatgggactgcctcagtttggaattgctactag

SEQ ID NO: 58965 - DNA, 1119 bp, Artificial Sequence
  derived and/or modified sequence
atggagtggaagctggagcggaccgccccccggcgggtgcggaccgaagaagaaatgctgtgggaaagcattatgcgcgttctgtccaaggacctaaagcagaagaggagccaagattcagctaatgtgctcgatagcgtcaatgccacgtattccgattttaaatcaaatttcgctaagcgactgtcagccgaggttcccgtggcctccagcccaattacaaccagatggcagcagagccagacccgcgcattgtctagcgactcctttggagaggagcaaagcactacatatctccccgaagcttcgggctccgttctcaagactccaccagagaaggagacgctcacgttgggtagcaggaaggagcagctgaagactcctagcaaaggcattagcgaaacatccaattctgcccttcacttctgtaaagctccacacgccatggatcgagactggaaggaaagtgtcgcaagtaagggccagaaatgtctgaagcagctgtttgtgacccagaacgtcgtgcaacaggccaacgggaagatgcagctgtgtgagcagtcagaatgtgtatggaaaggttgcaaggatggagtccgggacgagagcttccatctgaagtcatctggagacataaatgatagcattctgcaaccagaggtgaagattcatattactggcctgcgtaatgactactaccttaatattcttgattggtcctttcagaaccttgtcgctatcgcactagggtccgcagtatatatttggaacggggagaatcataacggaatcgagaatatagacctaagcctaacctgcaactacatttcctccgtgagctggataaaagaaggaacttgccttgctgtgggcaccagtgagggggaagttcagctatgggatgtggtaactaaaaaacgtcttcgtaacatgctgggccatctcagtgtcgtgggagctctttcttggaatcacttcatcttgagccggctcgaattttcgggggtaataagtgcccattgcaacctgcacctgccatcctcctgggactataggcgtcccccaccctgcctggtgggccaggactggggggttttcataatcaccatgttcggctag

SEQ ID NO: 58966 - DNA, 1434 bp, Artificial Sequence
  derived and/or modified sequence
atggaatggaaattggagaggactgcccctcgcagggtgcggaccgaggaggagatgctttgggagtcaattatgagggtcctaagtaaagacctgaagcagaaacggtctcaggattcggctaatgtgctggattcagtaaacgccacgtactctgatttcaaaagtaactttgccaaacggctctcagctgaagtccccgtggcatcctcacccatcactacccggtggcagcagtcccagactcgcgcactgtcgagtgatagtttcggtgaagagcaatcaacaacgtacctgcccgaggcctcaggctccgtgctgaagactcctcctgaaaaggagacactgacccttggatcccgtaaggaacagctgaagactccaagcaaaggcatctccgaaacctccaactctgccctgcatttctgtaaggcaccacatgccatggaccgtgactggaaggagtccgtggcctcgaaaggacagaaatgcctgaagcagctgtttgttacgcaaaacgtggtgcagcaggccaacgggaaaatgcagctatgcgaacaaagcgagtgtgtgtggaagggctgtaaagacggggtgagagatgagtctttccatttgaagagctctggcgacatcaatgacagtatcctgcaacccgaggtaaaaattcacatcacagggctgaggaacgattattacttaaacatcctagattggagctttcagaatcttgttgctatagcactgggttccgctgtatacatatggaacggggagaaccataatgggattgaaaacattgatctgtccttgacatgtaactatatttctagcgtttcctggatcaaagaaggaacttgtctggctgttggcacttccgaaggcgaagtgcaactgtgggatgtggtaacaaaaaaacgtctccgcaacatgctgggccatctgtcagtagtgggggcactcagctggaatcactttattctctccagcggctctcggctcggcagggtctaccatcacgacgtacgggttgctcagcatcacgttggaaccctccggcataaacaggcagtctgcgctcttaaatggagtcccgacggaagactgttgagctcgggatgcagcgatggactgctgaccatctggccccacgatcctggcgcttccgctcagggccaacctctcaaagtcattacacagtctactgccgtgaagatctgctccctaatctggctgcccaagacgaaggaaattgccacggggcagggtaccccaaaaaatgatgtaaccgtgtggacttgtccgaccgttagccgctccggcggattctttggccacagaggtcgggtactgcatctgtccctgtcccccgaccagaccagagtgttcagcgctgccgctgacggcacagcctccgtgtggaattgctactag

SEQ ID NO: 58967 - DNA, 1119 bp, Artificial Sequence
  derived and/or modified sequence
atggagtggaaactagaaaggacagccccacgtcgtgttagaacagaggaagagatgctgtgggagagtatcatgagagtcttatcgaaggatctgaaacaaaaacggtctcaggattcagctaacgtgctggactccgtcaacgctacctatagcgattttaaatccaattttgctaagcgcctcagcgctgaagtccctgtggcaagcagccctattacaacaaggtggcagcaatcccagaccagggccctgtcatccgattcattcggcgaagagcagtccacaacctatctgccagaggcttcagggagcgtcctcaagacaccacccgaaaaggagaccctgactttaggctccagaaaagaacagctgaaaaccccctctaaggggatctctgagacgtcaaacagcgcactgcacttttgcaaggcgcctcatgcgatggatcgcgactggaaagagtctgtcgccagcaaaggacagaagtgtcttaagcagctcttcgttactcagaacgtcgttcaacaggcaaatggcaagatgcagctttgcgaacagtccgagtgtgtatggaaagggtgcaaggacggcgttagagacgagtcttttcacctaaaatcgtcaggcgatatcaacgactcaatcctgcaacctgaagtgaagattcacatcacaggcctgagaaacgactattatctgaacatcctggactggagcttccagaatttggtggcaatcgccctcgggagtgctgtatacatatggaacggcgaaaatcataacgggatagaaaatatcgacctgtcgttgacctgcaattacattagctctgtatcctggatcaaggaaggaacctgcctggcagtgggaacctctgaaggcgaggtccagctctgggacgtagtgactaaaaaacgcctgagaaacatgctcgggcacctgtcagttgtgggcgcactcagctggaaccacttcatcctgtccagacttgagttttccggtgttatttccgctcactgcaacttgcacctgcccagctcatgggactaccgacgccctcccccatgcctcgtcggtcaggattggggagtgtttataatcacaatgttcggctag

SEQ ID NO: 58968 - DNA, 1679 bp, Artificial Sequence
  derived and/or modified sequence
agcggcggtgggaggagtgggggacctggagggaggtggtgaaatagaatggtcctgggggacgggactccaggggtttgacgattaggcgtcaagactgacttagacctgggaagaaaaccagaggcagtcgagcagagaggccaaacgccaggcagggcgaagtcagccggagatggagtggaaactggagcgcaccgcgcctcggagggtccgcacggaagaggagatgctgtgggaaagtatcatgcgtgtgctctccaaagacttgaagcagaagagaagtcaagattccgccaacgtactcgattcagttaatgctacgtattctgactttaagagcaactttgcgaagaggctgtccgcagaggttcctgttgcgagtagccccattaccacaaggtggcagcaaagtcaaactagggctctgtcctctgattcctttggggaagagcagtcaaccacctacctcccagaagcttccggatcagtgctgaagacaccgcctgagaaagagaccttgactctaggatcccgcaaagaacaactgaagacccccagcaaaggaatttctgaaacaagtaactctgctctccatttttgcaaggcacctcatgcaatggacagagactggaaagaaagtgttgcctcaaaagggcagaaatgcctaaaacaactctttgtaacccagaacgtggttcagcaggctaatggaaaaatgcagctctgtgagcaatccgaatgtgtttggaaaggctgcaaagatggagtcagagatgaatccttccatcttaaaagttctggtgatataaacgattccatactccaaccagaggtgaagattcatattactggtcttcgaaatgactactatctgaatatcctagattggagttttcagaatcttgttgccatagccctgggctctgctgtatacatctggaatggggagaaccacaatgggattgaaaacatagacttaagtctcacttgtaactatatctcttctgtgtcctggataaaagagggaacttgcctggcagttggcaccagcgagggagaagtgcaattatgggatgtggtaactaaaaagcggctgagaaatatgcttggtcatttgtcagtagttggggctctgagctggaatcactttatcctcagcagtgggtcaagactggggcgtgtttatcatcacgatgttcgggtagcccagcatcatgttggaacacttcgccacaagcaagctgtgtgtgctctgaagtggtcaccggatggcaggctgctttccagcggctgcagtgatggactgctgacaatatggccccacgatccaggtgccagtgcacagggccaaccgctgaaagtcataacccagtctacggcagtcaagatttgttccttaatctggctacctaagacaaaggagattgcaactggtcaaggtactcccaagaatgatgtgactgtgtggacctgtcccactgtgtccaggtcaggtgggttttttggccacaggggcagagtgctgcacctgtctttgagtccagaccagacccgggtgttttctgctgcagctgatgggacggcctctgtatggaattgctactagcacccagcccctctaggtttcagtttccttatttctgagtgaagatgatgatgttggctatgtcttctcc

SEQ ID NO: 58969 - protein, 457 aa, Artificial Sequence
  derived and/or modified sequence
MTTDEGAKNNEESPTATVAEQGEDITSKKDRGVLKIVKRVGNGEETPMIGDKVYVHYKGKLSNGKKFDSSHDRNEPFVFSLGKGQVIKAWDIGVATMKKGEICHLLCKPEYAYGSAGSLPKIPSNATLFFEIELLDFKGEDLFEDGGIIRRTKRKGEGYSNPNEGATVEIHLEGRCGGRMFDCRDVAFTVGEGEDHDIPIGIDKALEKMQREEQCILYLGPRYGFGEAGKPKFGIEPNAELIYEVTLKSFEKAKESWEMDTKEKLEQAAIVKEKGTVYFKGGKYMQAVIQYGKIVSWLEMEYGLSEKESKASESFLLAAFLNLAMCYLKLREYTKAVECCDKALGLDSANEKGLYRRGEAQLLMNEFESAKGDFEKVLEVNPQNKAARLQISMCQKKAKEHNERDRRIYANMFKKFAEQDAKEEANKAMGKKTSEGVTNEKGTDSQAMEEEKPEGHV

SEQ ID NO: 58970 - protein, 278 aa, Artificial Sequence
  derived and/or modified sequence
MFDCRDVAFTVGEGEDHDIPIGIDKALEKMQREEQCILYLGPRYGFGEAGKPKFGIEPNAELIYEVTLKSFEKAKESWEMDTKEKLEQAAIVKEKGTVYFKGGKYMQAVIQYGKIVSWLEMEYGLSEKESKASESFLLAAFLNLAMCYLKLREYTKAVECCDKALGLDSANEKGLYRRGEAQLLMNEFESAKGDFEKVLEVNPQNKAARLQISMCQKKAKEHNERDRRIYANMFKKFAEQDAKEEANKAMGKKTSEGVTNEKGTDSQAMEEEKPEGHV

SEQ ID NO: 58971 - protein, 420 aa, Artificial Sequence [sequence omitted]

SEQ ID NO: 58972 - DNA, 4093 bp, Artificial Sequence
  derived and/or modified sequence
aacaaactcctacctctgtttgcaactaagagttacatcccccatgccaagaccttccgaggcgtcccaaagggggaaattcctcgctgccggactgcgcccacccttgaggacctcacattctctttgggcagagcggaagccagacagagacagggactacgaagcgacaatccccagccctgtgtgtgcaaggagcccccgaggggcaggcagccacgctgcagaaggctagactctccgacccccagggagcctggtgtgggctgcagggacagaacgcttctcagaggagggcgccgggcgctgccccggggattcgggccggctcgcgggcgctgccagtctcgggcggcggtgtccggcgcgcgggcggcctgctgggcgggctgaagggttagcggagcacgggcaaggcggagagtgacggagtcggcgagcccccgcggcgacaggttctctacttaaaagacaatgactactgatgaaggtgccaagaacaatgaagaaagccccacagccactgttgctgagcagggagaggatattacctccaaaaaagacaggggagtattaaagattgtcaaaagagtggggaatggtgaggaaacgccgatgattggagacaaagtttatgtccattacaaaggaaaattgtcaaatggaaagaagtttgattccagtcatgatagaaatgaaccatttgtctttagtcttggcaaaggccaagtcatcaaggcatgggacattggggtggctaccatgaagaaaggagagatatgccatttactgtgcaaaccagaatatgcatatggctcggctggcagtctccctaaaattccctcgaatgcaactctcttttttgagattgagctccttgatttcaaaggagaggatttatttgaagatggaggcattatccggagaaccaaacggaaaggagagggatattcaaatccaaacgaaggagcaacagtagaaatccacctggaaggccgctgtggtggaaggatgtttgactgcagagatgtggcattcactgtgggcgaaggagaagaccacgacattccaattggaattgacaaagctctggagaaaatgcagcgggaagaacaatgtattttatatcttggaccaagatatggttttggagaggcagggaagcctaaatttggcattgaacctaatgctgagcttatatatgaagttacacttaagagcttcgaaaaggccaaagaatcctgggagatggataccaaagaaaaattggagcaggctgccattgtcaaagagaagggaaccgtatacttcaagggaggcaaatacatgcaggcggtgattcagtatgggaagatagtgtcctggttagagatggaatatggtttatcagaaaaggaatcgaaagcttctgaatcatttctccttgctgcctttctgaacctggccatgtgctacctgaagcttagagaatacaccaaagctgttgaatgctgtgacaaggcccttggactggacagtgccaatgagaaaggcttgtataggaggggtgaagcccagctgctcatgaacgagtttgagtcagccaagggtgactttgagaaagtgctggaagtaaacccccagaataaggctgcaagactgcagatctccatgtgccagaaaaaggccaaggagcacaacgagcgggaccgcaggatatacgccaacatgttcaagaagtttgcagagcaggatgccaaggaagaggccaataaagcaatgggcaagaagacttcagaaggggtcactaatgaaaaaggaacagacagtcaagcaatggaagaagagaaacctgagggccacgtatgacgccacgccaaggagggaagagtcccagtgaactcggcccctcctcaatgggctttcccccaactcaggacagaacagtgtttaatgtaaagtttgttatagtctatgtgattctggaagcaaatggcaaaaccagtagcttcccaaaaacagcccccctgctgctgcccggagggttcactgaggggtggcacgggaccactccaggtggaacaaacagaaatgactgtggtgtggagggagtgagccagcagcttaagtccagctcatttcagtttctatcaaccttcaagtatccaattcagggtccctggagatcatcctaacaatgtggggctgttaggttttacctttgaactttcatagcactgcagaaacctttaaaaaaaaaatgcttcatgaatttctcctttcctacagttgggtagggtaggggaaggaggataagcttttgttttttaaatgactgaagtgctataaatgtagtctgttgcatttttaaccaacagaacccacagtagaggggtctcatgtctccccagttccacagcagtgtcacagacgtgaaagccagaacctcagaggccacttgcttgctgacttagcctcctcccaaagtccccctcctcagccagcctccttgtgagagtggctttctaccacacacagcctgtccctgggggagtaattctgtcattcctaaaacacccttcagcaatgataatgagcagatgagagtttctggattagcttttcctattttcgatgaagttctgagatactgaaatgtgaaaagagcaatcagaattgtgctttttctcccctcctctattccttttagggaataatattcaatacacagtacttcctcccagcattgctactgctcagcttcttctttcattctaatccttgctattaagaatttaagacttgtgcttacaatatttttgacctggagtggatctatttacatagtcatttaggatccatgcagctttttttgtctttttaagattattggctcataagcatatgtatactggtttatggaactttatttacactcctctatcatgcaaaaaaattttgactttttagtactaagcttaatttttaaaaacaaaatctgtagggttgacaaataaatagttgctcttctacactaggggtttcacctgcaggtttgacacgcagttgctcgcttttcctgccctgtcaagcttctctgttctggcgtgagttgtgaaagagttgaagacagcttcccatgccggtacacagccagtagcctaaatctccagtacttgagctgaccattgaactagggcaagtcttaaatgtgtacatgtagttgaatttcagtccttacgggtaaacagattgagcatggctctctattccctcagcctaagaaacactcatgggaatgcatttggcaacccaaggaaccatttgcttaaacctggaacatctcacctttttaaatcctaaaaaacactggcagttatattttaaattagtttttatttttatgatggttttatcaaaagacttttattattagattgggacccccttcaaacctaaaaatcaagttatttccttttataatacttttcttccccatggaacaaatgggatcaatttgtgagttttttcctttaatgataactaaaatccctctaatttctcatttatgcttttgtcttttttatgaaatatttcttttaaaagccccagtctcacctacgaaatatgaagagcaaaagctgattttgcttacttgctaaactgttgggaaagctctgtagagcatggttccagtgaggccaagattgaaatttgatactaaaaaggccacctagctttttgcagataacaaacaagaaagctattccaagactcagatgatgccagctgtctcccacgtgtgtattatggttcaccagggggaactggcaaaagtgtgtgtggggaggggaagggtgtgtgagtggttctgagcaaataactacagggtgcccattaccactcaagaagacacttcacgtattcttgtatcaaattcaataatcttaaacaatttgtgtagaagtccacagacatctttcaaccaccttttaggctgcatatggattgccaagtcagcatatgaggaattaaagacattgtttttaaaaaaaaaaaatcatttagatgcacttttttgtgtgttctttaaataaatccaaaaaaaatgtga

SEQ ID NO: 58973 - DNA, 3782 bp, Artificial Sequence
  derived and/or modified sequence
gattcgggccggctcgcgggcgctgccagtctcgggcggcggtgtccggcgcgcgggcggcctgctgggcgggctgaagggttagcggagcacgggcaaggcggagagtgacggagtcggcgagcccccgcggcgacaggttctctacttaaaagacaatgactactgatgaaggtgccaagaacaatgaagaaagccccacagccactgttgctgagcagggagaggatattacctccaaaaaagacaggggagtattaaagattgtcaaaagagtggggaatggtgaggaaacgccgatgattggagacaaagtttatgtccattacaaaggaaaattgtcaaatggaaagaagtttgattccagtcatgatagaaatgaaccatttgtctttagtcttggcaaaggccaagtcatcaaggcatgggacattggggtggctaccatgaagaaaggagagatatgccatttactgtgcaaaccagaatatgcatatggctcggctggcagtctccctaaaattccctcgaatgcaactctcttttttgagattgagctccttgatttcaaaggagaggatttatttgaagatggaggcattatccggagaaccaaacggaaaggagagggatattcaaatccaaacgaaggagcaacagtagaaatccacctggaaggccgctgtggtggaaggatgtttgactgcagagatgtggcattcactgtgggcgaaggagaagaccacgacattccaattggaattgacaaagctctggagaaaatgcagcgggaagaacaatgtattttatatcttggaccaagatatggttttggagaggcagggaagcctaaatttggcattgaacctaatgctgagcttatatatgaagttacacttaagagcttcgaaaaggccaaagaatcctgggagatggataccaaagaaaaattggagcaggctgccattgtcaaagagaagggaaccgtatacttcaagggaggcaaatacatgcaggcggtgattcagtatgggaagatagtgtcctggttagagatggaatatggtttatcagaaaaggaatcgaaagcttctgaatcatttctccttgctgcctttctgaacctggccatgtgctacctgaagcttagagaatacaccaaagctgttgaatgctgtgacaaggcccttggactggacagtgccaatgagaaaggcttgtataggaggggtgaagcccagctgctcatgaacgagtttgagtcagccaagggtgactttgagaaagtgctggaagtaaacccccagaataaggctgcaagactgcagatctccatgtgccagaaaaaggccaaggagcacaacgagcgggaccgcaggatatacgccaacatgttcaagaagtttgcagagcaggatgccaaggaagaggccaataaagcaatgggcaagaagacttcagaaggggtcactaatgaaaaaggaacagacagtcaagcaatggaagaagagaaacctgagggccacgtatgacgccacgccaaggagggaagagtcccagtgaactcggcccctcctcaatgggctttcccccaactcaggacagaacagtgtttaatgtaaagtttgttatagtctatgtgattctggaagcaaatggcaaaaccagtagcttcccaaaaacagcccccctgctgctgcccggagggttcactgaggggtggcacgggaccactccaggtggaacaaacagaaatgactgtggtgtggagggagtgagccagcagcttaagtccagctcatttcagtttctatcaaccttcaagtatccaattcagggtccctggagatcatcctaacaatgtggggctgttaggttttacctttgaactttcatagcactgcagaaacctttaaaaaaaaaatgcttcatgaatttctcctttcctacagttgggtagggtaggggaaggaggataagcttttgttttttaaatgactgaagtgctataaatgtagtctgttgcatttttaaccaacagaacccacagtagaggggtctcatgtctccccagttccacagcagtgtcacagacgtgaaagccagaacctcagaggccacttgcttgctgacttagcctcctcccaaagtccccctcctcagccagcctccttgtgagagtggctttctaccacacacagcctgtccctgggggagtaattctgtcattcctaaaacacccttcagcaatgataatgagcagatgagagtttctggattagcttttcctattttcgatgaagttctgagatactgaaatgtgaaaagagcaatcagaattgtgctttttctcccctcctctattccttttagggaataatattcaatacacagtacttcctcccagcattgctactgctcagcttcttctttcattctaatccttgctattaagaatttaagacttgtgcttacaatatttttgacctggagtggatctatttacatagtcatttaggatccatgcagctttttttgtctttttaagattattggctcataagcatatgtatactggtttatggaactttatttacactcctctatcatgcaaaaaaattttgactttttagtactaagcttaatttttaaaaacaaaatctgtagggttgacaaataaatagttgctcttctacactaggggtttcacctgcaggtttgacacgcagttgctcgcttttcctgccctgtcaagcttctctgttctggcgtgagttgtgaaagagttgaagacagcttcccatgccggtacacagccagtagcctaaatctccagtacttgagctgaccattgaactagggcaagtcttaaatgtgtacatgtagttgaatttcagtccttacgggtaaacagattgagcatggctctctattccctcagcctaagaaacactcatgggaatgcatttggcaacccaaggaaccatttgcttaaacctggaacatctcacctttttaaatcctaaaaaacactggcagttatattttaaattagtttttatttttatgatggttttatcaaaagacttttattattagattgggacccccttcaaacctaaaaatcaagttatttccttttataatacttttcttccccatggaacaaatgggatcaatttgtgagttttttcctttaatgataactaaaatccctctaatttctcatttatgcttttgtcttttttatgaaatatttcttttaaaagccccagtctcacctacgaaatatgaagagcaaaagctgattttgcttacttgctaaactgttgggaaagctctgtagagcatggttccagtgaggccaagattgaaatttgatactaaaaaggccacctagctttttgcagataacaaacaagaaagctattccaagactcagatgatgccagctgtctcccacgtgtgtattatggttcaccagggggaactggcaaaagtgtgtgtggggaggggaagggtgtgtgagtggttctgagcaaataactacagggtgcccattaccactcaagaagacacttcacgtattcttgtatcaaattcaataatcttaaacaatttgtgtagaagtccacagacatctttcaaccaccttttaggctgcatatggattgccaagtcagcatatgaggaattaaagacattgtttttaaaaaaaaaaaatcatttagatgcacttttttgtgtgttctttaaataaatccaaaaaaaatgtgacttcc

SEQ ID NO: 58974 - DNA, 3940 bp, Artificial Sequence
  derived and/or modified sequence
agaacaaactcctacctctgtttgcaactaagagttacatcccccatgccaagaccttccgaggcgtcccaaagggggaaattcctcgctgccggactgcgcccacccttgaggacctcacattctctttgggcagagcggaagccagacagagacagggactacgaagcgacaatccccagccctgtgtgtgcaaggagcccccgaggggcaggcagccacgctgcagaaggctagactctccgacccccagggagcctggtgtgggctgcagggacagaacgcttctcagaggaggttctctacttaaaagacaatgactactgatgaaggtgccaagaacaatgaagaaagccccacagccactgttgctgagcagggagaggatattacctccaaaaaagacaggggagtattaaagattgtcaaaagagtggggaatggtgaggaaacgccgatgattggagacaaagtttatgtccattacaaaggaaaattgtcaaatggaaagaagtttgattccagtcatgatagaaatgaaccatttgtctttagtcttggcaaaggccaagtcatcaaggcatgggacattggggtggctaccatgaagaaaggagagatatgccatttactgtgcaaaccagaatatgcatatggctcggctggcagtctccctaaaattccctcgaatgcaactctcttttttgagattgagctccttgatttcaaaggagaggatttatttgaagatggaggcattatccggagaaccaaacggaaaggagagggatattcaaatccaaacgaaggagcaacagtagaaatccacctggaaggccgctgtggtggaaggatgtttgactgcagagatgtggcattcactgtgggcgaaggagaagaccacgacattccaattggaattgacaaagctctggagaaaatgcagcgggaagaacaatgtattttatatcttggaccaagatatggttttggagaggcagggaagcctaaatttggcattgaacctaatgctgagcttatatatgaagttacacttaagagcttcgaaaaggccaaagaatcctgggagatggataccaaagaaaaattggagcaggctgccattgtcaaagagaagggaaccgtatacttcaagggaggcaaatacatgcaggcggtgattcagtatgggaagatagtgtcctggttagagatggaatatggtttatcagaaaaggaatcgaaagcttctgaatcatttctccttgctgcctttctgaacctggccatgtgctacctgaagcttagagaatacaccaaagctgttgaatgctgtgacaaggcccttggactggacagtgccaatgagaaaggcttgtataggaggggtgaagcccagctgctcatgaacgagtttgagtcagccaagggtgactttgagaaagtgctggaagtaaacccccagaataaggctgcaagactgcagatctccatgtgccagaaaaaggccaaggagcacaacgagcgggaccgcaggatatacgccaacatgttcaagaagtttgcagagcaggatgccaaggaagaggccaataaagcaatgggcaagaagacttcagaaggggtcactaatgaaaaaggaacagacagtcaagcaatggaagaagagaaacctgagggccacgtatgacgccacgccaaggagggaagagtcccagtgaactcggcccctcctcaatgggctttcccccaactcaggacagaacagtgtttaatgtaaagtttgttatagtctatgtgattctggaagcaaatggcaaaaccagtagcttcccaaaaacagcccccctgctgctgcccggagggttcactgaggggtggcacgggaccactccaggtggaacaaacagaaatgactgtggtgtggagggagtgagccagcagcttaagtccagctcatttcagtttctatcaaccttcaagtatccaattcagggtccctggagatcatcctaacaatgtggggctgttaggttttacctttgaactttcatagcactgcagaaacctttaaaaaaaaaatgcttcatgaatttctcctttcctacagttgggtagggtaggggaaggaggataagcttttgttttttaaatgactgaagtgctataaatgtagtctgttgcatttttaaccaacagaacccacagtagaggggtctcatgtctccccagttccacagcagtgtcacagacgtgaaagccagaacctcagaggccacttgcttgctgacttagcctcctcccaaagtccccctcctcagccagcctccttgtgagagtggctttctaccacacacagcctgtccctgggggagtaattctgtcattcctaaaacacccttcagcaatgataatgagcagatgagagtttctggattagcttttcctattttcgatgaagttctgagatactgaaatgtgaaaagagcaatcagaattgtgctttttctcccctcctctattccttttagggaataatattcaatacacagtacttcctcccagcattgctactgctcagcttcttctttcattctaatccttgctattaagaatttaagacttgtgcttacaatatttttgacctggagtggatctatttacatagtcatttaggatccatgcagctttttttgtctttttaagattattggctcataagcatatgtatactggtttatggaactttatttacactcctctatcatgcaaaaaaattttgactttttagtactaagcttaatttttaaaaacaaaatctgtagggttgacaaataaatagttgctcttctacactaggggtttcacctgcaggtttgacacgcagttgctcgcttttcctgccctgtcaagcttctctgttctggcgtgagttgtgaaagagttgaagacagcttcccatgccggtacacagccagtagcctaaatctccagtacttgagctgaccattgaactagggcaagtcttaaatgtgtacatgtagttgaatttcagtccttacgggtaaacagattgagcatggctctctattccctcagcctaagaaacactcatgggaatgcatttggcaacccaaggaaccatttgcttaaacctggaacatctcacctttttaaatcctaaaaaacactggcagttatattttaaattagtttttatttttatgatggttttatcaaaagacttttattattagattgggacccccttcaaacctaaaaatcaagttatttccttttataatacttttcttccccatggaacaaatgggatcaatttgtgagttttttcctttaatgataactaaaatccctctaatttctcatttatgcttttgtcttttttatgaaatatttcttttaaaagccccagtctcacctacgaaatatgaagagcaaaagctgattttgcttacttgctaaactgttgggaaagctctgtagagcatggttccagtgaggccaagattgaaatttgatactaaaaaggccacctagctttttgcagataacaaacaagaaagctattccaagactcagatgatgccagctgtctcccacgtgtgtattatggttcaccagggggaactggcaaaagtgtgtgtggggaggggaagggtgtgtgagtggttctgagcaaataactacagggtgcccattaccactcaagaagacacttcacgtattcttgtatcaaattcaataatcttaaacaatttgtgtagaagtccacagacatctttcaaccaccttttaggctgcatatggattgccaagtcagcatatgaggaattaaagacattgtttttaaaaaaaaaaaatcatttagatgcacttttttgtgtgttctttaaataaatccaaaaaaaatgtgacttcc

SEQ ID NO: 58975 - DNA, 3827 bp, Artificial Sequence
  derived and/or modified sequence
agtctcgggcggcggtgtccggcgcgcgggcggcctgctgggcgggctgaagggttagcggagcacgggcaaggcggagagtgacggagtcggcgagcccccgcggcgacaggtaccggcgccatggccacggagatggggcggccggccgcggcgccccgggagccgaacgccctccttccaggttctctacttaaaagacaatgactactgatgaaggtgccaagaacaatgaagaaagccccacagccactgttgctgagcagggagaggatattacctccaaaaaagacaggggagtattaaagattgtcaaaagagtggggaatggtgaggaaacgccgatgattggagacaaagtttatgtccattacaaaggaaaattgtcaaatggaaagaagtttgattccagtcatgatagaaatgaaccatttgtctttagtcttggcaaaggccaagtcatcaaggcatgggacattggggtggctaccatgaagaaaggagagatatgccatttactgtgcaaaccagaatatgcatatggctcggctggcagtctccctaaaattccctcgaatgcaactctcttttttgagattgagctccttgatttcaaaggagaggatttatttgaagatggaggcattatccggagaaccaaacggaaaggagagggatattcaaatccaaacgaaggagcaacagtagaaatccacctggaaggccgctgtggtggaaggatgtttgactgcagagatgtggcattcactgtgggcgaaggagaagaccacgacattccaattggaattgacaaagctctggagaaaatgcagcgggaagaacaatgtattttatatcttggaccaagatatggttttggagaggcagggaagcctaaatttggcattgaacctaatgctgagcttatatatgaagttacacttaagagcttcgaaaaggccaaagaatcctgggagatggataccaaagaaaaattggagcaggctgccattgtcaaagagaagggaaccgtatacttcaagggaggcaaatacatgcaggcggtgattcagtatgggaagatagtgtcctggttagagatggaatatggtttatcagaaaaggaatcgaaagcttctgaatcatttctccttgctgcctttctgaacctggccatgtgctacctgaagcttagagaatacaccaaagctgttgaatgctgtgacaaggcccttggactggacagtgccaatgagaaaggcttgtataggaggggtgaagcccagctgctcatgaacgagtttgagtcagccaagggtgactttgagaaagtgctggaagtaaacccccagaataaggctgcaagactgcagatctccatgtgccagaaaaaggccaaggagcacaacgagcgggaccgcaggatatacgccaacatgttcaagaagtttgcagagcaggatgccaaggaagaggccaataaagcaatgggcaagaagacttcagaaggggtcactaatgaaaaaggaacagacagtcaagcaatggaagaagagaaacctgagggccacgtatgacgccacgccaaggagggaagagtcccagtgaactcggcccctcctcaatgggctttcccccaactcaggacagaacagtgtttaatgtaaagtttgttatagtctatgtgattctggaagcaaatggcaaaaccagtagcttcccaaaaacagcccccctgctgctgcccggagggttcactgaggggtggcacgggaccactccaggtggaacaaacagaaatgactgtggtgtggagggagtgagccagcagcttaagtccagctcatttcagtttctatcaaccttcaagtatccaattcagggtccctggagatcatcctaacaatgtggggctgttaggttttacctttgaactttcatagcactgcagaaacctttaaaaaaaaaatgcttcatgaatttctcctttcctacagttgggtagggtaggggaaggaggataagcttttgttttttaaatgactgaagtgctataaatgtagtctgttgcatttttaaccaacagaacccacagtagaggggtctcatgtctccccagttccacagcagtgtcacagacgtgaaagccagaacctcagaggccacttgcttgctgacttagcctcctcccaaagtccccctcctcagccagcctccttgtgagagtggctttctaccacacacagcctgtccctgggggagtaattctgtcattcctaaaacacccttcagcaatgataatgagcagatgagagtttctggattagcttttcctattttcgatgaagttctgagatactgaaatgtgaaaagagcaatcagaattgtgctttttctcccctcctctattccttttagggaataatattcaatacacagtacttcctcccagcattgctactgctcagcttcttctttcattctaatccttgctattaagaatttaagacttgtgcttacaatatttttgacctggagtggatctatttacatagtcatttaggatccatgcagctttttttgtctttttaagattattggctcataagcatatgtatactggtttatggaactttatttacactcctctatcatgcaaaaaaattttgactttttagtactaagcttaatttttaaaaacaaaatctgtagggttgacaaataaatagttgctcttctacactaggggtttcacctgcaggtttgacacgcagttgctcgcttttcctgccctgtcaagcttctctgttctggcgtgagttgtgaaagagttgaagacagcttcccatgccggtacacagccagtagcctaaatctccagtacttgagctgaccattgaactagggcaagtcttaaatgtgtacatgtagttgaatttcagtccttacgggtaaacagattgagcatggctctctattccctcagcctaagaaacactcatgggaatgcatttggcaacccaaggaaccatttgcttaaacctggaacatctcacctttttaaatcctaaaaaacactggcagttatattttaaattagtttttatttttatgatggttttatcaaaagacttttattattagattgggacccccttcaaacctaaaaatcaagttatttccttttataatacttttcttccccatggaacaaatgggatcaatttgtgagttttttcctttaatgataactaaaatccctctaatttctcatttatgcttttgtcttttttatgaaatatttcttttaaaagccccagtctcacctacgaaatatgaagagcaaaagctgattttgcttacttgctaaactgttgggaaagctctgtagagcatggttccagtgaggccaagattgaaatttgatactaaaaaggccacctagctttttgcagataacaaacaagaaagctattccaagactcagatgatgccagctgtctcccacgtgtgtattatggttcaccagggggaactggcaaaagtgtgtgtggggaggggaagggtgtgtgagtggttctgagcaaataactacagggtgcccattaccactcaagaagacacttcacgtattcttgtatcaaattcaataatcttaaacaatttgtgtagaagtccacagacatctttcaaccaccttttaggctgcatatggattgccaagtcagcatatgaggaattaaagacattgtttttaaaaaaaaaaaatcatttagatgcacttttttgtgtgttctttaaataaatccaaaaaaaatgtgacttcc

SEQ ID NO: 58976 - DNA, 1414 bp, Artificial Sequence
  derived and/or modified sequence
agtctcgggcggcggtgtccggcgcgcgggcggcctgctgggcgggctgaagggttagcggagcacgggcaaggcggagagtgacggagtcggcgagcccccgcggcgacagtccacctggaaggccgctgtggtggaaggatgtttgactgcagagatgtggcattcactgtgggcgaaggagaagaccacgacattccaattggaattgacaaagctctggagaaaatgcagcgggaagaacaatgtattttatatcttggaccaagatatggttttggagaggcagggaagcctaaatttggcattgaacctaatgctgagcttatatatgaagttacacttaagagcttcgaaaaggccaaagaatcctgggagatggataccaaagaaaaattggagcaggctgccattgtcaaagagaagggaaccgtatacttcaagggaggcaaatacatgcaggcggtgattcagtatgggaagatagtgtcctggttagagatggaatatggtttatcagaaaaggaatcgaaagcttctgaatcatttctccttgctgcctttctgaacctggccatgtgctacctgaagcttagagaatacaccaaagctgttgaatgctgtgacaaggcccttggactggacagtgccaatgagaaaggcttgtataggaggggtgaagcccagctgctcatgaacgagtttgagtcagccaagggtgactttgagaaagtgctggaagtaaacccccagaataaggctgcaagactgcagatctccatgtgccagaaaaaggccaaggagcacaacgagcgggaccgcaggatatacgccaacatgttcaagaagtttgcagagcaggatgccaaggaagaggccaataaagcaatgggcaagaagacttcagaaggggtcactaatgaaaaaggaacagacagtcaagcaatggaagaagagaaacctgagggccacgtatgacgccacgccaaggagggaagagtcccagtgaactcggcccctcctcaatgggctttcccccaactcaggacagaacagtgtttaatgtaaagtttgttatagtctatgtgattctggaagcaaatggcaaaaccagtagcttcccaaaaacagcccccctgctgctgcccggagggttcactgaggggtggcacgggaccactccaggtggaacaaacagaaatgactgtggtgtggagggagtgagccagcagcttaagtccagctcatttcagtttctatcaaccttcaagtatccaattcagggtccctggagatcatcctaacaatgtggggctgttaggttttacctttgaactttcatagcactgcagaaacctttaaaaaaaaaatgcttcatgaatttctcctttcctacagttgggtagggtagggg

SEQ ID NO: 58977 - DNA, 1776 bp, Artificial Sequence
  derived and/or modified sequence
agtctcgggcggcggtgtccggcgcgcgggcggcctgctgggcgggctgaagggttagcggagcacgggcaaggcggagagtgacggagtcggcgagcccccgcggcgacaggttctctacttaaaagacaatgactactgagcagggagaggaaacgccgatgattggagacaaagtttatgtccattacaaaggaaaattgtcaaatggaaagaagtttgattccagtcatgatagaaatgaaccatttgtctttagtcttggcaaaggccaagtcatcaaggcatgggacattggggtggctaccatgaagaaaggagagatatgccatttactgtgcaaaccagaatatgcatatggctcggctggcagtctccctaaaattccctcgaatgcaactctcttttttgagattgagctccttgatttcaaaggagaggatttatttgaagatggaggcattatccggagaaccaaacggaaaggagagggatattcaaatccaaacgaaggagcaacagtagaaatccacctggaaggccgctgtggtggaaggatgtttgactgcagagatgtggcattcactgtgggcgaaggagaagaccacgacattccaattggaattgacaaagctctggagaaaatgcagcgggaagaacaatgtattttatatcttggaccaagatatggttttggagaggcagggaagcctaaatttggcattgaacctaatgctgagcttatatatgaagttacacttaagagcttcgaaaaggccaaagaatcctgggagatggataccaaagaaaaattggagcaggctgccattgtcaaagagaagggaaccgtatacttcaagggaggcaaatacatgcaggcggtgattcagtatgggaagatagtgtcctggttagagatggaatatggtttatcagaaaaggaatcgaaagcttctgaatcatttctccttgctgcctttctgaacctggccatgtgctacctgaagcttagagaatacaccaaagctgttgaatgctgtgacaaggcccttggactggacagtgccaatgagaaaggcttgtataggaggggtgaagcccagctgctcatgaacgagtttgagtcagccaagggtgactttgagaaagtgctggaagtaaacccccagaataaggctgcaagactgcagatctccatgtgccagaaaaaggccaaggagcacaacgagcgggaccgcaggatatacgccaacatgttcaagaagtttgcagagcaggatgccaaggaagaggccaataaagcaatgggcaagaagacttcagaaggggtcactaatgaaaaaggaacagacagtcaagcaatggaagaagagaaacctgagggccacgtatgacgccacgccaaggagggaagagtcccagtgaactcggcccctcctcaatgggctttcccccaactcaggacagaacagtgtttaatgtaaagtttgttatagtctatgtgattctggaagcaaatggcaaaaccagtagcttcccaaaaacagcccccctgctgctgcccggagggttcactgaggggtggcacgggaccactccaggtggaacaaacagaaatgactgtggtgtggagggagtgagccagcagcttaagtccagctcatttcagtttctatcaaccttcaagtatccaattcagggtccctggagatcatcctaacaatgtggggctgttaggttttacctttgaactttcatagcactgcagaaaccttt

SEQ ID NO: 58978 - DNA, 1374 bp, Artificial Sequence
  derived and/or modified sequence
atgacaaccgacgagggtgccaaaaacaacgaagagagccctacagcaaccgtcgcggaacagggggaggatatcacctctaagaaagatcgcggagtcttgaaaatagtcaaacgggttggcaatggcgaagagaccccaatgatcggggacaaggtttatgtgcattacaaaggcaaactgtcgaatggcaagaaatttgatagttcccacgacaggaatgagccgtttgtattcagcctgggcaaggggcaagttataaaggcctgggatattggagtggctaccatgaaaaaaggcgaaatctgccacctgttgtgcaagcctgagtatgcttacgggtcagccggatcccttccaaagatacccagcaatgcaacccttttcttcgaaattgaactgctggacttcaaaggagaagaccttttcgaagatggggggattatcagacgaactaaaagaaaaggcgaagggtactcaaaccctaatgaaggagcgacggttgaaatccacctagaaggccggtgcggaggtcgcatgtttgattgccgcgatgtggctttcaccgtgggcgaaggcgaggatcatgatattccgataggcatcgataaagccctggaaaaaatgcagcgcgaggagcagtgcattctgtacttgggacctagatacgggtttggtgaggccgggaagccgaaattcggtatcgaacccaacgccgaattgatttacgaagtgaccctcaagtccttcgagaaagcgaaggagagctgggagatggacaccaaagagaagcttgagcaggcagccattgtgaaggaaaaagggactgtttatttcaaaggaggaaaatatatgcaggccgtcatccaatacgggaagatagtcagctggttggaaatggagtatggcctgtccgaaaaggaaagcaaggcctctgagtctttcctgttggccgcattcctcaatctcgcgatgtgttacctaaagttgagggagtacacgaaagcagtcgaatgctgcgacaaggcactaggactggatagcgccaacgaaaaaggtttgtatcggagaggcgaagctcaattgttgatgaatgaattcgagagcgccaagggcgattttgaaaaagtcctagaggtcaatccccagaacaaggccgcgagacttcaaatctcaatgtgccagaaaaaagccaaggaacacaatgagcgggaccgtaggatctacgcaaatatgtttaagaaatttgcagagcaggatgctaaggaagaagcgaataaagctatggggaagaagacttccgagggtgttacaaacgaaaaagggactgatagccaagctatggaagaagagaagcccgaaggccacgtgtag

SEQ ID NO: 58979 - DNA, 1374 bp, Artificial Sequence
  derived and/or modified sequence
atgacaaccgatgagggtgcgaaaaataatgaagaatcacctacagctaccgtggccgagcagggggaagatatcacgtctaagaaagatcggggggtgctgaaaatcgttaaacgcgtaggaaatggagaagagacccccatgattggggacaaggtgtacgtccactacaagggtaagctgtcaaatggcaaaaagtttgacagttcacacgataggaacgagccgtttgtgttctccctgggcaaagggcaggttattaaagcctgggatattggtgttgctaccatgaagaaaggggaaatttgtcacctgctgtgtaaacccgagtacgcatacggatcggcgggctctctccctaagatcccaagcaacgcgaccctcttcttcgagattgagctgctggatttcaagggagaggacttatttgaagatggtggaatcattaggagaacaaaacgcaaaggtgaaggctacagcaatcctaatgaaggtgccacagtggagattcacctggaggggaggtgcgggggaaggatgttcgactgccgggacgtagccttcactgtcggggagggagaagaccacgatatcccaatcggaattgacaaggccttagaaaaaatgcagcgggaggagcagtgcatactttatctgggacctcgctatggattcggggaagccgggaaacctaagttcggaattgaacctaatgccgagctgatatacgaggtgacactgaaatccttcgaaaaggccaaggagtcttgggagatggacacaaaggaaaagctagaacaggcagccatagtcaaggaaaaagggactgtttattttaaaggcggaaagtacatgcaggcagtcattcagtatggaaaaattgtctcttggttagaaatggagtatggactcagcgaaaaagagagtaaggcgagcgagtctttcttgttagccgcattcctgaacctcgccatgtgttaccttaagctgcgggagtacactaaggccgttgaatgctgtgataaagcgttgggtctggatagcgccaacgagaagggactgtacagacgcggggaggcccagctgctaatgaacgaatttgagagcgccaagggagactttgagaaagtgctggaagtcaatccgcaaaataaagctgcccggctgcagatctcgatgtgtcagaaaaaggccaaggaacacaatgagcgcgatcgcaggatctatgccaatatgttcaaaaagttcgccgagcaggacgcaaaagaggaggcgaataaagccatggggaagaaaacctcagagggagtgacaaacgaaaagggcacagattcccaagccatggaagaggagaagcccgagggacacgtctag

SEQ ID NO: 58980 - DNA, 1374 bp, Artificial Sequence
  derived and/or modified sequence
atgaccactgacgagggcgcgaagaataatgaggaaagcccgactgctactgttgccgaacaaggggaagacatcacctccaagaaggataggggtgtccttaaaatcgtcaaaagggtgggtaacggagaagagacccccatgatcggcgacaaagtttatgtgcattacaagggcaagctctctaatgggaagaaatttgattcaagccatgaccgaaacgagccttttgttttcagcctcggtaagggacaagtcattaaagcatgggatatcggcgtcgctactatgaaaaagggcgagatctgccatttgctctgcaagcctgagtacgcctatggcagcgccggctcattgccaaagattccaagcaatgccacactattttttgaaattgagctgcttgattttaagggggaagacttgtttgaagatggcggtattatccgccggactaaaagaaagggggagggttactcaaatccgaacgagggggcaacagtggagatccatctcgagggaaggtgcggcgggaggatgttcgactgtagggatgtggcttttactgtcggcgaaggcgaggatcacgacattccaattggcatagataaggcactggagaaaatgcagagggaagaacagtgtatcttatacctcggcccgcggtatggttttggcgaagctggcaagcctaaattcggcatcgagccaaacgctgaactaatatatgaagtcacgctgaaaagttttgagaaggccaaggagagttgggagatggacactaaagaaaaactggaacaggccgccatcgttaaagagaaaggcaccgtgtattttaaaggtggaaagtacatgcaagctgtgattcagtatggtaagatcgtctcttggttggagatggaatacgggctgagcgagaaagagagtaaggcgagtgaaagctttttgctcgccgcctttttaaacttggctatgtgttacctgaagttgcgcgaatacaccaaggccgttgaatgctgtgataaggccctggggttggacagtgcgaatgaaaaaggcctgtaccgacgcggggaggcccagcttctcatgaacgagtttgagagcgctaagggcgacttcgagaaggtgctggaagttaatccacagaataaggcagcccgtctgcagattagcatgtgccagaagaaggctaaagagcataacgagagagatagaagaatttatgcgaacatgttcaaaaaattcgccgaacaggacgccaaagaggaagccaataaggctatgggcaagaaaaccagcgagggggttacaaacgagaagggcaccgactctcaggcaatggaggaggaaaagcctgaagggcatgtgtag

SEQ ID NO: 58981 - DNA, 1374 bp, Artificial Sequence
  derived and/or modified sequence
atgactactgacgagggagcaaaaaacaatgaggaatccccaacagcgaccgtggcagagcaaggagaagacattactagtaagaaggatcggggggtgctaaagattgttaaaagggttgggaacggcgaggagaccccaatgattggcgacaaggtttacgttcattacaaaggcaagctctctaacggcaagaagttcgacagctcccatgatcggaatgaaccctttgtgttcagtcttggaaaagggcaggtgattaaagcttgggatatcggagtggctactatgaaaaagggcgagatctgccacttactgtgcaagcccgagtacgcgtatgggagtgcgggtagccttcccaagataccatctaacgctacattgtttttcgagatcgagttgctggatttcaagggtgaagacttattcgaggacggcggaatcataagacggacaaagaggaaaggcgagggatattctaaccccaatgagggagccactgtggaaattcatctagaagggcgatgcggcggcaggatgttcgactgccgggacgtcgcgttcaccgtcggtgaaggcgaagaccacgacattcccatcggtatagacaaggctctggagaaaatgcagagggaggaacagtgcattctctatttaggccctcgatatggcttcggcgaggcaggaaagcccaagttcggcatcgaaccaaacgccgaactgatctacgaggttacgctcaagtcatttgaaaaggccaaggagagctgggaaatggacacgaaggaaaagcttgagcaagcagctatcgtgaaggagaaagggaccgtgtactttaaggggggtaagtacatgcaggccgtgatccagtacgggaagatcgtgtcatggctggagatggagtacggcttgagcgaaaaagagtccaaggccagcgagagtttcctcctggctgcatttttgaatcttgcaatgtgttatttgaagttgagagagtatactaaggcagtggagtgctgtgacaaagctcttggtctggatagtgctaatgagaaaggtctgtaccggcgtggtgaggcacagctgcttatgaatgagttcgagagcgccaagggagactttgaaaaggtactcgaagtaaacccccagaataaagccgccagactgcaaatatcaatgtgccagaagaaggcaaaggagcacaacgagagagacagaagaatctatgcgaatatgtttaagaaatttgccgagcaagatgcaaaagaagaggccaacaaggctatgggcaagaagacttctgaaggggtcaccaatgaaaaggggacggactcccaggcaatggaagaagaaaagcccgaaggtcatgtgtag

SEQ ID NO: 58982 - DNA, 837 bp, Artificial Sequence
  derived and/or modified sequence
atgttcgactgtcgggacgtggcttttactgtaggcgagggagaggaccacgatattcctataggcatagacaaggcccttgaaaaaatgcaaagggaagagcaatgtatcctctacttgggccctaggtacggattcggggaggcgggaaagcccaaatttggtattgagccgaacgcagagctgatctacgaggtgacgcttaaatcgtttgagaaggccaaggagagctgggaaatggatacaaaggaaaagttggagcaagccgcaattgtcaaggagaaaggaactgtgtatttcaagggggggaagtatatgcaagccgttatccagtatggaaagatcgtttcttggttagagatggaatacggcctcagtgaaaaggaatccaaggctagtgagtcttttctgcttgcggccttcttgaatctcgccatgtgttacttgaaactccgggaatataccaaggcagtcgagtgctgtgataaagccctgggactggatagcgccaacgagaaaggcctataccggaggggggaggctcagctgctcatgaatgaattcgagagcgctaaaggtgatttcgaaaaggtactggaagtgaatccgcagaacaaggccgcacggctccagatctctatgtgtcagaagaaggccaaagaacataatgagcgcgacagacgaatatatgcaaacatgtttaagaagtttgctgaacaggatgccaaagaagaggctaataaggccatggggaagaagactagcgaaggagtgaccaatgagaagggcaccgattcccaagctatggaggaggaaaagcctgaaggccacgtttag

SEQ ID NO: 58983 - DNA, 1263 bp, Artificial Sequence
  derived and/or modified sequence
atgaccaccgagcagggagaggagacgcccatgattggtgacaaagtttacgtgcattataaaggtaaattatctaatgggaaaaaatttgattcatcacatgaccgtaatgaaccatttgtgttctcccttggcaagggacaagttattaaggcctgggatataggtgtggccaccatgaagaagggcgaaatttgtcacctgttgtgcaaacctgagtacgcttatggctctgctgggtcattgccgaaaattccttcaaatgctaccctattttttgagatcgaactactcgactttaagggagaagatctgttcgaggacggagggatcattcggaggacaaagcggaagggcgaaggatattccaaccctaacgagggggcaaccgtagaaatccatctggaaggtcggtgcggaggtcggatgtttgactgtcgtgacgtggcattcaccgtgggggaaggggaggaccatgacatccccattgggattgacaaagcactcgaaaaaatgcagcgcgaggagcagtgcattctatatcttggtccccgctacggctttggagaggccggcaagcctaagttcggaatcgaaccaaatgcagaactgatttatgaggtcacgttgaagagctttgagaaagccaaagagtcctgggaaatggacacaaaagagaaattggagcaagcagccattgtcaaagagaaaggtactgtgtattttaaaggcggaaagtatatgcaagccgttatccaatatggtaagatcgtgtcatggttggagatggagtacggcctgagcgagaaggaatccaaggccagcgaaagcttcctgttagccgcatttctgaatctggccatgtgttacctgaaactccgcgaatacacaaaggctgtggaatgctgtgacaaggcattgggactggatagtgccaatgagaagggcctgtatcgccggggcgaagcccagttgctgatgaatgagttcgagtccgcaaaaggagatttcgaaaaagtcctggaggtgaatccccagaacaaggctgctaggttgcaaatttccatgtgtcaaaagaaggcaaaagagcataatgaacgggatcgtaggatatacgcaaacatgttcaagaagttcgctgagcaagatgctaaggaagaagccaacaaagcgatgggaaaaaagacctcggaaggagttacgaacgaaaagggtacagactctcaggcaatggaggaggaaaagcctgagggacacgtatag

SEQ ID NO: 58984 - DNA, 1374 bp, Artificial Sequence
  derived and/or modified sequence
atgaccacagatgagggcgccaagaacaatgaggagagccccacagccaccgtggccgagcagggcgaggacatcaccagcaagaaggaccggggcgtgctgaagatcgtgaagagggtgggcaatggagaggagacccccatgattggagacaaggtgtatgtgcactacaagggcaagctgagcaatggcaagaagtttgacagcagccatgacagaaatgagccctttgtgttcagcctgggcaagggccaggtgatcaaggcctgggacatcggcgtggccaccatgaagaagggggagatctgccacctgctgtgcaagccagaatatgcctacggcagcgctggcagcctgcccaagatccccagcaatgccaccctcttctttgaaattgagctgctggacttcaagggggaggacctgtttgaagatggcggcatcatccggaggaccaagaggaaaggagagggctacagcaaccccaatgaaggagccaccgtggagatccacctggagggccgctgtggcggccgcatgtttgactgcagagatgtggccttcaccgtgggggagggggaggaccatgacatccccatcggcatcgacaaggccctggagaagatgcagcgggaggagcagtgcatcctgtacctgggccccaggtatggctttggagaggccggcaagcccaagtttggaattgagcccaatgctgagctgatctatgaggtgaccctgaagagctttgagaaggccaaggagagctgggagatggacaccaaggagaagctggagcaggccgccatcgtgaaggagaagggcaccgtgtacttcaagggcggcaagtacatgcaggccgtcatccagtatggcaagatcgtgtcctggctggagatggagtatggcctgtctgagaaggagagcaaggccagcgagagcttcctgctggccgccttcctgaacctggccatgtgctacctgaagctgcgggagtacaccaaggctgtggagtgctgtgacaaggccctgggcctggacagcgccaatgagaagggcctgtaccgccgcggggaggcccagctgctgatgaatgaatttgaaagtgccaagggggactttgagaaggtgctggaggtgaacccccagaacaaggccgcccggctgcagatctccatgtgccagaagaaggccaaggagcacaatgaaagagaccggcgcatctatgccaacatgttcaagaagtttgctgagcaggatgccaaggaggaggccaacaaggccatgggcaagaagaccagcgagggcgtgaccaatgaaaaaggaacagacagccaggccatggaggaggagaagccagagggccacgtgtag

SEQ ID NO: 58985 - DNA, 837 bp, Artificial Sequence
  derived and/or modified sequence
atgtttgactgcagagatgtggccttcaccgtgggggagggagaagatcatgacatccccatcggcatcgacaaggccctggagaagatgcagcgggaggagcagtgcatcctgtacctgggccccaggtatggctttggagaggccggcaagcccaagtttggcatcgagcccaatgctgagctgatctatgaggtgaccctgaagagctttgagaaggccaaggagagctgggagatggacaccaaggagaagctggagcaggccgccatcgtgaaggagaagggcaccgtgtacttcaagggcggcaagtacatgcaggccgtcatccagtatggcaagatcgtgtcctggctggagatggagtatggcctgtctgagaaggagagcaaggccagcgagagcttcctgctggccgccttcctgaacctggccatgtgctacctgaagctgcgggagtacaccaaggctgtggagtgctgtgacaaggccctgggcctggacagcgccaatgagaagggcctgtacagaagaggagaggcccagctgctgatgaatgaatttgagagcgccaagggggactttgagaaggtgctggaggtgaacccccagaacaaggccgcccggctgcagatctccatgtgccagaagaaggccaaggagcacaatgaaagagaccggcgcatctatgccaacatgttcaagaagtttgctgagcaggatgccaaggaggaggccaacaaggccatgggcaagaagaccagcgagggcgtgaccaatgagaagggcacagacagccaggccatggaggaggagaagccagagggccacgtgtag

SEQ ID NO: 58986 - DNA, 1263 bp, Artificial Sequence
  derived and/or modified sequence
atgaccacagagcagggcgaggagacccccatgattggagacaaggtgtatgtgcactacaagggcaagctgagcaatggcaagaagtttgacagcagccatgacagaaatgagccctttgtgttcagcctgggcaagggccaggtgatcaaggcctgggacattggagtggccaccatgaagaagggggagatctgccacctgctgtgcaagccagaatatgcctacggcagcgctggcagcctgcccaagatccccagcaatgccaccctcttctttgaaattgagctgctggacttcaagggggaggacctgtttgaagatggcggcatcatccggaggaccaagaggaagggggagggctacagcaaccccaatgaaggagccaccgtggagatccacctggagggccgctgtggcggccgcatgtttgactgcagagatgtggccttcaccgtgggggagggagaagatcatgacatccccatcggcatcgacaaggccctggagaagatgcagcgggaggagcagtgcatcctgtacctgggccccaggtatggctttggagaggccggcaagcccaagtttggcatcgagcccaatgctgagctgatctatgaggtgaccctgaagagctttgagaaggccaaggagagctgggagatggacaccaaggagaagctggagcaggccgccatcgtgaaggagaagggcaccgtgtacttcaagggcggcaagtacatgcaggccgtcatccagtatggcaagatcgtgtcctggctggagatggagtatggcctgtctgagaaggagagcaaggccagcgagagcttcctgctggccgccttcctgaacctggccatgtgctacctgaagctgcgggagtacaccaaggctgtggagtgctgtgacaaggccctgggcctggacagcgccaatgagaagggcctgtacagaagaggagaggcccagctgctgatgaatgaatttgagagcgccaagggggactttgagaaggtgctggaggtgaacccccagaacaaggccgcccggctgcagatctccatgtgccagaagaaggccaaggagcacaatgaaagagaccggcgcatctatgccaacatgttcaagaagtttgctgagcaggatgccaaggaggaggccaacaaggccatgggcaagaagaccagcgagggcgtgaccaatgagaagggcacagacagccaggccatggaggaggagaagccagagggccacgtgtag

SEQ ID NO: 58987 - DNA, 1374 bp, Artificial Sequence
  derived and/or modified sequence
atgaccaccgacgagggcgccaagaacaacgaggagagccccaccgcaacagtggcagagcagggggaggacataacttccaaaaaggataggggcgtcctgaaaattgttaagcgcgtggggaatggggaagaaacccccatgataggggacaaggtatacgtccactataagggaaaactgtcaaacggaaagaagttcgattcttcccatgatagaaacgagccattcgtattctctctgggaaagggacaggtgataaaagcctgggacattggggtggcaacaatgaaaaaaggcgagatttgccatctgctctgcaagcccgaatatgcctatggcagcgcaggtagcctcccaaagataccatccaacgcgacactcttctttgaaattgaattactggactttaagggtgaagacctgtttgaggatgggggtatcatccgccggactaaacgcaagggggaagggtatagcaatcctaacgaaggtgcaaccgtggagatacatctagagggacggtgcggaggccgcatgttcgactgccgcgacgtggcattcacagttggtgagggggaggatcacgatatcccaatcggaatcgataaggctctggagaagatgcagcgagaagaacagtgtatcttatacctcggaccccgctacggcttcggggaggccggaaaacccaagttcgggattgagccgaacgctgaactaatttatgaggtcaccctgaagagctttgaaaaagctaaggaaagttgggagatggatactaaagaaaagctggagcaggccgccatcgtgaaagagaaggggaccgtttattttaaaggtggtaagtatatgcaggccgtaatccagtatgggaagatcgtgagctggctcgaaatggaatatggcctgtccgaaaaggaatcgaaggcaagcgagagctttctgctggccgccttcctgaatctggccatgtgctacctgaaactgcgcgaatacactaaggccgttgagtgctgcgacaaggccctggggctggacagcgcgaacgagaagggactgtacagacgaggcgaggcacagcttctcatgaacgaattcgaatcagctaaaggcgattttgagaaggtgttggaggtcaacccgcaaaacaaggcggctcggctgcagatatccatgtgccagaagaaagctaaagaacacaatgagcgtgacaggaggatctatgccaacatgtttaagaaatttgccgaacaggacgccaaagaagaagcgaataaagctatgggaaagaaaacatccgagggcgttaccaacgagaaaggaactgattcccaggcgatggaggaggaaaaaccagaagggcacgtctag

SEQ ID NO: 58988 - DNA, 1374 bp, Artificial Sequence
  derived and/or modified sequence
atgaccaccgacgagggcgccaagaacaacgaggagagccccaccgccacagtcgcggagcagggtgaagacatcactagcaagaaagaccggggcgtacttaagattgtcaagagagtggggaatggtgaggaaacacccatgatcggagacaaagtgtacgttcactacaaggggaaactgtccaacggcaagaagtttgatagttctcacgatagaaatgagcctttcgttttctccctggggaaaggacaggtgatcaaagcatgggacatcggagtagcaacaatgaagaagggcgaaatttgccacctgctctgtaaaccagagtacgcttatggcagcgctggttcactgcccaagatcccaagtaacgcgacattattttttgaaatcgaattactcgattttaagggcgaagatctattcgaggacggggggattatccgaagaacaaagaggaaaggggaagggtattctaaccctaatgagggagcaacggttgaaatccatctggagggccgttgcggtggaaggatgttcgactgccgcgatgtcgcattcacagtgggagaaggggaggatcatgatattcccattggtattgataaggcacttgagaaaatgcaacgagaggagcagtgtattctctatctgggccctagatacgggttcggtgaggctggcaaaccgaaatttggaatagaacccaatgctgaactgatctacgaagttaccctcaagtccttcgaaaaggcaaaagagagctgggaaatggatacaaaggaaaaactcgaacaggcagccatcgtcaaggaaaagggcaccgtttattttaaggggggcaagtacatgcaagctgtgatccagtatggcaaaatcgtcagctggcttgagatggaatacggcctgtcagaaaaagagagtaaagcatccgagtccttcttgctcgctgccttcctgaatctcgcgatgtgttatctcaaactccgtgaatatacaaaagcagtggagtgttgtgacaaagctctgggcctggattctgcgaacgaaaaagggctctaccgtaggggggaagcccagttgctcatgaatgagtttgagtccgccaagggcgactttgagaaggtattggaggtgaacccccagaacaaggccgcacgcctgcagatttccatgtgccagaaaaaagcaaaggaacataacgagcgcgaccggcggatttacgctaacatgtttaagaagttcgcagaacaggatgctaaggaggaagctaataaggcgatgggcaagaagacctcagagggagtaaccaacgagaaggggacggattcccaggcaatggaggaggagaagccagagggccacgtgtag

SEQ ID NO: 58989 - DNA, 1374 bp, Artificial Sequence
  derived and/or modified sequence
atgaccaccgacgagggcgccaagaacaacgaggagagccccaccgctaccgtggctgagcagggggaggatattacgtcaaagaaggatcggggggtgttgaaaatcgttaagcgggtcggcaacggggaagagacccccatgattggtgacaaggtctacgtccactacaaaggcaaactttccaacggcaaaaaattcgacagctcccacgaccgtaatgagccctttgttttcagtctcggcaaaggccaggtaatcaaggcgtgggacatcggcgtggccacaatgaagaaaggagaaatttgtcatcttctctgcaaaccagaatatgcgtacggatctgctgggtctctgcccaagatcccatctaatgccacacttttctttgagatcgagctgcttgacttcaagggagaagacttgttcgaagacggggggattatcaggaggacaaagagaaaaggcgagggctatagcaatcctaatgagggagcaactgtcgagatacacttagaaggtaggtgtgggggacgcatgttcgactgccgcgacgtggccttcaccgttggcgaaggggaggatcatgatattccaatcgggatagacaaggcacttgaaaagatgcagagagaagagcaatgtattttatatctcggaccacgatacggatttggtgaagccggcaagcctaagttcggcatcgaacctaatgcggaattgatctacgaagtgactcttaaatcgtttgaaaaagctaaagaaagctgggagatggacactaaagaaaaactagaacaagcagcaatcgttaaagagaaaggaactgtgtactttaaaggtggcaagtacatgcaggcagtgattcagtacggcaagattgtgagctggctcgaaatggaatacgggctgtctgaaaaggaatccaaggcgagcgaatccttcttgctggcagcctttctgaatctagcaatgtgctacctgaagttaagagagtacacaaaggcggtggagtgctgcgataaggctctagggctcgatagcgccaatgaaaagggactgtacagaaggggtgaggcccaattacttatgaacgaatttgagagcgccaagggagactttgagaaagtgttggaggtgaatcctcagaataaagccgcgagactgcagatcagtatgtgtcagaaaaaggccaaagagcacaacgagagggataggaggatttatgcaaacatgttcaagaagttcgccgagcaggacgccaaggaggaagcaaataaagcaatggggaagaagacaagcgaaggcgtcacgaacgaaaagggcactgactcccaggccatggaagaggagaagccagagggtcacgtttag

SEQ ID NO: 58990 - DNA, 1374 bp, Artificial Sequence
  derived and/or modified sequence
atgaccaccgacgagggcgccaagaacaacgaggagagccccaccgcaaccgtggccgaacagggcgaggacattacttctaagaaagatcggggcgtgctaaagatcgttaaacgagtgggcaacggcgaggagacacccatgattggcgacaaggtctatgtacactacaaggggaaactgtccaatggcaagaagtttgactcttctcatgacaggaacgagcctttcgtgttctctctcggaaagggacaggttattaaggcgtgggatattggcgtggctacgatgaagaaaggggaaatctgtcacctactctgcaaaccggaatacgcttatgggtcagccgggtcactccctaaaatcccctcaaacgccacgttgttttttgagatcgaactgctcgacttcaagggagaggacctatttgaagatggcggaatcatccgccgaactaaacggaaaggcgaggggtatagcaatcccaacgagggcgcaaccgtggagattcacctcgagggaaggtgcggcggtagaatgttcgactgtcgggatgtggcctttacggtaggggaaggcgaggaccacgacatcccaatagggattgacaaggcactggagaagatgcagagggaagagcagtgcatcctatatctcggacctcggtacggtttcggcgaggcgggtaagccaaaattcggcattgaaccgaacgcggaattaatatacgaggtgaccctcaaaagctttgaaaaagcgaaggagtcttgggagatggatacaaaggagaaactggagcaagccgctattgtgaaagagaaaggcaccgtctacttcaagggaggtaaatatatgcaggctgtgattcagtacggcaaaattgtatcatggctagagatggagtacggcctgagcgagaaggagagcaaggcttccgagtcttttttgttagccgctttcctgaacctggctatgtgttacctaaaactccgagaatataccaaagcagtggagtgttgcgacaaagctctcggcctggacagtgcaaacgagaaaggcctttacaggcgcggtgaggctcagctgcttatgaatgagtttgaatcagcaaagggagactttgaaaaggtgcttgaggttaatccgcaaaacaaggctgctcgattgcagatttctatgtgtcagaagaaagctaaagaacacaatgagcgagatcgtaggatctatgcaaacatgtttaagaagtttgctgagcaagatgcaaaagaagaagcaaacaaagcaatggggaaaaaaacctccgagggggtcaccaatgaaaaaggtacagacagccaggccatggaagaggaaaagcctgaaggtcatgtgtag

SEQ ID NO: 58991 - DNA, 837 bp, Artificial Sequence
  derived and/or modified sequence
atgttcgactgccgggacgtggccttcaccgtgggcgagggcgaggaccacgatatcccgatcggtatcgataaggcgctggaaaaaatgcaaagggaggagcaatgtatcctctacctcggccctcggtacggcttcggcgaggcaggaaaaccaaaattcggaatcgaaccaaatgccgagctcatctacgaggtgaccctcaaaagcttcgaaaaggctaaggagtcatgggagatggacacaaaggaaaagcttgagcaggctgcgatcgttaaggagaagggcaccgtgtattttaaaggaggcaaatatatgcaggccgttatccaatacgggaaaattgtttcctggctggaaatggaatatggcctgtccgagaaggaatcgaaagcctccgagtcttttttactagctgctttcttgaatttggctatgtgctacttgaaacttcgggaatacacgaaggccgtagaatgctgtgacaaagccctggggcttgattcagcaaacgagaaagggctttaccgaagaggggaggcacagctgttgatgaacgaattcgaatcggcgaagggtgatttcgagaaagtgcttgaggttaacccacagaacaaggccgcacgcctgcagatctcaatgtgccagaaaaaggccaaggaacacaacgaacgtgaccgccgaatttacgctaacatgttcaaaaaatttgccgaacaggacgcgaaggaggaggccaacaaggctatggggaaaaaaaccagcgaaggcgtgaccaacgaaaagggcacagatagccaagccatggaggaggagaaacctgaaggccacgtgtag

SEQ ID NO: 58992 - DNA, 1263 bp, Artificial Sequence
  derived and/or modified sequence
atgaccaccgagcagggcgaggagacccccatgatcggcgacaaggtgtatgtccattataaaggcaagctgagtaacggaaagaaattcgacagttcccacgatagaaatgagccttttgttttttccctggggaagggtcaggtgatcaaggcctgggacatcggagtggccacaatgaagaagggcgaaatctgccacctactctgcaaacctgaatacgcttatggtagtgctggtagcttaccaaagattccatccaatgcaaccctgttctttgaaattgaattgctggatttcaaaggggaagatttgtttgaggatggcgggataatccgacgaactaaaagaaagggcgaaggctattccaaccccaatgagggggcgaccgttgaaattcacttggaggggcgctgcggtggcaggatgtttgactgtcgagacgtagccttcactgtgggagaaggtgaggaccacgacatacccataggcatagacaaagctcttgaaaagatgcagagggaggaacaatgcatcctgtacttgggcccacgctatggtttcggcgaggccggcaagcccaagtttggcatcgagccaaacgccgaattgatttatgaagtcaccctcaagagcttcgaaaaagcaaaggaaagttgggagatggacaccaaggaaaaactggagcaggccgccatcgtcaaggaaaaaggtacagtgtacttcaaaggaggcaagtacatgcaggctgtaatccagtacggcaaaattgtgagttggctcgagatggagtatggcctgtccgagaaagaaagcaaggcatccgaatcatttctgctggcagcttttttgaatctggcaatgtgctacctcaagttgagagaatacaccaaggctgtcgaatgttgtgacaaggccctgggcttggatagtgcaaatgagaaggggctctatagaaggggcgaagctcagcttcttatgaacgagtttgagagcgctaagggtgattttgaaaaggtccttgaggtcaatccccagaacaaagccgccaggttgcagatttcaatgtgccagaaaaaagctaaagagcacaatgagagggatagacgaatctacgcgaatatgtttaaaaaatttgcggaacaagatgctaaggaagaggccaacaaagctatgggaaagaaaaccagcgagggcgtcacaaatgaaaaggggacagacagccaggcaatggaggaagagaagccagaaggccatgtgtag

SEQ ID NO: 58993 - DNA, 1374 bp, Artificial Sequence
  derived and/or modified sequence
atgaccaccgatgaaggcgcaaaaaataatgaagagtccccgaccgccaccgtagctgaacagggtgaggacataacgtctaagaaagacagaggtgtcctaaaaatcgttaaacgggttgggaacggagaagaaacgcccatgattggggacaaagtatatgttcactacaaggggaagctgagcaatggcaagaagtttgacagctcccacgaccggaacgagccctttgtgttttccttaggtaagggccaggtgattaaggcctgggacatcggcgtggccactatgaagaagggagaaatctgtcatcttttatgtaagccggaatacgcttacgggtcagcaggcagcttgcccaaaatcccttccaacgccaccctgttttttgaaatcgaactgctggactttaagggtgaagatctgtttgaagacgggggaattattaggaggacgaagcgaaagggtgaaggctacagcaatccaaatgagggcgcaactgtggaaatccatttggaggggcgatgtggcggaagaatgttcgactgccgcgatgtggcgttcaccgtgggcgagggggaagatcacgacatccccataggaatcgataaggctttggaaaaaatgcaacgtgaggagcagtgtatcctctatctggggcctcgatacggttttggcgaagcgggtaagcccaaattcggcattgaacctaacgccgaactgatctatgaagtgacactgaaaagcttcgaaaaggccaaagaaagctgggaaatggacactaaagaaaagttggaacaggccgctatcgtcaaagaaaagggtacagtgtatttcaaggggggaaagtacatgcaggcagttattcagtatggaaagattgtatcctggctggagatggagtacggcctgtccgagaaggagagtaaggcctccgaatccttcttgctcgctgccttcctgaatctcgccatgtgttatttgaagctcagggaatacaccaaggctgtggaatgctgtgacaaggcactcgggctcgattccgcgaacgaaaagggtctatacaggcgcggagaggctcagttgctgatgaatgagttcgaatcagcaaaaggcgattttgagaaagtgctcgaggttaatcctcaaaataaggccgctcggcttcagatctcaatgtgccaaaagaaagctaaggaacacaacgagcgagataggagaatttacgctaacatgttcaagaagtttgctgaacaggacgcgaaagaggaggccaataaggcaatggggaaaaaaacgtcagagggggtgaccaatgaaaaaggcacggactctcaggctatggaggaggagaagcctgaaggacacgtctag

SEQ ID NO: 58994 - DNA, 1374 bp, Artificial Sequence
  derived and/or modified sequence
atgacaacagatgagggggcaaaaaataatgaagaaagccccacagccaccgtagcagagcagggtgaagacattaccagtaagaaggaccggggtgtgcttaagatcgtcaagcgcgtggggaacggagaggagaccccgatgatcggcgataaagtgtacgttcactacaagggcaagctttccaacggcaagaagtttgacagcagccatgaccggaatgagccctttgtgttctctctcgggaaaggccaggtcatcaaagcatgggacatcggggttgccacaatgaagaagggtgaaatctgtcatctgctgtgcaaaccagagtacgcttatgggagtgcaggctccctgccaaagatacctagcaatgcgactctctttttcgaaatagagcttttggactttaagggagaagacctattcgaggacggtgggatcatccggcgtactaaaaggaagggcgagggttacagcaacccaaatgaaggcgctacggtcgaaattcatctggagggtcgatgcggcggacgcatgtttgactgccgcgatgtggcatttacagttggtgaaggggaggaccacgatatccctatcgggattgataaggcactagaaaagatgcagagggaggaacagtgcatactatatttgggcccacggtatggattcggggaggcagggaaacccaagtttggtattgagccaaacgctgagttaatctacgaagtcaccctgaaatcttttgagaaagctaaagagagttgggaaatggacaccaaggagaaattggagcaggcagctatagtgaaggagaagggaactgtctatttcaaaggcggaaaatatatgcaggccgtcatccagtacggcaaaatcgtctcctggctcgaaatggagtacggcctgtctgagaaggaatctaaggcctcagaatctttcctccttgccgcttttctgaacctggccatgtgttacctgaaactccgagagtatactaaagctgttgagtgctgtgataaagctctggggctggattccgcaaacgaaaaaggcctataccggagaggggaggcccagctgctcatgaacgaatttgaatccgctaagggggatttcgagaaagtgcttgaggttaaccctcaaaataaggcggctaggctccaaattagcatgtgtcagaagaaggcgaaggaacacaacgaacgcgacaggagaatatatgcaaatatgttcaaaaagtttgcagaacaggacgctaaggaagaggctaacaaagctatgggtaaaaagacttctgagggcgtaacaaacgagaagggtaccgacagtcaggccatggaggaagagaaaccagaaggacatgtttag

SEQ ID NO: 58995 - DNA, 1374 bp, Artificial Sequence
  derived and/or modified sequence
atgactaccgacgaaggagcaaaaaacaacgaagagtcccctacagcaaccgttgcagagcagggggaagatattactagtaagaaagatcgaggggtcttgaagatcgtaaaacgtgtgggcaacggggaggaaacaccaatgatcggggataaggtctatgtgcactacaagggaaagcttagtaatggcaaaaagttcgacagtagccatgaccgcaatgaaccctttgtgttttctctcgggaaggggcaggttattaaggcttgggacattggtgtcgctacaatgaagaaaggcgaaatttgtcacctcttgtgcaaacccgaatatgcttatgggtctgccggatcgctgcctaagatcccatctaatgccaccttgttcttcgagatcgaattactcgatttcaaaggagaggacctctttgaagacggcggaatcataagacgaaccaaacggaagggagaggggtattctaatccaaacgaaggagctaccgtcgaaatacacctggaaggccgttgtggcggtcgtatgtttgattgtagagacgttgctttcacagtcggcgagggcgaggaccatgacatccccattggtatagataaagctctagagaaaatgcagagggaggaacaatgcatcctctatttggggcctaggtacggcttcggagaagccggaaaaccaaagttcgggatcgagcccaacgctgagctcatctatgaggtgacgttaaaaagcttcgagaaggccaaggagtcctgggagatggacactaaggaaaagttagagcaagctgctatcgtgaaggagaagggcaccgtatactttaaagggggaaagtacatgcaggccgtaatccaatacggtaagatcgtgtcttggctcgagatggaatacggtctgagtgaaaaggaatccaaggcatctgagtcctttcttcttgctgcttttttgaacttagctatgtgttatctgaagctgcgggagtacactaaggcagtagaatgctgtgacaaagcacttggcctcgattccgccaacgagaaaggcctataccgaagaggggaggctcagttactcatgaatgaattcgagagcgccaaaggggatttcgaaaaggtgctggaagttaatccccagaataaagccgctcggctgcagatttcaatgtgtcagaaaaaggcaaaggagcacaacgagcgggatcggagaatttatgccaatatgtttaagaagtttgcagagcaagacgcaaaagaggaagccaataaggccatggggaaaaagacttccgagggagtgactaatgaaaagggcacagactcccaggctatggaagaagaaaagcccgagggccatgtttag

SEQ ID NO: 58996 - DNA, 1374 bp, Artificial Sequence
  derived and/or modified sequence
atgacaactgatgaaggggctaagaataacgaggagagcccaacagcaactgtggcagaacaaggggaagacatcacctccaaaaaagacaggggagtgctgaagatcgtgaagcgcgtgggcaacggtgaggagacgcctatgatcggcgacaaagtctacgtgcactacaaaggcaagctgagtaatggcaagaaattcgatagctcacatgacaggaatgaaccattcgtgttttccctggggaaggggcaagtaataaaggcctgggacataggggtggcaaccatgaagaaaggcgagatttgccacctgctgtgtaagccagaatatgcatatggctccgctggttccctgcccaagatcccgagtaatgcaactctattcttcgaaattgagctcctagacttcaaaggcgaggacctgttcgaggacgggggaatcatacgcagaaccaagagaaagggggagggctacagtaaccctaacgagggcgcaacggtagaaattcacttagagggcagatgcgggggtcgtatgtttgactgcagggacgtggccttcacagtgggcgagggagaggaccacgatatccctatcgggatcgacaaagcgctcgagaaaatgcagcgggaggagcagtgcattctgtatctgggtcctcgatatgggttcggggaggctggaaaacccaagtttggaatcgagcctaacgcagaactgatttacgaagtcactctcaagagcttcgaaaaggccaaagagagctgggagatggatacaaaagaaaaattggaacaagccgcaatcgtcaaagaaaaggggactgtatatttcaaaggcggaaaatacatgcaagcagtaattcaatatggcaaaattgttagttggttagaaatggagtacggtctgtctgagaaagagtctaaagccagtgagtctttcctgctggcggcatttttgaaccttgcaatgtgttatctgaaactccgggaatatactaaagcagtcgagtgctgcgacaaagcgttaggcctagacagtgctaacgagaaagggctttatcgcaggggggaggctcagctgttaatgaacgaattcgagtccgccaagggggactttgagaaagtgctcgaagtgaacccacagaacaaggcagccagattgcagatctcaatgtgtcagaaaaaagcgaaggagcataacgaaagagatcgtagaatatatgccaatatgttcaaaaaattcgccgaacaagacgcaaaggaggaagcgaataaggcaatggggaaaaagacaagcgagggcgttactaacgaaaagggcacagattctcaggccatggaggaggagaagcccgagggacacgtgtag

SEQ ID NO: 58997 - DNA, 837 bp, Artificial Sequence
  derived and/or modified sequence
atgtttgactgcagagatgtggcctttactgtgggggagggcgaagaccatgacataccgataggcattgataaagcgctggaaaaaatgcaaagagaggaacaatgtatcttatacctcggacctcgatatggttttggggaggcaggcaagccaaaatttggaattgagccgaacgccgaactgatctacgaggtgactctgaagtccttcgaaaaagctaaagagtcatgggagatggataccaaggagaagttagagcaggcagccattgtgaaagagaagggaaccgtctatttcaaaggagggaagtatatgcaggctgttattcaatacgggaagatcgtgagctggctggagatggaatacggcctgagtgagaaggaatcaaaggcaagtgagagcttcctcctggcggctttcctgaacctggcaatgtgttacctgaagcttcgtgagtatacaaaagctgttgagtgctgtgataaggcactaggactcgactctgccaacgaaaaagggctctatcgcagaggcgaggcacagcttctgatgaacgagttcgagagtgccaagggtgacttcgaaaaggtgcttgaagtgaatccccagaacaaagcagcacgtctgcagataagcatgtgtcaaaagaaagcaaaggagcacaatgagagggaccgcaggatctatgcgaacatgtttaaaaaattcgccgaacaggatgcaaaggaagaggcaaacaaagcgatgggaaagaagacatctgaaggggtgaccaatgagaagggcactgattcccaagcaatggaggaggagaaaccagaaggacacgtatag

SEQ ID NO: 58998 - DNA, 1263 bp, Artificial Sequence
  derived and/or modified sequence
atgactacggagcagggcgaggaaactcccatgatcggcgataaggtgtatgtccattacaagggcaagctatccaatggcaagaagttcgacagctcccacgatcgcaacgagccatttgttttcagtctgggaaaaggacaggtcattaaagcttgggacattggggtcgcaaccatgaagaagggggaaatttgtcatctgctctgtaagccagaatacgcttacggttccgctggtagcttacctaagattccgagtaacgccacactattcttcgaaatcgagctactcgatttcaaaggcgaagacctcttcgaagacggcggtatcataagacgtactaagcggaaaggcgaaggttatagcaatcccaatgagggggctacagttgaaatccacctggagggcagatgcgggggaaggatgtttgattgccgggacgtggcgttcacagtcggggaaggcgaggaccatgatattcccattgggatcgataaggctttagaaaaaatgcagagggaggagcagtgcatcctctacttggggcctagatatggctttggagaggccggaaagcctaagttcggaattgagccaaacgcagagcttatctatgaggttaccctgaaatcatttgagaaggccaaggaatcctgggagatggacaccaaggaaaagctcgagcaagctgcgattgtcaaagagaaaggcacagtttatttcaaagggggaaaatatatgcaggcagtgattcaatacgggaagatagtttcatggctggagatggaatacggactgtctgaaaaagaatctaaggcttccgagagttttttactggcagctttcttgaacctcgcaatgtgttatcttaagctccgagaatacacaaaggcagtggagtgctgcgataaagccttgggattggacagcgctaatgaaaaaggcctctaccgcaggggcgaggcgcaactgctgatgaacgaatttgagagcgcgaagggcgattttgagaaggtgcttgaagttaatccacagaacaaggccgcacggcttcagattagcatgtgtcagaaaaaggccaaagaacataatgaacgggataggagaatctatgctaacatgttcaagaagtttgccgagcaagacgcaaaagaggaagcgaataaggctatgggtaagaagacatctgaaggcgttaccaacgagaaggggacagactcacaagccatggaggaggagaagccggagggtcacgtgtag

SEQ ID NO: 58999 - DNA, 1374 bp, Artificial Sequence
  derived and/or modified sequence
atgaccaccgacgagggcgccaagaacaacgaggagagccccaccgccaccgtggccgagcagggcgaggacatcaccagcaagaaggacagaggcgtgctgaagatcgtgaagagagtgggcaacggcgaggagacccccatgatcggcgacaaggtgtacgtgcactacaagggcaagctgagcaacggcaagaagttcgacagcagccacgacagaaacgagcccttcgtgttcagcctgggcaagggccaggtgatcaaggcctgggacatcggcgtggccaccatgaagaagggcgagatctgccacctgctgtgcaagcccgagtacgcctacggcagcgccggcagcctgcccaagatccccagcaacgccaccctgttcttcgagatcgagctgctggacttcaagggcgaggacctgttcgaggacggcggcatcatcagaagaaccaagagaaagggcgagggctacagcaaccccaacgagggcgccaccgtggagatccacctggagggcagatgcggcggcagaatgttcgactgcagagacgtggccttcaccgtgggcgagggcgaggaccacgacatccccatcggcatcgacaaggccctggagaagatgcagagagaggagcagtgcatcctgtacctgggccccagatacggcttcggcgaggccggcaagcccaagttcggcatcgagcccaacgccgagctgatctacgaggtgaccctgaagagcttcgagaaggccaaggagagctgggagatggacaccaaggagaagctggagcaggccgccatcgtgaaggagaagggcaccgtgtacttcaagggcggcaagtacatgcaggccgtgatccagtacggcaagatcgtgagctggctggagatggagtacggcctgagcgagaaggagagcaaggccagcgagagcttcctgctggccgccttcctgaacctggccatgtgctacctgaagctgagagagtacaccaaggccgtggagtgctgcgacaaggccctgggcctggacagcgccaacgagaagggcctgtacagaagaggcgaggcccagctgctgatgaacgagttcgagagcgccaagggcgacttcgagaaggtgctggaggtgaacccccagaacaaggccgccagactgcagatcagcatgtgccagaagaaggccaaggagcacaacgagagagacagaagaatctacgccaacatgttcaagaagttcgccgagcaggacgccaaggaggaggccaacaaggccatgggcaagaagaccagcgagggcgtgaccaacgagaagggcaccgacagccaggccatggaggaggagaagcccgagggccacgtgtag

SEQ ID NO: 59000 - DNA, 837 bp, Artificial Sequence
  derived and/or modified sequence
atgttcgactgcagagacgtggccttcaccgtgggcgagggcgaggaccacgacatccccatcggcatcgacaaggccctggagaagatgcagagagaggagcagtgcatcctgtacctgggccccagatacggcttcggcgaggccggcaagcccaagttcggcatcgagcccaacgccgagctgatctacgaggtgaccctgaagagcttcgagaaggccaaggagagctgggagatggacaccaaggagaagctggagcaggccgccatcgtgaaggagaagggcaccgtgtacttcaagggcggcaagtacatgcaggccgtgatccagtacggcaagatcgtgagctggctggagatggagtacggcctgagcgagaaggagagcaaggccagcgagagcttcctgctggccgccttcctgaacctggccatgtgctacctgaagctgagagagtacaccaaggccgtggagtgctgcgacaaggccctgggcctggacagcgccaacgagaagggcctgtacagaagaggcgaggcccagctgctgatgaacgagttcgagagcgccaagggcgacttcgagaaggtgctggaggtgaacccccagaacaaggccgccagactgcagatcagcatgtgccagaagaaggccaaggagcacaacgagagagacagaagaatctacgccaacatgttcaagaagttcgccgagcaggacgccaaggaggaggccaacaaggccatgggcaagaagaccagcgagggcgtgaccaacgagaagggcaccgacagccaggccatggaggaggagaagcccgagggccacgtgtag

SEQ ID NO: 59001 - DNA, 1263 bp, Artificial Sequence
  derived and/or modified sequence
atgaccaccgagcagggcgaggagacccccatgatcggcgacaaggtgtacgtgcactacaagggcaagctgagcaacggcaagaagttcgacagcagccacgacagaaacgagcccttcgtgttcagcctgggcaagggccaggtgatcaaggcctgggacatcggcgtggccaccatgaagaagggcgagatctgccacctgctgtgcaagcccgagtacgcctacggcagcgccggcagcctgcccaagatccccagcaacgccaccctgttcttcgagatcgagctgctggacttcaagggcgaggacctgttcgaggacggcggcatcatcagaagaaccaagagaaagggcgagggctacagcaaccccaacgagggcgccaccgtggagatccacctggagggcagatgcggcggcagaatgttcgactgcagagacgtggccttcaccgtgggcgagggcgaggaccacgacatccccatcggcatcgacaaggccctggagaagatgcagagagaggagcagtgcatcctgtacctgggccccagatacggcttcggcgaggccggcaagcccaagttcggcatcgagcccaacgccgagctgatctacgaggtgaccctgaagagcttcgagaaggccaaggagagctgggagatggacaccaaggagaagctggagcaggccgccatcgtgaaggagaagggcaccgtgtacttcaagggcggcaagtacatgcaggccgtgatccagtacggcaagatcgtgagctggctggagatggagtacggcctgagcgagaaggagagcaaggccagcgagagcttcctgctggccgccttcctgaacctggccatgtgctacctgaagctgagagagtacaccaaggccgtggagtgctgcgacaaggccctgggcctggacagcgccaacgagaagggcctgtacagaagaggcgaggcccagctgctgatgaacgagttcgagagcgccaagggcgacttcgagaaggtgctggaggtgaacccccagaacaaggccgccagactgcagatcagcatgtgccagaagaaggccaaggagcacaacgagagagacagaagaatctacgccaacatgttcaagaagttcgccgagcaggacgccaaggaggaggccaacaaggccatgggcaagaagaccagcgagggcgtgaccaacgagaagggcaccgacagccaggccatggaggaggagaagcccgagggccacgtgtag

SEQ ID NO: 59002 - protein, 266 aa, Artificial Sequence
  derived and/or modified sequence
LLMKVPRTMKKAPQPLLLSRERILPPKDRGVLKIVKRVGNGEETPMIGDKVYVHYKGKLSNGKKFDSSHDRNEPFVFSLGKGQVIKAWDIGVATMKKGEICHLLCKPEYAYGSAGSLPKIPSNATLFFEIELLDFKGEDLFEDGGIIRRTKRKGEGYSNPNEGATVEIHLEGRCGGRMFDCRDVAFTVGEGEDHDIPIGIDKALEKMQREEQCILYLGPRPKNPGRWIPKKNWSRLPLSKRREPYTSRCVSPYAILSISKNLFKCW

SEQ ID NO: 59003 - protein, 268 aa, Artificial Sequence
  derived and/or modified sequence
MTTDEGAKNNEESPTATVAEQGEDITSKKDRGVLKIVKRVGNGEETPMIGDKVYVHYKGKLSNGKKFDSSHDRNEPFVFSLGKGQVIKAWDIGVATMKKGEICHLLCKPEYAYGSAGSLPKIPSNATLFFEIELLDFKGEDLFEDGGIIRRTKRKGEGYSNPNEGATVEIHLEGRCGGRMFDCRDVAFTVGEGEDHDIPIGIDKALEKMQREEQCILYLGPRPKNPGRWIPKKNWSRLPLSKRREPYTSRCVSPYAILSISKNLFKCW

SEQ ID NO: 59004 - DNA, 7220 bp, Artificial Sequence
  derived and/or modified sequence
ctactgatgaaggtgccaagaacaatgaagaaagccccacagccactgttgctgagcagggagaggatattacctccaaaagacaggggagtattaaagattgtcaaaagagtggggaatggtgaggaaacgccgatgattggagacaaagtttatgtccattacaaaggaaaattgtcaaatggaaagaagtttgattccagtcatgatagaaatgaaccatttgtctttagtcttggcaaaggccaagtcatcaaggcatgggacattggggtggctaccatgaagaaaggagagatatgccatttactgtgcaaaccagaatatgcatatggctcggctggcagtctccctaaaattccctcgaatgcaactctcttttttgagattgagctccttgatttcaaaggagaggatttatttgaagatggaggcattatccggagaaccaaacggaaaggagagggatattcaaatccaaacgaaggagcaacagtagaaatccacctggaaggccgctgtggtggaaggatgtttgactgcagagatgtggcattcactgtgggcgaaggagaagaccacgacattccaattggaattgacaaagctctggagaaaatgcagcgggaagaacaatgtattttatatcttggaccaaggccaaagaatcctgggagatggataccaaagaaaaattggagcaggctgccattgtcaaagagaagggaaccgtatacttcaaggtgtgtgagtccctatgcaatcctttccatctcaaagaatttattcaagtgttggtgaattgtgctgatattccctactctgaattttgtcaacactgcttggtaagaataagctgcaatttttataaatctgtcattttcaatatgaaaaatggtgagaaaacaatcatgtggaaaaaaaaaaaagtacagattcctcttttacacattctgctctagattgtaaccttccatacaggcagaccaggtctggcatccccacccaccacagtatcactcactcctaaagcatcttgcttggtacatagttggcactcaacaagtgtttttggaatgaaaaaagaatgaatagaataattgttagcaaagaatggaattcataagggtaagtttcacatcatttttctttcttcctttttttttttttgtatgagagacagggtctccctttctttcccaggctggtctcaaacttctagcctcaagcaatcctcccacctcagcttcccaaagtgctgagattacaggcgtgagccactgcaccgggcccatcttcctttagactgtcttgatgaagtcactagagcatatgataaaaggagagaggacatgcacaaatttcaaaacaaactgacaggagagtattgattgcttctaatggccaagatgattcctgcacacttgcttttatgaggaatctccggatattcctgaatgatattcatcataaattgcttctcagaaacccttcttggagcaactaggagtgtgatattttctcacttagatcttaaacctctagatgtaagaaaaaaagaaaccgcccttcattctgttttaatcagtgttctacccattgcttccccaccccaaatatatgccttctccatgtcaagcagaaagggcttagtgatgagaattagagggagaatgggagttctgtcaaggtttctttcgttttctgccactgcaatacagaaattagatgtttttcagcagtataaagcagtgaggcataagtgtactttaacaagtctttatggggcatctgctataagacatgctattattaagttacaaccttgtcaggagggaggagtggcaatgttaatccaaatgaaacaactagagaattatgtaagaatatataatcaacccaaaattaacacagccagagggcaccatgtgttttcagaatttgagctgagacaatattgggtcatgaaatcagttttgtggaagtgtattgcaatatgttataaggatcagttttgttgcataaaactttgcttgtgtatgagtaagtactggattgcatatttcttactgtgggtggtattcaaacaaattttaaatcatgggtttagataagtataaatatataaatatgttatttatcattatttactatgtatactaaactcttatggatcaccagaaagcatgggggtatgatagaataagctcagaattgggaaaaatgggctttattgctcttcaaatgatttagtcatttaaggtccaaagaggttatattttcaagtgaaaaataggggagttagatgttccccaagtttctttccagcctgaatttctgtgagtttctaaactctcaagaacaagtgttatttttttggttttgttttgtttttaattctaattgaggtatattggatacttctaaactattcaagtaagattccaagtgggttatttgtatatccaaatacataatacactagagggaaaaatgtttctacaaaatttcttaagatcgtgagtccttaacagtattttctatatttccgaagtccataaaaatccttaactatattttatatatttcctcaatacttccaaatagaatattaacagtttgggaagatttgaggcttttggcctttgactagaattatatcgattcagtgtagtaaaacagctcagctattcagaggctctaatcggtgctatgatacagaattttggagaacattattggtaatgaaataatgttatgaagccatctgtcatatagctgtgttctgaatatatacagagagatggccagaattagtgatcagtagcagaaagcaatgagtgtctgtacagttacttaactttgttgcttatcagcatcacaactgcaagagtgatactattatgaacctacttaaaattaccaatctttggataaaatctggatcagcagtcacacacatggaaaaaattatttttaacatggaatttgataggcaaaatttttcaaaacattagtccattggggaaaaattaatgaaaggttcaaaaccactgacctgagacttttctcccagaatgtctctgaacattttgtaccactaaaaacttccctggaggcacctttataattataggtaaaagatcccagcagtagtcctagcgttagctgtaaaacttcaaaatggttagtagatagtttcctgtacatattcccttcccaactcagggcaggtttcaatctgccatactgccctcccgggccttgtctttccagggtgtctgacttggcatgttatgcatttgcacagagtccagatgtgtaggtgagagcagagatgggctgaactaaagatctgtatttcatgccatctgcatattggaattctgtttccattgatctgttggtttggtttatacctaaatgggtaaagcctctctcctgagtaggattgaattgtactcagcttttaagtgggaatgattttgccattgaagatgtaaagtcctcatttcaacctctgaatactaaagagaagaaaaatagagaactctatttggctctgaaaataattattaagtacaggtaacagcataatattaagccaggcattgtgcaagcgagttaaacagacacgatttttgccctcatagctgacagtgttctgcaggacaggagcattaactcacacctggtcagtgtttttcttttttctgacttggcagcagagtggcaagaaggctaagaacactgaagtgatgtgggattcttgcgcccccttgtgcttctcctgggaagaaagcatttctaaaacaaactagttgaggagaattgttcaacctctaaactcttcagataaatcgggctttgctatattttcaccacccttgctgttccaagataccagtaatgtgatttagaaacaagccgtttatgactctaggatttgatgttttaaaaaaaattcctaagaagagtccaccctgtctttcatctctttcctttagtgcagaatttttcaacctcagtactatcaacatttggagtgggataattcttgattgtgtggggctgtcttgtgcattgtagaatatttagcagcattcctggcctctgcccattagatgccagtagcatcctacccagttatgacaactaaaaatgcctccagacctgccaggtgttccctggggggcaaaatcaccccccagttgagaactgctttagtacctcagaagcagggagtacaagacagacttttcgctaattggaagttgaagtctaaataaagttacatgatatatatgcaagagctttcaaaaaattaaaatgccctatgtgaaggaactattaagaagtctaatacctgttttttgtgttttgttttgttttaccatggccttctaccattctgattattcagaacttattgaaatgttaagatctaggtttttgtcctccctggctcttcttttctttccctatacaatatattaggagataatcagaaaagttaagttaatcaatgcattagagagggaggaggagagaggatgaagaaatgaggcatgacaggggaaatgcctgtccttcctatctcatctcagtgaaacaacacttttcatttccacccacacattttttgctcccaatgatagcaaaaggttttgttgttggtattgtttttagagagagagggtcttactctgtcacccaggctggagtgcagtggcacaagcatagctaactgcagcttcgaactcctggacttaagagatcctcctgcctcagcttcccaaagtgctgggactataggcgtgagccaccacaccactttagaaaaagtcttgattccatatttacattcctttgatttcaatatttactcaacaaacctttattaaagacctcttggtgctaaaccctgaatattccaaaagggagaggacaatgctgcctgtcctcaaagaccagcaagagaaaaggcagtgacagaaagaaaatgccgacctgaaactggtgaggactttattcttttttttttgtagcatccaaaaaaggagtggtaggcctaagactatgacaaaatttaagtattgtcttagcttgggctgccacagtaaaataccatacactgggtggcttcaacaacaggaatttacttctggagactgtaagtcccagatcaaggtgttagcaggatcagtgtctggggagggcctctcctctggttccttgtagctcccttcttgctgtgttctcacatggcctttccacatgcatgtgagtggagagagggcagagggcagcaagcacccgagtttcttcttataaaggctctaatcccatcatgaggccccaccctcatgaccacatctaacctaattccctccccaaatgctccatctgcaaatatcacattcggggtgagggcttcaacataggaatttaggatgggggacacaattcagtccatagcaaatctaatttcctcaagaatttcagcatttaaaataaaatgccctggtttcgtgttcttatgaatgacctgtatcacacacttctgaggcagagagggtgacagactttgattttagtgccagtcttccctctcctaagtgagtgacttgggaagaaggatgttcgagggatgtagcctggccctcattcacacccaggccctccagctggaacaggtctgccccatcttcatcaccagaaaatccacaccagggcttcctttctacaggcagagctcgtttcttacatcacccacttgaagtcctgtatcacaggcatgtcctcttagacctgctctatggtttttctcttactcagactccttgggtgagggttggagtatttgtggggagagacaactcggcagtgagatgtacgcgctgcttgggctgtggtaaatcctagtaacatggtcttaacactgttggtcaggcattgaatttaatgtcctaataggtctggctgctcctctgccatctggcaggatgtatcatctgtggttttgagcttatcacctcctcaaaggagaatccccacttgtactcctgtttctatttgcgtatttaccagcgattccccagtgctttcatttaccttaaaatcacagtggacacattgtctcagccctggaggggttttgttttgttttgttttgttttgttttgtttttgaggagtctcgctctgtcacccaggctggagtgcagtggcatgatcttggctcactgcaacctctgcctcttaggttcaagcagttctcctgcctcagcctcctaagtagccgggattacaggcatatgccaccatgcctggctcatttttgtatttttagtagagacggccaggctggtctcgaactcctgacctcaggtgatccacctgtctcggcctccaaagtgctgggattacaggtatgagccactgtgctcagcccccagcgtttctcatatgagcatgtatatatatatatattatatatatattatatatgtttatatttatatatattatatataactgacagacctttctgatgtatattgttttatagttgttatttatgttgtatgctactatccaactattcatattcccattgcctatagatcaggggtcagcaaactacagtttgctggccaaatctggtccctgcctgtttttgtaagtacagtttaactgaaacacagctgcacccattgatttacatactgtctagagcagcttttgcactacaaatgataagaatttagtagttgcaacagagactggttcaaataggattggctgtgtttggaactagcacttgccagaatgtaatatttgctgtgaagtgctgaaaagaaaagtaacttccttttcatttttttagtggcatagtctaaaactgctcacaatccttttgaaagactaaagaataggccaggtgtggtggctcatgcctgtaatcccagcactttgggaggccaaggcaggcggatcacaaggtcaggagttcaagaccagcctggccaacatagtgaaacgctgtctctactaaaaatacaaaaaaaaatagctgggcttggtggcggccacctgtagtccccagctactcgggaggctgaggcaggagaatcgctggaacccgggaggcggaggttgcagtgagctgagatggcgccattgcactccagccctggagacagtgcgagactgtgtctc

SEQ ID NO: 59005 - DNA, 7384 bp, Artificial Sequence
  derived and/or modified sequence
gattcgggccggctcgcgggcgctgccagtctcgggcggcggtgtccggcgcgcgggcggcctgctgggcgggctgaagggttagcggagcacgggcaaggcggagagtgacggagtcggcgagcccccgcggcgacaggttctctacttaaaagacaatgactactgatgaaggtgccaagaacaatgaagaaagccccacagccactgttgctgagcagggagaggatattacctccaaaaaagacaggggagtattaaagattgtcaaaagagtggggaatggtgaggaaacgccgatgattggagacaaagtttatgtccattacaaaggaaaattgtcaaatggaaagaagtttgattccagtcatgatagaaatgaaccatttgtctttagtcttggcaaaggccaagtcatcaaggcatgggacattggggtggctaccatgaagaaaggagagatatgccatttactgtgcaaaccagaatatgcatatggctcggctggcagtctccctaaaattccctcgaatgcaactctcttttttgagattgagctccttgatttcaaaggagaggatttatttgaagatggaggcattatccggagaaccaaacggaaaggagagggatattcaaatccaaacgaaggagcaacagtagaaatccacctggaaggccgctgtggtggaaggatgtttgactgcagagatgtggcattcactgtgggcgaaggagaagaccacgacattccaattggaattgacaaagctctggagaaaatgcagcgggaagaacaatgtattttatatcttggaccaaggccaaagaatcctgggagatggataccaaagaaaaattggagcaggctgccattgtcaaagagaagggaaccgtatacttcaaggtgtgtgagtccctatgcaatcctttccatctcaaagaatttattcaagtgttggtgaattgtgctgatattccctactctgaattttgtcaacactgcttggtaagaataagctgcaatttttataaatctgtcattttcaatatgaaaaatggtgagaaaacaatcatgtggaaaaaaaaaaaagtacagattcctcttttacacattctgctctagattgtaaccttccatacaggcagaccaggtctggcatccccacccaccacagtatcactcactcctaaagcatcttgcttggtacatagttggcactcaacaagtgtttttggaatgaaaaaagaatgaatagaataattgttagcaaagaatggaattcataagggtaagtttcacatcatttttctttcttcctttttttttttttgtatgagagacagggtctccctttctttcccaggctggtctcaaacttctagcctcaagcaatcctcccacctcagcttcccaaagtgctgagattacaggcgtgagccactgcaccgggcccatcttcctttagactgtcttgatgaagtcactagagcatatgataaaaggagagaggacatgcacaaatttcaaaacaaactgacaggagagtattgattgcttctaatggccaagatgattcctgcacacttgcttttatgaggaatctccggatattcctgaatgatattcatcataaattgcttctcagaaacccttcttggagcaactaggagtgtgatattttctcacttagatcttaaacctctagatgtaagaaaaaaagaaaccgcccttcattctgttttaatcagtgttctacccattgcttccccaccccaaatatatgccttctccatgtcaagcagaaagggcttagtgatgagaattagagggagaatgggagttctgtcaaggtttctttcgttttctgccactgcaatacagaaattagatgtttttcagcagtataaagcagtgaggcataagtgtactttaacaagtctttatggggcatctgctataagacatgctattattaagttacaaccttgtcaggagggaggagtggcaatgttaatccaaatgaaacaactagagaattatgtaagaatatataatcaacccaaaattaacacagccagagggcaccatgtgttttcagaatttgagctgagacaatattgggtcatgaaatcagttttgtggaagtgtattgcaatatgttataaggatcagttttgttgcataaaactttgcttgtgtatgagtaagtactggattgcatatttcttactgtgggtggtattcaaacaaattttaaatcatgggtttagataagtataaatatataaatatgttatttatcattatttactatgtatactaaactcttatggatcaccagaaagcatgggggtatgatagaataagctcagaattgggaaaaatgggctttattgctcttcaaatgatttagtcatttaaggtccaaagaggttatattttcaagtgaaaaataggggagttagatgttccccaagtttctttccagcctgaatttctgtgagtttctaaactctcaagaacaagtgttatttttttggttttgttttgtttttaattctaattgaggtatattggatacttctaaactattcaagtaagattccaagtgggttatttgtatatccaaatacataatacactagagggaaaaatgtttctacaaaatttcttaagatcgtgagtccttaacagtattttctatatttccgaagtccataaaaatccttaactatattttatatatttcctcaatacttccaaatagaatattaacagtttgggaagatttgaggcttttggcctttgactagaattatatcgattcagtgtagtaaaacagctcagctattcagaggctctaatcggtgctatgatacagaattttggagaacattattggtaatgaaataatgttatgaagccatctgtcatatagctgtgttctgaatatatacagagagatggccagaattagtgatcagtagcagaaagcaatgagtgtctgtacagttacttaactttgttgcttatcagcatcacaactgcaagagtgatactattatgaacctacttaaaattaccaatctttggataaaatctggatcagcagtcacacacatggaaaaaattatttttaacatggaatttgataggcaaaatttttcaaaacattagtccattggggaaaaattaatgaaaggttcaaaaccactgacctgagacttttctcccagaatgtctctgaacattttgtaccactaaaaacttccctggaggcacctttataattataggtaaaagatcccagcagtagtcctagcgttagctgtaaaacttcaaaatggttagtagatagtttcctgtacatattcccttcccaactcagggcaggtttcaatctgccatactgccctcccgggccttgtctttccagggtgtctgacttggcatgttatgcatttgcacagagtccagatgtgtaggtgagagcagagatgggctgaactaaagatctgtatttcatgccatctgcatattggaattctgtttccattgatctgttggtttggtttatacctaaatgggtaaagcctctctcctgagtaggattgaattgtactcagcttttaagtgggaatgattttgccattgaagatgtaaagtcctcatttcaacctctgaatactaaagagaagaaaaatagagaactctatttggctctgaaaataattattaagtacaggtaacagcataatattaagccaggcattgtgcaagcgagttaaacagacacgatttttgccctcatagctgacagtgttctgcaggacaggagcattaactcacacctggtcagtgtttttcttttttctgacttggcagcagagtggcaagaaggctaagaacactgaagtgatgtgggattcttgcgcccccttgtgcttctcctgggaagaaagcatttctaaaacaaactagttgaggagaattgttcaacctctaaactcttcagataaatcgggctttgctatattttcaccacccttgctgttccaagataccagtaatgtgatttagaaacaagccgtttatgactctaggatttgatgttttaaaaaaaattcctaagaagagtccaccctgtctttcatctctttcctttagtgcagaatttttcaacctcagtactatcaacatttggagtgggataattcttgattgtgtggggctgtcttgtgcattgtagaatatttagcagcattcctggcctctgcccattagatgccagtagcatcctacccagttatgacaactaaaaatgcctccagacctgccaggtgttccctggggggcaaaatcaccccccagttgagaactgctttagtacctcagaagcagggagtacaagacagacttttcgctaattggaagttgaagtctaaataaagttacatgatatatatgcaagagctttcaaaaaattaaaatgccctatgtgaaggaactattaagaagtctaatacctgttttttgtgttttgttttgttttaccatggccttctaccattctgattattcagaacttattgaaatgttaagatctaggtttttgtcctccctggctcttcttttctttccctatacaatatattaggagataatcagaaaagttaagttaatcaatgcattagagagggaggaggagagaggatgaagaaatgaggcatgacaggggaaatgcctgtccttcctatctcatctcagtgaaacaacacttttcatttccacccacacattttttgctcccaatgatagcaaaaggttttgttgttggtattgtttttagagagagagggtcttactctgtcacccaggctggagtgcagtggcacaagcatagctaactgcagcttcgaactcctggacttaagagatcctcctgcctcagcttcccaaagtgctgggactataggcgtgagccaccacaccactttagaaaaagtcttgattccatatttacattcctttgatttcaatatttactcaacaaacctttattaaagacctcttggtgctaaaccctgaatattccaaaagggagaggacaatgctgcctgtcctcaaagaccagcaagagaaaaggcagtgacagaaagaaaatgccgacctgaaactggtgaggactttattcttttttttttgtagcatccaaaaaaggagtggtaggcctaagactatgacaaaatttaagtattgtcttagcttgggctgccacagtaaaataccatacactgggtggcttcaacaacaggaatttacttctggagactgtaagtcccagatcaaggtgttagcaggatcagtgtctggggagggcctctcctctggttccttgtagctcccttcttgctgtgttctcacatggcctttccacatgcatgtgagtggagagagggcagagggcagcaagcacccgagtttcttcttataaaggctctaatcccatcatgaggccccaccctcatgaccacatctaacctaattccctccccaaatgctccatctgcaaatatcacattcggggtgagggcttcaacataggaatttaggatgggggacacaattcagtccatagcaaatctaatttcctcaagaatttcagcatttaaaataaaatgccctggtttcgtgttcttatgaatgacctgtatcacacacttctgaggcagagagggtgacagactttgattttagtgccagtcttccctctcctaagtgagtgacttgggaagaaggatgttcgagggatgtagcctggccctcattcacacccaggccctccagctggaacaggtctgccccatcttcatcaccagaaaatccacaccagggcttcctttctacaggcagagctcgtttcttacatcacccacttgaagtcctgtatcacaggcatgtcctcttagacctgctctatggtttttctcttactcagactccttgggtgagggttggagtatttgtggggagagacaactcggcagtgagatgtacgcgctgcttgggctgtggtaaatcctagtaacatggtcttaacactgttggtcaggcattgaatttaatgtcctaataggtctggctgctcctctgccatctggcaggatgtatcatctgtggttttgagcttatcacctcctcaaaggagaatccccacttgtactcctgtttctatttgcgtatttaccagcgattccccagtgctttcatttaccttaaaatcacagtggacacattgtctcagccctggaggggttttgttttgttttgttttgttttgttttgtttttgaggagtctcgctctgtcacccaggctggagtgcagtggcatgatcttggctcactgcaacctctgcctcttaggttcaagcagttctcctgcctcagcctcctaagtagccgggattacaggcatatgccaccatgcctggctcatttttgtatttttagtagagacggccaggctggtctcgaactcctgacctcaggtgatccacctgtctcggcctccaaagtgctgggattacaggtatgagccactgtgctcagcccccagcgtttctcatatgagcatgtatatatatatatattatatatatattatatatgtttatatttatatatattatatataactgacagacctttctgatgtatattgttttatagttgttatttatgttgtatgctactatccaactattcatattcccattgcctatagatcaggggtcagcaaactacagtttgctggccaaatctggtccctgcctgtttttgtaagtacagtttaactgaaacacagctgcacccattgatttacatactgtctagagcagcttttgcactacaaatgataagaatttagtagttgcaacagagactggttcaaataggattggctgtgtttggaactagcacttgccagaatgtaatatttgctgtgaagtgctgaaaagaaaagtaacttccttttcatttttttagtggcatagtctaaaactgctcacaatccttttgaaagactaaagaataggccaggtgtggtggctcatgcctgtaatcccagcactttgggaggccaaggcaggcggatcacaaggtcaggagttcaagaccagcctggccaacatagtgaaacgctgtctctactaaaaatacaaaaaaaaatagctgggcttggtggcggccacctgtagtccccagctactcgggaggctgaggcaggagaatcgctggaacccgggaggcggaggttgcagtgagctgagatggcgccattgcactccagccctggagacagtgcgagactgtgtctc

SEQ ID NO: 59006 - DNA, 801 bp, Artificial Sequence
  derived and/or modified sequence
cttcttatgaaggtcccaaggaccatgaagaaggcacctcagccccttctgctcagcagagagaggatcctcccacccaaagacagaggagtgctgaaaatagtaaagcgagtcggcaacggggaagagacccctatgatcggggacaaggtctatgttcactataaagggaagctgtcgaatggcaagaaattcgacagtagtcacgacagaaacgagcctttcgttttctctctcgggaaaggtcaagtaattaaagcgtgggacataggcgtcgctaccatgaagaagggcgaaatctgtcacctcctatgcaagccagaatacgcctacgggagtgcaggtagcttgcccaaaattccctcgaacgccacgctcttttttgaaattgaacttcttgacttcaagggggaagatttgttcgaagatggtggcattatcagaaggacaaagcgtaaaggggagggatacagtaatccaaatgagggagccactgtcgagattcacctggagggcagatgtggcggccgtatgtttgactgtagggatgtggcctttacagtgggtgagggagaagaccacgatattcctatcgggatcgacaaggctctggaaaagatgcaaagagaggagcagtgtatattatatctggggcctcgccctaagaaccctgggaggtggatccccaaaaaaaactggtcccgccttccattaagcaagcgccgcgagccgtatacgtctcgttgcgtcagcccgtatgccatcctgagtattagtaagaatttgtttaaatgctggtag

SEQ ID NO: 59007 - DNA, 807 bp, Artificial Sequence
  derived and/or modified sequence
atgaccactgacgaaggggcaaagaataatgaagaaagtccgactgccacagtggccgaacagggcgaggatataacttctaaaaaagatcggggagtgttgaaaatagtgaaacgggtggggaatggggaggagaccccaatgattggcgacaaggtgtatgttcactataagggcaaattgagtaacgggaaaaaattcgatagctcccacgaccggaacgaaccttttgtattctcattgggcaagggccaagttatcaaggcttgggatatcggcgtggcaaccatgaaaaaaggggagatctgccatctgctgtgcaagcccgagtacgcctatggtagcgcaggctcactccctaagatcccctccaacgccacccttttctttgagattgagttattggattttaaaggcgaggatttgtttgaggatggagggatcattcggaggaccaagcgaaagggcgaagggtattccaatcctaacgagggagcgacggtcgaaatccacctcgaaggacgttgtggaggaaggatgttcgactgccgggatgtggcctttacggtgggcgaaggcgaagatcacgatatccccatcggcatcgataaggcacttgaaaagatgcagcgggaagaacagtgcatactgtacctggggcctcgtcctaagaacccaggcagatggatccctaaaaagaactggagtaggctgccgcttagcaagagacgcgagccatacacttcaaggtgcgtgtcgccttacgctatcctgtctatttccaaaaacttatttaaatgctggtag

SEQ ID NO: 59008 - DNA, 801 bp, Artificial Sequence
  derived and/or modified sequence
ctgctgatgaaggtgcccaggaccatgaagaaggccccccagcccctgctgctgagccgggagcgcatcctgccccccaaggaccggggcgtgctgaagatcgtgaagagggtgggcaatggagaggagacccccatgattggagacaaggtgtatgtgcactacaagggcaagctgagcaatggcaagaagtttgacagcagccatgacagaaatgagccctttgtgttcagcctgggcaagggccaggtgatcaaggcctgggacatcggcgtggccaccatgaagaagggggagatctgccacctgctgtgcaagccagaatatgcctacggcagcgctggcagcctgcccaagatccccagcaatgccaccctcttctttgaaattgagctgctggacttcaagggggaggacctgtttgaagatggcggcatcatccggaggaccaagaggaaaggagagggctacagcaaccccaatgaaggagccaccgtggagatccacctggagggccgctgtggcggccgcatgtttgactgcagagatgtggccttcaccgtgggggagggggaggaccatgacatccccatcggcatcgacaaggccctggagaagatgcagcgggaggagcagtgcatcctgtacctgggcccccggcccaagaaccctggccgctggatccccaagaagaactggagccggctgcccctgagcaagagaagagagccctacaccagccgctgtgtgagcccctatgccatcctgagcatcagcaagaacctcttcaagtgctggtag

SEQ ID NO: 59009 - DNA, 807 bp, Artificial Sequence
  derived and/or modified sequence
atgaccacagatgagggcgccaagaacaatgaggagagccccacagccaccgtggccgagcagggcgaggacatcaccagcaagaaggaccggggcgtgctgaagatcgtgaagagggtgggcaatggagaggagacccccatgattggagacaaggtgtatgtgcactacaagggcaagctgagcaatggcaagaagtttgacagcagccatgacagaaatgagccctttgtgttcagcctgggcaagggccaggtgatcaaggcctgggacatcggcgtggccaccatgaagaagggggagatctgccacctgctgtgcaagccagaatatgcctacggcagcgctggcagcctgcccaagatccccagcaatgccaccctcttctttgaaattgagctgctggacttcaagggggaggacctgtttgaagatggcggcatcatccggaggaccaagaggaaaggagagggctacagcaaccccaatgaaggagccaccgtggagatccacctggagggccgctgtggcggccgcatgtttgactgcagagatgtggccttcaccgtgggggagggggaggaccatgacatccccatcggcatcgacaaggccctggagaagatgcagcgggaggagcagtgcatcctgtacctgggcccccggcccaagaaccctggccgctggatccccaagaagaactggagccggctgcccctgagcaagagaagagagccctacaccagccgctgtgtgagcccctatgccatcctgagcatcagcaagaacctcttcaagtgctggtag

SEQ ID NO: 59010 - DNA, 801 bp, Artificial Sequence
  derived and/or modified sequence
ctgctgatgaaggtgccccggaccatgaagaaggccccccagcccctgctgctatcacgagagcggattctccctcccaaggaccgtggggtcctgaagatagtaaagcgcgtgggtaatggagaggaaacccctatgatcggcgacaaggtgtatgtgcattacaagggcaaactgtctaacggaaaaaagttcgattctagccatgacaggaatgagcctttcgtgttttccctggggaaaggacaggtgattaaagcgtgggacattggggttgcgaccatgaagaagggagagatctgccatttactttgcaagccagagtatgcttatggatccgctgggagcttacctaagatcccctcaaacgcaaccttgtttttcgaaatcgagctactcgacttcaagggggaggatctcttcgaagacggcggaattattcgccgcactaaaaggaaaggtgagggatacagtaaccccaatgagggggcaaccgtggagatccatctggagggtaggtgcggtggacggatgttcgattgcagggacgtggccttcacagtaggcgagggtgaggaccatgacataccgatcggcatcgacaaagcgctggaaaagatgcagcgggaagagcagtgtattctgtatttgggtccccggccgaagaatccaggacgctggattcccaaaaaaaattggagccgtttaccgttaagtaaaagaagggaaccttataccagtcgctgcgtgtccccatacgccattctgagtattagcaaaaatcttttcaagtgctggtag

SEQ ID NO: 59011 - DNA, 807 bp, Artificial Sequence
  derived and/or modified sequence
atgaccaccgacgagggcgccaagaacaacgaggagagccccaccgcgactgttgctgaacagggggaagatatcaccagcaagaaagaccgcggtgtcctcaaaatcgtgaaaagagtcggtaacggagaggagacacccatgattggcgataaggtgtatgtccactacaaaggtaagctgtcaaatggaaagaagtttgattcctcacacgataggaacgagccctttgttttttctttgggaaagggacaggtgattaaagcatgggatataggggtggccacaatgaagaagggtgagatctgccacctgctgtgtaaaccggagtacgcgtatggaagcgcaggatccctccctaagattccaagcaacgcaacattattctttgaaatcgagcttctggacttcaaaggcgaggacctgtttgaggacggcgggatcatcaggagaacaaagaggaaaggggaaggctatagcaaccccaacgaaggtgcgacggtcgagatacatcttgaggggcgatgcggaggacggatgtttgattgtagggatgttgcattcaccgtgggggagggagaagatcacgatatccccatcgggatcgataaggctctcgagaagatgcaacgggaggagcagtgtatcctgtatctggggccccgccccaaaaacccagggcgctggattcccaagaagaactggtctcgcctcccactgagcaagaggcgggaaccatatacatcaaggtgtgtgtctccatacgcaattctgtccattagcaagaacctcttcaaatgctggtag

SEQ ID NO: 59012 - DNA, 801 bp, Artificial Sequence
  derived and/or modified sequence
ttgcttatgaaggtaccacgcacaatgaagaaggcaccgcagccactcctgctgagtagggagcgcatcctgcccccaaaagataggggggtactgaaaatcgttaagcgagttggtaacggtgaagaaacccccatgataggcgataaggtttatgtccattacaaaggcaaactttctaatgggaagaaattcgatagtagccacgaccgcaatgaaccctttgtattcagcctaggcaaaggtcaggtaattaaggcatgggatatcggagtagccactatgaagaagggggaaatctgtcatctgctctgcaagcccgagtacgcatatgggtctgccggtagtcttcccaagatcccaagtaatgccacgctgttcttcgagatcgagctgctggactttaaaggcgaggatctgttcgaagacggtggcatcatccggaggaccaagaggaagggagagggctacagcaaccctaatgaaggcgctacagtagagattcacttggaaggacgttgcgggggacggatgttcgactgtagggatgtcgccttcacggttggagaaggtgaagaccacgatattccaatagggattgacaaagcccttgaaaaaatgcagcgcgaagaacagtgcatcctatacctgggacccagacctaagaatcccggaaggtggatcccaaagaaaaactggtctcggctacccctgtctaagaggagagagccctacaccagcagatgcgtgtccccctacgccattttgagtatatccaaaaatctcttcaaatgctggtag

SEQ ID NO: 59013 - DNA, 807 bp, Artificial Sequence
  derived and/or modified sequence
atgacgactgacgagggagctaaaaacaatgaggagagccctacggctacggttgccgaacaaggtgaggatataacaagcaaaaaggatagaggggtgctgaaaatagtcaagagggtcggaaatggcgaagagacaccaatgattggtgataaagtctacgtccactataagggtaagcttagcaatggcaagaaattcgattcttcccacgatagaaacgagccattcgtgttttctctaggaaaaggacaggtcataaaggcctgggacatcggcgtcgccaccatgaaaaagggagagatttgccatctgctctgcaagccggaatacgcttacgggtcagccggaagcttgccaaagatcccgagcaatgccacgctgttttttgagattgaactcctcgactttaagggcgaggacctgtttgaagatggcggaattatccggagaacaaaacggaagggtgagggctatagcaatcctaacgagggcgcaacggtggaaatccaccttgaggggaggtgcgggggtaggatgttcgattgtagagacgttgcattcaccgttggcgaaggagaagatcatgatataccaataggaattgataaagccctggaaaagatgcaacgcgaggagcagtgtatactctacttggggccacggcctaaaaacccaggccgatggatccccaaaaagaattggtcaaggctgccgttgagcaagagaagggagccatacacgagtagatgcgtgtctccgtatgccatactgagcatatcaaagaacctgtttaagtgttggtag

SEQ ID NO: 59014 - DNA, 801 bp, Artificial Sequence
  derived and/or modified sequence
ctgctgatgaaggtgcccagaaccatgaagaaggccccccagcccctgctgctgagcagagagagaatcctgccccccaaggacagaggcgtgctgaagatcgtgaagagagtgggcaacggcgaggagacccccatgatcggcgacaaggtgtacgtgcactacaagggcaagctgagcaacggcaagaagttcgacagcagccacgacagaaacgagcccttcgtgttcagcctgggcaagggccaggtgatcaaggcctgggacatcggcgtggccaccatgaagaagggcgagatctgccacctgctgtgcaagcccgagtacgcctacggcagcgccggcagcctgcccaagatccccagcaacgccaccctgttcttcgagatcgagctgctggacttcaagggcgaggacctgttcgaggacggcggcatcatcagaagaaccaagagaaagggcgagggctacagcaaccccaacgagggcgccaccgtggagatccacctggagggcagatgcggcggcagaatgttcgactgcagagacgtggccttcaccgtgggcgagggcgaggaccacgacatccccatcggcatcgacaaggccctggagaagatgcagagagaggagcagtgcatcctgtacctgggccccagacccaagaaccccggcagatggatccccaagaagaactggagcagactgcccctgagcaagagaagagagccctacaccagcagatgcgtgagcccctacgccatcctgagcatcagcaagaacctgttcaagtgctggtag

SEQ ID NO: 59015 - DNA, 807 bp, Artificial Sequence
  derived and/or modified sequence
atgaccaccgacgagggcgccaagaacaacgaggagagccccaccgccaccgtggccgagcagggcgaggacatcaccagcaagaaggacagaggcgtgctgaagatcgtgaagagagtgggcaacggcgaggagacccccatgatcggcgacaaggtgtacgtgcactacaagggcaagctgagcaacggcaagaagttcgacagcagccacgacagaaacgagcccttcgtgttcagcctgggcaagggccaggtgatcaaggcctgggacatcggcgtggccaccatgaagaagggcgagatctgccacctgctgtgcaagcccgagtacgcctacggcagcgccggcagcctgcccaagatccccagcaacgccaccctgttcttcgagatcgagctgctggacttcaagggcgaggacctgttcgaggacggcggcatcatcagaagaaccaagagaaagggcgagggctacagcaaccccaacgagggcgccaccgtggagatccacctggagggcagatgcggcggcagaatgttcgactgcagagacgtggccttcaccgtgggcgagggcgaggaccacgacatccccatcggcatcgacaaggccctggagaagatgcagagagaggagcagtgcatcctgtacctgggccccagacccaagaaccccggcagatggatccccaagaagaactggagcagactgcccctgagcaagagaagagagccctacaccagcagatgcgtgagcccctacgccatcctgagcatcagcaagaacctgttcaagtgctggtag

SEQ ID NO: 59016 - protein, 368 aa, Artificial Sequence
  derived and/or modified sequence
MGRKKIQISRILDQRNRQVTFTKRKFGLMKKAYELSVLCDCEIALIIFNSANRLFQYASTDMDRVLLKYTEYSEPHESRTNTDILETLKRRGIGLDGPELEPDEGPEEPGEKFRRLAGEGGDPALPRPRLYPAAPAMPSPDVVYGALPPPGCDPSGLGEALPAQSRPSPFRPAAPKAGPPGLVHPLFSPSHLTSKTPPPLYLPTEGRRSDLPGGLAGPRGGLNTSRSLYSGLQNPCSTATPGPPLGSFPFLPGGPPEYGLGDPPPPPGLLQPPTLAPWQPSRGDGPPAVSSQPSGGRSLGEEGPPTRGASPPTPPVSIKSERLSPAPGGPGDFPKTFPYPLLLARSLAEPLRPGPALRRLPLADGWPR

SEQ ID NO: 59017 - protein, 297 aa, Artificial Sequence
  derived and/or modified sequence
MGRKKIQISRILDQRNRQVTFTKRKFGLMKKAYELSVLCDCEIALIIFNSANRLFQYASTDMDRVLLKYTEYSEPHESRTNTDILEVPQTLKRRGIGLDGPELEPDEGPEEPGEKFRRLAGEGGDPALPRPRLYPAAPAMPSPDVVYGALPPPGCDPSGLGEALPAQSRPSPFRPAAPKAGPPGLVHPLFSPSHLTSKTPPPLYLPTEGRRSDLPGGLAGPRGGLNTSRSLYSGLQNPCSTATPGPPLGSFPFLPGGPPEYGLGDPPPPPGLLQPPTLAPWQPSRGDGPPAVSSQPR

SEQ ID NO: 59018 - DNA, 1107 bp, Artificial Sequence
  derived and/or modified sequence
atgggcagaaagaagattcagatctcccggatcctggaccaaagaaatcgacaggttaccttcactaagcgaaagttcggcttaatgaaaaaagcctatgagctctccgtgttatgtgactgtgagattgctctcattattttcaactccgcaaatcggttatttcagtatgcatccacagatatggaccgtgttcttcttaaatatacagaatacagcgaaccccatgagtccagaactaacaccgatatcctcgagactctcaagcggaggggcatcgggctggacggtcctgaactggagcctgatgaaggccccgaggaacccggggaaaaattcagaagactggccggcgaaggtggcgaccccgccctcccaagacctcgactgtacccagccgctcctgcaatgcctagccccgatgttgtgtacggggcactgcctcccccaggttgtgatccaagcggccttggcgaggcactgccagcgcagtcaaggcccagcccgtttagaccggccgcacctaaagctggcccccctgggctcgtgcatcccttattttctccgagccatctaaccagcaaaacacccccaccgctctacttgccaaccgagggcagacgctccgacttaccagggggccttgctgggcccaggggcgggctgaatacctcccggtccctatacagcggcctacagaatccatgttctactgccactcccgggcccccgttgggctctttcccctttctgccagggggccctccagaatacggcttgggtgatccaccaccaccccccggcctcctgcagccaccgacattggccccttggcagccctcaagaggagacggaccccctgccgtgtcttcacagccctccggcggtagatcacttggtgaggaaggccccccaactcgcggtgcatcccccccaaccccccccgtgtcgattaagagcgaacgtctctccccagccccaggtgggcctggggactttccaaagactttcccctaccccctcctgttggccagatccctggccgagcctctgaggccgggtcctgccttgcggcgactgcctctagctgacggttggccaagatag

SEQ ID NO: 59019 - DNA, 894 bp, Artificial Sequence
  derived and/or modified sequence
atgggtcgaaaaaagattcaaatctctcgaatcctggaccagaggaaccgtcaggtcacatttacaaaaagaaagttcggactgatgaaaaaggcctacgagctgtccgtactatgcgattgcgagattgctctaatcatatttaacagcgcaaaccgtttgttccaatacgcctcaacagacatggatagagtgctcctcaagtacactgagtacagtgaaccacatgagtcccggactaacactgacatcctggaagtgccacagaccctgaagcgtaggggcatcggacttgatgggccagaactagagccagatgaggggccagaagagcccggagaaaagttcagaaggttagccggtgaggggggtgaccccgccttgcctcgcccccgcctctatcctgcagcgcctgccatgccttcacctgatgtggtttacggggctctcccacctccaggctgtgatccctcaggactgggagaggccctgccagcacagtctaggcccagtcctttccgccccgcggctcccaaggctggcccccctggtctcgtccaccccttgtttagccctagtcacctgacatcaaagacaccccccccgctgtatttgccaacagagggcagacggagcgacctccctggaggactcgcaggcccacgaggtggcttaaacacgagcagaagcctgtatagcgggctccaaaatccatgttctactgccaccccgggcccgccacttggcagttttccattcttgcccgggggacctccggagtacggtctcggagatcctccccctccgcccggcctgcttcagccacctacactggctccctggcagcccagcagaggagacggaccacccgccgtgtctagccagccaagatag

SEQ ID NO: 59020 - DNA, 1107 bp, Artificial Sequence
  derived and/or modified sequence
atgggtagaaaaaaaattcaaatctcccgaatcttggaccagagaaatcgccaggttacattcaccaaacggaagttcggactgatgaagaaagcttacgaactgtcggtactgtgtgattgcgagatcgcactaataatcttcaattcagcaaacagattgttccaatacgcttcaacagacatggatcgcgtgctcctcaagtacaccgaatatagtgagcctcacgaatcaaggactaataccgatatcctggagactctgaaacgacggggcatcggcctggacggcccggagctagaacctgacgagggcccagaggaacccggggaaaagtttaggcgcctggcaggcgagggaggcgatccagcgctgccaagaccacgcctgtatccagcagccccagctatgccttctcccgacgtggtctatggcgccttgccccccccagggtgcgatccatccggcctgggagaagcgcttcccgcacagagtcgaccaagcccattcaggcctgctgcccccaaggccggtccacctggactggtgcatccattattcagcccctctcatcttacatctaaaacgccccctccactctacctgcccacagaaggccggagaagtgatttgcccggcggcctagctggacccaggggagggctgaatacctcacggtcgctctactctggtcttcagaatccttgtagcactgcaacgccaggccctcctctaggatccttccccttcctgcctgggggcccccctgagtatggcctcggagatcccccacctccccccgggctgctccagccaccgactttagcaccttggcagccgagtcgcggcgacgggccgcccgctgtgtcgagtcaaccttctggaggaagatcccttggagaagaaggaccccccaccaggggagcctcacctccgactcctccagtgtcaattaagtcagagcgactttccccggcacctggcggacccggggatttcccaaagaccttcccataccccctacttcttgcacgaagtcttgctgaacccctgcggcctgggccagccctcagaaggctgcctttggccgacggctggccaaggtag

SEQ ID NO: 59021 - DNA, 1107 bp, Artificial Sequence
  derived and/or modified sequence
atgggcaggaagaagatccagatcagccgcatcctggaccagaggaaccggcaggtgaccttcaccaagaggaagtttggcctgatgaagaaggcctatgagctgtctgtgctgtgtgactgtgaaattgccctgatcatcttcaacagcgccaacagactcttccagtatgccagcacagacatggacagagtgctgctgaagtacacagagtacagcgagccccatgagagcaggaccaacacagacatcctggagaccctgaagaggcggggcatcggcctggatggccctgagctggagccagatgagggccctgaggagcctggagagaagttccggcggctggccggggagggcggggaccctgccctgccccggccccggctgtacccagctgccccagccatgcccagcccagatgtggtgtatggagccctgcccccacctggctgtgaccccagcggcctgggggaggccctgcctgcccagagccggcccagccccttccggcctgctgcccccaaggccggccccccaggcctggtgcaccccctcttcagccccagccacctgaccagcaagaccccaccacccctgtacctgcccacagagggcagaagaagtgacctgcccggcggcctggccggcccccggggcggcctgaacaccagccgcagcctgtacagcggcctgcagaacccctgcagcacagccaccccaggcccccccctgggcagcttccccttcctgcccggcggccccccagaatatggcctgggggaccccccacctcctcctggcctgctgcagccccccaccctggccccctggcagcccagcagaggagatggccccccagctgtgagcagccagcccagcggcggccgcagcctgggggaggagggcccccccaccaggggggccagcccccccaccccacctgtgtccatcaagtctgagcggctgagccctgcccctgggggccctggggacttccccaagaccttcccctaccccctgctgctggcccggagcctggccgagcccctgcggcccggccctgccctgcggcggctgcccctggctgatggctggcccaggtag

SEQ ID NO: 59022 - DNA, 894 bp, Artificial Sequence
  derived and/or modified sequence
atgggcaggaagaagatccagatcagccgcatcctggaccagaggaaccggcaggtgaccttcaccaagaggaagtttggcctgatgaagaaggcctatgagctgtctgtgctgtgtgactgtgaaattgccctgatcatcttcaacagcgccaacagactcttccagtatgccagcacagacatggacagagtgctgctgaagtacacagagtacagcgagccccatgagagcaggaccaacacagacatcctggaggtgccccagaccctgaagagaagaggcatcggcctggatggccctgagctggagccagatgagggccctgaggagcccggggagaagttccggcggctggccggggagggcggggaccctgccctgccccggccccggctgtacccagctgccccagccatgcccagcccagatgtggtgtatggagccctgcccccacctggctgtgaccccagcggcctgggggaggccctgcctgcccagagccggcccagccccttccggcctgctgcccccaaggccggccccccaggcctggtgcaccccctcttcagccccagccacctgaccagcaagaccccaccacccctgtacctgcccacagagggccgccgcagtgacctgcccggcggcctggccggcccccggggcggcctgaacaccagccgcagcctgtacagcggcctgcagaacccctgcagcacagccaccccaggcccccccctgggcagcttccccttcctgcccggcggccccccagaatatggcctgggggaccccccacctcctcctggcctgctgcagccccccaccctggccccctggcagcccagcagaggagatggccccccagctgtgagcagccagcccaggtag

SEQ ID NO: 59023 - DNA, 1623 bp, Artificial Sequence
  derived and/or modified sequence
gcttccggtgccgtttcccggttcgctcggccgcggtcgctatggaggagccggagatgcagctcaaggggaagaaagtcacggacaagttcactgagagcgtctacgtcctggccaacgagccatccgtggccctgtaccggctgcaggagcatgtgcgtcgctccctccccgagctggcccagcacaaggcagacatgcagcgttgggaggagcagagccagggagccatctacactgtggagtacgcctgcagcgccgtgaagaacctggtggacagcagcgtctacttccgcagcgtggagggtctgctcaaacaggccatcagcatccgggaccatatgaatgccagtgcccagggccacagcccggaggaaccacccccgccctcctcagcctgatcctggaagagactcggggccccccagcctccgccaacccagacaaagatcattccactcagcctgggacgatggggaggaaaaaaatccagatctcccgcatcctggaccaaaggaatcggcaggtgacgttcaccaagcggaagttcgggctgatgaagaaggcctatgagctgagcgtgctctgtgactgtgagatagccctcatcatcttcaacagcgccaaccgcctcttccagtatgccagcacggacatggaccgtgtgctgctgaagtacacagagtacagcgagccccacgagagccgcaccaacactgacatcctcgagacgctgaagcggaggggcattggcctcgatgggccagagctggagccggatgaagggcctgaggagccaggagagaagtttcggaggctggcaggcgaagggggtgatccggccttgccccgaccccggctgtatcctgcagctcctgctatgcccagcccagatgtggtatacggggccttaccgccaccaggctgtgaccccagtgggcttggggaagcactgcccgcccagagccgcccatctcccttccgaccagcagcccccaaagccgggcccccaggcctggtgcaccctctcttctcaccaagccacctcaccagcaagacaccacccccactgtacctgccgacggaagggcggaggtcagacctgcctggtggcctggctgggccccgagggggactaaacacctccagaagcctctacagtggcctgcagaacccctgctccactgcaactcccggacccccactggggagcttccccttcctccccggaggccccccagaatatggcctgggagaccctccaccgccccctggcttgttgcagccccccaccctggccccctggcagccctcgaggggtgatgggccccccgccgtgtcctcccagcccagtgggggccgaagcctgggcgaggagggtcccccaacccgcggcgcctccccgccgacccccccagtcagcatcaagtctgagcgcctctctccggcccccgggggccccggcgactttcctaagaccttcccctatcccttgctcctcgcccggtccctggcagagcctctgcggcctgggcccgccctgcgccggctgcccttggccgacggctggccccggtaggagatcacccggtggcaccagcccagagcgctcgccaggtacgg

SEQ ID NO: 59024 - DNA, 1683 bp, Artificial Sequence
  derived and/or modified sequence
atcttcgtgcagccgccgcgggtccgtgcgcccagcgtcccagggcccaggccgagcagacaaagatcattccactcagcctgggacgatggggaggaaaaaaatccagatctcccgcatcctggaccaaaggaatcggcaggtgacgttcaccaagcggaagttcgggctgatgaagaaggcctatgagctgagcgtgctctgtgactgtgagatagccctcatcatcttcaacagcgccaaccgcctcttccagtatgccagcacggacatggaccgtgtgctgctgaagtacacagagtacagcgagccccacgagagccgcaccaacactgacatcctcgaggtaccccagacgctgaagcggaggggcattggcctcgatgggccagagctggagccggatgaagggcctgaggagccaggagagaagtttcggaggctggcaggcgaagggggtgatccggccttgccccgaccccggctgtatcctgcagctcctgctatgcccagcccagatgtggtatacggggccttaccgccaccaggctgtgaccccagtgggcttggggaagcactgcccgcccagagccgcccatctcccttccgaccagcagcccccaaagccgggcccccaggcctggtgcaccctctcttctcaccaagccacctcaccagcaagacaccacccccactgtacctgccgacggaagggcggaggtcagacctgcctggtggcctggctgggccccgagggggactaaacacctccagaagcctctacagtggcctgcagaacccctgctccactgcaactcccggacccccactggggagcttccccttcctccccggaggccccccagaatatggcctgggagaccctccaccgccccctggcttgttgcagccccccaccctggccccctggcagccctcgaggggtgatgggccccccgccgtgtcctcccagcccaggtaagtgccctgagacgacggcaagtcccagtcctccaaagccccggccgctgctgacccctggtggccatccctggtactgcgcacacttccggtacggatgggcagctattttgaggccccaagagggaccgccaccccctcctttcccagggtcctcctgccaagcctttgcccacgctgtgccatcccctggcttccttcccttcctcgctgagctcacggcctccctctctctttccccctgcagtgggggccgaagcctgggcgaggagggtcccccaacccgcggcgcctccccgccgacccccccagtcagcatcaagtctgagcgcctctctccggcccccgggggccccggcgactttcctaagaccttcccctatcccttgctcctcgcccggtccctggcagagcctctgcggcctgggcccgccctgcgccggctgcccttggccgacggctggccccggtaggagatcacccggtggcaccagcccagagcgctcgccaggtacggcgagggcacgtggggaccccacctccctccaggcctcttcagagaagacccaacagtgacgcccccctccgcggtgggggcttggaggtgggcggctggactcaatccaccctggggggctcctttccttcttcctatttgtgtgtatatccacaaataaaacgcgcgtggcgtccgtggaccag

SEQ ID NO: 59025 - DNA, 1405 bp, Artificial Sequence
  derived and/or modified sequence
cgggtccgtgcgcccagcgtcccagggcccaggccgagcagacaaagatcattccactcagcctgggacgatggggaggaaaaaaatccagatctcccgcatcctggaccaaaggaatcggcaggtgacgttcaccaagcggaagttcgggctgatgaagaaggcctatgagctgagcgtgctctgtgactgtgagatagccctcatcatcttcaacagcgccaaccgcctcttccagtatgccagcacggacatggaccgtgtgctgctgaagtacacagagtacagcgagccccacgagagccgcaccaacactgacatcctcgagacgctgaagcggaggggcattggcctcgatgggccagagctggagccggatgaagggcctgaggagccaggagagaagtttcggaggctggcaggcgaagggggtgatccggccttgccccgaccccggctgtatcctgcagctcctgctatgcccagcccagatgtggtatacggggccttaccgccaccaggctgtgaccccagtgggcttggggaagcactgcccgcccagagccgcccatctcccttccgaccagcagcccccaaagccgggcccccaggcctggtgcaccctctcttctcaccaagccacctcaccagcaagacaccacccccactgtacctgccgacggaagggcggaggtcagacctgcctggtggcctggctgggccccgagggggactaaacacctccagaagcctctacagtggcctgcagaacccctgctccactgcaactcccggacccccactggggagcttccccttcctccccggaggccccccagaatatggcctgggagaccctccaccgccccctggcttgttgcagccccccaccctggccccctggcagccctcgaggggtgatgggccccccgccgtgtcctcccagcccagtgggggccgaagcctgggcgaggagggtcccccaacccgcggcgcctccccgccgacccccccagtcagcatcaagtctgagcgcctctctccggcccccgggggccccggcgactttcctaagaccttcccctatcccttgctcctcgcccggtccctggcagagcctctgcggcctgggcccgccctgcgccggctgcccttggccgacggctggccccggtaggagatcacccggtggcaccagcccagagcgctcgccaggtacggcgagggcacgtggggaccccacctccctccaggcctcttcagagaagacccaacagtgacgcccccctccgcggtgggggcttggaggtgggcggctggactcaatccaccctggggggctcctttccttcttcctatttgtgtgtatatccacaaataaaacgcgcgtggcgtccgtggacca

SEQ ID NO: 59026 - DNA, 1107 bp, Artificial Sequence
  derived and/or modified sequence
atgggccggaagaagatccagatcagccggatcctggaccagcggaatcgccaggtgactttcaccaaacgcaagtttggactcatgaagaaagcatatgagctatctgtactgtgtgactgtgagatcgctcttattatatttaattccgccaatcgcctatttcaatacgcctctactgacatggacagggtcctactcaagtatactgagtacagcgagccccacgagtcgcgtaccaatacagacatcctggagacactgaagcggcggggaatcggcctggatggaccagaactggaacctgacgaggggccggaggagcccggggaaaaattcaggcggctggccggggaggggggagaccctgcactgccacgcccccgactatatccggccgccccagcaatgccaagtcctgacgtagtgtacggggcactcccacccccggggtgcgaccctagcggactcggagaagccttgcccgcccagtctcgaccctctccttttcgtcccgctgcaccgaaagctggtccacctggcctcgtgcacccactgttctcccccagtcaccttacctccaagaccccgcctcccctctacctgcccacggagggccgccgcagcgacctccctgggggacttgcgggcccacgagggggtcttaatacgtctcgcagcttgtacagtggcctccaaaacccatgttccacggcaactcctgggcctcctctcggatctttcccattcttaccaggcggccccccagagtatggcctaggcgacccaccccctcctccaggcttgctacagccaccaacactggctccctggcaacccagccgcggagatgggccgcccgcggtgagcagccaaccaagtggtggtaggtcattgggagaggagggacccccaactagaggcgcctctcccccaaccccgcctgtctcaatcaagtccgagaggctaagccccgctccggggggtcctggggattttccgaaaacattcccatacccactcctgctcgctcgaagccttgccgaacccctacgccctgggccagccctgcgccggctgcctttggcagacggctggcccaggtag

SEQ ID NO: 59027 - DNA, 894 bp, Artificial Sequence
  derived and/or modified sequence
atgggccggaagaagatccagatcagccggatcctggaccagcggaatagacaggtcaccttcacaaaacgaaaattcggtctcatgaagaaggcctacgagctgtcagtgctgtgtgattgcgaaatagctctcattatatttaattcagcaaaccggctcttccaatacgccagcacagacatggatcgtgtcctgctcaagtacacagaatatagtgagccacatgagtcccgcacaaataccgacattttagaagtcccacagaccttgaagagaagaggaatcgggttggacgggccagagctggagccagacgaaggacctgaggaacctggtgagaagtttcggcggcttgcaggcgaaggcggcgacccggccttaccccggcctcgtctgtatcccgctgccccagctatgcctagtcccgacgttgtttacggtgccttaccccctcccggatgcgatccaagcggtctaggcgaggccctgcccgctcagtccaggcctagcccatttaggcccgcagctccgaaggccggaccacccggcttggttcatccacttttttcaccaagccatctcacttccaaaactccccccccattgtacctccccacagagggcagacggtccgacctaccgggcggactggcgggccctcgaggcgggctcaatactagtcgatcactgtactctggcctgcagaatccctgcagtaccgccactcccggacctccactcgggagctttccgtttctacccggtggaccaccggagtacggacttggcgatcccccacccccacctggactgctacagccccctacactggccccctggcagccatctagaggggacgggcctcctgcagtctcgtcacaaccccgctag

SEQ ID NO: 59028 - DNA, 1107 bp, Artificial Sequence
  derived and/or modified sequence
atgggccggaagaagatccagatcagccggatcctggaccagcggaataggcaggtcaccttcacgaagagaaaattcgggttgatgaaaaaggcgtatgaactctccgttttatgcgactgcgaaatcgcactgataatctttaactccgcaaaccgattatttcagtacgcatcgaccgatatggatcgggtccttctgaaatataccgaatattcggagccgcacgagagccgcactaacacggacattctggaaaccctgaagcgccggggaatcggtctcgacggtcctgagctcgagcccgacgagggcccggaggagccaggagaaaaatttaggaggcttgccggcgaaggcggcgaccctgctctgcccaggccccgcctttatcctgccgcaccagctatgccaagcccagacgtcgtttacggcgctttgcccccacctggatgcgatccttcgggcttgggagaagccctccccgctcaaagccgaccctccccatttcgccccgccgcgccaaaagctggcccgccgggccttgtccatcccttgttctcgccctcccatctgacaagcaagactccacctcctctgtacctcccaactgaagggcgccggtctgacctgcctggaggcttggcaggccctagagggggcctcaacacgtcgcgctccctttattctgggctccagaacccatgctctaccgccactcctggacctcccttaggttctttccccttcctccccggcggaccgcccgaatacggcttgggggatccgccccccccccccgggcttttacaacctccgactcttgccccatggcagcctagcaggggcgatggacctccggctgtgagttctcagccaagcgggggccgttccttaggagaagaagggcctcccacccgcggagcatctccccctaccccacccgtgagtatcaagtcagaaaggctgtcccccgcacctggtggtccaggcgattttcccaaaacgttcccctatccactgcttttggctaggtcactggctgagccgctgcgcccaggtcccgctctgagacgtctcccacttgccgatggctggccacgctag

SEQ ID NO: 59029 - DNA, 1107 bp, Artificial Sequence
  derived and/or modified sequence
atggggagaaaaaagattcaaatctctcgaatactggaccagcgcaatcgccaagtgactttcactaagagaaaattcgggctgatgaagaaggcttacgagttatcagtgctgtgtgactgcgagatcgccctgattatatttaactcagcaaacagactgtttcagtatgccagcactgatatggatcgcgtgttgctaaagtataccgagtacagcgagccccatgaatcccgaaccaatacagacattctcgaaacactgaaaagacggggtatcggccttgatgggcctgaactggaacctgatgagggcccagaggagccaggcgaaaaatttcgaagactcgctggcgagggaggcgacccagccctgcctaggccgaggctctatcctgcagctcccgctatgcctagtccagatgtggtctatggagcattaccccctcccggttgtgacccgtcagggctgggcgaagccctccctgcccaaagccggcctagtccattccgcccagctgcaccaaaggctggacctccgggtttggtgcacccactgttcagtccttcacacctcacctcaaagactccccctcccttatatctgccgactgaggggagacgctccgatttgcctgggggacttgcaggccctagggggggtctcaatacaagcaggtctttgtactcaggccttcaaaatccctgctccacagctaccccaggcccaccactcggcagctttccatttctgccaggaggtcccccagagtatggcctaggcgatcctccacctcccccagggctgctgcagcctccaacacttgctccttggcagccatccaggggagacggccctcctgccgtgtcctctcaaccgtctggcggtaggtccctcggagaagagggacctccaactagaggagcctccccgccaacccctccagttagcatcaaaagtgagcggctgtccccggctccagggggaccaggagattttccaaaaacatttccataccctcttctgctggcgcgatctttggccgaaccattgagacccggaccagcacttagacgcctgcccttagccgatggatggcctaggtag

SEQ ID NO: 59030 - DNA, 894 bp, Artificial Sequence
  derived and/or modified sequence
atgggccgaaaaaagattcaaatttcccgtatcctggatcagagaaatcgccaggtaacatttaccaaaaggaagttcggtctgatgaaaaaggcgtatgaattgtccgtgctgtgtgattgcgaaattgctctgatcatctttaacagcgccaacaggctgttccagtacgcatcaacagacatggacagagttctgctcaaatacaccgagtactccgagccacacgagagtagaacgaatacagacattctcgaggtgcctcagaccctgaaaaggagagggatcggcctggatggtccagaattggaaccggacgaggggccagaggaacccggtgaaaagttcaggcgccttgcaggggagggcggagacccggctctgcctagaccacggctgtaccccgcagcgccagccatgccttccccggacgtggtttacggtgcactgcccccaccaggctgtgatccctcaggcctcggcgaggccctcccagcacagtcccggcctagtccatttcggccagcagctccaaaagccggaccacctggactcgtacacccactcttttctccctctcatttgacctcgaagacccctcctcccctctatctgcctacagaggggagacggagtgatctgcctggagggctagccggacctcgtggtggactcaatacttctcgttcattatatagcgggctccagaacccctgcagtacagctacaccgggacccccattagggtcattcccctttcttccagggggacccccagagtatggattgggcgaccccccacccccacccggattgcttcagcccccaacactggccccatggcagccttcacggggagatggccctcccgctgtgtcgagccagccacgatag

SEQ ID NO: 59031 - DNA, 1107 bp, Artificial Sequence
  derived and/or modified sequence
atgggcaggaaaaagattcagatttctagaatcctggatcagcggaatcggcaggtcaccttcacaaagagaaaattcggcctgatgaaaaaggcctatgaactgtccgtgctgtgtgactgcgagatcgcactcatcatctttaattctgctaacagactctttcagtacgcttccacagatatggaccgggtgttgttgaaatacacagaatactccgagccgcatgaatccagaacaaatacagatattctggagacactaaaacgtcggggtatcgggctggacggacctgaactggagcccgacgagggacccgaagaaccgggagagaaatttcggaggttggctggggagggaggagatccagctcttcctagacccagactgtatccagccgctcccgctatgccatctccagatgttgtgtacggcgctctccccccaccgggttgcgacccctccggcctgggggaagctctccctgcacagagcagaccgagcccttttcgaccagcagcgccaaaggctggccctcctggactggtgcatcctctgttctcaccgtcccatctgacttccaagacaccacccccattgtacctgcccactgagggcagaagatcggacttgcccggaggtctggcagggccacggggaggtctaaacacatcccgctcactgtattccgggctgcagaacccctgttctaccgctacacctgggccaccgttgggctcttttccgttcttaccaggaggtccacctgagtatggactcggggacccaccgccaccccctgggttgttgcaaccccctaccctagctccttggcaacccagccgcggtgatggaccccctgccgtatcttctcaaccaagcggtgggaggtccttaggagaggagggacccccaacacggggagcctcccctccaacacctcccgtcagcatcaagtccgaacgcctcagccccgctccaggaggcccaggcgactttccgaaaacattcccttatcccctgctgttagctcggagcctcgccgagccactgcgacctgggcctgctctgcgacgtctgccgcttgccgatggttggccacgctag

SEQ ID NO: 59032 - DNA, 1107 bp, Artificial Sequence
  derived and/or modified sequence
atgggaaggaaaaaaatccagatatcgcgtatccttgatcaacgtaatcgacaagtgacctttacgaaaaggaaatttggtctgatgaagaaagcctacgaattgagcgtattgtgcgactgcgaaatcgccctgatcatcttcaattcggccaatcggcttttccagtacgcgtcaacagatatggacagggtgctgctgaagtacaccgaatattcagagccccacgagtcacggaccaataccgacatccttgagaccttgaagagacgcggaataggccttgatggacccgaattagaacccgacgagggtcctgaggagcctggggagaagtttcgtcgtctggccggcgagggaggagaccctgccctgcctcgacccaggttgtacccagccgcccccgctatgcctagtccagatgtcgtgtatggggccctcccaccccccgggtgtgaccccagtggactaggcgaagccctgccagcccagtcgcgccccagcccatttagacccgccgcacctaaggcaggcccccccggacttgtgcaccctctgttctcccccagccatctgactagcaaaacccccccccccctttaccttccaactgagggacgtagatccgaccttccagggggcctcgctggcccgcgaggcggcctcaacacttctcgaagtctctattcaggcttgcaaaacccctgctctaccgcaaccccgggacctcccctcggaagcttcccttttctgcccggcggacccccagagtacggactaggcgacccccccccgcctcccggcttgctgcagcctcccacgctggcaccttggcagccttcgaggggagatgggccccctgctgtgtctagccaacctagcggtggcagaagcctgggagaggagggtccacctacccgtggagccagtccccctaccccacccgtatccatcaagagcgagagactgagcccagcaccaggtggcccaggcgacttccctaaaacgttcccatatcccctcctccttgctaggtccttagcggaaccactgaggcccggccctgccctcagacggctgcctctggccgacggctggccaagatag

SEQ ID NO: 59033 - DNA, 1107 bp, Artificial Sequence
  derived and/or modified sequence
atggggcggaaaaaaattcaaatttcacgaatcctggatcaacgcaaccgccaggtaacctttactaaaagaaaatttggactgatgaaaaaagcctatgaactcagcgtcttgtgtgattgtgaaatcgccctgatcatttttaacagcgccaatcgcctattccaatacgcgagcaccgatatggaccgcgtgctgcttaaatacaccgaatactccgaaccccatgagagtagaaccaataccgatattcttgaaactctgaaacgaagaggcatcgggttagacggccccgagctggaacctgatgagggacccgaagagcccggcgaaaaattcaggcgcctagccggggaagggggtgatccagcgttacccagacctagactgtaccccgcagcccctgccatgccatcgccggacgtagtgtacggcgctcttccaccacctggctgcgacccttctggacttggggaggcactaccagctcaatctcggcctagcccgtttagacccgcagcccctaaagccggcccccctggcctagtacaccccctgttcagcccaagccatctgacgagtaagacaccaccacccctctatcttccaacagaaggcaggagatccgatcttcctggcggtttggctggtcctaggggcggactgaacacaagtcgatcactgtacagtggactccaaaatccgtgctccactgccacgcccggcccacctttgggctcatttcccttcttaccaggcggccctcccgagtatggattgggcgaccctccaccaccacccggtctgttgcaacctcctacccttgctccctggcaaccaagcagaggagatggtccaccagccgtgagttctcaacccagtgggggacgatcgctgggcgaagagggccccccgaccagaggggcatcccccccgactccaccagtttccattaaaagcgaaagactgtcaccagcccccggagggccaggtgacttcccaaaaactttcccttatcctttgttgctcgcacgcagtttagctgagcccctgcgcccaggtcccgctctgagacggctacccttagcagatggctggccaagatag

SEQ ID NO: 59034 - DNA, 1107 bp, Artificial Sequence
  derived and/or modified sequence
atgggcagaaagaagatccagatcagcagaatcctggaccagagaaacagacaggtgaccttcaccaagagaaagttcggcctgatgaagaaggcctacgagctgagcgtgctgtgcgactgcgagatcgccctgatcatcttcaacagcgccaacagactgttccagtacgccagcaccgacatggacagagtgctgctgaagtacaccgagtacagcgagccccacgagagcagaaccaacaccgacatcctggagaccctgaagagaagaggcatcggcctggacggccccgagctggagcccgacgagggccccgaggagcccggcgagaagttcagaagactggccggcgagggcggcgaccccgccctgcccagacccagactgtaccccgccgcccccgccatgcccagccccgacgtggtgtacggcgccctgcccccccccggctgcgaccccagcggcctgggcgaggccctgcccgcccagagcagacccagccccttcagacccgccgcccccaaggccggcccccccggcctggtgcaccccctgttcagccccagccacctgaccagcaagacccccccccccctgtacctgcccaccgagggcagaagaagcgacctgcccggcggcctggccggccccagaggcggcctgaacaccagcagaagcctgtacagcggcctgcagaacccctgcagcaccgccacccccggcccccccctgggcagcttccccttcctgcccggcggcccccccgagtacggcctgggcgaccccccccccccccccggcctgctgcagccccccaccctggccccctggcagcccagcagaggcgacggcccccccgccgtgagcagccagcccagcggcggcagaagcctgggcgaggagggcccccccaccagaggcgccagcccccccaccccccccgtgagcatcaagagcgagagactgagccccgcccccggcggccccggcgacttccccaagaccttcccctaccccctgctgctggccagaagcctggccgagcccctgagacccggccccgccctgagaagactgcccctggccgacggctggcccagatag

SEQ ID NO: 59035 - DNA, 894 bp, Artificial Sequence
  derived and/or modified sequence
atgggcagaaagaagatccagatcagcagaatcctggaccagagaaacagacaggtgaccttcaccaagagaaagttcggcctgatgaagaaggcctacgagctgagcgtgctgtgcgactgcgagatcgccctgatcatcttcaacagcgccaacagactgttccagtacgccagcaccgacatggacagagtgctgctgaagtacaccgagtacagcgagccccacgagagcagaaccaacaccgacatcctggaggtgccccagaccctgaagagaagaggcatcggcctggacggccccgagctggagcccgacgagggccccgaggagcccggcgagaagttcagaagactggccggcgagggcggcgaccccgccctgcccagacccagactgtaccccgccgcccccgccatgcccagccccgacgtggtgtacggcgccctgcccccccccggctgcgaccccagcggcctgggcgaggccctgcccgcccagagcagacccagccccttcagacccgccgcccccaaggccggcccccccggcctggtgcaccccctgttcagccccagccacctgaccagcaagacccccccccccctgtacctgcccaccgagggcagaagaagcgacctgcccggcggcctggccggccccagaggcggcctgaacaccagcagaagcctgtacagcggcctgcagaacccctgcagcaccgccacccccggcccccccctgggcagcttccccttcctgcccggcggcccccccgagtacggcctgggcgaccccccccccccccccggcctgctgcagccccccaccctggccccctggcagcccagcagaggcgacggcccccccgccgtgagcagccagcccagatag

SEQ ID NO: 59036 - protein, 489 aa, Artificial Sequence
  derived and/or modified sequence
MVAERSPARSPGSWLFPGLWLLVLSGPGGLLRAQEQPSCRRAFDLYFVLDKSGSVANNWIEIYNFVQQLAERFVSPEMRLSFIVFSSQATIILPLTGDRGKISKGLEDLKRVSPVGETYIHEGLKLANEQIQKAGGLKTSSIIIALTDGKLDGLVPSYAEKEAKISRSLGASVYCVGVLDFEQAQLERIADSKEQVFPVKGGFQALKGIINSILAQSCTEILELQPSSVCVGEEFQIVLSGRGFMLGSRNGSVLCTYTVNETYTTSVKPVSVQLNSMLCPAPILNKAGETLDVSVSFNGGKSVISGSLIVTATECSNGIAAIIVILVLLLLLGIGLMWWFWPLCCKVVIKDPPPPPAPAPKEEEEEPLPTKKWPTVDASYYGGRGVGGIKRMEVRWGDKGSTEEGARLEKAKNAVVKIPEETEEPIRPRPPRPKPTHQPPQTKWYTPIKGRLDALWALLRRQYDRVSLMRPQEGDEVCIWECIEKELTA

SEQ ID NO: 59037 - protein, 386 aa, Artificial Sequence
  derived and/or modified sequence
MVAERSPARSPGSWLFPGLWLLVLSGPGGLLRAQEQPSCRRAFDLYFVLDKSGSVANNWIEIYNFVQQLAERFVSPEMRLSFIVFSSQATIILPLTGDRGKISKGLEDLKRVSPVGETYIHEGLKLANEQIQKAGGLKTSSIIIALTDGKLDGLVPSYAEKEAKISRSLGASVYCVGVLDFEQAQLERIADSKEQVFPVKGGFQALKGIINSSNGIAAIIVILVLLLLLGIGLMWWFWPLCCKVVIKDPPPPPAPAPKEEEEEPLPTKKWPTVDASYYGGRGVGGIKRMEVRWGDKGSTEEGARLEKAKNAVVKIPEETEEPIRPRPPRPKPTHQPPQTKWYTPIKGRLDALWALLRRQYDRVSLMRPQEGDEVCIWECIEKELTA

SEQ ID NO: 59038 - DNA, 1470 bp, Artificial Sequence
  derived and/or modified sequence
atggtcgccgagaggagccccgcccgatctcccggctcatggctgttccctgggttgtggttactggttctgtccgggcccggagggctgttgagggctcaggaacagcctagctgccgtcgcgcattcgatctgtactttgtcctggataagagtggaagcgtggccaacaattggattgagatttataacttcgtgcagcagcttgcggagcgcttcgtgtcaccagaaatgcgcctgtcctttatcgtcttttcctcacaagctaccatcatcctgccccttacaggagataggggaaagatctccaagggtctggaagacctcaagagagtgtctcccgtgggcgagacttacatccacgaaggcctgaagcttgccaacgagcagatccaaaaggcaggcgggctgaagacctcatcaataattattgccctcaccgatggaaagcttgacggcctggtaccaagttacgcggagaaagaggctaaaattagtcgcagtttgggcgccagcgtctactgcgtgggagtgctcgatttcgaacaggcacagctcgagagaatcgcagattccaaagagcaagttttcccagtgaagggcggcttccaggctctgaagggaatcattaatagtattcttgcacagagttgcactgagattttggagctgcagccatcgtctgtgtgtgttggagaggagttccagatcgtcctctcgggcaggggatttatgctcggcagtcggaacggtagcgtcctgtgcacctatacagtgaatgagacatataccactagtgtcaagcccgtgtcagttcaattgaacagcatgttatgcccagccccaatactgaacaaggccggtgagaccctggacgtctctgtgagttttaatggggggaaatccgtcatctccggcagtttaatcgtgacagctaccgaatgcagcaatggcatcgcggcgatcatcgtcatcttggtcctgctcttgttgctaggcatcggcctcatgtggtggttttggcccctgtgttgcaaggtggtgattaaggatcccccccctcctccagctccggccccaaaagaagaagaggaggagcctctgccgacaaaaaagtggcctacagtggatgcctcatactacggaggtcggggcgtggggggtattaagaggatggaagtgagatggggcgacaagggctcgacagaggagggtgctaggttagaaaaagctaagaatgcagttgtgaaaattcctgaagagaccgaggagcctatcaggcccaggcccccacgtcccaagccaacccatcaaccacctcaaacaaagtggtacaccccaataaaaggtaggcttgacgcattgtgggcacttcttcgccggcaatatgaccgcgtctcacttatgagaccacaggagggcgacgaggtttgtatatgggaatgcatcgaaaaagaactgactgcatag

SEQ ID NO: 59039 - DNA, 1470 bp, Artificial Sequence
  derived and/or modified sequence
atggtggccgagaggagccctgcccggagccctggctcctggctgtttcctggcctgtggctgctggtgctgagcggccctgggggcctgctgcgggcccaggagcagcccagctgccggcgggcctttgacctgtactttgtgctggacaagagcggctctgtggccaacaactggattgagatctacaactttgtgcagcagctggccgagagatttgtgtccccagagatgaggctgtccttcatcgtgttcagcagccaggccaccatcatcctgcccctgaccggggaccggggcaagatcagcaagggcctggaggacctgaagagggtgtcccctgtgggggagacctacatccacgagggcctgaagctggccaatgagcagatccagaaggccggcggcctgaagaccagcagcatcatcatcgccctgacagatggcaagctggatggcctggtgcccagctatgcagagaaggaggccaagatcagccgcagcctgggcgcctctgtgtactgtgtgggcgtgctggactttgagcaggcccagctggagagaattgctgacagcaaggagcaggtgtttcctgtgaagggcggcttccaggccctgaagggcatcatcaacagcatcctggcccagagctgcacagagatcctggagctgcagcccagctctgtgtgtgtgggggaggagttccagatcgtgctgagcggccggggcttcatgctgggcagcagaaatggatctgtgctgtgcacctacacagtgaatgagacctacaccacctctgtgaagcctgtgtctgtgcagctgaacagcatgctgtgcccagcccccatcctgaacaaggccggggagaccctggatgtgtctgtgtccttcaacggcggcaagagcgtcatcagcggcagcctgattgtgacagccacagagtgcagcaatggaattgctgccatcatcgtcatcctggtgctgctgctgctgctgggcatcggcctgatgtggtggttctggcccctgtgctgcaaggtggtgatcaaggaccccccacctcctccagccccagcccccaaggaggaggaggaggagcccctgcccaccaagaagtggcccaccgtggatgccagctactatggaggccggggcgtgggcggcatcaagaggatggaggtgcgctggggagacaagggcagcacagaggagggcgcccggctggagaaggccaagaatgctgtggtgaagatccctgaggagacagaggagcccatccggccccggcccccccggcccaagcccacccaccagcccccccagaccaagtggtacacccccatcaagggccgcctggatgccctgtgggccctgctgcggcggcagtatgacagagtgtccctgatgaggccccaggagggagatgaggtgtgcatctgggagtgcatcgagaaggagctgacagcctag

SEQ ID NO: 59040 - DNA, 1470 bp, Artificial Sequence
  derived and/or modified sequence
atggtggccgagcggagccccgcccggagccccggcagctggctgtttcccggtctgtggctgttggtgctgtccggacctggaggcctgctgcgggcccaagaacagcccagctgccggcgggccttcgatctgtacttcgtgctggacaaatccggctcagtggctaataactggatcgagatttataatttcgtgcaacaattggctgagagattcgtgtcaccagaaatgaggctgtctttcattgtgttttcctcgcaggccacaataatcctgcccttaacaggagatcgaggcaagatttcaaaggggctggaagatctgaagcgcgtttcccctgtcggcgaaacatacattcacgaggggcttaagctggccaatgagcagattcagaaagccgggggtttgaaaacgtccagcatcatcatcgcgttgacagatggaaagttagatgggttagtgccgtcctacgccgagaaggaggcaaaaatttccaggtccttgggtgctagcgtctattgtgtgggtgtgctcgacttcgagcaggcccagcttgaaaggattgccgactctaaggagcaggtctttcccgttaaagggggatttcaagcacttaaaggtattattaatagcatcctggcccagagctgtaccgagatcttagaactgcagccctccagcgtgtgcgtcggtgaggaattccaaatcgtcctttcagggcgcgggttcatgcttggatcgagaaacgggtctgtgttgtgcacatacactgtaaatgagacgtatacgacgtctgtcaagccagtgtctgtgcagctgaattccatgctgtgtcccgcgcccatcctgaacaaggccggggagacactggatgttagcgtgtcttttaacggcggtaaaagcgtcatctcaggtagtctgatcgttactgctaccgaatgttcgaacggcatagcagctataatcgtcatactggttctgcttctgctgttgggcatcggactgatgtggtggttctggccattatgttgtaaagtcgtaataaaggatcccccgcccccacccgcccccgcccccaaagaagaggaggaagagcccctgcctacgaagaagtggcctaccgtggacgcctcgtattatggtgggcggggtgtgggcggaataaagcgaatggaagtccggtggggagataaaggatccactgaggagggcgccagattagagaaagccaaaaacgctgtcgtaaaaattccggaggagacagaggagcccatacggccaaggccccctcgacctaagcccacacaccagcccccacagaccaaatggtacacccccatcaaaggccgattagacgctctatgggcacttctgagaaggcagtacgaccgcgtgagcctgatgagaccccaggaaggcgatgaagtctgtatatgggaatgtattgagaaggagcttactgcatag

SEQ ID NO: 59041 - DNA, 1470 bp, Artificial Sequence
  derived and/or modified sequence
atggtggcagagaggagtcccgcaaggtctcccggtagttggctgtttcctggactctggctcctggtcttatccggccctggtggtcttctccgggcacaggagcaaccctcttgtagacgtgccttcgacctatacttcgttctggataagtccggatccgtcgccaacaactggatcgagatttataatttcgtccaacagctcgccgagcgctttgtctctcctgaaatgaggttatctttcatcgttttctcctcccaggccaccattattcttcctctgaccggagatcggggaaagatcagcaaaggattggaagacctgaagcgcgtttctcctgtcggagagacctacatacatgaaggcctcaagctggccaacgaacagattcagaaggccggagggctaaagaccagctcgatcatcatcgctttaactgatgggaaactggacggactggtcccctcatacgctgagaaagaagctaaaatatctcgctccctgggcgctagcgtgtattgcgtaggagtgcttgacttcgaacaggctcaactggagagaatcgccgacagtaaggagcaagttttcccagtgaaggggggatttcaggctttgaagggtattatcaacagtatcctggctcagtcttgcaccgaaattcttgaactccagcccagctccgtatgcgtcggtgaggaatttcaaattgtcctgtcgggacgtggattcatgctaggaagtagaaatgggtccgtgttgtgtacatataccgtcaacgagacatacactacaagtgtgaaacccgtctctgtgcagctgaactccatgctgtgtccagcgcctatcctgaacaaagccggagagacccttgatgtgtctgtcagcttcaatggcggaaaatctgtaatcagcgggagcctgatcgtgactgcgaccgagtgtagcaacggaattgccgctataatagtgatcctggtgctcctgctgttactcggcattggcttgatgtggtggttctggccgctctgttgtaaggtggtcattaaagacccccctccaccccctgctcctgcacccaaggaggaggaggaggaacctctgccgaccaagaagtggccaaccgtcgatgcatcatattacggcggaagaggcgtgggagggattaagcggatggaggtacgatggggggataaaggaagcactgaggaaggggctagactggaaaaggccaagaacgctgtggtgaagatccctgaggaaacagaggaaccgattagacccaggccacctcgcccaaaaccaactcaccagccccctcagacaaagtggtacactcctataaaggggcgtctggacgctctgtgggcgcttctgaggcgacaatacgatcgggtgtccctgatgaggccccaggaaggcgacgaagtatgcatttgggagtgcatcgagaaggaacttaccgcgtag

SEQ ID NO: 59042 - DNA, 1473 bp, Artificial Sequence
  derived and/or modified sequence
aggatggtggcggagcggtccccggcccgcagccccgggagctggctgttccccgggctgtggctgttggtgctcagcggtcccggggggctgctgcgcgcccaggagcagccctcctgcagaagagcctttgatctctacttcgtcctggacaagtctgggagtgtggcaaataactggattgaaatttataatttcgtacagcaacttgcggagagatttgtgagccctgaaatgagattatctttcattgtgttttcttctcaagcaactattattttgccattaactggagacagaggcaaaatcagtaaaggcttggaggatttaaaacgtgttagtccagtaggagagacatatatccatgaaggactaaagctagcgaatgaacaaattcagaaagcaggaggcttgaaaacctccagtatcataattgctctgacagatggcaagttggacggtctggtgccatcatatgcagagaaagaggcaaagatatccaggtcacttggggctagtgtttattgtgttggtgtccttgattttgaacaagcacagcttgaaagaattgctgattccaaggagcaagttttccctgtcaaaggtggatttcaggctcttaaaggaataattaattctatactagctcagtcatgtactgaaatcctagaattgcagccctcaagtgtctgtgtgggggaggaatttcagattgtcttaagtggaagaggattcatgctgggcagtcggaatggcagtgttctctgcacttacactgtaaatgaaacatatacaacgagtgtaaaaccagtaagtgtacagcttaattctatgctttgtcctgcacctatcctgaataaagctggagaaactcttgatgtttcagtgagctttaatggaggaaaatctgtcatttcaggatcattaattgtcacagccacagaatgttctaacgggatcgcagccatcattgttattttggtgttactgctactcctggggatcggtttgatgtggtggttttggcccctttgctgcaaagtggttattaaggatcctccaccaccacccgcccctgcaccaaaagaggaggaagaagaacctttgcctactaaaaagtggccaactgtggatgcttcctattatggtggtcgaggggttggaggaattaaaagaatggaggttcgttggggtgataaaggatctactgaggaaggtgcaaggctagagaaagccaaaaatgctgtggtgaagattcctgaagaaacagaggaacccatcaggcctagaccacctcgacccaaacccacacaccagcctcctcagacaaaatggtacaccccaattaagggtcgtcttgatgctctctgggctttgttgaggcggcagtatgaccgggtttctttgatgcgacctcaggaaggagatgaggtttgtatatgggaatgtattgagaaagagctaactgcttga

SEQ ID NO: 59043 - DNA, 1470 bp, Artificial Sequence
  derived and/or modified sequence
atggtggccgagagaagccccgccagaagccccggcagctggctgttccccggcctgtggctgctggtgctgagcggccccggcggcctgctgagagcccaggagcagcccagctgcagaagagccttcgacctgtacttcgtgctggacaagagcggcagcgtggccaacaactggatcgagatctacaacttcgtgcagcagctggccgagagattcgtgagccccgagatgagactgagcttcatcgtgttcagcagccaggccaccatcatcctgcccctgaccggcgacagaggcaagatcagcaagggcctggaggacctgaagagagtgagccccgtgggcgagacctacatccacgagggcctgaagctggccaacgagcagatccagaaggccggcggcctgaagaccagcagcatcatcatcgccctgaccgacggcaagctggacggcctggtgcccagctacgccgagaaggaggccaagatcagcagaagcctgggcgccagcgtgtactgcgtgggcgtgctggacttcgagcaggcccagctggagagaatcgccgacagcaaggagcaggtgttccccgtgaagggcggcttccaggccctgaagggcatcatcaacagcatcctggcccagagctgcaccgagatcctggagctgcagcccagcagcgtgtgcgtgggcgaggagttccagatcgtgctgagcggcagaggcttcatgctgggcagcagaaacggcagcgtgctgtgcacctacaccgtgaacgagacctacaccaccagcgtgaagcccgtgagcgtgcagctgaacagcatgctgtgccccgcccccatcctgaacaaggccggcgagaccctggacgtgagcgtgagcttcaacggcggcaagagcgtgatcagcggcagcctgatcgtgaccgccaccgagtgcagcaacggcatcgccgccatcatcgtgatcctggtgctgctgctgctgctgggcatcggcctgatgtggtggttctggcccctgtgctgcaaggtggtgatcaaggaccccccccccccccccgcccccgcccccaaggaggaggaggaggagcccctgcccaccaagaagtggcccaccgtggacgccagctactacggcggcagaggcgtgggcggcatcaagagaatggaggtgagatggggcgacaagggcagcaccgaggagggcgccagactggagaaggccaagaacgccgtggtgaagatccccgaggagaccgaggagcccatcagacccagaccccccagacccaagcccacccaccagcccccccagaccaagtggtacacccccatcaagggcagactggacgccctgtgggccctgctgagaagacagtacgacagagtgagcctgatgagaccccaggagggcgacgaggtgtgcatctgggagtgcatcgagaaggagctgaccgcctag

SEQ ID NO: 59044 - protein, 756 aa, Artificial Sequence
  derived and/or modified sequence
MNGAPSPEDGASPSSPPLPPPPPPSWREFCESHARAAALDFARRFRLYLASHPQYAGPGAEAAFSRRFAELFLQHFEAEVARASGSLSPPILAPLSPGAEISPHDLSLESCRVGGPLAVLGPSRSSEDLAGPLPSSVSSSSTTSSKPKLKKRFSLRSVGRSVRGSVRGILQWRGTVDPPSSAGPLETSSGPPVLGGNSNSNSSGGAGTVGRGLVSDGTSPGERWTHRFERLRLSRGGGALKDGAGMVQREELLSFMGAEEAAPDPAGVGRGGGVAGPPSGGGGQPQWQKCRLLLRSEGEGGGGSRLEFFVPPKASRPRLSIPCSSITDVRTTTALEMPDRENTFVVKVEGPSEYIMETVDAQHVKAWVSDIQECLSPGPCPATSPRPMTLPLAPGTSFLTRENTDSLELSCLNHSESLPSQDLLLGPSESNDRLSQGAYGGLSDRPSASISPSSASIAASHFDSMELLPPELPPRIPIEEGPPTGTVHPLSAPYPPLDTPETATGSFLFQGEPEGGEGDQPLSGYPWFHGMLSRLKAAQLVLTGGTGSHGVFLVRQSETRRGEYVLTFNFQGKAKHLRLSLNEEGQCRVQHLWFQSIFDMLEHFRVHPIPLESGGSSDVVLVSYVPSSQRQQEPTTSHDPPQPPEPPSWTDPPQPGAEEASRAPEVAAAAAAAAKERQEKEKAGGGGVPEELVPVVELVPVVELEEAIAPGSEAQGAGSGGDAGVPPMVQLQQSPLGGDGEEGGHPRAINNQYSFV

SEQ ID NO: 59045 - protein, 683 aa, Artificial Sequence
  derived and/or modified sequence
MNGAPSPEDGASPSSPPLPPPPPPSWREFCESHARAAALDFARRFRLYLASHPQYAGPGAEAAFSRRFAELFLQHFEAEVARASGSLSPPILAPLSPGAEISPHDLSLESCRVGGPLAVLGPSRSSEDLAGPLPSSVSSSSTTSSKPKLKKRFSLRSVGRSVRGSVRGILQWRGTVDPPSSAGPLETSSGPPVLGGNSNSNSSGGAGTVGRGLVSDGTSPGERWTHRFERLRLSRGGGALKDGAGMVQREELLSFMGAEEAAPDPAGVGRGGGVAGPPSGGGGQPQWQKCRLLLRSEGEGGGGSRLEFFVPPKASRPRLSIPCSSITDVRTTTALEMPDRENTFVVKVEGPSEYIMETVDAQHVKAWVSDIQECLSPGPCPATSPRPMTLPLAPGTSFLTRENTDSLELSCLNHSESLPSQDLLLGPSESNDRLSQGAYGGLSDRPSASISPSSASIAASHFDSMELLPPELPPRIPIEEGPPTGTVHPLSAPYPPLDTPETATGSFLFQGEPEGGEGDQPLSGYPWFHGMLSRLKAAQLVLTGGTGSHGVFLVRQSETRRGEYVLTFNFQGKAKHLRLSLNEEGQCRVQHLWFQSIFDMLEHFRVHPIPLESGGSSDVVLVSYVPSSQRQQGEQSRSAGEEVPVHPRSEAGSRLGAMRGCAREMDATPMPPAPSCPSERVTV

SEQ ID NO: 59046 - protein, 373 aa, Artificial Sequence
  derived and/or modified sequence
MAEASRPRLSIPCSSITDVRTTTALEMPDRENTFVVKVEGPSEYIMETVDAQHVKAWVSDIQECLSPGPCPATSPRPMTLPLAPGTSFLTRENTDSLELSCLNHSESLPSQDLLLGPSESNDRLSQGAYGGLSDRPSASISPSSASIAASHFDSMELLPPELPPRIPIEEGPPTGTVHPLSAPYPPLDTPETATGSFLFQGEPEGGEGDQPLSGYPWFHGMLSRLKAAQLVLTGGTGSHGVFLVRQSETRRGEYVLTFNFQGKAKHLRLSLNEEGQCRVQHLWFQSIFDMLEHFRVHPIPLESGGSSDVVLVSYVPSSQRQQGEQSRSAGEEVPVHPRSEAGSRLGAMRGCAREMDATPMPPAPSCPSERVTV

SEQ ID NO: 59047 - DNA, 2052 bp, Artificial Sequence
  derived and/or modified sequence
atgaacggggccccaagccctgaagacggcgccagccccagcagtccacccttaccaccccctcctccacctagctggagagaattttgtgaatcacatgccagagcagcagcactggactttgctcggagatttcgcctgtatctcgcctcacacccacagtacgctggcccgggcgctgaagcggctttttcacggcgttttgcagagctatttctccagcacttcgaagctgaggtggcccgagcttctggatctctgagccccccgatactggctccactgtcccccggggcggaaatctccccccacgacttaagtctggaaagctgtcgcgtcggtggtcccctagcggtgcttgggccttccaggagtagtgaagaccttgccgggcccctgccatcaagcgtgtcgagcagtagcacgacaagctcaaagcccaaactgaaaaaaagatttagcttgcgttctgtcggacggtcggtgcgcggttccgtgagggggatcctccaatggagaggtactgtcgatcccccatcttcagcagggccacttgaaacctcatcgggcccacccgtgcttgggggaaattcaaatagcaattccagcggaggcgccgggaccgtgggcagggggctggtttctgatggtacttctcccggagagaggtggacacaccggttcgaacgcctgagattatccaggggggggggtgcgctgaaggacggggccgggatggtacaaagagaggagctcctgtcatttatgggggctgaggaggcagcccccgatcccgcaggggtgggtcgggggggcggcgtagctggcccaccatcaggtggcggcggacaacctcaatggcagaagtgccgactgctacttagatccgaaggcgagggtggtggaggctcacgcctcgagttcttcgtgccaccgaaagctagtcgtcccagactcagtattccatgttcaagcatcaccgacgtgcgaactacgaccgccctggagatgccagatagagaaaacactttcgtggtcaaagtcgaagggcccagcgagtatatcatggagacagttgatgctcagcacgtcaaggcttgggtttccgacatccaggaatgtctttcccctggcccttgcccagcaactagtccaagacccatgaccctgccattagctcccggaacgtccttcctgactagggagaatacagattcactggagctgtcgtgtctaaaccatagcgagagcctgccttctcaagaccttctactcggacctagcgagagcaacgatcgattatcccaaggagcctacgggggcctatctgaccgcccatccgcaagcatttccccatcctccgcatccattgccgcaagccacttcgattccatggagctactcccccccgaacttcctcccaggataccgatcgaggaggggccccctactgggaccgtgcaccccctctctgcaccttatccaccccttgacacacctgagactgctaccgggtctttcctttttcagggggagccagagggaggtgagggggatcagcctctgagtggatacccttggtttcacggcatgctatctcgattgaaggctgcacagctggtcctgacaggtgggaccggctcccatggcgtgttccttgtgagacagtccgaaacacggagaggagaatacgtattaacgtttaatttccagggaaaggcaaagcatttacgactgtcactgaacgaggagggtcagtgccgagtgcaacacctgtggtttcagagcatatttgatatgctggagcactttcgagtacatcccatcccccttgagagcggcggatccagcgatgtcgtgttggtatcttatgtaccgtcttctcagcggcagcagggcgaacagtctcggtccgctggggaggaggtccctgtgcatccaaggtccgaagcaggtagtcgattgggagccatgcgcggctgcgccagagagatggacgcaacccccatgcctccagccccaagttgtcctagcgaaagagtgaccgtgtag

SEQ ID NO: 59048 - DNA, 1122 bp, Artificial Sequence
  derived and/or modified sequence
atggccgaagcttccagaccacggctctccatcccctgcagttcaatcactgatgtcaggacaacaacggctctcgagatgcctgatcgggagaacacttttgtggtgaaggtcgagggcccatcggaatacatcatggaaaccgtagacgcccagcacgtcaaggcttgggtaagcgatattcaggaatgcctgtctcccggtccgtgccccgcaacttctcctcgccctatgaccctgccactggctcccgggactagcttcctgaccagggagaataccgactccctagaactgagttgcttaaatcactcagaatctctgccttcacaagatctccttctcgggccaagcgagagtaatgacaggttatctcagggtgcttacggcgggctgagcgataggccttccgcctcgatttctccctcctccgcaagtatcgccgccagccacttcgacagtatggagttgctccctcccgagctgccaccacgcattcctatcgaagagggcccgcctacgggcactgtgcatcccttgagtgccccttaccctcctttggatactccagaaaccgcaactggaagtttcctcttccaaggtgagcctgaaggaggggagggggatcagcccctgtctggttacccctggtttcatgggatgctgtcacggctgaaggcagcgcagctggtgcttacgggagggactgggtcccacggggtcttcctggtccgacagtccgaaaccagacggggggagtacgtcctgacctttaacttccagggcaaggccaagcacctgcgactgtctctgaatgaagaggggcagtgtcgcgtgcagcacctctggtttcagtccatctttgatatgttggagcatttccgtgtccatcccatccccctagagtcgggtggcagcagcgacgtggtcctcgttagctacgtcccatcctcccagagacagcagggtgaacagagcaggagcgcaggggaggaagtcccagtccaccctcgttctgaggcaggtagcaggctgggagcaatgcgaggttgcgctcgtgaaatggacgcaacgccaatgcctcctgctccttcctgtccctcagagcgtgtgaccgtgtag

SEQ ID NO: 59049 - DNA, 2052 bp, Artificial Sequence
  derived and/or modified sequence
atgaatggagcccccagcccagaagatggagccagccccagcagcccccccctgcccccacctcctcctccttcctggagggagttctgtgagagccacgcccgggctgctgccctggactttgcccggcgcttccggctgtacctggccagccacccccagtatgccggccctggagctgaggccgccttcagccgccgctttgctgagctgttcctgcagcactttgaggccgaggtggcccgggccagcggcagcctgagcccccccatcctggcccccctgagccctggagctgagatcagcccccatgacctgagcctggagagctgccgggtgggcggccccctggccgtgctgggccccagccgcagcagcgaggacctggccggccccctgcccagctctgtgagcagcagcagcaccaccagcagcaagcccaagctgaagaagcgcttcagcctgcggtctgtgggccgctctgtgcggggctctgtgcggggcatcctgcagtggaggggcaccgtggacccccccagcagcgctggccccctggagaccagcagcggcccccctgtgctgggcggcaacagcaacagcaacagcagtggaggagctggcaccgtgggccggggcctggtgtctgatggcaccagccctggagagcgctggacccacagatttgagcggctgcggctgagccggggcggcggggccctgaaggatggagctggcatggtgcagcgggaggagctgctgtccttcatgggcgctgaggaggccgccccagaccctgctggggtgggccggggcggcggcgtggccggccccccatctgggggcggcggccagccccagtggcagaagtgccgcctgctgctgcggtctgagggggagggcggcggcggcagccggctggagttctttgtgccccccaaggccagccggccccggctgagcatcccctgcagcagcatcacagatgtgaggaccaccacagccctggagatgccagaccgggagaacacctttgtggtgaaggtggagggccccagcgagtacatcatggagaccgtggatgcccagcacgtgaaggcctgggtgtctgacatccaggagtgcctgagccctggcccctgcccagccaccagcccccggcccatgaccctgcccctggcccctggcaccagcttcctgacccgggagaacacagacagcctggagctgagctgcctgaaccacagcgagagcctgcccagccaggacctgctgctgggccccagcgagagcaatgaccggctgagccagggcgcctatggaggcctgagtgaccggcccagcgccagcatcagccccagcagcgccagcattgctgccagccactttgacagcatggagctgctgcccccagagctgcccccacgcatccccatcgaggagggcccccccaccggcaccgtgcaccccctgagcgccccctacccacccctggacaccccagagacagccaccggcagcttcctgttccagggcgagcctgagggcggggagggggaccagcccctgagcggctacccctggttccacggcatgctgagccggctgaaggccgcccagctggtgctgactggaggcaccggcagccatggagtcttcctggtgcggcagagcgagacccggcggggggagtatgtgctgaccttcaacttccagggcaaggccaagcacctgcggctgagcctgaatgaggagggccagtgccgggtgcagcacctgtggttccagagcatctttgacatgctggagcacttccgggtgcaccccatccccctggagagcggcggcagcagtgatgtggtgctggtgtcctatgtgcccagcagccagaggcagcagggcgagcagagccgctctgctggggaggaggtgcctgtgcaccccaggtctgaggccggcagccggctgggcgccatgaggggctgtgcccgggagatggatgccacccccatgcccccagcccccagctgccccagcgagcgggtgacagtgtag

SEQ ID NO: 59050 - DNA, 1122 bp, Artificial Sequence
  derived and/or modified sequence
atggccgaggccagccggccccggctgagcatcccctgcagcagcatcacagatgtgaggaccaccacagccctggagatgccagaccgggagaacacctttgtggtgaaggtggagggccccagcgagtacatcatggagaccgtggatgcccagcacgtgaaggcctgggtgtctgacatccaggagtgcctgagccctggcccctgcccagccaccagcccccggcccatgaccctgcccctggcccctggcaccagcttcctgacccgggagaacacagacagcctggagctgagctgcctgaaccacagcgagagcctgcccagccaggacctgctgctgggccccagcgagagcaatgaccggctgagccagggcgcctatggaggcctgagtgaccggcccagcgccagcatcagccccagcagcgccagcattgctgccagccactttgacagcatggagctgctgcccccagagctgcccccacgcatccccatcgaggagggcccccccaccggcaccgtgcaccccctgagcgccccctacccacccctggacaccccagagacagccaccggcagcttcctgttccagggcgagcctgagggcggggagggggaccagcccctgagcggctacccctggttccacggcatgctgagccggctgaaggccgcccagctggtgctgactggaggcaccggcagccatggagtcttcctggtgcggcagagcgagacccggcggggggagtatgtgctgaccttcaacttccagggcaaggccaagcacctgcggctgagcctgaatgaggagggccagtgccgggtgcagcacctgtggttccagagcatctttgacatgctggagcacttccgggtgcaccccatccccctggagagcggcggcagcagtgatgtggtgctggtgtcctatgtgcccagcagccagaggcagcagggcgagcagagccgctctgctggggaggaggtgcctgtgcaccccaggtctgaggccggcagccggctgggcgccatgaggggctgtgcccgggagatggatgccacccccatgcccccagcccccagctgccccagcgagcgggtgacagtgtag

SEQ ID NO: 59051 - DNA, 2052 bp, Artificial Sequence
  derived and/or modified sequence
atgaacggcgcccccagccccgaggacggcgccagccccagcagccctcctctccctccaccacctcccccatcctggcgagagttttgtgagtcccacgctcgagcagcagcactggactttgcccgtcggtttagattatacctggcaagtcatccccagtatgctggaccaggggccgaagccgcattctcgagacgcttcgctgagttatttctccaacacttcgaagccgaagtggccagagcaagtgggtccttgagtcctccgattctggcgccgctcagccccggtgctgaaattagtcctcacgacctgtctcttgagagctgtcgtgtgggaggacctctcgccgtgcttggtccaagccgaagctctgaagacttagcaggtcccttgccgagctctgtgagcagctcctcaactacctcgagcaaacccaaactgaagaagaggttctctcttcgctcagttggcaggtcagtgaggggcagcgtccgggggatccttcagtggaggggtacagtagatccaccaagttcagcagggcccttagagacctcttccgggcctccagtcctggggggtaatagcaattccaactccagtggaggagcagggaccgttggccgaggcttggttagcgacgggacctctcccggcgaacgctggacccacagatttgagcgtttacgcctttcccgcggaggcggggctctgaaggatggagccggcatggtacagagggaagagctgctgtcgttcatgggggcagaggaagcagctcccgatccagccggggtcggaaggggcggaggggttgcgggacccccatctggcggcggaggacagcctcagtggcagaagtgccgcctgctactgcgatccgagggcgagggcggcggaggcagccgcctggagttcttcgtgccacctaaggccagcagaccaagactatcaataccttgttcctcaatcacggacgtacgcactaccaccgccctggaaatgcccgacagggaaaatacttttgtagtcaaagtggaggggccatccgagtacattatggagacagtagatgcccagcatgttaaggcttgggttagcgacatccaagaatgcctctctcctggaccttgccctgcaacctccccgcggccaatgaccctccccctggcacccggaacttcctttctgaccagagagaacacggacagcctggaactctcctgcctgaaccattcggaatccctgccttcccaggatcttctcctcggcccctctgagtctaatgacagattgtcacagggcgcttatggaggcctctccgataggccatcagctagcatcagtccctcgtctgctagtatcgccgcctctcacttcgacagcatggaactgctgcctccagagctccccccacgcatcccaattgaggagggccctccaacaggcaccgttcatcctcttagtgcaccatatcctcctcttgacactccagagaccgcgaccggttctttcctgttccagggtgagccggaaggaggagagggtgaccagcccctatctggctacccttggttccatggcatgctgagccgcttaaaggctgcacaattggtgcttacaggcggcactgggagccatggtgtctttctggtaaggcagtctgagactcggcgcggggaatatgtgctcacattcaattttcagggcaaggcaaaacacctccgcctgtcactgaacgaggaaggtcagtgccgcgttcagcacttgtggttccagtctatattcgacatgcttgagcactttcgggttcaccccattccactggagagtggcggttcttccgacgtcgtcttggtgagttacgtgcccagcagtcagagacagcagggggagcagagtaggtcagcaggcgaggaggtgcctgtgcacccacgcagcgaggcaggaagccgccttggggccatgagagggtgcgcacgcgagatggatgccacacccatgcctccagctccctcttgcccaagcgaaagggttacggtttag

SEQ ID NO: 59052 - DNA, 1122 bp, Artificial Sequence
  derived and/or modified sequence
atggccgaggccagccggccccggctgagcatcccctgcagcagcattaccgacgtccggactactactgccctcgaaatgccggatcgggaaaatacgttcgttgtgaaagtcgaaggaccgagcgagtatatcatggaaactgttgatgcacaacacgtgaaagcctgggtgagcgacatccaggaatgccttagccccggaccttgtccagcaacctcccctagaccaatgactctcccgttagccccagggacttccttcctgacccgggagaatacagacagtctcgaattatcctgcctgaaccactcggagagcctgccgagccaagacctgctgttgggcccctccgagtccaacgaccgcctctctcaaggcgcatacgggggactgtcggaccgtccctcagcgtccatatccccctcatctgcatcgatcgccgcgagccacttcgacagcatggagttgctgccccccgagctgccacccagaatcccaattgaagaagggcctccaacaggaacagtgcaccccctttcagctccctatccccctctggatacccctgaaactgcgacgggctcattcctgtttcagggggagcctgaggggggcgagggggatcagccacttagtggttatccctggttccacggcatgctctctcgtctcaaggcagctcagttagttctcaccgggggaacaggatcccacggggtattcctggttcgccagtccgaaaccaggcgcggggaatatgttctcacctttaattttcaaggtaaagctaagcatcttaggctgagtctcaatgaggaaggacaatgtagggtgcagcatctatggtttcagagcatctttgacatgctcgagcatttcagggtacatcctattccattagaatcagggggcagttcagacgttgtgctagtgagttacgtgccaagtagtcaacgccaacagggagagcagtcgaggagcgcaggggaggaagtgcccgttcatcccagaagcgaagccgggtcgcggctgggagcgatgaggggatgtgcgcgagagatggacgccactcccatgccaccggctccctcctgcccttcagaacgtgtcacagtgtag

SEQ ID NO: 59053 - DNA, 2052 bp, Artificial Sequence
  derived and/or modified sequence
atgaacggagccccatcgcccgaagatggcgcatcacccagttctcctcctctgccaccaccccctcctcctagctggagggaattttgcgagtctcatgccagggccgctgcccttgattttgcaaggcgatttcggctgtacctcgcctctcatccccagtatgctggccctggggcagaggctgccttttcccgacgattcgccgagctatttctccagcatttcgaagccgaggttgcacgtgcgtcgggctctcttagcccccctatcctggcgccactctctcctggagcggagatcagtcctcacgatctctcccttgaaagttgccgggtaggcggacccctggctgtgctcggacctagcagatcatccgaggatttagcagggcctcttccctctagcgtctcatcttcctctaccacctctagcaaaccaaagctgaaaaaacggttttctttgcggtccgtgggacgcagtgtcaggggttctgttcggggtatcctgcagtggcggggaaccgtcgatccgccaagcagcgcaggcccactggaaaccagcagcggtcctccagtactgggcggtaatagtaattctaactcgagcgggggagcaggtactgttggtcgtgggttagtcagtgatggcactagccctggagagaggtggactcacagattcgaacgactacggctgtcaagaggaggaggcgcactgaaagatggggcagggatggtccaaagggaggagttgctgtcttttatgggcgctgaagaagcagctcccgaccctgctggggtaggacggggtggaggagttgctggaccgccttccggcggaggaggtcagccccaatggcaaaagtgtcggctgcttctacgctccgagggcgagggcggtggtgggtccaggttggagtttttcgtgcctccaaaggcgtctcggccacgattgtcaattccttgctcatctatcactgacgtgcggacaacgacagccctcgagatgccagaccgagaaaacacctttgtggttaaggtcgagggtccgagtgagtatataatggagactgtcgatgcacagcacgtgaaggcctgggtgtctgatatacaagagtgtctgtcccccggtccatgccccgctacgtctcctaggcccatgacgttgcccctggcaccagggacttcattcttgacccgcgagaacactgactccctggagctcagctgcctgaaccacagtgaatcactcccatcgcaggacctcctgctaggccctagtgaatctaatgaccggctgtctcaaggggcttatgggggactctcagaccggccatccgcctccatctctcccagctctgcctccatcgcagctagtcatttcgattcgatggagctcctccctcccgaactccctcccaggatccccattgaggaaggcccacctactggcacggttcacccgctctctgcaccgtatccccctctggatacacctgagaccgcgacaggctccttcctgtttcagggcgagcccgagggcggagaaggcgaccagccgctgagtggatacccctggttccacggaatgctgagcagacttaaagccgctcagctggtgctgaccgggggaaccggctctcacggagtgttcctcgtacggcagtccgagacacggcgtggagaatacgtcttaacctttaacttccagggcaaagcaaaacatctccggctgtccttgaacgaggaaggacagtgcagggtccagcatctttggtttcagtctatctttgacatgctggaacacttcagggttcacccaatccccttagaaagcgggggttcgtcagatgtggttctggtgagctatgtgccatcctcccagcggcaacagggtgaacagagcagatctgcgggagaggaagtaccagtgcatcccagatctgaggccggttcccgcctaggcgctatgagaggctgtgcgagggaaatggacgctacacccatgccccctgcgccttcatgtccatcggaaagagtgaccgtgtag

SEQ ID NO: 59054 - DNA, 1122 bp, Artificial Sequence
  derived and/or modified sequence
atggccgaggccagtcgtccacgcctgagcatcccttgcagctccattacagacgtgagaaccacaacagctcttgagatgccagaccgagagaatacctttgtcgtaaaggttgagggtccaagcgagtatatcatggagacagtcgatgcccagcatgtcaaagcctgggtgtccgatatccaggagtgtttgtctccaggtccgtgccccgcaacgtcaccaaggccaatgacacttcctctggcacccggaaccagcttcttgacccgggaaaatacggattctctggagctgtcatgcctcaaccatagcgagtcattgccctctcaggatctgcttctggggccttccgaaagcaatgatagactgagtcagggcgcatatgggggtctgagtgataggccttcagcctctatcagcccatcgagtgcctccatcgcagcgagccattttgacagcatggagctgctaccccctgagttgccacctcgcattcctatcgaggagggacctcctacgggtaccgtgcaccctctctccgctccatacccaccgctggacactcccgagacagccaccggttctttcttatttcagggcgagccagaagggggagagggcgaccagcccttgtctggctacccctggttccacggtatgctctctcgactcaaagcggcacagttggtgctgactggcggaacaggctcccacggggtgtttctcgttagacagtcagaaacccggagaggagaatatgtgctgacttttaacttccagggcaaggccaaacatctgcgcctttcactcaatgaagaaggacaatgtcgtgtgcagcacctgtggttccagtcgatttttgatatgttggaacactttcgcgtacaccccatacctttagaaagcggaggatccagtgatgtggtgctcgtaagctatgttccaagctcgcagcgccagcagggagagcagtcacgttctgccggtgaggaagttccagtccatccccgatctgaagctgggtctcgactaggcgctatgaggggctgtgccagagagatggacgctaccccaatgcctcctgctccatcctgtcctagtgagcgagtcacagtatag

SEQ ID NO: 59055 - DNA, 3088 bp, Artificial Sequence
  derived and/or modified sequence
aagtatgaaggtgcccttccctcccgccgctgttctctatggtctcttccttcagcgacgggaaagggggtcctgacgcctgcgcggaaccgggctgggcgctcgtcgcgtagtgggtgggggcgcagggagcgggagccgccgccgccgccgccgccgccggagctaacctcggggaccgagatgcagctgctgccgcccacccctcgtcttctggctgcctccctctttgtgccccacaggctccccctctccacctcctggggcccatcatgaatggtgccccttccccagaggacggggcctccccctcgtctcccccgctgcccccacccccgccccctagttggcgggagttctgtgagtcccacgcccgggctgcggctctggactttgcccgccgttttcgcctctacctggcctcccacccccaatatgcggggcccggggccgaggctgccttctcccgccgttttgctgagctcttcctgcagcactttgaagccgaggtggcccgggcctctggctccctgtcgccacccatcctggctcccctgagccctggtgcggagatttcgccacatgacctgtcccttgagagctgcagggtgggtgggcccctggctgtgctgggcccttctcgatcatctgaggacctggccggccccctcccttcctcagtctcttcctcctctacaacctcctccaagccgaagctcaagaagcgcttttccctgcgttcagtgggtcgctctgtccgaggctcagtccgtggcatcctgcagtggcgggggaccgttgaccctccctcctccgctgggcccctggagacctcgtcaggccccccagtcttaggtggaaacagcaactccaactcctctggcggggctgggaccgttggtaggggactggtcagtgatggaacgtcccctggggaaagatggactcaccgttttgagaggctgagactcagtcggggagggggcgccttgaaggatggagcagggatggtgcagagggaagagctgctgagtttcatgggggctgaggaggcagcccctgacccagccggagtgggccggggaggaggggtggctgggcctccttcagggggaggagggcagcctcagtggcagaagtgtcgcctgctgcttcgaagtgaaggagaaggaggaggaggaagtcgcctggagttctttgtaccacccaaggcctctcggccccgactcagcatcccctgctcttctatcacagacgtccggacaaccacagccctggagatgcctgaccgggagaacacgtttgtggttaaggtggaaggtccatccgagtatatcatggagacagtggatgcccagcatgtgaaggcctgggtgtctgacatccaagaatgcctgagcccaggaccctgccctgctaccagtccccgccccatgaccctccctctggcccctgggacctcattccttacaagggagaacacagacagcctggagctgtcctgcctgaatcactcggagagtctacccagccaggacctgctgcttggacccagcgagagcaatgaccgcctgtcgcagggggcatatgggggcctctcagaccgcccctcggcatccatctcccccagctctgcctccattgccgcctcccattttgactcgatggaactgcttcccccagagttgcccccccgcatccccattgaagagggacccccaacagggacagttcatcccctctcagccccctaccctcccttggacactccggaaacagccacagggtccttcctgttccagggggagccagagggcggtgagggggaccagcccctctcagggtatccttggttccacgggatgctctctcggctcaaggctgcacagttggtgctgactggcggcactggctcccacggtgtcttcctggtgcgccagagtgagacaaggcggggtgaatacgtcctcaccttcaacttccagggcaaggccaagcacctgcgtttgtcgctgaacgaggagggtcagtgccgggtccagcacctgtggttccagtccattttcgatatgctcgagcacttccgggtgcaccccatccctttggagtcgggaggctccagtgatgttgtccttgtcagctatgtcccatcctcccagcgacagcagggtgagcagagcaggtctgcaggggaggaggtgcccgtgcacccaagaagtgaggccgggagcaggctgggagccatgcgggggtgtgcgagggagatggatgccaccccgatgcctcctgcaccctcatgcccttcggagcgagtgactgtgtaaccgaccacctcccatgacccaccccagccccctgaacccccttcatggacagatcccccacagcctggggcagaagaggcgtcgagggcgccagaagtggcggcagcagcagccgcagcagccaaagagaggcaagagaaagagaaagcgggcggtggaggggtcccggaagagctggtccccgtggttgagctggtccccgtggttgaattggaagaggccatagccccaggctcagaggcccagggcgctgggtctggtggggacgcgggggtgcccccaatggtgcagctgcagcagtcaccactagggggtgatggagaggaagggggccaccccagggccattaacaaccagtactccttcgtgtgagccaaccccacccgctccaccctttttaaaccccccagccctgctcgtgagattgggctgggtagggacagaggaggccgaaatccctcccccatgcttcctgacccttgttggccaagggcatctttgatggtacaagcagaggctcgggagaggctcccgtcacacactacaggtcccctccccagggcaggggatttgggctccatgagctccttgaggggctcttctggtcagccccaccctgggggccatttccccattaactacccccagcccgaggcagggtgagggggaagggctgtcagttacattaaggtggttgttgttgttgttttaaacaaaatggagaagcataaataaataaaaaggtttatctcggttctatcgtg

SEQ ID NO: 59056 - DNA, 1488 bp, Artificial Sequence
  derived and/or modified sequence
aaggccggttctctatggtcgacatcgcccctttgtcccgaatttcctccgggaggacgctctggtgggatccaagcacttcccccgctgcgtctgtggtcgcttttaggtgcaactggagaaggcactgaagccctacgagattcacaccgtcttcggtctcctggggtcggcgccgagtgggaggatggcggaagcctctcggccccgactcagcatcccctgctcttctatcacagacgtccggacaaccacagccctggagatgcctgaccgggagaacacgtttgtggttaaggtggaaggtccatccgagtatatcatggagacagtggatgcccagcatgtgaaggcctgggtgtctgacatccaagaatgcctgagcccaggaccctgccctgctaccagtccccgccccatgaccctccctctggcccctgggacctcattccttacaagggagaacacagacagcctggagctgtcctgcctgaatcactcggagagtctacccagccaggacctgctgcttggacccagcgagagcaatgaccgcctgtcgcagggggcatatgggggcctctcagaccgcccctcggcatccatctcccccagctctgcctccattgccgcctcccattttgactcgatggaactgcttcccccagagttgcccccccgcatccccattgaagagggacccccaacagggacagttcatcccctctcagccccctaccctcccttggacactccggaaacagccacagggtccttcctgttccagggggagccagagggcggtgagggggaccagcccctctcagggtatccttggttccacgggatgctctctcggctcaaggctgcacagttggtgctgactggcggcactggctcccacggtgtcttcctggtgcgccagagtgagacaaggcggggtgaatacgtcctcaccttcaacttccagggcaaggccaagcacctgcgtttgtcgctgaacgaggagggtcagtgccgggtccagcacctgtggttccagtccattttcgatatgctcgagcacttccgggtgcaccccatccctttggagtcgggaggctccagtgatgttgtccttgtcagctatgtcccatcctcccagcgacagcagggtgagcagagcaggtctgcaggggaggaggtgcccgtgcacccaagaagtgaggccgggagcaggctgggagccatgcgggggtgtgcgagggagatggatgccaccccgatgcctcctgcaccctcatgcccttcggagcgagtgactgtgtaaccgaccacctcccatgacccaccccagccccctgaacccccttcatggacagatcccccacagcctggggcagaagaggcgtcgagggcgccagaagtggcggcagcagcagccgcagcagccaaagagaggcaagagaaagagaaagcgggcggtggaggggtcccggaagagctggt

SEQ ID NO: 59057 - DNA, 2052 bp, Artificial Sequence
  derived and/or modified sequence
atgaacggcgcccccagccccgaggacggcgccagccccagcagcccccccctgccccccccccccccccccagctggagagagttctgcgagagccacgccagagccgccgccctggacttcgccagaagattcagactgtacctggccagccacccccagtacgccggccccggcgccgaggccgccttcagcagaagattcgccgagctgttcctgcagcacttcgaggccgaggtggccagagccagcggcagcctgagcccccccatcctggcccccctgagccccggcgccgagatcagcccccacgacctgagcctggagagctgcagagtgggcggccccctggccgtgctgggccccagcagaagcagcgaggacctggccggccccctgcccagcagcgtgagcagcagcagcaccaccagcagcaagcccaagctgaagaagagattcagcctgagaagcgtgggcagaagcgtgagaggcagcgtgagaggcatcctgcagtggagaggcaccgtggacccccccagcagcgccggccccctggagaccagcagcggcccccccgtgctgggcggcaacagcaacagcaacagcagcggcggcgccggcaccgtgggcagaggcctggtgagcgacggcaccagccccggcgagagatggacccacagattcgagagactgagactgagcagaggcggcggcgccctgaaggacggcgccggcatggtgcagagagaggagctgctgagcttcatgggcgccgaggaggccgcccccgaccccgccggcgtgggcagaggcggcggcgtggccggcccccccagcggcggcggcggccagccccagtggcagaagtgcagactgctgctgagaagcgagggcgagggcggcggcggcagcagactggagttcttcgtgccccccaaggccagcagacccagactgagcatcccctgcagcagcatcaccgacgtgagaaccaccaccgccctggagatgcccgacagagagaacaccttcgtggtgaaggtggagggccccagcgagtacatcatggagaccgtggacgcccagcacgtgaaggcctgggtgagcgacatccaggagtgcctgagccccggcccctgccccgccaccagccccagacccatgaccctgcccctggcccccggcaccagcttcctgaccagagagaacaccgacagcctggagctgagctgcctgaaccacagcgagagcctgcccagccaggacctgctgctgggccccagcgagagcaacgacagactgagccagggcgcctacggcggcctgagcgacagacccagcgccagcatcagccccagcagcgccagcatcgccgccagccacttcgacagcatggagctgctgccccccgagctgccccccagaatccccatcgaggagggcccccccaccggcaccgtgcaccccctgagcgccccctacccccccctggacacccccgagaccgccaccggcagcttcctgttccagggcgagcccgagggcggcgagggcgaccagcccctgagcggctacccctggttccacggcatgctgagcagactgaaggccgcccagctggtgctgaccggcggcaccggcagccacggcgtgttcctggtgagacagagcgagaccagaagaggcgagtacgtgctgaccttcaacttccagggcaaggccaagcacctgagactgagcctgaacgaggagggccagtgcagagtgcagcacctgtggttccagagcatcttcgacatgctggagcacttcagagtgcaccccatccccctggagagcggcggcagcagcgacgtggtgctggtgagctacgtgcccagcagccagagacagcagggcgagcagagcagaagcgccggcgaggaggtgcccgtgcaccccagaagcgaggccggcagcagactgggcgccatgagaggctgcgccagagagatggacgccacccccatgccccccgcccccagctgccccagcgagagagtgaccgtgtag

SEQ ID NO: 59058 - DNA, 1122 bp, Artificial Sequence
  derived and/or modified sequence
atggccgaggccagcagacccagactgagcatcccctgcagcagcatcaccgacgtgagaaccaccaccgccctggagatgcccgacagagagaacaccttcgtggtgaaggtggagggccccagcgagtacatcatggagaccgtggacgcccagcacgtgaaggcctgggtgagcgacatccaggagtgcctgagccccggcccctgccccgccaccagccccagacccatgaccctgcccctggcccccggcaccagcttcctgaccagagagaacaccgacagcctggagctgagctgcctgaaccacagcgagagcctgcccagccaggacctgctgctgggccccagcgagagcaacgacagactgagccagggcgcctacggcggcctgagcgacagacccagcgccagcatcagccccagcagcgccagcatcgccgccagccacttcgacagcatggagctgctgccccccgagctgccccccagaatccccatcgaggagggcccccccaccggcaccgtgcaccccctgagcgccccctacccccccctggacacccccgagaccgccaccggcagcttcctgttccagggcgagcccgagggcggcgagggcgaccagcccctgagcggctacccctggttccacggcatgctgagcagactgaaggccgcccagctggtgctgaccggcggcaccggcagccacggcgtgttcctggtgagacagagcgagaccagaagaggcgagtacgtgctgaccttcaacttccagggcaaggccaagcacctgagactgagcctgaacgaggagggccagtgcagagtgcagcacctgtggttccagagcatcttcgacatgctggagcacttcagagtgcaccccatccccctggagagcggcggcagcagcgacgtggtgctggtgagctacgtgcccagcagccagagacagcagggcgagcagagcagaagcgccggcgaggaggtgcccgtgcaccccagaagcgaggccggcagcagactgggcgccatgagaggctgcgccagagagatggacgccacccccatgccccccgcccccagctgccccagcgagagagtgaccgtgtag

SEQ ID NO: 59059 - protein, 458 aa, Artificial Sequence
  derived and/or modified sequence
MSSSSYAKNGTADGPHSPTSQVARGTTTRRSRLKRSDGSTTSTSFILRQGSADSYTSRPSDSDVSLEEDREAIRQEREQQAAIQLERAKSKPVAFAVKTNVSYCGALDEDVPVPSTAISFDAKDFLHIKEKYNNDWWIGRLVKEGCEIGFIPSPLRLENIRIQQEQKRGRFHGGKSSGNSSSSLGEMVSGTFRATPTSTAKQKQKVTEHIPPYDVVPSMRPVVLVGPSLKGYEVTDMMQKALFDFLKHRFDGRISITRVTADISLAKRSVLNNPSKRAIIERSNTRSSLAEVQSEIERIFELARSLQLVVLDADTINHPAQLIKTSLAPIIVHVKVSSPKVLQRLIKSRGKSQSKHLNVQLVAADKLAQCPPSQRMRHSNHSTENSPIERRSLMTSDENYHNERARKSRNRLSSSSQHSRDHYPLVEEDYPDSYQDTYKPHRNRGSPGGYSHDSRHRL

SEQ ID NO: 59060 - protein, 415 aa, Artificial Sequence
  derived and/or modified sequence
FYFLCQGSADSYTSRPSDSDVSLEEDREAIRQEREQQAAIQLERAKSKPVAFAVKTNVSYCGALDEDVPVPSTAISFDAKDFLHIKEKYNNDWWIGRLVKEGCEIGFIPSPLRLENIRIQQEQKRGRFHGGKSSGNSSSSLGEMVSGTFRATPTSTAKQKQKVTEHIPPYDVVPSMRPVVLVGPSLKGYEVTDMMQKALFDFLKHRFDGRISITRVTADISLAKRSVLNNPSKRAIIERSNTRSSLAEVQSEIERIFELARSLQLVVLDADTINHPAQLIKTSLAPIIVHVKVSSPKVLQRLIKSRGKSQSKHLNVQLVAADKLAQCPPSQRMRHSNHSTENSPIERRSLMTSDENYHNERARKSRNRLSSSSQHSRDHYPLVEEDYPDSYQDTYKPHRNRGSPGGYSHDSRHRL

SEQ ID NO: 59061 - DNA, 1377 bp, Artificial Sequence
  derived and/or modified sequence
atgagcagctcttcctacgctaagaatggcacggctgatggccctcattccccgaccagccaggtggcccgaggaaccacaactaggaggagtcggttgaagcgatcagacgggtccacaacgagcacaagcttcatcctgcgacagggcagcgctgactcttacacaagtaggcccagtgatagtgatgtctccctcgaggaggatcgcgaagccatcaggcaggaacgggaacaacaagccgcgattcaactggagagagctaaaagtaagcccgttgccttcgctgtgaaaaccaacgtgagttactgcggcgctctcgatgaggacgtccctgtaccctcgaccgccatttctttcgatgccaaagacttcctgcacataaaagagaaatacaacaacgattggtggatagggaggcttgtgaaggaggggtgcgagattggtttcattcccagccctctgcgtttggagaacatccgtattcagcaggagcagaagagggggcgcttccatggtgggaaaagcagcggcaacagcagcagtagcttgggtgaaatggtgtcaggaacctttagagctaccccaacaagcacagccaagcagaagcaaaaggtgacagaacacattccaccctacgacgtcgttcctagcatgaggccagtagtgctcgttgggccatccctcaaaggctacgaagtgaccgacatgatgcagaaggctttgtttgattttcttaaacatagattcgacgggcgcataagtatcactagggtcactgcagacataagcttggcaaaacgtagtgtactcaataatccttccaagagagctataattgagcgttccaacacgcgctcctccttggccgaggtgcagtccgaaatcgagcgaatcttcgagctggcccgcagtttgcagcttgtggttctggacgctgacactattaatcacccagctcagctaataaagacttctcttgccccaatcatagttcacgttaaagtttccagtcctaaagtgctgcagagattgatcaagtcacgtggtaaaagtcagagtaaacatctcaatgttcagctggtcgccgccgacaagttggctcagtgcccgccctcccaacggatgagacactctaatcactccactgaaaacagccctatagagcgaagatccctgatgacgtctgatgagaattatcacaacgagcgggcccgcaagtctagaaacagactgtcttcctcaagccagcactctagagaccactatcccctcgttgaggaagactacccggattcataccaggacacatacaagccccatcgtaaccgaggcagtccagggggttattcccacgactctcggcaccgtctgtag

SEQ ID NO: 59062 - DNA, 1248 bp, Artificial Sequence
  derived and/or modified sequence
ttctattttctctgtcagggaagcgcagatagctacacctcccgccccagcgactctgatgtgtccttggaggaggaccgggaagccattcgccaggagcgcgagcagcaagcagccattcagctcgagcgcgcgaagagcaaaccagtggcgttcgctgtgaagacaaatgtctcgtactgcggagctctggacgaggacgtaccggttccatcaactgccatctccttcgacgcgaaagattttctgcacattaaagaaaaatataacaatgactggtggatcgggaggctagtgaaggaagggtgtgagataggctttatcccttcccctctcaggttagaaaacattcggatccagcaagagcaaaaaagaggcaggtttcacggcgggaagtcaagtgggaactcgagcagtagcctgggcgagatggtgagtggcacgttccgtgcgacacccacttccacggcaaagcaaaaacagaaagtgactgaacatatacccccatacgatgttgttcccagcatgagacccgtcgtgcttgtcggaccttcactgaagggctacgaagtcacagacatgatgcagaaagcactcttcgactttctgaagcaccggtttgacggcaggatatctataacaagggtgacagcagatatttctctggcaaagagaagcgtgttaaacaacccttcaaaaagagctataatcgagcgaagtaacaccagatccagtctggctgaggtacagtcagaaatcgagcggattttcgaactggcccgaagcttgcagttagtggtactggacgccgacaccattaatcaccctgcccagctcattaagaccagtctcgcccccatcatagtgcacgtgaaggtgtccagccccaaagtgttgcagaggctgatcaagagcagaggcaaatcccaatcaaaacatttgaacgttcaactcgtcgccgcagacaagcttgcccaatgccccccctctcagagaatgagacatagtaaccactccaccgaaaattctccaattgaaaggagaagtttgatgacctcagacgagaactatcacaacgagagggcaagaaaatcccggaatcggttgagtagctccagccagcattctagggatcattaccctcttgtcgaagaagattacccagacagctaccaggacacgtacaaaccacaccgaaatcgaggtagtcctggcggatacagtcacgacagtcgtcaccgtctctag

SEQ ID NO: 59063 - DNA, 1377 bp, Artificial Sequence
  derived and/or modified sequence
atgagcagcagcagctatgccaagaatggaacagcagatggcccccacagccccaccagccaggtggcccggggcaccaccaccaggaggagccggctgaagagaagtgatggcagcaccaccagcaccagcttcatcctgcggcagggcagcgctgacagctacaccagccggcccagcgacagtgatgtgtccctggaggaggaccgggaggccatccggcaggagcgggagcagcaggccgccatccagctggagcgggccaagagcaagcctgtggcctttgctgtgaagaccaacgtgtcctactgtggggccctggatgaagatgtgcctgtgcccagcacagccatcagctttgatgccaaggacttcctgcacatcaaggagaagtacaacaatgactggtggattggccgcctggtgaaggagggctgtgagatcggcttcatccccagccccctgcggctggagaacatccgcatccagcaggagcagaagaggggccgcttccacggcggcaagagcagcggcaacagcagcagcagcctgggggagatggtgtctggcaccttccgggccacccccaccagcacagccaagcagaagcagaaggtgacagagcacatccccccctatgatgtggtgcccagcatgaggcctgtggtgctggtgggccccagcctgaagggctatgaggtgacagacatgatgcagaaggccctgtttgacttcctgaagcacagatttgatggccgcatcagcatcaccagggtgacagctgacatcagcctggccaagaggtctgtgctgaacaaccccagcaagagggccatcatcgagaggagcaacaccaggagcagcctggccgaggtgcagagcgagattgaaagaatttttgagctggcccggagcctgcagctggtggtgctggatgctgacaccatcaaccacccagcccagctgatcaagaccagcctggcccccatcatcgtgcacgtgaaggtgagcagccccaaggtgctgcagaggctcatcaagagccggggcaagagccagagcaagcacctgaatgtgcagctggtggccgctgacaagctggcccagtgcccccccagccagaggatgaggcacagcaaccacagcacagagaacagccccatcgagcggcgcagcctgatgaccagtgatgagaactaccacaatgaaagagccaggaagagcaggaaccggctgagcagcagcagccagcacagccgggaccactaccccctggtggaggaggactacccagacagctaccaggacacctacaagccccacaggaacagaggcagccctgggggctacagccatgacagccgccaccggctgtag

SEQ ID NO: 59064 - DNA, 1248 bp, Artificial Sequence
  derived and/or modified sequence
ttctacttcctgtgccagggcagcgctgacagctacaccagccggcccagcgacagtgatgtgtccctggaggaggaccgggaggccatccggcaggagcgggagcagcaggccgccatccagctggagcgggccaagagcaagcctgtggcctttgctgtgaagaccaacgtgtcctactgtggggccctggatgaagatgtgcctgtgcccagcacagccatcagctttgatgccaaggacttcctgcacatcaaggagaagtacaacaatgactggtggattggccgcctggtgaaggagggctgtgaaattggcttcatccccagccccctgcggctggagaacatccgcatccagcaggagcagaagaggggccgcttccatggaggcaagagcagcggcaacagcagcagcagcctgggggagatggtgtctggcaccttccgggccacccccaccagcacagccaagcagaagcagaaggtgacagagcacatccccccctatgatgtggtgcccagcatgaggcctgtggtgctggtgggccccagcctgaagggctatgaggtgacagacatgatgcagaaggccctgtttgacttcctgaagcacagatttgatggccgcatcagcatcaccagggtgacagctgacatcagcctggccaagaggtctgtgctgaacaaccccagcaagagggccatcatcgagaggagcaacaccaggagcagcctggccgaggtgcagagcgagattgagcgcatctttgagctggcccggagcctgcagctggtggtgctggatgctgacaccatcaaccacccagcccagctgatcaagaccagcctggcccccatcatcgtgcacgtgaaggtgagcagccccaaggtgctgcagaggctcatcaagagccggggcaagagccagagcaagcacctgaatgtgcagctggtggccgctgacaagctggcccagtgcccccccagccagaggatgaggcacagcaaccacagcacagagaacagccccattgaaagaagaagcctgatgaccagtgatgagaactaccacaatgaaagagccaggaagagcaggaaccggctgagcagcagcagccagcacagccgggaccactaccccctggtggaggaggactacccagacagctaccaggacacctacaagccccacaggaacagaggcagccctgggggctacagccatgacagccgccaccggctgtag

SEQ ID NO: 59065 - DNA, 1377 bp, Artificial Sequence
  derived and/or modified sequence
atgagcagcagcagctacgccaagaacggcaccgccgacggcccccacagcccaacttctcaggttgcccggggcactactactaggcggtcccgcttgaagaggagcgacggatcaaccaccagcacttcatttatattgcgacaggggtccgctgactcgtatacctcacgccctagcgactcagacgtcagccttgaagaagacagagaggccatccgccaggagcgggagcaacaggctgctattcagctggagcgcgcgaagtcaaaaccagtggccttcgcagtgaagacgaatgtgagctattgcggcgccctggatgaagatgtgcctgtgccatccaccgctatctcatttgacgctaaggactttctacacattaaggagaaatacaataacgactggtggattgggcggttggtgaaggaaggctgcgagataggatttatcccctcaccgctgcgtttggaaaatatccgcatccaacaggagcagaaaagaggaagattccacggcggtaagtcaagcggaaattcctcttcatcattaggcgaaatggtgtctggaacctttcgggccacaccaactagcaccgctaaacaaaagcaaaaggtaaccgagcatattcctccctatgatgtggtaccttcgatgaggccagtggtgttggtcggtccatctctaaagggctatgaggtaactgacatgatgcagaaagctctcttcgacttcctgaaacacagattcgatgggcgtatctctatcacccgggttaccgccgatatcagtctcgccaaacgctcagttctgaacaatccaagcaagcgcgctattatagaacgttccaacacgaggtcaagcctggctgaggttcaatctgagatagaaagaatctttgaactggcccgctctctccagcttgtggtgctggacgctgatactattaatcacccggctcagttaattaaaacctcactggctccaataattgtccacgtgaaggtgtcttcgcccaaggttctgcagagactgatcaagagtcgcggcaagagtcagtctaaacacctgaatgtgcagctggtggccgccgacaaattggcacagtgtccaccaagtcagcgaatgaggcacagcaatcactcaacagaaaatagccctatagaacgacgtagtctcatgacgagtgatgagaattatcacaatgaacgcgctcgaaagtctcgtaaccgactgtcctcttcctcacagcacagccgggaccactaccctctagtggaggaggattaccctgatagctaccaggatacatataaacctcacagaaatcgtggctcgcccggaggctatagccacgatagccgccaccgtctctag

SEQ ID NO: 59066 - DNA, 1248 bp, Artificial Sequence
  derived and/or modified sequence
ttctacttcctgtgccagggcagcgccgacagctacaccagccggccttcagacagcgatgtgtctctggaagaagatcgggaggcgattcgtcaggaacgcgaacagcaagctgcaattcagctggagcgcgccaagagtaaaccggtcgcattcgccgtcaaaaccaacgtgtcctattgcggcgccctggatgaggacgttcccgtgcctagcactgccatctccttcgacgctaaagatttcctgcatataaaggagaaatacaacaatgattggtggatcggccggctcgtaaaggaaggatgtgagatagggttcattcccagcccccttagactagagaatatccggatccagcaggagcagaagaggggccgctttcatgggggcaaaagcagtggaaatagctccagtagtcttggggagatggtgagcggtacctttagagccaccccaacatctaccgctaaacaaaagcagaaggtcacagaacatatcccgccttatgacgtggtcccaagcatgcgcccagtggtcctggtgggaccgtctctgaaaggctacgaggtgactgacatgatgcagaaggcattgtttgactttctcaagcatcggttcgacggcagaatctcaataacccgagttaccgccgacattagtcttgccaagcgctccgtgctgaacaatcccagcaagcgggcgattatagaacgcagcaacacacggtctagtttagctgaagtgcagtcggaaattgagaggatcttcgagcttgccagaagcctgcagctggtcgtcttggacgcagacacaatcaatcatccagcgcaactgatcaagactagcctggcgcctatcattgtccacgttaaggtaagcagcccaaaggtgttgcagcgcctgattaaaagtcgcgggaaatctcaaagcaagcatctgaatgtgcagcttgtagccgctgataaacttgcacagtgccccccttctcaaaggatgaggcacagcaaccactctacagagaattcaccaatcgaacggaggtccctcatgacttctgatgagaactatcacaatgagagagcacgaaaatctcgtaatcggctctcctcaagcagccagcactctcgggatcattaccctctcgttgaggaggattaccctgacagctatcaagatacttacaagccacacagaaacaggggctcgcctggaggatactctcacgattcccgtcaccgtctctag

SEQ ID NO: 59067 - DNA, 1377 bp, Artificial Sequence
  derived and/or modified sequence
atgtcctcaagctcatatgcaaaaaatggaacagcagatggtcctcactctccaacctcgcaggtggctaggggcactaccaccaggagaagccggttgaagcggtccgacgggtccaccaccagtacctcatttattctgagacagggcagcgctgatagctatacaagcaggccatctgattccgacgtcagcctggaggaagacagggaggccatacgccaggagcgcgaacagcaggccgctatccagctggagcgcgcaaagtcaaaacctgtggccttcgccgtcaagacgaatgtaagctactgcggggctctcgatgaagatgtgcccgtaccgagtactgcgatctcttttgacgctaaggatttccttcatatcaaggagaaatacaataacgattggtggatcgggcgactggtcaaggagggctgcgagatagggttcattccgtcccccctccgtcttgagaacatcaggatccagcaagagcagaagaggggaaggttccacggaggtaagtccagcggcaattcctctagctctttgggggaaatggtgtcgggcacctttcgggctacaccaaccagtacagccaagcagaagcagaaggttacagagcatattccgccttatgatgtggtgccgtctatgaggccggttgtcctcgtcgggcctagtcttaaagggtacgaggttaccgatatgatgcagaaagcactgttcgatttcttaaagcatcgctttgatggacgaatatcgattacgcgcgtgacggcggacattagcctcgctaagcgctctgtcctgaacaatccttccaaaagggctataatcgaacggagcaatacccggagttccctcgccgaggtccaaagtgaaatcgaacgaattttcgaactcgctcgaagcctgcagctagtggtgctggatgcagacaccatcaaccatccagctcaattaatcaagacctctctggcccctataatcgtccatgtcaaagttagctcccccaaagtccttcagcggctgattaagtctagggggaaatcacaatctaaacatctcaatgtgcagctcgttgctgcagataaacttgcacagtgccctccctctcagcggatgcgccactctaaccattccactgagaacagccctatcgagcgcagatccctaatgacatctgacgagaactatcataacgaacgagccaggaagtcacgaaatcgcctttcgagcagttcacagcattccagagatcattatcccctcgtggaggaagactatccagattcctaccaggacacctacaagccccaccgaaaccgcggttctcccggagggtattcccatgattctcgccaccgtctctag

SEQ ID NO: 59068 - DNA, 1248 bp, Artificial Sequence
  derived and/or modified sequence
ttttacttcctatgtcagggctcagcggactcctatacatctagaccctctgatagcgacgtcagcctggaagaagacagagaggcaatccgccaggaaagagaacaacaggcagcgatacaacttgagagagctaaaagcaaacctgtggccttcgccgtgaagacaaacgtgagctattgtggtgcgctcgacgaagacgtaccagttccttccaccgcgatcagctttgatgccaaagatttcctgcatattaaggagaagtataataacgattggtggattggcagactggtaaaggaaggctgcgagatcggattcatccccagtccgcttcgtttggaaaatattagaattcaacaggagcagaagcggggaaggtttcatggcggtaagtcatctggtaatagcagctctagccttggggagatggtgagcggcacatttcgcgctacccccacaagtactgccaagcagaagcagaaggtcaccgagcacattcctccttacgatgtcgttccttctatgcgcccagtggtcctggttggcccttctcttaagggctacgaagtgacagatatgatgcaaaaagcgctgttcgattttctgaagcatcggttcgacggcagaataagtatcacccgcgtcaccgctgacatatccttggctaagagaagcgtgctgaacaacccatccaaacgcgctatcattgagcgttcaaatacaaggagtagtctcgccgaagttcagtcagagatcgagagaatcttcgaactcgcccgtagcctgcaactcgtggtgctcgacgccgacaccatcaatcaccccgcacagctgataaagacctcccttgctcccattatagttcacgtcaaagtaagctcacccaaggtgttacagagactaattaaatccagaggtaaatctcagagcaaacacctgaatgtgcagttggttgcagccgataagctggcacagtgtcccccatcacagagaatgcggcacagcaatcattcaaccgagaactcaccgattgagagaagatcactcatgacaagtgatgagaactaccacaatgaaagggctcgcaagtcgcggaataggctgagtagctccagccagcattcccgcgaccactacccgctcgttgaagaggattaccccgatagctaccaagacacatataaacctcatcgcaatcggggaagcccaggtggctacagccacgatagtagacatagactgtag

SEQ ID NO: 59069 - DNA, 1394 bp, Artificial Sequence
  derived and/or modified sequence
cggctctgaacgatgtcctcctcctcctacgccaagaacgggaccgcggacgggccgcactcccccacctcgcaggtggcccgaggcaccacaacccggaggagcaggttgaaaagatccgatggcagcaccacttcgaccagcttcatcctcagacagggttcagcggattcctacacaagcaggccgtctgactccgatgtctctttggaagaggaccgggaagcaattcgacaggagagagaacagcaagcagctatccagcttgagagagcaaagtccaaacctgtagcatttgccgtgaagacaaatgtgagctactgcggcgccctggacgaggatgtgcctgttccaagcacagctatctcctttgatgctaaagactttctacatattaaagagaaatataacaatgattggtggataggaaggctggtgaaagagggctgtgaaattggcttcattccaagtccactcagattggagaacatacggatccagcaagaacaaaaaagaggacgttttcacggagggaaatcaagtggaaattcttcttcaagtcttggagaaatggtatctgggacattccgagcaactcccacatcaacagcaaaacagaagcaaaaagtgacggagcacattcctccttacgatgttgtaccgtcaatgcgtccggtggtgttagtggggccgtcactgaaaggttacgaggtaacagacatgatgcagaaagccctctttgatttcctgaagcacaggtttgatgggaggatttcaataacgagagtgacagctgacatttctcttgctaagaggtctgtcctaaataatcccagcaagagagcaataattgaacgttcgaacacccggtccagcttagcggaagtacaaagtgaaattgaaagaatctttgagttggcaagatctttgcaactggttgttcttgatgcagacaccatcaatcacccagcacaacttataaagacttccttagcaccaattattgttcatgtaaaagtctcatctccaaaggttttacagcggttgattaaatctagaggaaagtcacaaagtaaacacttgaatgttcaactggtggcagctgataaacttgcacaatgccccccaagtcagcgaatgaggcacagcaaccactccacagagaactctccaattgaaagacgaagtctaatgacctctgatgaaaattatcacaatgaaagggctcggaagagtaggaaccgcttgtcttccagttctcagcatagccgagatcattaccctcttgtggaagaagattaccctgactcataccaggacacttacaaaccccataggaaccgaggatcacctgggggatatagccatgactcccgacataggctttgagtcta

SEQ ID NO: 59070 - DNA, 7581 bp, Artificial Sequence
  derived and/or modified sequence
ttctattttctttgccagggttcagcggattcctacacaagcaggccgtctgactccgatgtctctttggaagaggaccgggaagcaattcgacaggagagagaacagcaagcagctatccagcttgagagagcaaagtccaaacctgtagcatttgccgtgaagacaaatgtgagctactgcggcgccctggacgaggatgtgcctgttccaagcacagctatctcctttgatgctaaagactttctacatattaaagagaaatataacaatgattggtggataggaaggctggtgaaagagggctgtgaaattggcttcattccaagtccactcagattggagaacatacggatccagcaagaacaaaaaagaggacgttttcacggagggaaatcaagtggaaattcttcttcaagtcttggagaaatggtatctgggacattccgagcaactcccacatcaacagcaaaacagaagcaaaaagtgacggagcacattcctccttacgatgttgtaccgtcaatgcgtccggtggtgttagtggggccgtcactgaaaggttacgaggtaacagacatgatgcagaaagccctctttgatttcctgaagcacaggtttgatgggaggatttcaataacgagagtgacagctgacatttctcttgctaagaggtctgtcctaaataatcccagcaagagagcaataattgaacgttcgaacacccggtccagcttagcggaagtacaaagtgaaattgaaagaatctttgagttggcaagatctttgcaactggttgttcttgatgcagacaccatcaatcacccagcacaacttataaagacttccttagcaccaattattgttcatgtaaaagtctcatctccaaaggttttacagcggttgattaaatctagaggaaagtcacaaagtaaacacttgaatgttcaactggtggcagctgataaacttgcacaatgccccccaagtcagcgaatgaggcacagcaaccactccacagagaactctccaattgaaagacgaagtctaatgacctctgatgaaaattatcacaatgaaagggctcggaagagtaggaaccgcttgtcttccagttctcagcatagccgagatcattaccctcttgtggaagaagattaccctgactcataccaggacacttacaaaccccataggaaccgaggatcacctgggggatatagccatgactcccgacataggctttgagtctaatgaaacaaaaaatattcatctgttgacaatttgccatagcagtgctaggataaaccaatcatcttaacttggctaacatagcacagtatttactgtgctaatgggctgctgtcattttatgctaagtaaggggcaaaaaaaaaaattacattatgcccttgagtctagatggatattagatgcccgatcatatagatatttttaagtgcaacatttacatgataacagtacattttgttttcttcatagatttagacacatcaatttgtaatttagggtacttacaaggcacatataaaataatttcccatgctggaaattccaaatgaccagttccagttggaaccaatttataaaccaattcctgttggaatttgggtgaattgactagaaagtctacttgagcatgttgtaatcaactgaaaaatctggggggaaaaaaaaaaaactaataagaaaatcgaaataccaatagaagccaaatccagctttggtatttatttgctggaagctaaatttacacttaaagttggagtgtataaacattttaatatatgttaatgttgccagaatgacttttcagacttaccaaatgtattgatagtgccaaaaaaaaaatctcagaaatcttaatgcagaaattatatagtctcctcagattttaatatttttatttctttcctggcacagctgttgtattcaaagtgttttgctttttgtttggtcagtactgttagctcatttgaagttggcaaaaacaaatacaaacaagcaaaaaacctcaaatttttttcagcagtgagagagaatagtaaagagaggcccaagcatagctggttatgtgaaatataaaatggggtgttgttctccctttaatcaatctgagcacaactacatacatccaggaatctgaagtcagatagtaaggatgtggtaccaatcctcccgagtgcaatgctaaacacttccaggtgggaattcatctatttcacttaacacaaacgcagggtctgtatttcctgccaacaagattgagtatctttccattgcttctctcagtctctgtctttgaatatctgaatgttctggcccttcaacaaattctttaaatcatgctaaggaatttcgttttatgtggacacactcaactttgatattcaggagatgtttttacaaaatgactaattgaaaaaagttgaaacaaatgattttaaaagcttgcagtaaaaaataaactcatagattcagcaaatatttgttgactaaaattatagcatttttaatgcagaaaattataaagaatttggagattgagctgccttatttctaatgaacactcctcttcatcttattaagtcttcacagtttttccagtggctataattatggaattggtgacctatgttttatattatcaaggaagccttagattcactctgatctaagaaattattgaaattgaccctttttacacaaatgtctttaaaaaaaaaaacttatttctaaatgtccatagtgcatgcattttctaaaaccccaataagtccagccataaaagttcttttctgctagtacatgtcatgaagcctatttttgaaaataatgataattaattttatagtatcttcttttctccccaagcctttcagtattcaggcactcaaagcatgcaccagttcagtaatcttcttgaccatggaaataagttccacattactgatgagttatatatatatcttgaaccccattacaacctcaccacatccccctgcatttatgttcagtgtttgtaccccattatgaacctgtttagctgataatgaggatacctataattctgtaagtcatttcaaatatttgatacaattaaaaaatatgggcttagtaaattttaaaagttaacatgtgatactggcttgtgagattcttctgtcatctagtgaagcttataaaactttcagttaagacattttaaaagagttatatccattaggcactttaataaacatataacctgccattactgaatactttgttagaacacagaagagcatcttccagcaaacaaaaatatatttattacatgtacagcacatacttgcatgagaaagaaaacattagccaaaacatttttctatatgctttactggtttcttgtttatgcgcattaaagtatttaattgcaaagagtgcaccaaggtgtacaaatttagactagacagctgttcagctttttctgtagtagcattagcagtttggtcatttaactactttaagatacttacattttatggcaggtagctgtaacagcatttaaatatatttcctagtcatcaagattaccatcttctttcaactttttaaaagtcacttgtttttaaaggtttttcaaagccttgtttttagtcttccatgtcatgccgataaagagagtctcattcaatatctgtgcacaaaaccaatctatcaattaccatcagatgtccatacctgttttgctttgcattcttattcaaaagctgacaatcttggaaagggtataatgtatattttattgatggatatatttaaatgtttactttaatttggaatattctttccccttctttctgtaataagtttatcttcctcaaataaggggatatacatcttattttttttaaagacttaagagtttattgtgtaaatgatacttaaaatctagatatatactaaatgaaaagttttatttttgccaagcacaccaagcacctttgaaaaatacatactccatactttgtttttaattaatttcatttaaagatagcaaatgattataagcaagagaaacaagtcttttactgttttgaggctgttttaacttacagtataagccacatactagaattctgtaatttcagtcacagacatataataatgtggactcatgtgacaatgtggaaatgtagttctggaaaaaaacgaatgcaatttgtcaatcctgatgttaattctcaagggtataatgtcactctaatattataaccaacaacattatcttgtttaatatttaaagcaacacttagaaatgtttataaatgatgattctctcttatctttatacagttctattggagagaaggttgaaattgttcacaatttagatgatggtctttcctaataagagtcttaattttgtgactatataagtcattgcagttagtctttaatgaaatgaattttattaatgtaaaacaaattctgagacaattatttgtttcctttaaataatctgctatttaattattattgtcgttgtttgcaaaatgtatttttggaatgttaacctcttttcatacctgcatacttgaacttgtcttttgtgtgggggccttaaaattcataataggaagtggaggcagtgaaaggaagtaagaaaaggaaattatgctaaaagatggtttgcaaatttaaattctttaaatgaacatatcacaaaatgttgttaagacccaggatgtccgttaagaatgtgtcttggcaaccttaatttgcatgttagtatatattttcttagttacacagttttattttggtatttgcttaaaaaatgtaataccattgtagaaattaccctatgtactgatatatttactacctcttctctagagaagacaatctgtctttaaagggaaaaacactggtcaataagtagtgatcaaaattatcactattctggctaaccttgctgcaaagctaaatacatagattattaaaatatgccttccctttagattttaaactgtttccaaaatgctgtttggcaccctttcatttcttccacgttagtgaagttttctttgaattggttcacagtttatcatgaggcaaggttaatttaacaaataagtcatcatagggaacaaaacaaactgcaagggaattgcctttgtgtgcaacttgttataatatctagttctaagtctaaaggagtaaaagtccaaagactttatgtttaagagcagctggtttgcaaattcacattttgttggtccttgacttccacagagcatgacttagccatttactgggtaaggatatgcataatcttggactcccatgtaattggaataaacttcatatcaatgtttcaaataaatgctatgtaccccttattccttttacatttctgcctttgtcttttatgacaatgttgcatgttgtgtttttttaaattatataaaactcatccttgaatgactgtatgaatgaaaaatttataggaaattatgtaataaaatctgttttattagtttctcatacctttaaatactgtcaatactataactgttagtaagttacttactcaagctgtgtctatggggcagagaacagtcctcttctttaaaataatcatgatcaaaccagtcaagtcaatccaattagctgttagacagacaataaggataaccttctttttgacttaagcagtcaagttagtcaaaatagaaaaattggcttatatgggcacccagaactacagcattcaaaaattacttttaaaagtttcttcttttattaaaatggactttcttaaataaaatacatcctctgatagcagctatctctttttacttgtaatgattaattctaaatgcttcatgtaattgagggacattatgagaagactagaaagtatctcatcagataatcctaagggctgtaacttctacttgccataaacaaagtataattaagagtgagtagcaattggtttggggagtcgtagttatatatgaaactttcttttgtttctcatgatgtatgtaaaatgtttgcagaaggatggtagaaaatgttactaatgaatttagagtggtttgggagaatacactgatacttcctcatttgaaaattataaggagttacaaggggaactaagaaccagaagtggctggcctctagcttttcaatacctgataagtgttcttggttatgttttgaacacttaaatttctcaacaaatggctatgtctatatttatgtaggggccacccttgccctacttgcatgccactttgacttttaactgaaatcagtgtgaattctgtatgcataagggatgtaataaagaggcgggatcattaacgctatatcgttgcatactatttttcatatgccttacaatattttctgggatgttattaaaatgaaagcattttattgccaaaataaatctatgttgttacttataatctgcattagcagtagaaaaataatgtagcaaaaacatattgtacagtacaaaattataaaatatatattttgccaataatataaaaatagattgaggagaaagaagcacatttgttatagcacaaacttataacaaaatccaccgttaaatttggcagtcatattttttaaaagtatgtcgatttagttctaagttttgtcagatttacttcatctaccatctttttaacttgctgcttgatacttttccagcaatttatttcatagccttgcaatctgtggatgtaatttcttttgttttattcccttccataaaatttattaaattttattttgtgataacactcataccatattttctcctcttatttcttctctttcaataacaacagcagaaagtcacagcaagtgagctcatagggctcctctgaattttggacatgtgtgagatttttgtatttttcacagcctcgagtcagaatgatcaataaagatgtcccaaccacaaaaaattatattagttagggattctttaatttgttttgtactgaatactactttgaaacataagttaaagccattagctgtgtttttgtagggatggtgggaaggaataaaaaataaatgtattaacataaaacatactaaaacagaaatatggcaaaatgatgtaaaaagatttttcctactattctgagggctgttgaaatcccaggctattgctatatctccattgacaaagtgggataaaaaatgcctttgtcaaataattttttttctttctttaaattttagttatttattttaataatttgtccccttttatttttcttatctaggtatgtgtagcattctacaaggcatgctgggtaaaatatactatgcaaatgtgtacagtgctgcatgttttgttctccctctgctttagtggctttaaagaaaaaaacgtggtgttatttttgtgaataaaaacattaacaaagaaaatgcagagtgcatgcatagagtatcctcatttctatggatttgttttatggaatttaaatgtgtacaaaacaactgcattactttttttcttttatataataaatg

SEQ ID NO: 59071 - DNA, 1377 bp, Artificial Sequence
  derived and/or modified sequence
atgagcagcagcagctacgccaagaacggcaccgccgacggcccccacagccccaccagccaggtggccagaggcaccaccaccagaagaagcagactgaagagaagcgacggcagcaccaccagcaccagcttcatcctgagacagggcagcgccgacagctacaccagcagacccagcgacagcgacgtgagcctggaggaggacagagaggccatcagacaggagagagagcagcaggccgccatccagctggagagagccaagagcaagcccgtggccttcgccgtgaagaccaacgtgagctactgcggcgccctggacgaggacgtgcccgtgcccagcaccgccatcagcttcgacgccaaggacttcctgcacatcaaggagaagtacaacaacgactggtggatcggcagactggtgaaggagggctgcgagatcggcttcatccccagccccctgagactggagaacatcagaatccagcaggagcagaagagaggcagattccacggcggcaagagcagcggcaacagcagcagcagcctgggcgagatggtgagcggcaccttcagagccacccccaccagcaccgccaagcagaagcagaaggtgaccgagcacatccccccctacgacgtggtgcccagcatgagacccgtggtgctggtgggccccagcctgaagggctacgaggtgaccgacatgatgcagaaggccctgttcgacttcctgaagcacagattcgacggcagaatcagcatcaccagagtgaccgccgacatcagcctggccaagagaagcgtgctgaacaaccccagcaagagagccatcatcgagagaagcaacaccagaagcagcctggccgaggtgcagagcgagatcgagagaatcttcgagctggccagaagcctgcagctggtggtgctggacgccgacaccatcaaccaccccgcccagctgatcaagaccagcctggcccccatcatcgtgcacgtgaaggtgagcagccccaaggtgctgcagagactgatcaagagcagaggcaagagccagagcaagcacctgaacgtgcagctggtggccgccgacaagctggcccagtgcccccccagccagagaatgagacacagcaaccacagcaccgagaacagccccatcgagagaagaagcctgatgaccagcgacgagaactaccacaacgagagagccagaaagagcagaaacagactgagcagcagcagccagcacagcagagaccactaccccctggtggaggaggactaccccgacagctaccaggacacctacaagccccacagaaacagaggcagccccggcggctacagccacgacagcagacacagactgtag

SEQ ID NO: 59072 - DNA, 1248 bp, Artificial Sequence
  derived and/or modified sequence
ttctacttcctgtgccagggcagcgccgacagctacaccagcagacccagcgacagcgacgtgagcctggaggaggacagagaggccatcagacaggagagagagcagcaggccgccatccagctggagagagccaagagcaagcccgtggccttcgccgtgaagaccaacgtgagctactgcggcgccctggacgaggacgtgcccgtgcccagcaccgccatcagcttcgacgccaaggacttcctgcacatcaaggagaagtacaacaacgactggtggatcggcagactggtgaaggagggctgcgagatcggcttcatccccagccccctgagactggagaacatcagaatccagcaggagcagaagagaggcagattccacggcggcaagagcagcggcaacagcagcagcagcctgggcgagatggtgagcggcaccttcagagccacccccaccagcaccgccaagcagaagcagaaggtgaccgagcacatccccccctacgacgtggtgcccagcatgagacccgtggtgctggtgggccccagcctgaagggctacgaggtgaccgacatgatgcagaaggccctgttcgacttcctgaagcacagattcgacggcagaatcagcatcaccagagtgaccgccgacatcagcctggccaagagaagcgtgctgaacaaccccagcaagagagccatcatcgagagaagcaacaccagaagcagcctggccgaggtgcagagcgagatcgagagaatcttcgagctggccagaagcctgcagctggtggtgctggacgccgacaccatcaaccaccccgcccagctgatcaagaccagcctggcccccatcatcgtgcacgtgaaggtgagcagccccaaggtgctgcagagactgatcaagagcagaggcaagagccagagcaagcacctgaacgtgcagctggtggccgccgacaagctggcccagtgcccccccagccagagaatgagacacagcaaccacagcaccgagaacagccccatcgagagaagaagcctgatgaccagcgacgagaactaccacaacgagagagccagaaagagcagaaacagactgagcagcagcagccagcacagcagagaccactaccccctggtggaggaggactaccccgacagctaccaggacacctacaagccccacagaaacagaggcagccccggcggctacagccacgacagcagacacagactgtag

SEQ ID NO: 59073 - protein, 181 aa, Artificial Sequence
  derived and/or modified sequence
MEAMNVEKASADGNLPEVISNIKETLKIVSRTPVNITMAGDSGNGMSTFISALRNTGHEGKASPPTELVKATQRCASYFSSHFSNVVLWDLPGTGSATTTLENYLMEMQFNRYDFIMVASAQFSMNHVMLAKTAEDMGKKFYIVWTKLDMDLSTGALPEVQLLQIRENVLENLQKERVCEY

SEQ ID NO: 59074 - DNA, 546 bp, Artificial Sequence
  derived and/or modified sequence
atggaagccatgaacgtcgagaaagcgtcagcagacggaaatctgccagaggtcatctctaacattaaggaaactctgaagattgtttcaaggaccccagttaatattacaatggccggtgacagtgggaatggcatgtcaacctttatttcagctctgcgaaataccggccacgagggcaaggccagtcctcccacagaactggtgaaggcaactcagcgctgtgccagctatttcagtagtcatttttccaatgtggtgttatgggaccttccggggaccgggtcagcgactacaaccttggaaaactatctcatggaaatgcagtttaaccgttatgactttatcatggtagcctcagcccagttcagtatgaaccacgtgatgctcgccaaaactgcagaggacatgggtaagaagttttacatcgtttggaccaaacttgacatggacctttcaactggggctctgcctgaagtgcagctgctccagatccgtgagaacgtcctggagaacttgcagaaagaacgggtctgtgaatattag

SEQ ID NO: 59075 - DNA, 1659 bp, Artificial Sequence
  derived and/or modified sequence
taacctgctcaggtccccttccatgctgtggaagctttgtttttttgcactttgcagtaaatcttgctgctgctcattctttgggtccacactgcctttatgagctgtaacactcaccgtgaaggtctgcagcatcactcctgaaacctgtgaaacaacgaaccccccggggagaaacgaacaactccagactcgccgcctgaagagctgtaactctcacttcgaaggtctgcagcttcgctcctgagtcagtgaaaccacgaacccaccggaaggaagaaactctgaacacatccaaacatcagaaggaacaaactccggacacgcagcctttaagaattgtaacactcaccgcgagggtccgtggcttcattcttgaagtcagtgagacgaagaacccaccaattccggtaggagtaggaaatcacatcaccttcttttaatcagtctcaaatacctggccccttgtggaacctgcaagagccaggtttggcgaatgcaatgataagcaattgtctaatcactgccttgaaaaagagcagagcatttgagtatgctgtctcctcctctccctcacttcagttgggcccaacatgacagtcttaatggaagctcgggggtcaaaggctggtggcttacttcacgtatattgcagcatttcagtactgctctgcacgtgtgctcccccgcctgatgagcttactccagtgcccacagatacgacagagtgtcccaagtgcccctcacactctattagctgcatccttaacctctttttgccacaccataagcattgggttttgtttgttttgagatggagtcttgctctgttgccaggctggagtgcaatggcgtgatctcagctcactgcaatatctgcgtccagggttcaagcgattcccctgcctcagcctcctgtattagctgggactacaggcgcacaccaccacgcgcagctaatttttttgtattttagtagagaaggtttcacgatgttggccaggatggtctcaatctcctgacctcgtgatctgctcgcctcggccttccaaagtgctgggattacaggcatgagccacggcgcctggccagcattggggtattttattgaagatggaagccatgaatgttgagaaagcctcagcagatgggaacttgccagaggtgatctctaacatcaaggagactctgaagatagtgtccaggacaccagttaacatcactatggcaggggactctggcaatgggatgtccaccttcatcagtgcccttcgaaacacaggacatgagggtaaggcctcacctcctactgagctggtaaaagctacccaaagatgtgcctcctatttctcttcccacttttcaaatgtggtgttgtgggacctgcctggcacagggtctgccaccacaaccctggagaactacctgatggaaatgcagttcaaccggtatgacttcatcatggttgcatctgcacaattcagcatgaatcatgtgatgcttgccaaaaccgctgaggacatgggaaagaagttctacattgtctggaccaagctagacatggacctcagcacaggtgccctcccagaagtgcagctactgcagatcagagaaaatgtcctggaaaatctccagaaggagcgggtatgtgaatactaa

SEQ ID NO: 59076 - DNA, 546 bp, Artificial Sequence
  derived and/or modified sequence
atggaggccatgaatgtggagaaggccagcgcagatggcaacctgcctgaggtgatcagcaacatcaaggagaccctgaagatcgtgtccaggacccctgtgaacatcaccatggccggggacagcggaaatggcatgagcaccttcatcagcgccctgaggaacacaggccacgagggcaaggccagccccccaacagagctggtgaaggccacccagagatgtgccagctacttcagcagccacttcagcaatgtggtgctgtgggacctgcccggcaccggcagcgccaccaccaccctggagaactacctgatggagatgcagttcaacagatatgacttcatcatggtggccagcgcccagttctccatgaaccacgtgatgctggccaagacagctgaggacatgggcaagaagttctacatcgtgtggaccaagctggacatggacctgagcactggagccctgcctgaggtgcagctgctgcagatcagagaaaatgtgctggagaacctgcagaaggagcgggtgtgtgagtactag

SEQ ID NO: 59077 - DNA, 546 bp, Artificial Sequence
  derived and/or modified sequence
atggaggccatgaacgtggagaaggccagcgccgacggcaacctgcccgaggttatcagcaacataaaggagaccctcaagattgtctctagaacaccggtaaatatcaccatggccggcgactccggcaatggtatgtccacgttcatctctgctctgcgaaacaccgggcacgaaggtaaggccagtcctcccacagagttagttaaagccacacaacgctgcgcatcctattttagctcacactttagcaatgtcgtgctgtgggatctaccagggaccggttccgcaactacgactctcgagaattacctgatggagatgcagttcaaccggtacgacttcatcatggtggcttccgcccagttcagtatgaaccacgttatgttggccaaaactgcggaggatatgggaaaaaaattttatatagtctggacgaagcttgacatggacctgtctactggagccctgccagaggtgcaactgctgcagattcgagaaaacgttctggagaacttgcagaaggagagagtgtgtgagtattag

SEQ ID NO: 59078 - DNA, 546 bp, Artificial Sequence
  derived and/or modified sequence
atggaggccatgaacgtggaaaaggcctccgcggatggtaatctccccgaagtcatcagtaacatcaaggagaccctgaagattgtgtctcggacgcccgtaaacattacaatggcaggggactccggcaatgggatgtcgaccttcatatccgctctcagaaacaccggccatgaaggcaaggccagcccaccgacagagctggtgaaggccactcagaggtgtgcctcctactttagcagccactttagcaacgtggtgctttgggaccttccaggcaccgggtccgcaaccactacacttgagaactaccttatggagatgcagttcaacagatatgattttatcatggtcgcttccgcacaattctcaatgaatcatgtgatgctggcaaagaccgctgaggacatgggcaagaaattttatatcgtgtggacaaaattggatatggatctgtccactggtgctctccctgaggtgcaactgttgcagattcgtgaaaacgtgctggagaacctgcagaaagagagagtgtgtgagtattag

SEQ ID NO: 59079 - DNA, 546 bp, Artificial Sequence
  derived and/or modified sequence
atggaggccatgaacgtggagaaggccagcgccgacggcaacctgcccgaggtgatcagcaacatcaaggagaccctgaagatcgtgagcagaacccccgtgaacatcaccatggccggcgacagcggcaacggcatgagcaccttcatcagcgccctgagaaacaccggccacgagggcaaggccagcccccccaccgagctggtgaaggccacccagagatgcgccagctacttcagcagccacttcagcaacgtggtgctgtgggacctgcccggcaccggcagcgccaccaccaccctggagaactacctgatggagatgcagttcaacagatacgacttcatcatggtggccagcgcccagttcagcatgaaccacgtgatgctggccaagaccgccgaggacatgggcaagaagttctacatcgtgtggaccaagctggacatggacctgagcaccggcgccctgcccgaggtgcagctgctgcagatcagagagaacgtgctggagaacctgcagaaggagagagtgtgcgagtactag

SEQ ID NO: 59080 - protein, 1153 aa, Artificial Sequence
  derived and/or modified sequence
MALRVLLLTALTLCHGFNLDTENAMTFQENARGFGQSVVQLQGSRVVVGAPQEIVAANQRGSLYQCDYSTGSCEPIRLQVPVEAVNMSLGLSLAATTSPPQLLACGPTVHQTCSENTYVKGLCFLFGSNLRQQPQKFPEALRGCPQEDSDIAFLIDGSGSIIPHDFRRMKEFVSTVMEQLKKSKTLFSLMQYSEEFRIHFTFKEFQNNPNPRSLVKPITQLLGRTHTATGIRKVVRELFNITNGARKNAFKILVVITDGEKFGDPLGYEDVIPEADREGVIRYVIGVGDAFRSEKSRQELNTIASKPPRDHVFQVNNFEALKTIQNQLREKIFAIEGTQTGSSSSFEHEMSQEGFSAAITSNGPLLSTVGSYDWAGGVFLYTSKEKSTFINMTRVDSDMNDAYLGYAAAIILRNRVQSLVLGAPRYQHIGLVAMFRQNTGMWESNANVKGTQIGAYFGASLCSVDVDSNGSTDLVLIGAPHYYEQTRGGQVSVCPLPRGQRARWQCDAVLYGEQGQPWGRFGAALTVLGDVNGDKLTDVAIGAPGEEDNRGAVYLFHGTSGSGISPSHSQRIAGSKLSPRLQYFGQSLSGGQDLTMDGLVDLTVGAQGHVLLLRSQPVLRVKAIMEFNPREVARNVFECNDQVVKGKEAGEVRVCLHVQKSTRDRLREGQIQSVVTYDLALDSGRPHSRAVFNETKNSTRRQTQVLGLTQTCETLKLQLPNCIEDPVSPIVLRLNFSLVGTPLSAFGNLRPVLAEDAQRLFTALFPFEKNCGNDNICQDDLSITFSFMSLDCLVVGGPREFNVTVTVRNDGEDSYRTQVTFFFPLDLSYRKVSTLQNQRSQRSWRLACESASSTEVSGALKSTSCSINHPIFPENSEVTFNITFDVDSKASLGNKLLLKANVTSENNMPRTNKTEFQLELPVKYAVYMVVTSHGVSTKYLNFTASENTSRVMQHQYQVSNLGQRSLPISLVFLVPVRLNQTVIWDRPQVTFSENLSSTCHTKERLPSHSDFLAELRKAPVVNCSIAVCQRIQCDIPFFGIQEEFNATLKGNLSFDWYIKTSHNHLLIVSTAEILFNDSVFTLLPGQGAFVRSQTETKVEPFEVPNPLPLIVGSSVGGLLLLALITAALYKLGFFKRQYKDMMSEGGPPGAEPQ

SEQ ID NO: 59081 - DNA, 3462 bp, Artificial Sequence
  derived and/or modified sequence
atggctttacgcgtgctattgctgactgccttaaccttgtgtcacgggtttaatctcgacaccgaaaatgccatgacatttcaggaaaacgcacgaggtttcggccagagcgttgtgcaacttcagggatccagagtggtcgtaggcgcccctcaggagatcgtggcagctaaccagcggggaagcctgtaccagtgcgactactctaccggaagttgcgaacctattcggctgcaagtgccggtggaagcggtgaatatgagccttggcctgtccctggccgccaccacaagccccccccagctgttggcatgcgggcctaccgtgcaccagacatgcagtgagaatacctatgtgaaaggactgtgtttcctgtttggaagcaacctcagacagcaaccacaaaaattccccgaagccctgcgcggttgccctcaagaagatagcgatatcgcgtttttaatcgacgggtccggctctatcattccgcatgatttcagaaggatgaaggagttcgtgtccactgtaatggagcagcttaaaaaatccaagactttgttcagtctgatgcaatactccgaggaattcaggatccacttcaccttcaaagaattccaaaataaccccaacccaagatccctggtgaaaccgatcacacagctgctcggccgaacgcatacagcaacaggaatccggaaggtcgtgcgcgagctgtttaacatcacgaacggtgcaagaaagaatgcttttaagatcttagtcgtgattacagacggagaaaagtttggcgaccccttaggttacgaggatgtgatcccagaagccgaccgggaaggggtgatccgatatgtcataggggtgggcgacgcatttcggtctgagaagtcccggcaggagctgaacacgatcgcttccaagcctcctcgagatcatgtcttccaggtgaataattttgaagctttaaagactatccagaatcagctgagagagaaaattttcgcaattgagggcacccagaccgggtccagttcgagtttcgaacacgagatgtcacaagaggggttcagtgccgccataaccagcaacgggccactgctaagcacagttgggagctatgattgggcagggggagtgtttctttacacatccaaggagaaatctactttcatcaacatgacacgagttgactctgatatgaacgatgcctacctcgggtatgcggcggctataatcctcaggaaccgggtgcagtccttagtgttaggcgctccgaggtaccagcacattggactggtggccatgttccgacaaaatacgggcatgtgggaaagtaatgccaatgtgaaaggcacacagatcggggcctacttcggggccagcttgtgtagcgtagacgtggactccaacggctcaactgatctcgttctcataggagcgccccactactatgagcagacccgtggggggcaggtgtccgtgtgtccattgccgcgagggcagcgcgcaagatggcaatgtgacgccgttctgtacggggaacagggtcagccctggggcagattcggagccgctcttactgtactgggagacgttaacggcgacaaactgactgacgtcgccatcggcgcccccggtgaggaggataatcgcggtgctgtgtacttgttccatggaactagtggtagcggcatatcacccagccactcccagcgaatagcgggaagcaagctttctcctcgcctccagtattttgggcaatcactctcaggtggacaggacctgaccatggatggtctcgtggacctcactgtgggagcccaggggcacgtgttactcctgagaagccaaccagttctgcgtgtgaaggctatcatggaatttaatccccgcgaggtcgcgcggaacgtgttcgaatgcaacgaccaagtggtgaaaggcaaagaagctggagaagtgcgtgtctgcttacacgtgcagaaaagcactcgagatcgtttgagagagggccagattcaatccgttgtaacatatgaccttgctctagacagtggaagaccacactctcgagcggtattcaacgagaccaagaacagtacccgacgccagacacaggtgcttggactgacccagacatgcgagactctgaagttacagcttcctaattgtatcgaagatccagtgtcacccatcgtgctgcggttgaatttttctctggtgggaactcctcttagtgcattcggcaaccttcggcctgtactggctgaggatgcccagcgtctctttacagccctattcccctttgagaagaattgcggtaatgacaacatttgtcaagacgacctcagcatcacgtttagcttcatgtctttggattgtctggtcgtcggaggacctcgcgagtttaatgtcacagtcacagtgagaaacgacggtgaggattcgtaccgtacccaagttacatttttcttccctctggacctttcgtataggaaagtgtccactctgcagaatcagaggtcccagagaagttggagactggcatgtgaatccgccagtagtacggaggtgtccggggcgctaaagtccacttcctgcagcattaaccatcctatattcccagagaattctgaagtcactttcaacataaccttcgatgtcgactctaaggcatcactgggcaataaactactactcaaagcgaacgttacgtccgagaacaacatgccacgtaccaataaaaccgagttccagctggagcttcccgtgaaatacgctgtgtacatggtcgttacttcacacggggtgtccacaaagtacctgaacttcactgctagcgagaacacgtcccgggtgatgcagcatcaataccaggtgtccaacctgggacaacgtagtctacctataagtctggtctttttagtgccagtccgactaaaccagactgtgatctgggaccggccccaggttacattctctgagaatctttcctctacatgtcacacaaaagagaggctcccctctcattccgactttttagctgaactgcggaaagctccagtggtaaattgttctatcgccgtgtgccagagaatacagtgtgatatacccttctttggcatccaagaggagttcaatgcgacgctgaaaggtaatctctctttcgattggtatataaagacctctcacaaccatctcttgatcgtgtcaaccgccgagatactgtttaatgatagcgtgttcaccttactacccggccagggggccttcgtccgatctcagactgaaacaaaagtggagccgtttgaagtccctaaccccctcccactcattgttggtagctctgtcggtggattactgttgctagccttaattactgcagctctctacaaactgggcttcttcaagagacagtacaaggatatgatgagcgaagggggacctccgggagctgaacctcagtag

SEQ ID NO: 59082 - DNA, 4745 bp, Artificial Sequence
  derived and/or modified sequence
ttttctgcccttctttgctttggtggcttccttgtggttcctcagtggtgcctgcaacccctggttcacctccttccaggttctggctccttccagccatggctctcagagtccttctgttaacagccttgaccttatgtcatgggttcaacttggacactgaaaacgcaatgaccttccaagagaacgcaaggggcttcgggcagagcgtggtccagcttcagggatccagggtggtggttggagccccccaggagatagtggctgccaaccaaaggggcagcctctaccagtgcgactacagcacaggctcatgcgagcccatccgcctgcaggtccccgtggaggccgtgaacatgtccctgggcctgtccctggcagccaccaccagcccccctcagctgctggcctgtggtcccaccgtgcaccagacttgcagtgagaacacgtatgtgaaagggctctgcttcctgtttggatccaacctacggcagcagccccagaagttcccagaggccctccgagggtgtcctcaagaggatagtgacattgccttcttgattgatggctctggtagcatcatcccacatgactttcggcggatgaaggagtttgtctcaactgtgatggagcaattaaaaaagtccaaaaccttgttctctttgatgcagtactctgaagaattccggattcactttaccttcaaagagttccagaacaaccctaacccaagatcactggtgaagccaataacgcagctgcttgggcggacacacacggccacgggcatccgcaaagtggtacgagagctgtttaacatcaccaacggagcccgaaagaatgcctttaagatcctagttgtcatcacggatggagaaaagtttggcgatcccttgggatatgaggatgtcatccctgaggcagacagagagggagtcattcgctacgtcattggggtgggagatgccttccgcagtgagaaatcccgccaagagcttaataccatcgcatccaagccgcctcgtgatcacgtgttccaggtgaataactttgaggctctgaagaccattcagaaccagcttcgggagaagatctttgcgatcgagggtactcagacaggaagtagcagctcctttgagcatgagatgtctcaggaaggcttcagcgctgccatcacctctaatggccccttgctgagcactgtggggagctatgactgggctggtggagtctttctatatacatcaaaggagaaaagcaccttcatcaacatgaccagagtggattcagacatgaatgatgcttacttgggttatgctgccgccatcatcttacggaaccgggtgcaaagcctggttctgggggcacctcgatatcagcacatcggcctggtagcgatgttcaggcagaacactggcatgtgggagtccaacgctaatgtcaagggcacccagatcggcgcctacttcggggcctccctctgctccgtggacgtggacagcaacggcagcaccgacctggtcctcatcggggccccccattactacgagcagacccgagggggccaggtgtccgtgtgccccttgcccagggggcagagggctcggtggcagtgtgatgctgttctctacggggagcagggccaaccctggggccgctttggggcagccctaacagtgctgggggacgtaaatggggacaagctgacggacgtggccattggggccccaggagaggaggacaaccggggtgctgtttacctgtttcacggaacctcaggatctggcatcagcccctcccatagccagcggatagcaggctccaagctctctcccaggctccagtattttggtcagtcactgagtgggggccaggacctcacaatggatggactggtagacctgactgtaggagcccaggggcacgtgctgctgctcaggtcccagccagtactgagagtcaaggcaatcatggagttcaatcccagggaagtggcaaggaatgtatttgagtgtaatgatcaggtggtgaaaggcaaggaagccggagaggtcagagtctgcctccatgtccagaagagcacacgggatcggctaagagaaggacagatccagagtgttgtgacttatgacctggctctggactccggccgcccacattcccgcgccgtcttcaatgagacaaagaacagcacacgcagacagacacaggtcttggggctgacccagacttgtgagaccctgaaactacagttgccgaattgcatcgaggacccagtgagccccattgtgctgcgcctgaacttctctctggtgggaacgccattgtctgctttcgggaacctccggccagtgctggcggaggatgctcagagactcttcacagccttgtttccctttgagaagaattgtggcaatgacaacatctgccaggatgacctcagcatcaccttcagtttcatgagcctggactgcctcgtggtgggtgggccccgggagttcaacgtgacagtgactgtgagaaatgatggtgaggactcctacaggacacaggtcaccttcttcttcccgcttgacctgtcctaccggaaggtgtccacgctccagaaccagcgctcacagcgatcctggcgcctggcctgtgagtctgcctcctccaccgaagtgtctggggccttgaagagcaccagctgcagcataaaccaccccatcttcccggaaaactcagaggtcacctttaatatcacgtttgatgtagactctaaggcttcccttggaaacaaactgctcctcaaggccaatgtgaccagtgagaacaacatgcccagaaccaacaaaaccgaattccaactggagctgccggtgaaatatgctgtctacatggtggtcaccagccatggggtctccactaaatatctcaacttcacggcctcagagaataccagtcgggtcatgcagcatcaatatcaggtcagcaacctggggcagaggagcctccccatcagcctggtgttcttggtgcccgtccggctgaaccagactgtcatatgggaccgcccccaggtcaccttctccgagaacctctcgagtacgtgccacaccaaggagcgcttgccctctcactccgactttctggctgagcttcggaaggcccccgtggtgaactgctccatcgctgtctgccagagaatccagtgtgacatcccgttctttggcatccaggaagaattcaatgctaccctcaaaggcaacctctcgtttgactggtacatcaagacctcgcataaccacctcctgatcgtgagcacagctgagatcttgtttaacgattccgtgttcaccctgctgccgggacagggggcgtttgtgaggtcccagacggagaccaaagtggagccgttcgaggtccccaaccccctgccgctcatcgtgggcagctctgtcgggggactgctgctcctggccctcatcaccgccgcgctgtacaagctcggcttcttcaagcggcaatacaaggacatgatgagtgaagggggtcccccgggggccgaaccccagtagcggctccttcccgacagagctgcctctcggtggccagcaggactctgcccagaccacacgtagcccccaggctgctggacacgtcggacagcgaagtatccccgacaggacgggcttgggcttccatttgtgtgtgtgcaagtgtgtatgtgcgtgtgtgcaagtgtctgtgtgcaagtgtgtgcacatgtgtgcgtgtgcgtgcatgtgcacttgcacgcccatgtgtgagtgtgtgcaagtatgtgagtgtgtccaagtgtgtgtgcgtgtgtccatgtgtgtgcaagtgtgtgcatgtgtgcgagtgtgtgcatgtgtgtgctcaggggcgtgtggctcacgtgtgtgactcagatgtctctggcgtgtgggtaggtgacggcagcgtagcctctccggcagaagggaactgcctgggctcccttgtgcgtgggtgaagccgctgctgggttttcctccgggagaggggacggtcaatcctgtgggtgaagacagagggaaacacagcagcttctctccactgaaagaagtgggacttcccgtcgcctgcgagcctgcggcctgctggagcctgcgcagcttggatggagactccatgagaagccgtgggtggaaccaggaacctcctccacaccagcgctgatgcccaataaagatgcccactgaggaatgatgaagcttcctttctggattcatttattatttcaatgtgactttaattttttggatggataagcttgtctatggtacaaaaatcacaaggcattcaagtgtacagtgaaaagtctccctttccagatattcaagtcacctccttaaaggtagtcaagattgtgttttgaggtttccttcagacagattccaggcgatgtgcaagtgtatgcacgtgtgcacacacaccacacatacacacacacaagcttttttacacaaatggtagcatactttatattggtctgtatcttgctttttttcaccaatatttctcagacatcggttcatattaagacataaattactttttcattcttttataccgctgcatagtattccattgtgtgagtgtaccataatgtatttaaccagtcttcttttgatatactattttcattctcttgttattgcatcaatgctgagttaataaatcaaatatatgtcatttttgcatatatgtaaggataa

SEQ ID NO: 59083 - DNA, 3462 bp, Artificial Sequence
  derived and/or modified sequence
atggccctgcgggtgctgctgctgacagccctgaccctgtgccacggcttcaacctggacacagaaaatgccatgaccttccaggagaatgcccggggcttcggccagagcgtggtgcagctgcagggcagccgggtggtggtgggcgccccccaggagatcgtggccgccaaccagaggggcagcctgtaccagtgtgactacagcacaggcagctgtgagcccatccggctgcaggtgcctgtggaggccgtgaacatgagcctgggcctgagcctggccgccaccaccagccccccccagctgctggcctgtggccccaccgtgcaccagacctgcagcgagaacacctacgtgaagggcctgtgcttcctgtttggcagcaacctgcggcagcagccccagaagtttcctgaggccctgcggggctgcccccaggaggacagcgacatcgccttcctgattgatggcagcggcagcatcatcccccatgacttccggaggatgaaggagtttgtgtccacagtgatggagcagctgaagaagagcaagaccctcttcagcctgatgcagtacagcgaggagttccgcatccacttcaccttcaaggagttccagaacaaccccaaccccaggagcctggtgaagcccatcacccagctgctgggccgcacccacacagccaccggcatcaggaaggtggtgcgggagctgttcaacatcaccaatggagccaggaagaatgccttcaagatcctggtggtgatcacagatggagagaagtttggagaccccctgggctatgaagatgtgattcctgaggccgaccgggagggcgtcatccgctacgtgattggagtgggagatgccttccgctctgagaagagccggcaggagctgaacaccatcgccagcaagccaccccgggaccacgtgttccaggtgaacaactttgaggccctgaagaccatccagaaccagctgcgggagaagatctttgccatcgagggcacccagacaggcagcagcagcagctttgagcacgagatgagccaggagggcttctctgctgccatcaccagcaatggccccctgctgagcacagtgggcagctatgactgggccggcggcgtcttcctgtacaccagcaaggagaagagcaccttcatcaacatgaccagggtggacagcgacatgaatgatgcctacctgggctatgctgctgccatcatcctgaggaacagagtgcagagcctggtgctgggcgccccccgctaccagcacatcggcctggtggccatgttccggcagaacacaggcatgtgggagagcaatgccaacgtgaagggcacccagattggagcctactttggagccagcctgtgcagcgtggatgtggacagcaatggcagcacagacctggtgctgattggagccccccactactatgagcagacccggggcggccaggtgtctgtgtgccccctgccccggggccagagggcccgctggcagtgtgatgctgtgctgtatggagagcagggccagccctggggccgctttggagctgccctgactgtgctgggagatgtgaatggagacaagctgacagatgtggccatcggggcccctggagaggaggacaacagaggagctgtgtacctgttccacggcaccagcggcagcggcatcagccccagccacagccagagaattgctggcagcaagctgagcccccggctgcagtacttcggccagagcctgagcggcggccaggacctgaccatggatggcctggtggacctgactgtgggcgcccagggccacgtgctgctgctgcggagccagcctgtgctgcgggtgaaggccatcatggagttcaacccccgggaggtggccagaaatgtgtttgagtgcaatgaccaggtggtgaagggcaaggaggccggggaggtgcgggtgtgcctgcacgtgcagaagagcacccgggaccggctgcgggagggccagatccagagcgtggtgacctatgacctggccctggacagcggccggccccacagcagagctgtgttcaatgagaccaagaacagcacccggcggcagacccaggtgctgggcctgacccagacctgtgagaccctgaagctgcagctgcccaactgcatcgaggaccctgtgagccccatcgtgctgcggctgaacttcagcctggtgggcacccccctgagcgccttcggcaacctgcggcctgtgctggctgaagatgcccagaggctcttcaccgccctcttcccctttgagaagaactgtggaaatgacaacatctgccaggatgacctgagcatcaccttctccttcatgagcctggactgcctggtggtgggcggcccccgggagttcaacgtgacagtgacagtgagaaatgatggagaggacagctaccgcacccaggtgaccttcttcttccccctggacctgagctacaggaaggtgtccaccctgcagaaccagaggagccagaggtcctggaggctggcctgtgagagcgccagcagcacagaggtgtctggggccctgaagagcaccagctgcagcatcaaccaccccatcttccctgagaacagcgaggtgaccttcaacatcacctttgatgtggacagcaaggccagcctgggcaacaagctgctgctgaaggccaacgtgaccagcgagaacaacatgcccaggaccaacaagacagagttccagctggagctgcctgtgaagtatgctgtgtacatggtggtgaccagccatggagtgtccaccaagtacctgaacttcaccgccagcgagaacaccagccgggtgatgcagcaccagtaccaggtgagcaacctgggccagaggagcctgcccatcagcctggtgttcctggtgcctgtgcggctgaaccagaccgtcatctgggaccggccccaggtgaccttcagcgagaacctgagcagcacctgccacaccaaggagcggctgcccagccacagcgacttcctggccgagctgaggaaggcccctgtggtgaactgcagcattgctgtgtgccagaggatccagtgtgacatccccttcttcggcatccaggaggagttcaatgccaccctgaagggcaacctgagctttgactggtacatcaagaccagccacaaccacctgctgattgtgtccacagctgagatcctcttcaatgacagcgtcttcaccctgctgcccggccagggcgcctttgtgcgcagccagacagagaccaaggtggagccctttgaggtgcccaaccccctgcccctcatcgtgggcagctctgtgggcggcctgctgctgctggccctgatcacagctgccctgtacaagctgggcttcttcaagaggcagtacaaggacatgatgtctgagggcggccccccaggagctgagccccagtag

SEQ ID NO: 59084 - DNA, 3462 bp, Artificial Sequence
  derived and/or modified sequence
atggccctgcgggtgctgctgctgaccgccctgaccctgtgccacggtttcaacctggatacagagaatgccatgacctttcaagagaacgctagggggttcggccagtccgtcgttcagctccagggatcacgggtggtggtgggggcccctcaggagattgtagctgctaatcaaagggggtctctctatcagtgtgattactcaacgggatcatgtgagcctattagactgcaggtgccagtggaagccgtaaatatgtccttgggactcagcctggctgcaactaccagcccccctcaacttttagcttgtggcccgacagtgcaccaaacctgtagcgaaaatacatacgtcaaggggctgtgttttctgttcggctccaacctgcggcagcagccgcaaaaattcccggaagctcttcggggatgcccacaggaggactctgatatcgcttttttgattgacgggtccggttctattatacctcatgactttcggcgcatgaaggagtttgttagtaccgttatggaacaactgaaaaagagtaaaacgctcttttctctgatgcaatattcagaagaattccgtatccactttacatttaaggagttccaaaataatcccaacccaaggtccctggtgaaaccaattacccagctgttgggccggacacatacggctacgggaatacggaaggtggtgcgcgagctgttcaatatcaccaatggcgctcggaagaatgcatttaagattctcgtggtgatcactgatggagagaagttcggtgatcctctgggttatgaggatgttattccagaggccgaccgggagggagtgatacgctacgtgattggcgtaggagacgcatttcggtccgaaaaatcccgccaggagctgaatacaattgcatctaagccccccagggatcatgttttccaggtgaacaacttcgaggccctgaaaactattcaaaaccagctccgtgaaaaaatattcgccatcgagggtacacagaccggatcctcaagttctttcgagcatgaaatgtcgcaggagggtttctccgccgccatcacgtccaatggtcccctcttatcaacagtgggtagctacgactgggctgggggggtattcctctatacatctaaggagaaatctacttttatcaatatgacccgcgttgattccgacatgaacgacgcgtaccttgggtatgccgcggctattattcttcgtaatagagtgcagtctctcgttctgggcgccccaagataccagcacataggcctggttgcaatgttccggcagaacactggtatgtgggaatccaatgccaacgtgaaaggaacccagattggagcctacttcggagccagcctgtgctccgttgatgtggacagcaacgggtctaccgatctggtcctcataggtgccccacattattacgagcagacaagaggaggacaggtgtcggtgtgccctttgcccaggggccagcgagcccgctggcagtgcgatgccgtcctctatggggaacagggacagccatggggacgattcggggctgcattgacggtgttaggtgatgtgaacggagataagctcaccgatgtcgcaataggggcgccgggggaggaagataaccgcggagcagtatacctgtttcatgggacttctggctccggcatctcgccatctcattcacaacggatcgcagggtcgaaattatccccaaggctgcagtacttcggtcaaagcctctctggtggtcaggatctgacgatggatggcctggtcgatctgactgttggcgcccagggacacgttctgctcctgcgatcacagcctgtcttgcgtgtgaaggctattatggagtttaaccctagggaggtggccagaaacgtatttgagtgcaatgaccaggtcgtcaagggcaaggaagccggagaagttcgtgtttgccttcatgtacaaaaatcaacacgggatcgcctgcgagaagggcagatccagtctgtggtcacatacgatttggcgctggactcaggcagaccacatagtcgagccgtattcaatgaaaccaagaatagcaccaggaggcagacccaggtactcggccttacccagacttgcgaaacactgaaattacaactcccaaactgcatcgaggatccagtgtctcctattgtgctgcgcctgaatttctctcttgtgggcacaccactgtccgcgtttggcaatctgcgccccgtgctggcagaggatgcacagagattgttcacagccttgtttccctttgaaaaaaattgcggaaacgacaatatttgccaggatgatttgtccatcacgttcagttttatgagccttgattgtctcgttgttggcggccctagggagtttaatgtgacagttaccgtgagaaacgacggcgaggacagctaccgcactcaagttaccttcttctttcccctcgacctctcgtatagaaaggtatctacactgcaaaaccagcggagccagaggtcatggagactcgcgtgtgaaagtgcttcctcaaccgaagtgagtggtgccctgaaatccaccagctgctccattaaccatccaatctttccagagaattctgaggtaacgtttaatataacgtttgacgtcgattccaaggcatcgctgggaaataagctattactgaaagctaacgtgacttcagagaacaatatgcccaggacaaataagacggagttccaattggagctaccggtaaaatatgctgtatacatggtggttactagccatggagtttctactaagtatctcaacttcactgctagcgagaatactagccgagtcatgcagcatcagtaccaggtgagcaaccttggccagcggtccctgcctattagccttgtgtttcttgtgccggtgcggcttaatcaaactgtgatctgggataggccacaggtgactttttccgagaacctgtcaagcacttgccacacaaaggaaaggctgcccagtcactccgactttctggctgagctccgtaaggccccagtcgtcaactgcagcatagctgtttgccagaggattcagtgtgacatcccatttttcggtatccaggaagaattcaacgccaccttaaagggcaatctgtctttcgactggtacatcaagaccagccataatcatttgctgatcgtcagtacagccgagatcctctttaacgactctgtttttactctgctgccagggcaaggggctttcgtgcggtcgcagactgaaaccaaggtcgagccctttgaggtgcctaatcccctgccactcatagtcggtagttcagtaggcggtctgcttcttctagctctgattacagccgctctctacaaactcggtttctttaagcgtcagtacaaggatatgatgagcgagggcggcccacccggagccgaacctcaatag

SEQ ID NO: 59085 - DNA, 3462 bp, Artificial Sequence
  derived and/or modified sequence
atggctctcagagtactgctgttgactgccctgaccctttgccacgggtttaatctggatacagagaacgccatgacattccaggaaaacgccagagggtttgggcagtccgttgtccagcttcaaggtagccgcgtcgtggtgggggcaccgcaggaaatcgtggctgccaatcaacgcggttcactgtatcagtgcgactactctaccggttcgtgtgagccaatcagactgcaggtgccggtcgaagcagttaacatgtcactggggttgtccctggcagccacaacctccccaccacagttgcttgcgtgcggccctaccgtacaccagacttgctccgaaaatacctatgtgaagggtttgtgtttcctgttcgggagcaacctccggcaacaaccccagaaatttccagaggccctgcggggatgcccacaggaggactcagacatagccttccttatcgacgggtcaggaagcatcatccctcatgatttccgtcgcatgaaagagtttgtgagcaccgtgatggagcagctcaaaaaaagcaagactctattttctctcatgcaatattccgaagagtttcggatacacttcacctttaaagagttccagaataaccctaatcctaggtctttggtgaaacctatcacacagctgttgggcagaactcatactgcgactggaatccgtaaggtggtgcgagaactgtttaacatcaccaacggcgctcgcaagaacgctttcaagattctggtggtgattaccgacggggagaagtttggagacccgctcggatatgaggacgttattccagaagcagaccgagagggagtcatccgctatgttatcggtgtgggagacgctttcagatccgaaaaatcaagacaggaactcaatacaatcgcttcaaagcctcctcgggatcacgtgttccaggtaaacaatttcgaggccttgaagacaatccagaatcagctgcgcgagaaaatctttgcaattgaagggacgcaaaccggatcctctagctcctttgagcacgagatgtcccaggaagggttctcagctgccatcaccagtaacggtcctcttttgagcacagtaggctcttatgactgggctgggggtgtcttcctgtatacctccaaggagaaaagtaccttcatcaatatgacacgagtggatagcgacatgaacgatgcctatctgggatacgccgcagccatcatactgagaaatcgggtacaaagcctggtgctgggtgcgcctaggtaccaacacataggcttggttgcaatgttccggcagaatactggaatgtgggaaagcaacgccaatgttaagggaacacagatcggcgcttacttcggggcttcgttatgttcagtcgacgtcgattctaatggatcgacggatctggtgctaatcggcgcaccacattattacgaacagacacgaggagggcaggtgtcggtgtgcccccttcccaggggtcaaagagcccgttggcaatgcgacgcagtgctctacggcgaacaagggcagccttggggaagattcggggctgccctcactgtgctcggggatgtgaacggcgataaactgaccgatgtcgctatcggcgctcccggtgaggaggacaataggggcgctgtgtacctgtttcatggcacctccggaagtggtatcagtccaagccacagtcagcgtattgctggctcgaagctttctcccaggctgcagtacttcgggcagtctctgtccggcggtcaggacttaactatggacggactggttgatttgaccgtaggcgctcagggccatgttctactgctacgcagtcagcccgtactccgagttaaagccattatggagtttaatcctcgcgaggtggcaaggaatgtatttgaatgtaatgatcaggttgtaaaggggaaagaggctggagaagttagagtttgtctgcatgtgcagaaaagtacacgcgataggctcagagagggacagattcaaagcgttgtgacctatgatctggccctggattctggacggccacattcacgggctgtgttcaacgagaccaaaaactccacccgcaggcagacgcaggtactcggactgacccagacatgtgagacactgaagctacaactaccaaactgcatcgaagatccagtctcccccatagtgctcagattaaacttttccttagtgggaacgcctctaagcgcctttggaaatttacggcctgtcctcgcagaagacgcccaacggctcttcaccgccttgttcccattcgaaaagaattgcggtaacgacaacatttgccaggacgatctatcaataaccttctcgttcatgtccctggactgtcttgttgtcggtggcccacgtgaattcaacgtcaccgtgacagtgcgcaatgacggagaggatagctatcggactcaagttacattcttcttccctctagatctgagctataggaaggtgagcaccttacagaaccagagatcccagcggagctggcgactggcttgtgaaagcgcttcttccacagaggtgagcggcgctctgaagagtactagctgctctattaaccatcccatttttcccgagaactcagaggttacattcaatattaccttcgacgtggactccaaagcaagcctgggcaacaaacttctccttaaagccaatgtgacctccgagaacaacatgcccagaacaaataagacagagttccagctggagctgccagtgaagtacgcagtctatatggtcgttacatctcacggggtgagcactaagtatctcaacttcacagcctcagaaaacacctcacgtgtcatgcagcaccagtatcaggtaagcaatttgggacagcgctctctgcctatttctctagtgttcctggtcccagttcggctgaatcagaccgtgatctgggaccgtccccaagtgaccttctccgagaacctgtcctccacctgccacaccaaggaaagactgccatcacacagcgattttttagcagaactccggaaagcaccagtagtgaattgttctatcgctgtgtgtcagcgcatccagtgtgacattccctttttcggcattcaggaagaattcaatgctacgctcaaggggaatctcagctttgattggtatatcaaaacctcccacaaccacctgctgatcgtcagcactgccgagatactgttcaacgacagtgtgttcaccctgctgcctggacagggtgcattcgtgagatcccagactgaaacgaaggtcgagccattcgaggtaccaaatcctctgcctttgattgttggtagttcagtcggaggtctgctactactggccctcatcaccgctgccctctacaaactgggttttttcaaacggcaatataaggatatgatgagcgaaggaggaccacccggagcggagccccagtag

SEQ ID NO: 59086 - DNA, 3462 bp, Artificial Sequence
  derived and/or modified sequence
atggccctgagagtgctgctgctgaccgccctgaccctgtgccacggcttcaacctggacaccgagaacgccatgaccttccaggagaacgccagaggcttcggccagagcgtggtgcagctgcagggcagcagagtggtggtgggcgccccccaggagatcgtggccgccaaccagagaggcagcctgtaccagtgcgactacagcaccggcagctgcgagcccatcagactgcaggtgcccgtggaggccgtgaacatgagcctgggcctgagcctggccgccaccaccagccccccccagctgctggcctgcggccccaccgtgcaccagacctgcagcgagaacacctacgtgaagggcctgtgcttcctgttcggcagcaacctgagacagcagccccagaagttccccgaggccctgagaggctgcccccaggaggacagcgacatcgccttcctgatcgacggcagcggcagcatcatcccccacgacttcagaagaatgaaggagttcgtgagcaccgtgatggagcagctgaagaagagcaagaccctgttcagcctgatgcagtacagcgaggagttcagaatccacttcaccttcaaggagttccagaacaaccccaaccccagaagcctggtgaagcccatcacccagctgctgggcagaacccacaccgccaccggcatcagaaaggtggtgagagagctgttcaacatcaccaacggcgccagaaagaacgccttcaagatcctggtggtgatcaccgacggcgagaagttcggcgaccccctgggctacgaggacgtgatccccgaggccgacagagagggcgtgatcagatacgtgatcggcgtgggcgacgccttcagaagcgagaagagcagacaggagctgaacaccatcgccagcaagccccccagagaccacgtgttccaggtgaacaacttcgaggccctgaagaccatccagaaccagctgagagagaagatcttcgccatcgagggcacccagaccggcagcagcagcagcttcgagcacgagatgagccaggagggcttcagcgccgccatcaccagcaacggccccctgctgagcaccgtgggcagctacgactgggccggcggcgtgttcctgtacaccagcaaggagaagagcaccttcatcaacatgaccagagtggacagcgacatgaacgacgcctacctgggctacgccgccgccatcatcctgagaaacagagtgcagagcctggtgctgggcgcccccagataccagcacatcggcctggtggccatgttcagacagaacaccggcatgtgggagagcaacgccaacgtgaagggcacccagatcggcgcctacttcggcgccagcctgtgcagcgtggacgtggacagcaacggcagcaccgacctggtgctgatcggcgccccccactactacgagcagaccagaggcggccaggtgagcgtgtgccccctgcccagaggccagagagccagatggcagtgcgacgccgtgctgtacggcgagcagggccagccctggggcagattcggcgccgccctgaccgtgctgggcgacgtgaacggcgacaagctgaccgacgtggccatcggcgcccccggcgaggaggacaacagaggcgccgtgtacctgttccacggcaccagcggcagcggcatcagccccagccacagccagagaatcgccggcagcaagctgagccccagactgcagtacttcggccagagcctgagcggcggccaggacctgaccatggacggcctggtggacctgaccgtgggcgcccagggccacgtgctgctgctgagaagccagcccgtgctgagagtgaaggccatcatggagttcaaccccagagaggtggccagaaacgtgttcgagtgcaacgaccaggtggtgaagggcaaggaggccggcgaggtgagagtgtgcctgcacgtgcagaagagcaccagagacagactgagagagggccagatccagagcgtggtgacctacgacctggccctggacagcggcagaccccacagcagagccgtgttcaacgagaccaagaacagcaccagaagacagacccaggtgctgggcctgacccagacctgcgagaccctgaagctgcagctgcccaactgcatcgaggaccccgtgagccccatcgtgctgagactgaacttcagcctggtgggcacccccctgagcgccttcggcaacctgagacccgtgctggccgaggacgcccagagactgttcaccgccctgttccccttcgagaagaactgcggcaacgacaacatctgccaggacgacctgagcatcaccttcagcttcatgagcctggactgcctggtggtgggcggccccagagagttcaacgtgaccgtgaccgtgagaaacgacggcgaggacagctacagaacccaggtgaccttcttcttccccctggacctgagctacagaaaggtgagcaccctgcagaaccagagaagccagagaagctggagactggcctgcgagagcgccagcagcaccgaggtgagcggcgccctgaagagcaccagctgcagcatcaaccaccccatcttccccgagaacagcgaggtgaccttcaacatcaccttcgacgtggacagcaaggccagcctgggcaacaagctgctgctgaaggccaacgtgaccagcgagaacaacatgcccagaaccaacaagaccgagttccagctggagctgcccgtgaagtacgccgtgtacatggtggtgaccagccacggcgtgagcaccaagtacctgaacttcaccgccagcgagaacaccagcagagtgatgcagcaccagtaccaggtgagcaacctgggccagagaagcctgcccatcagcctggtgttcctggtgcccgtgagactgaaccagaccgtgatctgggacagaccccaggtgaccttcagcgagaacctgagcagcacctgccacaccaaggagagactgcccagccacagcgacttcctggccgagctgagaaaggcccccgtggtgaactgcagcatcgccgtgtgccagagaatccagtgcgacatccccttcttcggcatccaggaggagttcaacgccaccctgaagggcaacctgagcttcgactggtacatcaagaccagccacaaccacctgctgatcgtgagcaccgccgagatcctgttcaacgacagcgtgttcaccctgctgcccggccagggcgccttcgtgagaagccagaccgagaccaaggtggagcccttcgaggtgcccaaccccctgcccctgatcgtgggcagcagcgtgggcggcctgctgctgctggccctgatcaccgccgccctgtacaagctgggcttcttcaagagacagtacaaggacatgatgagcgagggcggcccccccggcgccgagccccagtag

SEQ ID NO: 59087 - protein, 2036 aa, Artificial Sequence
  derived and/or modified sequence
MAAVTMSVPGRKAPPRPGPVPEAAQPFLFTPRGPSAGGGPGSGTSPQVEWTARRLVWVPSELHGFEAAALRDEGEEEAEVELAESGRRLRLPRDQIQRMNPPKFSKAEDMAELTCLNEASVLHNLRERYYSGLIYTYSGLFCVVINPYKQLPIYTEAIVEMYRGKKRHEVPPHVYAVTEGAYRSMLQDREDQSILCTGESGAGKTENTKKVIQYLAHVASSPKGRKEPGVPASVSTVSYGELERQLLQANPILEAFGNAKTVKNDNSSRFGKFIRINFDVAGYIVGANIETYLLEKSRAIRQAKDECSFHIFYQLLGGAGEQLKADLLLEPCSHYRFLTNGPSSSPGQERELFQETLESLRVLGFSHEEIISMLRMVSAVLQFGNIALKRERNTDQATMPDNTAAQKLCRLLGLGVTDFSRALLTPRIKVGRDYVQKAQTKEQADFALEALAKATYERLFRWLVLRLNRALDRSPRQGASFLGILDIAGFEIFQLNSFEQLCINYTNEKLQQLFNHTMFVLEQEEYQREGIPWTFLDFGLDLQPCIDLIERPANPPGLLALLDEECWFPKATDKSFVEKVAQEQGGHPKFQRPRHLRDQADFSVLHYAGKVDYKANEWLMKNMDPLNDNVAALLHQSTDRLTAEIWKDEHGGFQQFSFLGSFPPSPPGSAERCSSAISPPGVEGIVGLEQVSSLGDGPPGGRPRRGMFRTVGQLYKESLSRLMATLSNTNPSFVRCIVPNHEKRAGKLEPRLVLDQLRCNGVLEGIRICRQGFPNRILFQEFRQRYEILTPNAIPKGFMDGKQACEKMIQALELDPNLYRVGQSKIFFRAGVLAQLEEERDLKVTDIIVSFQAAARGYLARRAFQKRQQQQSALRVMQRNCAAYLKLRHWQWWRLFTKVKPLLQVTRQDEVLQARAQELQKVQELQQQSAREVGELQGRVAQLEEERARLAEQLRAEAELCAEAEETRGRLAARKQELELVVSELEARVGEEEECSRQMQTEKKRLQQHIQELEAHLEAEEGARQKLQLEKVTTEAKMKKFEEDLLLLEDQNSKLSKERKLLEDRLAEFSSQAAEEEEKVKSLNKLRLKYEATIADMEDRLRKEEKGRQELEKLKRRLDGESSELQEQMVEQQQRAEELRAQLGRKEEELQAALARAEDEGGARAQLLKSLREAQAALAEAQEDLESERVARTKAEKQRRDLGEELEALRGELEDTLDSTNAQQELRSKREQEVTELKKTLEEETRIHEAAVQELRQRHGQALGELAEQLEQARRGKGAWEKTRLALEAEVSELRAELSSLQTARQEGEQRRRRLELQLQEVQGRAGDGERARAEAAEKLQRAQAELENVSGALNEAESKTIRLSKELSSTEAQLHDAQELLQEETRAKLALGSRVRAMEAEAAGLREQLEEEAAARERAGRELQTAQAQLSEWRRRQEEEAGALEAGEEARRRAAREAEALTQRLAEKTETVDRLERGRRRLQQELDDATMDLEQQRQLVSTLEKKQRKFDQLLAEEKAAVLRAVEERERAEAEGREREARALSLTRALEEEQEAREELERQNRALRAELEALLSSKDDVGKSVHELERACRVAEQAANDLRAQVTELEDELTAAEDAKLRLEVTVQALKTQHERDLQGRDEAGEERRRQLAKQLRDAEVERDEERKQRTLAVAARKKLEGELEELKAQMASAGQGKEEAVKQLRKMQAQMKELWREVEETRTSREEIFSQNRESEKRLKGLEAEVLRLQEELAASDRARRQAQQDRDEMADEVANGNLSKAAILEEKRQLEGRLGQLEEELEEEQSNSELLNDRYRKLLLQVESLTTELSAERSFSAKAESGRQQLERQIQELRGRLGEEDAGARARHKMTIAALESKLAQAEEQLEQETRERILSGKLVRRAEKRLKEVVLQVEEERRVADQLRDQLEKGNLRVKQLKRQLEEAEEEASRAQAGRRRLQRELEDVTESAESMNREVTTLRNRLRRGPLTFTTRTVRQVFRLEEGVASDEEAEEAQPGSGPSPEPEGSPPAHPQ

SEQ ID NO: 59088 - protein, 2028 aa, Artificial Sequence
  derived and/or modified sequence
MAAVTMSVPGRKAPPRPGPVPEAAQPFLFTPRGPSAGGGPGSGTSPQVEWTARRLVWVPSELHGFEAAALRDEGEEEAEVELAESGRRLRLPRDQIQRMNPPKFSKAEDMAELTCLNEASVLHNLRERYYSGLIYTYSGLFCVVINPYKQLPIYTEAIVEMYRGKKRHEVPPHVYAVTEGAYRSMLQDREDQSILCTGESGAGKTENTKKVIQYLAHVASSPKGRKEPGVPGELERQLLQANPILEAFGNAKTVKNDNSSRFGKFIRINFDVAGYIVGANIETYLLEKSRAIRQAKDECSFHIFYQLLGGAGEQLKADLLLEPCSHYRFLTNGPSSSPGQERELFQETLESLRVLGFSHEEIISMLRMVSAVLQFGNIALKRERNTDQATMPDNTAAQKLCRLLGLGVTDFSRALLTPRIKVGRDYVQKAQTKEQADFALEALAKATYERLFRWLVLRLNRALDRSPRQGASFLGILDIAGFEIFQLNSFEQLCINYTNEKLQQLFNHTMFVLEQEEYQREGIPWTFLDFGLDLQPCIDLIERPANPPGLLALLDEECWFPKATDKSFVEKVAQEQGGHPKFQRPRHLRDQADFSVLHYAGKVDYKANEWLMKNMDPLNDNVAALLHQSTDRLTAEIWKDEHGGFQQFSFLGSFPPSPPGSAERCSSAISPPGVEGIVGLEQVSSLGDGPPGGRPRRGMFRTVGQLYKESLSRLMATLSNTNPSFVRCIVPNHEKRAGKLEPRLVLDQLRCNGVLEGIRICRQGFPNRILFQEFRQRYEILTPNAIPKGFMDGKQACEKMIQALELDPNLYRVGQSKIFFRAGVLAQLEEERDLKVTDIIVSFQAAARGYLARRAFQKRQQQQSALRVMQRNCAAYLKLRHWQWWRLFTKVKPLLQVTRQDEVLQARAQELQKVQELQQQSAREVGELQGRVAQLEEERARLAEQLRAEAELCAEAEETRGRLAARKQELELVVSELEARVGEEEECSRQMQTEKKRLQQHIQELEAHLEAEEGARQKLQLEKVTTEAKMKKFEEDLLLLEDQNSKLSKERKLLEDRLAEFSSQAAEEEEKVKSLNKLRLKYEATIADMEDRLRKEEKGRQELEKLKRRLDGESSELQEQMVEQQQRAEELRAQLGRKEEELQAALARAEDEGGARAQLLKSLREAQAALAEAQEDLESERVARTKAEKQRRDLGEELEALRGELEDTLDSTNAQQELRSKREQEVTELKKTLEEETRIHEAAVQELRQRHGQALGELAEQLEQARRGKGAWEKTRLALEAEVSELRAELSSLQTARQEGEQRRRRLELQLQEVQGRAGDGERARAEAAEKLQRAQAELENVSGALNEAESKTIRLSKELSSTEAQLHDAQELLQEETRAKLALGSRVRAMEAEAAGLREQLEEEAAARERAGRELQTAQAQLSEWRRRQEEEAGALEAGEEARRRAAREAEALTQRLAEKTETVDRLERGRRRLQQELDDATMDLEQQRQLVSTLEKKQRKFDQLLAEEKAAVLRAVEERERAEAEGREREARALSLTRALEEEQEAREELERQNRALRAELEALLSSKDDVGKSVHELERACRVAEQAANDLRAQVTELEDELTAAEDAKLRLEVTVQALKTQHERDLQGRDEAGEERRRQLAKQLRDAEVERDEERKQRTLAVAARKKLEGELEELKAQMASAGQGKEEAVKQLRKMQAQMKELWREVEETRTSREEIFSQNRESEKRLKGLEAEVLRLQEELAASDRARRQAQQDRDEMADEVANGNLSKAAILEEKRQLEGRLGQLEEELEEEQSNSELLNDRYRKLLLQVESLTTELSAERSFSAKAESGRQQLERQIQELRGRLGEEDAGARARHKMTIAALESKLAQAEEQLEQETRERILSGKLVRRAEKRLKEVVLQVEEERRVADQLRDQLEKGNLRVKQLKRQLEEAEEEASRAQAGRRRLQRELEDVTESAESMNREVTTLRNRLRRGPLTFTTRTVRQVFRLEEGVASDEEAEEAQPGSGPSPEPEGSPPAHPQ

SEQ ID NO: 59089 - protein, 2036 aa, Artificial Sequence
  derived and/or modified sequence
MAAVTMSVPGRKAPPRPGPVPEAAQPFLFTPRGPSAGGGPGSGTSPQVEWTARRLVWVPSELHGFEAAALRDEGEEEAEVELAESGRRLRLPRDQIQRMNPPKFSKAEDMAELTCLNEASVLHNLRERYYSGLIYTYSGLFCVVINPYKQLPIYTEAIVEMYRGKKRHEVPPHVYAVTEGAYRSMLQDREDQSILCTGESGAGKTENTKKVIQYLAHVASSPKGRKEPGVPVSNPALGWGELERQLLQANPILEAFGNAKTVKNDNSSRFGKFIRINFDVAGYIVGANIETYLLEKSRAIRQAKDECSFHIFYQLLGGAGEQLKADLLLEPCSHYRFLTNGPSSSPGQERELFQETLESLRVLGFSHEEIISMLRMVSAVLQFGNIALKRERNTDQATMPDNTAAQKLCRLLGLGVTDFSRALLTPRIKVGRDYVQKAQTKEQADFALEALAKATYERLFRWLVLRLNRALDRSPRQGASFLGILDIAGFEIFQLNSFEQLCINYTNEKLQQLFNHTMFVLEQEEYQREGIPWTFLDFGLDLQPCIDLIERPANPPGLLALLDEECWFPKATDKSFVEKVAQEQGGHPKFQRPRHLRDQADFSVLHYAGKVDYKANEWLMKNMDPLNDNVAALLHQSTDRLTAEIWKDEHGGFQQFSFLGSFPPSPPGSAERCSSAISPPGVEGIVGLEQVSSLGDGPPGGRPRRGMFRTVGQLYKESLSRLMATLSNTNPSFVRCIVPNHEKRAGKLEPRLVLDQLRCNGVLEGIRICRQGFPNRILFQEFRQRYEILTPNAIPKGFMDGKQACEKMIQALELDPNLYRVGQSKIFFRAGVLAQLEEERDLKVTDIIVSFQAAARGYLARRAFQKRQQQQSALRVMQRNCAAYLKLRHWQWWRLFTKVKPLLQVTRQDEVLQARAQELQKVQELQQQSAREVGELQGRVAQLEEERARLAEQLRAEAELCAEAEETRGRLAARKQELELVVSELEARVGEEEECSRQMQTEKKRLQQHIQELEAHLEAEEGARQKLQLEKVTTEAKMKKFEEDLLLLEDQNSKLSKERKLLEDRLAEFSSQAAEEEEKVKSLNKLRLKYEATIADMEDRLRKEEKGRQELEKLKRRLDGESSELQEQMVEQQQRAEELRAQLGRKEEELQAALARAEDEGGARAQLLKSLREAQAALAEAQEDLESERVARTKAEKQRRDLGEELEALRGELEDTLDSTNAQQELRSKREQEVTELKKTLEEETRIHEAAVQELRQRHGQALGELAEQLEQARRGKGAWEKTRLALEAEVSELRAELSSLQTARQEGEQRRRRLELQLQEVQGRAGDGERARAEAAEKLQRAQAELENVSGALNEAESKTIRLSKELSSTEAQLHDAQELLQEETRAKLALGSRVRAMEAEAAGLREQLEEEAAARERAGRELQTAQAQLSEWRRRQEEEAGALEAGEEARRRAAREAEALTQRLAEKTETVDRLERGRRRLQQELDDATMDLEQQRQLVSTLEKKQRKFDQLLAEEKAAVLRAVEERERAEAEGREREARALSLTRALEEEQEAREELERQNRALRAELEALLSSKDDVGKSVHELERACRVAEQAANDLRAQVTELEDELTAAEDAKLRLEVTVQALKTQHERDLQGRDEAGEERRRQLAKQLRDAEVERDEERKQRTLAVAARKKLEGELEELKAQMASAGQGKEEAVKQLRKMQAQMKELWREVEETRTSREEIFSQNRESEKRLKGLEAEVLRLQEELAASDRARRQAQQDRDEMADEVANGNLSKAAILEEKRQLEGRLGQLEEELEEEQSNSELLNDRYRKLLLQVESLTTELSAERSFSAKAESGRQQLERQIQELRGRLGEEDAGARARHKMTIAALESKLAQAEEQLEQETRERILSGKLVRRAEKRLKEVVLQVEEERRVADQLRDQLEKGNLRVKQLKRQLEEAEEEASRAQAGRRRLQRELEDVTESAESMNREVTTLRNRLRRGPLTFTTRTVRQVFRLEEGVASDEEAEEAQPGSGPSPEPEGSPPAHPQ

SEQ ID NO: 59090 - DNA, 6111 bp, Artificial Sequence
  derived and/or modified sequence
atggctgctgtcaccatgtctgtgccagggaggaaagctcccccgaggcctgggcctgtgccggaggcagcccagccttttctcttcacgccccgggggccctctgccggcgggggtcccggaagtggaaccagcccccaagtggagtggacagcccgacgtctagtatgggtgccgtccgagctgcacgggttcgaagccgctgccctacgagacgagggagaagaagaggccgaggttgagctcgctgagtccgggcgacgcctgcgtctgccccgggaccaaatccaacgcatgaatcctcctaagttcagtaaggcagaagacatggcagaactaacttgcttgaacgaagcaagtgtactccacaaccttcgggagcggtactacagcggactcatctacacatatagcggactgttttgtgtggtgatcaatccgtacaagcaactgcctatctacactgaggctatcgtggaaatgtaccgcggtaagaagcgccatgaggttccgccgcacgtgtacgccgtaactgagggggcatacaggagtatgttgcaggaccgagaagaccaatctattctgtgcacgggggagagtggggccggcaaaacagagaacaccaaaaaggtgatccagtatctagcacacgtcgcgagctcccctaaggggagaaaagagccaggcgtacccgcgtctgtgtcaaccgtctcctacggcgaactcgagagacaattactgcaggcaaacccgatccttgaggcttttggcaacgccaaaaccgtcaagaacgataactccagccggtttggtaagttcatccgcatcaacttcgacgtggcgggctatatcgtcggcgccaatatcgagacctacctcctcgagaaaagccgggccattagacaggccaaggacgaatgctcttttcacatcttctaccaactgctaggcggtgcgggagagcagctgaaggccgatttgctcctcgaaccctgctctcactataggtttctcaccaacggacccagttcaagccccggccaggaacgcgagctgttccaagaaactttagagagcctccgggtactcggcttttcccacgaagagatcatttccatgctgaggatggtgagtgcggtcttacagtttggaaatatagcgctgaaacgcgaacggaatactgaccaggcaacaatgcctgataacacagccgcccagaaactttgccggctgctcggcctgggagtcactgatttcagcagagcattgctgacgccaagaattaaggtggggagggactacgtgcagaaggcacagactaaagagcaggcagatttcgctctggaggcacttgctaaagctacttatgagcggctcttcaggtggctggttctccggcttaaccgcgcacttgaccgcagcccgcggcagggcgcgtcctttctgggaattctggacattgctggttttgagattttccaattaaactcctttgaacagttatgtatcaactatacgaacgagaagcttcagcagctctttaaccatacgatgttcgtgttagagcaggaggagtaccagagggaagggatcccttggacttttcttgattttggactagatttgcagccatgcatcgacctgatagagcgacctgccaaccccccaggtctattagccctgttagatgaggaatgttggttccctaaggccacagacaagtcattcgtagaaaaggtcgcgcaagaacagggcggacaccctaagtttcagcggccacgccacctgcgagatcaggccgactttagcgtactccactatgctggtaaagtggattacaaggctaacgagtggttgatgaaaaatatggatccactgaatgacaatgtggcagctttactccatcagagcacagacagattaacagccgagatttggaaagacgagcacggcggtttccagcaattttctttcctgggctcattccctccctccccgcctggttccgccgagagatgttcttcggccatctcacccccgggcgtggaaggcattgtgggcctggagcaggtgtcgtcactaggagacggacccccggggggcagaccccgccgcggaatgtttagaacagtcggacagctctacaaggaatctttgtctcggctgatggctacgctgagtaacaccaacccttcattcgtgagatgtatcgtacccaaccatgaaaagcgcgcaggtaagctcgaaccccggctagtgttagatcagctgagatgcaacggcgtgttggaaggcattcgtatatgcagacagggctttccaaatcgcattctcttccaagagttcagacagcggtacgaaatccttactccaaacgcaattcccaagggatttatggacgggaagcaggcatgcgaaaaaatgatccaagccctggaattagaccccaatctgtacagggtaggtcaaagcaaaattttcttcagggctggcgtgttggcacaactggaagaggagagagatctcaaagtcacagatatcatcgtatcatttcaggccgccgctcgagggtacctggccagacgagcttttcagaaaagacaacaacagcaatccgcattgagagttatgcagagaaactgcgctgcttacctcaagctgcgccactggcagtggtggcgattgtttaccaaggtcaagccactactgcaagtgactcgccaggatgaggtgttgcaagccagagcacaggaattacagaaagtgcaggagcttcagcagcaatctgctagggaggtcggcgaactgcaaggccgcgtggcccagcttgaagaagaacgggcacgccttgccgagcagttacgtgcggaagcagagctatgtgccgaggcagaggagacccgggggcggctggctgctcgcaagcaggaactggagcttgtcgtgtctgaactggaggcaagagtcggcgaagaggaggaatgttctcgccaaatgcaaaccgaaaagaaaagactgcagcagcacatccaagagctagaggctcatctggaggcagaagagggagcacgccagaaactgcagctggaaaaggtcactaccgaagccaaaatgaaaaaatttgaggaagacctgctgttgttagaggaccagaatagtaagctgagcaaggagaggaaactgctggaggaccgactggccgagttctcttctcaggcggccgaggaagaagagaaagtcaaatctcttaataagctccggctgaagtacgaggccactattgccgatatggaggacaggctccgaaaggaggagaagggcagacaggaactggagaagctaaaaagacgtctggatggcgagagctccgaactgcaggaacaaatggttgagcagcagcagcgcgcagaagagctgcgagcccagctgggtagaaaggaagaggaactccaggccgccctcgcgcgtgcggaggatgaaggcggggctcgcgcccaactgctgaaatcactcagagaggcacaagccgccctggccgaggcacaggaagacttagagagtgagagggtagcaaggacaaaggcagaaaaacagcgtcgtgacctgggcgaggagctggaagctctgagaggtgagctcgaagataccctggactccaccaatgcacaacaagagctccggtctaagcgggagcaagaggtgacagagctgaaaaagacactcgaggaggagacaaggattcatgaggctgccgtgcaagagttgaggcagcgccacggtcaagcactaggcgagctggccgagcagctcgagcaggcccggagaggaaagggggcctgggagaaaacccggctggcactggaggccgaggtttcagagctgagggccgagctttcaagcctacagactgcaaggcaggagggcgagcaaagaagacggaggctggagcttcagcttcaggaggtccaaggcagggccggtgatggcgaacgggcccgggccgaggctgctgaaaagcttcagcgggcccaggctgagctggagaacgtaagcggcgccctgaacgaggcagaatcaaagacaatccgcctgtcgaaggaactttctagcacagaggcccagctgcacgatgcgcaggagttacttcaggaagagacccgggctaagctggccctagggtctagagtaagagctatggaagccgaagccgccggtctgcgggaacagttggaggaggaggccgctgcccgggaaagggccggcagggagctccagactgctcaagcccaattatctgagtggagacgccgacaagaggaggaggcaggggcactagaagctggcgaggaggctcgccggcgcgctgctagggaagcagaggcgctgacccaaagattggctgaaaaaactgaaacagttgacagactcgaacgcggtcggaggcgattgcagcaagaattagacgatgctacaatggacctcgagcaacagcgccagctggtctccactttggaaaagaaacaacggaagttcgaccagctgctggccgaggaaaaggcggcagtgctgagggctgtagaggaacgagaaagggcggaagcggagggaagagaaagggaagcacgtgccctcagccttacccgggcactggaggaggagcaggaggcccgcgaggagttagagcgacagaacagagctctcagggcggaactcgaggcgttgctcagctctaaagatgacgtaggtaagtccgtgcatgagctggaaagagcatgtagggtcgccgaacaggctgccaacgatctgcgggcacaggtcaccgagctcgaagatgagctaacagccgccgaggacgcgaagcttaggctcgaggtgacggtccaggccctgaagacacagcatgagagagacctccagggcagggacgaagcaggggaggaacgtagaagacagttggccaagcaactgcgggacgcggaggtggagcgggatgaggaacggaagcagcggactcttgccgtggcagccaggaagaagctggagggggaacttgaggagttaaaagctcagatggcctctgctggccaaggcaaagaggaagcggtaaaacagctgcgtaaaatgcaagctcagatgaaagaactgtggcgtgaagtcgaggaaacaagaacttctcgtgaggagatcttctcacagaacagagaatctgagaaacgactcaaaggactggaagctgaggtgcttaggctgcaggaggagctggcggcctccgaccgggcccgaaggcaggcgcagcaagacagagacgaaatggccgacgaagttgctaatgggaacttaagcaaggctgctatcctcgaggaaaaacgccagctggagggacgcctaggacagctggaagaggaacttgaggaggagcagtccaactctgagctccttaacgaccgatacagaaaacttctgctacaggtcgagagccttactacagagctaagtgcagagcgttcattttccgctaaggctgaatctggtaggcagcagctagagagacaaatccaggaattgaggggacgcctgggtgaagaagatgccggggcacgggcacgacacaaaatgactattgctgcgctcgagagcaagttggctcaggctgaagagcagctcgaacaggaaactcgggaacggatcttatcaggtaagctggtacgcagggcagagaagcgactgaaggaagtagtgctgcaagtggaggaagaacggagagttgccgatcagctcagagatcaactggaaaaaggaaatctccgtgtaaagcagctaaagcgccaacttgaagaagccgaagaagaggcaagccgcgctcaggcagggagaagacgtctacagcgagagctggaggacgttactgaatctgctgagtctatgaatagagaagtgaccaccctgagaaacagactgcggcgcggtccactcacctttacaactcgcactgtccgccaggtttttcggctcgaagaaggtgtggcaagcgatgaagaggctgaggaggcgcagcccggttcggggcccagtcctgagcctgagggctctccccccgcgcatccccagtag

SEQ ID NO: 59091 - DNA, 6111 bp, Artificial Sequence
  derived and/or modified sequence
atggcagccgtgacaatgagcgtgcctgggaggaaggcgccaccaaggcctggaccagtgccagaagccgctcagccttttctatttactcctcggggccccagcgccggaggcggaccaggaagtgggacatccccccaggttgagtggacggcccggcggcttgtctgggtgccctctgaattacacggattcgaagccgctgccctcagggatgagggggaggaagaggcagaggtggaactagccgaatcaggaagacgtctgaggctgcccagggaccaaatacaacgcatgaatccaccaaaattcagtaaggctgaggacatggccgagctgacatgtctgaacgaagcttctgttctgcacaacctgcgggaacggtattactcgggcctcatctacacctactctggactgttctgtgttgtgataaacccatataaacaactccccatttatacagaggccattgtcgaaatgtaccgtgggaagaagaggcacgaagtccccccacatgtgtatgccgtgaccgaaggggcctaccgttctatgctgcaggatcgagaagatcagagtattctgtgcaccggggaatcgggcgccggaaagaccgaaaacactaaaaaagtcattcagtacttagcgcacgtggcttcgtctccaaagggtagaaaggagcctggcgtccctgcatcagtctccaccgtcagctatggcgagcttgagcggcagctgctgcaggctaaccccatccttgaagcgtttggaaacgccaagacagttaaaaacgataattcttctcggttcggaaaattcattcggattaactttgatgttgccggctatatagtaggcgctaacatcgaaacctatctgctagagaaaagcagagctatccggcaggccaaagatgagtgtagtttccacattttctaccagctgctaggcggagccggcgaacagttaaaagccgacctgctgctggaaccttgtagccactatagatttctcacaaatgggcctagttctagcccaggccaggaacgggaactattccaagagaccctagaatctttgagagtcctgggattttcccacgaggagattatatctatgctgcgtatggtctccgccgtgctgcagttcggcaacatcgctctgaaacgtgagcggaacacagatcaggctaccatgccagataatactgcagcccaaaagttgtgccgcctcctagggttgggagtgaccgacttctcaagagcccttctcacgccaagaatcaaggtggggcgcgattatgttcagaaggcccagaccaaggaacaagcagactttgcgctggaagctctggcaaaggcaacatacgaacgccttttccggtggctcgtactcaggctcaatagggccctggaccgaagcccacggcagggggcctccttccttggaatcttagatattgctggctttgagatctttcagttaaattcattcgagcagctatgtatcaactacactaatgaaaagcttcaacagctctttaatcacacaatgttcgttctagaacaagaagaataccagagagagggcattccctggacctttctcgatttcggtctggacttacagccgtgtattgacttaatcgagaggccggcgaatccccccggcctactggccctgcttgatgaagagtgttggttcccgaaagctacggacaagagtttcgtggaaaaagttgcccaagagcaaggcggccacccaaagttccagagacccagacacctcagggatcaggccgatttctccgtgctgcactacgccggcaaagtggactataaggccaatgagtggctgatgaagaatatggatcctctgaacgataatgttgcggcactgctacaccagtcgacagatagactgaccgcagagatctggaaagatgagcacgggggcttccagcagttttccttcctgggcagctttcctcctagccccccgggcagtgcagagcgctgctcgtcagctatctcaccacctggcgtagagggcattgtgggacttgagcaggtgtcttccctcggcgatggcccccccggaggacgaccccgcaggggaatgttccggaccgtgggtcagctttataaggagagcctcagcagactgatggcaactttgtctaacaccaatcccagctttgttcgctgtattgtgcctaaccacgaaaaaagagccggaaaattggagccccggcttgtcctcgaccagttgaggtgtaatggagttctcgaggggatacgcatttgcaggcaagggttccccaatcgtatactgtttcaggaattcagacagaggtacgagattttaaccccaaacgcaattcccaaagggttcatggacggcaaacaggcttgcgagaaaatgattcaggcattggaacttgatcctaatctatacagagtgggacaatccaagattttcttcagggccggcgtgttagctcaactggaagaagaacgggacttgaaagtcaccgacatcatcgtgtctttccaggcagctgctaggggctaccttgcccgacgcgcattccagaagcgacagcagcagcagagtgcactgagggtgatgcagagaaactgtgccgcttatctcaagctgaggcactggcagtggtggcggttatttacgaaagttaagccactgctccaggtcactcggcaggatgaggtgttacaggcccgggctcaggagttgcaaaaagtccaggagctccagcagcagtccgccagagaagttggcgagttacaagggagagtcgcgcagctcgaggaggagagagccaggcttgctgaacagctgagagcagaggccgagctctgcgcagaggctgaggaaacaaggggccggctggctgctcgtaagcaagagctggaattagtggtgtcagagctggaggcccgcgttggcgaggaagaagaatgcagccgacagatgcagacagagaagaagaggctccagcaacacattcaggagctagaggctcatctggaagccgaagagggtgctcgacagaagctccagctggagaaggttactactgaggctaagatgaaaaagttcgaagaggacctgctgctgctggaggatcagaactccaagctgtccaaggaaagaaaactgcttgaggaccggctggccgaattctcatcacaagcagcagaagaggaggagaaggtgaagagtttgaataagttacgcctgaaatacgaagctacgatagctgacatggaggaccgattaaggaaggaagagaagggcagacaggagctggaaaagctgaaacgacggctagatggggaatcatctgaacttcaggagcagatggtcgagcagcagcaaagggccgaagaactcagggctcagctgggccgcaaggaggaggagctgcaggcagctctcgctagagctgaggacgaaggaggcgctcgtgctcagttactgaagagcctccgcgaggcacaagccgcactggccgaggcccaggaagacctcgaaagcgagagagtggccaggacaaaagcagagaaacagagacgcgacttaggagaggaacttgaagccttacgaggtgagctggaagacactttggattccactaatgctcagcaagagctgcgctccaagcgcgaacaggaggtgaccgagctgaagaaaacattagaggaggagaccagaatccacgaggctgctgtccaggagctgaggcagagacacggtcaagcccttggagagttggccgagcaattagaacaagcccgcagagggaaaggtgcgtgggagaagactcgcctggcactggaggctgaggtttcagagctgcgagcagaactgagttccttgcagaccgcacgccaagagggggagcaacgccggcggcgacttgaactccagttgcaggaagtccaaggccgcgctggtgatggggaacgagcccgcgcggaggcggccgaaaagctgcaaagagctcaggccgagctggagaacgtgagcggggcattgaacgaggccgagtcaaaaactatacgactctctaaggagctgagcagcacagaggcgcagcttcacgatgcccaggagctgttacaggaagagacccgagcaaaactcgctctaggatcaagggtgcgggctatggaggcagaggcagctgggttgcgcgagcagttagaagaggaggcagctgcccgagaacgcgctggacgcgagctgcagacagcccaggctcagctgtcagaatggcgacggaggcaggaagaggaggccggtgcgctggaagctggcgaggaggctcgacgccgagcagccagagaagctgaggcactaacacagcggctcgctgaaaaaacagagaccgtcgataggctggaacgcggcaggaggcgccttcagcaagagctggatgacgccaccatggacctggaacagcaacggcaacttgtctcgacattggaaaaaaagcagaggaagtttgaccagctcctggccgaagagaaggctgccgtactgcgcgctgtcgaggagagggaacgggcagaggcagagggtcgggaaagagaggcccgagccctgagcctgacccgcgcgctagaggaggagcaggaagctagggaggagctagaaaggcagaacagggctcttagggccgaacttgaagctttgcttagtagtaaggatgacgtgggtaagtcagtgcatgagctggagcgggcgtgtcgcgttgctgagcaggcagccaatgacctcagagcccaggtcaccgaactggaggatgagctgactgccgcagaagatgccaagctgaggctggaagttactgtgcaagctctgaagacacagcatgaacgagatctacaggggagagatgaggcaggagaggagcgcaggcgccaacttgctaaacagcttcgagacgccgaagtcgagagggacgaggaaaggaagcagagaactctagcagtagctgcgcgtaagaagctggagggggaactggaggagctcaaggcgcagatggcctctgctggccagggaaaggaagaagcagtgaagcagctgcgtaaaatgcaagctcagatgaaagaactttggcgcgaggtagaagagacacgcactagccgagaggaaatctttagccagaaccgcgagagcgaaaagcgtctgaaagggctggaagcagaagtgctccggttgcaggaggaactggctgcatcggaccgagcccggagacaagcacaacaggaccgcgacgaaatggccgatgaggtggccaacggtaacttgtctaaggccgcaattctggaggaaaaacgtcagctcgagggacgcttaggccagttggaggaagaacttgaggaggagcagtcaaacagcgagcttcttaatgataggtataggaagctcctcttgcaggtcgaatctcttactacggaactgtctgccgagcgatccttctccgcaaaagccgaaagtggacggcaacagctagaacggcaaattcaggaattacgcgggcgtctcggcgaggaagatgctggcgctcgagctaggcataaaatgacaatcgctgccctcgaaagtaagctggcccaggctgaagaacaattggagcaggagacgagagaaagaattctgagcggaaagcttgtccgaagagccgaaaagcgcctcaaggaggtggtattgcaggtagaggaagagaggcgagtagccgaccaactgcgggatcagcttgaaaaggggaatctcagagtcaagcagctaaaaagacagctggaggaggccgaggaagaggcttcccgggctcaggccggaaggcgccgcttacagcgcgaattagaagatgtaacagagtcagctgagagcatgaatagagaagtcacaacacttcgcaataggctgcggcggggtccactgaccttcactacccgcactgttagacaggttttccggctggaggagggtgtggcgtccgacgaagaggccgaggaagctcaacctggctcaggacccagccctgaacccgaaggctcaccccccgcccatccccaatag

SEQ ID NO: 59092 - DNA, 6087 bp, Artificial Sequence
  derived and/or modified sequence
atggcagccgtcaccatgtccgtccctggcaggaaagcacccccaaggcctggaccagttcccgaggccgcccagccttttctattcacccccaggggcccttctgctggaggaggacctggctccggaacgtccccacaggtggagtggactgcgcgtcgtttggtttgggtgcccagtgaactgcacggtttcgaagcagccgccctgagagacgagggggaggaggaagctgaggtcgagctggccgaaagcggacgccgcctccgcctccctcgtgatcagatccaaaggatgaacccacctaagttttcaaaggctgaggatatggccgagctcacatgccttaacgaagcctcagttctgcacaacttgcgcgaacggtattactctggcctcatctacacatactctggcctcttttgtgtagtcataaatccatataagcagctgcctatctatacagaggcaatcgtcgagatgtacagaggcaaaaaaaggcacgaggttcctccgcatgtctacgctgtaaccgagggagcataccgctctatgctccaggaccgagaagaccagtctattctatgtactggcgagtctggcgctggaaagacagaaaacaccaagaaagttatccagtacctggcgcatgtcgcttcatcacctaagggaagaaaggagcctggcgtgcccggggagttagagaggcaactcctgcaggccaatcccattttagaggcctttgggaacgccaaaaccgtgaagaacgataattcatcaagatttggcaaatttatccggatcaacttcgacgtggctgggtacattgttggtgctaacatagagacctatcttctagagaagtcaagagctatcagacaggccaaggacgaatgttcgttccatatcttttatcagctactcggtggcgcgggagagcaattgaaagcagatctgttacttgaaccatgctcgcactataggttcctgacgaacggacctagttcatcccctggccaggagcgcgagctgttccaggaaactcttgagagtctgcgggtcttggggttctctcatgaggagatcataagcatgcttaggatggtgtccgccgtcctgcagttcggaaatatcgcgttgaagcgcgagagaaatacagaccaggccaccatgccggataacaccgcggcgcagaagctgtgtaggctactggggctgggagtgactgatttctctagggctctgctgactcctaggatcaaagtgggaagggactacgttcagaaagcgcagacaaaagagcaggcagattttgcattggaggctctcgctaaagccacgtatgaacgcctgttcaggtggctggtgcttcggctgaatcgggcgctggatcggtccccccgtcagggggcttcctttcttgggatacttgatattgcagggttcgaaattttccagttaaattcattcgaacagctctgcatcaactacactaatgaaaagctgcagcagcttttcaatcacactatgttcgtgctagaacaggaagaataccaacgtgaagggattccatggacttttttggattttggactggatctccagccatgcattgatctgattgagcggcctgcgaaccctccaggcctgcttgctctgctagacgaggagtgttggttccctaaggccactgataagtctttcgtggagaaagtggcccaggagcaaggggggcatcccaagtttcagcggccccggcacctcagggatcaggccgattttagtgtgctacactatgctgggaaagtggactataaggcaaatgagtggctcatgaaaaacatggaccctctcaacgacaacgtcgcagcactcctccatcagagtacagacagacttactgccgagatttggaaagatgagcacggcggcttccagcaattttccttcctgggttccttccctccttcccccccaggctccgctgagcggtgctctagtgcgatctccccaccaggagtggagggaattgtagggctggagcaagtctcaagcttgggtgatggtcctcctggagggagacctcggcgaggcatgtttaggaccgtgggccagctctataaagaatcactcagtagactcatggcaacgctgtctaacactaacccatctttcgttcgctgcatcgtgccaaatcatgagaagagagcagggaagctggagccccgcttggttctggatcagctgcgctgcaatggagtgctggagggaatcaggatctgcaggcaggggtttccaaaccgtatcctgttccaagaattcagacagcgatatgagatcctcaccccaaatgccatccctaaagggttcatggacggcaagcaggcttgtgagaagatgatccaggctctggagctcgaccccaatctttacagagttggacagtctaaaatcttttttagagccggcgtcctcgcccagctggaagaagagcgagatctaaaagtaaccgatattattgtttcctttcaggccgcagcacggggataccttgcacgaagagccttccagaaacggcagcagcaacagagtgctttgcgggtgatgcagagaaattgcgccgcttacctgaagctgaggcactggcagtggtggagattattcaccaaagtgaagcccctcctgcaggtgacacggcaggacgaggtccttcaggctcgagctcaggaattacaaaaggtgcaagaactgcagcagcaatccgcccgcgaggttggggaacttcagggtcgagtggctcagttggaggaagaacgggcgaggctcgcagaacagctgagagctgaggcggagctgtgtgccgaggccgaggaaactcggggcagactcgccgccaggaaacaggagttggagctggtggtgagcgaactagaggctcgcgttggggaggaagaggagtgttcccggcagatgcagactgaaaagaaaaggctgcaacagcatatacaggagcttgaagcgcacttggaggctgaggagggcgccagacagaagcttcagctcgagaaggtcactacagaggccaagatgaagaagttcgaagaggacctcttgctgttggaggatcaaaattccaaactcagcaaagagcgtaaactgcttgaggatcggctggccgaattctcttcacaggcggcggaggaagaggagaaagtgaagagtctaaacaaactgaggctcaagtacgaagcaactatagccgatatggaagaccgtttaagaaaggaagagaagggaagacaggagcttgaaaagctgaagcggaggctcgatggagagagttcagaactgcaggagcagatggtggagcagcagcagagagcagaggaactgcgtgcacagttgggtcgcaaggaggaagagcttcaggctgccctcgcaagagcagaagatgagggtggtgcccgagcgcaactgctcaagtcgctgcgggaggcccaggctgccctggcagaggctcaagaggatcttgagtccgagcgcgtagctcgcaccaaagcagaaaagcagcgtagagacttaggagaggaactggaggcattaaggggagagctcgaagatacgctggactccaccaatgctcagcaggagttgaggagcaaacgtgagcaggaggtaaccgagctgaagaagaccctggaagaggaaacgagaatacacgaggccgctgtgcaggagctgagacagcgacacgggcaggcgttgggcgagctggctgaacagctggagcaggcccggaggggcaagggcgcttgggaaaaaacaaggctcgcactcgaagcggaagtgagtgagctcagagcagagctcagttccctgcagaccgccagacaggaaggagaacaaaggagaagaagactggagcttcaactccaggaagttcaaggtcgggccggggatggggaaagagcgcgagctgaagccgctgaaaagctgcagagggcacaagccgagctggaaaacgtctctggggcactgaatgaagctgaatcaaagacgatcaggctctctaaagaactgagttcaacggaagcccaactgcatgacgctcaagagttgctccaagaggaaacaagagctaagcttgccctgggctcccgcgtccgggcaatggaggcagaggccgcaggtctgagagaacagctggaagaagaagcagccgcacgtgagcgagcgggtagggagcttcaaaccgcacaggcacagctgagtgagtggcggaggcgccaggaggaagaggcaggcgccctggaggcgggagaagaagcccgcaggcgtgccgctcgagaggccgaggcgctgacccagaggctcgccgaaaagaccgagacagtagaccgcctggaaagaggtcggcgcaggctgcagcaggaactggacgatgccactatggacctggaacagcagcggcagctggtctccaccctggagaagaagcagaggaaatttgaccagttgttagccgaggagaaggctgctgtgctccgggccgtggaagaaagagagcgggccgaagctgaggggcgggaaagggaagcacgggctttgtctctgacaagggcactagaggaggaacaggaagctagagaggaactggagcgccagaaccgcgccttgcgtgccgagcttgaggctctcttaagttctaaggatgacgtgggtaagtcagtacatgagctcgagcgagcgtgtagagtcgcagagcaggccgctaacgatcttcgggctcaggtcacagagctggaggatgagctcactgccgcagaggatgccaaactccggctcgaggtgaccgtgcaggcactgaagacccagcacgaacgcgatttgcaggggagggacgaggctggagaggagcgcaggcgacagctcgccaagcagttgcgggatgccgaagtggaaagagacgaggagcgcaagcagagaaccctagccgtagccgccaggaaaaaactggagggggaactggaggaactaaaggcgcagatggcttcggcaggacagggaaaagaggaagctgtaaaacagctgcgcaaaatgcaggcgcagatgaaggagctctggcgagaggtcgaagagacccggacatcgagggaggaaattttttcacagaatagggagagcgagaaacgcctgaagggactcgaagcggaagtgctccggctgcaggaagaattggctgctagcgacagggccagacggcaggcccagcaggacagggatgagatggctgatgaagtcgcaaatggcaatctgagcaaagcagcaatcctggaggagaagaggcaactggaagggcgactgggccagctggaagaggagctcgaagaggagcagtctaactctgaactcctgaacgaccgttataggaagctactcctgcaggtcgaaagtctcacaaccgaactttctgctgagaggagtttttccgccaaggctgagtctggcagacagcagcttgagcgacagatacaagaactgcggggacgcctaggtgaagaagacgccggggccagagccagacacaagatgacaatcgccgctctggagtctaagctggcacaggccgaggagcagctcgagcaggaaactagagaacggatccttagtggtaagctcgttcgaagagctgaaaaacggctgaaagaagtagtgttgcaggtggaggaggaacgcagggtagctgaccagttgagagatcagctggagaagggcaatctccgggtgaagcagctgaaaaggcagctggaggaagccgaagaagaagcgtccagagcgcaggccggaagaagacgtctccagcgagagttagaggacgtgactgaaagtgcagagagtatgaatagggaagtgacaacacttagaaatcgccttcgccgcggtcccttaacttttacaacccgtactgtgagacaggttttcagactggaggagggcgtggcttccgatgaggaagccgaggaagcgcagccaggtagcggaccatcccctgagccagaggggtcacccccagcacaccctcagtag

SEQ ID NO: 59093 - DNA, 6111 bp, Artificial Sequence
  derived and/or modified sequence
atggcagctgtgactatgtcggtccctggacggaaagcaccacctcgtccagggcccgtgcccgaggctgcacagccctttctgtttacccccaggggcccctcggcgggtggaggccccggctccggtacatctccccaagtggaatggactgccagaaggctcgtttgggtgccatctgagctacacggcttcgaggcggctgctcttagagatgaaggggaggaggaggcagaggtggaactggctgaatcaggaaggcgcctgcgattgcccagggatcaaattcagagaatgaaccctcccaaattctcaaaagcagaagatatggcggaactgacgtgtttaaacgaggcatctgtactccacaatctccgcgaaaggtactacagtgggctcatttacacttactcaggtctattttgtgtcgtgattaacccatacaaacaactgcctatctataccgaggcaattgtagagatgtataggggcaagaaacggcacgaggtgccaccacatgtgtacgctgtgactgagggcgcttaccgctctatgctgcaggaccgcgaggaccagagcatcctgtgcactggggaatccggagctggcaaaaccgaaaataccaaaaaggtgattcaatacctcgcccacgtcgccagctcaccgaaaggtagaaaggagccaggagtgccggtcagcaaccctgctctgggatggggagagcttgaaagacagctgctgcaggccaaccccattttggaggctttcgggaatgcaaaaacagttaagaatgacaactcctcgcggttcggcaaattcatccggataaactttgatgtggctgggtacattgtgggagccaatattgagacctacctgctcgagaaaagtagggcaatccggcaggcaaaggacgagtgttcctttcatatattttatcagctcctgggcggtgcgggcgaacagctgaaagcggatctccttttggagccttgttcacactacaggtttcttactaacggcccttcttcctcacccggacaggagcgggaactgttccaggagactctcgagagcctgagagtactggggttttcccatgaagaaatcatttcgatgctccggatggtttctgcggtccttcagttcggcaatatagcactaaagcgggaacgaaacaccgaccaggcaacaatgccagataataccgcagcacaaaaactctgcagacttctaggtctgggcgtcaccgatttctctcgcgcccttctaacgcctaggattaaagtggggcgcgactacgtgcagaaagcccagacgaaggagcaggctgattttgccctcgaggcactggcaaaggctacatatgagcgtctctttcgctggctcgttcttcggctaaacagagcactggaccgctctcccagacagggggcatctttccttggaattctcgatattgcaggctttgagatttttcagctgaacagtttcgagcagttatgcattaactacactaatgagaaactgcaacagttgttcaaccatactatgtttgtgctggagcaagaggagtaccagagagagggaataccatggaccttcctcgactttggcctcgatttacagccttgcatcgatttgattgagagacctgctaacccgcctgggcttcttgcacttctcgacgaagagtgttggttcccaaaagcaacggacaaatcattcgtcgaaaaagtagcccaagagcaagggggccatccaaaattccagcggcctcgacacttacgtgatcaagctgatttctcagttctgcactatgcaggaaaagtagattacaaagccaatgagtggcttatgaagaatatggacccgctcaatgacaacgtcgccgctctcctgcaccagtccactgacagactcaccgccgaaatctggaaggacgaacatggtgggtttcagcaattttccttcttgggctccttcccgccttctccacccggcagcgcagaacgatgctccagcgctatatccccgcctggcgtggagggcattgtgggcctggagcaggtgtcaagtctgggtgatggaccccctggcgggaggccgagacggggcatgttccgcacggtgggacaactctataaggagagcctgtctaggctcatggccactctcagtaacaccaatccaagctttgtcagatgcatcgtgccgaaccacgagaaacgggctggcaaacttgagcccagactggtgctcgaccagcttagatgcaatggtgtgcttgagggaatacggatttgccgccaaggattccccaataggatactgtttcaagagttccgccagcggtacgaaatattgacccccaatgcgattcccaaggggttcatggatggcaagcaagcatgtgagaagatgatccaagcccttgagcttgaccctaacctttatcgcgtgggtcaatccaagatttttttccgtgccggcgtactggcccagctcgaggaggaacgcgacctgaaagtgactgacattattgtatccttccaagcagctgcccgaggatacctggccaggagagcattccagaagcggcagcagcagcagagcgcccttcgagttatgcagcgcaactgcgccgcatatctcaaactgcgccattggcagtggtggaggcttttcactaaggtaaaacctctcctccaggtgacacggcaggatgaagtgcttcaagctagagcccaggagctgcagaaggttcaggagcttcagcagcagtcagccagagaagtcggcgaactccaggggcgcgttgcacagctcgaggaagagcgggcgcggctggccgagcagttacgtgccgaggccgaattgtgtgcagaagccgaagagacccgagggcgcctggctgcacgcaagcaggagctggaacttgtggttagtgagctcgaagctagagtgggcgaggaagaggagtgtagcagacagatgcagactgagaagaaaagattgcagcaacacatccaggagctagaggctcatttagaggctgaggaaggagccagacagaagctgcagctcgagaaggtcaccaccgaggctaagatgaaaaagtttgaggaagacttgctgctgcttgaagaccaaaattctaagctttctaaagaaaggaagctactggaggatcgtctcgcggaattcagcagtcaagccgccgaagaggaagaaaaggtgaaaagtttgaacaagctgcggcttaagtacgaagctacaatcgcggatatggaggacagactacgtaaagaggagaagggaagacaggagttggagaaactcaaacgaagactggacggggagtcttcagaattacaggagcagatggtggaacagcagcagagagctgaggagctgagggcgcagctcggtagaaaggaggaggagttgcaagcggctctggcgagagccgaggacgaaggcggcgctcgcgcacagcttctgaagtcccttagagaagcccaggccgctctggccgaggcccaggaagacctcgagtcggaaagagtcgcaagaacgaaggctgagaaacagcggagagacctcggcgaggagttagaggccctgcgtggtgagctggaggacactctcgacagcacgaacgcacagcaggagctgcgaagcaaacgagaacaggaggtgaccgagcttaaaaaaactctggaggaggaaacaagaatccacgaggctgccgtacaagaactcagacagagacacggacaggccctgggggaactagcggaacagctagagcaggccagaaggggcaaaggcgcgtgggagaagactcgattggcactggaagcagaggtgtctgagttgcgggccgaactttcgagcctgcagactgctcggcaggagggagagcaaagacgccgaagacttgagctacaattgcaggaagtacagggtcgggctggggatggagagagagctagagcagaggctgcagaaaaactgcagcgagcccaggcagagctcgagaacgtgagcggagcactgaacgaggccgagtctaagaccatacgcttgtctaaggagctcagcagcacggaggcacagctccatgacgcccaggagctgctgcaggaggaaaccagggctaagctggctcttggtagccgagtgcgggcaatggaagcagaagccgccgggctgagagaacagctggaagaggaggccgccgctagagaaagagctggaagggagcttcaaaccgctcaggcgcaactgagcgagtggcgccgacgacaggaggaagaagcgggcgccctggaagccggggaggaggccagacggagagccgcacgggaggcggaggcgcttacgcagcgcttagctgagaaaacagaaacagtcgatcgccttgaacgcggcagacgccggctgcagcaggaactggatgacgctacaatggacctcgaacagcaacggcagctggtttctaccttggaaaagaagcagagaaagtttgatcagcttctggcggaggaaaaagctgccgtccttcgggccgtcgaagagagagaacgggcagaggctgaaggcagggagcgcgaagcacgagcactgagtctgactagggcgctagaggaagagcaagaggctagagaagagctggagaggcagaaccgcgctctgcgggctgaactagaggctcttttgtcgtccaaagacgatgtcggcaagtcagtgcatgaactggaaagagcctgccgggtagccgagcaagctgctaacgatctgagagcgcaggtcacagaattagaggatgaattaactgcagccgaagatgccaagctgagacttgaggtgaccgtccaggctctgaagacccagcacgagcgggacttacaagggcgcgacgaggctggcgaggaacgccgtcgacagctagcaaaacagctaagggacgcagaggtggagagggatgaggaacgtaagcagagaacactggccgtggcagctcggaaaaagttggagggggaactggaagagctgaaggctcaaatggcatccgcagggcaaggcaaggaggaagcggttaaacagcttcggaaaatgcaggcacagatgaaagaattgtggagagaggtggaagagacccggacaagccgggaggagatcttcagtcagaatagggagagtgagaagaggctgaaaggcctcgaggcagaggtactccgccttcaggaagaacttgccgcatctgatagagcaaggaggcaagctcagcaggaccgggatgagatggctgacgaagtcgcaaatggcaatctttcgaaggccgcaatccttgaggagaagcgtcagctggaaggccgactgggccaactcgaagaagagctggaggaagagcagagcaattctgagctcttgaacgataggtacaggaaactcctgctgcaggtggagagcttgactacagaactgagcgccgagaggagctttagtgctaaggccgaatcaggccggcagcagctggagagacagattcaggaactgaggggacgcttgggagaggaggacgcgggggccagagccagacacaagatgacaatagccgcccttgagtctaagctcgcacaggctgaagaacagctggagcaggaaaccagggagcgaattctatccggcaagttggtgagacgggccgaaaagagactaaaagaagtagtgctccaagtggaggaggagcgtcgcgttgccgaccaactccgtgatcaactggaaaaaggcaacctgcgtgtgaagcagctcaaaagacagctggaggaggcagaggaagaggcctccagggctcaggcaggcaggagacggctgcagagagaactggaggatgtgactgagagcgctgagtccatgaaccgcgaggtgaccactcttaggaaccgactccgaagaggacccctcaccttcaccactcgcactgtgcgacaagtctttagactggaggagggcgtagcatccgacgaggaggcagaagaagcccagccgggtagtggacctagccctgaaccggaaggctctcccccagctcatccccagtag

SEQ ID NO: 59094 - DNA, 6111 bp, Artificial Sequence
  derived and/or modified sequence
atggctgctgtgaccatgtctgtgcccggcaggaaggccccacccaggcctggccctgtgcctgaggccgcccagcccttcctgttcaccccccggggccccagcgctgggggcggccctggcagcggcaccagcccccaggtggagtggacagcccggcggctggtgtgggtgcccagcgagctgcacggctttgaagctgctgccctgagagatgaaggagaggaggaggccgaggtggagctggccgagagcggccgccgcctgcggctgccccgggaccagatccagaggatgaacccccccaagttcagcaaggccgaggacatggccgagctgacctgcctgaatgaggcctctgtgctgcacaacctgcgggagcgctactacagcggcctcatctacacctacagcggcctcttctgtgtggtgatcaacccctacaagcagctgcccatctacacagaggccatcgtggagatgtaccggggcaagaagagacatgaggtgccccctcatgtgtatgctgtgacagagggcgcctaccgctccatgctgcaggaccgggaggaccagagcatcctgtgcacaggagagagcggggccggcaagacagagaacaccaagaaggtgatccagtacctggcccacgtggccagcagccccaagggcaggaaggagcccggggtgcctgcctctgtgtccacagtgtcctatggagagctggagcggcagctgctgcaggccaaccccatcctggaggcctttggaaatgccaagacagtgaagaatgacaacagcagcagatttgggaagttcatccgcatcaactttgatgtggccggctacatcgtgggcgccaacatcgagacctacctgctggagaagagccgggccatccggcaggccaaggatgagtgcagcttccacatcttctaccagctgctgggcggggccggggagcagctgaaggctgacctgctgctggagccctgcagccactaccgcttcctgaccaacggccccagcagcagccctggccaggagcgggagctgttccaggagaccctggagagcctgcgggtgctgggcttcagccatgaggagatcatctccatgctgaggatggtgtctgctgtgctgcagtttggaaacatcgccctgaagcgggagaggaacacagaccaggccaccatgccagacaacacagctgcccagaagctgtgccgcctgctgggcctgggcgtgacagacttcagccgggccctgctgaccccccgcatcaaggtgggccgggactatgtgcagaaggcccagaccaaggagcaggccgactttgccctggaggccctggccaaggccacctatgaaagactcttccgctggctggtgctgcggctgaacagagccctggacaggagcccccggcagggcgccagcttcctgggcatcctggacattgctggctttgagatcttccagctgaacagctttgagcagctgtgcatcaactacaccaatgagaagctgcagcagctgttcaaccacaccatgtttgtgctggagcaggaggagtaccagcgggagggcatcccctggaccttcctggactttggcctggacctgcagccctgcatcgacctgattgaaagacctgccaaccccccaggcctgctggccctgctggatgaggagtgctggttccccaaggccacagacaagagctttgtggagaaggtggcccaggagcagggcggccaccccaagttccagaggcccaggcacctgcgggaccaggccgacttctctgtgctgcactacgccggcaaggtggactacaaggccaatgagtggctgatgaagaacatggaccccctgaatgacaacgtggccgccctgctgcaccagagcacagaccggctgacagctgagatctggaaggatgagcacggcggcttccagcagttctccttcctgggcagcttcccccccagccccccaggcagcgctgagcgctgcagcagcgccatcagccccccaggagtggagggcatcgtgggcctggagcaggtgagcagcctgggagatggccccccaggcggccggccccggcggggcatgttcagaacagtgggccagctgtacaaggagagcctgagccggctgatggccaccctgagcaacaccaaccccagctttgtgcgctgcatcgtgcccaaccacgagaagagagctgggaagctggagccccggctggtgctggaccagctgcgctgcaatggagtgctggagggcatccgcatctgccggcagggcttccccaaccgcatcctcttccaggagttccggcagagatatgagatcctgaccccaaatgccatccccaagggcttcatggatggcaagcaggcctgtgagaagatgatccaggccctggagctggaccccaacctgtacagagtgggccagagcaagatcttcttccgggccggcgtgctggcccagctggaggaggagcgggacctgaaggtgacagacatcatcgtgtccttccaggccgccgcccggggctacctggcccggcgggccttccagaagaggcagcagcagcagagcgccctgcgggtgatgcagaggaactgtgccgcctacctgaagctgcggcactggcagtggtggaggctcttcaccaaggtgaagcccctgctgcaggtgacccggcaggatgaggtgctgcaggcccgggcccaggagctgcagaaggtgcaggagctgcagcagcagagcgcccgggaggtgggggagctgcagggccgggtggcccagctggaggaggagcgggcccggctggccgagcagctgcgggcagaggccgagctgtgtgccgaggccgaggagacccggggccgcctggccgccaggaagcaggagctggagctggtggtgtctgagctggaggcccgggtgggggaggaggaggagtgcagccggcagatgcagacagagaagaagaggctgcagcagcacatccaggagctggaggcccacctggaggccgaggagggcgcccggcagaagctgcagctggagaaggtgaccacagaggccaagatgaagaagtttgaggaggacctgctgctgctggaggaccagaacagcaagctgagcaaggagaggaagctgctggaggaccggctggccgagttcagcagccaggccgctgaggaggaggagaaggtgaagagcctgaacaagctgcggctgaagtatgaggccaccatcgctgacatggaggaccggctgaggaaggaggagaagggccggcaggagctggagaagctgaagaggcggctggatggagagagcagcgagctgcaggagcagatggtggagcagcagcagagagctgaggagctgcgggcccagctgggcaggaaggaggaggagctgcaggccgccctggcccgggcagaagatgaaggaggagcccgggcccagctgctgaagagcctgcgggaggcccaggccgccctggccgaggcccaggaggacctggagagcgagcgggtggcccggaccaaggccgagaagcagaggcgggacctgggggaggagctggaggccctgcggggggagctggaggacaccctggacagcaccaatgcccagcaggagctgcggagcaagcgggagcaggaggtgacagagctgaagaagaccctggaggaggagacccgcatccacgaggccgctgtgcaggagctgcggcagagacatggccaggccctgggggagctggccgagcagctggagcaggcccggcggggcaaaggagcctgggagaagacccggctggccctggaggccgaggtgtctgagctgcgggcagagctgagcagcctgcagacagcccggcaggagggggagcagaggagaagaaggctggagctgcagctgcaggaggtgcagggccgggctggagatggagagcgggcccgggcagaggccgctgagaagctgcagagggcccaggccgagctggagaatgtgtctggggccctgaatgaagctgagagcaagaccatccggctgagcaaggagctgagcagcacagaggcccagctgcatgatgcccaggagctgctgcaggaggagacccgggccaagctggccctgggcagccgggtgcgggccatggaggccgaggccgccggcctgcgggagcagctggaggaggaggccgccgcccgggagcgggccggccgggagctgcagacagcccaggcccagctgtctgagtggaggcggcggcaggaggaggaggccggggccctggaggccggggaggaggccaggagaagagctgcccgggaggccgaggccctgacccagaggctggccgagaagacagagaccgtggaccggctggagcggggcagaagaaggctgcagcaggagctggatgatgccaccatggacctggagcagcagaggcagctggtgtccaccctggagaagaagcagaggaagtttgaccagctgctggccgaggagaaggctgctgtgctgcgggctgtggaggagcgggagcgggcagaggccgagggccgggagcgggaggcccgggccctgagcctgacccgggccctggaggaggagcaggaggcccgggaggagctggagcggcagaacagagccctgcgggcagagctggaggccctgctgagcagcaaggatgatgtgggcaagtctgtgcatgagctggagcgggcctgccgggtggccgagcaggccgccaatgacctgcgggcccaggtgacagagctggaggatgagctgacagctgctgaagatgccaagctgcggctggaggtgacagtgcaggccctgaagacccagcacgagcgggacctgcagggcagagatgaggccggggaggagcggcggcggcagctggccaagcagctgagagatgctgaggtggagagagatgaggagaggaagcagaggaccctggccgtggccgccaggaagaagctggagggggagctggaggagctgaaggcccagatggccagcgctggccagggcaaggaggaggccgtgaagcagctgaggaagatgcaggcccagatgaaggagctgtggagggaggtggaggagaccaggaccagccgggaggagatcttcagccagaaccgggagagcgagaagaggctgaagggcctggaggccgaggtgctgcggctgcaggaggagctggccgccagtgaccgggcccggcggcaggcccagcaggacagagatgagatggctgatgaggtggccaatggaaacctgagcaaggccgccatcctggaggagaagaggcagctggagggccgcctgggccagctggaggaggagctggaggaggagcagagcaacagcgagctgctgaatgaccgctacaggaagctgctgctgcaggtggagagcctgaccacagagctgtctgctgagaggagcttcagcgccaaggccgagagcggccggcagcagctggagcggcagatccaggagctgcggggccgcctgggggaggaggatgctggggcccgggcccggcacaagatgaccatcgccgccctggagagcaagctggcccaggccgaggagcagctggagcaggagacccgggagcgcatcctgagcggcaagctggtgagaagagctgagaagaggctgaaggaggtggtgctgcaggtggaggaggagcggcgggtggccgaccagctgcgggaccagctggagaagggcaacctgcgggtgaagcagctgaagaggcagctggaggaggccgaggaggaggccagccgggcccaggccggcagaagaaggctgcagcgggagctggaggatgtgacagaatctgctgagagcatgaaccgggaggtgaccaccctgaggaaccggctgcggcggggccccctgaccttcaccaccaggacagtgcggcaggtgttccggctggaggagggcgtggccagtgatgaggaggccgaggaggcccagcccggcagcggccccagccctgagcctgagggcagccccccagcccacccccagtag

SEQ ID NO: 59095 - DNA, 6087 bp, Artificial Sequence
  derived and/or modified sequence
atggctgctgtgaccatgtctgtgcccggcaggaaggccccacccaggcctggccctgtgcctgaggccgcccagcccttcctgttcaccccccggggccccagcgctgggggcggccctggcagcggcaccagcccccaggtggagtggacagcccggcggctggtgtgggtgcccagcgagctgcacggctttgaagctgctgccctgagagatgaaggagaggaggaggccgaggtggagctggccgagagcggccgccgcctgcggctgccccgggaccagatccagaggatgaacccccccaagttcagcaaggccgaggacatggccgagctgacctgcctgaatgaggcctctgtgctgcacaacctgcgggagcgctactacagcggcctcatctacacctacagcggcctcttctgtgtggtgatcaacccctacaagcagctgcccatctacacagaggccatcgtggagatgtaccggggcaagaagagacatgaggtgccccctcatgtgtatgctgtgacagagggcgcctaccgctccatgctgcaggaccgggaggaccagagcatcctgtgcacaggagagagcggggccggcaagacagagaacaccaagaaggtgatccagtacctggcccacgtggccagcagccccaagggcaggaaggagcccggggtgcctggagagctggagcggcagctgctgcaggccaaccccatcctggaggcctttggaaatgccaagacagtgaagaatgacaacagcagcagatttgggaagttcatccgcatcaactttgatgtggccggctacatcgtgggcgccaacatcgagacctacctgctggagaagagccgggccatccggcaggccaaggatgagtgcagcttccacatcttctaccagctgctgggcggggccggggagcagctgaaggctgacctgctgctggagccctgcagccactaccgcttcctgaccaacggccccagcagcagccctggccaggagcgggagctgttccaggagaccctggagagcctgcgggtgctgggcttcagccatgaggagatcatctccatgctgaggatggtgtctgctgtgctgcagtttggaaacatcgccctgaagcgggagaggaacacagaccaggccaccatgccagacaacacagctgcccagaagctgtgccgcctgctgggcctgggcgtgacagacttcagccgggccctgctgaccccccgcatcaaggtgggccgggactatgtgcagaaggcccagaccaaggagcaggccgactttgccctggaggccctggccaaggccacctatgaaagactcttccgctggctggtgctgcggctgaacagagccctggacaggagcccccggcagggcgccagcttcctgggcatcctggacattgctggctttgagatcttccagctgaacagctttgagcagctgtgcatcaactacaccaatgagaagctgcagcagctgttcaaccacaccatgtttgtgctggagcaggaggagtaccagcgggagggcatcccctggaccttcctggactttggcctggacctgcagccctgcatcgacctgattgaaagacctgccaaccccccaggcctgctggccctgctggatgaggagtgctggttccccaaggccacagacaagagctttgtggagaaggtggcccaggagcagggcggccaccccaagttccagaggcccaggcacctgcgggaccaggccgacttctctgtgctgcactacgccggcaaggtggactacaaggccaatgagtggctgatgaagaacatggaccccctgaatgacaacgtggccgccctgctgcaccagagcacagaccggctgacagctgagatctggaaggatgagcacggcggcttccagcagttctccttcctgggcagcttcccccccagccccccaggcagcgctgagcgctgcagcagcgccatcagccccccaggagtggagggcatcgtgggcctggagcaggtgagcagcctgggagatggccccccaggcggccggccccggcggggcatgttcagaacagtgggccagctgtacaaggagagcctgagccggctgatggccaccctgagcaacaccaaccccagctttgtgcgctgcatcgtgcccaaccacgagaagagagctgggaagctggagccccggctggtgctggaccagctgcgctgcaatggagtgctggagggcatccgcatctgccggcagggcttccccaaccgcatcctcttccaggagttccggcagagatatgagatcctgaccccaaatgccatccccaagggcttcatggatggcaagcaggcctgtgagaagatgatccaggccctggagctggaccccaacctgtacagagtgggccagagcaagatcttcttccgggccggcgtgctggcccagctggaggaggagcgggacctgaaggtgacagacatcatcgtgtccttccaggccgccgcccggggctacctggcccggcgggccttccagaagaggcagcagcagcagagcgccctgcgggtgatgcagaggaactgtgccgcctacctgaagctgcggcactggcagtggtggaggctcttcaccaaggtgaagcccctgctgcaggtgacccggcaggatgaggtgctgcaggcccgggcccaggagctgcagaaggtgcaggagctgcagcagcagagcgcccgggaggtgggggagctgcagggccgggtggcccagctggaggaggagcgggcccggctggccgagcagctgcgggcagaggccgagctgtgtgccgaggccgaggagacccggggccgcctggccgccaggaagcaggagctggagctggtggtgtctgagctggaggcccgggtgggggaggaggaggagtgcagccggcagatgcagacagagaagaagaggctgcagcagcacatccaggagctggaggcccacctggaggccgaggagggcgcccggcagaagctgcagctggagaaggtgaccacagaggccaagatgaagaagtttgaggaggacctgctgctgctggaggaccagaacagcaagctgagcaaggagaggaagctgctggaggaccggctggccgagttcagcagccaggccgctgaggaggaggagaaggtgaagagcctgaacaagctgcggctgaagtatgaggccaccatcgctgacatggaggaccggctgaggaaggaggagaagggccggcaggagctggagaagctgaagaggcggctggatggagagagcagcgagctgcaggagcagatggtggagcagcagcagagagctgaggagctgcgggcccagctgggcaggaaggaggaggagctgcaggccgccctggcccgggcagaagatgaaggaggagcccgggcccagctgctgaagagcctgcgggaggcccaggccgccctggccgaggcccaggaggacctggagagcgagcgggtggcccggaccaaggccgagaagcagaggcgggacctgggggaggagctggaggccctgcggggggagctggaggacaccctggacagcaccaatgcccagcaggagctgcggagcaagcgggagcaggaggtgacagagctgaagaagaccctggaggaggagacccgcatccacgaggccgctgtgcaggagctgcggcagagacatggccaggccctgggggagctggccgagcagctggagcaggcccggcggggcaaaggagcctgggagaagacccggctggccctggaggccgaggtgtctgagctgcgggcagagctgagcagcctgcagacagcccggcaggagggggagcagaggagaagaaggctggagctgcagctgcaggaggtgcagggccgggctggagatggagagcgggcccgggcagaggccgctgagaagctgcagagggcccaggccgagctggagaatgtgtctggggccctgaatgaagctgagagcaagaccatccggctgagcaaggagctgagcagcacagaggcccagctgcatgatgcccaggagctgctgcaggaggagacccgggccaagctggccctgggcagccgggtgcgggccatggaggccgaggccgccggcctgcgggagcagctggaggaggaggccgccgcccgggagcgggccggccgggagctgcagacagcccaggcccagctgtctgagtggaggcggcggcaggaggaggaggccggggccctggaggccggggaggaggccaggagaagagctgcccgggaggccgaggccctgacccagaggctggccgagaagacagagaccgtggaccggctggagcggggcagaagaaggctgcagcaggagctggatgatgccaccatggacctggagcagcagaggcagctggtgtccaccctggagaagaagcagaggaagtttgaccagctgctggccgaggagaaggctgctgtgctgcgggctgtggaggagcgggagcgggcagaggccgagggccgggagcgggaggcccgggccctgagcctgacccgggccctggaggaggagcaggaggcccgggaggagctggagcggcagaacagagccctgcgggcagagctggaggccctgctgagcagcaaggatgatgtgggcaagtctgtgcatgagctggagcgggcctgccgggtggccgagcaggccgccaatgacctgcgggcccaggtgacagagctggaggatgagctgacagctgctgaagatgccaagctgcggctggaggtgacagtgcaggccctgaagacccagcacgagcgggacctgcagggcagagatgaggccggggaggagcggcggcggcagctggccaagcagctgagagatgctgaggtggagagagatgaggagaggaagcagaggaccctggccgtggccgccaggaagaagctggagggggagctggaggagctgaaggcccagatggccagcgctggccagggcaaggaggaggccgtgaagcagctgaggaagatgcaggcccagatgaaggagctgtggagggaggtggaggagaccaggaccagccgggaggagatcttcagccagaaccgggagagcgagaagaggctgaagggcctggaggccgaggtgctgcggctgcaggaggagctggccgccagtgaccgggcccggcggcaggcccagcaggacagagatgagatggctgatgaggtggccaatggaaacctgagcaaggccgccatcctggaggagaagaggcagctggagggccgcctgggccagctggaggaggagctggaggaggagcagagcaacagcgagctgctgaatgaccgctacaggaagctgctgctgcaggtggagagcctgaccacagagctgtctgctgagaggagcttcagcgccaaggccgagagcggccggcagcagctggagcggcagatccaggagctgcggggccgcctgggggaggaggatgctggggcccgggcccggcacaagatgaccatcgccgccctggagagcaagctggcccaggccgaggagcagctggagcaggagacccgggagcgcatcctgagcggcaagctggtgagaagagctgagaagaggctgaaggaggtggtgctgcaggtggaggaggagcggcgggtggccgaccagctgcgggaccagctggagaagggcaacctgcgggtgaagcagctgaagaggcagctggaggaggccgaggaggaggccagccgggcccaggccggcagaagaaggctgcagcgggagctggaggatgtgacagaatctgctgagagcatgaaccgggaggtgaccaccctgaggaaccggctgcggcggggccccctgaccttcaccaccaggacagtgcggcaggtgttccggctggaggagggcgtggccagtgatgaggaggccgaggaggcccagcccggcagcggccccagccctgagcctgagggcagccccccagcccacccccagtag

SEQ ID NO: 59096 - DNA, 6111 bp, Artificial Sequence
  derived and/or modified sequence
atggctgctgtgaccatgtctgtgcccggcaggaaggccccacccaggcctggccctgtgcctgaggccgcccagcccttcctgttcaccccccggggccccagcgctgggggcggccctggcagcggcaccagcccccaggtggagtggacagcccggcggctggtgtgggtgcccagcgagctgcacggctttgaagctgctgccctgagagatgaaggagaggaggaggccgaggtggagctggccgagagcggccgccgcctgcggctgccccgggaccagatccagaggatgaacccccccaagttcagcaaggccgaggacatggccgagctgacctgcctgaatgaggcctctgtgctgcacaacctgcgggagcgctactacagcggcctcatctacacctacagcggcctcttctgtgtggtgatcaacccctacaagcagctgcccatctacacagaggccatcgtggagatgtaccggggcaagaagagacatgaggtgccccctcatgtgtatgctgtgacagagggcgcctaccgctccatgctgcaggaccgggaggaccagagcatcctgtgcacaggagagagcggggccggcaagacagagaacaccaagaaggtgatccagtacctggcccacgtggccagcagccccaagggcaggaaggagcccggggtgcctgtgagcaacccagccctgggctggggcgagctggagcggcagctgctgcaggccaaccccatcctggaggcctttggaaatgccaagacagtgaagaatgacaacagcagcagatttgggaagttcatccgcatcaactttgatgtggccggctacatcgtgggcgccaacatcgagacctacctgctggagaagagccgggccatccggcaggccaaggatgagtgcagcttccacatcttctaccagctgctgggcggggccggggagcagctgaaggctgacctgctgctggagccctgcagccactaccgcttcctgaccaacggccccagcagcagccctggccaggagcgggagctgttccaggagaccctggagagcctgcgggtgctgggcttcagccatgaggagatcatctccatgctgaggatggtgtctgctgtgctgcagtttggaaacatcgccctgaagcgggagaggaacacagaccaggccaccatgccagacaacacagctgcccagaagctgtgccgcctgctgggcctgggcgtgacagacttcagccgggccctgctgaccccccgcatcaaggtgggccgggactatgtgcagaaggcccagaccaaggagcaggccgactttgccctggaggccctggccaaggccacctatgaaagactcttccgctggctggtgctgcggctgaacagagccctggacaggagcccccggcagggcgccagcttcctgggcatcctggacattgctggctttgagatcttccagctgaacagctttgagcagctgtgcatcaactacaccaatgagaagctgcagcagctgttcaaccacaccatgtttgtgctggagcaggaggagtaccagcgggagggcatcccctggaccttcctggactttggcctggacctgcagccctgcatcgacctgattgaaagacctgccaaccccccaggcctgctggccctgctggatgaggagtgctggttccccaaggccacagacaagagctttgtggagaaggtggcccaggagcagggcggccaccccaagttccagaggcccaggcacctgcgggaccaggccgacttctctgtgctgcactacgccggcaaggtggactacaaggccaatgagtggctgatgaagaacatggaccccctgaatgacaacgtggccgccctgctgcaccagagcacagaccggctgacagctgagatctggaaggatgagcacggcggcttccagcagttctccttcctgggcagcttcccccccagccccccaggcagcgctgagcgctgcagcagcgccatcagccccccaggagtggagggcatcgtgggcctggagcaggtgagcagcctgggagatggccccccaggcggccggccccggcggggcatgttcagaacagtgggccagctgtacaaggagagcctgagccggctgatggccaccctgagcaacaccaaccccagctttgtgcgctgcatcgtgcccaaccacgagaagagagctgggaagctggagccccggctggtgctggaccagctgcgctgcaatggagtgctggagggcatccgcatctgccggcagggcttccccaaccgcatcctcttccaggagttccggcagagatatgagatcctgaccccaaatgccatccccaagggcttcatggatggcaagcaggcctgtgagaagatgatccaggccctggagctggaccccaacctgtacagagtgggccagagcaagatcttcttccgggccggcgtgctggcccagctggaggaggagcgggacctgaaggtgacagacatcatcgtgtccttccaggccgccgcccggggctacctggcccggcgggccttccagaagaggcagcagcagcagagcgccctgcgggtgatgcagaggaactgtgccgcctacctgaagctgcggcactggcagtggtggaggctcttcaccaaggtgaagcccctgctgcaggtgacccggcaggatgaggtgctgcaggcccgggcccaggagctgcagaaggtgcaggagctgcagcagcagagcgcccgggaggtgggggagctgcagggccgggtggcccagctggaggaggagcgggcccggctggccgagcagctgcgggcagaggccgagctgtgtgccgaggccgaggagacccggggccgcctggccgccaggaagcaggagctggagctggtggtgtctgagctggaggcccgggtgggggaggaggaggagtgcagccggcagatgcagacagagaagaagaggctgcagcagcacatccaggagctggaggcccacctggaggccgaggagggcgcccggcagaagctgcagctggagaaggtgaccacagaggccaagatgaagaagtttgaggaggacctgctgctgctggaggaccagaacagcaagctgagcaaggagaggaagctgctggaggaccggctggccgagttcagcagccaggccgctgaggaggaggagaaggtgaagagcctgaacaagctgcggctgaagtatgaggccaccatcgctgacatggaggaccggctgaggaaggaggagaagggccggcaggagctggagaagctgaagaggcggctggatggagagagcagcgagctgcaggagcagatggtggagcagcagcagagagctgaggagctgcgggcccagctgggcaggaaggaggaggagctgcaggccgccctggcccgggcagaagatgaaggaggagcccgggcccagctgctgaagagcctgcgggaggcccaggccgccctggccgaggcccaggaggacctggagagcgagcgggtggcccggaccaaggccgagaagcagaggcgggacctgggggaggagctggaggccctgcggggggagctggaggacaccctggacagcaccaatgcccagcaggagctgcggagcaagcgggagcaggaggtgacagagctgaagaagaccctggaggaggagacccgcatccacgaggccgctgtgcaggagctgcggcagagacatggccaggccctgggggagctggccgagcagctggagcaggcccggcggggcaaaggagcctgggagaagacccggctggccctggaggccgaggtgtctgagctgcgggcagagctgagcagcctgcagacagcccggcaggagggggagcagaggagaagaaggctggagctgcagctgcaggaggtgcagggccgggctggagatggagagcgggcccgggcagaggccgctgagaagctgcagagggcccaggccgagctggagaatgtgtctggggccctgaatgaagctgagagcaagaccatccggctgagcaaggagctgagcagcacagaggcccagctgcatgatgcccaggagctgctgcaggaggagacccgggccaagctggccctgggcagccgggtgcgggccatggaggccgaggccgccggcctgcgggagcagctggaggaggaggccgccgcccgggagcgggccggccgggagctgcagacagcccaggcccagctgtctgagtggaggcggcggcaggaggaggaggccggggccctggaggccggggaggaggccaggagaagagctgcccgggaggccgaggccctgacccagaggctggccgagaagacagagaccgtggaccggctggagcggggcagaagaaggctgcagcaggagctggatgatgccaccatggacctggagcagcagaggcagctggtgtccaccctggagaagaagcagaggaagtttgaccagctgctggccgaggagaaggctgctgtgctgcgggctgtggaggagcgggagcgggcagaggccgagggccgggagcgggaggcccgggccctgagcctgacccgggccctggaggaggagcaggaggcccgggaggagctggagcggcagaacagagccctgcgggcagagctggaggccctgctgagcagcaaggatgatgtgggcaagtctgtgcatgagctggagcgggcctgccgggtggccgagcaggccgccaatgacctgcgggcccaggtgacagagctggaggatgagctgacagctgctgaagatgccaagctgcggctggaggtgacagtgcaggccctgaagacccagcacgagcgggacctgcagggcagagatgaggccggggaggagcggcggcggcagctggccaagcagctgagagatgctgaggtggagagagatgaggagaggaagcagaggaccctggccgtggccgccaggaagaagctggagggggagctggaggagctgaaggcccagatggccagcgctggccagggcaaggaggaggccgtgaagcagctgaggaagatgcaggcccagatgaaggagctgtggagggaggtggaggagaccaggaccagccgggaggagatcttcagccagaaccgggagagcgagaagaggctgaagggcctggaggccgaggtgctgcggctgcaggaggagctggccgccagtgaccgggcccggcggcaggcccagcaggacagagatgagatggctgatgaggtggccaatggaaacctgagcaaggccgccatcctggaggagaagaggcagctggagggccgcctgggccagctggaggaggagctggaggaggagcagagcaacagcgagctgctgaatgaccgctacaggaagctgctgctgcaggtggagagcctgaccacagagctgtctgctgagaggagcttcagcgccaaggccgagagcggccggcagcagctggagcggcagatccaggagctgcggggccgcctgggggaggaggatgctggggcccgggcccggcacaagatgaccatcgccgccctggagagcaagctggcccaggccgaggagcagctggagcaggagacccgggagcgcatcctgagcggcaagctggtgagaagagctgagaagaggctgaaggaggtggtgctgcaggtggaggaggagcggcgggtggccgaccagctgcgggaccagctggagaagggcaacctgcgggtgaagcagctgaagaggcagctggaggaggccgaggaggaggccagccgggcccaggccggcagaagaaggctgcagcgggagctggaggatgtgacagaatctgctgagagcatgaaccgggaggtgaccaccctgaggaaccggctgcggcggggccccctgaccttcaccaccaggacagtgcggcaggtgttccggctggaggagggcgtggccagtgatgaggaggccgaggaggcccagcccggcagcggccccagccctgagcctgagggcagccccccagcccacccccagtag

SEQ ID NO: 59097 - DNA, 6896 bp, Artificial Sequence
  derived and/or modified sequence
gaagcctcgggacggccctggaagccgaccatggcagccgtgaccatgtcggtgcccgggcggaaggcgccccccaggccgggcccagtgcccgaggcggcccagccgttcctgttcacgccccgcgggcccagcgcgggtggcgggcctggctcgggcacctccccgcaggtggagtggacggcccggcgtctcgtgtgggtgccttcggagcttcacgggttcgaggcggcggcgctgcgggacgaaggcgaggaggaggcggaggtggagctggcggagagcgggaggcggctgcgactgccgcgggaccagatccagcgcatgaacccgcccaagttcagcaaggccgaggacatggccgagctgacctgcctcaacgaggcctcggtcctgcacaacctccgggagcggtactactccggcctcatctacacgtactccggccttttctgtgtggtcatcaacccgtacaagcagcttcccatctacacagaagccattgtggagatgtaccggggcaagaagcgccacgaggtgccaccccacgtgtacgcagtgaccgagggggcctatcggagcatgctgcaggatcgtgaggaccagtccattctctgcactggagagtctggagctgggaagacggaaaacaccaagaaggtcatccagtacctcgcccacgtggcgtcgtctccaaagggcaggaaggagccgggtgtccccgcctccgtcagcaccgtgtcttatggtgagctggagcggcagctgcttcaggccaaccccatcctagaggcctttggcaatgccaagacagtgaagaatgacaactcctcccgattcggcaaattcatccgcatcaactttgatgttgccgggtacatcgtgggcgccaacattgagacctacctgctggagaagtcgcgggccatccgccaggccaaggacgagtgcagcttccacatcttctaccagctgctggggggcgctggagagcagctcaaagccgacctcctcctcgagccctgctcccactaccggttcctgaccaacgggccgtcatcctctcccggccaggagcgggaactcttccaggagacgctggagtcgctgcgggtcctgggattcagccacgaggaaatcatctccatgctgcggatggtctcagcagttctccagtttggcaacattgccttgaagagagaacggaacaccgatcaagccaccatgcctgacaacacagctgcacagaagctctgccgcctcttgggactgggggtgacggatttctcccgagccttgctcacccctcgcatcaaagttggccgagactatgtgcagaaagcccagactaaggaacaggctgacttcgcgctggaggccctggccaaggccacctacgagcgcctcttccgctggctggttctgcgcctcaaccgggccttggaccgcagcccccgccaaggcgcctccttcctgggcatcctggacatcgcgggctttgagatcttccagctgaactccttcgagcagctctgcatcaactacaccaacgagaagctgcagcagctcttcaaccacaccatgttcgtgctggagcaggaggagtaccagcgtgagggcatcccctggaccttcctcgactttggcctcgacctgcagccctgcatcgacctcatcgagcggccggccaacccccctggactcctggccctgctggatgaggagtgctggttcccgaaggccacagacaagtcgtttgtggagaaggtagcccaggagcagggcggccaccccaagttccagcggccgaggcacctgcgggatcaggccgacttcagtgttctccactacgcgggcaaggtcgactacaaggccaacgagtggctgatgaaaaacatggaccctctgaatgacaacgtcgcagccttgctccaccagagcacagaccggctgacggcagagatctggaaagacgaacatgggggcttccagcagttctctttccttggctccttcccaccgtcgcccccaggatctgcagagaggtgcagctctgctatttctccgccaggggtggagggcatcgtggggctggaacaggtgagcagcctgggcgacggcccaccaggtggccgcccccgtcggggtatgttccggacagtgggacagctctacaaggagtccctgagccgcctcatggccacactcagcaacaccaaccccagttttgtccgctgcattgtccccaaccacgagaagagggccgggaagctggagccacggctggtgctggaccagcttcgctgcaacggggtcctggagggcatccgcatctgtcgccagggcttccccaaccgcatcctcttccaggagttccggcagcgatacgagatcctgacacccaatgccatccccaagggcttcatggatgggaagcaggcctgtgaaaagatgatccaggcgctggaactggaccccaacctctaccgcgtgggacagagcaagatcttcttccgggctggggtcctggcccagctggaagaggagcgagacctgaaggtcaccgacatcatcgtctccttccaggcagctgcccggggatacctggctcgcagggccttccagaagcgccagcagcagcagagcgccctgagggtgatgcagcggaactgcgcggcctacctcaagctgagacactggcagtggtggcggctgtttaccaaggtgaagccactgctgcaggtgacgcggcaggatgaggtgctgcaggcacgggcccaggagctgcagaaagtgcaggagctacagcagcagagcgcccgcgaagttggggagctccagggccgagtggcacagctggaagaggagcgcgcccgcctggcagagcaattgcgagcagaggcagaactgtgtgcagaggccgaggagacgcgggggaggctggcagcccgcaagcaggagctggagctggtggtgtcagagctggaggctcgcgtgggcgaggaggaggagtgcagccgtcaaatgcaaaccgagaagaagaggctgcagcagcacatacaggagctagaggcccaccttgaggctgaggagggtgcgcggcagaagctgcagctggagaaggtgacgacagaggcaaaaatgaagaaatttgaagaggacctgctgctcctggaagaccagaattccaagctgagcaaggagcggaagctgctggaagatcgtctggccgagttctcatcccaggcagctgaggaggaggagaaggtcaagagcctcaataagctacggctcaaatatgaggccacaatcgcagacatggaggaccgcctacggaaggaggagaagggtcgccaggagctggagaagctgaagcggaggctggatggggagagctcagagctgcaggagcagatggtggagcagcaacagcgggcagaggagctgcgggcccagctgggccggaaggaggaggagctgcaggctgccctggccagggcagaagacgagggtggggcccgggcccagctgctgaaatccctgcgggaggctcaagcagccctggccgaggcccaggaggacctggagtctgagcgtgtggccaggaccaaggcggagaagcagcgccgggacctgggcgaggagctggaggcgctgcggggcgagctggaggacacgctggactccaccaacgcacagcaggagctccggtccaagagggaacaggaggtgacggagctgaagaagactctggaggaggagactcgcatccacgaggcggcagtgcaggagctgaggcagcgccacggccaggccctgggggagctggcggagcagctggagcaggcccggaggggcaaaggtgcatgggagaagacccggctggccctggaggccgaggtgtccgagctgcgggcagaactgagcagcctgcagactgcacgtcaggagggtgagcagcggaggcgccgcctggagttacagctgcaggaggtgcagggccgggctggtgatggggagagggcacgagcggaggctgctgagaagctgcagcgagcccaggctgaactggagaatgtgtctggggcgctgaacgaggctgagtccaaaaccatccgtcttagcaaggagctgagcagcacagaagcccagctgcacgatgcccaggagctgctgcaggaggagaccagggcgaaattggccttggggtcccgggtgcgagccatggaggctgaggcagccgggctgcgtgagcagctggaggaggaggcagctgccagggaacgggcgggccgtgaactgcagactgcccaggcccagctttccgagtggcggcggcgccaggaggaggaggcaggggcactggaggcaggggaggaggcacggcgccgggcagcccgggaggccgaggccctgacccagcgcctggcagaaaagacagagaccgtggatcggctggagcggggccgccgccggctgcagcaggagctggacgacgccaccatggacctggagcagcagcggcagcttgtgagcaccctggagaagaagcagcgcaagtttgaccagcttctggcagaggagaaggcagctgtacttcgggcagtggaggaacgtgagcgggccgaggcagagggccgggagcgtgaggctcgggccctgtcactgacacgggcactggaggaggagcaggaggcacgtgaggagctggagcggcagaaccgggccctgcgggctgagctggaggcactgctgagcagcaaggatgacgtcggcaagagcgtgcatgagctggaacgagcctgccgggtagcagaacaggcagccaatgatctgcgagcacaggtgacagaactggaggatgagctgacagcggccgaggatgccaagctgcgtctggaggtgactgtgcaggctctcaagactcagcatgagcgtgacctgcagggccgtgatgaggctggtgaagagaggcggaggcagctggccaagcagctgagagatgcagaggtggagcgggatgaggagcggaagcagcgcactctggccgtggctgcccgcaagaagctggagggagagctggaggagctgaaggctcagatggcctctgccggccagggcaaggaggaggcggtgaagcagcttcgcaagatgcaggcccagatgaaggagctatggcgggaggtggaggagacacgcacctcccgggaggagatcttctcccagaatcgggaaagtgaaaagcgcctcaagggcctggaggctgaggtgctgcggctgcaggaggaactggccgcctcggaccgtgctcggcggcaggcccagcaggaccgggatgagatggcagatgaggtggccaatggtaaccttagcaaggcagccattctggaggagaagcgtcagctggaggggcgcctggggcagttggaggaagagctggaggaggagcagagcaactcggagctgctcaatgaccgctaccgcaagctgctcctgcaggtagagtcactgaccacagagctgtcagctgagcgcagtttctcagccaaggcagagagcgggcggcagcagctggaacggcagatccaggagctacggggacgcctgggtgaggaggatgctggggcccgtgcccgccacaagatgaccattgctgcccttgagtctaagttggcccaggctgaggagcagctagagcaagagaccagagagcgcatcctctctggaaagctggtgcgcagagctgagaagcggcttaaagaggtggtgctccaggtggaggaggagcggagggtggctgaccagctccgggaccagctggagaagggaaaccttcgagtcaagcagctgaagcggcagctggaggaggccgaggaggaggcatcccgggctcaggccggccgccggaggctgcagcgtgagctggaagatgtcacagagtcggccgagtccatgaaccgtgaagtgaccacactgaggaaccggcttcgacgcggccccctcaccttcaccacccgcacggtgcgccaggtcttccgactagaggagggcgtggcatccgacgaggaggcagaggaagcacagcctgggtctgggccatccccggagcctgaggggtccccaccagcccacccccagtgaccctaccctgtccccagatgcactaacagatggggcccagcccccttcctccctggaccccacgggcccctgtcccaggaaccccgccctctgacttcttgccctttggaaatggtgcagcactctggcatttatcacccccacctgggtcccctgcaacctcccatcaaaggatgacccctaaacacagaggagcggggcaggcagggaggcaatgactggagctaccttgcttgttgggggactgggtacagttggcaagctgtgtttccatcagctccctgtcctcctttcttccctcgttattgatctatagacattaggaagggagtgagacggctcctccaccatcctcagccagtgcaacccattccctctgcttctctctctctctctctctctccctccctctccttccctaccctctcaccatctttcttggcctctctgagggtctctctgtgcatctttttaggaatctcgctctcactctctacgtagccactctccttcccccatttctgcgtccacccctgaactcctgagcgacagaagccccaggcctccaccagccttgaacccttgcaaaggggcaggacaaggggacccctctcactcctgctgctgcccatgctctgccctcccttctggttgctctgagggttcggagcttccctctgggactaaaggagtgtcctttaccctcccagcctccaggctctggcagaaataaactccaacccgactggaccatc

SEQ ID NO: 59098 - DNA, 6873 bp, Artificial Sequence
  derived and/or modified sequence
gcagaccatggcagccgtgaccatgtcggtgcccgggcggaaggcgccccccaggccgggcccagtgcccgaggcggcccagccgttcctgttcacgccccgcgggcccagcgcgggtggcgggcctggctcgggcacctccccgcaggtggagtggacggcccggcgtctcgtgtgggtgccttcggagcttcacgggttcgaggcggcggcgctgcgggacgaaggcgaggaggaggcggaggtggagctggcggagagcgggaggcggctgcgactgccgcgggaccagatccagcgcatgaacccgcccaagttcagcaaggccgaggacatggccgagctgacctgcctcaacgaggcctcggtcctgcacaacctccgggagcggtactactccggcctcatctacacgtactccggccttttctgtgtggtcatcaacccgtacaagcagcttcccatctacacagaagccattgtggagatgtaccggggcaagaagcgccacgaggtgccaccccacgtgtacgcagtgaccgagggggcctatcggagcatgctgcaggatcgtgaggaccagtccattctctgcactggagagtctggagctgggaagacggaaaacaccaagaaggtcatccagtacctcgcccacgtggcgtcgtctccaaagggcaggaaggagccgggtgtccccgcctccgtcagcaccgtgtcttatggtgagctggagcggcagctgcttcaggccaaccccatcctagaggcctttggcaatgccaagacagtgaagaatgacaactcctcccgattcggcaaattcatccgcatcaactttgatgttgccgggtacatcgtgggcgccaacattgagacctacctgctggagaagtcgcgggccatccgccaggccaaggacgagtgcagcttccacatcttctaccagctgctggggggcgctggagagcagctcaaagccgacctcctcctcgagccctgctcccactaccggttcctgaccaacgggccgtcatcctctcccggccaggagcgggaactcttccaggagacgctggagtcgctgcgggtcctgggattcagccacgaggaaatcatctccatgctgcggatggtctcagcagttctccagtttggcaacattgccttgaagagagaacggaacaccgatcaagccaccatgcctgacaacacagctgcacagaagctctgccgcctcttgggactgggggtgacggatttctcccgagccttgctcacccctcgcatcaaagttggccgagactatgtgcagaaagcccagactaaggaacaggctgacttcgcgctggaggccctggccaaggccacctacgagcgcctcttccgctggctggttctgcgcctcaaccgggccttggaccgcagcccccgccaaggcgcctccttcctgggcatcctggacatcgcgggctttgagatcttccagctgaactccttcgagcagctctgcatcaactacaccaacgagaagctgcagcagctcttcaaccacaccatgttcgtgctggagcaggaggagtaccagcgtgagggcatcccctggaccttcctcgactttggcctcgacctgcagccctgcatcgacctcatcgagcggccggccaacccccctggactcctggccctgctggatgaggagtgctggttcccgaaggccacagacaagtcgtttgtggagaaggtagcccaggagcagggcggccaccccaagttccagcggccgaggcacctgcgggatcaggccgacttcagtgttctccactacgcgggcaaggtcgactacaaggccaacgagtggctgatgaaaaacatggaccctctgaatgacaacgtcgcagccttgctccaccagagcacagaccggctgacggcagagatctggaaagacgaacatgggggcttccagcagttctctttccttggctccttcccaccgtcgcccccaggatctgcagagaggtgcagctctgctatttctccgccaggggtggagggcatcgtggggctggaacaggtgagcagcctgggcgacggcccaccaggtggccgcccccgtcggggtatgttccggacagtgggacagctctacaaggagtccctgagccgcctcatggccacactcagcaacaccaaccccagttttgtccgctgcattgtccccaaccacgagaagagggccgggaagctggagccacggctggtgctggaccagcttcgctgcaacggggtcctggagggcatccgcatctgtcgccagggcttccccaaccgcatcctcttccaggagttccggcagcgatacgagatcctgacacccaatgccatccccaagggcttcatggatgggaagcaggcctgtgaaaagatgatccaggcgctggaactggaccccaacctctaccgcgtgggacagagcaagatcttcttccgggctggggtcctggcccagctggaagaggagcgagacctgaaggtcaccgacatcatcgtctccttccaggcagctgcccggggatacctggctcgcagggccttccagaagcgccagcagcagcagagcgccctgagggtgatgcagcggaactgcgcggcctacctcaagctgagacactggcagtggtggcggctgtttaccaaggtgaagccactgctgcaggtgacgcggcaggatgaggtgctgcaggcacgggcccaggagctgcagaaagtgcaggagctacagcagcagagcgcccgcgaagttggggagctccagggccgagtggcacagctggaagaggagcgcgcccgcctggcagagcaattgcgagcagaggcagaactgtgtgcagaggccgaggagacgcgggggaggctggcagcccgcaagcaggagctggagctggtggtgtcagagctggaggctcgcgtgggcgaggaggaggagtgcagccgtcaaatgcaaaccgagaagaagaggctgcagcagcacatacaggagctagaggcccaccttgaggctgaggagggtgcgcggcagaagctgcagctggagaaggtgacgacagaggcaaaaatgaagaaatttgaagaggacctgctgctcctggaagaccagaattccaagctgagcaaggagcggaagctgctggaagatcgtctggccgagttctcatcccaggcagctgaggaggaggagaaggtcaagagcctcaataagctacggctcaaatatgaggccacaatcgcagacatggaggaccgcctacggaaggaggagaagggtcgccaggagctggagaagctgaagcggaggctggatggggagagctcagagctgcaggagcagatggtggagcagcaacagcgggcagaggagctgcgggcccagctgggccggaaggaggaggagctgcaggctgccctggccagggcagaagacgagggtggggcccgggcccagctgctgaaatccctgcgggaggctcaagcagccctggccgaggcccaggaggacctggagtctgagcgtgtggccaggaccaaggcggagaagcagcgccgggacctgggcgaggagctggaggcgctgcggggcgagctggaggacacgctggactccaccaacgcacagcaggagctccggtccaagagggaacaggaggtgacggagctgaagaagactctggaggaggagactcgcatccacgaggcggcagtgcaggagctgaggcagcgccacggccaggccctgggggagctggcggagcagctggagcaggcccggaggggcaaaggtgcatgggagaagacccggctggccctggaggccgaggtgtccgagctgcgggcagaactgagcagcctgcagactgcacgtcaggagggtgagcagcggaggcgccgcctggagttacagctgcaggaggtgcagggccgggctggtgatggggagagggcacgagcggaggctgctgagaagctgcagcgagcccaggctgaactggagaatgtgtctggggcgctgaacgaggctgagtccaaaaccatccgtcttagcaaggagctgagcagcacagaagcccagctgcacgatgcccaggagctgctgcaggaggagaccagggcgaaattggccttggggtcccgggtgcgagccatggaggctgaggcagccgggctgcgtgagcagctggaggaggaggcagctgccagggaacgggcgggccgtgaactgcagactgcccaggcccagctttccgagtggcggcggcgccaggaggaggaggcaggggcactggaggcaggggaggaggcacggcgccgggcagcccgggaggccgaggccctgacccagcgcctggcagaaaagacagagaccgtggatcggctggagcggggccgccgccggctgcagcaggagctggacgacgccaccatggacctggagcagcagcggcagcttgtgagcaccctggagaagaagcagcgcaagtttgaccagcttctggcagaggagaaggcagctgtacttcgggcagtggaggaacgtgagcgggccgaggcagagggccgggagcgtgaggctcgggccctgtcactgacacgggcactggaggaggagcaggaggcacgtgaggagctggagcggcagaaccgggccctgcgggctgagctggaggcactgctgagcagcaaggatgacgtcggcaagagcgtgcatgagctggaacgagcctgccgggtagcagaacaggcagccaatgatctgcgagcacaggtgacagaactggaggatgagctgacagcggccgaggatgccaagctgcgtctggaggtgactgtgcaggctctcaagactcagcatgagcgtgacctgcagggccgtgatgaggctggtgaagagaggcggaggcagctggccaagcagctgagagatgcagaggtggagcgggatgaggagcggaagcagcgcactctggccgtggctgcccgcaagaagctggagggagagctggaggagctgaaggctcagatggcctctgccggccagggcaaggaggaggcggtgaagcagcttcgcaagatgcaggcccagatgaaggagctatggcgggaggtggaggagacacgcacctcccgggaggagatcttctcccagaatcgggaaagtgaaaagcgcctcaagggcctggaggctgaggtgctgcggctgcaggaggaactggccgcctcggaccgtgctcggcggcaggcccagcaggaccgggatgagatggcagatgaggtggccaatggtaaccttagcaaggcagccattctggaggagaagcgtcagctggaggggcgcctggggcagttggaggaagagctggaggaggagcagagcaactcggagctgctcaatgaccgctaccgcaagctgctcctgcaggtagagtcactgaccacagagctgtcagctgagcgcagtttctcagccaaggcagagagcgggcggcagcagctggaacggcagatccaggagctacggggacgcctgggtgaggaggatgctggggcccgtgcccgccacaagatgaccattgctgcccttgagtctaagttggcccaggctgaggagcagctagagcaagagaccagagagcgcatcctctctggaaagctggtgcgcagagctgagaagcggcttaaagaggtggtgctccaggtggaggaggagcggagggtggctgaccagctccgggaccagctggagaagggaaaccttcgagtcaagcagctgaagcggcagctggaggaggccgaggaggaggcatcccgggctcaggccggccgccggaggctgcagcgtgagctggaagatgtcacagagtcggccgagtccatgaaccgtgaagtgaccacactgaggaaccggcttcgacgcggccccctcaccttcaccacccgcacggtgcgccaggtcttccgactagaggagggcgtggcatccgacgaggaggcagaggaagcacagcctgggtctgggccatccccggagcctgaggggtccccaccagcccacccccagtgaccctaccctgtccccagatgcactaacagatggggcccagcccccttcctccctggaccccacgggcccctgtcccaggaaccccgccctctgacttcttgccctttggaaatggtgcagcactctggcatttatcacccccacctgggtcccctgcaacctcccatcaaaggatgacccctaaacacagaggagcggggcaggcagggaggcaatgactggagctaccttgcttgttgggggactgggtacagttggcaagctgtgtttccatcagctccctgtcctcctttcttccctcgttattgatctatagacattaggaagggagtgagacggctcctccaccatcctcagccagtgcaacccattccctctgcttctctctctctctctctctctccctccctctccttccctaccctctcaccatctttcttggcctctctgagggtctctctgtgcatctttttaggaatctcgctctcactctctacgtagccactctccttcccccatttctgcgtccacccctgaactcctgagcgacagaagccccaggcctccaccagccttgaacccttgcaaaggggcaggacaaggggacccctctcactcctgctgctgcccatgctctgccctcccttctggttgctctgagggttcggagcttccctctgggactaaaggagtgtcctttaccctcccagcctccaggctctggcagaaataaactccaacccgactggaccatc

SEQ ID NO: 59099 - DNA, 6886 bp, Artificial Sequence
  derived and/or modified sequence
ctctttctccccaggccgaagcctcgggacggccctggaagccgaccatggcagccgtgaccatgtcggtgcccgggcggaaggcgccccccaggccgggcccagtgcccgaggcggcccagccgttcctgttcacgccccgcgggcccagcgcgggtggcgggcctggctcgggcacctccccgcaggtggagtggacggcccggcgtctcgtgtgggtgccttcggagcttcacgggttcgaggcggcggcgctgcgggacgaaggcgaggaggaggcggaggtggagctggcggagagcgggaggcggctgcgactgccgcgggaccagatccagcgcatgaacccgcccaagttcagcaaggccgaggacatggccgagctgacctgcctcaacgaggcctcggtcctgcacaacctccgggagcggtactactccggcctcatctacacgtactccggccttttctgtgtggtcatcaacccgtacaagcagcttcccatctacacagaagccattgtggagatgtaccggggcaagaagcgccacgaggtgccaccccacgtgtacgcagtgaccgagggggcctatcggagcatgctgcaggatcgtgaggaccagtccattctctgcactggagagtctggagctgggaagacggaaaacaccaagaaggtcatccagtacctcgcccacgtggcgtcgtctccaaagggcaggaaggagccgggtgtccccggtgagctggagcggcagctgcttcaggccaaccccatcctagaggcctttggcaatgccaagacagtgaagaatgacaactcctcccgattcggcaaattcatccgcatcaactttgatgttgccgggtacatcgtgggcgccaacattgagacctacctgctggagaagtcgcgggccatccgccaggccaaggacgagtgcagcttccacatcttctaccagctgctggggggcgctggagagcagctcaaagccgacctcctcctcgagccctgctcccactaccggttcctgaccaacgggccgtcatcctctcccggccaggagcgggaactcttccaggagacgctggagtcgctgcgggtcctgggattcagccacgaggaaatcatctccatgctgcggatggtctcagcagttctccagtttggcaacattgccttgaagagagaacggaacaccgatcaagccaccatgcctgacaacacagctgcacagaagctctgccgcctcttgggactgggggtgacggatttctcccgagccttgctcacccctcgcatcaaagttggccgagactatgtgcagaaagcccagactaaggaacaggctgacttcgcgctggaggccctggccaaggccacctacgagcgcctcttccgctggctggttctgcgcctcaaccgggccttggaccgcagcccccgccaaggcgcctccttcctgggcatcctggacatcgcgggctttgagatcttccagctgaactccttcgagcagctctgcatcaactacaccaacgagaagctgcagcagctcttcaaccacaccatgttcgtgctggagcaggaggagtaccagcgtgagggcatcccctggaccttcctcgactttggcctcgacctgcagccctgcatcgacctcatcgagcggccggccaacccccctggactcctggccctgctggatgaggagtgctggttcccgaaggccacagacaagtcgtttgtggagaaggtagcccaggagcagggcggccaccccaagttccagcggccgaggcacctgcgggatcaggccgacttcagtgttctccactacgcgggcaaggtcgactacaaggccaacgagtggctgatgaaaaacatggaccctctgaatgacaacgtcgcagccttgctccaccagagcacagaccggctgacggcagagatctggaaagacgaacatgggggcttccagcagttctctttccttggctccttcccaccgtcgcccccaggatctgcagagaggtgcagctctgctatttctccgccaggggtggagggcatcgtggggctggaacaggtgagcagcctgggcgacggcccaccaggtggccgcccccgtcggggtatgttccggacagtgggacagctctacaaggagtccctgagccgcctcatggccacactcagcaacaccaaccccagttttgtccgctgcattgtccccaaccacgagaagagggccgggaagctggagccacggctggtgctggaccagcttcgctgcaacggggtcctggagggcatccgcatctgtcgccagggcttccccaaccgcatcctcttccaggagttccggcagcgatacgagatcctgacacccaatgccatccccaagggcttcatggatgggaagcaggcctgtgaaaagatgatccaggcgctggaactggaccccaacctctaccgcgtgggacagagcaagatcttcttccgggctggggtcctggcccagctggaagaggagcgagacctgaaggtcaccgacatcatcgtctccttccaggcagctgcccggggatacctggctcgcagggccttccagaagcgccagcagcagcagagcgccctgagggtgatgcagcggaactgcgcggcctacctcaagctgagacactggcagtggtggcggctgtttaccaaggtgaagccactgctgcaggtgacgcggcaggatgaggtgctgcaggcacgggcccaggagctgcagaaagtgcaggagctacagcagcagagcgcccgcgaagttggggagctccagggccgagtggcacagctggaagaggagcgcgcccgcctggcagagcaattgcgagcagaggcagaactgtgtgcagaggccgaggagacgcgggggaggctggcagcccgcaagcaggagctggagctggtggtgtcagagctggaggctcgcgtgggcgaggaggaggagtgcagccgtcaaatgcaaaccgagaagaagaggctgcagcagcacatacaggagctagaggcccaccttgaggctgaggagggtgcgcggcagaagctgcagctggagaaggtgacgacagaggcaaaaatgaagaaatttgaagaggacctgctgctcctggaagaccagaattccaagctgagcaaggagcggaagctgctggaagatcgtctggccgagttctcatcccaggcagctgaggaggaggagaaggtcaagagcctcaataagctacggctcaaatatgaggccacaatcgcagacatggaggaccgcctacggaaggaggagaagggtcgccaggagctggagaagctgaagcggaggctggatggggagagctcagagctgcaggagcagatggtggagcagcaacagcgggcagaggagctgcgggcccagctgggccggaaggaggaggagctgcaggctgccctggccagggcagaagacgagggtggggcccgggcccagctgctgaaatccctgcgggaggctcaagcagccctggccgaggcccaggaggacctggagtctgagcgtgtggccaggaccaaggcggagaagcagcgccgggacctgggcgaggagctggaggcgctgcggggcgagctggaggacacgctggactccaccaacgcacagcaggagctccggtccaagagggaacaggaggtgacggagctgaagaagactctggaggaggagactcgcatccacgaggcggcagtgcaggagctgaggcagcgccacggccaggccctgggggagctggcggagcagctggagcaggcccggaggggcaaaggtgcatgggagaagacccggctggccctggaggccgaggtgtccgagctgcgggcagaactgagcagcctgcagactgcacgtcaggagggtgagcagcggaggcgccgcctggagttacagctgcaggaggtgcagggccgggctggtgatggggagagggcacgagcggaggctgctgagaagctgcagcgagcccaggctgaactggagaatgtgtctggggcgctgaacgaggctgagtccaaaaccatccgtcttagcaaggagctgagcagcacagaagcccagctgcacgatgcccaggagctgctgcaggaggagaccagggcgaaattggccttggggtcccgggtgcgagccatggaggctgaggcagccgggctgcgtgagcagctggaggaggaggcagctgccagggaacgggcgggccgtgaactgcagactgcccaggcccagctttccgagtggcggcggcgccaggaggaggaggcaggggcactggaggcaggggaggaggcacggcgccgggcagcccgggaggccgaggccctgacccagcgcctggcagaaaagacagagaccgtggatcggctggagcggggccgccgccggctgcagcaggagctggacgacgccaccatggacctggagcagcagcggcagcttgtgagcaccctggagaagaagcagcgcaagtttgaccagcttctggcagaggagaaggcagctgtacttcgggcagtggaggaacgtgagcgggccgaggcagagggccgggagcgtgaggctcgggccctgtcactgacacgggcactggaggaggagcaggaggcacgtgaggagctggagcggcagaaccgggccctgcgggctgagctggaggcactgctgagcagcaaggatgacgtcggcaagagcgtgcatgagctggaacgagcctgccgggtagcagaacaggcagccaatgatctgcgagcacaggtgacagaactggaggatgagctgacagcggccgaggatgccaagctgcgtctggaggtgactgtgcaggctctcaagactcagcatgagcgtgacctgcagggccgtgatgaggctggtgaagagaggcggaggcagctggccaagcagctgagagatgcagaggtggagcgggatgaggagcggaagcagcgcactctggccgtggctgcccgcaagaagctggagggagagctggaggagctgaaggctcagatggcctctgccggccagggcaaggaggaggcggtgaagcagcttcgcaagatgcaggcccagatgaaggagctatggcgggaggtggaggagacacgcacctcccgggaggagatcttctcccagaatcgggaaagtgaaaagcgcctcaagggcctggaggctgaggtgctgcggctgcaggaggaactggccgcctcggaccgtgctcggcggcaggcccagcaggaccgggatgagatggcagatgaggtggccaatggtaaccttagcaaggcagccattctggaggagaagcgtcagctggaggggcgcctggggcagttggaggaagagctggaggaggagcagagcaactcggagctgctcaatgaccgctaccgcaagctgctcctgcaggtagagtcactgaccacagagctgtcagctgagcgcagtttctcagccaaggcagagagcgggcggcagcagctggaacggcagatccaggagctacggggacgcctgggtgaggaggatgctggggcccgtgcccgccacaagatgaccattgctgcccttgagtctaagttggcccaggctgaggagcagctagagcaagagaccagagagcgcatcctctctggaaagctggtgcgcagagctgagaagcggcttaaagaggtggtgctccaggtggaggaggagcggagggtggctgaccagctccgggaccagctggagaagggaaaccttcgagtcaagcagctgaagcggcagctggaggaggccgaggaggaggcatcccgggctcaggccggccgccggaggctgcagcgtgagctggaagatgtcacagagtcggccgagtccatgaaccgtgaagtgaccacactgaggaaccggcttcgacgcggccccctcaccttcaccacccgcacggtgcgccaggtcttccgactagaggagggcgtggcatccgacgaggaggcagaggaagcacagcctgggtctgggccatccccggagcctgaggggtccccaccagcccacccccagtgaccctaccctgtccccagatgcactaacagatggggcccagcccccttcctccctggaccccacgggcccctgtcccaggaaccccgccctctgacttcttgccctttggaaatggtgcagcactctggcatttatcacccccacctgggtcccctgcaacctcccatcaaaggatgacccctaaacacagaggagcggggcaggcagggaggcaatgactggagctaccttgcttgttgggggactgggtacagttggcaagctgtgtttccatcagctccctgtcctcctttcttccctcgttattgatctatagacattaggaagggagtgagacggctcctccaccatcctcagccagtgcaacccattccctctgcttctctctctctctctctctctccctccctctccttccctaccctctcaccatctttcttggcctctctgagggtctctctgtgcatctttttaggaatctcgctctcactctctacgtagccactctccttcccccatttctgcgtccacccctgaactcctgagcgacagaagccccaggcctccaccagccttgaacccttgcaaaggggcaggacaaggggacccctctcactcctgctgctgcccatgctctgccctcccttctggttgctctgagggttcggagcttccctctgggactaaaggagtgtcctttaccctcccagcctccaggctctggcagaaataaactccaacccgactggacc

SEQ ID NO: 59100 - DNA, 6910 bp, Artificial Sequence
  derived and/or modified sequence
ctctttctccccaggccgaagcctcgggacggccctggaagccgaccatggcagccgtgaccatgtcggtgcccgggcggaaggcgccccccaggccgggcccagtgcccgaggcggcccagccgttcctgttcacgccccgcgggcccagcgcgggtggcgggcctggctcgggcacctccccgcaggtggagtggacggcccggcgtctcgtgtgggtgccttcggagcttcacgggttcgaggcggcggcgctgcgggacgaaggcgaggaggaggcggaggtggagctggcggagagcgggaggcggctgcgactgccgcgggaccagatccagcgcatgaacccgcccaagttcagcaaggccgaggacatggccgagctgacctgcctcaacgaggcctcggtcctgcacaacctccgggagcggtactactccggcctcatctacacgtactccggccttttctgtgtggtcatcaacccgtacaagcagcttcccatctacacagaagccattgtggagatgtaccggggcaagaagcgccacgaggtgccaccccacgtgtacgcagtgaccgagggggcctatcggagcatgctgcaggatcgtgaggaccagtccattctctgcactggagagtctggagctgggaagacggaaaacaccaagaaggtcatccagtacctcgcccacgtggcgtcgtctccaaagggcaggaaggagccgggtgtccccgtaagcaaccccgccttgggctggggtgagctggagcggcagctgcttcaggccaaccccatcctagaggcctttggcaatgccaagacagtgaagaatgacaactcctcccgattcggcaaattcatccgcatcaactttgatgttgccgggtacatcgtgggcgccaacattgagacctacctgctggagaagtcgcgggccatccgccaggccaaggacgagtgcagcttccacatcttctaccagctgctggggggcgctggagagcagctcaaagccgacctcctcctcgagccctgctcccactaccggttcctgaccaacgggccgtcatcctctcccggccaggagcgggaactcttccaggagacgctggagtcgctgcgggtcctgggattcagccacgaggaaatcatctccatgctgcggatggtctcagcagttctccagtttggcaacattgccttgaagagagaacggaacaccgatcaagccaccatgcctgacaacacagctgcacagaagctctgccgcctcttgggactgggggtgacggatttctcccgagccttgctcacccctcgcatcaaagttggccgagactatgtgcagaaagcccagactaaggaacaggctgacttcgcgctggaggccctggccaaggccacctacgagcgcctcttccgctggctggttctgcgcctcaaccgggccttggaccgcagcccccgccaaggcgcctccttcctgggcatcctggacatcgcgggctttgagatcttccagctgaactccttcgagcagctctgcatcaactacaccaacgagaagctgcagcagctcttcaaccacaccatgttcgtgctggagcaggaggagtaccagcgtgagggcatcccctggaccttcctcgactttggcctcgacctgcagccctgcatcgacctcatcgagcggccggccaacccccctggactcctggccctgctggatgaggagtgctggttcccgaaggccacagacaagtcgtttgtggagaaggtagcccaggagcagggcggccaccccaagttccagcggccgaggcacctgcgggatcaggccgacttcagtgttctccactacgcgggcaaggtcgactacaaggccaacgagtggctgatgaaaaacatggaccctctgaatgacaacgtcgcagccttgctccaccagagcacagaccggctgacggcagagatctggaaagacgaacatgggggcttccagcagttctctttccttggctccttcccaccgtcgcccccaggatctgcagagaggtgcagctctgctatttctccgccaggggtggagggcatcgtggggctggaacaggtgagcagcctgggcgacggcccaccaggtggccgcccccgtcggggtatgttccggacagtgggacagctctacaaggagtccctgagccgcctcatggccacactcagcaacaccaaccccagttttgtccgctgcattgtccccaaccacgagaagagggccgggaagctggagccacggctggtgctggaccagcttcgctgcaacggggtcctggagggcatccgcatctgtcgccagggcttccccaaccgcatcctcttccaggagttccggcagcgatacgagatcctgacacccaatgccatccccaagggcttcatggatgggaagcaggcctgtgaaaagatgatccaggcgctggaactggaccccaacctctaccgcgtgggacagagcaagatcttcttccgggctggggtcctggcccagctggaagaggagcgagacctgaaggtcaccgacatcatcgtctccttccaggcagctgcccggggatacctggctcgcagggccttccagaagcgccagcagcagcagagcgccctgagggtgatgcagcggaactgcgcggcctacctcaagctgagacactggcagtggtggcggctgtttaccaaggtgaagccactgctgcaggtgacgcggcaggatgaggtgctgcaggcacgggcccaggagctgcagaaagtgcaggagctacagcagcagagcgcccgcgaagttggggagctccagggccgagtggcacagctggaagaggagcgcgcccgcctggcagagcaattgcgagcagaggcagaactgtgtgcagaggccgaggagacgcgggggaggctggcagcccgcaagcaggagctggagctggtggtgtcagagctggaggctcgcgtgggcgaggaggaggagtgcagccgtcaaatgcaaaccgagaagaagaggctgcagcagcacatacaggagctagaggcccaccttgaggctgaggagggtgcgcggcagaagctgcagctggagaaggtgacgacagaggcaaaaatgaagaaatttgaagaggacctgctgctcctggaagaccagaattccaagctgagcaaggagcggaagctgctggaagatcgtctggccgagttctcatcccaggcagctgaggaggaggagaaggtcaagagcctcaataagctacggctcaaatatgaggccacaatcgcagacatggaggaccgcctacggaaggaggagaagggtcgccaggagctggagaagctgaagcggaggctggatggggagagctcagagctgcaggagcagatggtggagcagcaacagcgggcagaggagctgcgggcccagctgggccggaaggaggaggagctgcaggctgccctggccagggcagaagacgagggtggggcccgggcccagctgctgaaatccctgcgggaggctcaagcagccctggccgaggcccaggaggacctggagtctgagcgtgtggccaggaccaaggcggagaagcagcgccgggacctgggcgaggagctggaggcgctgcggggcgagctggaggacacgctggactccaccaacgcacagcaggagctccggtccaagagggaacaggaggtgacggagctgaagaagactctggaggaggagactcgcatccacgaggcggcagtgcaggagctgaggcagcgccacggccaggccctgggggagctggcggagcagctggagcaggcccggaggggcaaaggtgcatgggagaagacccggctggccctggaggccgaggtgtccgagctgcgggcagaactgagcagcctgcagactgcacgtcaggagggtgagcagcggaggcgccgcctggagttacagctgcaggaggtgcagggccgggctggtgatggggagagggcacgagcggaggctgctgagaagctgcagcgagcccaggctgaactggagaatgtgtctggggcgctgaacgaggctgagtccaaaaccatccgtcttagcaaggagctgagcagcacagaagcccagctgcacgatgcccaggagctgctgcaggaggagaccagggcgaaattggccttggggtcccgggtgcgagccatggaggctgaggcagccgggctgcgtgagcagctggaggaggaggcagctgccagggaacgggcgggccgtgaactgcagactgcccaggcccagctttccgagtggcggcggcgccaggaggaggaggcaggggcactggaggcaggggaggaggcacggcgccgggcagcccgggaggccgaggccctgacccagcgcctggcagaaaagacagagaccgtggatcggctggagcggggccgccgccggctgcagcaggagctggacgacgccaccatggacctggagcagcagcggcagcttgtgagcaccctggagaagaagcagcgcaagtttgaccagcttctggcagaggagaaggcagctgtacttcgggcagtggaggaacgtgagcgggccgaggcagagggccgggagcgtgaggctcgggccctgtcactgacacgggcactggaggaggagcaggaggcacgtgaggagctggagcggcagaaccgggccctgcgggctgagctggaggcactgctgagcagcaaggatgacgtcggcaagagcgtgcatgagctggaacgagcctgccgggtagcagaacaggcagccaatgatctgcgagcacaggtgacagaactggaggatgagctgacagcggccgaggatgccaagctgcgtctggaggtgactgtgcaggctctcaagactcagcatgagcgtgacctgcagggccgtgatgaggctggtgaagagaggcggaggcagctggccaagcagctgagagatgcagaggtggagcgggatgaggagcggaagcagcgcactctggccgtggctgcccgcaagaagctggagggagagctggaggagctgaaggctcagatggcctctgccggccagggcaaggaggaggcggtgaagcagcttcgcaagatgcaggcccagatgaaggagctatggcgggaggtggaggagacacgcacctcccgggaggagatcttctcccagaatcgggaaagtgaaaagcgcctcaagggcctggaggctgaggtgctgcggctgcaggaggaactggccgcctcggaccgtgctcggcggcaggcccagcaggaccgggatgagatggcagatgaggtggccaatggtaaccttagcaaggcagccattctggaggagaagcgtcagctggaggggcgcctggggcagttggaggaagagctggaggaggagcagagcaactcggagctgctcaatgaccgctaccgcaagctgctcctgcaggtagagtcactgaccacagagctgtcagctgagcgcagtttctcagccaaggcagagagcgggcggcagcagctggaacggcagatccaggagctacggggacgcctgggtgaggaggatgctggggcccgtgcccgccacaagatgaccattgctgcccttgagtctaagttggcccaggctgaggagcagctagagcaagagaccagagagcgcatcctctctggaaagctggtgcgcagagctgagaagcggcttaaagaggtggtgctccaggtggaggaggagcggagggtggctgaccagctccgggaccagctggagaagggaaaccttcgagtcaagcagctgaagcggcagctggaggaggccgaggaggaggcatcccgggctcaggccggccgccggaggctgcagcgtgagctggaagatgtcacagagtcggccgagtccatgaaccgtgaagtgaccacactgaggaaccggcttcgacgcggccccctcaccttcaccacccgcacggtgcgccaggtcttccgactagaggagggcgtggcatccgacgaggaggcagaggaagcacagcctgggtctgggccatccccggagcctgaggggtccccaccagcccacccccagtgaccctaccctgtccccagatgcactaacagatggggcccagcccccttcctccctggaccccacgggcccctgtcccaggaaccccgccctctgacttcttgccctttggaaatggtgcagcactctggcatttatcacccccacctgggtcccctgcaacctcccatcaaaggatgacccctaaacacagaggagcggggcaggcagggaggcaatgactggagctaccttgcttgttgggggactgggtacagttggcaagctgtgtttccatcagctccctgtcctcctttcttccctcgttattgatctatagacattaggaagggagtgagacggctcctccaccatcctcagccagtgcaacccattccctctgcttctctctctctctctctctctccctccctctccttccctaccctctcaccatctttcttggcctctctgagggtctctctgtgcatctttttaggaatctcgctctcactctctacgtagccactctccttcccccatttctgcgtccacccctgaactcctgagcgacagaagccccaggcctccaccagccttgaacccttgcaaaggggcaggacaaggggacccctctcactcctgctgctgcccatgctctgccctcccttctggttgctctgagggttcggagcttccctctgggactaaaggagtgtcctttaccctcccagcctccaggctctggcagaaataaactccaacccgactggacc

SEQ ID NO: 59101 - DNA, 6111 bp, Artificial Sequence
  derived and/or modified sequence
atggccgccgtgaccatgagcgtgcccggccggaaggccccccccagacctggccctgtccctgaggcagcccagcctttcctgtttacgccaaggggcccttcagccgggggggggcctggctccggtacctctcctcaggttgagtggacagcccgcagacttgtgtgggtgccatctgaacttcacgggttcgaagccgctgcactccgcgatgaaggcgaggaggaagcagaagtggagcttgctgaatccggccgccggctgcgtctcccacgggatcagatacagcgaatgaatccccccaaattcagtaaagcagaggacatggcggaactgacatgtctaaatgaggcaagcgtgctacataacctcagagaacgttactattctggtttgatctacacttacagtggacttttctgtgtagttattaacccctacaagcaactccctatatacaccgaagctatagttgaaatgtacagaggtaaaaagcgccacgaagtcccaccccatgtttacgcagtgactgaaggcgcctataggtcgatgctacaggatcgcgaggaccagtcaatcctctgtaccggtgagagcggcgccggaaaaaccgagaatactaagaaagtgatccagtacttggcccatgttgccagttctccaaaaggacgcaaggagccgggggttcctgccagcgtcagcaccgtctcatatggagagttggaacgccagctccttcaggccaatccaattttagaggccttcgggaatgccaaaactgtgaagaacgacaactcctcccgttttgggaagttcattcgtatcaactttgatgtggccggctacatcgttggagcaaatatagaaacatacttgctggagaagagccgagccatcaggcaggccaaggacgagtgttcttttcacattttctaccaattgcttgggggcgcgggggagcagctgaaggccgacctgttgctggagccctgctcccactacagatttttaaccaacgggcctagctctagccccgggcaggaacgagaactgtttcaagagaccttggaaagcctgcgggtgctgggcttcagccacgaggagatcatcagcatgctcaggatggtctccgcagtgctgcagttcgggaacattgccctgaaacgggagcgcaacactgaccaggccacaatgcctgataataccgccgcccagaagctctgtagacttcttggtcttggcgttaccgatttcagccgggcccttttgactccgcggattaaagtgggaagagattacgtccagaaggcccagacaaaagaacaagccgatttcgctttagaagccctcgccaaagccacgtacgaaagattgtttcggtggctggttcttaggctaaaccgagccctggataggtctcctcgacagggtgcaagttttctgggtattctggacatcgccgggtttgagatctttcaactgaattcatttgaacaactgtgtattaactacaccaatgaaaaactgcagcaattatttaaccacaccatgtttgttctagaacaggaggagtatcagcgggaagggataccatggacttttctcgatttcgggcttgatttacaaccctgcatagatttgattgagaggccggccaatccccctggcttactggcccttcttgatgaggaatgctggttccctaaggccacagataaatccttcgtggagaaagtggctcaggaacaggggggccatcctaagttccagaggcccaggcatctccgagaccaggccgacttcagcgttctgcactacgcaggcaaggtggactataaagccaacgaatggctgatgaagaatatggatcctcttaatgataatgtcgctgcactgctgcatcagagtacagataggctgactgccgaaatctggaaagacgagcacgggggttttcagcagttcagctttctgggctcattcccaccaagcccccccgggagcgcggaacgttgttcttcagctatatcacctccgggcgtcgaggggatagtgggcctggagcaggttagcagtctcggggacgggccccctggggggcgtccccgcagaggcatgtttcggacagttgggcagctctacaaagaaagcttatcgcggcttatggcaacactgtccaacaccaatccatcattcgtcaggtgcatcgtgcctaaccatgaaaaacgtgccgggaaacttgagccacggctggttttagatcagctccgatgtaatggtgtgttggaaggcatacgcatatgtcggcagggtttccctaaccggatcctcttccaggagtttcgacaacgctacgagatcctgacacccaatgccattccaaaaggctttatggatggcaagcaggcatgcgagaaaatgattcaggctcttgagctggatcccaatttgtaccgcgtcggccagtctaagattttcttcagggcgggggtactggcccagctagaagaagaacgtgatttaaaagtgaccgacataatcgttagctttcaagctgcagctagggggtacctggcccggagggccttccaaaagcggcagcaacagcaaagcgccttgcgcgtaatgcagcgtaactgcgccgcctacctgaagctccgtcattggcagtggtggcgcttattcacaaaagtcaagcctttactccaggttacccgccaggatgaagtgctacaggcaagggcgcaagagctgcaaaaggtgcaggaactgcaacagcaaagtgcccgagaagtgggcgagctacagggtcgggtcgcccagttggaagaggagcgagcacgcctagctgagcagctgcgggccgaagcagagttgtgtgctgaagccgaggagacccgtgggcggctggcggccagaaaacaggagctcgagctggtggtaagcgaactcgaggcacgggtcggggaggaggaggagtgctctagacaaatgcaaaccgagaaaaaaaggctccagcagcacatccaggagcttgaggctcacttggaagcagaagagggagctaggcaaaaactgcagctggagaaagtgactaccgaagcgaagatgaaaaaattcgaagaggatctgctcctgctggaagaccagaactccaaacttagtaaagagagaaagttgctggaagatcggctggcggaattctcttcccaggccgccgaggaagaggaaaaggtgaagtcattgaacaaattgagactcaaatatgaagccacaatcgccgacatggaggaccggctgcgtaaggaggagaaggggaggcaggagctggagaagctgaagaggcgccttgatggcgagagcagtgagcttcaggagcagatggtggagcagcagcagcgcgctgaagagcttagggctcagctcgggcgaaaggaagaggagttgcaggcggcattagcgagagccgaggacgaaggcggcgcccgggctcagctgctgaagtccctgcgggaagcccaagctgcactcgccgaagcccaggaagatctcgagagtgagcgggttgcccgcaccaaggccgagaaacagaggcgggatttaggcgaagagttggaagccctccgtggcgaattagaggatacactcgactctacgaatgcccaacaggaacttcgctctaagcgagagcaagaagttacggagctcaagaagactctggaagaggaaactcgcattcacgaggcagcggtgcaagagctccgccagagacacggtcaggccctcggggagctcgcagagcagcttgaacaggcccgaaggggcaaaggtgcctgggagaagacgcgcctagctctcgaagccgaagtgtcagagttgcgcgcagagttgtcctccctgcagacggccagacaggaaggcgaacagcggcgtcgtcgcttggaactgcagctgcaggaggtgcagggccgggcgggagatggggaacgagcccgcgccgaagcggccgagaagctgcagcgggcacaggccgaactggaaaacgtgagcggtgctcttaacgaggccgaaagcaaaaccataaggctctcaaaggaattaagcagtacagaagcacaactgcacgacgcccaggagctgttacaagaagaaacgcgcgccaagctggcactgggatcacgcgtgagagccatggaggccgaggccgccggcctgcgagagcagctggaagaagaagcagcagctcgcgaacgagctggacgggagctacagacagcccaagcacagctgagtgagtggcgacgaaggcaggaagaagaggccggtgcgctcgaagccggtgaggaagcccgcagacgggcagccagggaggcggaagccctgactcagcgcctcgccgagaaaactgagaccgtcgatagacttgaacgcgggagaaggcggttgcagcaggagctggacgacgccacgatggacctcgagcagcagcggcagttggtgagcacactcgagaagaagcagcgtaaatttgaccagttacttgccgaggagaaagcggccgttttgagggctgtagaagaacgggagcgggctgaagcagaagggcgcgaacgagaggccagggcactgtctctcaccagagcattggaggaagagcaggaggcccgggaggagctcgagaggcaaaaccgggcactgagagccgagcttgaagccttgctatcatccaaggatgatgtgggaaagtccgttcacgagctagagagagcctgccgcgtagcagaacaggcggccaatgatctgcgggcacaggtgacagagctggaagatgagttgaccgctgcagaggatgccaagttgagactggaagtgaccgttcaggccttgaaaacacaacacgagcgcgatctgcagggtcgcgacgaggctggagaagaaaggaggcggcagcttgccaagcagctcagagatgctgaggtggagcgcgatgaagagcgtaaacagaggactctcgctgtagccgcccgaaagaaactcgaaggcgagttggaagagttaaaggcacagatggcatccgcaggccagggaaaagaggaagcggtgaagcagctgcgaaagatgcaggctcagatgaaggaactgtggcgggaggtagaagagacacgcacctcacgggaggaaattttttcccagaatagggagtcagagaaaagactgaagggcttagaggcggaggtgttgaggctacaggaggaattggcagcctctgacagagcaagacgccaggcccagcaggacagagacgagatggcggatgaagtagcgaatggcaatctgagcaaggccgcaatcttggaggagaagcgccagcttgaaggccggttaggccagctggaggaagagcttgaggaggagcaatccaatagcgagctgctgaacgaccgttacaggaagctacttctccaagtggagtccttgactactgagctgtccgctgaaaggtctttcagcgctaaggccgagtctggacggcaacagttggaaagacagatccaggaattgcggggtaggctgggagaggaagatgccggggcccgtgcgagacacaagatgacgatcgcggccttggaatctaagttagcacaggctgaggagcagctggagcaggagaccagagagcgtattctctccggtaaactggtgaggagggctgagaagagattgaaagaagtggtcctacaggtcgaggaggagcgcagggtggcagatcagctgcgtgaccagctggaaaaggggaatcttcgggtaaagcaattaaagcggcagttagaggaggctgaagaggaagcgagtagggctcaggctgggagaaggcggctacagcgtgagttagaagatgtgaccgaatcagctgagagcatgaacagagaagtcaccactctgagaaaccgcctgaggaggggacccctaacttttacaactcgcacggtaaggcaggttttccggctagaggagggcgtggcttctgatgaagaggcagaggaggcccaaccgggatctggcccatcccctgagccagaaggaagcccccctgcccatccacagtag

SEQ ID NO: 59102 - DNA, 6111 bp, Artificial Sequence
  derived and/or modified sequence
atggccgccgtgaccatgagcgtgcccggccggaaggcccccccccgcccaggaccggttcctgaggcggcacagcccttcctcttcactccgagaggcccctcagctggcggtggaccgggctcaggcacaagtccgcaggtcgagtggaccgcacgaaggttagtatgggtgccaagcgagctgcatggctttgaagccgccgccttaagggatgagggggaggaggaggctgaggtggagctggcagagagtgggagaagactaaggttacctcgggatcaaattcagaggatgaacccccctaaattctctaaggccgaggacatggctgagttgacctgtctcaacgaagcgagcgtgttacacaacttgcgagagcgatactatagtgggctgatttacacttacagtggactattctgcgtcgtcatcaatccctacaagcaactgccaatttatactgaagccatagtggagatgtaccgtggaaagaagaggcacgaagtgccgcctcacgtgtacgcagtgactgagggggcgtatcgcagtatgctgcaggaccgtgaagaccagtctattctgtgcaccggggagtcaggggcaggaaaaacagaaaataccaagaaggtcattcaatacctggcccacgttgcgagcagcccaaaaggacgaaaagaacctggtgtgcctgcgtctgtttctactgttagctacggtgaactggaaaggcagcttctccaggccaacccaatcctggaggccttcgggaatgcgaaaaccgtaaaaaatgacaattcatctagatttggcaaatttattcggatcaatttcgatgtggccgggtacatcgtgggagccaacatcgaaacgtaccttttggaaaagtccagagctattcgacaggccaaggacgaatgctcatttcacatcttctaccagcttctgggcggagccggagagcagttaaaggcagacttattactcgagccctgcagccattaccggtttctcacaaacggcccaagttccagtcccggtcaggagagggagctttttcaggaaaccttggagtccctgcgcgtcctcggattctcccacgaggaaatcatatctatgctgcggatggtctctgcggtgctacagtttgggaatatcgctcttaaacgggagagaaacaccgaccaggcgaccatgcccgataacaccgcagcccagaagttgtgccgattgctgggcctgggtgtgaccgacttctcaagggccctcctgactccccgcataaaagtgggccgggactacgttcagaaagcccagactaaagaacaggccgatttcgcactggaagcgctagcaaaggcgacctacgaaagactgttccgctggttagtcctgagactcaacagggccctggatagatcgccccgccagggcgccagtttccttggcatcttggacatcgcaggtttcgagatcttccagctgaactcattcgagcagctctgcataaactatacgaatgaaaaactgcagcagctattcaatcacacaatgttcgtgctagagcaagaggagtatcagagggaagggattccgtggacattcctggattttggcttagatctgcagccatgtatagatctgatcgagagaccggctaacccccccggcctgctagctttgttggatgaggagtgctggttccctaaggccactgacaagagttttgtagagaaggtggcccaggaacaggggggccatcctaagttccaacgaccccggcatctgagagaccaggctgactttagcgtcttgcattacgccggaaaagttgactacaaggctaacgagtggctgatgaaaaacatggaccctctgaatgataatgttgctgctctgctgcaccagtcaaccgataggctaacagcagaaatctggaaggatgaacacggcgggttccaacagtttagttttttggggtccttcccgccatctccaccgggtagcgctgagcggtgctccagcgccatctccccacctggagtcgaagggatcgtgggcctggaacaggtgtcatctttgggcgacggaccacccggtggtaggcctagacgcgggatgttccggacagtgggccagctgtacaaagaaagcctgagccggctgatggcaacactgagcaacaccaatccctccttcgtccgttgcatagtccccaaccatgagaagagggctggaaagcttgagcccagactggttctagaccaacttagatgtaatggagttcttgaaggcattagaatctgcagacaggggttcccaaaccgaattctgtttcaggagttcaggcaaaggtacgagattctcacccccaatgcaatccctaagggatttatggacgggaagcaggcctgcgagaagatgattcaggcactggagctcgaccccaacctctatagggtgggacagagcaagatcttcttccgcgccggagtcctggctcagctggaggaggaacgggatctcaaagtcactgatattattgtgtcgtttcaggccgccgccaggggttacctggcccgtcgtgcctttcagaaacgccagcagcagcagtcggctctaagggtgatgcagcggaattgcgccgcttacctgaaactgagacattggcaatggtggcgcctgttcactaaggtaaaaccgctgttgcaggtcaccagacaggatgaagtgttacaggccagagcgcaggagctccagaaagtccaagaactgcaacagcaatcagctagagaggtcggcgaactgcagggcagagttgcacaactggaggaagaaagggcccgcctggcagagcagttgcgcgctgaggctgagctatgtgcggaggctgaagaaacccgaggacgccttgcagcgcgaaaacaagaactggagcttgttgtatctgagctcgaagcgcgggtgggagaggaagaagagtgcagtcgccagatgcaaaccgagaaaaaacgcctccagcagcacatccaagagctggaggcgcaccttgaggccgaggagggggctaggcagaaactgcagctcgagaaagtcacaaccgaggctaagatgaagaagtttgaagaagacttactgctccttgaggaccaaaattctaagctttccaaggaacggaaattgttagaagaccgcctggcagaattcagtagccaggccgcagaagaagaggaaaaggtaaagtctctcaataagctccgcctgaaatatgaggccacaatcgctgacatggaagaccggttaagaaaggaagagaagggaagacaggaactcgagaagctcaagagacgcctagacggtgaaagcagcgagctgcaagagcaaatggtggaacagcagcaaagggcggaagagttaagagcacagttaggtcgcaaagaagaggaactccaagctgccttggcaagagctgaagacgaaggcggcgcaagagctcaactgcttaagtcattacgggaggcacaggccgccctggcggaggcgcaggaggacttagaaagcgaaagagtggcccggactaaagcagaaaagcaaagacgggaccttggggaggaactcgaagctctgagaggggagcttgaggatacactcgactccactaacgcccagcaagaattgcgatctaaacgcgaacaggaggtgaccgaacttaagaaaacactagaggaggagacccggatccacgaggccgcggtgcaggagctcagacagcgccacggacaggccctgggtgagttggcagaacaactagaacaagcaagaagagggaagggtgcttgggaaaagacaaggcttgcactcgaagcagaggtgtctgaacttcgagccgaactttccagtctccagactgctcgacaggagggcgagcagcggcgccgccgcttggaactgcaattacaggaagtacagggacgagctggagatggcgagagagcccgagcggaggcggctgaaaaactccagagagcgcaagccgagttagagaatgtgagcggggccctcaatgaagcagaatcaaaaactatacggcttagcaaggaactgagctcaactgaagcccagctccacgacgcccaggaactgctccaggaagagaccagggccaagctggcccttgggagtcgggtgcgcgccatggaagccgaggcggccggcttgagagaacagttagaagaagaagccgcagctagagagcgcgctggcagagagctccaaaccgctcaggctcaacttagcgagtggcgacggagacaggaggaggaggcgggagccctcgaagcaggcgaggaagcaaggcgacgcgcagcccgggaagctgaggccctaacccagaggttagcggaaaagaccgagaccgtcgatagactcgagagaggtaggagacgactgcagcaggagctagacgatgccactatggacctagagcagcagcgacagctggtgtccacgctggagaaaaaacagagaaagtttgaccagttgctcgcagaagaaaaagccgcagtattgcgtgcggtagaggagcgcgaaagggccgaagccgagggacgcgagcgggaagcacgagccctctctctgacgagagctctggaggaagaacaagaggcacgcgaggagcttgagcgccaaaaccgagccctgagggccgaattggaggcgctcctcagttccaaagacgacgtcgggaagagtgtccacgaattagagagggcttgtcgtgtggcggaacaggcggcaaatgacctgagggcacaggtgactgagctggaggacgagctcaccgccgctgaggatgcaaagctgaggcttgaagttacagttcaggccctcaagacccagcacgagcgcgatctccaggggagggatgaggccggcgaagaacgccgacggcagttagcaaagcagctgcgggatgccgaagttgagagagatgaagaacgcaagcagcgaacgctcgcagttgctgcacgcaaaaagttagaaggcgagctagaggaactgaaggcgcagatggcgtccgcggggcaagggaaagaggaggcagtgaagcagctccggaaaatgcaggcccaaatgaaagaactgtggagggaggtcgaagagactaggacctctcgggaagagatcttctctcaaaacagggaaagcgagaaacgccttaaaggcctagaggccgaggtcctccgcctccaggaagagctggcggcctccgatagggcgcgtcgacaggctcagcaggacagggatgaaatggcagatgaagtggctaatgggaatctatctaaggcagcaatccttgaggaaaagaggcaattagaaggcaggttgggtcagctggaggaggagctggaggaagagcagtcgaactcagagttactaaacgaccggtataggaagctgttgctgcaggtagagagcctaacaactgagttatccgcagaaagatcttttagtgctaaggcagaatccggcaggcagcagcttgaaaggcagattcaggaattgcgcggcaggttgggggaggaagatgctggagcacgcgctcgacataagatgacaattgccgcactagagtccaagttagctcaggccgaggagcagctggagcaagagactagagagcggattttgagcggaaaactggtccgccgtgctgagaagcgattgaaagaagttgtgcttcaagtagaggaagaaaggagagtcgcagatcagttaagagaccagttagagaaagggaatctgcgggtcaagcagctgaagcgccaattggaagaggcagaagaggaggcttccagagctcaggctggacgacgacgactgcagcgggagctggaggacgtcaccgagtccgccgagagcatgaacagagaagtgactactctacgcaaccggcttaggcggggtccccttacattcactacgcgaacagtcagacaggtattcaggcttgaagagggcgtggcctctgatgaggaagctgaagaagcccagcccggttccggaccctcgcctgagccggaagggagtccccctgcccacccacagtag

SEQ ID NO: 59103 - DNA, 6087 bp, Artificial Sequence
  derived and/or modified sequence
atggccgccgtgaccatgagcgtgcccggccggaaggccccccccaggcccggccccgtgcccgaggcagctcagccattcttattcactccccgcggccccagcgccgggggaggaccaggaagcggcacatccccccaagtcgagtggaccgcgcggcggttagtctgggttccgagtgagctccacggtttcgaagccgctgctctgcgggacgagggcgaagaggaggctgaggtggaactggccgagtccggccgcaggctgcggctgccacgagaccagattcagcgcatgaacccgccaaagtttagcaaagccgaagacatggccgaactaacatgccttaacgaggcctcagttctgcataacttgagagaaaggtactactccggccttatctacacttattcaggcctgttttgtgtggtgatcaacccatacaaacagctgcctatctatacagaagctattgtcgaaatgtacaggggtaagaagaggcacgaagtgccaccgcatgtgtacgccgtaaccgagggggcatacaggtcgatgctgcaggacagggaagatcagtctattctctgtactggggagtccggtgcagggaagactgaaaacacaaagaaagtgattcagtatttagctcatgtggctagcagtccaaaaggcaggaaggagcctggagtgcctggggagttagaaaggcagctgcttcaggctaacccaatcctggaagctttcggcaacgctaagaccgttaagaatgataacagctcccggttcggcaagttcatacgcataaattttgacgttgctggttatatagtcggcgcaaacattgaaacgtacctgctcgaaaagagtcgagcaatacgccaggctaaagacgagtgctcattccatatcttctatcaacttctgggaggagctggcgagcaattgaaggctgatctgctgctggagccctgctcccactacaggtttctgactaacggaccctcctcaagccccgggcaggaacgcgagctttttcaggaaacactggagtcactgcgcgtgctgggcttctctcatgaagagattatctctatgctgaggatggtttcagccgtgctgcagtttggaaacatcgccctgaaaagggagcgtaacactgatcaagcaacaatgccagacaacactgccgcacaaaagctgtgtcgcttactcggcctgggggtgactgactttagccgcgcacttctgacacctagaatcaaagtgggcagggactacgtccaaaaagcccagacgaaagagcaggctgactttgccttggaagcccttgccaaggctacttacgagaggttattccgctggttagtgctcaggctgaacagggcccttgaccgttcaccccggcagggcgctagctttctggggatcctggacatcgcaggttttgagatatttcagttaaatagtttcgaacagctgtgtatcaattatacaaacgagaaattgcagcaactatttaatcataccatgttcgtcttggagcaagaagaatatcagcgtgaaggaataccatggaccttcttggattttggcttggacctgcagccctgtattgatctgatcgagagacctgctaatcctccaggcctgttagcactgctcgacgaagagtgctggtttccaaaggctaccgacaaatcctttgttgaaaaagtcgcccaggaacaaggagggcaccccaaatttcagcggcccagacacctacgagatcaggctgatttttctgtgttgcactatgccgggaaggttgattacaaagcgaacgagtggctgatgaagaatatggatccgctgaatgataacgtcgcagcgctgttacaccagtccacagatcgcttgaccgcagagatatggaaggatgaacacggtggcttccagcaatttagcttcctcggaagctttcccccttccccacccgggagcgctgaacggtgtagcagtgccatctcccccccaggggtggaaggtatcgtgggcctcgaacaggtcagctccttaggcgacggtcctccaggtggccgccccagaaggggcatgtttcggactgttggccaactatacaaggagagcttgtccagattgatggccaccctcagcaacacgaatcctagctttgtcagatgcattgttccgaaccacgagaagcgggcggggaaactcgagccacgcctggtcttggatcagctcaggtgtaatggtgtcctcgagggcattaggatctgtaggcagggcttccctaatcgcatcctatttcaggagtttaggcaaagatacgaaattctgactcctaacgcaataccgaaaggcttcatggacggaaagcaggcttgtgaaaagatgattcaggcactggaattagaccccaacctctaccgggtgggccagagcaaaatcttcttccgagctggcgtgctcgcgcagctggaagaggagagagatctaaaagtgaccgacattatcgtgagctttcaggccgccgccagggggtatctcgcccgacgcgctttccagaaaaggcaacaacaacagtctgccttgagggtcatgcagaggaactgcgctgcatatctcaagttaagacactggcagtggtggcggctttttaccaaggtcaagcccctgctgcaggtcactcgccaagatgaagtgctccaggcccgtgcacaagagcttcagaaggttcaagagttgcagcagcagagtgcgagggaagtcggagaattacaggggagagtagcacagttggaagaagagagggcgagactagcggaacagctccgtgcagaagcggagctttgcgcagaggctgaggagaccaggggacggttggcagcacgcaagcaggagctggagctggtcgtgagtgaactcgaggccagagtgggggaagaggaggagtgctctaggcagatgcagaccgaaaagaagcgactacagcagcacatccaggagctcgaagcccacctggaggctgaggagggtgctcgacagaagctgcagctggaaaaagtgacaacagaggctaaaatgaagaagtttgaagaggatctgctcctgctcgaggaccaaaattcaaagttatccaaagagaggaaattgctggaggatcgcctcgccgagttttccagtcaggccgcagaggaggaggaaaaggtaaagtcattgaacaagttgaggctcaagtacgaagctacaatagctgatatggaggatagactgcggaaggaggagaagggcaggcaggaactagagaagcttaaaagacggttggacggcgaatcaagcgaactgcaagagcagatggtcgagcaacaacaacgtgccgaagagttgcgagcccagctaggccgcaaggaagaagaactgcaggccgccctggcgagagcagaggacgaaggtggagccagggcacagcttctaaagtccttgcgggaagctcaggcagccctggcggaggcccaagaggaccttgaatcagagcgtgtggctaggaccaaagctgagaaacagcgacgagacctgggagaggagttggaagctctgcgaggcgagttggaagataccctggacagcacaaacgctcagcaggagctgcggagcaagagagaacaggaagttactgaattaaagaaaacattggaagaagagacacgtattcacgaagcagccgtgcaggaactccggcagcgacacggacaagctttgggtgagctcgccgaacaattagagcaggctcgaagaggcaagggagcttgggagaagacacggctagctctggaggctgaggtttcagagctcagagccgaactatcgtctctccagaccgcaagacaggaaggggaacagcgccgcaggcggctggaactgcagctgcaagaggtccagggaagagccggggacggcgaacgcgcacgcgctgaagctgccgaaaagctgcagcgcgcccaggctgaattggaaaatgtttcaggggccctcaacgaagcggaatccaagacaattagactgagtaaggagctttcttccacagaggcccagcttcacgatgcacaggaacttttgcaagaggaaactcgggctaagctggcattaggaagccgcgtgagagcaatggaggcagaagctgcaggactccgggagcagctagaggaggaggccgcggcgcgggagcgcgccggacgggaactgcagacggcccaggctcagctatcagagtggaggaggcgacaggaggaagaagccggagctctcgaggctggggaagaagccaggaggagggccgccagggaggctgaagcgttgacccaaaggttggccgagaagactgaaaccgtggatagattggagagagggagacggaggcttcagcaggagctcgacgacgccactatggaccttgaacaacagcgccagctggtctcgacattggaaaagaagcagcgaaagtttgaccagcttttggccgaagagaaggccgcggtcctgagggccgtggaagagcgggagagagctgaggccgagggacgagaacgtgaggcccgcgccttgagtcttaccagagccttagaggaagagcaggaggctagggaggaactggagcgccagaatcgcgccttgagagccgaattagaagctctgctgtccagtaaagatgatgtgggcaaaagtgtccatgagctggaaagagcgtgtcgggttgcagaacaggctgcaaacgatcttagagctcaggtcaccgagctggaagatgagttgaccgcggctgaagatgctaagctgagacttgaggtaacggttcaggcattaaagacacagcacgaacgcgacctccagggacgcgacgaagccggcgaggagaggcgccggcaactcgccaagcaactgcgggatgctgaggtcgaacgcgatgaagagcggaaacaaagaactttggctgtagccgcccgaaagaagttggagggagaacttgaagaacttaaggcacagatggcttctgcaggtcagggaaaggaagaagctgtcaagcagcttcgcaagatgcaggcccagatgaaggaactttggagggaggtagaagaaacccgaacctctagggaggaaatattcagtcagaacagggagagtgagaagaggctgaaagggctcgaagccgaggtccttcgtctgcaggaggaactagcagcctctgatagagcgcgacgccaagcccagcaggatagggacgagatggccgacgaggttgcgaacggaaacctgtcaaaagccgcgatacttgaggaaaaacggcagctagagggacgtctgggtcagctggaggaagaactggaagaggaacagtcaaatagcgagctgctgaacgacaggtaccggaaactgttgctgcaagttgaatcgctgaccaccgagctgagcgcggaaaggtcattctccgccaaggctgagtccggtaggcagcaactggagcgacaaatacaggagttaagaggacggctgggagaagaggacgccggggctagggccagacacaagatgacaatcgccgccctggaaagtaaattggcacaggctgaagagcaattagaacaagagaccagagagagaatcctctctggcaagctggtgagacgcgccgagaaaagactaaaggaggtagtgctgcaggttgaggaggaacgccgagtagcagatcagctgagagaccagcttgaaaaaggcaacctccgggtgaagcagctgaaacggcagctggaggaagcagaggaggaagcatctagagcccaggctgggcgtagaaggctgcagagagaactcgaagacgtgactgaatctgcagaatccatgaacagagaggtcaccaccttgagaaaccggctgagacggggcccactgacatttactaccaggactgtaagacaggtttttagactagaggagggcgtcgcttcggacgaggaagcagaagaagcccaacctggcagtgggccttctcctgaacctgagggatctcctcccgcccatccacagtag

SEQ ID NO: 59104 - DNA, 6111 bp, Artificial Sequence
  derived and/or modified sequence
atggccgccgtgaccatgagcgtgcccggccggaaggcccccccccgacccgggccagtaccggaagctgctcagccctttctgttcacgccccgcggtccctctgccggcggaggtcctggtagtgggacctcacctcaggtcgagtggacagccagaaggttggtatgggttccaagcgagttacacggctttgaggccgcagccttgagggatgagggagaggaagaggctgaggtggagcttgccgaaagtggccgaagactccgcttaccccgggatcagatccagagaatgaatccccctaaattttccaaggccgaggacatggcggaactgacctgtctgaacgaagctagcgttctccacaatttaagggaaagatactacagtggactgatctacacatattctggcctgttctgtgttgtgatcaacccctataagcagctgcccatctacacagaggccattgtggaaatgtacaggggcaagaaaaggcatgaagtgcctccacatgtttacgccgtcactgaaggcgcatatcggtcaatgctgcaggacagagaagaccagtctattttgtgcacaggggagtccggagccggtaaaactgagaacaccaagaaagtgattcagtatcttgcacacgtggcttccagcccgaaggggcgcaaagaacccggtgtgccggtaagtaacccagccctgggttggggcgagctggaaaggcagctcctgcaggccaaccccatcctggaggcctttggcaacgcaaaaacagtgaaaaacgataatagttccagattcgggaagttcatcaggattaacttcgatgtggcaggctatatcgtgggcgccaacatcgaaacctacctgctagagaagtcccgggcaattagacaggccaaagacgaatgttcattccacattttttaccaacttttgggcggggctggcgaacagctgaaagcagatttgctgttggaaccatgctcccattatagattcctaactaatggcccgagctccagccccggccaggagcgcgagctgttccaggagacactggaatccctgcgggtgttgggattttcacatgaagaaattatctcaatgttacgcatggtttccgcagtcttacagtttggcaacattgcccttaagcgcgagcgcaacactgaccaggccacaatgccggataacactgcggcacaaaaactgtgccggctcttgggcttgggcgtgactgacttctcacgtgctctattgactcctaggatcaaggtaggaagggactatgttcagaaagcccaaaccaaagagcaggcggactttgccctcgaggccctggccaaggctacctacgagaggttgttcagatggttggtgcttcggcttaatcgtgcgctggataggagtcctcggcaaggcgccagcttcctcggaatcctggacatagctgggttcgagatttttcagcttaactcattcgagcaactgtgcattaactataccaacgaaaaacttcagcagctgttcaaccacaccatgtttgttctcgagcaggaggagtatcagagggagggaattccatggacatttctggactttggtcttgatcttcagccttgtattgacctcatcgaacgaccagctaatcctccgggcttactcgctctgctcgatgaggaatgctggtttcctaaggccaccgacaagtctttcgtggaaaaggtcgcacaggaacagggcgggcaccctaaattccagcgcccaagacatttgcgcgatcaagccgacttctccgtcctacattacgccggtaaggttgattataaggctaacgagtggttgatgaaaaatatggatcctctcaatgacaatgttgccgcattactacaccagtctacggacagactgacagccgagatctggaaagatgaacacggggggtttcagcagttcagcttcctaggaagctttcctcctagtcccccaggctccgcagaacggtgttctagcgctatcagcccacctggagtggaagggatcgtgggactggaacaggtgtcctccctgggcgatggaccacctggagggcggcctcgccggggcatgtttcggacagtgggccagctgtacaaggaatctctgtctcgcctgatggctaccttatctaacactaatcccagctttgtcaggtgcattgtgccaaaccatgaaaaaagggccggtaaactcgagcctcgactggtgttggatcagttgcggtgcaatggggttctggaaggaatccgcatttgccgccagggtttcccaaatagaatcttgttccaggaattccgacagcgatatgaaattctgacacccaatgccattccaaaagggttcatggacggtaagcaagcctgcgaaaaaatgatccaggccctggaacttgatcccaacctatatagagttggtcagagtaagatcttttttcgcgctggagtactggcccagctcgaagaggagcgggatctgaaagtcaccgatattattgtttctttccaggctgctgcgagaggttacctggccagaagagcattccagaagcgccagcagcaacagagtgctctcagagtcatgcagcgaaactgtgctgcgtacctgaaactccgccactggcagtggtggcggttatttacaaaggtcaagcctctgcttcaggtgacacggcaagatgaggtcctacaagcacgcgctcaggaattgcagaaggtccaagaactccagcagcaatctgcgcgggaagtgggggagctccagggcagggttgcacagctggaagaagaacgggcccggctggctgagcagctgagggccgaagccgaactctgcgccgaagcagaggagactcgcggaaggttggccgcccggaagcaggaattggaactcgtggtgtccgagctggaggctagagtgggcgaggaggaagagtgtagccggcagatgcagacagagaaaaagcgcttacagcagcacattcaggaactggaggctcacctggaggccgaagaaggcgctcgccagaagttgcaactggaaaaggttacgactgaagccaaaatgaaaaaatttgaggaggatctgctgctcctcgaagatcagaatagcaagctatcaaaggagagaaagctgctggaagacagactggctgaattttcaagccaggccgctgaagaggaggagaaggttaaaagtctgaataaactgagactcaaatatgaagcaaccattgccgacatggaggatcggctccgcaaggaggaaaaaggacgccaggaactggagaaactgaaaaggcgtttggatggggagtcttcagagctgcaggagcagatggtcgaacagcagcagagggctgaggagttgcgagcgcagctcggacgcaaagaggaggaattacaggctgcgctcgcccgggcggaggatgagggtggcgctagagcccagttgcttaaatcccttcgggaagcccaggctgccttggccgaagcacaagaagacctggagtccgagcgggtggcccggacaaaggccgagaagcagcggagagacctgggcgaggaactcgaggcccttcggggtgaactcgaagatactctagacagcacaaatgcccagcaagaactgcgctccaagagagagcaagaggtaaccgagctgaaaaaaaccctagaagaagagacccgcatccacgaagctgccgttcaagaattgcggcagcgacacggacaggccctgggagagctcgcagagcaactagagcaagcccgaaggggaaaaggggcctgggagaagactcggctggcccttgaagccgaggttagcgagctgagggcagaactatctagcctacagactgcgaggcaggagggcgagcaaaggcgccggagactggagctgcagctgcaggaagtgcaaggacgggctggggatggtgagagagcaagagcagaggctgccgagaagctgcaaagggcccaagccgaactagagaatgtttctggagccctgaacgaagcggaatctaagaccattcggctgtccaaggagctgtcgtccactgaggcccagctacacgacgctcaggaactgttacaggaggagacccgcgcaaagttagcactggggtcaagggtgagagccatggaagctgaagcagccggactgcgggagcagctagaggaggaggccgcagccagggaacgcgcaggtagagaactgcagactgctcaggcccagctgagcgagtggcgacgtcgacaagaggaggaggccggagccctcgaggccggagaggaggccaggagacgcgctgccagggaggctgaggcattgacacagcggctggcggagaagacagagacggttgaccgcttggaacgcggtcgacgaaggttgcagcaggagttagacgatgccacaatggatttggaacagcagaggcagttggtgagtacgctggaaaagaagcaaagaaagttcgatcagctgctggccgaggaaaaggcagccgtgctaagagccgttgaagaacgcgaaagggctgaagccgagggaagagaacgggaagcgcgggcactcagcttgaccagagcgttagaggaggaacaggaggctagggaggagttggaacgacagaacagggccttaagagcagagcttgaagccctcctatcttctaaagatgatgttggtaaatcggttcatgaattggagcgggcttgcagggtcgcagaacaagccgctaatgatctgcgcgcacaggtcacagaactggaggatgagttgaccgccgccgaagatgcgaagctccggcttgaggttactgttcaagctcttaagactcagcacgaacgagatcttcaggggcgggacgaggccggggaggagcggcgacgtcagctcgcaaagcaactgagagatgctgaagtggaaagagatgaagagaggaaacagagaactctagcagtcgccgccaggaaaaagcttgagggagaactggaagaactgaaggctcaaatggcctccgccggccagggtaaggaagaggccgtgaagcagctgaggaagatgcaggctcagatgaaagaactgtggagagaagttgaggagactcgcacttcacgcgaggaaatattcagccagaaccgagagtcggagaaaagacttaaaggcctggaggccgaggtgctgaggctccaggaggaattagctgcgtccgatcgcgctagaaggcaggctcagcaggatcgagatgagatggcagatgaagtggctaatggcaacctgagtaaggcagctatcctagaagagaagcgacagttggaaggtcgtctcggccaactggaggaggagcttgaggaggagcaatctaatagtgaattgttgaacgatcgataccggaagctcttgctacaggtggaaagcctgacaaccgagctttccgcggagcgctcattctctgccaaagccgagagcggacgccagcagcttgaaagacagatacaggagctgcgcgggcgccttggcgaagaagatgctggagccagggcccgacataagatgacgatcgcagctctggagtcaaagctggcacaggcggaggagcagctcgaacaggagacaagggaaagaatccttagtgggaagctggtccggcgtgcagaaaaaagactgaaggaagtggtgcttcaggtagaagaagagcggcgagtggcagaccagctgcgtgaccagctggaaaagggtaatctaagggtgaaacaactgaagcgacagttggaggaggctgaagaggaggcgtcgagagcacaggcaggccgtcgacggctgcagcgggagcttgaggacgtgaccgaaagcgccgagtcaatgaaccgggaggtgactacactccggaatcgtttgcgcagggggcctctgacgtttaccacacgaacagtacgccaggtcttccggctcgaggagggcgtggcctctgacgaagaggcagaggaggctcagccaggctcaggaccctccccagagccagaggggtctccacccgcgcatccacagtag

SEQ ID NO: 59105 - DNA, 6110 bp, Artificial Sequence
  derived and/or modified sequence
atggccgcagtcacaatgtccgtgcctggcagaaaagcccctcccagacctggcccagtgcccgaggctgcgcagcccttcctgtttaccccaaggggaccatccgccggtgggggacctggatcaggcacatcccctcaagtagagtggaccgccaggcgcttagtctgggtcccctctgagctgcacggctttgaagccgcagccctacgcgatgagggagaagaggaagcggaggtggagttagccgagtccgggagaagactccgcctgccacgcgatcagattcagagaatgaacccccctaagttttccaaagcagaggatatggccgagcttacatgcctgaatgaagccagtgtcctccacaatctccgggaacgctactactccggccttatttacacatactcaggacttttttgcgtcgtaattaacccatataaacagctccctatctacactgaggcgatcgttgaaatgtaccggggaaaaaagcgacatgaagttccaccccatgtctacgccgttaccgagggcgcttaccgctctatgctgcaggaccgcgaggaccagtctattctttgcacgggagaatcgggcgcaggaaagacggagaataccaagaaggtcattcagtacctagcccacgtagccagctcgcccaagggccgaaaggaacctggagtacccgcttccgtgtcaacggttagttatggagaactcgagcgccagctgcttcaggcaaaccccatcctggaggctttcggcaatgcgaagacggtaaagaatgacaacagcagccgctttggcaagtttattcggatcaatttcgacgtggcagggtatatcgtcggagctaatatcgagacttatttactcgagaaaagtagggctatccgtcaggcaaaagatgagtgtagcttccacattttttaccagctcctcggaggcgcaggggaacagctcaaagctgatctgctgctggagccttgtagccactatagattcctcacaaatggaccctcatccagcccagggcaggagcgcgaactctttcaggagacgctcgagtccctgcgggtccttggcttctcccatgaagagatcatttctatgctacgtatggtgtccgccgtgctgcagtttggaaacatagccttgaagcgcgagcgcaataccgatcaagctaccatgcctgataatacagccgcacagaaactatgtcggctgctggggctgggcgttactgacttctcccgggctctgctcaccccaagaatcaaagtggggagagactacgttcagaaggcccagaccaaggagcaggccgacttcgcgctcgaggccctggctaaggcgacgtatgagcgcttgtttcgctggctggtccttcgattgaatcgagcgttagatcgctcgccacgccagggagcatcgtttctaggcatactggatatcgccggtttcgagatctttcagctcaactcattcgaacagctgtgcattaattataccaacgaaaagttacagcagttgttcaaccacaccatgtttgtgctggagcaggaggaataccagagagagggaattccgtggacattcctggatttcggactcgaccttcagccctgcatcgacttgatcgagagaccagccaacccacctggtttgctggccctcctcgacgaagaatgctggtttccaaaggccacggacaagtcgtttgtggaaaaggttgctcaggagcaaggcggtcaccccaagtttcagcggccacggcatctccgcgatcaagcagacttttccgtcctccattatgccggtaaagtagactataaggcaaatgagtggctaatgaagaatatggatcccctgaatgacaatgtggcagcactgcttcaccagtccacagaccgtctgacagccgaaatttggaaagatgagcacgggggttttcaacaattctcctttctgggcagtttcccccctagcccccctggcagcgcagagcgttgttcatccgctatttcccctcccggtgtcgagggaatcgtggggttggagcaggtgtcctcccttggtgacggtcctcctgggggtcgccctcgcagaggcatgtttcggacagtcggtcagctctacaaggagagcctatctcggctgatggcaacactcagtaacacaaatccttcctttgtgcgctgtatcgtgccaaatcacgagaaacgggctgggaaactggagccgaggctggtgctggaccagctccggtgtaatggcgtgcttgaaggaatcagaatctgcaggcaggggtttccaaatcgaatactgttccaagagtttaggcagagatatgagatactgacccccaacgccattcccaaaggcttcatggacggtaagcaggcatgcgagaagatgattcaggccttggaactcgatcctaatctctatcgggtcggtcagtcaaagatcttcttcagggccggagtgctcgcccagctcgaggaggagagagacttaaaagtgaccgacataatagtgtcgttccaggccgctgctaggggctatctggctagacgggcattccagaaacgtcagcagcagcaatcggcactcagagtgatgcagcggaactgcgcagcctatctgaagcttaggcactggcagtggtggcggttatttaccaaggtaaagcccctgttacaagtaacaaggcaagatgaagtgctccaggctagggctcaggagctacaaaaagtgcaggagctgcagcaacagtctgctagggaagtgggcgagctccaggggagagtagctcaactagaggaagaaagggcacgcctggcagagcaattgcgagctgaggcggagctttgtgcagaggccgaggagaccagaggccgacttgcagccagaaagcaggaattggaactcgtggtgtccgaattggaggctagagtcggcgaggaggaggagtgttcacgacagatgcaaacagagaagaaacgattgcagcagcacatccaggagctcgaagcacatttggaagccgaggaaggcgctcgccaaaagctccaattagagaaggtgacaactgaggctaaaatgaaaaaattcgaagaagaccttttgctcctagaggaccagaatagtaagctgtccaaggagcgcaagctcttagaggatcgactcgcagagttttcttctcaggctgccgaggaggaggagaaggtaaaaagcctaaataagctacgcttgaagtacgaggccactatcgctgacatggaggatcgcctgcgcaaggaagaaaaggggagacaagagctggagaaactgaaacgcagacttgacggggagtcttctgagctccaggagcagatggtggaacagcaacaaagggctgaagaattgagagcccagctcggcaggaaagaggaggagttacaagctgcgttggcacgcgctgaggacgagggcggagccagagcccaactcctcaagagcctgagggaggctcaagctgccctggcggaagcacaagaagacttggaatcagaacgcgtagctcggacgaaagccgaaaagcagaggagggatctgggagaagaattggaagctcttaggggggagcttgaggacacactggattccacaaacgctcaacaggaactgcgatctaaacgcgagcaagaagtcacggagctgaagaaaacgctggaagaagaaacaagaatccacgaagccgctgtgcaggagctgcggcagcgtcacggacaggccctgggtgagctggctgagcagctggagcaggccagacgaggaaaaggtgcctgggaaaagacaagactggccttagaggccgaagtcagcgaactgagagccgaactgagttccctgcagaccgccaggcaggaaggcgagcagaggaggagacgactcgaactccagctgcaggaggtccaggggagggccggtgatggcgagagagcacgagccgaggccgctgagaagttgcagcgcgcacaggctgagctcgagaacgtctcgggcgcattgaacgaggctgagagcaaaaccattagactgtcaaaggagttaagctctaccgaggcccagttacacgacgcacaggaactgcttcaggaggaaactcgcgctaagctggccctcggctcgcgtgttcgagccatggaagctgaggcagctggtctgcgggagcaactggaagaggaagctgctgcacgcgaaagagccggacgggagctgcaaactgcccaagcccaacttagtgagtggagaagacgccaggaagaagaggcgggtgctcttgaagccggagaggaagctcgtcgaagagcagcgagggaagccgaagctctgactcagcgcctcgcggagaaaactgagacagtagaccgtcttgaaaggggtaggcgtaggctccagcaagagctggacgatgccacaatggatctggagcagcagaggcaactggtcagtaccctcgaaaaaaaacagcggaaattcgaccagctcctagcggaggagaaggctgcagttttgagggcagttgaagagcgtgagcgtgctgaggccgagggaagagaacgggaggctagggcattgtcactgacccgcgcactggaggaggaacaagaggctagagaggagttggaacggcagaacagagctcttcgggcagaactcgaagctttactaagttctaaggacgatgtgggcaagagcgtgcatgaattagagcgtgcatgtagggtggccgagcaggcagctaacgaccttagagctcaagttaccgagctggaggatgaactgactgccgcagaagatgccaaactccgcctggaggtgactgtgcaggcactcaagacacagcacgaacgggacctgcagggacgagacgaggctggggaagagcgaaggaggcagctcgcgaagcagttacgagacgctgaagtggagagggacgaggaaaggaaacagagaaccctggccgtggcagctcgtaagaagctggaaggcgagcttgaggaactcaaggcccagatggcgtcagccggacaaggcaaagaagaggccgtgaaacagctcagaaagatgcaggcccagatgaaggagctttggcgggaggtggaggagaccagaacctcgagggaggagattttttctcagaatcgagagtcggaaaaacgactgaaagggctcgaagcagaagtcttgcgccttcaagaagagctcgccgcatctgatcgggcacgccgacaagcccaacaagacagggatgaaatggctgacgaggtggctaacggtaacttgtctaaggcggcaatcctggaagaaaagagacagctggaaggtaggctcggacagctggaggaggagctggaagaggaacaatctaacagcgagctgttaaacgacagatacaggaaactactactccaggtcgagagcttgaccaccgaactttctgccgagagaagctttagcgccaaggcagaaagcggacggcagcaactggagcggcagatacaggagctgaggggcaggctgggcgaagaggacgccggtgctagagcccgtcacaagatgaccatcgccgcactcgaatcgaagcttgcccaagcagaggagcaacttgagcaagagactcgcgagcgaatcctgtctggcaagctggtgcggcgagctgaaaagaggttgaaggaggtggtgctgcaggtcgaggaagaacgcagggtggccgatcaactcagggatcaattggaaaagggcaatctgagggtcaaacagttgaaacgccagctggaagaagcagaagaggaggctagtcgcgctcaggcgggacgaagacgtttgcagagagaacttgaagacgtcactgaatcagccgagagcatgaatcgcgaagtcactacactgagaaaccgattacgacgcggaccgctaactttcactacacgtacagtacgacaggtgttcaggctagaggagggtgtcgcatcagacgaggaggccgaagaagctcagcctgggtccgggccaagtccagagcccgagggtagcccacccgcacacccacagta

SEQ ID NO: 59106 - DNA, 6111 bp, Artificial Sequence
  derived and/or modified sequence
atggctgccgtcacaatgagtgtgcccggacgcaaagctccccctagacccggacccgtgccagaagccgctcagccgttcctgttcacgccacggggtccttcagccggaggcggacctggttcaggaacttcgccccaggtggagtggaccgccagacggttggtctgggtgccgtcggagctccacgggttcgaagctgctgcgttacgtgacgagggagaggaagaagcggaagtcgaactggctgagagcggcagaagactccggctgcccagagatcaaatccaacggatgaacccacccaaattttctaaagcagaggacatggccgaactgacctgcctcaatgaagctagcgtgctgcacaacttgcgggaaagatactattcgggcttgatctacacctacagtggcctgttctgcgttgtgatcaatccgtacaaacaattgccaatctacacagaggctatcgtagagatgtatcgaggtaagaagagacacgaggtcccccctcatgtctacgccgttaccgagggtgcctatcgatctatgctgcaagacagggaggatcaatcaatcctgtgtactggggaaagcggcgcagggaaaactgagaacacaaagaaggttatccagtacctcgctcacgtagcctccagccccaaaggtcggaaggagccaggagtgcctgcctcagtgagtactgtgagttatggtgaactcgaacgtcagctccttcaggcaaacccgattctggaagctttcgggaacgccaaaaccgtgaagaatgataatagttctcggtttggtaaattcattagaattaacttcgatgttgctggttatatcgtaggtgccaacattgagacgtacttactagaaaaaagccgggcaatcaggcaggccaaagatgaatgttccttccacatcttttatcagctgctcggtggcgctggggagcagctgaaagccgacctgctgttagagccttgtagccattatcgctttcttacaaacggaccctcctcgtccccagggcaggagcgcgagctatttcaggagacattggagagtttgcgggtcctgggctttagccacgaagaaattatatctatgttgcgcatggtctctgctgtgctacagtttggaaacatcgcactgaaacgagagcgaaataccgatcaagcgacaatgcccgataacactgctgcccaaaaattgtgtcgcctcctggggctgggagttactgacttcagcagggcgttactcacccccagaataaaggttggaagggactacgtgcaaaaagcccagacgaaagaacaagccgatttcgccctcgaggctctggccaaggcgacctatgagcgactgtttcggtggctggttctgcgcttgaatcgagctctagacaggtctccaaggcaaggcgcatcattcctcggaatcctggacatcgcgggatttgaaatattccaacttaattccttcgaacagctctgtattaactacactaatgagaaacttcagcagctcttcaaccacacaatgttcgttctagagcaggaagaataccagagagagggcataccctggacttttctggattttggtttagacctgcaaccttgcatcgacttgatcgaacgtcccgctaacccaccgggactcttggctcttctggatgaagagtgttggtttcctaaggcgaccgataagagcttcgttgagaaagtcgcacaagaacagggcggacatccgaagtttcagcgacctcgccacttgcgtgaccaagcagacttttcagtgctgcactacgccggaaaagtcgattacaaggcgaatgaatggctaatgaagaacatggatcctctaaatgataatgtggcagcccttctgcatcaatcgacagacagactaacagctgagatttggaaagatgaacatggtgggttccagcagtttagcttcctgggttctttccccccatctcctcctggtagtgctgagagatgttctagtgccatatcgcctcccggtgtggagggaatagtgggcttggaacaggtcagtagcctcggcgatgggccacctggcggtaggcccaggcggggtatgttccggactgtgggacagctctataaagagagtttatctaggttgatggcaaccctcagcaacactaatccctcattcgtacggtgcatagtgcccaatcacgagaagagagctggcaagctagagcccagactggtgcttgaccagctcaggtgcaacggtgtactggagggcattagaatatgtagacagggcttccctaacagaatcctgttccaagagttccgccagaggtacgaaatcctgactccaaacgccattccaaagggattcatggacggtaagcaggcatgcgagaaaatgatccaggcgctggaactggacccaaacttataccgggttggtcagagcaagatctttttccgcgcaggcgtcctcgcccaacttgaggaggagcgagacctaaaggtgactgacatcatcgtgagcttccaggccgctgctcgcggttacctggccagaagagcatttcaaaaaaggcaacagcagcagagcgcccttagagtgatgcagcgaaactgcgcagcctacttgaagctgcgtcactggcagtggtggcgcctgttcacaaaagtgaagccacttctgcaagtgacccggcaggatgaagtgctgcaggccagggcccaagaactccagaaagtgcaggaattgcagcaacagagtgctagggaagtgggcgagcttcaggggagagtcgctcaattagaggaagaacgcgctcgcctcgctgaacagctccgcgcagaggcggaactgtgtgcagaagcggaagaaactcgtggacggctggcggcacggaagcaggagctggagctcgttgtgagcgagctcgaagccagggtgggcgaggaggaagagtgtagcagacagatgcagaccgagaaaaaacgcttacagcagcacatccaagaactggaagcacaccttgaggctgaggaaggagctcgacagaagctccaactagagaaagtgacgaccgaggccaagatgaaaaagttcgaagaagaccttcttttgcttgaggaccagaacagtaagctgtccaaagagagaaaactgcttgaagatcggcttgctgagttttctagccaggctgcagaagaagaggaaaaggttaaaagtctgaataaactgcgtctcaaatatgaggccacaatcgcagacatggaagatagactgcgcaaggaggagaaagggagacaagagctagagaaactgaagcgtagactggatggtgaatcatcagagctgcaggaacaaatggtcgagcagcagcaacgggcagaagagctaagagcccagctgggcaggaaggaggaggaactgcaggcagcgctagccagagcggaggacgagggaggagcgagggctcagcttctgaaaagcctgagagaagcacaggcagcactggctgaagcccaggaggatctggagtccgaacgggtcgcccgaaccaaagctgagaaacagaggagagacctgggcgaggaattggaggccttgcgaggtgaactggaggatacattggactcaacaaatgctcaacaagagctccgcagtaagcgagaacaggaagtgactgagctgaaaaaaaccctcgaggaggaaactaggatccatgaagcagcggtgcaggaactgagacagagacacggacaggcactgggagagttagctgagcagctcgagcaggccagaagggggaagggagcatgggagaaaaccagacttgccctcgaggccgaggtttcagagctccgagcagaactttcctctctgcaaacagcacgacaggaaggcgagcaaaggaggcgccgtcttgagttacagctacaagaggtacaaggaagagctggggacggggagcgggctcgtgccgaggcagccgaaaaactgcagagagcccaggcggagttggagaacgtctcgggtgccctgaacgaggctgaatccaaaaccatccggctgagcaaggagctaagctcaaccgaagctcagctccatgacgcccaggaacttttacaggaagagactagggctaagctcgccttggggtcaagagttcgtgccatggaggctgaggcagcaggccttcgggaacagctggaggaggaagccgcagccagggagcgtgcaggacgcgaactgcagacagcacaggcccaactgagtgagtggcggcgacgtcaggaggaggaagccggagctctggaagcgggagaggaggctagacggagggctgctcgggaggcagaagccctgacgcagaggttggctgaaaagaccgagacagtagaccgactggagaggggcaggcgcagactgcagcaagaacttgacgacgccaccatggacctggagcagcaaagacagctggtctcaacccttgaaaaaaagcagcgtaagttcgaccagctgcttgcggaagagaaagccgctgtacttcgtgccgtggaagagcgcgagagggctgaagccgagggaagagaacgtgaagctagggccctcagtctgacaagagccctcgaggaagagcaggaggctcgagaagagctggagagacagaaccgtgcgctgcgcgctgaactggaggctctgctttcttccaaggatgacgtgggaaagagcgtccacgaactcgagcgcgcatgccgcgtagccgagcaagccgcaaatgacctgcgcgctcaggttaccgagctcgaagatgagctgactgctgcagaggatgctaagctcaggctagaggtcaccgtgcaggccttgaagacccagcacgaaagagaccttcagggcagggatgaggctggggaggagcggagacggcaactcgccaagcaactcagggacgctgaggtcgaaagggatgaggaacgaaaacagcgaactcttgcggtggctgccagaaagaagctcgagggtgagctggaagagctcaaggcccaaatggctagtgccggacagggaaaggaggaggctgtcaagcagctgagaaaaatgcaggcacagatgaaggagctgtggcgggaggtggaggagacacggacatctagggaggagatcttttcgcagaatcgtgaaagcgagaagagactgaagggcttggaggctgaagtcctacgcctgcaggaagaactagccgctagtgatcgagctaggcgacaagcccagcaggaccgggacgaaatggcggacgaagtcgcaaatggaaatttatcgaaggctgcgatccttgaagagaagcgccaactcgagggcaggctgggccaactggaggaggaactcgaggaggaacagtccaattctgaactcttgaatgataggtacaggaagcttctcctgcaggtggaatcattgactaccgagctgagtgcggagagatccttctccgctaaggcagaaagcgggaggcaacagttggagcgccagatccaagaactgagaggcaggctgggcgaggaggacgccggtgcccgtgccaggcataaaatgacaatcgctgctctggagagcaagctcgcccaggcagaggaacaactggagcaggagaccagggagcggatcctgagcggcaagctggttcggagggccgagaaaagactcaaagaggtcgtgctgcaggtagaggaagagagacgagtggcagatcagctgagagaccaactcgaaaagggaaaccttagagtgaaacagttgaaaaggcagttggaggaggctgaggaggaagcgagccgcgcacaggctgggagacggagactgcagagagagctcgaggacgtgactgaatccgctgaatccatgaacagagaggtgacgacgctacggaaccggctcagaaggggccctcttacattcacaacaaggactgtgagacaggtcttccggctggaggagggagttgcgagcgacgaggaggctgaagaagcccaacccggatctggacccagtccagagcctgagggtagcccaccagctcatccacagtat

SEQ ID NO: 59107 - DNA, 6086 bp, Artificial Sequence
  derived and/or modified sequence
atggctgccgtaaccatgagcgtgccaggacggaaggccccacctaggcccggaccagtacccgaggccgctcaaccattccttttcaccccaagggggccatctgctggtgggggtccagggtcaggaacaagcccacaggtcgagtggaccgcgcgacgattggtatgggttccttcagaactccatggcttcgaggctgccgcactacgcgacgagggtgaggaggaggctgaggtcgagctcgccgaaagcggcaggcggctgcggctgcccagagatcaaattcagcgcatgaatcccccaaaattctccaaagccgaggacatggccgagttgacatgtttgaatgaggcatccgttctccacaatcttcgtgagcgctactatagtggactgatctatacttactccggactcttttgtgtggtgattaatccttacaagcagctgcccatatacactgaagccatagttgagatgtacagaggtaaaaaacgacatgaagtgccgccacacgtatacgcagtgaccgaaggtgcttaccggagtatgctgcaggacagggaggaccaaagcatactttgcacgggtgagagcggagccggaaaaaccgagaataccaaaaaagtgatccagtatctggcacatgtggcatctagtcctaaagggcgtaaagagccgggtgtgccaggagaacttgaacgtcagttactgcaggccaatcctattctggaagcgttcggtaacgctaagaccgtaaagaatgacaactcaagccgttttggcaagttcatcaggatcaactttgatgttgcagggtatattgtgggtgcaaatattgaaacttacctactggaaaagtccagggccatccggcaggccaaagatgaatgttcattccacatcttttatcagcttcttggcggtgccggtgagcagctaaaagcagacctactgctggagccctgttctcattaccgatttttgacaaacgggccatcatccagtccaggacaggagagggagctgttccaggagaccctagagtcattacgggtgctggggttctcacacgaagagattatctcaatgctgcggatggtctctgccgtcctccaattcggcaacattgctcttaaaagggagcgcaatacagatcaggcgaccatgcctgacaacactgcagcccaaaaactgtgtagactcttaggcctgggagtcacggattttagtagggccctccttacacctcggatcaaagttggccgtgactacgtacaaaaggcccagactaaggaacaagcagattttgccctcgaagctctggctaaggcaacctacgagcggctgttcagatggttggtcctaagactgaatagagcgcttgaccgctcaccccgacagggcgcaagcttcctgggcatcttggacatagcgggattcgaaatcttccaattaaatagctttgagcagttgtgcatcaactataccaacgagaagcttcaacagctgttcaaccatactatgttcgtgctggagcaggaggaataccagagagaaggcatcccttggacattcttggatttcgggctggacctgcagccttgcattgacctgatcgaacggccagccaatcctcccggactcctcgccctcttggacgaggaatgttggttcccgaaagcgacagataagagctttgtagagaaggtggctcaagagcaggggggacaccctaaatttcagaggcctcgtcatcttagagatcaggccgatttcagtgtactgcactacgctggaaaagtggattacaaggccaatgaatggctgatgaagaacatggatccactaaatgataatgtggccgctcttctccatcagagcactgacagacttaccgcagagatctggaaagacgaacacggaggcttccagcagttttcttttctgggttcattccccccttccccacccggaagcgccgagcggtgctcgagcgcgataagtcctcccggagtggaaggcatcgtcggattggagcaagtctccagcttaggagacggacctcccggtgggaggcccaggcgtggaatgtttaggaccgttggccaactgtacaaggagtccctctctaggctgatggccactctcagcaatactaatccgtccttcgtgagatgtatcgtgcctaatcacgaaaagagggccggtaagcttgagcccagactggtcctagaccaactacgatgcaatggcgtactcgaaggtatccgcatttgcagacagggattccccaacaggattttgtttcaggagttcaggcaaagatatgagatcctgacacctaatgcgatccccaaaggcttcatggacggaaaacaggcttgtgaaaagatgattcaggcacttgagctcgaccccaatctctaccgcgtgggtcagtccaagattttttttcgagcaggtgtactcgcccagctggaggaggagagggatcttaaggtgacggacattatagtgtcgttccaggccgcagctcggggttacctggccagaagagccttccagaagaggcagcagcaacaatcagcattaagagtgatgcaacgaaactgcgcggcttacctaaaactacgccattggcagtggtggaggctgttcacaaaggtgaagcctctccttcaggtcacgcggcaggacgaagtcctgcaagcccgtgctcaggaactgcagaaagttcaggagctccagcagcagagtgccagggaagtgggggagcttcagggacgggtggcacagcttgaggaagaacgtgccaggctggcagagcagctgagagccgaagctgagctgtgtgcggaagccgaggaaacacggggaaggttagcggctagaaagcaagaattggaattggtggtgtccgagctagaagctcgcgttggggaagaagaggagtgcagccgtcagatgcagaccgaaaaaaagaggttacagcagcacatacaagaacttgaggctcacttggaagctgaagaaggtgccagacagaagttgcagctcgaaaaagtgacaactgaggcgaaaatgaaaaagttcgaagaggatttgttgctgttggaagatcagaacagtaaattaagtaaggaaaggaagcttctcgaggataggttggccgagttcagctcccaagctgcagaggaagaggagaaagtcaagagtttgaacaaactgaggttgaaatatgaggccacgattgccgatatggaggacagattgagaaaagaggaaaagggtaggcaggaacttgaaaaactgaaacggaggctggacggtgaatccagtgagctgcaggagcagatggttgagcagcagcaaagggccgaggaattgcgagctcaactgggaaggaaggaggaggaattacaggccgctctcgctcgggcagaggatgagggcggagccagagcccaactactgaagtccctccgagaggctcaggccgcactcgccgaagcacaggaggacctggaatcagagcgggtagctagaactaaagcagagaagcagcgacgggacctgggagaggagttagaggccctgcgcggtgagctggaagatactctggatagtacaaatgcccagcaagaattgcggagtaagagagaacaggaggtcactgaactcaaaaagactcttgaagaggaaaccaggatccacgaggcagctgtgcaggagttgagacagcgccacggacaagccctcggggagctggccgagcagctcgaacaggctcgaagaggaaaaggggcttgggagaagacacgactggcgctggaggcagaggtaagcgaactgagggccgagctctcaagcctgcagacagcaagacaggagggagagcagaggcggcgtaggctcgagctgcaactccaggaggtgcaaggaagggccggagacggcgaaagggctagggcggaggctgccgagaaattgcaacgcgcacaggccgaactcgaaaacgtttccggtgctttaaatgaagctgaatcgaagaccatcagactgtctaaggagctttcttcgaccgaagcacaacttcatgatgcccaggagcttctgcaggaagagacaagagccaagctggcgttaggcagcagggtcagagctatggaggcagaggccgcaggtctgagggagcagctggaggaagaggcagccgctagagagcgcgcaggcagggaactgcagactgcccaggcccaactgtcagagtggcgcaggagacaggaagaagaagccggagccctggaagcgggagaagaggccagacgcagagccgctcgggaggcagaggccttgacccaacggctcgctgagaagaccgaaacagtggacaggcttgagcgaggtagacgcagactgcaacaggagttagatgacgcaactatggacttagaacagcagagacaactcgtgagtacacttgaaaaaaagcagcgcaagtttgaccaactgctcgccgaggagaaggctgccgtcctcagggcagtcgaagagcgggagcgcgcagaagccgaaggtcgcgagagagaggcccgagcactgtctctaacaagagcccttgaggaagagcaggaggcccgtgaagaacttgaaaggcaaaaccgagccctgagggccgagctggaagctctactttcgagtaaagatgacgtaggcaaatcagtacatgagcttgagagagcctgcagggtggctgagcaagctgctaatgaccttagagcccaagttacagaattagaagatgagctgacggcagccgaagatgccaagctccgattggaggtgacagtgcaggcgctgaagactcaacacgaacgcgacctgcagggacgggatgaggcaggcgaggaaaggcggcgacagctggctaagcaactacgagatgctgaagtggagcgggacgaggagcgaaagcagcgaactctggccgtggctgctcggaagaagctcgaaggggaactagaagagctaaaggcgcagatggcatccgctggacagggtaaagaggaagcggtgaaacagctgcgaaaaatgcaggcccagatgaaagagctgtggagagaggtggaggagacgcgcacgtcgcgagaggagatattcagtcagaatagggagtccgaaaagagacttaagggcttagaggcagaggtgctacggcttcaggaagaactcgctgcatcggaccgcgcacgccgtcaagcccagcaagacagggatgagatggcagacgaagttgcaaacgggaacctgtcaaaggctgctatcctggaggagaagcgccagctggaaggacgcttgggccagttggaggaggagctggaggaggagcagtccaattccgaactgcttaacgatagatatcgtaagcttctgctgcaggtagagtccctcaccacggagctcagcgctgaaagaagcttttccgccaaggccgaatcggggcgacagcaactggagcgtcagattcaggaactgcgaggacggctgggcgaagaagacgctggcgctagggcaaggcataagatgaccatagccgcacttgaatcaaagcttgcccaggccgaggagcaacttgagcaggaaactcgagaacgcatcctctcagggaaactggtgcggcgtgcagagaaacgacttaaggaggttgtgctgcaggttgaagaggaacgtcgggtggctgaccagctgcgtgatcagttggagaagggcaacctgagagtcaaacagctgaagcgccaactggaggaagctgaggaggaagcatctagagcacaagcaggacggcgaaggcttcagagagagctcgaggatgtgacagagagtgccgagtccatgaaccgggaagtgactaccctgagaaacaggttgaggcgtggaccgcttacgtttacaaccagaactgttcggcaggtatttagactcgaagagggcgttgcatcagatgaggaagccgaagaagcccaaccgggaagcggaccctcccccgagccagaaggctctccacccgctcatccccagta

SEQ ID NO: 59108 - DNA, 6110 bp, Artificial Sequence
  derived and/or modified sequence
atggcggcagtcactatgagtgtgccaggcagaaaagctccacctaggcccggaccagtcccagaagctgcacagccgtttttattcactcccaggggcccatctgccggtggcggtcctggaagtggcacgtccccacaggttgagtggacggccagacgcctagtgtgggttccttctgagctgcacggcttcgaagccgctgctttgagggacgaaggagaagaggaagccgaagtggaactcgcagaatctggacggaggctccgtctgccgagggatcagattcagcgcatgaaccctcctaagttcagcaaagccgaagacatggctgagctcacgtgcctcaatgaagcctcagttctgcacaaccttagagaacggtactacagtggactcatctatacgtattccggcctgttctgtgtggtgattaacccctataagcagctgccgatctacacagaggcaatcgtcgagatgtacagaggaaaaaaaaggcacgaggtgcctccgcacgtatacgccgtgacggagggagcgtatagaagtatgttgcaggacagagaagatcagtcaattctgtgcactggcgagtcaggcgctggcaaaaccgaaaatactaagaaggtgatccaatacctggcgcatgtcgctagctcacctaagggacgtaaagaacctggggtgccagtctctaaccccgctttgggctggggcgagcttgaacggcagttgctgcaggcaaaccccatcttagaagcttttgggaatgccaaaaccgtgaagaatgataacagctcacgtttcggaaagttcatccgcatcaatttcgacgtggcaggctacatcgtcggggctaacatcgaaacgtatctgctcgaaaagagtcgggctatccggcaggcaaaggatgagtgttctttccacattttttaccagctcttgggcggagcaggcgagcagctgaaggcggacctgctacttgaaccctgtagccattatagattcctgacgaatggtccgtcctcatcacctgggcaggagcgggagctgtttcaggaaacgctggagagcctgagggttttgggattttcccacgaagagatcatctctatgcttaggatggtgtcagccgttctgcagtttggcaatatcgccctcaagagggaacggaacacagaccaggctaccatgcccgataacacggccgctcaaaaactctgcagactattagggctgggcgtgacggacttctccagggccctgctgaccccaaggattaaagtaggtcgcgactatgtccagaaggcccagacaaaagagcaggcggacttcgctttggaggctctggccaaggccacgtatgaaaggctattcaggtggctggtgcttcgtttaaaccgcgctctggatagatcccccagacaaggggcaagcttcctcggcatacttgacattgcaggctttgagatattccagctgaatagtttcgaacagctgtgtataaactataccaatgagaaactgcagcagctgttcaatcacacaatgtttgtgctggagcaggaggaataccagcgcgaagggattccctggacttttctggatttcgggttggatctacagccctgcatagatttaattgagcgccctgccaaccccccaggcctgctggccctgcttgacgaggagtgttggtttcctaaagctacggacaagtcttttgtggagaaggtcgctcaggagcagggcggacaccctaaatttcaaaggccacggcacctccgggaccaggcagactttagcgtgttgcattacgccggaaaggtcgattacaaggcaaacgagtggctgatgaaaaacatggatcctcttaatgacaacgtggctgccttactacatcaaagtacagatcggcttacagccgagatctggaaagacgaacacggaggctttcaacagttctcgttcctggggagctttcccccatctcctcctggaagtgccgagcggtgctcaagcgccattagccctcccggagtcgaaggtattgtcggccttgaacaagtgtcctctctcggggacggcccacccggtgggcgaccccgtcgcggtatgtttaggacggtcggtcaactctacaaggagagccttagccgcctgatggctacactcagcaatacaaaccctagcttcgttcgctgtatagtgccaaaccacgagaagcgtgccggaaaattagagccacgattagtgcttgatcagctgagatgtaacggagtcctggaaggtattagaatctgtaggcaagggtttcccaacagaatcttgttccaagaattccggcagaggtatgaaatcctgactcctaatgcaatccctaaaggcttcatggacggaaagcaggcctgcgaaaagatgatccaggcattggaactcgaccccaacctgtatagagttgggcagtcaaaaatcttctttagagcgggagtgctggcccagcttgaagaagagcgggatctgaaggtgaccgacattattgtcagttttcaagccgctgccaggggttaccttgccaggcgggctttccagaagcgccagcagcagcagagcgctttgagggtgatgcagcggaattgtgccgcttatcttaagctacgtcactggcagtggtggaggctcttcacaaaggtcaagccactcctacaggtgacgcgccaggatgaggtcctgcaagcccgagctcaagaattgcagaaggtgcaggaactacagcagcagagcgccagagaagttggcgaactgcagggtagagtggcccagctggaagaagaacgtgcgagactggcagaacaattgcgggctgaggctgagctgtgtgcggaggccgaagagaccagggggagactggcagcaaggaaacaggaactcgagctggtagtgagtgagctcgaggcacgcgtcggcgaggaggaggagtgtagcaggcaaatgcaaaccgaaaagaaacgactccaacagcacattcaagaactggaagcacacctcgaggccgaggagggagccagacagaagctgcagcttgaaaaggtgactactgaagctaagatgaaaaaatttgaggaagacctgctgctcctcgaggaccagaactctaagctctccaaggagcgaaaacttcttgaggatcggcttgccgaattcagttcacaagcagccgaagaggaagaaaaagtaaagtctctgaacaagttacgactgaagtatgaagccactatcgctgatatggaggaccggctgcggaaagaagaaaagggcaggcaggaattagagaagctgaagcgaagattggacggggagtcttctgaactgcaggaacaaatggttgaacagcagcagcgggctgaagaactcagggcgcagttgggtcgtaaggaggaggaactgcaggctgcactcgctagagccgaggacgaaggcggagccagggcacagcttctcaaatccctgcgggaggcccaggcagcccttgcggaggctcaagaagatctcgaatcagagcgagtcgcccgtaccaaggcagagaagcagaggagggatctcggcgaagaactagaggcattgcgcggtgagctagaggacaccctcgactctactaacgcccagcaggagctgcgtagtaaacgggaacaggaagtcaccgaactgaaaaagacactagaggaggaaactaggatccacgaagctgcagtgcaggagctgaggcaaaggcacggacaggcactgggagagctcgctgaacagttggagcaagcaaggagaggcaagggagcttgggaaaagactagactagctctggaggcggaagtctcggaactgagggccgagctcagctcgctccaaactgcccgtcaggaaggagaacaaagaagacggcgacttgagctacagttgcaggaagtacagggcagggctggggacggagagcgggcaagagccgaggccgctgagaagctgcagcgggcacaggccgaactcgaaaacgtgagtggcgcactaaatgaggcagagagcaaaacgatcagactgagtaaagagttatcgagcactgaagcacagttacatgacgcccaagagcttctgcaggaagaaacacgggcaaagctcgccctcggctcaagggtgagagccatggaagcggaggcggctggattgagggagcagctggaagaggaggcagccgcaagagaaagagccggaagggagctccagactgctcaagctcagctcagtgagtggaggagaagacaagaagaagaggccggagccttggaagccggtgaagaggccaggcgcagggctgctagggaagccgaggcactcactcaaagactcgctgaaaaaaccgaaaccgtcgatcgactcgagcgcggtaggagacggctgcagcaggagcttgacgatgcgacaatggatctggagcaacagcggcagctcgtgtcaactctagagaagaagcagagaaagtttgaccagttgttagctgaggaaaaagcggcagtactgcgggcagtcgaggagagagagcgcgctgaagccgaaggaagagaaagggaggcgagagccttgagcctgaccagagctctcgaggaggagcaggaggccagggaggaactggaacgtcaaaatagagctctgcgcgctgaactcgaagccctcctaagctccaaagatgacgtggggaaaagcgtgcacgagctggaacgcgcttgccgagtggccgagcaagcggcaaacgatctcagggcccaggtgaccgagttggaagatgaactcactgccgctgaggatgccaaactgcggcttgaggtgactgtgcaggccctgaagacccagcatgaacgcgatttgcagggtcgggacgaagccggtgaagaacggagacggcaactcgcgaaacagctgcgcgatgcggaagtggagcgtgatgaggagaggaagcagaggacacttgcggtggcagctagaaagaagctggaaggtgagctagaggagctgaaagcacagatggcgtctgcaggtcagggaaaggaagaggctgtcaagcagctgcggaagatgcaggcccaaatgaaggaactctggcgggaagtggaagaaaccaggacatcccgcgaagaaatattttctcagaaccgagaatccgagaagcgactgaaaggcctggaagcagaagtgttacggctccaggaggaactggccgcaagcgatagggccagacggcaggctcagcaggatagggatgagatggcagacgaggtggccaacggcaacctgtcaaaagccgcaatactggaagaaaaacggcagctcgaggggagattgggtcaactggaggaggaactggaagaggaacagagtaattccgagttactgaacgatagataccggaagttgctgctgcaagtggaatccctgacaaccgaattgtccgctgagcgatcctttagtgcgaaagctgaaagtggcaggcagcagctggaacgtcaaatacaagaattaaggggtcgtctgggcgaggaggatgccggagcacgggcaaggcacaagatgacgattgcggcactcgagagcaaacttgcccaggccgaagagcagcttgagcaagaaactagagagcgtatcctctccggtaaactggtgaggcgcgctgaaaaacggctcaaggaggttgtcttacaggtagaggaggaaagacgggtggcagaccagctgcgagaccagctggaaaaggggaatcttcgcgtcaaacagctcaagcggcagcttgaggaagccgaggaagaggccagccgggcacaggctggtcgcaggcgcttacaacgagagctagaggatgtaaccgaaagtgccgaatcaatgaatcgggaggttacgacactacgaaacaggctccgaagaggccctctaacgtttacaacgcgtaccgtgcggcaagtgttcagattggaggagggcgtcgcgtctgacgaagaggctgaggaagcccagccagggtcaggcccttctcccgagcccgaggggtcacctcccgctcacccgcagta

SEQ ID NO: 59109 - DNA, 6111 bp, Artificial Sequence
  derived and/or modified sequence
atggccgccgtgaccatgagcgtgcccggcagaaaggccccccccagacccggccccgtgcccgaggccgcccagcccttcctgttcacccccagaggccccagcgccggcggcggccccggcagcggcaccagcccccaggtggagtggaccgccagaagactggtgtgggtgcccagcgagctgcacggcttcgaggccgccgccctgagagacgagggcgaggaggaggccgaggtggagctggccgagagcggcagaagactgagactgcccagagaccagatccagagaatgaacccccccaagttcagcaaggccgaggacatggccgagctgacctgcctgaacgaggccagcgtgctgcacaacctgagagagagatactacagcggcctgatctacacctacagcggcctgttctgcgtggtgatcaacccctacaagcagctgcccatctacaccgaggccatcgtggagatgtacagaggcaagaagagacacgaggtgcccccccacgtgtacgccgtgaccgagggcgcctacagaagcatgctgcaggacagagaggaccagagcatcctgtgcaccggcgagagcggcgccggcaagaccgagaacaccaagaaggtgatccagtacctggcccacgtggccagcagccccaagggcagaaaggagcccggcgtgcccgccagcgtgagcaccgtgagctacggcgagctggagagacagctgctgcaggccaaccccatcctggaggccttcggcaacgccaagaccgtgaagaacgacaacagcagcagattcggcaagttcatcagaatcaacttcgacgtggccggctacatcgtgggcgccaacatcgagacctacctgctggagaagagcagagccatcagacaggccaaggacgagtgcagcttccacatcttctaccagctgctgggcggcgccggcgagcagctgaaggccgacctgctgctggagccctgcagccactacagattcctgaccaacggccccagcagcagccccggccaggagagagagctgttccaggagaccctggagagcctgagagtgctgggcttcagccacgaggagatcatcagcatgctgagaatggtgagcgccgtgctgcagttcggcaacatcgccctgaagagagagagaaacaccgaccaggccaccatgcccgacaacaccgccgcccagaagctgtgcagactgctgggcctgggcgtgaccgacttcagcagagccctgctgacccccagaatcaaggtgggcagagactacgtgcagaaggcccagaccaaggagcaggccgacttcgccctggaggccctggccaaggccacctacgagagactgttcagatggctggtgctgagactgaacagagccctggacagaagccccagacagggcgccagcttcctgggcatcctggacatcgccggcttcgagatcttccagctgaacagcttcgagcagctgtgcatcaactacaccaacgagaagctgcagcagctgttcaaccacaccatgttcgtgctggagcaggaggagtaccagagagagggcatcccctggaccttcctggacttcggcctggacctgcagccctgcatcgacctgatcgagagacccgccaacccccccggcctgctggccctgctggacgaggagtgctggttccccaaggccaccgacaagagcttcgtggagaaggtggcccaggagcagggcggccaccccaagttccagagacccagacacctgagagaccaggccgacttcagcgtgctgcactacgccggcaaggtggactacaaggccaacgagtggctgatgaagaacatggaccccctgaacgacaacgtggccgccctgctgcaccagagcaccgacagactgaccgccgagatctggaaggacgagcacggcggcttccagcagttcagcttcctgggcagcttcccccccagcccccccggcagcgccgagagatgcagcagcgccatcagcccccccggcgtggagggcatcgtgggcctggagcaggtgagcagcctgggcgacggcccccccggcggcagacccagaagaggcatgttcagaaccgtgggccagctgtacaaggagagcctgagcagactgatggccaccctgagcaacaccaaccccagcttcgtgagatgcatcgtgcccaaccacgagaagagagccggcaagctggagcccagactggtgctggaccagctgagatgcaacggcgtgctggagggcatcagaatctgcagacagggcttccccaacagaatcctgttccaggagttcagacagagatacgagatcctgacccccaacgccatccccaagggcttcatggacggcaagcaggcctgcgagaagatgatccaggccctggagctggaccccaacctgtacagagtgggccagagcaagatcttcttcagagccggcgtgctggcccagctggaggaggagagagacctgaaggtgaccgacatcatcgtgagcttccaggccgccgccagaggctacctggccagaagagccttccagaagagacagcagcagcagagcgccctgagagtgatgcagagaaactgcgccgcctacctgaagctgagacactggcagtggtggagactgttcaccaaggtgaagcccctgctgcaggtgaccagacaggacgaggtgctgcaggccagagcccaggagctgcagaaggtgcaggagctgcagcagcagagcgccagagaggtgggcgagctgcagggcagagtggcccagctggaggaggagagagccagactggccgagcagctgagagccgaggccgagctgtgcgccgaggccgaggagaccagaggcagactggccgccagaaagcaggagctggagctggtggtgagcgagctggaggccagagtgggcgaggaggaggagtgcagcagacagatgcagaccgagaagaagagactgcagcagcacatccaggagctggaggcccacctggaggccgaggagggcgccagacagaagctgcagctggagaaggtgaccaccgaggccaagatgaagaagttcgaggaggacctgctgctgctggaggaccagaacagcaagctgagcaaggagagaaagctgctggaggacagactggccgagttcagcagccaggccgccgaggaggaggagaaggtgaagagcctgaacaagctgagactgaagtacgaggccaccatcgccgacatggaggacagactgagaaaggaggagaagggcagacaggagctggagaagctgaagagaagactggacggcgagagcagcgagctgcaggagcagatggtggagcagcagcagagagccgaggagctgagagcccagctgggcagaaaggaggaggagctgcaggccgccctggccagagccgaggacgagggcggcgccagagcccagctgctgaagagcctgagagaggcccaggccgccctggccgaggcccaggaggacctggagagcgagagagtggccagaaccaaggccgagaagcagagaagagacctgggcgaggagctggaggccctgagaggcgagctggaggacaccctggacagcaccaacgcccagcaggagctgagaagcaagagagagcaggaggtgaccgagctgaagaagaccctggaggaggagaccagaatccacgaggccgccgtgcaggagctgagacagagacacggccaggccctgggcgagctggccgagcagctggagcaggccagaagaggcaagggcgcctgggagaagaccagactggccctggaggccgaggtgagcgagctgagagccgagctgagcagcctgcagaccgccagacaggagggcgagcagagaagaagaagactggagctgcagctgcaggaggtgcagggcagagccggcgacggcgagagagccagagccgaggccgccgagaagctgcagagagcccaggccgagctggagaacgtgagcggcgccctgaacgaggccgagagcaagaccatcagactgagcaaggagctgagcagcaccgaggcccagctgcacgacgcccaggagctgctgcaggaggagaccagagccaagctggccctgggcagcagagtgagagccatggaggccgaggccgccggcctgagagagcagctggaggaggaggccgccgccagagagagagccggcagagagctgcagaccgcccaggcccagctgagcgagtggagaagaagacaggaggaggaggccggcgccctggaggccggcgaggaggccagaagaagagccgccagagaggccgaggccctgacccagagactggccgagaagaccgagaccgtggacagactggagagaggcagaagaagactgcagcaggagctggacgacgccaccatggacctggagcagcagagacagctggtgagcaccctggagaagaagcagagaaagttcgaccagctgctggccgaggagaaggccgccgtgctgagagccgtggaggagagagagagagccgaggccgagggcagagagagagaggccagagccctgagcctgaccagagccctggaggaggagcaggaggccagagaggagctggagagacagaacagagccctgagagccgagctggaggccctgctgagcagcaaggacgacgtgggcaagagcgtgcacgagctggagagagcctgcagagtggccgagcaggccgccaacgacctgagagcccaggtgaccgagctggaggacgagctgaccgccgccgaggacgccaagctgagactggaggtgaccgtgcaggccctgaagacccagcacgagagagacctgcagggcagagacgaggccggcgaggagagaagaagacagctggccaagcagctgagagacgccgaggtggagagagacgaggagagaaagcagagaaccctggccgtggccgccagaaagaagctggagggcgagctggaggagctgaaggcccagatggccagcgccggccagggcaaggaggaggccgtgaagcagctgagaaagatgcaggcccagatgaaggagctgtggagagaggtggaggagaccagaaccagcagagaggagatcttcagccagaacagagagagcgagaagagactgaagggcctggaggccgaggtgctgagactgcaggaggagctggccgccagcgacagagccagaagacaggcccagcaggacagagacgagatggccgacgaggtggccaacggcaacctgagcaaggccgccatcctggaggagaagagacagctggagggcagactgggccagctggaggaggagctggaggaggagcagagcaacagcgagctgctgaacgacagatacagaaagctgctgctgcaggtggagagcctgaccaccgagctgagcgccgagagaagcttcagcgccaaggccgagagcggcagacagcagctggagagacagatccaggagctgagaggcagactgggcgaggaggacgccggcgccagagccagacacaagatgaccatcgccgccctggagagcaagctggcccaggccgaggagcagctggagcaggagaccagagagagaatcctgagcggcaagctggtgagaagagccgagaagagactgaaggaggtggtgctgcaggtggaggaggagagaagagtggccgaccagctgagagaccagctggagaagggcaacctgagagtgaagcagctgaagagacagctggaggaggccgaggaggaggccagcagagcccaggccggcagaagaagactgcagagagagctggaggacgtgaccgagagcgccgagagcatgaacagagaggtgaccaccctgagaaacagactgagaagaggccccctgaccttcaccaccagaaccgtgagacaggtgttcagactggaggagggcgtggccagcgacgaggaggccgaggaggcccagcccggcagcggccccagccccgagcccgagggcagcccccccgcccacccccagtag

SEQ ID NO: 59110 - DNA, 6087 bp, Artificial Sequence
  derived and/or modified sequence
atggccgccgtgaccatgagcgtgcccggcagaaaggccccccccagacccggccccgtgcccgaggccgcccagcccttcctgttcacccccagaggccccagcgccggcggcggccccggcagcggcaccagcccccaggtggagtggaccgccagaagactggtgtgggtgcccagcgagctgcacggcttcgaggccgccgccctgagagacgagggcgaggaggaggccgaggtggagctggccgagagcggcagaagactgagactgcccagagaccagatccagagaatgaacccccccaagttcagcaaggccgaggacatggccgagctgacctgcctgaacgaggccagcgtgctgcacaacctgagagagagatactacagcggcctgatctacacctacagcggcctgttctgcgtggtgatcaacccctacaagcagctgcccatctacaccgaggccatcgtggagatgtacagaggcaagaagagacacgaggtgcccccccacgtgtacgccgtgaccgagggcgcctacagaagcatgctgcaggacagagaggaccagagcatcctgtgcaccggcgagagcggcgccggcaagaccgagaacaccaagaaggtgatccagtacctggcccacgtggccagcagccccaagggcagaaaggagcccggcgtgcccggcgagctggagagacagctgctgcaggccaaccccatcctggaggccttcggcaacgccaagaccgtgaagaacgacaacagcagcagattcggcaagttcatcagaatcaacttcgacgtggccggctacatcgtgggcgccaacatcgagacctacctgctggagaagagcagagccatcagacaggccaaggacgagtgcagcttccacatcttctaccagctgctgggcggcgccggcgagcagctgaaggccgacctgctgctggagccctgcagccactacagattcctgaccaacggccccagcagcagccccggccaggagagagagctgttccaggagaccctggagagcctgagagtgctgggcttcagccacgaggagatcatcagcatgctgagaatggtgagcgccgtgctgcagttcggcaacatcgccctgaagagagagagaaacaccgaccaggccaccatgcccgacaacaccgccgcccagaagctgtgcagactgctgggcctgggcgtgaccgacttcagcagagccctgctgacccccagaatcaaggtgggcagagactacgtgcagaaggcccagaccaaggagcaggccgacttcgccctggaggccctggccaaggccacctacgagagactgttcagatggctggtgctgagactgaacagagccctggacagaagccccagacagggcgccagcttcctgggcatcctggacatcgccggcttcgagatcttccagctgaacagcttcgagcagctgtgcatcaactacaccaacgagaagctgcagcagctgttcaaccacaccatgttcgtgctggagcaggaggagtaccagagagagggcatcccctggaccttcctggacttcggcctggacctgcagccctgcatcgacctgatcgagagacccgccaacccccccggcctgctggccctgctggacgaggagtgctggttccccaaggccaccgacaagagcttcgtggagaaggtggcccaggagcagggcggccaccccaagttccagagacccagacacctgagagaccaggccgacttcagcgtgctgcactacgccggcaaggtggactacaaggccaacgagtggctgatgaagaacatggaccccctgaacgacaacgtggccgccctgctgcaccagagcaccgacagactgaccgccgagatctggaaggacgagcacggcggcttccagcagttcagcttcctgggcagcttcccccccagcccccccggcagcgccgagagatgcagcagcgccatcagcccccccggcgtggagggcatcgtgggcctggagcaggtgagcagcctgggcgacggcccccccggcggcagacccagaagaggcatgttcagaaccgtgggccagctgtacaaggagagcctgagcagactgatggccaccctgagcaacaccaaccccagcttcgtgagatgcatcgtgcccaaccacgagaagagagccggcaagctggagcccagactggtgctggaccagctgagatgcaacggcgtgctggagggcatcagaatctgcagacagggcttccccaacagaatcctgttccaggagttcagacagagatacgagatcctgacccccaacgccatccccaagggcttcatggacggcaagcaggcctgcgagaagatgatccaggccctggagctggaccccaacctgtacagagtgggccagagcaagatcttcttcagagccggcgtgctggcccagctggaggaggagagagacctgaaggtgaccgacatcatcgtgagcttccaggccgccgccagaggctacctggccagaagagccttccagaagagacagcagcagcagagcgccctgagagtgatgcagagaaactgcgccgcctacctgaagctgagacactggcagtggtggagactgttcaccaaggtgaagcccctgctgcaggtgaccagacaggacgaggtgctgcaggccagagcccaggagctgcagaaggtgcaggagctgcagcagcagagcgccagagaggtgggcgagctgcagggcagagtggcccagctggaggaggagagagccagactggccgagcagctgagagccgaggccgagctgtgcgccgaggccgaggagaccagaggcagactggccgccagaaagcaggagctggagctggtggtgagcgagctggaggccagagtgggcgaggaggaggagtgcagcagacagatgcagaccgagaagaagagactgcagcagcacatccaggagctggaggcccacctggaggccgaggagggcgccagacagaagctgcagctggagaaggtgaccaccgaggccaagatgaagaagttcgaggaggacctgctgctgctggaggaccagaacagcaagctgagcaaggagagaaagctgctggaggacagactggccgagttcagcagccaggccgccgaggaggaggagaaggtgaagagcctgaacaagctgagactgaagtacgaggccaccatcgccgacatggaggacagactgagaaaggaggagaagggcagacaggagctggagaagctgaagagaagactggacggcgagagcagcgagctgcaggagcagatggtggagcagcagcagagagccgaggagctgagagcccagctgggcagaaaggaggaggagctgcaggccgccctggccagagccgaggacgagggcggcgccagagcccagctgctgaagagcctgagagaggcccaggccgccctggccgaggcccaggaggacctggagagcgagagagtggccagaaccaaggccgagaagcagagaagagacctgggcgaggagctggaggccctgagaggcgagctggaggacaccctggacagcaccaacgcccagcaggagctgagaagcaagagagagcaggaggtgaccgagctgaagaagaccctggaggaggagaccagaatccacgaggccgccgtgcaggagctgagacagagacacggccaggccctgggcgagctggccgagcagctggagcaggccagaagaggcaagggcgcctgggagaagaccagactggccctggaggccgaggtgagcgagctgagagccgagctgagcagcctgcagaccgccagacaggagggcgagcagagaagaagaagactggagctgcagctgcaggaggtgcagggcagagccggcgacggcgagagagccagagccgaggccgccgagaagctgcagagagcccaggccgagctggagaacgtgagcggcgccctgaacgaggccgagagcaagaccatcagactgagcaaggagctgagcagcaccgaggcccagctgcacgacgcccaggagctgctgcaggaggagaccagagccaagctggccctgggcagcagagtgagagccatggaggccgaggccgccggcctgagagagcagctggaggaggaggccgccgccagagagagagccggcagagagctgcagaccgcccaggcccagctgagcgagtggagaagaagacaggaggaggaggccggcgccctggaggccggcgaggaggccagaagaagagccgccagagaggccgaggccctgacccagagactggccgagaagaccgagaccgtggacagactggagagaggcagaagaagactgcagcaggagctggacgacgccaccatggacctggagcagcagagacagctggtgagcaccctggagaagaagcagagaaagttcgaccagctgctggccgaggagaaggccgccgtgctgagagccgtggaggagagagagagagccgaggccgagggcagagagagagaggccagagccctgagcctgaccagagccctggaggaggagcaggaggccagagaggagctggagagacagaacagagccctgagagccgagctggaggccctgctgagcagcaaggacgacgtgggcaagagcgtgcacgagctggagagagcctgcagagtggccgagcaggccgccaacgacctgagagcccaggtgaccgagctggaggacgagctgaccgccgccgaggacgccaagctgagactggaggtgaccgtgcaggccctgaagacccagcacgagagagacctgcagggcagagacgaggccggcgaggagagaagaagacagctggccaagcagctgagagacgccgaggtggagagagacgaggagagaaagcagagaaccctggccgtggccgccagaaagaagctggagggcgagctggaggagctgaaggcccagatggccagcgccggccagggcaaggaggaggccgtgaagcagctgagaaagatgcaggcccagatgaaggagctgtggagagaggtggaggagaccagaaccagcagagaggagatcttcagccagaacagagagagcgagaagagactgaagggcctggaggccgaggtgctgagactgcaggaggagctggccgccagcgacagagccagaagacaggcccagcaggacagagacgagatggccgacgaggtggccaacggcaacctgagcaaggccgccatcctggaggagaagagacagctggagggcagactgggccagctggaggaggagctggaggaggagcagagcaacagcgagctgctgaacgacagatacagaaagctgctgctgcaggtggagagcctgaccaccgagctgagcgccgagagaagcttcagcgccaaggccgagagcggcagacagcagctggagagacagatccaggagctgagaggcagactgggcgaggaggacgccggcgccagagccagacacaagatgaccatcgccgccctggagagcaagctggcccaggccgaggagcagctggagcaggagaccagagagagaatcctgagcggcaagctggtgagaagagccgagaagagactgaaggaggtggtgctgcaggtggaggaggagagaagagtggccgaccagctgagagaccagctggagaagggcaacctgagagtgaagcagctgaagagacagctggaggaggccgaggaggaggccagcagagcccaggccggcagaagaagactgcagagagagctggaggacgtgaccgagagcgccgagagcatgaacagagaggtgaccaccctgagaaacagactgagaagaggccccctgaccttcaccaccagaaccgtgagacaggtgttcagactggaggagggcgtggccagcgacgaggaggccgaggaggcccagcccggcagcggccccagccccgagcccgagggcagcccccccgcccacccccagtag

SEQ ID NO: 59111 - DNA, 6111 bp, Artificial Sequence
  derived and/or modified sequence
atggccgccgtgaccatgagcgtgcccggcagaaaggccccccccagacccggccccgtgcccgaggccgcccagcccttcctgttcacccccagaggccccagcgccggcggcggccccggcagcggcaccagcccccaggtggagtggaccgccagaagactggtgtgggtgcccagcgagctgcacggcttcgaggccgccgccctgagagacgagggcgaggaggaggccgaggtggagctggccgagagcggcagaagactgagactgcccagagaccagatccagagaatgaacccccccaagttcagcaaggccgaggacatggccgagctgacctgcctgaacgaggccagcgtgctgcacaacctgagagagagatactacagcggcctgatctacacctacagcggcctgttctgcgtggtgatcaacccctacaagcagctgcccatctacaccgaggccatcgtggagatgtacagaggcaagaagagacacgaggtgcccccccacgtgtacgccgtgaccgagggcgcctacagaagcatgctgcaggacagagaggaccagagcatcctgtgcaccggcgagagcggcgccggcaagaccgagaacaccaagaaggtgatccagtacctggcccacgtggccagcagccccaagggcagaaaggagcccggcgtgcccgtgagcaaccccgccctgggctggggcgagctggagagacagctgctgcaggccaaccccatcctggaggccttcggcaacgccaagaccgtgaagaacgacaacagcagcagattcggcaagttcatcagaatcaacttcgacgtggccggctacatcgtgggcgccaacatcgagacctacctgctggagaagagcagagccatcagacaggccaaggacgagtgcagcttccacatcttctaccagctgctgggcggcgccggcgagcagctgaaggccgacctgctgctggagccctgcagccactacagattcctgaccaacggccccagcagcagccccggccaggagagagagctgttccaggagaccctggagagcctgagagtgctgggcttcagccacgaggagatcatcagcatgctgagaatggtgagcgccgtgctgcagttcggcaacatcgccctgaagagagagagaaacaccgaccaggccaccatgcccgacaacaccgccgcccagaagctgtgcagactgctgggcctgggcgtgaccgacttcagcagagccctgctgacccccagaatcaaggtgggcagagactacgtgcagaaggcccagaccaaggagcaggccgacttcgccctggaggccctggccaaggccacctacgagagactgttcagatggctggtgctgagactgaacagagccctggacagaagccccagacagggcgccagcttcctgggcatcctggacatcgccggcttcgagatcttccagctgaacagcttcgagcagctgtgcatcaactacaccaacgagaagctgcagcagctgttcaaccacaccatgttcgtgctggagcaggaggagtaccagagagagggcatcccctggaccttcctggacttcggcctggacctgcagccctgcatcgacctgatcgagagacccgccaacccccccggcctgctggccctgctggacgaggagtgctggttccccaaggccaccgacaagagcttcgtggagaaggtggcccaggagcagggcggccaccccaagttccagagacccagacacctgagagaccaggccgacttcagcgtgctgcactacgccggcaaggtggactacaaggccaacgagtggctgatgaagaacatggaccccctgaacgacaacgtggccgccctgctgcaccagagcaccgacagactgaccgccgagatctggaaggacgagcacggcggcttccagcagttcagcttcctgggcagcttcccccccagcccccccggcagcgccgagagatgcagcagcgccatcagcccccccggcgtggagggcatcgtgggcctggagcaggtgagcagcctgggcgacggcccccccggcggcagacccagaagaggcatgttcagaaccgtgggccagctgtacaaggagagcctgagcagactgatggccaccctgagcaacaccaaccccagcttcgtgagatgcatcgtgcccaaccacgagaagagagccggcaagctggagcccagactggtgctggaccagctgagatgcaacggcgtgctggagggcatcagaatctgcagacagggcttccccaacagaatcctgttccaggagttcagacagagatacgagatcctgacccccaacgccatccccaagggcttcatggacggcaagcaggcctgcgagaagatgatccaggccctggagctggaccccaacctgtacagagtgggccagagcaagatcttcttcagagccggcgtgctggcccagctggaggaggagagagacctgaaggtgaccgacatcatcgtgagcttccaggccgccgccagaggctacctggccagaagagccttccagaagagacagcagcagcagagcgccctgagagtgatgcagagaaactgcgccgcctacctgaagctgagacactggcagtggtggagactgttcaccaaggtgaagcccctgctgcaggtgaccagacaggacgaggtgctgcaggccagagcccaggagctgcagaaggtgcaggagctgcagcagcagagcgccagagaggtgggcgagctgcagggcagagtggcccagctggaggaggagagagccagactggccgagcagctgagagccgaggccgagctgtgcgccgaggccgaggagaccagaggcagactggccgccagaaagcaggagctggagctggtggtgagcgagctggaggccagagtgggcgaggaggaggagtgcagcagacagatgcagaccgagaagaagagactgcagcagcacatccaggagctggaggcccacctggaggccgaggagggcgccagacagaagctgcagctggagaaggtgaccaccgaggccaagatgaagaagttcgaggaggacctgctgctgctggaggaccagaacagcaagctgagcaaggagagaaagctgctggaggacagactggccgagttcagcagccaggccgccgaggaggaggagaaggtgaagagcctgaacaagctgagactgaagtacgaggccaccatcgccgacatggaggacagactgagaaaggaggagaagggcagacaggagctggagaagctgaagagaagactggacggcgagagcagcgagctgcaggagcagatggtggagcagcagcagagagccgaggagctgagagcccagctgggcagaaaggaggaggagctgcaggccgccctggccagagccgaggacgagggcggcgccagagcccagctgctgaagagcctgagagaggcccaggccgccctggccgaggcccaggaggacctggagagcgagagagtggccagaaccaaggccgagaagcagagaagagacctgggcgaggagctggaggccctgagaggcgagctggaggacaccctggacagcaccaacgcccagcaggagctgagaagcaagagagagcaggaggtgaccgagctgaagaagaccctggaggaggagaccagaatccacgaggccgccgtgcaggagctgagacagagacacggccaggccctgggcgagctggccgagcagctggagcaggccagaagaggcaagggcgcctgggagaagaccagactggccctggaggccgaggtgagcgagctgagagccgagctgagcagcctgcagaccgccagacaggagggcgagcagagaagaagaagactggagctgcagctgcaggaggtgcagggcagagccggcgacggcgagagagccagagccgaggccgccgagaagctgcagagagcccaggccgagctggagaacgtgagcggcgccctgaacgaggccgagagcaagaccatcagactgagcaaggagctgagcagcaccgaggcccagctgcacgacgcccaggagctgctgcaggaggagaccagagccaagctggccctgggcagcagagtgagagccatggaggccgaggccgccggcctgagagagcagctggaggaggaggccgccgccagagagagagccggcagagagctgcagaccgcccaggcccagctgagcgagtggagaagaagacaggaggaggaggccggcgccctggaggccggcgaggaggccagaagaagagccgccagagaggccgaggccctgacccagagactggccgagaagaccgagaccgtggacagactggagagaggcagaagaagactgcagcaggagctggacgacgccaccatggacctggagcagcagagacagctggtgagcaccctggagaagaagcagagaaagttcgaccagctgctggccgaggagaaggccgccgtgctgagagccgtggaggagagagagagagccgaggccgagggcagagagagagaggccagagccctgagcctgaccagagccctggaggaggagcaggaggccagagaggagctggagagacagaacagagccctgagagccgagctggaggccctgctgagcagcaaggacgacgtgggcaagagcgtgcacgagctggagagagcctgcagagtggccgagcaggccgccaacgacctgagagcccaggtgaccgagctggaggacgagctgaccgccgccgaggacgccaagctgagactggaggtgaccgtgcaggccctgaagacccagcacgagagagacctgcagggcagagacgaggccggcgaggagagaagaagacagctggccaagcagctgagagacgccgaggtggagagagacgaggagagaaagcagagaaccctggccgtggccgccagaaagaagctggagggcgagctggaggagctgaaggcccagatggccagcgccggccagggcaaggaggaggccgtgaagcagctgagaaagatgcaggcccagatgaaggagctgtggagagaggtggaggagaccagaaccagcagagaggagatcttcagccagaacagagagagcgagaagagactgaagggcctggaggccgaggtgctgagactgcaggaggagctggccgccagcgacagagccagaagacaggcccagcaggacagagacgagatggccgacgaggtggccaacggcaacctgagcaaggccgccatcctggaggagaagagacagctggagggcagactgggccagctggaggaggagctggaggaggagcagagcaacagcgagctgctgaacgacagatacagaaagctgctgctgcaggtggagagcctgaccaccgagctgagcgccgagagaagcttcagcgccaaggccgagagcggcagacagcagctggagagacagatccaggagctgagaggcagactgggcgaggaggacgccggcgccagagccagacacaagatgaccatcgccgccctggagagcaagctggcccaggccgaggagcagctggagcaggagaccagagagagaatcctgagcggcaagctggtgagaagagccgagaagagactgaaggaggtggtgctgcaggtggaggaggagagaagagtggccgaccagctgagagaccagctggagaagggcaacctgagagtgaagcagctgaagagacagctggaggaggccgaggaggaggccagcagagcccaggccggcagaagaagactgcagagagagctggaggacgtgaccgagagcgccgagagcatgaacagagaggtgaccaccctgagaaacagactgagaagaggccccctgaccttcaccaccagaaccgtgagacaggtgttcagactggaggagggcgtggccagcgacgaggaggccgaggaggcccagcccggcagcggccccagccccgagcccgagggcagcccccccgcccacccccagtag

SEQ ID NO: 59112 - protein, 139 aa, Artificial Sequence
  derived and/or modified sequence
MSSKQATSPFACAADGEDAMTQDLTSREKEEGSDQHVASHLPLHPIMHNKPHSEELPTLVSTIQQDADWDSVLSSQQRMESENNKLCSLYSFRNTSTSPHKPDEGSRDREIMTSVTFGTPERRKGSLADVVDTLKQKKL

SEQ ID NO: 59113 - protein, 79 aa, Artificial Sequence
  derived and/or modified sequence
MSSKQATSPFACAADGEDAMTQDLTSREKEEGSDQHVASHLPLHPIMHNKPHSEELPTLVSTIQQDADWDSVLSSQQRM

SEQ ID NO: 59114 - protein, 159 aa, Artificial Sequence
  derived and/or modified sequence
MSSKQATSPFACAADGEDAMTQDLTSREKEEGSDQHVASHLPLHPIMHNKPHSEELPTLVSTIQQDADWDSVLSSQQRMESENNKLCSLYSFRNTSTSPHKPDEGSRDREIMTSVTFGTPERRKGSLADVVDTLKQKKLEEMTRTEQEDSSCMEKLLSK

SEQ ID NO: 59115 - DNA, 420 bp, Artificial Sequence
  derived and/or modified sequence
atgagcagcaagcaggccaccagccccttcgcctgcgccgccgacggcgaggacgccatgacccaggacctgaccagcagagagaaggaggagggcagcgaccagcacgtggccagccacctgcccctgcaccccatcatgcacaacaagccccacagcgaggagctgcccaccctggtgagcaccatccagcaggacgccgactgggacagcgtgctgagcagccagcagagaatggagagcgagaacaacaagctgtgcagcctgtacagcttcagaaacaccagcaccagcccccacaagcccgacgagggcagcagagacagagagatcatgaccagcgtgaccttcggcacccccgagagaagaaagggcagcctggccgacgtggtggacaccctgaagcagaagaagctgtag

SEQ ID NO: 59116 - DNA, 240 bp, Artificial Sequence
  derived and/or modified sequence
atgagcagcaagcaggccaccagccccttcgcctgcgccgccgacggcgaggacgccatgacccaggacctgaccagcagagagaaggaggagggcagcgaccagcacgtggccagccacctgcccctgcaccccatcatgcacaacaagccccacagcgaggagctgcccaccctggtgagcaccatccagcaggacgccgactgggacagcgtgctgagcagccagcagagaatgtag

SEQ ID NO: 59117 - DNA, 480 bp, Artificial Sequence
  derived and/or modified sequence
atgagcagcaagcaggccaccagccccttcgcctgcgccgccgacggcgaggacgccatgacccaggacctgaccagcagagagaaggaggagggcagcgaccagcacgtggccagccacctgcccctgcaccccatcatgcacaacaagccccacagcgaggagctgcccaccctggtgagcaccatccagcaggacgccgactgggacagcgtgctgagcagccagcagagaatggagagcgagaacaacaagctgtgcagcctgtacagcttcagaaacaccagcaccagcccccacaagcccgacgagggcagcagagacagagagatcatgaccagcgtgaccttcggcacccccgagagaagaaagggcagcctggccgacgtggtggacaccctgaagcagaagaagctggaggagatgaccagaaccgagcaggaggacagcagctgcatggagaagctgctgagcaagtag

SEQ ID NO: 59118 - DNA, 420 bp, Artificial Sequence
  derived and/or modified sequence
atgtccagcaagcaggctacaagtccattcgcttgcgctgcggacggggaagacgcgatgacccaggacttaacgtctagggaaaaggaggagggaagcgatcagcatgtcgcttcacatcttcctttacacccgataatgcataataagccacattcagaggagcttcccaccctggtcagtacaatacagcaggacgccgactgggactcagtgctttctagtcagcagcgtatggaatccgaaaataacaagttgtgttctctctattcttttcgcaatactagtacctctccacacaagcccgatgagggctcacgcgatcgggaaatcatgaccagcgtcacttttgggactccagaacggagaaaaggctccctggcggacgttgtcgacaccctgaaacaaaaaaagctctag

SEQ ID NO: 59119 - DNA, 240 bp, Artificial Sequence
  derived and/or modified sequence
atgtcctccaagcaggcaacttcccccttcgcgtgcgctgcggacggggaggatgcaatgacccaggatctgacaagtagggagaaggaagagggttcagaccaacacgtggcttcccatctcccattacatcccattatgcacaacaagccacatagtgaggaattgcccacgctggtatccacaatccaacaggacgccgactgggattccgttctgagttcccagcagcggatgtag

SEQ ID NO: 59120 - DNA, 480 bp, Artificial Sequence
  derived and/or modified sequence
atgtcaagcaagcaggccaccagccccttcgcttgcgcagccgacggcgaagacgcaatgacccaggatctcacaagtagggagaaagaggaggggtcggatcagcacgttgcctctcatctcccactgcacccaataatgcacaacaaaccccatagcgaggagctgccgaccctcgttagcaccatccaacaggatgccgattgggattcagtgctgtccagtcagcagcgcatggagtccgagaacaataaattatgttctctctattcttttagaaacacaagtacctccccccacaagccagatgaagggtcacgcgatcgggagataatgacttctgtcacgtttggcactcctgaacgacgaaagggctcactggcggatgtggtcgacacgctgaagcagaagaaattggaagagatgacaagaactgaacaggaagatagctcatgcatggagaagctactctctaaatag

SEQ ID NO: 59121 - DNA, 420 bp, Artificial Sequence
  derived and/or modified sequence
atgagcagcaagcaggccaccagcccctttgcctgtgccgcagatggagaagatgccatgacccaggacctgaccagccgggagaaggaggagggcagtgaccagcacgtggccagccacctgcccctgcaccccatcatgcacaacaagccccacagcgaggagctgcccaccctggtgtccaccatccagcaggatgctgactgggacagcgtgctgagcagccagcagaggatggagagcgagaacaacaagctgtgcagcctgtacagcttcaggaacaccagcaccagcccccacaagccagatgagggcagccgggaccgggagatcatgacctctgtgaccttcggcaccccagagaggaggaagggcagcctggctgatgtggtggacaccctgaagcagaagaagctgtag

SEQ ID NO: 59122 - DNA, 240 bp, Artificial Sequence
  derived and/or modified sequence
atgagcagcaagcaggccaccagcccctttgcctgtgccgcagatggagaagatgccatgacccaggacctgaccagccgggagaaggaggagggcagtgaccagcacgtggccagccacctgcccctgcaccccatcatgcacaacaagccccacagcgaggagctgcccaccctggtgtccaccatccagcaggatgctgactgggacagcgtgctgagcagccagcagaggatgtag

SEQ ID NO: 59123 - DNA, 480 bp, Artificial Sequence
  derived and/or modified sequence
atgagcagcaagcaggccaccagcccctttgcctgtgccgcagatggagaagatgccatgacccaggacctgaccagccgggagaaggaggagggcagtgaccagcacgtggccagccacctgcccctgcaccccatcatgcacaacaagccccacagcgaggagctgcccaccctggtgtccaccatccagcaggatgctgactgggacagcgtgctgagcagccagcagaggatggagagcgagaacaacaagctgtgcagcctgtacagcttcaggaacaccagcaccagcccccacaagccagatgagggcagccgggaccgggagatcatgacctctgtgaccttcggcaccccagagaggaggaagggcagcctggctgatgtggtggacaccctgaagcagaagaagctggaggagatgaccaggacagagcaggaggacagcagctgcatggagaagctgctgagcaagtag

SEQ ID NO: 59124 - DNA, 420 bp, Artificial Sequence
  derived and/or modified sequence
atgagcagcaagcaggccaccagccccttcgcctgcgccgccgacggagaagacgctatgactcaggatctgacgtcgcgcgagaaagaagaaggcagtgaccagcacgtggcgagccacctgccactgcacccaatcatgcataacaagccccattcagaggaactgccaacattggtctcaacaatacagcaggatgccgattgggactccgtattgtcatcgcagcaacgcatggagtcagaaaataacaaactgtgcagcctctattcctttcgcaatacgagcacaagcccacataagccggacgaagggtctagagatagggagattatgactagtgtgacctttgggacacccgagcggagaaagggcagcctagccgacgtcgtagacactttgaaacagaaaaagctgtag

SEQ ID NO: 59125 - DNA, 240 bp, Artificial Sequence
  derived and/or modified sequence
atgagcagcaagcaggccaccagccccttcgcctgcgccgccgacggcgaagacgccatgacacaggatctgacatcccgggagaaggaggagggatcagatcaacatgtggcgagccatctgccgctgcaccctataatgcataacaagccgcattccgaggagctcccgaccttagtatcaacaatccagcaggatgctgactgggactccgtgctgagctcacagcaacgcatgtag

SEQ ID NO: 59126 - DNA, 480 bp, Artificial Sequence
  derived and/or modified sequence
atgagcagcaagcaggccaccagccccttcgcctgcgccgccgacggcgaagatgctatgacacaagatctgacaagcagggagaaagaggagggatctgatcagcacgtggcttcccacctgccccttcatcctatcatgcataataagccacacagtgaagagttaccgaccctcgtgtctacgatccagcaggatgccgactgggatagcgtgctctcgagtcagcagcgcatggaaagtgagaataataaactgtgctccctctacagctttcgcaacacttccacttctccccataaaccggatgaggggtcccgagatagggagatcatgacttcggtgaccttcgggactcccgaaagacggaaggggtccctagccgatgtggttgatacactcaagcagaagaaactcgaagagatgacccgcactgaacaggaggattcttcatgtatggagaaattactttcaaagtag

SEQ ID NO: 59127 - DNA, 420 bp, Artificial Sequence
  derived and/or modified sequence
atgagttcaaagcaagccacttcccctttcgcctgcgcggctgatggtgaggacgccatgacccaggaccttacctcccgcgagaaggaagagggaagcgaccaacacgtcgcttcacatttgccccttcatcccattatgcataataagccacacagtgaagaactgccgaccctggtgtcaaccattcagcaggacgcggattgggattcagtcctgtctagccagcaaaggatggagtccgagaataacaaattgtgcagcctgtacagcttccggaatacatccacatcacctcacaagccagatgagggttccagagaccgcgagatcatgaccagcgtgacctttgggactcctgaaagacgaaaagggtcgctagcggacgtggtggacacattaaaacagaaaaaattatag

SEQ ID NO: 59128 - DNA, 240 bp, Artificial Sequence
  derived and/or modified sequence
atgagttcgaaacaggccacctcccccttcgcgtgtgccgcagacggggaagatgctatgactcaggatctaacttctcgcgagaaagaggaggggtccgatcagcatgtggcctcccacctcccgcttcatcctatcatgcataataaacctcactccgaagagcttcctaccctcgtgagcactatacagcaggacgccgattgggatagcgtcctcagcagccaacaaaggatgtag

SEQ ID NO: 59129 - DNA, 480 bp, Artificial Sequence
  derived and/or modified sequence
atgtcttccaaacaagccactagccccttcgcatgcgccgctgacggggaggacgccatgacgcaggatctcacatcacgggaaaaggaggaaggttccgaccagcatgtggcaagtcatttgcctttacatcccatcatgcataacaaacctcactctgaagaactgccaaccttggtttcaactatccagcaggatgctgactgggactcggtgctgtcctcacagcagagaatggaatcagagaataacaagctctgttcactgtacagctttcggaatacttccactagcccgcacaagcccgacgagggttcccgtgatagggagatcatgacgtcagtcactttcggcacgccagaacggaggaaaggctctttggcagatgtggtggatacactaaagcagaagaagctcgaagagatgacacgcaccgagcaggaggacagcagttgcatggagaaactcctgtccaagtag

SEQ ID NO: 59130 - protein, 178 aa, Artificial Sequence
  derived and/or modified sequence
MHVNGKVALVTGAAQGIGRAFAEALLLKGAKVALVDWNLEAGVQCKAALDEQFEPQKTLFIQCDVADQQQLRDTFRKVVDHFGRLDILVNNAGVNNEKNWEKTLQINLVSVISGTYLGLDYMSKQNGGEGGIIINMSSLAGLMPVAQQPVYCASKHGIVGFTRSAAPTIDCQWIDNTH

SEQ ID NO: 59131 - DNA, 537 bp, Artificial Sequence
  derived and/or modified sequence
atgcacgtgaacggcaaggtggccctggtgaccggcgccgcccagggcatcggcagagccttcgccgaggccctgctgctgaagggcgccaaggtggccctggtggactggaacctggaggccggcgtgcagtgcaaggccgccctggacgagcagttcgagccccagaagaccctgttcatccagtgcgacgtggccgaccagcagcagctgagagacaccttcagaaaggtggtggaccacttcggcagactggacatcctggtgaacaacgccggcgtgaacaacgagaagaactgggagaagaccctgcagatcaacctggtgagcgtgatcagcggcacctacctgggcctggactacatgagcaagcagaacggcggcgagggcggcatcatcatcaacatgagcagcctggccggcctgatgcccgtggcccagcagcccgtgtactgcgccagcaagcacggcatcgtgggcttcaccagaagcgccgcccccaccatcgactgccagtggatcgacaacacccactag

SEQ ID NO: 59132 - DNA, 537 bp, Artificial Sequence
  derived and/or modified sequence
atgcatgtcaatggaaaggtggctctcgtgaccggggccgcacagggcatcggtagagcatttgccgaagcactcctgcttaagggggcaaaagttgctttagtggattggaaccttgaggccggcgtgcaatgcaaggctgcccttgacgagcaattcgagcctcagaagaccttattcattcagtgcgacgttgctgaccagcagcagctgagggacacatttaggaaggtcgttgatcactttggacgcctggatatactggtgaataatgccggcgtgaataatgagaagaattgggagaagacccttcaaattaatctggtctccgtgatcagcggtacatacctcggattggattatatgagtaaacagaacggaggagaagggggcatcatcatcaacatgtcttctctggccgggttaatgccagtggctcagcagcctgtgtactgcgcgtccaagcacggaattgttgggtttactcggtctgctgctcctaccatcgattgccagtggatcgataatacacattag

SEQ ID NO: 59133 - DNA, 1171 bp, Artificial Sequence
  derived and/or modified sequence
agctcgcccaccgcccgccccagcagtggctgcaccatgcacgtgaacggcaaagtggcgctggtgaccggcgcggctcagggcataggcagagcctttgcagaggcgctgctgcttaagggcgccaaggtagcgctggtggattggaatcttgaagcaggtgtacagtgtaaagctgccctggatgagcagtttgaacctcagaagactctgttcatccagtgcgatgtggctgaccagcaacaactgagagacacttttagaaaagttgtagaccactttggaagactggacattttggtcaataatgctggagtgaataatgagaaaaactgggaaaaaactctgcaaattaatttggtttctgttatcagtggaacctatcttggtttggattacatgagtaagcaaaatggaggtgaaggcggcatcattatcaatatgtcatctttagcaggactcatgcccgttgcacagcagccggtttattgtgcttcaaagcatggcatagttggattcacacgctcagcagcgcccaccattgattgccaatggattgataacactcattgaagatgatgctttaaatggtgctattatgaagatcacaacttctaagggaattcattttcaagactatgatacaactccatttcaagcaaaaacccaatgaacagcttatgtgttagccatagctgaaaataagcacaaatagcttatattcagatcctatcttcatttgaatatagcttttaaatgaaatgttacagtttgaagttttccttcatgcacttggtgataaacgttttctaaatttttagttaagtatatggataaaaagttatgaactattaaaaatgtgatgtggaccaaaggctaggttgtaatcttgatagtctaaaaaatgatcaaaacaaatgattttcaaggaatattcaatattctgcctttcagaaagtgtatttatatctgtgcttcataaatattaatgttcttcagaacatcattttaaaggagatacttgaattgttatttaaatcaaaccagatgtaaaacactcacatacaagttcatactttaaaagaggaaagctacttaacaatgacaaatatttcacaataataatttttacttatataccatctttcaactgaacatttcagttcttcca

SEQ ID NO: 59134 - DNA, 537 bp, Artificial Sequence
  derived and/or modified sequence
atgcacgtgaatggcaaggtggccctggtgactggagctgcccagggcatcggccgggcctttgctgaggccctgctgctgaagggggccaaggtggccctggtggactggaacctggaggccggcgtgcagtgcaaggccgccctggatgagcagtttgagccccagaagaccctcttcatccagtgtgatgtggccgaccagcagcagctgcgggacaccttcaggaaggtggtggaccacttcggccgcctggacatcctggtgaacaatgctggggtgaacaatgagaagaactgggagaagaccctgcagatcaacctggtgtctgtcatcagcggcacctacctgggcctggactacatgagcaagcagaatggaggagagggcggcatcatcatcaacatgagcagcctggccggcctgatgcctgtggcccagcagcctgtgtactgtgccagcaagcacggcatcgtgggcttcaccaggtctgctgcccccaccatcgactgccagtggattgacaacacccactag

SEQ ID NO: 59135 - DNA, 537 bp, Artificial Sequence
  derived and/or modified sequence
atgcacgtgaacggcaaggtggccctggtgaccggcgccgcccagggaataggcagagcctttgctgaagccttgctgctgaagggagcaaaggttgcgctagtggactggaatctggaggctggagtgcaatgcaaagccgctttggacgaacagtttgaacctcagaagaccctcttcattcaatgcgacgtggctgatcaacaacagctgcgggacacctttaggaaggtcgttgaccactttggacgactggacattctggtcaacaacgcaggggtcaacaacgagaaaaattgggagaaaacccttcagataaatctcgtgtccgttatctccggcacgtacctaggtctagactatatgtccaagcaaaatggcggagaaggcggcatcatcataaatatgtcctctttggcaggcctgatgcccgtggcacaacagcctgtttactgtgcttctaaacacggcatcgtgggtttcacgcgtagcgctgctccgacaattgattgccaatggattgataacacgcactag

SEQ ID NO: 59136 - DNA, 537 bp, Artificial Sequence
  derived and/or modified sequence
atgcacgtgaacggcaaggtggcattggtaactggtgcggctcagggaatagggcgtgcttttgcagaggcacttctcttgaagggcgctaaggtcgcgctcgttgactggaacttagaagccggtgtacagtgcaaggccgctctcgacgaacaattcgagcctcagaaaactctcttcattcaatgtgacgtcgccgaccagcaacagctgagagatacatttcgcaaggtcgtagatcacttcgggcgtctcgacattctagtgaacaatgccggagtcaataacgaaaaaaactgggaaaagacactccaaataaacctcgtttcagtgatttccggtacctatttggggttagattacatgagcaagcagaatggaggagaaggcggtatcatcatcaacatgtctagtctggctggtctgatgccagttgcacaacagcccgtgtactgcgccagcaagcatggcattgtgggctttactcggtccgcagcaccaaccatcgactgccagtggatagacaacacccattag

SEQ ID NO: 59137 - protein, 828 aa, Artificial Sequence
  derived and/or modified sequence
MSSKQATSPFACAADGEDAMTQDLTSREKEEGSDQHVASHLPLHPIMHNKPHSEELPTLVSTIQQDADWDSVLSSQQRMESENNKLCSLYSFRNTSTSPHKPDEGSRDREIMTSVTFGTPERRKGSLADVVDTLKQKKLEEMTRTEQEDSSCMEKLLSKDWKEKMERLNTSELLGEIKGTPESLAEKERQLSTMITQLISLREQLLAAHDEQKKLAASQIEKQRQQMDLARQQQEQIARQQQQLLQQQHKINLLQQQIQVQGHMPPLMIPIFPHDQRTLAAAAAAQQGFLFPPGITYKPGDNYPVQFIPSTMAAAAASGLSPLQLQKGHVSHPQINQRLKGLSDRFGRNLDTFEHGGGHSYNHKQIEQLYAAQLASMQVSPGAKMPSTPQPPNTAGTVSPTGIKNEKRGTSPVTQVKDEAAAQPLNLSSRPKTAEPVKSPTSPTQNLFPASKTSPVNLPNKSSIPSPIGGSLGRGSSLDILSSLNSPALFGDQDTVMKAIQEARKMREQIQREQQQQQPHGVDGKLSSINNMGLNSCRNEKERTRFENLGPQLTGKSNEDGKLGPGVIDLTRPEDAEGSKAMNGSAAKLQQYYCWPTGGATVAEARVYRDARGRASSEPHIKRPMNAFMVWAKDERRKILQAFPDMHNSNISKILGSRWKSMSNQEKQPYYEEQARLSKIHLEKYPNYKYKPRPKRTCIVDGKKLRIGEYKQLMRSRRQEMRQFFTVGQQPQIPITTGTGVVYPGAITMATTTPSPQMTSDCSSTSASPEPSLPVIQSTYGMKTDGGSLAGNEMINGEDEMEMYDDYEDDPKSDYSSENEAPEAVSAN

SEQ ID NO: 59138 - DNA, 2487 bp, Artificial Sequence
  derived and/or modified sequence
atgagcagcaagcaggccaccagccccttcgcctgcgccgccgacggcgaggacgccatgacccaggacctgaccagcagagagaaggaggagggcagcgaccagcacgtggccagccacctgcccctgcaccccatcatgcacaacaagccccacagcgaggagctgcccaccctggtgagcaccatccagcaggacgccgactgggacagcgtgctgagcagccagcagagaatggagagcgagaacaacaagctgtgcagcctgtacagcttcagaaacaccagcaccagcccccacaagcccgacgagggcagcagagacagagagatcatgaccagcgtgaccttcggcacccccgagagaagaaagggcagcctggccgacgtggtggacaccctgaagcagaagaagctggaggagatgaccagaaccgagcaggaggacagcagctgcatggagaagctgctgagcaaggactggaaggagaagatggagagactgaacaccagcgagctgctgggcgagatcaagggcacccccgagagcctggccgagaaggagagacagctgagcaccatgatcacccagctgatcagcctgagagagcagctgctggccgcccacgacgagcagaagaagctggccgccagccagatcgagaagcagagacagcagatggacctggccagacagcagcaggagcagatcgccagacagcagcagcagctgctgcagcagcagcacaagatcaacctgctgcagcagcagatccaggtgcagggccacatgccccccctgatgatccccatcttcccccacgaccagagaaccctggccgccgccgccgccgcccagcagggcttcctgttcccccccggcatcacctacaagcccggcgacaactaccccgtgcagttcatccccagcaccatggccgccgccgccgccagcggcctgagccccctgcagctgcagaagggccacgtgagccacccccagatcaaccagagactgaagggcctgagcgacagattcggcagaaacctggacaccttcgagcacggcggcggccacagctacaaccacaagcagatcgagcagctgtacgccgcccagctggccagcatgcaggtgagccccggcgccaagatgcccagcaccccccagccccccaacaccgccggcaccgtgagccccaccggcatcaagaacgagaagagaggcaccagccccgtgacccaggtgaaggacgaggccgccgcccagcccctgaacctgagcagcagacccaagaccgccgagcccgtgaagagccccaccagccccacccagaacctgttccccgccagcaagaccagccccgtgaacctgcccaacaagagcagcatccccagccccatcggcggcagcctgggcagaggcagcagcctggacatcctgagcagcctgaacagccccgccctgttcggcgaccaggacaccgtgatgaaggccatccaggaggccagaaagatgagagagcagatccagagagagcagcagcagcagcagccccacggcgtggacggcaagctgagcagcatcaacaacatgggcctgaacagctgcagaaacgagaaggagagaaccagattcgagaacctgggcccccagctgaccggcaagagcaacgaggacggcaagctgggccccggcgtgatcgacctgaccagacccgaggacgccgagggcagcaaggccatgaacggcagcgccgccaagctgcagcagtactactgctggcccaccggcggcgccaccgtggccgaggccagagtgtacagagacgccagaggcagagccagcagcgagccccacatcaagagacccatgaacgccttcatggtgtgggccaaggacgagagaagaaagatcctgcaggccttccccgacatgcacaacagcaacatcagcaagatcctgggcagcagatggaagagcatgagcaaccaggagaagcagccctactacgaggagcaggccagactgagcaagatccacctggagaagtaccccaactacaagtacaagcccagacccaagagaacctgcatcgtggacggcaagaagctgagaatcggcgagtacaagcagctgatgagaagcagaagacaggagatgagacagttcttcaccgtgggccagcagccccagatccccatcaccaccggcaccggcgtggtgtaccccggcgccatcaccatggccaccaccacccccagcccccagatgaccagcgactgcagcagcaccagcgccagccccgagcccagcctgcccgtgatccagagcacctacggcatgaagaccgacggcggcagcctggccggcaacgagatgatcaacggcgaggacgagatggagatgtacgacgactacgaggacgaccccaagagcgactacagcagcgagaacgaggcccccgaggccgtgagcgccaactag

SEQ ID NO: 59139 - DNA, 2487 bp, Artificial Sequence
  derived and/or modified sequence
atgtctagtaagcaggccaccagtcctttcgcatgcgccgcggacggcgaagatgctatgacccaagacctgacctcccgcgagaaagaagaaggatctgaccagcatgtagcctcccacctgccgctacacccaatcatgcataacaagcctcacagtgaggaattaccgacactggtgtcaaccatccagcaggatgccgactgggacagcgtactaagctctcagcagcggatggaatcagaaaataacaaactctgtagcctgtacagcttcaggaacacctccacctcacctcataagcctgacgaggggtcacgggaccgagagattatgaccagtgtcacctttggcacaccggaacgtagaaaagggtccctggccgacgtggtggatactctgaagcaaaagaaacttgaggaaatgaccagaaccgagcaggaggacagctcctgtatggagaagttgctcagtaaagattggaaagagaagatggagaggcttaatacgagcgagttacttggagagattaaaggcacacctgaatctctcgccgagaaagaacgacagctgagtacaatgataacacaactaatcagtctgcgtgaacagctgctcgctgcccatgatgaacagaagaaacttgccgcgagccagatcgagaagcagaggcagcagatggacctcgctcggcagcagcaggaacagattgccaggcaacagcaacagctattacagcagcaacacaaaatcaacctcctgcagcagcagattcaggttcagggtcacatgccccccctaatgattcccatcttcccacatgaccagaggacactcgccgcggccgccgccgcacagcaggggttccttttcccacctggaattacgtacaaaccaggcgacaactaccccgttcagttcatccctagtacaatggcggcagctgccgcttccgggctatcaccactccagctgcaaaaggggcatgtgagtcaccctcagattaatcaaaggctcaaggggctatctgatcgttttggccggaacctcgatacattcgagcacggggggggacactcctataaccataagcaaattgagcagctttacgcagcgcagctcgcttccatgcaagtgtcccccggagcaaagatgcccagcacccctcaacctcctaataccgcgggtacggtgtctcctacgggtataaaaaatgaaaagcgcgggacaagcccagtgacacaggtcaaagatgaagccgcggcgcagccgctgaacctttccagcagacccaagacagctgagccagtgaagtcacccacgagcccaacacaaaacttgttccccgcatctaagaccagccccgtgaacctccctaacaaaagctcaatcccaagccccatcggtggctccctggggcggggtagttcattagacatcctgtcctcactgaatagcccagcactgttcggggatcaagataccgtgatgaaggcaatccaggaagctagaaaaatgcgtgagcagatccagagagaacagcagcagcagcagcctcacggtgtcgacgggaaactgtccagcattaataatatgggactgaattcctgtcgcaacgaaaaagaacgtacccgtttcgagaacctcgggccgcagcttactggtaagtccaatgaggacggcaaactcggacccggcgtgatcgatcttacccggcccgaagacgctgaagggagcaaggctatgaacggatccgctgccaagctgcagcagtattactgttggcctacaggaggggccacagtggctgaagcgcgggtgtaccgagacgcacgtgggcgcgcctcctccgagccacatattaagaggcctatgaatgcctttatggtgtgggccaaagatgagagacgtaagatcttacaggcattcccagacatgcataattcaaacatctctaagattttaggaagcagatggaaatcgatgagcaaccaggagaaacagccctactacgaggagcaggcgcgcctgtctaaaatccacctggagaaatacccaaactataagtacaagcctagacctaagagaacatgtattgtggacggcaaaaagctccgtattggagagtataaacaactaatgcggtcgaggcggcaggagatgcggcaatttttcaccgtggggcagcagcctcaaatccctattacaaccggtaccggcgtggtttatcccggcgcgatcacaatggcgaccactacaccttctcctcagatgacaagtgattgttcaagcacatccgcatctcctgaaccctcacttccagttatccagtctacatatggtatgaagacagacggcgggagtttggccggtaacgaaatgatcaatggggaggacgagatggaaatgtatgacgactacgaagacgatcccaaatctgactatagtagcgaaaatgaagcaccagaggcggtgtcagccaattag

SEQ ID NO: 59140 - DNA, 2487 bp, Artificial Sequence
  derived and/or modified sequence
atgtcatcaaaacaggccacctcaccctttgcttgtgcagccgacggggaggacgccatgacgcaggacctgacttcaagggagaaggaggaaggatctgaccaacatgtcgcctcacaccttccattgcaccccatcatgcataataagccgcactcagaagaactcccgaccctggtgagcacaatccaacaggacgctgactgggactccgtcctgagctcacagcagcgcatggaaagcgaaaataataagctgtgttccctttatagctttaggaacaccagtacctcccctcataagcctgatgagggcagtcgcgaccgggagataatgactagtgtgacattcggcaccccagagagacggaaagggtccctggcagatgtcgttgacaccctgaagcagaagaagctggaggaaatgacaaggacggaacaggaggattcttcgtgtatggaaaagttgcttagtaaggactggaaggagaaaatggagcggttgaacacctctgaactgcttggagagatcaaaggcacccccgagtctcttgccgaaaaggaaagacagctgagcacaatgataacacaactcatctccctgcgggagcagctcctggctgcccacgatgaacaaaaaaaattggctgcttctcagatagaaaaacaaagacagcagatggacctcgcacgccagcagcaagaacaaatcgcgcgccagcagcaacagctattgcagcagcagcacaaaattaacttgctgcagcagcagattcaggtgcaaggccacatgccccccctgatgattcccatttttccacacgatcaacggactttggctgccgctgcggcggcccagcagggctttctgtttcccccgggcatcacctataaacctggcgataactacccagtgcagttcattccaagcacgatggccgcagcagccgcaagtgggctcagccctctccaactgcaaaaaggacatgtgtcccaccctcaaattaaccaacggctgaaaggcctgtccgatcggtttggtcggaacctagacaccttcgagcacggagggggacattcctataatcataaacagattgagcagctttatgcggcccaactcgccagtatgcaggtgagtcccggtgcaaaaatgccctcaactccccaaccacctaacacggccggtaccgtctctcccacaggtatcaagaacgagaaaagggggaccagtcccgttacacaggtgaaggacgaagccgctgcccagcccctcaatctgagtagcaggccaaaaaccgccgagcccgtcaagtctcctacgtcaccaacacaaaatctgttcccggcatccaaaactagccccgtaaatctgcccaacaagtcctccatccccagtcctatcggcgggtccctgggaaggggatctagtttagatatcctttcatcccttaattcacctgcattgttcggtgaccaagatacagttatgaaagctatccaagaggcgaggaagatgcgggagcagattcaacgggagcagcagcagcagcaacctcatggagtggatggcaaattgagctctatcaataacatgggccttaacagctgtcgaaacgagaaggaacggactagatttgagaatcttggtccacagctcaccgggaagtcaaacgaagatggtaaactggggcccggcgtgatagaccttactcggcctgaggatgcagagggctctaaagccatgaacggatcggccgcaaaactgcagcagtattactgctggccgactggtggcgctactgtggctgaggcccgtgtctatcgcgacgctagggggcgggcatcttctgagcctcatataaagagacctatgaacgcgttcatggtttgggcgaaggacgagcgccgtaagatcctgcaggctttccccgatatgcacaactccaatatcagcaagattcttgggagccgctggaagagcatgagcaatcaggagaagcagccctactacgaagagcaggcccgccttagtaaaatccacctggagaaataccctaactataagtacaaacccaggcctaaacggacatgtatcgtggatggtaagaagctacggatcggcgagtacaagcagctgatgaggtctcgccggcaggagatgagacaatttttcactgtcggacaacagccccagatcccaatcacaactggcaccggggtggtataccccggggccataacaatggctaccacaactccctctccccagatgacttcagactgcagctccacatcggcatccccagagcctagtctcccggtgatccaatccacatatggaatgaaaaccgatggcggaagcctagccggaaacgagatgattaatggtgaagacgagatggaaatgtacgatgactatgaggatgaccctaagagcgactacagcagtgagaatgaggcgcccgaggccgtgagcgccaactag

SEQ ID NO: 59141 - DNA, 2487 bp, Artificial Sequence
  derived and/or modified sequence
atgagcagcaagcaggccaccagcccctttgcctgtgccgcagatggagaagatgccatgacccaggacctgaccagccgggagaaggaggagggcagtgaccagcacgtggccagccacctgcccctgcaccccatcatgcacaacaagccccacagcgaggagctgcccaccctggtgtccaccatccagcaggatgctgactgggacagcgtgctgagcagccagcagaggatggagagcgagaacaacaagctgtgcagcctgtacagcttcaggaacaccagcaccagcccccacaagccagatgagggcagccgggaccgggagatcatgacctctgtgaccttcggcaccccagagaggaggaagggcagcctggctgatgtggtggacaccctgaagcagaagaagctggaggagatgaccaggacagagcaggaggacagcagctgcatggagaagctgctgagcaaggactggaaggagaagatggagcggctgaacaccagcgagctgctgggggagatcaagggcaccccagagagcctggccgagaaggagcggcagctgagcaccatgatcacccagctgatcagcctgcgggagcagctgctggccgcccatgatgagcagaagaagctggccgccagccagatcgagaagcagaggcagcagatggacctggcccggcagcagcaggagcagatcgcccggcagcagcagcagctgctgcagcagcagcacaagatcaacctgctgcagcagcagatccaggtgcagggccacatgccacccctgatgatccccatcttcccccatgaccagaggaccctggccgctgctgctgctgcccagcagggcttcctgttccccccaggcatcacctacaagccaggggacaactaccctgtgcagttcatccccagcaccatggctgctgctgctgccagcggcctgagccccctgcagctgcagaagggccacgtgagccacccccagatcaaccagaggctgaagggcctgagtgaccgcttcggcaggaacctggacacctttgaacatggaggcggccacagctacaaccacaagcagatcgagcagctgtatgctgcccagctggcctccatgcaggtgtcccctggggccaagatgcccagcaccccccagccccccaacacagctggcaccgtgagccccaccggcatcaagaatgagaagaggggcaccagccctgtgacccaggtgaaggatgaggccgccgcccagcccctgaacctgagcagccggcccaagacagctgagcctgtgaagagccccaccagccccacccagaacctcttccctgccagcaagaccagccctgtgaacctgcccaacaagagcagcatccccagccccatcggcggcagcctgggccggggcagcagcctggacatcctgagcagcctgaacagccctgccctgtttggagaccaggacacagtgatgaaggccatccaggaggccaggaagatgagggagcagatccagcgggagcagcagcagcagcagccccacggcgtggatggcaagctgagcagcatcaacaacatgggcctgaacagctgcagaaatgagaaggagaggaccaggtttgagaacctgggcccccagctgaccgggaagagcaatgaagatggcaagctgggccctggggtcatcgacctgaccaggccagaagatgctgagggcagcaaggccatgaatggatctgctgccaagctgcagcagtactactgctggcccactggaggagccaccgtggccgaggcccgggtgtacagagatgcccggggccgggccagcagcgagccccacatcaagaggcccatgaatgccttcatggtgtgggccaaggatgagaggaggaagatcctgcaggccttcccagacatgcacaacagcaacatcagcaagatcctgggcagccgctggaagtccatgagcaaccaggagaagcagccctactatgaggagcaggcccggctgagcaagatccacctggagaagtaccccaactacaagtacaagccccggcccaagaggacctgcatcgtggatggcaagaagctgagaattggagagtacaagcagctgatgaggagccggcggcaggagatgaggcagttcttcaccgtgggccagcagccccagatccccatcaccactggaactggagtggtgtacccaggggccatcaccatggccaccaccacccccagcccccagatgaccagtgactgcagcagcaccagcgccagccctgagcccagcctgcccgtcatccagagcacctacggcatgaagacagatggcggcagcctggccggaaatgagatgatcaacggggaggatgagatggagatgtatgatgattatgaagatgaccccaagagtgactacagcagtgaaaatgaggcccctgaggccgtgtctgccaactag

SEQ ID NO: 59142 - DNA, 2487 bp, Artificial Sequence
  derived and/or modified sequence
atgagcagcaagcaggccaccagccccttcgcctgcgccgccgacggggaggacgctatgacacaggatttaacctctagagagaaagaggaaggcagcgaccaacacgtagcctcccacttacccctacatccaatcatgcataacaagccacatagcgaggagctccccacgctcgtctccaccatacagcaggacgcagattgggacagcgtgttgtctagccaacagcgcatggagagcgagaataataaactgtgtagcctctactctttcaggaacactagtacctcgcctcacaagccagacgaaggctcgagggaccgggaaataatgacaagtgtgacatttggtacccccgaacgcaggaaggggagtctggccgacgtggtggatacactgaaacaaaagaagctcgaagaaatgaccaggacggagcaggaggatagcagttgcatggaaaaactcctttccaaggactggaaagaaaagatggagagactgaataccagtgaactgctcggtgaaattaagggtactcccgaaagtcttgcagagaaggagaggcaactgtccaccatgatcacacagctcatcagcctgcgggagcagctgttagctgctcacgacgaacagaaaaagcttgcagccagtcagatagagaaacagagacagcaaatggacctcgcgaggcaacagcaggaacaaatcgcgcgacagcagcaacagctgctccagcagcagcacaaaatcaatctccttcaacagcagatacaggttcaaggccatatgcccccccttatgattcccatcttccctcacgaccagcgcaccctcgcagcagctgctgcagcacagcagggattcttgtttcccccaggcattacgtataagccaggggacaattacccggttcagttcattcctagcaccatggctgccgccgcagctagtgggctctcacccctgcagttgcagaaaggccacgtgtctcacccacagattaatcagcgcctaaaaggcttgtcggatagattcggaaggaatttggatactttcgaacatggcgggggacactcttacaaccataagcagatcgagcaactgtacgccgctcagctcgcgtccatgcaggtcagtcccggagccaaaatgccttccaccccccagcctcctaataccgctggtactgtatccccaactggcattaagaatgagaagcgggggacttcccctgttacccaagtcaaagacgaagcggctgctcagccactgaatctcagctccaggcctaagaccgccgagccagtgaagtccccaacctctcccacacagaatctgttccctgctagcaagacatccccggtaaatcttcccaacaaaagttctattccatcaccgattggcggctccctggggaggggctcatctctcgatatcctttcctccttgaattccccggccctgtttggagatcaggacacggtaatgaaggctatccaggaggccagaaagatgcgggaacagatacagcgggagcagcaacagcagcagccacacggtgtggacggaaaactgagctcaatcaataatatggggcttaactcttgtcggaacgagaaagagcgcactagatttgagaatctgggcccacaacttacaggaaaatccaatgaggacgggaagttgggccctggcgtcattgacctgactagaccagaggacgccgaggggtctaaagccatgaatggatcagcagcgaagttgcaacagtactattgttggccaaccggtggcgctacagtcgcggaagcccgggtttatagagacgcccgtggcagagcatcatccgagccacacatcaaacgcccaatgaacgcattcatggtttgggctaaggatgaacgcaggaagatcctgcaagcatttcccgacatgcacaacagtaatatatccaagatattgggatccaggtggaagtcaatgtcaaaccaggagaaacaaccatattacgaggagcaggccagactgtccaagattcatctggaaaagtatcccaactataagtataagccacggcctaaacgcacttgtattgtggatggaaagaagctgagaatcggagagtataaacagctgatgagatctcgcaggcaggaaatgagacagttttttactgttgggcagcagccacagattcctatcacgacaggaactggcgtggtttatccgggcgccattacaatggcaactacaacaccgagcccacagatgacctccgattgttccagcacctctgccagccctgagccctctttgccagtgatccaatccacatacgggatgaagacagatggcggctccctcgccggcaatgaaatgatcaacggcgaagacgaaatggagatgtacgacgactacgaggacgaccctaagtcggattacagctccgagaatgaggcaccagaggcggtgagtgcaaactag

SEQ ID NO: 59143 - DNA, 2487 bp, Artificial Sequence
  derived and/or modified sequence
atgagcagcaagcaggccaccagccccttcgcctgcgccgccgacggtgaggacgccatgactcaggacttaacaagcagagaaaaggaggaaggcagcgatcagcatgtcgcttcccacctgccactacatcctatcatgcacaataagcctcattcagaagagcttccaacactggttagcacgatccagcaagacgccgactgggactcagtgttatcaagccagcagcgtatggaatccgagaataataagctatgctctctgtattctttccgaaatacgtccacctcgccacacaagcctgatgaaggcagccgggaccgagagattatgacttctgttacgttcggcacccctgagaggagaaaaggaagcctcgccgatgtagttgatacgctcaagcagaaaaaacttgaggaaatgacccggacagagcaggaggattcatcttgtatggaaaaactgcttagcaaggactggaaggagaaaatggaaagactaaatacgagtgagttgctgggtgaaatcaagggcactccagaatcccttgctgagaaagagcgccaactaagtacaatgattactcagcttatcagcctccgggaacaactcctggctgcacacgacgaacagaagaaacttgcagcctctcagattgagaagcagcgccagcagatggacttggcgaggcagcagcaggagcagatagctcgacagcagcagcaactgctccaacagcagcataagattaacctgttgcagcagcagatacaagtccagggacacatgccaccccttatgattccgatcttccctcatgaccagaggacgctcgccgccgccgctgccgctcagcagggcttccttttcccacccggcatcacatataagccaggtgacaactaccctgtccagtttataccatccactatggccgccgcggccgccagtggcctaagtccgctgcaactgcagaaaggacacgtctcacaccctcagatcaaccagagactgaaaggcctgagtgacaggttcggtagaaatttggacacattcgagcacggcggcggacactcatataaccataagcaaattgagcaactgtatgcagctcagttagctagcatgcaggtgtctccaggcgccaagatgccatctacaccccaaccgcccaatacagcaggcactgtgagtccaaccggtattaagaacgaaaagagaggcacaagtccagtcacacaggtgaaagatgaagcagcggcccagccgctaaacctgtcctccagacccaaaactgctgagcccgtgaagtcccccaccagtcccacacagaacttatttcctgctagcaagacctccccagtgaacctgcctaataaatccagcatacccagtccaatcggcggttccctgggcaggggttcctcattggatattctgagcagtctgaatagccctgccctgttcggagaccaagacaccgttatgaaggcaatccaagaagcacgaaaaatgcgtgagcagattcagcgcgaacagcagcagcagcagccccatggcgtcgatgggaagttgtctagcatcaataacatgggtctgaattcttgccgcaacgagaaagaacgaacccgcttcgaaaaccttggcccgcagctgacaggcaaatccaatgaagatggtaaactgggtcctggcgtcatcgatcttacgcgccctgaagatgcggaaggttccaaagctatgaacggctccgcggctaaactgcagcagtattactgctggccaacaggaggagcaacagttgccgaggctagagtctatagggacgcgcgaggacgagcttccagtgaaccgcatatcaagcggccgatgaacgcattcatggtctgggctaaagatgaaagacgcaaaatcttacaggcttttccagacatgcacaactctaacattagcaagatccttgggagcaggtggaagagtatgtctaaccaggagaaacagccatattatgaagaacaggctagattgagcaaaatacatttggaaaaatatcctaattacaagtacaaacctcggccaaaacgaacctgtattgtcgatggcaagaagttgcgaatcggggagtacaaacaactcatgcgtagccgacgtcaggaaatgcggcagttctttacagtcggacagcaaccccagattcctatcacaacggggacaggcgtcgtgtaccctggcgccattacgatggccacaacgactccctcaccacagatgactagcgactgttcttcgacatcagctagtccggaacctagcctgcccgtcatccagagcacatacggaatgaaaacagacggaggcagcctcgcaggaaatgagatgattaatggcgaggatgagatggaaatgtatgatgactatgaggatgacccaaagagcgattattcctctgagaatgaggctcctgaagcggtctcagcaaattag

SEQ ID NO: 59144 - DNA, 2487 bp, Artificial Sequence
  derived and/or modified sequence
atgtcttctaagcaagcaacctccccgtttgcatgcgccgctgatggggaagatgccatgacgcaggaccttacctcgagagagaaggaagaaggcagtgatcagcatgtggctagccacttgccactgcaccctatcatgcacaacaagccccactccgaagaactgcccactctggttagcacgatccagcaggacgcggattgggactccgtcctaagctcacagcagaggatggagtcagagaataataagctctgctccttgtattcattcaggaacaccagcacatcgccacataaaccggacgagggcagccgcgaccgcgaaataatgacgtccgttaccttcggcacccccgagaggcgtaaggggagcctggcagacgtggtggatactctgaagcagaagaagctcgaagagatgacacgaactgagcaggaggatagttcctgcatggagaagctgctatcgaaggactggaaggaaaaaatggagcgactcaatacgtcggaactgttaggagaaattaagggaacccctgagagccttgctgaaaaggagagacaattaagtacaatgattacccagttgatttccctgcgggagcagcttctcgctgcacacgacgagcagaaaaaacttgctgcgagccagattgaaaaacaacgtcagcagatggatctagcaagacagcagcaagagcagattgccaggcagcagcagcagctgctgcaacagcaacataagataaatttgctccagcagcagatccaggttcagggtcatatgcccccattgatgattcccatctttccacatgaccagaggaccctcgctgctgccgcagccgcacagcaagggtttctgtttcccccagggatcacatacaagcctggagataattatcctgtgcaattcatcccgtcgacaatggcagcggcagcagcatctggtctcagcccactccagctgcagaaagggcacgtcagccacccccagatcaaccaacgactcaagggcctcagcgaccgattcgggagaaacttggacacatttgagcacggtggaggtcactcttataaccataaacagatcgagcaactctatgctgcccagttagcctccatgcaggtgagccctggcgcaaaaatgccttctacgccacaacccccaaatactgcagggacagtcagtcccacgggaattaagaatgagaaaagaggaacctcaccggtcacacaagtgaaagatgaggccgctgcccagcccttgaacctttcctctcggcctaagactgcggagcccgtgaagtcccctactagccccacccagaacttattccccgcaagtaaaacatcccctgtcaacctgccaaataaatcgtctatcccatcacccatagggggtagtctgggtagaggatcaagtctcgatattctatcatccctgaattccccagctttgtttggcgaccaggacacagtgatgaaggcgattcaagaggctcggaagatgcgagaacagatccagcgggaacagcagcagcagcagccacacggagtggatggcaagctgtcatctatcaacaacatgggcttgaatagctgtaggaatgagaaagaacgaacgaggtttgagaacttgggcccacagcttaccgggaagtccaacgaggatggcaagctgggcccaggagtgattgacttgactaggcctgaagatgccgagggtagcaaagccatgaatggcagcgctgccaagctgcagcagtattactgctggcccactggaggggctacagtggccgaagcccgagtgtaccgggacgccaggggcagggccagttccgagccacacatcaagaggcccatgaacgcattcatggtctgggcgaaagacgagaggcggaagattttacaggctttcccggacatgcacaacagtaatatctcaaagatcctcggtagccggtggaagtcaatgtccaaccaggagaagcagccctactatgaagagcaagccaggctgagcaaaatccatctggagaagtacccaaattacaagtataagccaagacctaaaaggacctgtatcgtcgatgggaagaagctgagaataggcgaatacaaacagctcatgcggtcacggcgacaagagatgcgtcagttttttactgtggggcagcagcctcaaatacccatcacaactggaacaggggtggtctacccaggtgcaataactatggcaactaccacccccagtccccagatgacgagcgattgcagctccacgtcagcgtctcctgagccttcactacctgtgatccaatcaacatatgggatgaagaccgatggcggtagcctggctggaaatgaaatgataaatggagaggatgagatggaaatgtacgatgactatgaggacgaccccaagtcagactacagcagtgagaatgaggcacccgaggccgtctctgccaactag

SEQ ID NO: 59145 - DNA, 2487 bp, Artificial Sequence
  derived and/or modified sequence
atgtcaagcaaacaagctacctctccattcgcctgtgcggctgatggggaagatgcaatgactcaggatctgacttctcgcgaaaaggaggaggggagcgaccagcatgtagcttctcatctccctctccacccaattatgcataataaaccccattccgaggagctcccaaccttggtgagcaccatccaacaagacgcagactgggacagcgtgctgagttcacagcagcgtatggagagcgaaaataacaagctgtgttccctgtatagctttcgaaatacttcaacctctccccacaagccagatgagggctcaagggatcgcgagattatgacatccgtcacttttggaactcctgagcgacgtaaaggtagtttagctgacgtagtggataccctcaagcagaaaaagttggaggagatgacccggaccgagcaagaggactccagttgtatggagaaactcttatccaaagactggaaagaaaagatggagcgcctcaatacatctgagctcctgggagaaatcaagggcactccggagagcctagctgaaaaggaacgccagctcagcaccatgattacccagctcataagcctgcgggagcaactgctcgcagctcatgatgagcagaaaaaactagcggcttctcaaattgaaaaacagcgccagcagatggatcttgcccgtcaacagcaagaacagatagccagacagcagcagcaattactgcaacagcagcacaaaatcaacctgctccagcagcaaatccaggtgcagggccacatgccacccctgatgatcccaattttcccacacgaccagcgtaccctggcagctgccgcagccgcacagcaaggctttctgtttcctccagggatcacttacaagcccggtgacaactaccctgtccagttcattccgtcaacaatggccgctgctgccgcatccgggctctcccctctacaactccagaaaggtcacgttagtcatcctcaaattaaccagcggcttaagggactttccgatcgcttcggcagaaatttggacactttcgagcacggcggaggccattcatacaaccacaaacagattgaacagctgtacgccgctcagctagccagcatgcaggtgagccctggagccaagatgccttctactcctcaaccccctaacactgccggaactgtctcccctaccggtattaagaatgaaaaacgaggaactagcccggtcacccaggtgaaagacgaagcggctgctcagcctctaaatctctcaagccgcccaaagacggctgagccagtgaagagtcctaccagcccgacgcagaaccttttccccgcatcaaaaaccagcccagttaaccttccaaataaaagctcaataccatctccaattgggggttcactgggccgaggaagttccttggacattctttcaagtctgaatagccccgctttattcggcgaccaggacaccgtgatgaaggccatacaggaagctaggaaaatgagggaacagatccagcgcgaacagcagcagcagcagccacacggagtcgatggaaaactctcttctataaacaacatgggcctgaactcatgccgaaacgaaaaagaaagaactcgcttcgagaacttagggcctcagctgacaggaaagagcaacgaggatgggaaactgggtccaggggttatagacctgacacgtcctgaggatgctgaggggtctaaagcaatgaatggctccgctgctaaactgcagcagtactactgctggccgaccggaggggctacagtcgctgaagcgagagtctacagagatgcacgcggacgggctagtagtgagccgcacattaagagaccaatgaatgcattcatggtgtgggcaaaagacgagcggcgaaaaattttgcaggcatttcccgacatgcacaatagcaacatttctaaaatcttggggagccggtggaagtcgatgagtaaccaggaaaagcagccatattacgaagagcaggctcgattgagcaagatccatttggagaagtaccccaattacaaatacaaacccagacccaagaggacctgcattgtcgatggcaaaaagctcagaatcggagagtacaagcaattgatgagaagtcggagacaagagatgagacagttctttaccgtgggtcagcagccccagattcccataaccaccggcaccggggtagtttatcccggtgccatcacaatggcaactacaacaccctcaccacagatgaccagcgattgtagttcgacctccgcctcacccgaaccatcactccccgttattcagagtacctacggcatgaaaaccgatggtggctctttggccggtaatgagatgatcaatggcgaggacgagatggagatgtacgatgactacgaagacgatcctaaatccgactactcgagcgaaaacgaagccccagaggctgtatctgccaattag

SEQ ID NO: 59146 - DNA, 8925 bp, Artificial Sequence
  derived and/or modified sequence
gtcactttcatgaattcaaaggcaatttaccagtgatttctgggtgctggggctgatattttttgtgcatatttaagaatgtcttccaagcaagccacctctccatttgcctgtgcagctgatggagaggatgcaatgacccaggatttaacctcaagggaaaaggaagagggcagtgatcaacatgtggcctcccatctgcctctgcaccccataatgcacaacaaacctcactctgaggagctaccaacacttgtcagtaccattcaacaagatgctgactgggacagcgttctgtcatctcagcaaagaatggaatcagagaataataagttatgttccctatattccttccgaaatacctctacctcaccacataagcctgacgaagggagtcgggaccgtgagataatgaccagtgttacttttggaaccccagagcgccgcaaagggagtcttgccgatgtggtggacacactgaaacagaagaagcttgaggaaatgactcggactgaacaagaggattcctcctgcatggaaaaactactttcaaaagattggaaggaaaaaatggaaagactaaataccagtgaacttcttggagaaattaaaggtacacctgagagcctggcagaaaaagaacggcagctctccaccatgattacccagctgatcagtttacgggagcagctactggcagcgcatgatgaacagaaaaaactggcagcgtcacaaattgagaaacaacggcagcaaatggaccttgctcgccaacagcaagaacagattgcgagacaacagcagcaacttctgcaacagcagcacaaaattaatctcctgcagcaacagatccaggttcagggtcacatgcctccgctcatgatcccaatttttccacatgaccagcggactctggcagcagctgctgctgcccaacagggattcctcttcccccctggaataacatacaaaccaggtgataactaccccgtacagttcattccatcaacaatggcagctgctgctgcttctggactcagccctttacagctccagaagggtcatgtctcccacccacaaattaaccaaaggctaaagggcctaagtgaccgttttggcaggaatttggacacctttgaacatggtggtggccactcttacaaccacaaacagattgagcagctctatgccgctcagctggccagcatgcaggtgtcacctggagcaaagatgccatcaactccacagccaccaaacacagcagggacggtctcacctactgggataaaaaatgaaaagagagggaccagccctgtaactcaagttaaggatgaagcagcagcacagcctctgaatctctcatcccgacccaagacagcagagcctgtaaagtccccaacgtctcccacccagaacctcttcccagccagcaaaaccagccctgtcaatctgccaaacaaaagcagcatccctagccccattggaggaagcctgggaagaggatcctctttagatatcctatctagtctcaactcccctgccctttttggggatcaggatacagtgatgaaagccattcaggaggcgcggaagatgcgagagcagatccagcgggagcaacagcagcaacagccacatggtgttgacgggaaactgtcctccataaataatatggggctgaacagctgcaggaatgaaaaggaaagaacgcgctttgagaatttggggccccagttaacgggaaagtcaaatgaagatggaaaactgggcccaggtgtcatcgaccttactcggccagaagatgcagagggaagtaaagcaatgaatggctctgcagctaaactacagcagtattattgttggccaacaggaggtgccactgtggctgaagcacgagtctacagggacgcccgcggccgtgccagcagcgagccacacattaagcgaccaatgaatgcattcatggtttgggcaaaggatgagaggagaaaaatccttcaggccttccccgacatgcataactccaacattagcaaaatcttaggatctcgctggaaatcaatgtccaaccaggagaagcaaccttattatgaagagcaggcccggctaagcaagatccacttagagaagtacccaaactataaatacaaaccccgaccgaaacgcacctgcattgttgatggcaaaaagcttcggattggggagtataagcaactgatgaggtctcggagacaggagatgaggcagttctttactgtggggcaacagcctcagattccaatcaccacaggaacaggtgttgtgtatcctggtgctatcactatggcaactaccacaccatcgcctcagatgacatctgactgctctagcacctcggccagcccggagcccagcctcccggtcatccagagcacttatggtatgaagacagatggcggaagcctagctggaaatgaaatgatcaatggagaggatgaaatggaaatgtatgatgactatgaagatgaccccaaatcagactatagcagtgaaaatgaagccccggaggctgtcagtgccaactgaggagtttttgtttgctgaattaaagtactctgacatttcacccccctccccaacaaagagttattaaagagcccgcatgcatttgtggctccacaattacatcagcagaatggtcttaattgtttcgtaaagtgtgagacagattaagttttccctgatttttcatgaacttgagttttttgttgttattgttattgttgttgttgttgtttttttaatttaggtgaagacatattaaatatgagacaccaggacttgaaacttatctcaacccgtagatgtcttacaagtcttatatttttgtcttactttttttttcttttggatgttgataaaggtttaagttactgttttagatggggttaaacattctcactcaggtatgctgtgccggcctacaggttgtgaatgtgtttttattctgaattattttagaaaacaactgaggatttcatattgtgaaacagaacaagtccacggcgtgtgcagctgcatgtagagcatattcaaaaggcctcggaattccaattttccatttgtagagttaaactttgaatgtgccaaactttttcgtaacttttgaatcttaatattttgaaagtcttaaaggagacactgcaaagtcttagacaatctttggcatcttaaaataaaatagcaaaccaacatttttttttccagaaaatggtaaggtactcaggaatctggagacaagatattgtaaggaatgaacaaggttgccacagtgcatggacccaattgtgtttgcctgttgacgtgccatcagtgcgtgatgtggtatgacatacacacaccagagcaaccgccacaccagatatcgacagagtggtcttctctgcctgagaccacctctcactacatccattatccctttgcctttaaccctgacattcagtcttaacacattttatcttaaataatttattcattccagaatgtcaagggtccacttgctatttattttttttcaattgttggtggcattaatttaataattcttgtttttcaccttccttccccgaagaacttttccgtccttttcacctccttctcctgtgtacatagtgattttatgtccccagaacgcctggaagcatttctgaaaccaagatattattaaaaacctattattgtttttaatcatgagtatgtatctggctgcagggctgtgtattgggatataggtatatagtcttacacttaaacaggtatgcccctgaggttcactgtgacctcaagtcttttgccagaattttcccctaattcagttcacaagtggtagggtctgcatcagtggcatttccccctgaattccattcagcagcaaggttcaacagtggtgactgccaggcaggagagtcctgcggccaaacctgaagcccaaggctcgtgggccatgcaggaatctcagtgaagctgtcatgggctggcacctttacactgagttgccttgtcccagctggcacatctagggagttcattgcaaaatccccaggatgcaaaaagccacatgacagcctcagagcaaagatggtggcaaatagtcatgatacatctagagaatgaaagaaaactgtaagggaggagaaggaggggaatacattccctatatgggatgttcctactgttaactctggggaacagatagctccgggggcagcagatgagttcctctggctgactctatctgtagccacatggggacctgcctacgtgtgaacaaaatgaactgcacttatcacacaaggatttctttgaagacatgctactggggtgggaagcagtgaggttttattccccatctcctaactacagggagctctgccatgtcattttggccttcctgaaactaggacaggttgtctatcggggggcttcccccagagaggtttagtgggagaatgtcagtgaatgggatagttcacctcatgggacaacccagaatctgatcaccaggacataggaatggccccatcagatttcttgagccattttgtcacttggaagaaaatagtgtacctttgtatttatttaagagtgctcaaggcctaatagcaataaacaggtctagccaagaaattacaagctattctgttagctgggagtgctctctataagctgattaaggtactgataggaactctttgttattcatgttggttggggattagaaatttgtttttgtacatttatttcaaatgaggaggaggtcattttttctctcaaaaaatgagtatttattattgtcttactgatttctttgattatatacctctcctcctcagttcactcttgttttttttctttctctttggcttttgcttttgctctctctcacttctttcttattttgttgcattggtagagtgttgtatggctagcattgtattgtatgtaattaattttgcacaaaagcaaacatttagcatagtaggttaattttgtttgtttttatgaccatgccaaaataatattctgggctggtggagaacaaaggactgttctttaggactgaaacttgattttgctcatagtaagtaaaaaaaaacaaaaaacacacacactcacagatgttgtttcgtaagtgttataagcactggatataaatggtattttttatcacttctgactaatgtgaaactgttgtacgaaaactacatgaacaaaagtcatctgtttcgactcgtgtgggcttgcctcacagttgccggatttgagtcatttttatgtcttgttatttcatttatttatgcaaaatacatgtgtgtatgaacactttgttttagctccagctctgcctcagtactggggttcatttacttttagccatgttcttaaaaatgaaaggctattcaggaatgatctgattgtaaacgtctttttcattggatcaaacagtaatgctgtatttgaatctaaattttgtgtataagcagtttatttattagccaagtttggctctaaatatccatggaaattaagaatgacaatcatagggatcaattcattttattttcagtggggcttaaacaaagtttatatgactttaccatctcattttagatttttctaattgtgtaaatataacatagaaatagaatttatttttggttcatgaatacttagtgagatataagttatgtatttcctttttgttctctatccatagatgttggtccaaactgaaagttgatgagtcactgtgcctctcggggtagtgagttatcagctacagtgagagagcagtgtttggcctgcagctgggacagcaaaacgtttcaccagggttctcatgcagttcagaacccactgtccacagatccagacatttcccttttttcttacagaaagttgatgattggacatactaaatttccactacagttaggagacagtcagtttgctttgggagtctacataaatcttctaagatagttctgtgaccatttaatagcaagaagcatgaatgccactacaaaggcaaaaatccacctctgagatcggccgttaataaacgtcccgtcatgtcagtttagattcaagaatgttaagcaactttgtttttgcggtgctccctatttcatagtatcttcaaatcaaaaataaaaattatctccattttgttaaagaacttacagggtcagggttctccttgtcacttagaattgggacactgccaggcaatcctctcccaaaaaaaaaaaaaaaaaaaaatagccatatggaatggaaggaaaaggagaaaagaaggaagaaaggaaaaaagtaggaagggagagagaaaaaaaaggtcgctttgcggatacgagccgctaggctgacaacttttctatttcattggcagatatgaagcagtgtcttttccagtaaggtacggaagctttgttgttttcatgtgtacccagctcagccttttagaagcacctcggtttgcttcattaggtatttgatactctccagccttgtcctcaggcctgatttgatttgccagggtcctgacaccaaagcccaggccaagttctaaattcaggtgtgggctcacagtgctattgagcttgtcgaattctggcctcccctgaacattagccccacgggagcctgagggtgtttgaaaagggcgtgatcactctagggctgaaattaaaggctgctttcttttccttctgaagccaggctgcttcttcggagtacaccctcctgagccaggagcacaagcactagcagaaagcagggattgtttcaggaaagcccatttaccctcagtaggaaggcagcctggtcacttgaacagcacagctgaggctgcttctctcaatttactcattttgcaaagaattgacctctaccaactcattagggagaggaaaaagaatcacttagtaattttaaatcatatgagaagtcctgtaccaagtgccaacaactgcaaagaaatgcagctagaggaatgtattgaaattactactgggtcttcctttttaatgagaaaatgacaaaaatggttgctgtagccctgcctgattttgtacacgtttgtctaagaattgagttggcacttaagctcacttctcaaagtataataatattgtatgacctcatttgtcctttcacaaaagcacttgcatcatttccttaagtcatctgctccctgacatgttttcttccctaataaacaacttctgtctgttattcctgccaatgatgttctgtttctgatgccatatcctattgagcgtgcccctgtactaatatcattgaaaatattgatatgcaaacacatttccttttcatccccattctatctttccctttggggacagattgctttccaaaagctcatgaacaaatatttggaatgctggtacctttggggcagaggtaagggtgggcggggtgggggcagaaaggtaatgcttaatgcagataactcttctaatcagtgtccatggcaatatgaacgcttgaagaaaactcagtgacatatcttgctcagtagtttcttattcctgaagaaccacaagcataaagtgaggcctcagtgctggtgctcttggagtatggggaatgtgcaaatatttaactgttttgtatgctgcacattgcaggtctgctcatgtgcattctccctttgtcttcctttgtcatatgtgtttttgcttttttgaaagtgcagtctttattgtaccctcctccagcttgtagcaaattagaatgcttagcatttatgttcattcattattgtatttgccatgtaaaatttttattaccttagacaagcttataagctgttactacataacttatcttactgtaactcttttatttcccccgacgttgtaatttgtttgtgatgtatattgtgaaattgtattctatgttaatttaatcagcacaattcactgacatgctggactgacatgctggctgctgtttcaaagtgtaaagtttgtgtagggctgttgggacaactgcaactctgttgtcaaggtactgtgctttggttcctatagcaacactgggtgtggcccttgaattgctaagggcatttaatacatcctggagcaaattttaactgcagattttctttgtagaaattctatgtataatgcaggtacctacttggcccatggctggtaactatttgggcaattagaaaaaaagaaaaaaacataaaaactagtgtctattgctgctttgaatatgtttgaaagtctgaaaatgtaaatagtttatcaaaaaaaaatcttgtacagtccagtgtaaagtttttaaatgaccttaagggttgccatcacatctttctcacactctcctcttgataataataataataaaaagtttgctaaggattaaagaaatgggaaaaataaaaaaaatctcttcaaatttacaggaatgaatcattgttcttagctttgttgcatacacaaacttcttggattttgttgtgcagtattgacgtgagataaagctcaacattgaataatctttcagtggtacttttcaaagtcttcccctcctctgcctcataattaagggaaaagacaaaattgaaagacacactgtctttatctatcctggtgtatgttggcaccttagctactttttttttttcctttttgcacaaggtgctttcctgatatgttcaacatgccatctttgggtgataatgtatatgccgtgatggggctcaggccccttaggggagtgtctataagaactgcctatttatgctcatttacctcaagactgtcctctctaccctaatctagttgtcatcactccatcttttgtactgctgttgacacttacaaattaaagataaattttgttttatga

SEQ ID NO: 59147 - DNA, 534 bp, Artificial Sequence
  derived and/or modified sequence
gtggaggtagaggatgatttcaattagaaataatgacagcaatagacgcttccaatgaagatatcgtggccaccaaaggacaaaggcaagaagttaattcctgaagtcgagaagaatgtcttccaagcaagccacctctccatttgcctgtgcagctgatggagaggatgcaatgacccaggatttaacctcaagggaaaaggaagagggcagtgatcaacatgtggcctcccatctgcctctgcaccccataatgcacaacaaacctcactctgaggagctaccaacacttgtcagtaccattcaacaagatgctgactgggacagcgttctgtcatctcagcaaagaatggaatcagagaataataagttatgttccctatattccttccgaaatacctctacctcaccacataagcctgacgaagggagtcgggaccgtgagataatgaccagtgttacttttggaaccccagagcgccgcaaagggagtcttgccgatgtggtggacacactgaaacagaagaagcttga

SEQ ID NO: 59148 - DNA, 2656 bp, Artificial Sequence
  derived and/or modified sequence
gttaggagagaccattggggataggaaagatgaaaggtcatggtgagcttcaaggacatgaaagaagaatgtcttccaagcaagccacctctccatttgcctgtgcagctgatggagaggatgcaatgacccaggatttaacctcaagggaaaaggaagagggcagtgatcaacatgtggcctcccatctgcctctgcaccccataatgcacaacaaacctcactctgaggagctaccaacacttgtcagtaccattcaacaagatgctgactgggacagcgttctgtcatctcagcaaagaatggaatcagagaataataagttatgttccctatattccttccgaaatacctctacctcaccacataagcctgacgaagggagtcgggaccgtgagataatgaccagtgttacttttggaaccccagagcgccgcaaagggagtcttgccgatgtggtggacacactgaaacagaagaagcttgaggaaatgactcggactgaacaagaggattcctcctgcatggaaaaactactttcaaaagattggaaggaaaaaatggaaagactaaataccagtgaacttcttggagaaattaaaggtacacctgagagcctggcagaaaaagaacggcagctctccaccatgattacccagctgatcagtttacgggagcagctactggcagcgcatgatgaacagaaaaaactggcagcgtcacaaattgagaaacaacggcagcaaatggaccttgctcgccaacagcaagaacagattgcgagacaacagcagcaacttctgcaacagcagcacaaaattaatctcctgcagcaacagatccaggttcagggtcacatgcctccgctcatgatcccaatttttccacatgaccagcggactctggcagcagctgctgctgcccaacagggattcctcttcccccctggaataacatacaaaccaggtgataactaccccgtacagttcattccatcaacaatggcagctgctgctgcttctggactcagccctttacagctccagaagggtcatgtctcccacccacaaattaaccaaaggctaaagggcctaagtgaccgttttggcaggaatttggacacctttgaacatggtggtggccactcttacaaccacaaacagattgagcagctctatgccgctcagctggccagcatgcaggtgtcacctggagcaaagatgccatcaactccacagccaccaaacacagcagggacggtctcacctactgggataaaaaatgaaaagagagggaccagccctgtaactcaagttaaggatgaagcagcagcacagcctctgaatctctcatcccgacccaagacagcagagcctgtaaagtccccaacgtctcccacccagaacctcttcccagccagcaaaaccagccctgtcaatctgccaaacaaaagcagcatccctagccccattggaggaagcctgggaagaggatcctctttagatatcctatctagtctcaactcccctgccctttttggggatcaggatacagtgatgaaagccattcaggaggcgcggaagatgcgagagcagatccagcgggagcaacagcagcaacagccacatggtgttgacgggaaactgtcctccataaataatatggggctgaacagctgcaggaatgaaaaggaaagaacgcgctttgagaatttggggccccagttaacgggaaagtcaaatgaagatggaaaactgggcccaggtgtcatcgaccttactcggccagaagatgcagagggaagtaaagcaatgaatggctctgcagctaaactacagcagtattattgttggccaacaggaggtgccactgtggctgaagcacgagtctacagggacgcccgcggccgtgccagcagcgagccacacattaagcgaccaatgaatgcattcatggtttgggcaaaggatgagaggagaaaaatccttcaggccttccccgacatgcataactccaacattagcaaaatcttaggatctcgctggaaatcaatgtccaaccaggagaagcaaccttattatgaagagcaggcccggctaagcaagatccacttagagaagtacccaaactataaatacaaaccccgaccgaaacgcacctgcattgttgatggcaaaaagcttcggattggggagtataagcaactgatgaggtctcggagacaggagatgaggcagttctttactgtggggcaacagcctcagattccaatcaccacaggaacaggtgttgtgtatcctggtgctatcactatggcaactaccacaccatcgcctcagatgacatctgactgctctagcacctcggccagcccggagcccagcctcccggtcatccagagcacttatggtatgaagacagatggcggaagcctagctggaaatgaaatgatcaatggagaggatgaaatggaaatgtatgatgactatgaagatgaccccaaatcagactatagcagtgaaaatgaagccccggaggctgtcagtgccaactgaggagtttttgtttgctgaattaaagtactctgacatttcacccccctccccaacaaagagttattaaagagcccgcatgcatttgtggctccacaattaca

SEQ ID NO: 59149 - protein, 182 aa, Artificial Sequence
  derived and/or modified sequence
MSQCKKRNRAITARRQHLKSVMLQIAATELEKEESRREAEKQNYLAEHCPPLHIPGSMSEVQELCKQLHAKIDAAEEEKYDMEVRVQKTSKELEDMNQKLFDLRGKFKRPPLRRVRMSADAMLKALLGSKHKVCMDLRANLKQVKKEDTEKERDLRDVGDWRKNIEEKSGMEGRKKMFESES

SEQ ID NO: 59150 - DNA, 549 bp, Artificial Sequence
  derived and/or modified sequence
atgagccagtgcaagaagagaaacagagccatcaccgccagaagacagcacctgaagagcgtgatgctgcagatcgccgccaccgagctggagaaggaggagagcagaagagaggccgagaagcagaactacctggccgagcactgcccccccctgcacatccccggcagcatgagcgaggtgcaggagctgtgcaagcagctgcacgccaagatcgacgccgccgaggaggagaagtacgacatggaggtgagagtgcagaagaccagcaaggagctggaggacatgaaccagaagctgttcgacctgagaggcaagttcaagagaccccccctgagaagagtgagaatgagcgccgacgccatgctgaaggccctgctgggcagcaagcacaaggtgtgcatggacctgagagccaacctgaagcaggtgaagaaggaggacaccgagaaggagagagacctgagagacgtgggcgactggagaaagaacatcgaggagaagagcggcatggagggcagaaagaagatgttcgagagcgagagctag

SEQ ID NO: 59151 - DNA, 549 bp, Artificial Sequence
  derived and/or modified sequence
atgtctcagtgcaagaagcgaaaccgggccatcaccgctcgccgccagcatttaaagtcagtgatgctccagatagcagccaccgagctggagaaagaggaatctagaagggaggctgagaaacaaaattatctggctgaacactgtccacctttacatatccctggaagcatgtctgaagtgcaggaactgtgcaagcagctgcacgcaaaaatagacgccgccgaggaggagaagtacgacatggaggttcgggtccagaagacaagcaaagagcttgaagatatgaaccagaagctctttgatctgagagggaagtttaaaaggccacctttgcgtcgcgtacgaatgagtgctgacgccatgctaaaagcacttttggggagtaaacacaaggtatgtatggatctccgcgctaatctgaaacaggtgaagaaagaagacacagaaaaggagcgggacctgcgggacgtgggcgattggcgtaagaatattgaggagaaaagcggaatggagggacgcaagaagatgttcgaaagcgaaagttag

SEQ ID NO: 59152 - DNA, 549 bp, Artificial Sequence
  derived and/or modified sequence
atgagccagtgcaagaagaggaacagagccatcacagcccggcggcagcacctgaagtctgtgatgctgcagattgctgccacagagctggagaaggaggagagccggcgggaggccgagaagcagaactacctggccgagcactgcccccccctgcacatccctggctccatgtctgaggtgcaggagctgtgcaagcagctgcacgccaagattgatgctgctgaggaggagaagtatgacatggaggtgcgggtgcagaagaccagcaaggagctggaggacatgaaccagaagctgtttgacctgcggggcaagttcaagaggcctcccctgcggcgggtgaggatgtctgcagatgccatgctgaaggccctgctgggcagcaagcacaaggtgtgcatggacctgcgggccaacctgaagcaggtgaagaaggaggacacagagaaggagcgggacctgagagatgtgggggactggaggaagaacatcgaggagaagagcggcatggagggcaggaagaagatgtttgagagcgagagctag

SEQ ID NO: 59153 - DNA, 549 bp, Artificial Sequence
  derived and/or modified sequence
atgagccagtgcaagaagcggaaccgggccatcaccgcccggcggcaacatcttaaaagtgtaatgttacagatcgcagccaccgagctcgagaaggaggagagcaggcgggaggccgagaaacaaaattatcttgccgaacactgtcccccgctccacatccctggcagcatgtccgaggtgcaagaactgtgcaaacagctgcatgcaaagatcgatgccgcggaagaagagaaatacgacatggaggttcgcgttcagaagacgagtaaagagctagaagacatgaaccagaagctttttgacttgcgggggaagtttaagagaccaccgctgcggagggtccgaatgtcagcggacgctatgcttaaagcgctgttgggatctaagcacaaagtttgcatggacctgagggccaatctaaaacaagtcaagaaggaggataccgaaaaagaaagggacctcagggacgtcggagattggagaaaaaatattgaggagaagtctggtatggagggccgtaaaaaaatgtttgaatcagagtcctag

SEQ ID NO: 59154 - DNA, 549 bp, Artificial Sequence
  derived and/or modified sequence
atgtcacagtgcaagaaacggaatagagctatcactgcgagaagacagcatcttaaaagcgtgatgctgcaaattgccgctacagagctagaaaaggaggaatcccgtcgggaggctgaaaagcagaattatcttgccgaacattgccctcctcttcatatccctggctccatgtccgaggtgcaggaactctgcaaacagctgcatgcgaagatagacgccgcagaagaggagaaatacgatatggaggtaagagtacagaagacctcaaaggaactggaagacatgaatcaaaaactcttcgatttgcgcggtaaatttaagaggcctccccttcgccgtgtgcgcatgagtgcggacgcaatgcttaaagccctactaggaagcaagcataaggtgtgcatggacctccgggctaatctgaagcaggtgaagaaagaggatacagaaaaggagcgggacctgcgcgacgtgggggactggaggaagaacatcgaggagaaaagcggaatggaagggaggaagaaaatgtttgagagcgaatcatag

SEQ ID NO: 59155 - DNA, 706 bp, Artificial Sequence
  derived and/or modified sequence
ctggcaaagtgtcacacaccacacagcaccatgtcccagtgcaagaagcggaacagggccatcacggcccgcaggcagcacctgaagagtgtgatgctgcagatagcggccacggagctggagaaggaggagagccgccgtgaggcagagaagcagaactacctggcggagcactgcccgccgctgcatatcccgggctccatgtctgaagtgcaggagctctgcaaacagctgcacgccaagatcgatgcggctgaagaggagaagtacgacatggaggtgagggtgcagaagaccagcaaggagctggaggacatgaaccagaagctatttgatctgcggggcaagttcaagcggcccccactgcggagggtgcgcatgtcggccgatgccatgctcaaggccctgctgggctcgaagcacaaggtgtgcatggacctgagggccaacctgaagcaggtcaagaaggaggacacagagaaggagcgggacctgcgagacgtgggtgactggaggaagaacatcgaggagaagtctggcatggagggccggaagaagatgtttgagtccgagtcctaggccactcgctgcccctacgcctgccccggtgcccggctcccagcagaacatactagggagatgcacccagagcctgccagggagggctggcctcaccaccaccgtcaataaaggatttgaatcccca

SEQ ID NO: 59156 - protein, 1551 aa, Artificial Sequence
  derived and/or modified sequence
MIAEPAHFYLFGLICLCSGSRLRQEDFPPRIVEHPSDLIVSKGEPATLNCKAEGRPTPTIEWYKGGERVETDKDDPRSHRMLLPSGSLFFLRIVHGRKSRPDEGVYVCVARNYLGEAVSHNASLEVAILRDDFRQNPSDVMVAVGEPAVMECQPPRGHPEPTISWKKDGSPLDDKDERITIRGGKLMITYTRKSDAGKYVCVGTNMVGERESEVAELTVLERPSFVKRPSNLAVTVDDSAEFKCEARGDPVPTVRWRKDDGELPKSRYEIRDDHTLKIRKVTAGDMGSYTCVAENMVGKAEASATLTVQVGSEPPHFVVKPRDQVVALGRTVTFQCEATGNPQPAIFWRREGSQNLLFSYQPPQSSSRFSVSQTGDLTITNVQRSDVGYYICQTLNVAGSIITKAYLEVTDVIADRPPPVIRQGPVNQTVAVDGTFVLSCVATGSPVPTILWRKDGVLVSTQDSRIKQLENGVLQIRYAKLGDTGRYTCIASTPSGEATWSAYIEVQEFGVPVQPPRPTDPNLIPSAPSKPEVTDVSRNTVTLSWQPNLNSGATPTSYIIEAFSHASGSSWQTVAENVKTETSAIKGLKPNAIYLFLVRAANAYGISDPSQISDPVKTQDVLPTSQGVDHKQVQRELGNAVLHLHNPTVLSSSSIEVHWTVDQQSQYIQGYKILYRPSGANHGESDWLVFEVRTPAKNSVVIPDLRKGVNYEIKARPFFNEFQGADSEIKFAKTLEEAPSAPPQGVTVSKNDGNGTAILVSWQPPPEDTQNGMVQEYKVWCLGNETRYHINKTVDGSTFSVVIPFLVPGIRYSVEVAASTGAGSGVKSEPQFIQLDAHGNPVSPEDQVSLAQQISDVVKQPAFIAGIGAACWIILMVFSIWLYRHRKKRNGLTSTYAGIRKVTYQRGGEAVSSGGRPGLLNISEPAAQPWLADTWPNTGNNHNDCSISCCTAGNGNSDSNLTTYSRPGQPTPYATTQLIQSNLSNNMNNGSGDSGEKHWKPLGQQKQEVAPVQYNIVEQNKLNKDYRANDTVPPTIPYNQSYDQNTGGSYNSSDRGSSTSGSQGHKKGARTPKVPKQGGMNWADLLPPPPAHPPPHSNSEEYNISVDESYDQEMPCPVPPARMYLQQDELEEEEDERGPTPPVRGAASSPAAVSYSHQSTATLTPSPQEELQPMLQDCPEETGHMQHQPDRRRQPVSPPPPPRPISPPHTYGYISGPLVSDMDTDAPEEEEDEADMEVAKMQTRRLLLRGLEQTPASSVGDLESSVTGSMINGWGSASEEDNISSGRSSVSSSDGSFFTDADFAQAVAAAAEYAGLKVARRQMQDAAGRRHFHASQCPRPTSPVSTDSNMSAAVMQKTRPAKKLKHQPGHLRRETYTDDLPPPPVPPPAIKSPTAQSKTQLEVRPVVVPKLPSMDARTDRSSDRKGSSYKGREVLDGRQVVDMRTNPGDPREAQEQQNDGKGRGNKAAKRDLPPAKTHLIQEDILPYCRPTFPTSNNPRDPSSSSSMSSRGSGSRQREQANVGRRNIAEMQVLGGYERGEDNNEELEETES

SEQ ID NO: 59157 - DNA, 4656 bp, Artificial Sequence
  derived and/or modified sequence
atgattgccgaaccggctcacttctatttgttcggtctgatctgtttgtgttcagggtccaggctgcggcaggaggactttcctccgcgcatcgtggagcatccatccgacctaatagtaagcaagggggaaccggccaccctcaattgcaaggcagaaggcagacccactccaacaatcgagtggtacaaagggggagaaagggtggagacggataaggacgatcctagatctcatagaatgctgctgccatcagggtcccttttcttcctgcgtatcgtacatggtagaaagtctcggcccgatgaaggcgtatacgtgtgtgtggcccgaaactacctcggcgaggcagtctcccacaatgcctctttggaggttgctatcttacgtgacgattttcggcaaaacccgagcgatgttatggtggccgtaggggagccagccgtgatggagtgccagccacctcggggacatcctgagccaacaattagctggaagaaggacggctcccctctggatgacaaagacgagaggatcacaataagaggggggaagctcatgattacctacacaagaaagagcgacgccgggaaatatgtgtgtgtcgggacaaatatggtgggggaaagggaatctgaggttgcagaactgacagttcttgaacgtccatccttcgtcaagcggcccagcaatctcgcggtgacggtggatgactctgccgaattcaaatgcgaggcaaggggtgatccagtgcctacagtgaggtggaggaaggatgatggcgagcttccaaagagccgctatgagattcgtgatgatcacaccctgaaaattcggaaagttacagctggagatatgggaagctacacttgtgttgctgaaaacatggtgggaaaggcagaagcctccgcaacgctgaccgtgcaggttggctcagaacccccacattttgttgtcaagccccgggaccaggtggtggcacttggaaggaccgtgaccttccagtgtgaggcgaccggcaatcctcagcccgcaatcttctggagaagggaaggttctcagaatctccttttctcttatcagcctcctcaaagttcttctagattctctgtctcacagacgggagacctcaccattactaatgtccaaagaagtgacgtaggctactatatttgccagaccctaaatgttgccggcagcatcattacgaaggcttacctggaagttactgacgtgattgctgacagacctcctcctgtgattaggcagggaccggtcaaccagacggtcgccgtggacggtacttttgttctgtcttgcgtcgccactggaagtccagtccccaccattctgtggcgaaaggacggcgttttagtgtcaacacaggattcgcggatcaagcagctggaaaatggcgtgctacagatccgatatgcgaaattgggagataccggccgatatacatgtatcgcttcaacaccatctggagaagcgacctggagcgcctacatagaagttcaggaattcggagtgcccgtccagccaccacggcccacggatccgaacctgatcccttcggcccctagcaagcctgaagtgaccgatgtgagccggaatactgttaccctatcctggcagcccaacttgaacagtggcgcgacacccacatcgtacatcattgaagcgttctcccacgcatcaggatcctcatggcagacagttgctgaaaatgtgaaaacagagactagcgcgataaaagggcttaagccaaacgccatctacctgtttctcgttcgagctgctaatgcctacggcatttcggacccttcccagattagcgaccctgtcaagactcaggacgtgctgcctacctcccagggtgtggatcacaagcaggtccagcgtgagttgggtaacgccgttctgcatttacacaatccgacagtcctgagttcctcatccattgaagttcattggaccgtggaccagcagtctcagtatatccagggctataagattctctaccggccctcaggcgccaatcacggagagagcgactggcttgtctttgaagtgcgcactcccgctaagaattccgttgtgatccccgatcttcgcaagggtgtaaattacgagatcaaagcacgaccgttcttcaacgagtttcagggagctgatagcgagatcaagtttgccaaaaccctggaagaagctcctagtgctccgccacagggtgtcacagttagcaagaatgacggtaacggaacagctattctagtgtcttggcaacccccacccgaagatacccaaaacggaatggtccaggagtacaaggtatggtgtctcggcaatgagacccgatatcatattaacaaaacagtagacggctccacctttagcgtggtgattccatttctggtccccgggatcagatacagcgtggaggtggcggcaagcactggtgccgggtcaggtgtcaaaagtgagcctcagttcatccagctggatgctcacgggaatccagtgtctccagaggatcaggtgagcctggcccaacagatctccgacgtggtaaaacagcccgcattcatagctggaattggagcggcttgctggattattctgatggtgttttccatctggctgtaccggcatcgaaagaaaagaaatgggttgaccagcacgtacgcaggaatacggaaagtgacctatcaacgcggcggagaggcagttagttccggaggacggccagggctgcttaacatttccgaaccagcagctcagccttggctggcagacacatggcctaataccgggaacaaccataatgattgctccattagctgttgcacggccggtaatggaaattctgactcaaacttgaccacctattctcggcctggccagcccaccccttacgccaccacgcagttgatccagtctaatctctcaaataacatgaacaatgggtccggcgatagcggggagaagcattggaaaccgctgggtcagcagaagcaggaggtcgcccctgtgcagtacaacatcgttgaacaaaataagcttaacaaggactaccgcgcgaacgataccgtcccacctaccataccttataaccagtcatacgaccagaatacaggcgggtcttacaacagttccgaccgaggctccagcacgagcggctcacaaggccacaagaagggagccagaacacccaaagtgccgaaacagggcgggatgaactgggcagacttgttaccccctccccccgcccacccccccccccacagcaactcggaagagtataacatctcagtagacgaatcgtatgaccaggagatgccctgtccagtccctccggctaggatgtacttacaacaggacgaactcgaggaagaggaagatgagcgcggacctactccacccgtgaggggagctgctagtagtcccgccgccgtgagctactcccatcagtccacagcaacactcacgccaagtcctcaggaggagctgcagcctatgctgcaggattgtcccgaggagactggccatatgcagcatcagcctgataggcggcgacagcccgttagccctccacccccaccccgtcctatttccccaccacacacatacggatacatttctggcccactagtcagtgacatggataccgatgcccccgaggaggaggaagacgaggccgatatggaagtggcaaaaatgcagacccgccgcttactactcagaggcctcgagcagacacccgcctcttcagtgggggatcttgagtccagcgtgacaggctccatgattaatggatggggaagcgcatccgaagaggataatatttcgtcgggtaggtcctctgtgtcgtcatccgacggaagctttttcacagatgctgacttcgcccaggctgtagctgctgccgccgaatacgcgggattgaaggtggcccggaggcaaatgcaggatgccgcgggacgacggcattttcatgcatctcagtgcccccggcctacctctcccgtctcgactgatagcaatatgagtgccgccgtgatgcaaaaaacccggccggcaaagaaactgaaacaccaaccaggccacctgagacgggagacttataccgacgatcttcctccgcctcccgtgcccccccccgccataaaatctcctacagctcaaagcaaaactcagttggaagtcaggccagttgtggtgccaaagcttccgagtatggatgcccgcaccgacaggtccagtgataggaagggctcttcttataaggggcgcgaagttctggacggccgtcaggtcgtggacatgagaacaaatcccggcgaccccagagaagctcaggaacagcaaaacgacggcaagggtcggggcaacaaagcagccaagagggacctccctccagctaagacccatctgattcaggaggacatcctgccctactgcagaccaacattccccactagcaacaacccccgggatcccagctcgagcagcagtatgtcatcccgcggatctggttcaaggcagagagagcaggcaaacgtagggcgtaggaacatagctgagatgcaagtactaggcggctatgaaaggggggaggataacaatgaggagcttgaagagacagagtcctag

SEQ ID NO: 59158 - DNA, 4656 bp, Artificial Sequence
  derived and/or modified sequence
atgattgctgagcccgcccacttctacctgtttggcctcatctgcctgtgcagcggcagccggctgcggcaggaggacttccccccaagaattgtggagcaccccagcgacctgattgtgtccaagggggagcccgccaccctgaactgcaaggccgagggccggcccacccccaccatcgagtggtacaagggcggggagcgggtggagacagacaaggatgaccccaggagccacaggatgctgctgcccagcggcagcctcttcttcctgagaattgtgcacggcaggaagagcaggccagatgagggcgtgtatgtgtgtgtggccaggaactacctgggggaggccgtgagccacaatgccagcctggaggtggccatcctgagagatgacttccggcagaaccccagtgatgtgatggtggccgtgggggagcctgctgtgatggagtgccagcccccccggggccaccctgagcccaccatctcctggaagaaggatggcagccccctggatgacaaggatgagcgcatcaccatccggggcggcaagctgatgatcacctacaccaggaagagtgatgctgggaagtatgtgtgtgtgggcaccaacatggtgggggagcgggagagcgaggtggccgagctgactgtgctggagcggcccagctttgtgaagaggcccagcaacctggccgtgacagtggatgattctgctgagttcaagtgtgaggcccggggggaccctgtgcccaccgtgcgctggaggaaggatgatggagagctgcccaagagccgctatgagatcagagatgaccacaccctgaagatcaggaaggtgacagctggggacatgggcagctacacctgtgtggccgagaacatggtgggcaaggccgaggccagcgccaccctgactgtgcaggtgggcagcgagcccccccactttgtggtgaagccccgggaccaggtggtggccctgggccgcacagtgaccttccagtgtgaggccactggaaacccccagcctgccatcttctggaggcgggagggcagccagaacctgctcttctcctaccagcccccccagagcagcagccgcttctctgtgtcccagacaggagacctgaccatcaccaacgtgcagaggagtgatgtgggctactacatctgccagaccctgaatgtggccggcagcatcatcaccaaggcctacctggaggtgacagatgtgattgctgacaggcctcctcctgtgatccggcagggccctgtgaaccagacagtggccgtggatggcacctttgtgctgagctgtgtggccaccggcagccctgtgcccaccatcctgtggaggaaggatggagtgctggtgtccacccaggacagccgcatcaagcagctggagaatggagtgctgcagatccgctatgccaagctgggggacaccggccgctacacctgcatcgccagcaccccatctggagaggccacctggagcgcctacatcgaggtgcaggagtttggagtgcctgtgcagcccccccggcccacagaccccaacctgatccccagcgcccccagcaagccagaggtgacagatgtgtccaggaacacagtgaccctgtcctggcagcccaacctgaacagcggggccacccccaccagctacatcatcgaggccttcagccacgccagcggcagctcctggcagacagtggccgagaatgtgaagacagagaccagcgccatcaagggcctgaagcccaatgccatctacctgttcctggtgcgggccgccaatgcctacggcatcagtgaccccagccagatcagtgaccctgtgaagacccaggatgtgctgcccaccagccagggcgtggaccacaagcaggtgcagcgggagctgggcaatgctgtgctgcacctgcacaaccccaccgtgctgagcagcagcagcattgaggtgcactggacagtggaccagcagagccagtacatccagggctacaagatcctgtaccggcccagcggggccaaccacggggagagtgactggctggtgtttgaggtgaggaccccagccaagaacagcgtggtgatcccagacctgaggaaaggagtgaactatgagatcaaggcccggcccttcttcaatgagttccagggcgctgacagcgagatcaagtttgccaagaccctggaggaggcccccagcgccccaccccagggcgtgacagtgtccaagaatgatggaaatggaacagccatcctggtgtcctggcagcccccacctgaggacacccagaatggcatggtgcaggagtacaaggtgtggtgcctgggcaatgagacccgctaccacatcaacaagacagtggatggcagcaccttctctgtggtgatccccttcctggtgcccggcatccgctacagcgtggaggtggccgccagcactggagctggcagcggcgtgaagtctgagccccagttcatccagctggatgcccacggcaaccctgtgtccccagaggaccaggtgtccctggcccagcagatcagtgatgtggtgaagcagcctgccttcatcgccggcattggagctgcctgctggatcatcctgatggtgttcagcatctggctgtaccgccacaggaagaagagaaatggcctgaccagcacctacgccggcatcaggaaggtgacctaccagagaggaggagaggccgtgtcctctgggggccggcccggcctgctgaacatcagcgagcctgctgcccagccctggctggccgacacctggcccaacacaggcaacaaccacaatgactgcagcatcagctgctgcacagctggaaatggaaacagcgacagcaacctgaccacctacagcaggcctggccagcccaccccctatgccaccacccagctgatccagagcaacctgagcaacaacatgaacaatggaagtggggacagcggggagaagcactggaagcccctgggccagcagaagcaggaggtggcccctgtgcagtacaacatcgtggagcagaacaagctgaacaaggactaccgggccaatgacacagtgccccccaccatcccctacaaccagagctatgaccagaacacaggaggcagctacaacagcagtgaccggggcagcagcaccagcggcagccagggccacaagaagggggcccggacccccaaggtgcccaagcagggcggcatgaactgggccgacctgctgcccccacctccagcccaccccccaccccacagcaacagcgaggagtacaacatctctgtggatgagagctatgaccaggagatgccctgccctgtgcccccagccaggatgtacctgcagcaggatgagctggaggaggaggaggatgagcggggccccaccccacctgtgcggggggccgccagcagccctgctgctgtgtcctacagccaccagagcacagccaccctgacccccagcccccaggaggagctgcagcccatgctgcaggactgcccagaggagaccggccacatgcagcaccagcctgacagaagacggcagcctgtgagccccccacctccaccccggcccatcagccccccccacacctacggctacatcagcggccccctggtgtctgacatggacacagatgcccctgaggaggaggaggatgaggccgacatggaggtggccaagatgcagacccggcggctgctgctgcggggcctggagcagaccccagccagctctgtgggggacctggagagctctgtgacaggctccatgatcaatggctggggcagcgccagcgaggaggacaacatcagcagcggccgcagctctgtgagcagcagtgatggcagcttcttcacagatgctgactttgcccaggccgtggccgctgctgctgaatatgccggcctgaaggtggcccggcggcagatgcaggatgctgctggaagaagacacttccacgccagccagtgcccccggcccaccagccctgtgtccacagacagcaacatgtctgctgctgtgatgcagaagaccaggcctgccaagaagctgaagcaccagcccggccacctgcggcgggagacctacacagatgacctgcccccacctcctgtgcccccaccagccatcaagagccccacagcccagagcaagacccagctggaggtgcggcctgtggtggtgcccaagctgcccagcatggatgccaggacagacaggagcagtgacaggaagggcagcagctacaagggccgggaggtgctggatggccggcaggtggtggacatgaggaccaaccctggggacccccgggaggcccaggagcagcagaatgatggcaagggccggggcaacaaggccgccaagagggacctgcccccagccaagacccacctgatccaggaggacatcctgccctactgccggcccaccttccccaccagcaacaacccccgggaccccagcagcagcagctccatgagcagccggggcagcggcagccggcagcgggagcaggccaacgtgggcagaagaaatattgctgagatgcaggtgctgggcggctatgaaagaggagaggacaacaatgaggagctggaggagacagagagctag

SEQ ID NO: 59159 - DNA, 4656 bp, Artificial Sequence
  derived and/or modified sequence
atgatcgccgagcccgcccacttctacctgttcggcctgatctgcctgtgttctggctcaaggttacggcaggaagactttccccccaggatagttgagcatccgtctgatctgattgtgtccaagggggaacccgccacactgaactgcaaagccgagggcagacctacccccaccattgaatggtataagggaggcgaacgagttgagactgataaggatgaccctaggtcccaccggatgttgttgcctagcgggagcctgtttttcctgaggattgtgcacggccggaaatcgagaccagacgaaggtgtatacgtatgcgtggctcgaaattacctcggggaggccgtttcccataatgcttcgctggaggtagccattctccgggacgactttcgccaaaacccctccgacgtaatggtcgcagtcggtgagcccgcagttatggaatgtcaaccgccacgggggcatcctgagccgactatttcttggaaaaaggatggtagtccattagacgacaaggacgagcgcataaccatccggggagggaagttgatgattacctatacgcgtaaaagcgatgcaggcaagtacgtgtgtgtgggcacaaatatggtgggggagcgggagagcgaagtcgccgaactgaccgtgcttgaacggccgtcctttgtgaaacgcccctcaaaccttgccgtgaccgttgatgactcagctgagttcaaatgtgaagctagaggcgatccggtgccaacagtccggtggcgaaaagacgacggtgaattgccaaaatcacggtatgaaatccgggatgatcatacactcaagattagaaaagtgaccgccggcgatatgggaagctacacatgtgttgcagaaaatatggtgggcaaagctgaggcctctgcaactctcacagtgcaagtgggtagtgagccgccccactttgttgtgaaaccgcgcgaccaggttgtggcccttgggcggacagtgacttttcagtgcgaggccactggtaacccccagccagccatcttttggaggagggaaggaagccagaacttactatttagttaccaacccccacagtcatcctctcggttttcagtctctcagactggggaccttacaattaccaacgtacagcgctcagacgtgggatactatatttgccaaaccctaaacgtggccgggtctataatcaccaaggcctatcttgaagtgactgatgtgattgccgacagacctcctcccgtcatccgccaaggacccgtgaatcagaccgtcgctgtggacggaacgttcgtactgtcgtgtgttgcaaccggctcccccgtccccaccatcttatggagaaaagacggtgtgctcgtttcaacacaagattcccgcattaagcaactggagaacggtgttctacaaatccgatatgctaagcttggcgacaccggtcgatacacttgtatcgcctccacgccgtccggggaagcaacttggagcgcctacatcgaggtccaggaatttggcgtgccggtgcagcccccacggccaacggaccccaatctgatcccatccgctccgagtaagccggaggtgactgatgtgagccgtaatactgttacactgtcctggcagccaaatctaaacagtggtgcaacgcccaccagttacataatcgaagcttttagtcacgcctcaggcagcagctggcagactgttgcagagaatgtgaagactgagacatccgccataaaaggcctcaagccaaacgccatctatctgttcctcgtaagagcagccaacgcatacggcatatctgacccgtcccagatcagcgatcctgtgaagactcaggatgttctgcccacaagccaaggcgtcgatcataaacaggtgcagagagaactgggaaatgcagtgctgcacttacataacccaaccgtgctctcctctagtagcattgaggtccactggactgtcgatcagcagagccagtacatacaggggtacaagattctataccggccaagcggtgctaaccacggtgagagcgattggctggtcttcgaggtccgcactccagcgaagaactccgtcgtaataccagatctgcggaaaggagttaattacgaaatcaaagcaaggccattctttaatgagttccaaggagctgactctgaaataaaattcgccaagacacttgaggaggcacctagcgcccctccccaaggagtcacagtgtcaaaaaatgacgggaacgggaccgcaatattggtttcttggcagccccctcccgaggacacccagaatggtatggtacaggaatacaaagtctggtgtctgggtaatgagacaagataccatattaacaagacagtggatggaagcacatttagcgttgttattccatttttggttcccggcatcagatattccgtcgaggtggcagcctccaccggagccggatcaggcgtgaagtctgaaccccaattcatccagttggacgcccatggcaatcctgttagtccggaggatcaggtgagtctggcgcagcaaatttctgatgtcgttaagcagcccgcctttatcgcagggattggcgcagcctgctggatcatcctgatggtcttctctatttggctttacagacacaggaagaagaggaacggcctgacctcgacgtatgctggtatcagaaaagttacataccagaggggcggcgaagcagtctctagcggtggacggcccgggcttttgaatatcagtgaacctgcggcacagccctggctggcggatacatggcccaatacgggcaacaatcataacgattgttccattagctgttgtactgctggcaatgggaactctgactcgaatctaaccacttattcacgccctggtcaaccaacaccctacgcgactacccaactcattcagtcaaatctgtccaataatatgaacaatggatcaggcgatagtggcgagaaacactggaagcccttaggccagcagaagcaagaagtcgccccagtgcagtacaatattgtggagcaaaacaaactcaacaaagattatcgggctaacgacaccgtgcccccaactattccatacaaccagagttacgatcagaatactggcggttcctacaactcgtcagacagaggttcgtctaccagcggaagtcaaggccacaaaaaaggagcacggacccctaaggtgcctaaacaaggcgggatgaactgggccgatctcctgcccccaccgcccgctcaccctcccccccactccaacagtgaggaatataatatcagtgtagatgaaagttatgaccaggagatgccatgcccggtcccaccggccaggatgtaccttcagcaagatgaacttgaggaggaggaggacgagcgggggcccaccccccctgtgagaggagcggcttcctcccccgctgcagtgagctactcacatcagtcaacagctacgctcactccctcaccacaggaggagcttcaacctatgttgcaggactgtcctgaggaaactggacacatgcagcaccagccagaccggcgccggcagccagtgtcgcctcccccaccccccaggccaatctcgccgccacacacctatggttacatctctggaccactcgtgagcgatatggataccgacgcaccggaggaggaagaagatgaggccgacatggaagtggccaagatgcagaccaggcgactcctgttgaggggtctggaacagaccccggcatcctctgtgggtgacctggagtccagcgttaccggtagtatgatcaatgggtggggcagcgctagcgaagaagacaacatttcttccgggagaagcagtgtatcctcatctgatggttctttttttacagatgcagactttgcccaggcggtcgctgctgccgctgagtatgctggccttaaagtagcgcggaggcaaatgcaggatgctgcagggaggcgccattttcatgcctcccagtgtcccaggcctaccagccccgtttccacagattctaacatgagtgccgcagtcatgcaaaaaacaaggcccgccaagaaactcaagcaccaacccggccacctgcgtcgagagacatacactgacgacctgccacctccaccggtgccaccgcccgccattaaatcccccaccgctcagagcaaaacccagctggaggttcgccccgtggtggtgccaaaattaccatcaatggacgctaggaccgacagatcaagtgatcggaaagggtctagttataaagggagggaggtattggacggccggcaggtcgtggatatgaggaccaaccctggcgacccaagggaggctcaggagcagcagaacgacggcaagggacgtgggaataaggctgccaaacgtgacctccccccagccaaaacccacctaatacaggaggatatcttaccatactgtcgtcctaccttccccaccagcaacaatccaagagacccttccagtagctcctccatgagcagcaggggttccgggagcagacagagagagcaggctaacgtaggcagaaggaacatcgctgagatgcaggtcctaggcggatacgaaagaggagaagataataatgaggaactcgaggagaccgagtcctag

SEQ ID NO: 59160 - DNA, 4656 bp, Artificial Sequence
  derived and/or modified sequence
atgatcgcggagcccgctcacttttatttgtttggactgatatgcctgtgttctggatctaggcttaggcaagaggactttccacctcgtattgttgaacaccctagcgacctgatcgttagcaagggcgagcccgctaccctcaactgcaaagccgagggccgacccacacccaccatagagtggtataaagggggagagagggtcgagaccgacaaagacgatcctcggtcacaccgtatgcttctgccaagtgggagtttgttcttccttcgaatagttcatggtcggaagagcagacccgacgaaggggtgtatgtttgtgttgcacgcaactaccttggcgaggccgtttcacacaacgccagtcttgaagtcgctattcttcgggacgattttcggcagaatcccagcgatgttatggtggccgttggcgagcctgctgtcatggagtgccaaccgccaaggggccatcccgagcctactatcagctggaaaaaggacggtagccctctggacgataaagacgaacgcatcacaattcggggaggcaagctgatgatcacatacacaaggaaaagtgacgccggaaaatacgtatgtgttggcaccaacatggtcggggagcgagaatcagaggttgcggaattaacagtgttggaacggccttctttcgtgaaaaggccctctaacctcgcggtgaccgtggatgacagtgccgaattcaaatgtgaggcccgaggcgaccccgtgcctacggttcgttggcgaaaggacgacggcgagttgccgaaatcccgatatgagatacgagatgaccacaccctcaagatccggaaagtgacggctggagacatgggctcgtatacgtgtgtggccgaaaatatggtcggtaaagcggaagcctcagccacgcttaccgtgcaagtgggatcagaaccaccacacttcgtcgtcaaacctcgcgaccaggtggtggccctcggtagaactgtgactttccaatgcgaggccactggcaatccgcagccggcaatcttctggagaagggaaggctctcagaacctgctcttcagctatcagccaccacagtctagctctcggttctcagttagccaaacgggtgatctgaccattaccaatgtccagaggtcggatgtagggtactatatttgccagactcttaacgtagctggctctattattactaaggcctacctggaggtcaccgatgtgattgcagatcggccacctcccgtgatccgccagggacccgtcaaccagactgtggccgtggatggtacatttgtgctgtcctgcgtggccactgggagtcctgtccccaccatcctgtggcgtaaagatggcgtgctggtgtctacccaggattctagaattaagcaactcgaaaacggcgtgctccagattcgctacgccaaattgggggacactggcaggtacacttgcatagccagtactccttccggggaagctacatggtcagcttacattgaagtgcaggaatttggcgtaccagtccagccccctagacccaccgaccccaacctgattccatccgcaccctccaagcccgaggtgactgatgtctctaggaatacagtgacgctgtcatggcagcctaacctcaactctggggcaacaccaacttcttatattatcgaagcctttagccacgcgtctggatcctcctggcagaccgtcgccgagaatgtcaagactgagacaagcgcgattaaaggccttaagcccaatgccatttacctatttctggtgagagcggcaaatgcctatgggatctccgacccttctcagatttctgatccagtgaaaactcaggatgtccttccgacttcccagggggtggaccacaagcaggtgcaacgggaactgggaaacgcagtcctacatctccacaaccctaccgtattgtcatcttcatctatcgaagtgcattggaccgtggatcagcagagccaatatattcagggctacaagatcctttatcgcccatcaggtgcaaatcacggtgaaagcgactggctggtgtttgaagtgcgcactccagctaaaaacagtgtggttatacccgacctgcggaagggagtgaattacgaaatcaaggccagaccgtttttcaacgagtttcagggggcagattcagagatcaagttcgcaaagaccctcgaggaagcgccaagcgcccctccacagggggtcaccgtttccaaaaacgatgggaacgggacggctattctggtctcctggcagcctccccctgaggacacccaaaacggcatggttcaagaatataaagtgtggtgcctggggaacgagactcggtaccacattaacaaaacagtggacggctccactttctccgtggtgattcccttcttggttccgggtatccggtattccgtggaggtcgcagcttccacaggggcaggctccggtgtgaaatcagagcctcaatttatccaactggacgcacatggtaatccagttagccccgaagaccaggtgtcactggcgcagcagatcagcgacgtggtaaagcagcccgcttttatcgccggaatcggagcggcatgttggatcatattaatggtgttcagcatctggctgtataggcatcgcaaaaagaggaacggcctgacatctacttatgccggtattcgtaaggtgacctaccagaggggaggagaagccgtgagttctggtgggaggcccggacttctaaatatatccgagcccgctgctcagccatggctcgccgacacatggcccaacacagggaacaaccacaacgactgctcaatcagctgttgcacagcaggaaatggtaattctgattccaatctaacgacctacagcagaccagggcagcctacaccctacgctaccactcagctgattcaatctaatttgtccaacaacatgaacaacggtagtggtgattccggggaaaagcattggaagccactggggcagcagaagcaagaggtggctccagttcagtacaatatcgtggaacagaacaagctgaacaaggattatagggctaacgacacggtccctccgacaatcccatacaatcagtcttacgaccagaacaccggcggttcctataactcaagcgatagaggttctagcaccagcggcagtcaaggacataagaaaggcgcaagaaccccaaaagttcccaagcaagggggtatgaattgggcagatctgctccctcctccaccagctcaccctccaccacattcaaactctgaagagtataacatttccgtggatgaaagctacgatcaggagatgccgtgccctgtaccgccagcccgaatgtacctacagcaggacgagctggaagaagaagaggatgagaggggcccaacaccaccagtgcggggagctgctagcagccccgcagctgtgagttacagccaccagtccacagccacgctcaccccttccccccaggaggaactccagccgatgctacaggactgtcctgaggagaccgggcacatgcaacaccagccagaccggcgaaggcagccagtgagcccaccaccccctcccaggcctatatctcctccccatacctatgggtacatttccggcccactggtgtccgacatggacaccgatgctccagaagaggaggaggacgaggctgacatggaagtggccaagatgcagactcgcaggctgcttttgcggggtctggaacagactcccgctagttcggtgggggacctggagtccagtgtcacggggagcatgattaacggctggggctctgcatccgaagaagacaacattagcagcggccgaagtagtgtgagttcttcagacggttctttttttacagacgcagacttcgcccaagcagttgctgcagcggcagagtacgctgggctcaaggtcgcacggcgtcaaatgcaagatgcagccggacgtcgccactttcatgcttcccagtgccctcggcctacctccccagtgagcacggactcaaatatgagcgctgcagtaatgcagaagactcggcctgccaagaagctgaaacatcagcccggacacctgaggagagagacctacaccgacgatctgcctccgcctccagttcccccaccggcaatcaagtcccctacagcccagtcaaagacccaactcgaagtgaggcctgtagtcgtaccaaagctgccttcaatggatgccaggacagacaggtccagcgaccgtaaaggcagtagctacaagggcagggaggtccttgatggccgtcaggtcgttgatatgaggacaaaccctggcgatcctagagaagcacaagagcaacaaaatgacggaaaggggaggggcaataaagctgccaaacgcgacttgcccccagccaaaacacatctgatccaggaggatattctgccatattgtaggccgacattcccgacctccaacaatcctagagatccatcatcttcttccagcatgagttcgaggggttctgggtcccgccagagagagcaggcaaatgtgggtagacggaatattgcagagatgcaagttctgggcggatacgagaggggcgaagataataacgaagagctggaggagacagaatcgtag

SEQ ID NO: 59161 - DNA, 4841 bp, Artificial Sequence
  derived and/or modified sequence
gtgtgtggcttcatacatttggggaccctatttccactccctcctcttggcatgagactgtatacaggatccacccgaggacaatgattgcggagcccgctcacttttacctgtttggattaatatgtctctgttcaggctcccgtcttcgtcaggaagattttccacctcgcattgttgaacacccttcagacctgattgtctcaaaaggagaacctgcaactttgaactgcaaagctgaaggccgccccacacccactattgaatggtacaaagggggagagagagtggagacagacaaagatgaccctcgctcacaccgaatgttgctgccgagtggatctttatttttcttacgtatagtacatggacggaaaagtagacctgatgaaggagtctatgtctgtgtagcaaggaattaccttggagaggctgtgagccacaatgcatcgctggaagtagccatacttcgggatgacttcagacaaaacccttcggatgtcatggttgcagtaggagagcctgcagtaatggaatgccaacctccacgaggccatcctgagcccaccatttcatggaagaaagatggctctccactggatgataaagatgaaagaataactatacgaggaggaaagctcatgatcacttacacccgtaaaagtgacgctggcaaatatgtttgtgttggtaccaatatggttggggaacgtgagagtgaagtagccgagctgactgtcttagagagaccatcatttgtgaagagacccagtaacttggcagtaactgtggatgacagtgcagaatttaaatgtgaggcccgaggtgaccctgtacctacagtacgatggaggaaagatgatggagagctgcccaaatccagatatgaaatccgagatgatcataccttgaaaattaggaaggtgacagctggtgacatgggttcatacacttgtgttgcagaaaatatggtgggcaaagctgaagcatctgctactctgactgttcaagttgggtctgaacctccacattttgttgtgaaaccccgtgaccaggttgttgctttgggacggactgtaacttttcagtgtgaagcaaccggaaatcctcaaccagctattttctggaggagagaagggagtcagaatctacttttctcatatcaaccaccacagtcatccagccgattttcagtctcccagactggcgacctcacaattactaatgtccagcgatctgatgttggttattacatctgccagactttaaatgttgctggaagcatcatcacaaaggcatatttggaagttacagatgtgattgcagatcggcctcccccagttattcgacaaggtcctgtgaatcagactgtagccgtggatggcactttcgtcctcagctgtgtggccacaggcagtccagtgcccaccattctgtggagaaaggatggagtcctcgtttcaacccaagactctcgaatcaaacagttggagaatggagtactgcagatccgatatgctaagctgggtgatactggtcggtacacctgcattgcatcaacccccagtggtgaagcaacatggagtgcttacattgaagttcaagaatttggagttccagttcagcctccaagacctactgacccaaatttaatccctagtgccccatcaaaacctgaagtgacagatgtcagcagaaatacagtcacattatcgtggcaaccaaatttgaattcaggagcaactccaacatcttatattatagaagccttcagccatgcatctggtagcagctggcagaccgtagcagagaatgtgaaaacagaaacatctgccattaaaggactcaaacctaatgcaatttaccttttccttgtgagggcagctaatgcatatggaattagtgatccaagccaaatatcagatccagtgaaaacacaagatgtcctaccaacaagtcagggggtggaccacaagcaggtccagagagagctgggaaatgctgttctgcacctccacaaccccaccgtcctttcttcctcttccatcgaagtgcactggacagtagatcaacagtctcagtatatacaaggatataaaattctctatcggccatctggagccaaccacggagaatcagactggttagtttttgaagtgaggacgccagccaaaaacagtgtggtaatccctgatctcagaaagggagtcaactatgaaattaaggctcgccctttttttaatgaatttcaaggagcagatagtgaaatcaagtttgccaaaaccctggaagaagcacccagtgccccaccccaaggtgtaactgtatccaagaatgatggaaacggaactgcaattctagttagttggcagccacctccagaagacactcaaaatggaatggtccaagagtataaggtttggtgtctgggcaatgaaactcgataccacatcaacaaaacagtggatggttccaccttttccgtggtcattccctttcttgttcctggaatccgatacagtgtggaagtggcagccagcactggggctgggtctggggtaaagagtgagcctcagttcatccagctggatgcccatggaaaccctgtgtcacctgaggaccaagtcagcctcgctcagcagatttcagatgtggtgaagcagccggccttcatagcaggtattggagcagcctgttggatcatcctcatggtcttcagcatctggctttatcgacaccgcaagaagagaaacggacttactagtacctacgcgggtatcagaaaagtaacttaccagagaggaggcgaagctgtcagcagtggagggaggcctggacttctcaacatcagtgaacctgccgcgcagccatggctggcagacacgtggcctaatactggcaacaaccacaatgactgctccatcagctgctgcacggcaggcaatggaaacagcgacagcaacctcactacctacagtcgcccagggcagcctactccttacgccaccactcagctcatccagtcaaacctcagcaacaacatgaacaatggcagcggggactctggcgagaagcactggaaaccactgggacagcagaaacaagaagtggcaccagttcagtacaacatcgtggagcaaaacaagctgaacaaagattatcgagcaaatgacacagttcctccaactatcccatacaaccaatcatacgaccagaacacaggaggatcctacaacagctcagaccggggcagtagtacatctgggagtcaggggcacaagaaaggggcaagaacacccaaggtaccaaaacagggtggcatgaactgggcagacctgcttcctcctcccccagcacatcctcctccacacagcaatagcgaagagtacaacatttctgtagatgaaagctatgaccaagaaatgccatgtcccgtgccaccagcaaggatgtatttgcaacaagatgaattagaagaggaggaagatgaacgaggccccactccccctgttcggggagcagcttcttctccagctgccgtgtcctatagccatcagtccactgccactctgactccctccccacaggaagaactccagcccatgttacaggattgtccagaggagactggccacatgcagcaccagcccgacaggagacggcagcctgtgagtcctcctccaccaccacggccgatctcccctccacatacctatggctacatttcaggacccctggtctcagatatggatacggatgcgccagaagaggaagaagacgaagccgacatggaggtagccaagatgcaaaccagaaggcttttgttacgtgggcttgagcagacacctgcctccagtgttggggacctggagagctctgtcacggggtccatgatcaacggctggggctcagcctcagaggaggacaacatttccagcggacgctccagtgttagttcttcggacggctcctttttcactgatgctgactttgcccaggcagtcgcagcagcggcagagtatgctggtctgaaagtagcacgacggcaaatgcaggatgctgctggccgtcgacattttcatgcgtctcagtgccctaggcccacaagtcccgtgtctacagacagcaacatgagtgccgccgtaatgcagaaaaccagaccagccaagaaactgaaacaccagccaggacatctgcgcagagaaacctacacagatgatcttccaccacctcctgtgccgccacctgctataaagtcacctactgcccaatccaagacacagctggaagtacgacctgtagtggtgccaaaactcccttctatggatgcaagaacagacagatcatcagacagaaaaggaagcagttacaaggggagagaagtgttggatggaagacaggttgttgacatgcgaacaaatccaggtgatcccagagaagcacaggaacagcaaaatgacgggaaaggacgtggaaacaaggcagcaaaacgagaccttccaccagcaaagactcatctcatccaagaggatattctaccttattgtagacctacttttccaacatcaaataatcccagagatcccagttcctcaagctcaatgtcatcaagaggatcaggaagcagacaaagagaacaagcaaatgtaggtcgaagaaatattgcagaaatgcaggtacttggaggatatgaaagaggagaagataataatgaagaattagaggaaactgaaagctgaagacaaccaagaggcttatgagatctaatgtgaaaatcatcactcaagatgcctcctgtcagatgacacatgacgccagataaaatgttcagtgcaatcaga

SEQ ID NO: 59162 - DNA, 4656 bp, Artificial Sequence
  derived and/or modified sequence
atgatcgccgagcccgcccacttctacctgttcggcctgatctgcctgtgcagcggcagcagactgagacaggaggacttcccccccagaatcgtggagcaccccagcgacctgatcgtgagcaagggcgagcccgccaccctgaactgcaaggccgagggcagacccacccccaccatcgagtggtacaagggcggcgagagagtggagaccgacaaggacgaccccagaagccacagaatgctgctgcccagcggcagcctgttcttcctgagaatcgtgcacggcagaaagagcagacccgacgagggcgtgtacgtgtgcgtggccagaaactacctgggcgaggccgtgagccacaacgccagcctggaggtggccatcctgagagacgacttcagacagaaccccagcgacgtgatggtggccgtgggcgagcccgccgtgatggagtgccagccccccagaggccaccccgagcccaccatcagctggaagaaggacggcagccccctggacgacaaggacgagagaatcaccatcagaggcggcaagctgatgatcacctacaccagaaagagcgacgccggcaagtacgtgtgcgtgggcaccaacatggtgggcgagagagagagcgaggtggccgagctgaccgtgctggagagacccagcttcgtgaagagacccagcaacctggccgtgaccgtggacgacagcgccgagttcaagtgcgaggccagaggcgaccccgtgcccaccgtgagatggagaaaggacgacggcgagctgcccaagagcagatacgagatcagagacgaccacaccctgaagatcagaaaggtgaccgccggcgacatgggcagctacacctgcgtggccgagaacatggtgggcaaggccgaggccagcgccaccctgaccgtgcaggtgggcagcgagcccccccacttcgtggtgaagcccagagaccaggtggtggccctgggcagaaccgtgaccttccagtgcgaggccaccggcaacccccagcccgccatcttctggagaagagagggcagccagaacctgctgttcagctaccagcccccccagagcagcagcagattcagcgtgagccagaccggcgacctgaccatcaccaacgtgcagagaagcgacgtgggctactacatctgccagaccctgaacgtggccggcagcatcatcaccaaggcctacctggaggtgaccgacgtgatcgccgacagacccccccccgtgatcagacagggccccgtgaaccagaccgtggccgtggacggcaccttcgtgctgagctgcgtggccaccggcagccccgtgcccaccatcctgtggagaaaggacggcgtgctggtgagcacccaggacagcagaatcaagcagctggagaacggcgtgctgcagatcagatacgccaagctgggcgacaccggcagatacacctgcatcgccagcacccccagcggcgaggccacctggagcgcctacatcgaggtgcaggagttcggcgtgcccgtgcagccccccagacccaccgaccccaacctgatccccagcgcccccagcaagcccgaggtgaccgacgtgagcagaaacaccgtgaccctgagctggcagcccaacctgaacagcggcgccacccccaccagctacatcatcgaggccttcagccacgccagcggcagcagctggcagaccgtggccgagaacgtgaagaccgagaccagcgccatcaagggcctgaagcccaacgccatctacctgttcctggtgagagccgccaacgcctacggcatcagcgaccccagccagatcagcgaccccgtgaagacccaggacgtgctgcccaccagccagggcgtggaccacaagcaggtgcagagagagctgggcaacgccgtgctgcacctgcacaaccccaccgtgctgagcagcagcagcatcgaggtgcactggaccgtggaccagcagagccagtacatccagggctacaagatcctgtacagacccagcggcgccaaccacggcgagagcgactggctggtgttcgaggtgagaacccccgccaagaacagcgtggtgatccccgacctgagaaagggcgtgaactacgagatcaaggccagacccttcttcaacgagttccagggcgccgacagcgagatcaagttcgccaagaccctggaggaggcccccagcgcccccccccagggcgtgaccgtgagcaagaacgacggcaacggcaccgccatcctggtgagctggcagcccccccccgaggacacccagaacggcatggtgcaggagtacaaggtgtggtgcctgggcaacgagaccagataccacatcaacaagaccgtggacggcagcaccttcagcgtggtgatccccttcctggtgcccggcatcagatacagcgtggaggtggccgccagcaccggcgccggcagcggcgtgaagagcgagccccagttcatccagctggacgcccacggcaaccccgtgagccccgaggaccaggtgagcctggcccagcagatcagcgacgtggtgaagcagcccgccttcatcgccggcatcggcgccgcctgctggatcatcctgatggtgttcagcatctggctgtacagacacagaaagaagagaaacggcctgaccagcacctacgccggcatcagaaaggtgacctaccagagaggcggcgaggccgtgagcagcggcggcagacccggcctgctgaacatcagcgagcccgccgcccagccctggctggccgacacctggcccaacaccggcaacaaccacaacgactgcagcatcagctgctgcaccgccggcaacggcaacagcgacagcaacctgaccacctacagcagacccggccagcccaccccctacgccaccacccagctgatccagagcaacctgagcaacaacatgaacaacggcagcggcgacagcggcgagaagcactggaagcccctgggccagcagaagcaggaggtggcccccgtgcagtacaacatcgtggagcagaacaagctgaacaaggactacagagccaacgacaccgtgccccccaccatcccctacaaccagagctacgaccagaacaccggcggcagctacaacagcagcgacagaggcagcagcaccagcggcagccagggccacaagaagggcgccagaacccccaaggtgcccaagcagggcggcatgaactgggccgacctgctgccccccccccccgcccacccccccccccacagcaacagcgaggagtacaacatcagcgtggacgagagctacgaccaggagatgccctgccccgtgccccccgccagaatgtacctgcagcaggacgagctggaggaggaggaggacgagagaggccccaccccccccgtgagaggcgccgccagcagccccgccgccgtgagctacagccaccagagcaccgccaccctgacccccagcccccaggaggagctgcagcccatgctgcaggactgccccgaggagaccggccacatgcagcaccagcccgacagaagaagacagcccgtgagccccccccccccccccagacccatcagccccccccacacctacggctacatcagcggccccctggtgagcgacatggacaccgacgcccccgaggaggaggaggacgaggccgacatggaggtggccaagatgcagaccagaagactgctgctgagaggcctggagcagacccccgccagcagcgtgggcgacctggagagcagcgtgaccggcagcatgatcaacggctggggcagcgccagcgaggaggacaacatcagcagcggcagaagcagcgtgagcagcagcgacggcagcttcttcaccgacgccgacttcgcccaggccgtggccgccgccgccgagtacgccggcctgaaggtggccagaagacagatgcaggacgccgccggcagaagacacttccacgccagccagtgccccagacccaccagccccgtgagcaccgacagcaacatgagcgccgccgtgatgcagaagaccagacccgccaagaagctgaagcaccagcccggccacctgagaagagagacctacaccgacgacctgccccccccccccgtgcccccccccgccatcaagagccccaccgcccagagcaagacccagctggaggtgagacccgtggtggtgcccaagctgcccagcatggacgccagaaccgacagaagcagcgacagaaagggcagcagctacaagggcagagaggtgctggacggcagacaggtggtggacatgagaaccaaccccggcgaccccagagaggcccaggagcagcagaacgacggcaagggcagaggcaacaaggccgccaagagagacctgccccccgccaagacccacctgatccaggaggacatcctgccctactgcagacccaccttccccaccagcaacaaccccagagaccccagcagcagcagcagcatgagcagcagaggcagcggcagcagacagagagagcaggccaacgtgggcagaagaaacatcgccgagatgcaggtgctgggcggctacgagagaggcgaggacaacaacgaggagctggaggagaccgagagctag

SEQ ID NO: 59163 - protein, 856 aa, Artificial Sequence
  derived and/or modified sequence
MALVLGSLLLLGLCGNSFSGGQPSSTDAPKAWNYELPATNYETQDSHKAGPIGILFELVHIFLYVVQPRDFPEDTLRKFLQKAYESKIDYDKIVYYEAGIILCCVLGLLFIILMPLVGYFFCMCRCCNKCGGEMHQRQKENGPFLRKCFAISLLVICIIISIGIFYGFVANHQVRTRIKRSRKLADSNFKDLRTLLNETPEQIKYILAQYNTTKDKAFTDLNSINSVLGGGILDRLRPNIIPVLDEIKSMATAIKETKEALENMNSTLKSLHQQSTQLSSSLTSVKTSLRSSLNDPLCLVHPSSETCNSIRLSLSQLNSNPELRQLPPVDAELDNVNNVLRTDLDGLVQQGYQSLNDIPDRVQRQTTTVVAGIKRVLNSIGSDIDNVTQRLPIQDILSAFSVYVNNTESYIHRNLPTLEEYDSYWWLGGLVICSLLTLIVIFYYLGLLCGVCGYDRHATPTTRGCVSNTGGVFLMVGVGLSFLFCWILMIIVVLTFVFGANVEKLICEPYTSKELFRVLDTPYLLNEDWEYYLSGKLFNKSKMKLTFEQVYSDCKKNRGTYGTLHLQNSFNISEHLNINEHTGSISSELESLKVNLNIFLLGAAGRKNLQDFAACGIDRMNYDSYLAQTGKSPAGVNLLSFAYDLEAKANSLPPGNLRNSLKRDAQTIKTIHQQRVLPIEQSLSTLYQSVKILQRTGNGLLERVTRILASLDFAQNFITNNTSSVIIEETKKYGRTIIGYFEHYLQWIEFSISEKVASCKPVATALDTAVDVFLCSYIIDPLNLFWFGIGKATVFLLPALIFAVKLAKYYRRMDSEDVYDDVETIPMKNMENGNNGYHKDHVYGIHNPVMTSPSQH

SEQ ID NO: 59164 - protein, 40 aa, Artificial Sequence
  derived and/or modified sequence
MALVLGSLLLLGLCGNSFSGGQPSSTDAPKAWNYELPATN

SEQ ID NO: 59165 - protein, 14 aa, Artificial Sequence
  derived and/or modified sequence
MALVLGSLLLLGLC

SEQ ID NO: 59166 - DNA, 2571 bp, Artificial Sequence
  derived and/or modified sequence
atggctctggttctgggctctctcctgctgctcggcctctgtgggaattcctttagcgggggacagccttcaagcacagatgccccgaaggcctggaattatgaactcccagcgaccaactacgagactcaagatagccataaggctggccccattgggattttgtttgagctggtccacatttttctgtacgttgtgcagccgcgggacttccccgaagacactcttagaaagttcctgcagaaagcatatgaatcaaaaatcgactatgataagattgtctactacgaagccggaattattctatgctgcgtgttaggcctcctatttatcattcttatgcctctggtgggctattttttctgcatgtgtagatgctgtaacaagtgtggtggcgagatgcatcagcgccagaaagagaatggaccatttctcagaaagtgcttcgccatcagtcttctggtgatttgcattattatctccatcgggattttttacggcttcgtggcaaaccaccaggtccgcactcgaatcaagagatccaggaagcttgccgacagcaatttcaaagacctgaggacccttctcaatgagactccagaacagattaagtatatcctggcacagtataacacaactaaggacaaggcattcaccgacctcaactccatcaatagcgtgctgggcggcgggattctggataggctaaggccaaacataattcccgtccttgacgagattaaaagcatggctacagccatcaaagaaaccaaagaggccttggaaaatatgaactccactctgaaatcgctccaccagcagtctacccaactatcgtcttcattaacatcagtgaaaaccagtcttagatctagcttaaacgatcctctttgtctggttcacccttcttctgaaacatgcaacagcattcgcctcagcctctcccagcttaacagcaatcccgaacttcggcagctgccccccgtcgatgctgagctagacaatgtgaataatgtattgcgcacagatctagacgggcttgttcaacagggatatcagtctttgaatgacatccctgatcgcgtgcaaagacaaaccactactgtggtcgctggcatcaaacgggtgctcaacagtatcggaagcgatatcgacaacgtaactcagcggctcccgatacaggacatcctttcagcttttagtgtgtacgtgaacaacaccgagtcttatatccatcggaacctacccaccttagaagagtacgactcttattggtggcttggcggattggttatttgcagtttacttactttgatcgtcatcttctattatttaggcctgctgtgtggagtatgtggttacgaccgccatgcaactccaaccactcgggggtgtgttagtaacacgggaggagtgtttctgatggtcggtgtgggcctttctttcctgttttgctggattcttatgataatcgtggtcctaacttttgtgtttggtgctaatgtggaaaagctcatttgtgaaccctacacttccaaggaactgtttcgtgtcttggacacaccatatctcttgaacgaggactgggagtactacctgtcagggaaactgtttaataagagtaaaatgaaactcacctttgagcaggtatactccgattgcaaaaagaaccgtggaacctatggaactctgcatctgcagaattccttcaacatctccgagcacttaaacataaatgagcacaccggtagtatctcctccgagctggaatccctgaaggtgaacctgaatatcttcctgttgggcgccgctggacgtaaaaacctgcaagattttgccgcttgcggtatcgacagaatgaattacgatagttacctcgctcagacaggcaagagccctgccggtgtgaatctgctcagttttgcctatgatctggaggccaaggccaattcattaccccctggaaatctgcgcaacagcctaaagagggatgcccagaccatcaagacaattcatcagcaacgggtgttacctattgagcagtcactgagtacactgtatcaatcagtaaagatcctgcagcgtaccgggaacgggctgctggaaagggtgacacggattctagcaagtctcgactttgcgcaaaacttcataacaaataacacttccagcgtaatcattgaggaaactaagaaatacggtcgcaccattattggttattttgaacattatctgcaatggatcgaattctccatcagtgaaaaagtggccagctgtaagcctgttgccacagctctcgataccgcggtcgacgttttcttgtgtagctacatcatcgatcctctgaatcttttctggtttggaatagggaaggccactgtcttcctcttacccgccctaatctttgccgttaaactggccaagtattaccgaaggatggactccgaagatgtctacgacgatgtcgaaaccattcctatgaagaacatggagaacggaaacaacggctatcataaggaccatgtatacggaatccataaccccgtgatgacaagcccatcacaacattag

SEQ ID NO: 59167 - DNA, 2571 bp, Artificial Sequence
  derived and/or modified sequence
atggccctggtgttaggaagcctgctcttgctggggctgtgtggaaactctttttctggtgggcagccaagtagcacggacgctccgaaggcctggaattatgaacttcctgccactaattatgagacacaagactcacataaggccgggccaatagggatcctctttgagctggtacatatattcctttacgtggtgcagcctagggatttccctgaagacactctgaggaagtttctacaaaaggcttatgaaagcaagatcgattatgacaagatcgtctattacgaagctggcatcatcctctgttgtgtactcggcctccttttcattatcttgatgcccctggttgggtatttcttttgcatgtgccgttgctgcaataagtgcggcggagagatgcatcagcggcagaaagagaacggcccatttctgcgtaaatgcttcgccatcagcctcctggtgatttgcatcattatttcaatcggcattttctacgggttcgtcgctaaccaccaagttcggacaaggatcaaaagatcccggaagctcgctgatagtaatttcaaggacctgcgcaccctgctgaacgaaactcccgagcagattaagtacatcctcgcgcaatataacactaccaaagataaggctttcactgacctgaactcaattaacagtgttctagggggaggtattttagatcgtttgcgtcccaacatcattccagtcctggacgagattaaaagcatggccacagcgatcaaagagaccaaagaggccctggagaatatgaactccaccctgaagtctctacatcagcagagcacccagttgagtagctctcttacctccgtaaaaacttctctgaggtccagcctcaacgatccactttgcttggttcatcctagcagcgaaacctgtaattctatcaggttgtccctctctcagctcaacagcaaccctgagctgaggcagttgcctcccgtggacgcagagttggataatgtgaataatgtgttacgaaccgacctagatggcctggttcagcagggttatcagtctttgaatgatatcccggaccgcgtgcagagacagacaacaacagtggttgctggaattaagagagtgctgaactcaattggaagcgacattgataatgtcacacagagacttccgatacaggatatactcagtgccttcagtgtgtacgtgaacaacactgagagctacatccaccggaatctccccactctggaggaatacgactcttattggtggttaggcggactggtgatctgtagtctgctgacgctgattgttatcttttactacctgggccttctgtgtggagtttgcggttacgataggcatgcaacccccaccacaagaggctgtgtaagtaacactgggggcgtgttcctgatggtcggcgtgggccttagtttcttgttttgctggatactgatgatcattgtggttctgacctttgtctttggtgccaacgtggaaaagctgatttgtgaaccttataccagtaaggagttgttcagggtcctggataccccttatctgttgaacgaagattgggagtactaccttagcgggaaattgtttaataaaagcaaaatgaaattgaccttcgaacaggtttatagcgattgcaagaagaatcgcgggacttacggtactctgcacctgcagaacagctttaatattagtgagcacctgaacattaacgaacatacaggctccatttcatcggaactggaaagtttaaaagtaaacttgaacatttttcttcttggcgctgccggcaggaagaatcttcaggattttgcggcctgtgggattgaccgtatgaattacgattcatacctggcgcagactggtaagtcccccgcgggggtcaatctgctgtctttcgcctacgacctagaagctaaggcaaattcactcccacccggtaatctgagaaattccttgaagcgagacgctcagacaataaaaaccatccaccagcagcgggttcttcccatcgaacagagtcttagtactctgtatcagtccgtgaaaatcttacaacggactggaaatggattactcgagcgtgtcacgcggattcttgcgagtctcgattttgctcaaaactttataaccaataacacttcatccgtgatcattgaggagaccaaaaaatatggtcggacgatcattgggtatttcgaacattatttgcaatggatcgaattctctatctctgaaaaggttgcttcctgcaaacccgtggctactgctttggatactgctgtggacgttttcctctgctcttacattatcgaccctttaaatcttttctggtttgggattggcaaggcgactgttttccttctgccagctctgatcttcgccgtgaagctggccaagtattaccggcgcatggacagtgaggacgtgtatgacgatgtggaaaccatcccaatgaagaatatggagaatggcaataacggctatcataaagaccacgtgtacggaatccacaaccctgttatgacaagccctagccagcactag

SEQ ID NO: 59168 - DNA, 2571 bp, Artificial Sequence
  derived and/or modified sequence
atggccctggtgctgggcagcctgctgctgctgggcctgtgtggcaacagcttcagcggcggccagcccagcagcacagatgcccccaaggcctggaactatgagctgcctgccaccaactatgagacccaggacagccacaaggccggccccatcggcatcctgtttgagctggtgcacatcttcctgtatgtggtgcagccccgggacttccctgaggacaccctgaggaagttcctgcagaaggcctatgagagcaagattgattatgacaagatcgtgtactatgaggccggcatcatcctgtgctgcgtgctgggcctgctcttcatcatcctgatgcccctggtgggctacttcttctgcatgtgccgctgctgcaacaagtgtggcggggagatgcaccagaggcagaaggaaaatggccccttcctgaggaaatgttttgccatcagcctgctggtgatctgcatcatcatcagcatcggcatcttctacggctttgtggccaaccaccaggtgaggacccgcatcaagaggagcaggaagctggccgacagcaacttcaaggacctgcggaccctgctgaatgagaccccagagcagatcaagtacatcctggcccagtacaacaccaccaaggacaaggccttcacagacctgaacagcatcaacagcgtgctgggcggcggcatcctggaccggctgcggcccaacatcatccctgtgctggatgagatcaagtccatggccacagccatcaaggagaccaaggaggccctggagaacatgaacagcaccctgaagagcctgcaccagcagagcacccagctgagcagcagcctgacctctgtgaagaccagcctgcggagcagcctgaatgaccccctgtgcctggtgcaccccagcagcgagacctgcaacagcatccggctgagcctgagccagctgaacagcaaccctgagctgcggcagctgccccctgtggatgctgagctggacaacgtgaacaacgtgctgaggacagacctggatggcctggtgcagcagggctaccagagcctgaatgacatcccagacagagtgcagaggcagaccaccaccgtggtggccggcatcaagagggtgctgaacagcatcggcagtgacatcgacaacgtgacccagaggctgcccatccaggacatcctgagcgccttctctgtgtatgtgaacaacacagagagctacatccacaggaacctgcccaccctggaggagtatgacagctactggtggctgggcggcctggtgatctgcagcctgctgaccctgattgtcatcttctactacctgggcctgctgtgtggggtgtgtggctatgacagacatgccacccccaccacccggggctgtgtgagcaacacaggaggagtcttcctgatggtgggcgtgggcctgtccttcctgttctgctggatcctgatgatcatcgtggtgctgacctttgtgtttggagccaacgtggagaagctgatctgtgagccctacaccagcaaggagctgttccgggtgctggacaccccctacctgctgaatgaagactgggagtactacctgagcggcaagctgttcaacaagagcaagatgaagctgacctttgagcaggtgtacagcgactgcaagaagaacagaggcacctacggcaccctgcacctgcagaacagcttcaacatcagcgagcacctgaacatcaatgagcacacaggcagcatcagcagcgagctggagagcctgaaggtgaacctgaacatcttcctgctgggcgccgccggcaggaagaacctgcaggactttgctgcctgtggcatcgacaggatgaactatgacagctacctggcccagacaggcaagagccctgctggggtgaacctgctgagctttgcctatgacctggaggccaaggccaacagcctgcccccaggcaacctgaggaacagcctgaagagagatgcccagaccatcaagaccatccaccagcagagggtgctgcccatcgagcagagcctgagcaccctgtaccagagcgtgaagatcctgcagaggactggaaatggcctgctggagcgggtgacccgcatcctggccagcctggactttgcccagaacttcatcaccaacaacaccagcagcgtcatcatcgaggagaccaagaagtatggccgcaccatcatcggctactttgagcactacctgcagtggattgagttcagcatcagcgagaaggtggccagctgcaagcctgtggccacagccctggacacagctgtggatgtgttcctgtgcagctacatcatcgaccccctgaacctcttctggtttggaattggcaaggccaccgtcttcctgctgcctgccctgatctttgctgtgaagctggccaagtactacagaaggatggattctgaagatgtgtatgatgatgtggagaccatccccatgaagaacatggagaatggaaataatggctaccacaaggaccacgtgtatggcatccacaaccctgtgatgaccagccccagccagcactag

SEQ ID NO: 59169 - DNA, 2571 bp, Artificial Sequence
  derived and/or modified sequence
atggccctggtgctgggcagcctgctgctgctgggcctgtgcggcaatagtttctccggcggccagccctcaagtacggacgccccaaaggcatggaactacgaattgcccgccactaactacgagacccaagattctcacaaagcaggacctatcggtattctctttgagcttgtgcatatttttctatacgtggtccagcccagagacttccccgaagacacgcttcgtaaattcctgcagaaggcctatgaaagcaagatcgactacgataaaatagtgtattatgaggctggtatcattctgtgctgcgttttggggctgcttttcattatcctgatgcctctagtgggctacttcttctgtatgtgtcgctgctgtaataaatgtggcggggagatgcaccagcggcagaaggaaaatggcccattcctccgcaaatgcttcgccatctctctgctggtcatttgcatcattatttcgattggcattttctacgggttcgttgccaaccaccaggtgagaactcgaattaaaaggtcccgaaagctcgccgattccaacttcaaggacctccgcaccctgctgaacgagacaccagaacagatcaaatatattctggcccagtacaataccaccaaagacaaggcttttaccgacctgaactcaattaacagcgtcctgggcgggggtatattggatcgattacgtcctaacatcatacccgtgctggatgaaattaagtcaatggcaaccgcaatcaaagaaaccaaggaagcattggagaacatgaattccaccctgaaaagcctgcatcagcagagcacccaactgtcttcctcactaacttctgttaagaccagcctcagatcctctctaaacgaccctctatgcctggttcatccctctagcgagacctgcaactctatacgcctgagtttatctcaacttaacagcaaccccgaattgaggcagctcccccccgtcgatgcagagctcgacaatgtcaacaacgtcctaaggaccgatcttgatggactagtccagcagggctatcaatctcttaacgacatacccgatcgcgttcaacggcaaaccaccacagttgtggccggcatcaagcgcgtgctcaactccatcggcagcgatatagataacgtcactcagcgactgccaattcaagacatcctctctgcgttttcagtgtacgtcaacaacacggagtcctacattcacagaaacctgcccacactagaggagtatgatagctattggtggctaggcggccttgtaatctgttcattactaaccctcattgtaattttctattatctgggacttttgtgcggcgtttgtggatacgatcgtcatgcgacgccaaccacacgaggttgcgtctcaaacacgggcggtgtgtttctgatggtgggagtgggtttgtccttcctcttctgctggatcctcatgatcattgttgtgctgacctttgtgtttggagccaatgtcgagaagctgatctgcgaaccctacacaagcaaagagctttttagagttttggatacaccatacctgctgaatgaggattgggagtactatctcagcggcaaactcttcaataagagcaagatgaaactcaccttcgagcaagtatactcagattgtaagaaaaaccgcgggacatatggtactcttcacctgcagaacagttttaatatctccgagcacctgaatatcaatgagcacacaggctcaatcagttccgagctagagtcccttaaggtgaaccttaacatattcctcttgggtgcagcaggacggaaaaatctccaagacttcgctgcctgtggtatcgacagaatgaattatgatagttatttggctcagaccgggaaaagccccgccggggtgaacctcctttcatttgcctacgacctcgaggcaaaagctaatagtctgccgcctgggaacctccgcaactccctaaagagggatgctcagactataaaaactattcatcagcaacgggttctgcccatcgaacaaagcctgagtacactctaccagagcgttaagatcctgcagcggacgggtaacggtctgcttgaacgggtaaccagaatactcgcatcactggacttcgcccagaactttataaccaataacaccagctctgttattattgaagagaccaagaaatatggcaggaccataattggttacttcgaacactatctccagtggatcgaattttctataagtgagaaggtcgcctcgtgtaaaccagtagccaccgcactggacaccgcagtagatgtctttctctgcagttacatcattgaccccctgaatctgttctggtttgggattggcaaagcaacggtgtttctgctgcccgcacttatctttgccgtgaaacttgctaaatactacaggcggatggatagcgaagacgtctatgatgatgtggaaactatccctatgaaaaatatggaaaatgggaataacggctaccacaaagatcacgtgtacggaattcacaatcccgtgatgacctccccaagccagcactag

SEQ ID NO: 59170 - DNA, 2571 bp, Artificial Sequence
  derived and/or modified sequence
atggccctggtgctgggcagcctgctgctgctgggcctgtgcggcaattctttttccggcgggcagccatcttctaccgacgcccccaaagcctggaattacgagctgcccgcgactaattatgaaacacaagattcgcataaggctgggcctataggcatcttgttcgaattggtgcacatcttcctatacgttgttcaacctagggacttcccggaggataccttacggaagttcttacagaaggcctacgaaagcaaaattgactacgacaagattgtctattacgaggcaggcataatactctgctgtgttctgggactgctattcatcatcctgatgcccctggttgggtatttcttctgcatgtgtagatgttgtaacaaatgcggaggagagatgcatcagcgacaaaaggagaatggcccatttctgaggaagtgcttcgccatcagcctgcttgtcatttgcatcattatctctatcgggatattttacgggtttgtggcaaaccaccaggttcggactagaataaagagatctcgtaagctcgccgactcaaacttcaaagatctgaggaccctcttgaacgaaacacctgaacagatcaagtacatcctggcccagtacaacaccaccaaagacaaagcgtttaccgacctcaattcgattaattctgttttaggaggcggtatcctggatcgccttcggcctaatattattcctgtgcttgacgagatcaaatccatggcgacagccattaaggaaacaaaggaagctctggagaatatgaatagcaccttaaaatctcttcatcaacagagtacccagctgagttcttctctcacaagtgtaaagactagcctgcgcagctctctcaacgaccccttatgtctagtgcatccttcctcagaaacttgcaattccatcaggctcagtctttctcagctgaatagtaatcctgagcttaggcagctaccaccagttgatgctgagcttgataacgtgaataatgtcctgaggactgacctggacggattggtacagcaaggctaccaatcgcttaatgatatccccgatagagtacagcgacagaccaccacagtcgtagcagggattaagcgcgtgttgaattccattggttcagatatcgacaacgttacacaaagattgccaattcaggacatcctgtcggctttctcggtttatgtgaacaatacagagagctatatccaccggaacctcccgacgctggaagagtacgattcgtattggtggctcggcgggctggttatttgctccctactgacactgatcgtgattttctattacttggggctattgtgcggggtgtgtggctatgatcggcatgccactccgaccacccggggttgtgtgtctaatactggcggggtgtttctgatggtgggcgtcgggcttagctttctcttctgttggattctcatgattatcgtggtgctgaccttcgtttttggtgcgaatgtggaaaagctgatatgcgaaccctatacatctaaggagctgtttcgagtccttgatacaccctatctcttaaatgaggactgggaatactatctgagtggcaagctgttcaataaaagtaaaatgaagctgaccttcgagcaggtgtattcagattgtaaaaagaatagaggtacttacggcactctgcatctgcaaaatagctttaacatctctgaacacttaaacatcaacgagcacaccggttcaatcagcagcgagctggagagcctgaaagtaaatctgaatatctttctgttaggagccgctggccggaaaaatttacaggacttcgccgcctgcggaatcgataggatgaattacgattcttatctcgcccagacggggaaaagccccgcaggggtgaacctgctgtcattcgcctacgatctggaggccaaagcaaactccctgcctcctggaaatctaaggaacagccttaagagagacgcccagactataaagactatccatcagcagagggtcctcccgatagaacaaagcctttccaccctctaccaatccgtaaaaatcctccagaggaccggcaacggcctgttagaacgcgtcactcggatcctcgccagtcttgacttcgctcagaacttcattacgaataacacctcgagcgttatcatagaagaaacgaagaagtatggcaggaccattattgggtactttgagcactacctacagtggatcgaattttcaatctcagaaaaggtcgcatcatgtaaaccagttgcaacagccctggacaccgcagtagacgtgtttctgtgtagctacatcatcgatcccctgaacctgttttggttcggaattggaaaagctacagtcttcctgctgcccgccttgatatttgctgttaagctcgccaaatattacaggcgcatggattccgaagacgtgtatgacgacgtggaaaccatcccaatgaagaacatggaaaatggaaataatggataccacaaagaccacgtctatggcattcacaaccctgttatgaccagccccagtcagcattag

SEQ ID NO: 59171 - DNA, 2571 bp, Artificial Sequence
  derived and/or modified sequence
atggccttggtcctgggtagtctgctccttttgggactatgtgggaacagtttttccggcggacaaccatcatccactgatgcccctaaagcctggaattatgaacttcccgcaaccaactatgaaacacaggatagccacaaagctggaccgataggcatcctgtttgagctggtgcacatattcttgtacgtagtccaaccgagagattttcctgaagacactctccgaaaatttctccagaaagcctacgagtctaaaatcgactatgacaagattgtgtactatgaggccggaataattttatgctgcgtgctgggtctgcttttcatcatcctcatgcctctggtgggttactttttctgcatgtgtcgatgctgcaataaatgcgggggagagatgcatcagagacagaaagaaaatggaccatttttgcgcaagtgtttcgcgatcagcctgcttgtgatatgcataatcatttctataggtattttctatggatttgttgccaatcaccaagtccggacacgcatcaaacgctcacgtaaactggctgattcaaattttaaagacctgcgcacattgctcaacgagacccccgagcagattaagtatatcctggcccagtacaacaccacaaaagataaagcctttacagacctgaattctatcaattccgttctaggaggcggaatactggacaggcttcgtcccaacattattccagtcctcgacgaaatcaagtctatggccacggctataaaagagactaaggaggccctggaaaatatgaactcaaccctgaagagccttcatcagcaaagcacccagctttcaagtagcctgaccagcgtaaagacatccctgcggtcttccctgaatgatccactgtgtctcgtccacccctctagcgaaacctgtaactctatccgcctatcactgagccagttgaactctaatcctgagttgcgtcagctccctcccgtcgatgctgagctcgataatgttaataatgttctgcgcactgatctggatggcctggtgcagcaaggataccagagtctaaatgacatcccagatcgagttcagaggcagaccaccacggtggtggctgggatcaagcgcgtgcttaatagtataggcagcgacatcgacaacgtgacccagaggcttcctattcaagatatattgtccgctttttcggtgtacgttaacaataccgaatcctacatacacagaaacctgccaaccctcgaagagtacgactcttattggtggctcggcggactcgtgatctgctccctccttacgctaatcgtgattttctactatctagggcttctttgcggggtgtgtggttacgataggcatgctacccccaccacccgcggatgtgtgagcaacacgggcggagtgttcctgatggttggtgtgggcctgtcattcctgttctgctggatcctcatgataatcgtcgtactcacgtttgtgtttggtgcgaatgtggagaaacttatctgcgaaccctatactagtaaagagctattcagagtgctggacacaccttaccttctgaatgaggattgggagtattatctgtccggaaagctgttcaacaaaagcaaaatgaaattgactttcgaacaggtgtatagcgactgcaaaaaaaaccggggaacctacgggaccctgcatctgcagaattctttcaacataagtgaacacttgaatatcaacgagcatacgggttctattagcagcgagctcgagagcctgaaggtgaatttgaatatcttcttgctcggggctgctggtaggaaaaacttgcaggattttgctgcttgcggtatagatcgcatgaactacgatagctacttggcacagaccggcaaaagtccggctggtgtcaaccttttgagcttcgcttacgacctggaggccaaggctaactctctccctccaggaaacctgaggaactcgctcaagagagacgcccagacgataaagaccatccatcaacagcgggtcttgccaattgagcagagcctgagtactctctatcagtctgtgaaaattctgcaacggactggcaacggcctcctggagcgcgttactcgcattctggcctccttagacttcgcgcagaatttcattaccaacaacacttctagcgtcatcatcgaggaaacaaagaaatacggaaggactatcatcggctattttgaacattacctgcaatggatcgagttctcaatatcagagaaggtcgcttcctgtaaaccagtggccacggctctggataccgccgtggatgtctttctttgcagctatatcattgacccccttaacttgttttggtttggtattggcaaagctaccgtgttcctcctcccagctctgatattcgcagttaagctggcaaagtactatagacggatggatagtgaagacgtctacgacgacgttgagacgattcccatgaaaaatatggaaaatggtaacaatgggtatcacaaggaccacgtatacggcattcataacccggtgatgacaagcccaagtcagcattag

SEQ ID NO: 59172 - DNA, 2571 bp, Artificial Sequence
  derived and/or modified sequence
atggccttggtcttgggctctctactgctcctgggactgtgcggaaatagtttctctggtggccaaccctcttccactgacgccccaaaagcatggaactatgagctgcctgctaccaactatgagacacaagattcacacaaggcaggcccaatagggatactgttcgaacttgtacacatattcctgtacgttgtgcaaccacgggactttcccgaggacactctccggaagttcctgcaaaaggcatacgagagtaagatagactatgataagattgtgtactatgaggccggaatcatcctatgttgtgtgcttgggcttctgttcattatcctgatgcccctcgtcggctacttcttttgcatgtgtcgttgctgtaataaatgcggaggagagatgcatcagcggcagaaagaaaacgggcctttcctcagaaagtgttttgccatttccctcctggttatctgcatcattatcagtatcggcatcttttatggcttcgtcgccaaccaccaagtgaggacccgcattaagcgatcccggaaactagcagatagtaactttaaggatttgagaacgctcctaaacgaaacacccgagcagatcaaatacatactcgcccagtataacacaactaaggacaaagctttcaccgacctcaattcgataaactccgtgctcggtgggggaatactcgatagactgaggcctaatattatccccgtgcttgacgagattaaatccatggccactgccatcaaggaaacaaaggaggcactcgaaaacatgaacagcaccctgaaatcattacatcagcagtctacgcagctctcaagctcccttacctctgttaagacctctttgagaagctctctcaatgacccactgtgcttggttcacccgagttccgagacctgtaatagtataagactgagcctctcccaattgaatagcaacccggaactgaggcagctgcctccggtcgatgcagaactcgacaacgttaacaatgtgctaaggaccgatttggacggcctggtacagcaggggtatcaaagcttaaacgatatccccgatagggtgcaacggcagactacaactgttgtggcaggtatcaagagggtgctcaatagtatcggctctgatatcgataacgtgacacaaaggctgcccatacaagacattctgagtgctttttctgtgtatgtgaacaacactgaatcatatatacatcgcaatctgccaacacttgaggagtatgattcatattggtggctgggcggactcgtaatctgttccctcctaaccctgatcgttatattttactatcttgggctactctgcggcgtttgtggatatgatcggcacgctacccccacaactcgcggttgtgtctctaatactgggggagtcttcctcatggtgggggtgggccttagcttcctgttctgttggatcttgatgattatcgttgttttgacctttgtgttcggcgcaaacgtggaaaagctgatctgcgaaccctacacaagtaaggagttatttcgggtactggacactccctacctcctgaacgaggactgggagtactatctgtctggaaagctgttcaacaagtctaagatgaagctgaccttcgagcaggtgtacagcgactgcaaaaagaacaggggcacatatggcactctccatttgcagaactcatttaatataagtgagcacttgaacataaatgaacataccggctccatcagtagcgagctagagagcctcaaggttaacctcaacattttcttgctgggagctgcaggcagaaagaatctgcaggatttcgcagcgtgtggcattgaccgaatgaattacgactcctatttagctcaaaccggaaaatcaccagccggtgtgaatctgctgagttttgcatatgatctggaagctaaagcaaatagtctcccccctggaaacttgcgaaattcgctgaagcgggacgcccagaccatcaagacaatccatcagcagcgtgtgctaccaatagagcagtcgttatctactttgtaccagtcagtcaagattctacagaggaccgggaatggcctgttagaacgggtcacccgcatcctggcaagtcttgacttcgcacagaactttatcacaaataacacaagctcagtgattatagaggaaaccaagaagtacggtcggacaataataggatatttcgagcattacttgcagtggattgagttctcgatctccgagaaggtggcgagttgtaagcctgtcgccacggccctggacactgctgttgacgtattcctgtgtagttacatcatagatccactcaacctcttttggttcggcattggcaaagcaacagtgttcttactgcccgcactgatcttcgccgtcaagctggccaaatattacagaagaatggactcggaggacgtgtatgatgatgtggagacaattcctatgaaaaatatggaaaatggaaacaacggttatcacaaggaccacgtatatggcatccataatcctgtcatgacaagccctagccagcactag

SEQ ID NO: 59173 - DNA, 4349 bp, Artificial Sequence
  derived and/or modified sequence
ctgctgcacactaaggatccaaatgattgtttttttgttttttgttttgttttgttttgttttgttttgttttaaattgcattgggattaggcaacagaagggtctaatgcggccgggatgagacaggagagtttttaggagggtagctgcattctaagtaagggactctgcggggggaaaagaggcgcaagcgttgcaagaagggagtgcagggggttgagcaggcacctctacaggaaatggatgctgtccaggtgctggtgggcgccccagggctacgtggcgaagcagctcagccggtccaatcagagtgcgtccagggctcgggtttcgcgatctttaagtgactgaggcagatccccacgcggcacctggccatgctctcagctctcccgccgcgggatggtgccttgagtgaatgacccccttggagaacattcttccgcatccctcgcctcaagccagcctcagacagaaaactgaagattcagcagatccagtgcttcctgctcctcttctgcccaggaacacgcttgccttccccaaggcttccagaagctctgaggcaggaggcaccaagttctacctcatgtttggaggatcttgctagctatggccctcgtactcggctccctgttgctgctggggctgtgcgggaactccttttcaggagggcagccttcatccacagatgctcctaaggcttggaattatgaattgcctgcaacaaattatgagacccaagactcccataaagctggacccattggcattctctttgaactagtgcatatctttctctatgtggtacagccgcgtgatttcccagaagatactttgagaaaattcttacagaaggcatatgaatccaaaattgattatgacaagattgtctactatgaagcagggattattctatgctgtgtcctggggctgctgtttattattctgatgcctctggtggggtatttcttttgtatgtgtcgttgctgtaacaaatgtggtggagaaatgcaccagcgacagaaggaaaatgggcccttcctgaggaaatgctttgcaatctccctgttggtgatttgtataataataagcattggcatcttctatggttttgtggcaaatcaccaggtaagaacccggatcaaaaggagtcggaaactggcagatagcaatttcaaggacttgcgaactctcttgaatgaaactccagagcaaatcaaatatatattggcccagtacaacactaccaaggacaaggcgttcacagatctgaacagtatcaattcagtgctaggaggcggaattcttgaccgactgagacccaacatcatccctgttcttgatgagattaagtccatggcaacagcgatcaaggagaccaaagaggcgttggagaacatgaacagcaccttgaagagcttgcaccaacaaagtacacagcttagcagcagtctgaccagcgtgaaaactagcctgcggtcatctctcaatgaccctctgtgcttggtgcatccatcaagtgaaacctgcaacagcatcagattgtctctaagccagctgaatagcaaccctgaactgaggcagcttccacccgtggatgcagaacttgacaacgttaataacgttcttaggacagatttggatggcctggtccaacagggctatcaatcccttaatgatatacctgacagagtacaacgccaaaccacgactgtcgtagcaggtatcaaaagggtcttgaattccattggttcagatatcgacaatgtaactcagcgtcttcctattcaggatatactctcagcattctctgtttatgttaataacactgaaagttacatccacagaaatttacctacattggaagagtatgattcatactggtggctgggtggcctggtcatctgctctctgctgaccctcatcgtgattttttactacctgggcttactgtgtggcgtgtgcggctatgacaggcatgccaccccgaccacccgaggctgtgtctccaacaccggaggcgtcttcctcatggttggagttggattaagtttcctcttttgctggatattgatgatcattgtggttcttacctttgtctttggtgcaaatgtggaaaaactgatctgtgaaccttacacgagcaaggaattattccgggttttggatacaccctacttactaaatgaagactgggaatactatctctctgggaagctatttaataaatcaaaaatgaagctcacttttgaacaagtttacagtgactgcaaaaaaaatagaggcacttacggcactcttcacctgcagaacagcttcaatatcagtgaacatctcaacattaatgagcatactggaagcataagcagtgaattggaaagtctgaaggtaaatcttaatatctttctgttgggtgcagcaggaagaaaaaaccttcaggattttgctgcttgtggaatagacagaatgaattatgacagctacttggctcagactggtaaatcccccgcaggagtgaatcttttatcatttgcatatgatctagaagcaaaagcaaacagtttgcccccaggaaatttgaggaactccctgaaaagagatgcacaaactattaaaacaattcaccagcaacgagtccttcctatagaacaatcactgagcactctataccaaagcgtcaagatacttcaacgcacagggaatggattgttggagagagtaactaggattctagcttctctggattttgctcagaacttcatcacaaacaatacttcctctgttattattgaggaaactaagaagtatgggagaacaataataggatattttgaacattatctgcagtggatcgagttctctatcagtgagaaagtggcatcgtgcaaacctgtggccaccgctctagatactgctgttgatgtctttctgtgtagctacattatcgaccccttgaatttgttttggtttggcataggaaaagctactgtatttttacttccggctctaatttttgcggtaaaactggctaagtactatcgtcgaatggattcggaggacgtgtacgatgatgttgaaactatacccatgaaaaatatggaaaatggtaataatggttatcataaagatcatgtatatggtattcacaatcctgttatgacaagcccatcacaacattgatagctgatgttgaaactgcttgagcatcaggatactcaaagtggaaaggatcacagatttttggtagtttctgggtctacaaggactttccaaatccaggagcaacgccagtggcaacgtagtgactcaggcgggcaccaaggcaacggcaccattggtctctgggtagtgctttaagaatgaacacaatcacgttatagtccatggtccatcactattcaaggatgactccctcccttcctgtctatttttgttttttacttttttacactgagtttctatttagacactacaacatatggggtgtttgttcccattggatgcatttctatcaaaactctatcaaatgtgatggctagattctaacatattgccatgtgtggagtgtgctgaacacacaccagtttacaggaaagatgcattttgtgtacagtaaacggtgtatataccttttgttaccacagagttttttaaacaaatgagtattataggactttcttctaaatgagctaaataagtcaccattgacttcttggtgctgttgaaaataatccattttcactaaaagtgtgtgaaacctacagcatattcttcacgcagagattttcatctattatactttatcaaagattggccatgttccacttggaaatggcatgcaaaagcaatcatagagaaacctgcgtaactccatctgacaaattcaaaagagagagagagatcttgagagagaaatgctgttcgttcaaaagtggagttgttttaacagatgccaattacggtgtacagtttaacagagttttctgttgcattacgataaacattaattggagtgcagctaacatgagtatcatcagactagtatcaagtgttctaaaatgaaatatgagaagatcctgtcacaattcttagatctggtgtccagcatggatgaaacctttgagtttggtccctaaatttgcatgaaagcacaaggtaaatattcatttgcttcaggagtttcatgttggatctgtcattatcaaaagtgatcagcaatgaagaactggtcggacaaaatttaacgttgatgtaatgaaattccagatgtaggcattccccccaggtcttttcatgtgcagattgcagttctgattcatttgaataaaaaggaacttggaaaaca

SEQ ID NO: 59174 - DNA, 4014 bp, Artificial Sequence
  derived and/or modified sequence
ggcgagctaagggaagggcggcggcagcggtgactagggcgggagcaggagcgggagccgggtgcacgggatggtgccttgagtgaatgacccccttggagaacattcttccgcatccctcgcctcaagccagcctcagacagaaaactgaagattcagcagatccagtgcttcctgctcctcttctgcccaggaacacgcttgccttccccaaggcttccagaagctctgaggcaggaggcaccaagttctacctcatgtttggaggatcttgctagctatggccctcgtactcggctccctgttgctgctggggctgtgcgggaactccttttcaggagggcagccttcatccacagatgctcctaaggcttggaattatgaattgcctgcaacaaattatgagacccaagactcccataaagctggacccattggcattctctttgaactagtgcatatctttctctatgtggtacagccgcgtgatttcccagaagatactttgagaaaattcttacagaaggcatatgaatccaaaattgattatgacaagattgtctactatgaagcagggattattctatgctgtgtcctggggctgctgtttattattctgatgcctctggtggggtatttcttttgtatgtgtcgttgctgtaacaaatgtggtggagaaatgcaccagcgacagaaggaaaatgggcccttcctgaggaaatgctttgcaatctccctgttggtgatttgtataataataagcattggcatcttctatggttttgtggcaaatcaccaggtaagaacccggatcaaaaggagtcggaaactggcagatagcaatttcaaggacttgcgaactctcttgaatgaaactccagagcaaatcaaatatatattggcccagtacaacactaccaaggacaaggcgttcacagatctgaacagtatcaattcagtgctaggaggcggaattcttgaccgactgagacccaacatcatccctgttcttgatgagattaagtccatggcaacagcgatcaaggagaccaaagaggcgttggagaacatgaacagcaccttgaagagcttgcaccaacaaagtacacagcttagcagcagtctgaccagcgtgaaaactagcctgcggtcatctctcaatgaccctctgtgcttggtgcatccatcaagtgaaacctgcaacagcatcagattgtctctaagccagctgaatagcaaccctgaactgaggcagcttccacccgtggatgcagaacttgacaacgttaataacgttcttaggacagatttggatggcctggtccaacagggctatcaatcccttaatgatatacctgacagagtacaacgccaaaccacgactgtcgtagcaggtatcaaaagggtcttgaattccattggttcagatatcgacaatgtaactcagcgtcttcctattcaggatatactctcagcattctctgtttatgttaataacactgaaagttacatccacagaaatttacctacattggaagagtatgattcatactggtggctgggtggcctggtcatctgctctctgctgaccctcatcgtgattttttactacctgggcttactgtgtggcgtgtgcggctatgacaggcatgccaccccgaccacccgaggctgtgtctccaacaccggaggcgtcttcctcatggttggagttggattaagtttcctcttttgctggatattgatgatcattgtggttcttacctttgtctttggtgcaaatgtggaaaaactgatctgtgaaccttacacgagcaaggaattattccgggttttggatacaccctacttactaaatgaagactgggaatactatctctctgggaagctatttaataaatcaaaaatgaagctcacttttgaacaagtttacagtgactgcaaaaaaaatagaggcacttacggcactcttcacctgcagaacagcttcaatatcagtgaacatctcaacattaatgagcatactggaagcataagcagtgaattggaaagtctgaaggtaaatcttaatatctttctgttgggtgcagcaggaagaaaaaaccttcaggattttgctgcttgtggaatagacagaatgaattatgacagctacttggctcagactggtaaatcccccgcaggagtgaatcttttatcatttgcatatgatctagaagcaaaagcaaacagtttgcccccaggaaatttgaggaactccctgaaaagagatgcacaaactattaaaacaattcaccagcaacgagtccttcctatagaacaatcactgagcactctataccaaagcgtcaagatacttcaacgcacagggaatggattgttggagagagtaactaggattctagcttctctggattttgctcagaacttcatcacaaacaatacttcctctgttattattgaggaaactaagaagtatgggagaacaataataggatattttgaacattatctgcagtggatcgagttctctatcagtgagaaagtggcatcgtgcaaacctgtggccaccgctctagatactgctgttgatgtctttctgtgtagctacattatcgaccccttgaatttgttttggtttggcataggaaaagctactgtatttttacttccggctctaatttttgcggtaaaactggctaagtactatcgtcgaatggattcggaggacgtgtacgatgatgttgaaactatacccatgaaaaatatggaaaatggtaataatggttatcataaagatcatgtatatggtattcacaatcctgttatgacaagcccatcacaacattgatagctgatgttgaaactgcttgagcatcaggatactcaaagtggaaaggatcacagatttttggtagtttctgggtctacaaggactttccaaatccaggagcaacgccagtggcaacgtagtgactcaggcgggcaccaaggcaacggcaccattggtctctgggtagtgctttaagaatgaacacaatcacgttatagtccatggtccatcactattcaaggatgactccctcccttcctgtctatttttgttttttacttttttacactgagtttctatttagacactacaacatatggggtgtttgttcccattggatgcatttctatcaaaactctatcaaatgtgatggctagattctaacatattgccatgtgtggagtgtgctgaacacacaccagtttacaggaaagatgcattttgtgtacagtaaacggtgtatataccttttgttaccacagagttttttaaacaaatgagtattataggactttcttctaaatgagctaaataagtcaccattgacttcttggtgctgttgaaaataatccattttcactaaaagtgtgtgaaacctacagcatattcttcacgcagagattttcatctattatactttatcaaagattggccatgttccacttggaaatggcatgcaaaagcaatcatagagaaacctgcgtaactccatctgacaaattcaaaagagagagagagatcttgagagagaaatgctgttcgttcaaaagtggagttgttttaacagatgccaattacggtgtacagtttaacagagttttctgttgcattacgataaacattaattggagtgcagctaacatgagtatcatcagactagtatcaagtgttctaaaatgaaatatgagaagatcctgtcacaattcttagatctggtgtccagcatggatgaaacctttgagtttggtccctaaatttgcatgaaagcacaaggtaaatattcatttgcttcaggagtttcatgttggatctgtcattatcaaaagtgatcagcaatgaagaactggtcggacaaaatttaacgttgatgtaatgaaattccagatgtaggcattccccccaggtcttttcatgtgcagattgcagttctgattcatttgaataaaaaggaacttggaaaa

SEQ ID NO: 59175 - DNA, 2571 bp, Artificial Sequence
  derived and/or modified sequence
atggccctggtgctgggcagcctgctgctgctgggcctgtgcggcaacagcttcagcggcggccagcccagcagcaccgacgcccccaaggcctggaactacgagctgcccgccaccaactacgagacccaggacagccacaaggccggccccatcggcatcctgttcgagctggtgcacatcttcctgtacgtggtgcagcccagagacttccccgaggacaccctgagaaagttcctgcagaaggcctacgagagcaagatcgactacgacaagatcgtgtactacgaggccggcatcatcctgtgctgcgtgctgggcctgctgttcatcatcctgatgcccctggtgggctacttcttctgcatgtgcagatgctgcaacaagtgcggcggcgagatgcaccagagacagaaggagaacggccccttcctgagaaagtgcttcgccatcagcctgctggtgatctgcatcatcatcagcatcggcatcttctacggcttcgtggccaaccaccaggtgagaaccagaatcaagagaagcagaaagctggccgacagcaacttcaaggacctgagaaccctgctgaacgagacccccgagcagatcaagtacatcctggcccagtacaacaccaccaaggacaaggccttcaccgacctgaacagcatcaacagcgtgctgggcggcggcatcctggacagactgagacccaacatcatccccgtgctggacgagatcaagagcatggccaccgccatcaaggagaccaaggaggccctggagaacatgaacagcaccctgaagagcctgcaccagcagagcacccagctgagcagcagcctgaccagcgtgaagaccagcctgagaagcagcctgaacgaccccctgtgcctggtgcaccccagcagcgagacctgcaacagcatcagactgagcctgagccagctgaacagcaaccccgagctgagacagctgccccccgtggacgccgagctggacaacgtgaacaacgtgctgagaaccgacctggacggcctggtgcagcagggctaccagagcctgaacgacatccccgacagagtgcagagacagaccaccaccgtggtggccggcatcaagagagtgctgaacagcatcggcagcgacatcgacaacgtgacccagagactgcccatccaggacatcctgagcgccttcagcgtgtacgtgaacaacaccgagagctacatccacagaaacctgcccaccctggaggagtacgacagctactggtggctgggcggcctggtgatctgcagcctgctgaccctgatcgtgatcttctactacctgggcctgctgtgcggcgtgtgcggctacgacagacacgccacccccaccaccagaggctgcgtgagcaacaccggcggcgtgttcctgatggtgggcgtgggcctgagcttcctgttctgctggatcctgatgatcatcgtggtgctgaccttcgtgttcggcgccaacgtggagaagctgatctgcgagccctacaccagcaaggagctgttcagagtgctggacaccccctacctgctgaacgaggactgggagtactacctgagcggcaagctgttcaacaagagcaagatgaagctgaccttcgagcaggtgtacagcgactgcaagaagaacagaggcacctacggcaccctgcacctgcagaacagcttcaacatcagcgagcacctgaacatcaacgagcacaccggcagcatcagcagcgagctggagagcctgaaggtgaacctgaacatcttcctgctgggcgccgccggcagaaagaacctgcaggacttcgccgcctgcggcatcgacagaatgaactacgacagctacctggcccagaccggcaagagccccgccggcgtgaacctgctgagcttcgcctacgacctggaggccaaggccaacagcctgccccccggcaacctgagaaacagcctgaagagagacgcccagaccatcaagaccatccaccagcagagagtgctgcccatcgagcagagcctgagcaccctgtaccagagcgtgaagatcctgcagagaaccggcaacggcctgctggagagagtgaccagaatcctggccagcctggacttcgcccagaacttcatcaccaacaacaccagcagcgtgatcatcgaggagaccaagaagtacggcagaaccatcatcggctacttcgagcactacctgcagtggatcgagttcagcatcagcgagaaggtggccagctgcaagcccgtggccaccgccctggacaccgccgtggacgtgttcctgtgcagctacatcatcgaccccctgaacctgttctggttcggcatcggcaaggccaccgtgttcctgctgcccgccctgatcttcgccgtgaagctggccaagtactacagaagaatggacagcgaggacgtgtacgacgacgtggagaccatccccatgaagaacatggagaacggcaacaacggctaccacaaggaccacgtgtacggcatccacaaccccgtgatgaccagccccagccagcactag

SEQ ID NO: 59176 - protein, 890 aa, Artificial Sequence
  derived and/or modified sequence
MDSNTAPLGPSCPQPPPAPQPQARSRLNATASLEQERSERPRAPGPQAGPGPGVRDAAAPAEPQAQHTRSRERADGTGPTKGDMEIPFEEVLERAKAGDPKAQTEVGKHYLQLAGDTDEELNSCTAVDWLVLAAKQGRREAVKLLRRCLADRRGITSENEREVRQLSSETDLERAVRKAALVMYWKLNPKKKKQVAVAELLENVGQVNEHDGGAQPGPVPKSLQKQRRMLERLVSSESKNYIALDDFVEITKKYAKGVIPSSLFLQDDEDDDELAGKSPEDLPLRLKVVKYPLHAIMEIKEYLIDMASRAGMHWLSTIIPTHHINALIFFFIVSNLTIDFFAFFIPLVIFYLSFISMVICTLKVFQDSKAWENFRTLTDLLLRFEPNLDVEQAEVNFGWNHLEPYAHFLLSVFFVIFSFPIASKDCIPCSELAVITGFFTVTSYLSLSTHAEPYTRRALATEVTAGLLSLLPSMPLNWPYLKVLGQTFITVPVGHLVVLNVSVPCLLYVYLLYLFFRMAQLRNFKGTYCYLVPYLVCFMWCELSVVILLESTGLGLLRASIGYFLFLFALPILVAGLALVGVLQFARWFTSLELTKIAVTVAVCSVPLLLRWWTKASFSVVGMVKSLTRSSMVKLILVWLTAIVLFCWFYVYRSEGMKVYNSTLTWQQYGALCGPRAWKETNMARTQILCSHLEGHRVTWTGRFKYVRVTDIDNSAESAINMLPFFIGDWMRCLYGEAYPACSPGNTSTAEEELCRLKLLAKHPCHIKKFDRYKFEITVGMPFSSGADGSRSREEDDVTKDIVLRASSEFKSVLLSLRQGSLIEFSTILEGRLGSKWPVFELKAISCLNCMAQLSPTRRHVKIEHDWRSTVHGAVKFAFDFFFFPFLSAA

SEQ ID NO: 59177 - protein, 268 aa, Artificial Sequence
  derived and/or modified sequence
MVKSLTRSSMVKLILVWLTAIVLFCWFYVYRSEGMKVYNSTLTWQQYGALCGPRAWKETNMARTQILCSHLEGHRVTWTGRFKYVRVTDIDNSAESAINMLPFFIGDWMRCLYGEAYPACSPGNTSTAEEELCRLKLLAKHPCHIKKFDRYKFEITVGMPFSSGADGSRSREEDDVTKDIVLRASSEFKSVLLSLRQGSLIEFSTILEGRLGSKWPVFELKAISCLNCMAQLSPTRRHVKIEHDWRSTVHGAVKFAFDFFFFPFLSAA

SEQ ID NO: 59178 - DNA, 2673 bp, Artificial Sequence
  derived and/or modified sequence
atggacagcaacaccgcccccctgggccccagctgcccccagcccccccccgccccccagccccaggccagaagcagactgaacgccaccgccagcctggagcaggagagaagcgagagacccagagcccccggcccccaggccggccccggccccggcgtgagagacgccgccgcccccgccgagccccaggcccagcacaccagaagcagagagagagccgacggcaccggccccaccaagggcgacatggagatccccttcgaggaggtgctggagagagccaaggccggcgaccccaaggcccagaccgaggtgggcaagcactacctgcagctggccggcgacaccgacgaggagctgaacagctgcaccgccgtggactggctggtgctggccgccaagcagggcagaagagaggccgtgaagctgctgagaagatgcctggccgacagaagaggcatcaccagcgagaacgagagagaggtgagacagctgagcagcgagaccgacctggagagagccgtgagaaaggccgccctggtgatgtactggaagctgaaccccaagaagaagaagcaggtggccgtggccgagctgctggagaacgtgggccaggtgaacgagcacgacggcggcgcccagcccggccccgtgcccaagagcctgcagaagcagagaagaatgctggagagactggtgagcagcgagagcaagaactacatcgccctggacgacttcgtggagatcaccaagaagtacgccaagggcgtgatccccagcagcctgttcctgcaggacgacgaggacgacgacgagctggccggcaagagccccgaggacctgcccctgagactgaaggtggtgaagtaccccctgcacgccatcatggagatcaaggagtacctgatcgacatggccagcagagccggcatgcactggctgagcaccatcatccccacccaccacatcaacgccctgatcttcttcttcatcgtgagcaacctgaccatcgacttcttcgccttcttcatccccctggtgatcttctacctgagcttcatcagcatggtgatctgcaccctgaaggtgttccaggacagcaaggcctgggagaacttcagaaccctgaccgacctgctgctgagattcgagcccaacctggacgtggagcaggccgaggtgaacttcggctggaaccacctggagccctacgcccacttcctgctgagcgtgttcttcgtgatcttcagcttccccatcgccagcaaggactgcatcccctgcagcgagctggccgtgatcaccggcttcttcaccgtgaccagctacctgagcctgagcacccacgccgagccctacaccagaagagccctggccaccgaggtgaccgccggcctgctgagcctgctgcccagcatgcccctgaactggccctacctgaaggtgctgggccagaccttcatcaccgtgcccgtgggccacctggtggtgctgaacgtgagcgtgccctgcctgctgtacgtgtacctgctgtacctgttcttcagaatggcccagctgagaaacttcaagggcacctactgctacctggtgccctacctggtgtgcttcatgtggtgcgagctgagcgtggtgatcctgctggagagcaccggcctgggcctgctgagagccagcatcggctacttcctgttcctgttcgccctgcccatcctggtggccggcctggccctggtgggcgtgctgcagttcgccagatggttcaccagcctggagctgaccaagatcgccgtgaccgtggccgtgtgcagcgtgcccctgctgctgagatggtggaccaaggccagcttcagcgtggtgggcatggtgaagagcctgaccagaagcagcatggtgaagctgatcctggtgtggctgaccgccatcgtgctgttctgctggttctacgtgtacagaagcgagggcatgaaggtgtacaacagcaccctgacctggcagcagtacggcgccctgtgcggccccagagcctggaaggagaccaacatggccagaacccagatcctgtgcagccacctggagggccacagagtgacctggaccggcagattcaagtacgtgagagtgaccgacatcgacaacagcgccgagagcgccatcaacatgctgcccttcttcatcggcgactggatgagatgcctgtacggcgaggcctaccccgcctgcagccccggcaacaccagcaccgccgaggaggagctgtgcagactgaagctgctggccaagcacccctgccacatcaagaagttcgacagatacaagttcgagatcaccgtgggcatgcccttcagcagcggcgccgacggcagcagaagcagagaggaggacgacgtgaccaaggacatcgtgctgagagccagcagcgagttcaagagcgtgctgctgagcctgagacagggcagcctgatcgagttcagcaccatcctggagggcagactgggcagcaagtggcccgtgttcgagctgaaggccatcagctgcctgaactgcatggcccagctgagccccaccagaagacacgtgaagatcgagcacgactggagaagcaccgtgcacggcgccgtgaagttcgccttcgacttcttcttcttccccttcctgagcgccgcctag

SEQ ID NO: 59179 - DNA, 2673 bp, Artificial Sequence
  derived and/or modified sequence
atggactccaacacagcgccgctgggcccttcctgcccgcagccacctcccgcgcctcagccccaagcccggtctagacttaacgctacagcgagcctggaacaggaacgtagtgagaggcccagggcaccagggccccaggctggacctggtcccggggtacgagatgccgcggcacctgctgagccgcaggcccaacacacgaggtctcgggagagagctgatggaacggggccgacaaagggcgatatggagattccctttgaagaggtgctggagagggctaaagctggggacccgaaagctcagaccgaggtgggaaaacattaccttcaactggccggtgataccgatgaggagctgaacagctgcacggcggtcgattggctggtgctggccgccaaacagggaagacgggaagccgtgaagctcctcagacgctgcttggccgatcggagaggaataacctccgaaaatgagcgggaggtgcgtcagctatccagcgagactgacctggagagggcggttagaaaggccgcccttgtgatgtactggaagttaaacccaaagaaaaagaagcaggtggcagttgccgaactgctagaaaacgttggccaggtcaacgagcacgacggaggcgcacagcctggacctgtgccaaaaagcctccagaagcaaaggcgcatgctcgaacgattggtgtcatccgagtcaaagaactatatcgccctggatgattttgtggagatcactaagaagtatgcaaaaggcgtaatccccagctctctgttcttacaggacgacgaagacgacgacgaactcgccgggaaatcacctgaagacttgccactccggctcaaggttgtgaagtaccctcttcatgccatcatggagattaaagaatacctgatagatatggccagcagggccggtatgcactggctgtctacaatcatacctacacaccacattaacgccttaatctttttttttatcgtttctaacttgacaatagactttttcgctttctttattcccctggtcattttttatctgtcttttatctccatggtgatctgcaccctgaaggtatttcaggattctaaagcttgggaaaattttcgcaccctgaccgacctcctgcttcgattcgaaccaaacctggacgtcgagcaggcagaggttaattttggatggaatcacctcgagccctacgcccacttcctgttaagcgtgttcttcgttatcttctcttttcccatcgcttctaaagactgtataccatgctcagaactagccgtgatcaccggattctttaccgtaaccagctacctttccctgtcaacccatgccgaaccatataccagaagagcacttgccactgaggtgactgccggccttctgtccctgctgccgtccatgcccctcaattggccctacctcaaggttttgggccagactttcatcacagtgccagtgggacacctggtagtgcttaacgtgagtgtcccctgtttgctatatgtctacttattgtatttgttcttccggatggcacagttgagaaactttaaggggacttattgctatctggtgccttatctggtatgctttatgtggtgcgagctaagcgtggtgatcctactggagtctaccggtctgggccttctacgagctagtattgggtatttcctgtttctttttgccctcccaatactggttgctggcctcgctctggtgggcgtgctccagttcgcccgatggtttacctctttggagcttactaagatcgctgtgacagtggccgtgtgcagcgtccctcttctgctgcgctggtggacaaaagcctctttcagtgtggttggtatggtcaagagtctgactcggtctagcatggtcaaactgatcttagtgtggttgaccgcaatagtacttttttgctggttttatgtgtatcgcagtgagggaatgaaagtgtataactccaccctaacatggcaacagtacggagcactatgcggccccagagcctggaaagagacgaatatggccagaactcagatcctatgctcacatctggaaggtcatagggttacgtggacagggcgttttaagtatgtcagggtgaccgatatcgacaatagcgctgagtccgccatcaacatgttgccattttttattggagactggatgcggtgtttgtacggggaagcttaccccgcctgctctcccgggaacaccagtaccgctgaagaagagctgtgccggctgaagttactcgccaagcacccgtgccatataaagaaatttgatcggtacaagtttgagatcacagtcggcatgccgttctccagtggagctgatggatctaggagccgcgaagaggacgacgttacaaaggacattgtgctgagagctagtagcgagttcaagtccgtattactgagcctgcggcagggcagtctgatcgaattctcaacaatcttagaggggcgactgggatcaaagtggcctgtcttcgaactgaaagctatttcctgcctgaactgcatggcccagctctctcccacacgcagacacgtgaaaatcgagcacgattggcgatctacggtgcatggcgcagtgaaatttgcttttgactttttcttctttccattcctgtctgcagcttag

SEQ ID NO: 59180 - DNA, 2673 bp, Artificial Sequence
  derived and/or modified sequence
atggacagcaacacagcccccctgggccccagctgcccccagcccccaccagccccccagccccaggcccggagccggctgaatgccacagccagcctggagcaggagaggtctgagcggccccgggcccctggcccccaggccggccctggccctggggtgagagatgctgctgccccagctgagccccaggcccagcacaccaggagccgggagcgggcagatggcaccggccccaccaagggggacatggagatcccctttgaggaggtgctggagcgggccaaggccggggaccccaaggcccagacagaggtgggcaagcactacctgcagctggccggggacacagatgaggagctgaacagctgcacagctgtggactggctggtgctggccgccaagcagggccggcgggaggccgtgaagctgctgcggcgctgcctggccgaccggcggggcatcaccagtgaaaatgaaagagaggtgcggcagctgagcagcgagacagacctggagagagctgtgaggaaggccgccctggtgatgtactggaagctgaaccccaagaagaagaagcaggtggccgtggccgagctgctggagaatgtgggccaggtgaatgaacatgatggaggagcccagcccggccctgtgcccaagagcctgcagaagcagaggaggatgctggagcggctggtgagcagcgagagcaagaactacatcgccctggatgactttgtggagatcaccaagaagtatgccaagggcgtcatccccagcagcctcttcctgcaggatgatgaagatgatgatgagctggccggcaagagccctgaggacctgcccctgcggctgaaggtggtgaagtaccccctgcacgccatcatggagatcaaggagtacctgattgacatggccagccgggccggcatgcactggctgagcaccatcatccccacccaccacatcaatgccctgatcttcttcttcatcgtgagcaacctgaccatcgacttctttgccttcttcatccccctggtgatcttctacctgtccttcatctccatggtgatctgcaccctgaaggtgttccaggacagcaaggcctgggagaacttccgcaccctgacagacctgctgctgcgctttgagcccaacctggatgtggagcaggccgaggtgaactttggctggaaccacctggagccctatgcccacttcctgctgtctgtgttcttcgtcatcttctccttccccatcgccagcaaggactgcatcccctgcagcgagctggccgtcatcaccggcttcttcaccgtgaccagctacctgagcctgagcacccatgctgagccctacacccggcgggccctggccacagaggtgacagctggcctgctgagcctgctgcccagcatgcccctgaactggccctacctgaaggtgctgggccagaccttcatcaccgtgcctgtgggccacctggtggtgctgaatgtgtctgtgccctgcctgctgtatgtgtacctgctgtacctgttcttcaggatggcccagctgaggaacttcaagggcacctactgctacctggtgccctacctggtgtgcttcatgtggtgtgagctgtctgtggtgatcctgctggagagcacaggcctgggcctgctgcgggccagcatcggctacttcctgttcctgtttgccctgcccatcctggtggccggcctggccctggtgggcgtgctgcagtttgcccgctggttcaccagcctggagctgaccaagattgctgtgacagtggccgtgtgcagcgtgcccctgctgctgcgctggtggaccaaggccagcttctctgtggtgggcatggtgaagagcctgaccaggagctccatggtgaagctgatcctggtgtggctgacagccatcgtgctcttctgctggttctacgtgtacagaagtgagggcatgaaggtgtacaacagcaccctgacctggcagcagtatggagccctgtgtggcccccgggcctggaaggagaccaacatggcccggacccagatcctgtgcagccacctggagggccaccgggtgacctggacaggccgcttcaagtatgtgcgggtgacagacatcgacaacagcgctgagagcgccatcaacatgctgcccttcttcatcggggactggatgcgctgcctgtatggagaggcctacccagcctgcagccctggcaacaccagcacagctgaggaggagctgtgccgcctgaagctgctggccaagcacccctgccacatcaagaagtttgaccgctacaagtttgagatcaccgtgggcatgcccttcagcagtggagcagatggcagccgcagccgggaggaggatgatgtgaccaaggacatcgtgctgcgggccagcagcgagttcaagtctgtgctgctgagcctgcggcagggcagcctgattgagttcagcaccatcctggagggccgcctgggcagcaagtggcctgtgtttgagctgaaggccatcagctgcctgaactgcatggcccagctgagccccacccggcggcacgtgaagattgaacatgactggaggagcacagtgcacggggctgtgaagtttgcctttgacttcttcttcttccccttcctgtctgctgcctag

SEQ ID NO: 59181 - DNA, 2673 bp, Artificial Sequence
  derived and/or modified sequence
atggacagcaacaccgcccccctgggccccagctgcccccagccccctcccgctcctcagcctcaggctagatcccgtctaaacgcgacggcttccctagagcaggagagaagtgaaagaccccgagctccaggtccgcaggccggccctggccccggtgtgcgggacgcggccgcccctgcagagccacaggctcaacatacccgttctagggagcgtgccgacgggaccgggcctactaaaggagacatggagattccatttgaggaggtgctggaacgcgccaaggctggcgatcccaaagcccagaccgaagttgggaaacattatctccagctagctggggataccgacgaggagctgaatagctgcacagccgtggactggctggtgctggctgcaaaacaaggaaggcgcgaggccgttaagttgctccggaggtgtctggccgacagaaggggtataacaagtgagaatgagcgggaggttcgtcagttatcgtcagaaacggacctggagcgggcggtgcggaaagccgccctcgtgatgtactggaaattgaacccaaagaagaaaaagcaggtggctgttgcggagttactcgaaaacgttggacaagtgaacgaacacgacggtggcgcgcagcctgggccagtcccgaagtctctgcaaaaacagagacgcatgctggaacgcctggtgagcagtgaatcaaagaattacatcgccctagatgattttgttgagatcacaaagaaatatgcgaaaggggtcattccctctagtcttttcctccaagatgatgaggatgacgatgaactcgccgggaagtctccggaggatcttccacttcggcttaaagtcgtgaaatatcctctccatgctattatggagattaaggagtacttgatagacatggcctcgcgcgctggcatgcactggttatctacgatcattccaacccaccatatcaacgctttgattttttttttcattgtttcaaatttaacaatcgacttcttcgcattctttatccctctcgtaatcttttatctgtcctttatatctatggtgatctgtacattgaaggtgttccaagacagtaaggcctgggagaacttcagaactctgaccgacctgcttctccggtttgagccgaacctggacgttgaacaggcagaagttaatttcggctggaaccacttggagccgtatgcccatttcttactgagcgtcttcttcgtgatcttttcttttccgatcgcttccaaggactgcattccttgcagcgagctagcggtgataacaggctttttcacagtcacatcatatttgtccctgtccacccacgcagagccatacactaggcgggcgctggcaacggaagtcactgcaggtttgctgagcctgctcccatcaatgccccttaattggccctacctgaaggtattaggacaaacgtttatcactgtgccagtggggcatctggtggtcctcaacgtttctgtgccatgtctgctgtatgtatacctgttatacctctttttcaggatggctcagctgaggaattttaaggggacatactgctatctggttccctaccttgtgtgctttatgtggtgcgagctgagtgtcgttattctgctggaaagcaccgggctgggtcttctgagagcatccatcggatattttctttttcttttcgccttgccaattctggttgcggggttagccttggtcggagtgctccaatttgccagatggtttacatccctcgaactcaccaagatcgctgtgacagtggccgtgtgttcagtgccacttttgcttagatggtggacgaaggcctccttttccgtagtgggaatggtgaagtctttgacccgatccagtatggtgaagctgatcctagtctggctcaccgcaatcgtcctgttctgttggttctatgtctatagatctgaaggcatgaaggtatacaattcgaccctcacctggcagcagtacggcgcactttgcggtccaagggcgtggaaggaaaccaatatggcaaggacccagatcctctgctcccatctggagggccaccgggtgacatggacagggagattcaagtacgtgcgcgtaactgacattgacaatagtgccgagagcgccatcaatatgctgccattctttatcggcgattggatgcggtgcctctacggcgaagcatacccagcctgttccccaggaaacacatcaacagccgaggaggaactgtgtcgactgaagcttctagctaaacatccatgccacatcaaaaaatttgatagatataagtttgagatcacggtaggtatgccattctcttccggcgctgacggatcacgaagtagagaagaagacgacgtcactaaggatatagttctccgtgcatcctcagagtttaaaagtgtgttactgtccctccgtcagggcagcctgatcgaatttagcaccattcttgaaggacggctgggaagcaaatggccagtttttgaattaaaagccatttcctgcctgaattgcatggctcagctcagccctacccgacgtcacgtgaaaatagaacatgattggcgtagtaccgtccacggagcagtaaaattcgccttcgacttctttttctttccatttctgtcggcggcttag

SEQ ID NO: 59182 - DNA, 2673 bp, Artificial Sequence
  derived and/or modified sequence
atggattcaaacactgcaccacttggacctagctgtccacagccacccccagctccccagcctcaggcgcgttctcgacttaacgctacggcgtctctggagcaggaaaggtccgagcgcccaagagcacccggaccccaggccggaccaggccctggagtgcgggatgctgccgcacctgctgagcctcaagcccagcacacccgtagcagggaacgggctgatgggacaggacccactaaaggggacatggagattcccttcgaggaggtgttggaaagggccaaggccggagatccgaaagcacagacagaggtaggcaagcattatctccaactcgcaggggatactgacgaagagttgaattcttgtacagctgtggattggcttgtcctggctgccaaacagggccgacgagaggcggtgaagctgctgcggagatgcctggccgatcggcgagggattacctccgaaaacgagagggaggttcgccaattgtcaagtgaaacagatctcgagcgggcagtccgcaaggctgcactggtcatgtactggaagcttaaccctaaaaaaaagaagcaagtggctgtggctgagctgctcgaaaacgttggtcaggtgaatgaacacgacggtggtgcccagccgggaccagtgcccaaatcactccagaagcaacggcgtatgttggaaaggctggttagttccgagagcaagaattacatcgcacttgacgatttcgtcgagattacaaaaaagtacgctaagggcgtgatcccatctagtctctttttgcaagacgacgaggatgatgacgaactggccggaaagtctccggaagacctgccactcaggctgaaagtggtgaaataccctttgcacgcgatcatggagattaaggagtatctgattgacatggcctctcgtgccggaatgcactggttatctaccataatcccaactcatcatatcaatgcccttattttcttttttattgtgtcaaatctgacgatcgatttcttcgcgttctttatccctctggtcattttttacttaagtttcatatcaatggtgatctgcaccctgaaagtttttcaggatagtaaggcctgggaaaattttcgaaccctaacagatctgttgttgcgctttgaaccgaatctcgacgtcgaacaagccgaagtcaatttcggttggaatcacctggaaccctacgctcatttcctcctcagtgtcttttttgttattttcagtttccccattgcttccaaggactgcatcccctgcagtgaactggccgtcattacaggctttttcaccgtcaccagctatttaagtctgagtactcacgccgaaccatacacaagacgcgcattagccacggaggtgactgccggactgctctccctgctacctagcatgcctctgaactggccatatctaaaggttctcggccagacgtttattacggtccctgtcgggcacctggtggtgcttaacgtgagcgtgccatgtctcctgtacgtgtatcttctgtatctgtttttccggatggcccagctgagaaatttcaaggggacctactgttacttagtgccttacctggtgtgtttcatgtggtgtgagctatctgtggtaatcttacttgagtccacggggttaggcctgctccgcgcttccatcggctattttctctttttgttcgcgctcccaattctagtagcgggtctggccctggtgggcgtgctccagtttgctaggtggtttacctccttggaacttaccaaaatcgctgtgacggtagcagtctgttccgtgcccttgctgctacgatggtggaccaaggcttcgttttcagtggtcggaatggtcaagtctctgactcggtcttcaatggtcaaattgatcctggtgtggctcacagctattgttctattctgttggttctacgtgtatcgatccgaggggatgaaagtgtataatagtaccctgacgtggcagcaatacggagccctgtgtggccctagggcatggaaggaaaccaatatggccaggacacagatcttgtgttcccatttagaggggcatcgagtcacctggacgggaagattcaaatatgttagagtgaccgacatcgataactcagccgaaagcgcgataaatatgcttcctttctttattggagactggatgcgttgtctctatggagaggcctatccggcttgttcccccggtaacacctcaaccgccgaagaggaactctgtcggctaaagctgctcgcaaaacatccctgtcatatcaagaaatttgataggtacaagtttgagattaccgtggggatgcctttcagctcaggagctgatgggtctcgttctagagaagaagatgacgtgaccaaagacatcgttctcagggccagctctgaattcaagagtgtgctgttatctttgaggcaggggtctctcatcgagtttagcaccatcctggaaggtcggctcggcagcaaatggccggtgttcgaactaaaagccatatcctgtctgaactgtatggcacagctgtccccaacaaggcgccacgtcaagatagagcatgactggagatcaaccgtccacggcgcagtcaagttcgcctttgatttcttttttttccctttcctcagcgctgcttag

SEQ ID NO: 59183 - DNA, 807 bp, Artificial Sequence
  derived and/or modified sequence
atggtgaagagcctgaccagaagcagcatggtgaagctgatcctggtgtggctgaccgccatcgtgctgttctgctggttctacgtgtacagaagcgagggcatgaaggtgtacaacagcaccctgacctggcagcagtacggcgccctgtgcggccccagagcctggaaggagaccaacatggccagaacccagatcctgtgcagccacctggagggccacagagtgacctggaccggcagattcaagtacgtgagagtgaccgacatcgacaacagcgccgagagcgccatcaacatgctgcccttcttcatcggcgactggatgagatgcctgtacggcgaggcctaccccgcctgcagccccggcaacaccagcaccgccgaggaggagctgtgcagactgaagctgctggccaagcacccctgccacatcaagaagttcgacagatacaagttcgagatcaccgtgggcatgcccttcagcagcggcgccgacggcagcagaagcagagaggaggacgacgtgaccaaggacatcgtgctgagagccagcagcgagttcaagagcgtgctgctgagcctgagacagggcagcctgatcgagttcagcaccatcctggagggcagactgggcagcaagtggcccgtgttcgagctgaaggccatcagctgcctgaactgcatggcccagctgagccccaccagaagacacgtgaagatcgagcacgactggagaagcaccgtgcacggcgccgtgaagttcgccttcgacttcttcttcttccccttcctgagcgccgcctag

SEQ ID NO: 59184 - DNA, 2673 bp, Artificial Sequence
  derived and/or modified sequence
atggatagcaatacggcacccctcggaccaagttgtcctcagccacccccagctccacagcctcaggccagatcaagattgaatgcaacagcgagcctggaacaggaaagatcagagagacctcgtgcaccaggcccccaggccggacccggacctggggtgcgagacgcggccgcccccgcagagccacaggcccagcacacccgtagccgcgagagagctgatggcaccggacctaccaagggggacatggagataccgtttgaggaggtgctggaacgcgcgaaagccggcgatccaaaagcccagaccgaagtcggcaaacactacctgcagctagcaggtgatacagacgaggaactaaattcttgtactgccgtcgattggctggtcctggcagccaagcaggggcgccgggaggcagtcaagctcctccgtagatgcctggcggacaggcgcggcatcacatccgagaacgagagagaggttcgacagttgagctccgaaactgatctggagcgcgcagtgcgaaaagcagccctggtgatgtattggaaattgaatccgaagaaaaagaagcaggtcgccgtggcggagctgttggagaatgtaggacaagtgaatgagcatgacggaggcgcacagccagggccagtgccaaagagcctgcagaaacagcggcggatgttggagcgccttgtgagctcagagtccaaaaattacattgccttggacgacttcgtggaaattacgaagaaatacgctaaaggagtgataccttcctcactgtttttgcaagatgacgaagacgatgacgagctcgccggcaaatctccggaggacctccctctcaggctgaaggtcgttaagtaccccctgcacgctattatggaaattaaagagtacctgatcgacatggcctctagggctggcatgcattggctgagcactataatcccgacccaccacattaacgccctgatcttctttttcatcgtttctaaccttacaatagatttctttgccttttttatccctcttgtcatcttctacttgtcgtttatcagtatggtgatatgtaccctcaaggtgtttcaggacagcaaagcatgggaaaattttaggactctaaccgaccttcttcttcgcttcgaaccaaatctcgatgtcgagcaggctgaggtgaatttcggctggaatcatctggagccttacgcacattttttgttatccgtgttcttcgtgatcttcagcttcccgatcgcctccaaggattgcatcccatgttcagagctcgcagtaattacaggctttttcacagtaacctcatacttgtcattaagtactcacgctgaaccgtacaccaggcgggcacttgctactgaagtcaccgccggattgctcagcctgctgccttccatgcccttaaattggccatacttgaaggttttgggccagactttcatcactgtaccagtcggacacttagttgtgctgaatgtcagcgtgccctgtttgctctatgtgtacctcttatacctgttttttagaatggctcagctgaggaactttaaaggcacttactgttacttggtgccgtacctggtctgttttatgtggtgcgagttgagtgtcgttatcttgttggaaagcaccgggttggggttgttgagggcaagcataggatattttctgtttctatttgccttgcctattcttgttgctggcctcgcgctcgtgggggttttacagttcgcccgctggtttaccagtctggagctgacaaagattgccgtcaccgtggctgtctgctccgttcccttgctcttacggtggtggacaaaggcttcatttagcgtagtcgggatggtcaagtctctgacacggagcagtatggtcaaactgattttggtttggcttaccgcaattgtgcttttctgttggttctatgtttaccgtagcgagggtatgaaagtgtacaacagcaccctgacttggcagcagtacggagcactctgtggtccaagagcctggaaagaaaccaatatggctcgaactcagatcctgtgctcacatctagaagggcatcgtgtaacttggacagggcggtttaaatatgtgagagttactgatattgataactctgcggagtcagccatcaatatgctgccgtttttcattggcgactggatgcgatgcctgtacggagaggcatatcctgcctgcagcccaggcaatacatccactgctgaggaggagctgtgcaggctgaaactgcttgccaagcatccatgccatatcaaaaaatttgatcggtataagttcgaaattacagtgggcatgccctttagctccggagctgatggaagccgtagcagagaagaagatgatgtcaccaaggacatagtccttcgagcatctagcgaattcaagagcgtgctcctgtctcttcgccaaggcagcctcatcgaattcagcacgattctggaaggacgcctcggctcgaaatggcctgtcttcgaactgaaagcaattagttgtctaaattgtatggcccagctttctccgacaaggcgccatgtcaaaatcgagcatgattggcgctccactgttcacggggccgttaagttcgcctttgacttcttcttcttcccattcctgagcgcagcctag

SEQ ID NO: 59185 - DNA, 807 bp, Artificial Sequence
  derived and/or modified sequence
atggtaaaatcacttacacgaagctctatggtcaagctcattctggtctggctgaccgctatcgtgctattttgctggttttacgtgtatcggtcggaaggaatgaaagtgtacaactccactttaacatggcagcaatacggtgcgctatgtgggcccagggcctggaaggagacaaacatggccaggacgcagatcctgtgctcgcacctagaaggccaccgcgtgacttggacgggaaggtttaagtatgtacgcgtcacagatatagacaattctgccgagtcagcaattaacatgctgccgttcttcattggggactggatgcggtgcctctatggcgaggcctatccagcttgctcccctgggaatactagtaccgctgaagaggaactgtgtcgcctcaaacttctggctaagcacccttgtcatattaagaaatttgatagatataagtttgaaatcactgtgggtatgccttttagctcaggtgccgacgggtcccggtcacgggaggaggacgatgttaccaaagacatcgtgctccgcgcctctagtgaatttaagtctgtactgctctcattgcgccagggaagcctgatcgagttctccactatactggaggggaggttgggatccaagtggccagtctttgaactgaaggccatttcctgcctgaactgtatggctcagctcagcccgacgcggagacatgtaaaaatcgaacacgattggcgcagcaccgtgcatggcgcggttaagttcgcatttgactttttctttttcccatttctgtccgcggcgtag

SEQ ID NO: 59186 - DNA, 807 bp, Artificial Sequence
  derived and/or modified sequence
atggtgaagagcctgaccaggagctccatggtgaagctgatcctggtgtggctgacagccatcgtgctcttctgctggttctacgtgtacagaagtgagggcatgaaggtgtacaacagcaccctgacctggcagcagtatggagccctgtgtggcccccgggcctggaaggagaccaacatggcccggacccagatcctgtgcagccacctggagggccaccgggtgacctggacaggccgcttcaagtatgtgcgggtgacagacatcgacaacagcgctgagagcgccatcaacatgctgcccttcttcatcggggactggatgcgctgcctgtatggagaggcctacccagcctgcagccctggcaacaccagcacagctgaggaggagctgtgccgcctgaagctgctggccaagcacccctgccacatcaagaagtttgaccgctacaagtttgagatcaccgtgggcatgcccttcagcagtggagcagatggcagccgcagccgggaggaggatgatgtgaccaaggacatcgtgctgcgggccagcagcgagttcaagtctgtgctgctgagcctgcggcagggcagcctgattgagttcagcaccatcctggagggccgcctgggcagcaagtggcctgtgtttgagctgaaggccatcagctgcctgaactgcatggcccagctgagccccacccggcggcacgtgaagattgaacatgactggaggagcacagtgcacggggctgtgaagtttgcctttgacttcttcttcttccccttcctgtctgctgcctag

SEQ ID NO: 59187 - DNA, 2673 bp, Artificial Sequence
  derived and/or modified sequence
atggacagcaacaccgcccccctgggccccagctgcccccagcccccgccagctccccagccccaggcgaggtcccggttaaacgcgaccgctagcttggaacaggaacgcagcgagcgccctagggcacctggccctcaggctggaccaggccctggtgtgagggatgccgctgcccctgctgaacctcaggcacagcatacacgctctcgggagcgggccgatgggacaggacctactaagggcgatatggaaatcccatttgaggaggtattagagagagcaaaggcaggggaccctaaagcgcagactgaagtaggtaagcactatctccagttagcaggagataccgacgaagaacttaactcttgtaccgctgtggactggttggtgctggccgcaaagcagggcaggcgcgaggcggtaaagctgttgaggagatgtctcgctgatcggcgcggcattacttctgaaaatgagcgcgaggtccgccagcttagcagcgagactgacttggagcgggccgtccgaaaggcagccctcgtaatgtactggaagctgaatcccaaaaagaaaaagcaggttgcagtggcagaactgcttgaaaacgttggccaggtcaacgaacacgatgggggcgcccagcctggcccagtccccaagtcccttcagaaacagcggaggatgctcgagcggttggtcagttctgaatccaaaaattacatcgcactggatgattttgtcgaaatcaccaaaaagtacgcaaagggcgtgattccctcctccctatttctacaggatgatgaagatgacgatgaacttgccggtaagagtcctgaggacctgcccctgcggctcaaagtggtcaagtaccctctccacgcaattatggagataaaggaatacctgatcgatatggcgtcacgagcaggaatgcattggctgagtactattattccaactcatcatatcaacgctctaatttttttctttattgtcagtaacctcacgatcgatttcttcgccttcttcattccactagtgattttctatttaagctttatctctatggttatttgtacactcaaggtgtttcaggactctaaggcctgggagaatttcagaacgctgaccgatcttctgcttcggttcgagcctaatctggatgtggaacaagccgaggtgaatttcgggtggaaccaccttgagccatacgctcattttcttctgagcgttttcttcgtgattttctcatttccaatcgcctccaaggactgcatcccctgttcagagttggcagtgatcactggttttttcacggttacttcttacttatcactttctacacacgcagaaccctacacacggcgcgccttggcaaccgaggttacagctgggctgctttctctactgcctagcatgcccctaaactggccatacctgaaggttttggggcagaccttcatcactgtccccgtaggacacttggtggtcctcaacgtgtccgtgccctgcttattatacgtgtacttgctgtacctgttcttcaggatggcccagctgagaaacttcaagggtacctattgctatttagtcccttatctggtgtgtttcatgtggtgcgaactgagtgtggttatcctgctggagtcaactggacttgggctgctgagggccagcatagggtacttcctgtttctgttcgccttgcccatactcgttgccgggttagcactcgtgggtgtgttgcagtttgcccgttggtttacctcacttgagctcaccaaaatagctgtgactgtggccgtgtgttcagtccctctcctcctgaggtggtggaccaaagcttcattcagcgtggtcggcatggttaaaagccttactaggtcgtctatggtgaagctcatattagtgtggctgacagcaattgtgttattttgctggttttatgtctatagatcagaagggatgaaggtctacaattctacgctgacctggcagcagtacggcgccctgtgcgggcctcgcgcctggaaagagaccaatatggcccgcactcagatcctttgtagccacctagaaggtcacagagtgacctggactgggcgattcaaatatgtgcgagttaccgacattgataactcggccgagagcgccatcaatatgctgcccttctttattggagactggatgcgttgtttgtatggcgaggcatatcctgcttgttcacccggtaacacctcaactgccgaggaagagctttgccggctcaagctgctagctaaacacccctgccatatcaagaaatttgataggtataaatttgagataactgtcggaatgcctttttccagcggcgcagacggatcccgcagtagagaagaggatgatgtgacgaaggatatcgttctgcgcgcttctagcgaattcaaaagcgttcttttgtctttaagacaaggctctttgatcgaattttctaccatcctggagggccgcttagggtcgaagtggcccgtgttcgagttgaaagccatctcttgtcttaactgtatggcgcagttatctcctacacggcgccacgtaaagatcgagcacgactggaggtcaacagtgcacggggctgtgaagtttgcttttgattttttttttttccctttcttgtctgctgcatag

SEQ ID NO: 59188 - DNA, 807 bp, Artificial Sequence
  derived and/or modified sequence
atggtgaagagcctgacccggagcagcatggtgaagctgatcctggtttggctgactgccatagtgttattttgttggttttacgtgtaccggtctgagggaatgaaagtgtacaactctacgctgacttggcaacaatacggagcactgtgtggcccacgggcttggaaggagacaaacatggctaggacccagattctgtgttctcacctcgaggggcatcgagtgacatggaccgggagattcaagtatgtgagggtgaccgatattgacaatagcgccgaatctgcaataaatatgcttccattctttatcggggattggatgaggtgtttgtacggtgaggcttatccagcatgctcacccggtaacactagcaccgccgaggaagaactgtgtcggctgaagttgctcgcaaagcacccatgccatataaaaaagtttgaccgctataagtttgagattaccgtcggcatgccatttagttctggagcagacggatctcgttctcgagaggaggatgatgtgaccaaagatattgtcctgcgcgcttcttcggaatttaaatccgttttattatccctgcgccagggatcgttgatcgaattctctacgatactagagggccggttaggtagtaagtggccagtctttgagctcaaagccatcagctgtctgaattgtatggcacaactttcccctacgagaaggcatgtcaagattgagcatgactggagatcaaccgttcatggggccgtcaaattcgctttcgatttcttctttttcccatttcttagcgctgcgtag

SEQ ID NO: 59189 - DNA, 2673 bp, Artificial Sequence
  derived and/or modified sequence
atggatagcaataccgctccacttgggccaagctgcccccagcctcctccagcccctcaaccacaggctaggtctagactaaacgctacggccagtcttgaacaggagaggagtgagcggcctcgggcacccggtcctcaggcgggacctggccctggggtgagggacgccgcagctccagcggagccacaggcacaacacactcgctcgagggaaagggcagacggaaccggacccaccaaaggcgacatggagatccccttcgaggaagtactagaaagggcaaaggcaggggatcccaaagcccagacagaggtaggaaagcactacctgcagctagcgggagatactgacgaggaactgaatagttgtacggctgtggactggctggtgctggcagcaaagcagggcagaagagaagcggtgaagctactgagacggtgtctggctgaccggcgtggtattacctctgaaaatgagagggaggtgcgccagctgtctagcgagacagaccttgagcgggctgtaaggaaagctgcactcgttatgtactggaagctgaaccccaagaaaaaaaaacaagtggccgtagccgagcttttggaaaatgttggccaagtgaacgagcatgacggcggagctcagccaggccctgtgccaaagtccctccagaaacagaggcgtatgctagagaggttagtgtcgtcagagtcaaagaattacattgcgctcgatgatttcgtggaaattacaaaaaagtatgccaagggggtcataccatcatctctcttcctgcaggacgacgaggacgatgacgaattggcagggaagagccccgaggacctgcccctccggctcaaagtagtaaaatacccgctgcacgccatcatggaaattaaggaatacctgatcgacatggcttccagggccggaatgcactggctgtcaaccataattccaacccaccacataaacgcactaatttttttctttatagtgtcaaatttgactattgacttttttgccttttttatacctcttgtgatcttttatctgtctttcatctctatggtgatatgtaccctgaaggtgtttcaggactcaaaggcctgggaaaactttcggacccttaccgacctcctccttagatttgaacctaacttagacgtcgaacaggcggaggttaacttcggttggaaccatctggaaccttacgctcacttccttttgtctgtcttctttgtgatattttcgtttccgattgcctccaaggactgtataccttgctcagagttggccgtgatcactggctttttcaccgtgacctcctatctgagcctatccacccacgccgaaccctacacaaggagggcattagccacagaggtcaccgcagggttactctccctcctgcccagtatgccactgaattggccgtacctgaaagtgctggggcagaccttcattacggttccagtcggacacctagtggtacttaacgtctccgtgccttgtctgctgtatgtctaccttctgtacttgttcttccgcatggcacaattgcgcaacttcaaaggaacttactgctatctggttccatatctcgtatgctttatgtggtgcgaactgtctgtggtaattcttttagaatccactggacttggcttgctgagggcctccataggctatttcctatttctgtttgccttgcccatactggtcgctgggctcgcgctcgtgggagtcttacagttcgctcgatggttcacctccctggagctaactaagattgctgtgacagtagcagtttgttctgtgcccctgcttctccggtggtggactaaagcatcattctcagttgtcggtatggtgaagtcccttactcggtcaagcatggtcaaactcatcctcgtctggctgacggcaatcgtcctgttttgttggttttatgtgtacagaagtgaaggcatgaaggtgtacaactctacacttacttggcaacagtatggggctctctgcgggcctcgagcgtggaaagaaactaacatggccaggactcagatcctgtgctcccatcttgaaggtcacagggtgacatggacaggaaggtttaagtacgtccgagtcacagacatcgacaattcagcggaatcggccattaacatgcttccattctttatcggagattggatgcgctgtctgtatggtgaggcctatcccgcatgctcacctggaaacacgtccaccgccgaagaggagctttgccgactcaaattgctggccaaacatccgtgtcacatcaaaaaatttgaccgctacaaattcgaaattacggttggaatgccgttcagctccggcgctgatggctcaagaagccgggaagaagacgacgttaccaaagacatcgtattgcgggctagttctgaattcaaaagcgtgctgctttccctgcgacaggggagtctcatagagttcagcaccatcttagagggcagacttggcagtaaatggcctgtgtttgagttaaaggctatttcctgtctgaactgtatggcccagttgagtcccaccagaaggcatgtcaagatcgaacacgactggcggagcaccgttcacggggctgttaaatttgctttcgacttcttcttctttccatttttgtctgcagcatag

SEQ ID NO: 59190 - DNA, 807 bp, Artificial Sequence
  derived and/or modified sequence
atggttaaatccttaacccgctcctccatggtcaaattgattcttgtatggttgactgctattgtgttgttctgttggttctacgtctaccggtcggaaggcatgaaagtctataattcaacccttacatggcagcaatacggggctctctgcggcccaagggcttggaaagagactaacatggcaagaacgcagatcctttgctcacacctcgaagggcatcgggtaacctggaccggcagattcaaatatgtccgcgtgactgacatcgacaactccgccgaatcagcaatcaacatgttaccattttttatcggggactggatgaggtgcctttatggcgaagcatatcctgcttgctctccaggaaacacatcgaccgccgaagaagagctgtgccgcctgaagttattagccaagcatccctgccacataaaaaagttcgatcgttataagtttgagattacagtgggtatgccattcagctcaggagccgatggtagcagatcaagagaagaggatgatgtcactaaggatatagtgctccgggcatcatcagaattcaaatccgtgttactctcacttaggcaggggtctttgattgaattctccaccattctagagggaagactggggtcaaaatggcccgtgtttgagctgaaggcgataagctgcctgaattgcatggctcaactcagccccactcggagacacgtgaaaattgagcacgattggcggtcaaccgtgcatggcgctgtcaagtttgcatttgacttcttcttcttcccattcctgtccgccgcttag

SEQ ID NO: 59191 - DNA, 3640 bp, Artificial Sequence
  derived and/or modified sequence
gtgcagaaggccgcgctagccggctcttcagcagcgagtgcagattgctcccccgcggccgcagatctcccgtttgcgccgcgttcagctgctcccgaacaacttttctgccggcccagaggccccagggcgtcgcagcgccgcgtgcggcccactcacgggccggcaggatggactccaacactgctccgctgggcccctcctgcccacagcccccgccagcaccgcagccccaggcgcgttcccgactcaatgccacagcctcgttggagcaggagaggagcgaaaggccccgagcacccggaccccaggctggccctggccctggtgttagagacgcagcggcccccgctgaaccccaggcccagcataccaggagccgggaaagagcagacggcaccgggcctacaaagggagacatggaaatcccctttgaagaagtcctggagagggccaaggccggggaccccaaggcacagactgaggtggggaagcactacctgcagttggccggcgacacggatgaagaactcaacagctgcaccgctgtggactggctggtcctcgccgcgaagcagggccgtcgcgaggctgtgaagctgcttcgccggtgcttggcggacagaagaggcatcacgtccgagaacgaacgggaggtgaggcagctctcctccgagaccgacctggagagggccgtgcgcaaggcagccctggtcatgtactggaagctcaaccccaagaagaagaagcaggtggccgtggcggagctgctggagaatgtcggccaggtcaacgagcacgatggaggggcgcagccaggccccgtgcccaagtccctgcagaagcagaggcgcatgctggagcgcctggtcagcagcgagtccaagaactacatcgcgctggatgactttgtggagatcactaagaagtacgccaagggcgtcatccccagcagcctgttcctgcaggacgacgaagatgatgacgagctggcggggaagagccctgaggacctgccactgcgtctgaaggtggtcaagtaccccctgcacgccatcatggagatcaaggagtacctgattgacatggcctccagggcaggcatgcactggctgtccaccatcatccccacgcaccacatcaacgcgctcatcttcttcttcatcgtcagcaacctcaccatcgacttcttcgccttcttcatcccgctggtcatcttctacctgtccttcatctccatggtgatctgcaccctcaaggtgttccaggacagcaaggcctgggagaacttccgcaccctcaccgacctgctgctgcgcttcgagcccaacctggatgtggagcaggccgaggtcaacttcggctggaaccacctggagccctatgcccatttcctgctctctgtcttcttcgtcatcttctccttccccatcgccagcaaggactgcatcccctgctcggagctggctgtcatcaccggcttctttaccgtgaccagctacctgagcctgagcacccatgcagagccctacacgcgcagggccctggccaccgaggtcaccgccggcctgctatcgctgctgccctccatgcccttgaattggccctacctgaaggtccttggccagaccttcatcaccgtgcctgtcggccacctggtcgtcctcaacgtcagcgtcccgtgcctgctctatgtctacctgctctatctcttcttccgcatggcacagctgaggaatttcaagggcacctactgctaccttgtgccctacctggtgtgcttcatgtggtgtgagctctccgtggtcatcctgctggagtccaccggcctggggctgctccgcgcctccatcggctacttcctcttcctctttgccctccccatcctggtggccggcctggccctggtgggcgtgctgcagttcgcccggtggttcacgtctctggagctcaccaagatcgcagtcaccgtggcggtctgtagtgtgcccctgctgttgcgctggtggaccaaggccagcttctctgtggtggggatggtgaagtccctgacgcggagctccatggtcaagctcatcctggtgtggctcacggccatcgtgctgttctgctggttctatgtgtaccgctcagagggcatgaaggtctacaactccacactgacctggcagcagtatggtgcgctgtgcgggccacgcgcctggaaggagaccaacatggcgcgcacccagatcctctgcagccacctggagggccacagggtcacgtggaccggccgcttcaagtacgtccgcgtgactgacatcgacaacagcgccgagtctgccatcaacatgctcccgttcttcatcggcgactggatgcgctgcctctacggcgaggcctaccctgcctgcagccctggcaacacctccacggccgaggaggagctctgtcgccttaagctgctggccaagcacccctgccacatcaagaagttcgaccgctacaagtttgagattaccgtgggcatgccattcagcagcggcgctgacggctcgcgcagccgcgaggaggacgacgtcaccaaggacatcgtgctgcgggccagcagcgagttcaagagcgtgctgctcagcctgcgccagggcagcctcatcgagttcagcaccatcctggagggccgcctgggcagcaagtggcctgtcttcgagctcaaggccatcagctgcctcaactgcatggcccagctctcacccaccaggcggcacgtgaagatcgagcacgactggcgcagcaccgtgcatggcgccgtgaagttcgccttcgacttctttttcttcccattcctgtcggcggcctgaggatggtccgccacgaggagcttccagtgcatgttgccatgaggcctttccccagtgtggccccagcccgacaggcatgcaccagtgccgcctgtgcccacgtgtgcagactgtggctgcagagaccttgcgaccatgtgtagattgcgtggaccccgacaaagggaaggctgctgtgtagctctgtccactctgaataccaagtgtgttgggaattgcatgccatctccaccctgagcctgacctttctgagtgacatgggtgtgccaggctagactaggaggttccggtgtctggaaaagcactttacagatgagattccctctcctcccccaccttcaagcaccctgttccctctttctttcttttgtgttggatttgtttaaaaaccaaataagcatctgtgtaacctccacagtagcatttcttatttgtttggtcactgctacaccttagcagctcttcccctttcctgggggatgtgcacggcagcttgagcctgtcacgtggtcaaggcccggccccatcagaggctgggggaggcggcacattggcagtgtgtcacactgagctgggcaccacaggctgcctcatgaccctcctgtccagcaggtagtgggtgaatgtgtgaaggtcttgcctgaatccatcaggacttgggaaacagagaaccctgtgggggcggctgtgggggaggtccctgccagtgtttagaagagcctgactgtgttcagtgccttggagcagaaagccagggtcctgagtggctgaaataaaagcctctggtggaacctgca

SEQ ID NO: 59192 - DNA, 3255 bp, Artificial Sequence
  derived and/or modified sequence
cgtgcagaaggccgcgctagccggctcttcagcagcgagtgcagattgctcccccgcggccgcagatctcccgtttgcgccgcgttcagctgctcccgaacaacttttctgccggcccagaggccccagggcgtcgcagcgccgcgtgcggcccactcacgggccggatggactccaacactgctccgctgggcccctcctgcccacagcccccgccagcaccgcagccccaggcgcgttcccgactcaatgccacagcctcgttggagcaggagaggagcgaaaggccccgagcacccggaccccaggctggccctggccctggtgttagagacgcagcggcccccgctgaaccccaggcccagcataccaggagccgggaaagagcagacggcaccgggcctacaaagggagacatggaaatcccctttgaagaagtcctggagagggccaaggccggggaccccaaggcacagactgaggtggggaagcactacctgcagttggccggcgacacggatgaagaactcaacagctgcaccgctgtggactggctggtcctcgccgcgaagcagggccgtcgcgaggctgtgaagctgcttcgccggtgcttggcggacagaagaggcatcacgtccgagaacgaacgggaggtgaggcagctctcctccgagaccgacctggagagggccgtgcgcaaggcagccctggtcatgtactggaagctcaaccccaagaagaagaagcaggtggccgtggcggagctgctggagaatgtcggccaggtcaacgagcacgatggaggggcgcagccaggccccgtgcccaagtccctgcagaagcagaggcgcatgctggagcgcctggtcagcagcgagtccaagaactacatcgcgctggatgactttgtggagatcactaagaagtacgccaagggcgtcatccccagcagcctgttcctgcaggacgacgaagatgatgacgagctggcggggaagagccctgaggacctgccactgcgtctgaaggtggtcaagtaccccctgcacgccatcatggagatcaaggagtacctgattgacatggcctccagggcaggcatgcactggctgtccaccatcatccccacgcaccacatcaacgcgctcatcttcttcttcatcgtcagcaacctcaccatcgacttcttcgccttcttcatcccgctggtcatcttctacctgtccttcatctccatggtgatctgcaccctcaaggtgttccaggacagcaaggcctgggagaacttccgcaccctcaccgacctgctgctgcgcttcgagcccaacctggatgtggagcaggccgaggtcaacttcggctggaaccacctggagccctatgcccatttcctgctctctgtcttcttcgtcatcttctccttccccatcgccagcaaggactgcatcccctgctcggagctggctgtcatcaccggcttctttaccgtgaccagctacctgagcctgagcacccatgcagagccctacacgcgcagggccctggccaccgaggtcaccgccggcctgctatcgctgctgccctccatgcccttgaattggccctacctgaaggtccttggccagaccttcatcaccgtgcctgtcggccacctggtcgtcctcaacgtcagcgtcccgtgcctgctctatgtctacctgctctatctcttcttccgcatggcacagctgaggaatttcaagggcacctactgctaccttgtgccctacctggtgtgcttcatgtggtgtgagctctccgtggtcatcctgctggagtccaccggcctggggctgctccgcgcctccatcggctacttcctcttcctctttgccctccccatcctggtggccggcctggccctggtgggcgtgctgcagttcgcccggtggttcacgtctctggagctcaccaagatcgcagtcaccgtggcggtctgtagtgtgcccctgctgttgcgctggtggaccaaggccagcttctctgtggtggggatggtgaagtccctgacgcggagctccatggtcaagctcatcctggtgtggctcacggccatcgtgctgttctgctggttctatgtgtaccgctcagagggcatgaaggtctacaactccacactgacctggcagcagtatggtgcgctgtgcgggccacgcgcctggaaggagaccaacatggcgcgcacccagatcctctgcagccacctggagggccacagggtcacgtggaccggccgcttcaagtacgtccgcgtgactgacatcgacaacagcgccgagtctgccatcaacatgctcccgttcttcatcggcgactggatgcgctgcctctacggcgaggcctaccctgcctgcagccctggcaacacctccacggccgaggaggagctctgtcgccttaagctgctggccaagcacccctgccacatcaagaagttcgaccgctacaagtttgagattaccgtgggcatgccattcagcagcggcgctgacggctcgcgcagccgcgaggaggacgacgtcaccaaggacatcgtgctgcgggccagcagcgagttcaagagcgtgctgctcagcctgcgccagggcagcctcatcgagttcagcaccatcctggagggccgcctgggcagcaagtggcctgtcttcgagctcaaggccatcagctgcctcaactgcatggcccagctctcacccaccaggcggcacgtgaagatcgagcacgactggcgcagcaccgtgcatggcgccgtgaagttcgccttcgacttctttttcttcccattcctgtcggcggcctgaggatggtccgccacgaggagcttccagtgcatgttgccatgaggcctttccccagtgtggccccagcccgacaggcatgcaccagtgccgcctgtgcccacgtgtgcagactgtggctgcagagaccttgcgaccatgtgtagattgcgtggaccccgacaaagggaaggctgctgtgtagctctgtccactctgaataccaagtgtgttgggaattgcatgccatctccaccctgagcctgacctttctgagtgacatgggtgtgccaggctagactaggaggttccggtgtctggaaaagcactttacagatgagattccctctcctcccccaccttcaagcaccctgttccctctttctttcttttgtgttggatttgtttaaaaaccaaataagcatctgtgtaacctcca

SEQ ID NO: 59193 - DNA, 1625 bp, Artificial Sequence
  derived and/or modified sequence
agattgctcccccgcggccgcagatctcccgtttgcgccgcgttcagctgctcccgaacaacttttctgccggcccagaggccccagggcgtcgcagcgccgcgtgcggcccactcacgggccggcaggatggactccaacactgctccgcgcctccatcggctacttcctcttcctctttgccctccccatcctggtggccggcctggccctggtgggcgtgctgcagttcgcccggtggttcacgtctctggagctcaccaagatcgcagtcaccgtggcggtctgtagtgtgcccctgctgttgcgctggtggaccaaggccagcttctctgtggtggggatggtgaagtccctgacgcggagctccatggtcaagctcatcctggtgtggctcacggccatcgtgctgttctgctggttctatgtgtaccgctcagagggcatgaaggtctacaactccacactgacctggcagcagtatggtgcgctgtgcgggccacgcgcctggaaggagaccaacatggcgcgcacccagatcctctgcagccacctggagggccacagggtcacgtggaccggccgcttcaagtacgtccgcgtgactgacatcgacaacagcgccgagtctgccatcaacatgctcccgttcttcatcggcgactggatgcgctgcctctacggcgaggcctaccctgcctgcagccctggcaacacctccacggccgaggaggagctctgtcgccttaagctgctggccaagcacccctgccacatcaagaagttcgaccgctacaagtttgagattaccgtgggcatgccattcagcagcggcgctgacggctcgcgcagccgcgaggaggacgacgtcaccaaggacatcgtgctgcgggccagcagcgagttcaagagcgtgctgctcagcctgcgccagggcagcctcatcgagttcagcaccatcctggagggccgcctgggcagcaagtggcctgtcttcgagctcaaggccatcagctgcctcaactgcatggcccagctctcacccaccaggcggcacgtgaagatcgagcacgactggcgcagcaccgtgcatggcgccgtgaagttcgccttcgacttctttttcttcccattcctgtcggcggcctgaggatggtccgccacgaggagcttccagtgcatgttgccatgaggcctttccccagtgtggccccagcccgacaggcatgcaccagtgccgcctgtgcccacgtgtgcagactgtggctgcagagaccttgcgaccatgtgtagattgcgtggaccccgacaaagggaaggctgctgtgtagctctgtccactctgaataccaagtgtgttgggaattgcatgccatctccaccctgagcctgacctttctgagtgacatgggtgtgccaggctagactaggaggttccggtgtctggaaaagcactttacagatgagattccctctcctcccccaccttcaagcaccctgttccctctttctttcttttgtgttggatttgtttaaaaaccaaataagcatctgtgtaacctccacagtagcatttcttatttgtttggtcactgctacaccttagcagctcttcccctttcctg

SEQ ID NO: 59194 - protein, 561 aa, Artificial Sequence
  derived and/or modified sequence
MAAEEMHWPVPMKAIGAQNLLTMPGGVAKAGYLHKKGGTQLQLLKWPLRFVIIHKRCVYYFKSSTSASPQGAFSLSGYNRVMRAAEETTSNNVFPFKIIHISKKHRTWFFSASSEEERKSWMALLRREIGHFHEKKDLPLDTSDSSSDTDSFYGAVERPVDISLSPYPTDNEDYEHDDEDDSYLEPDSPEPGRLEDALMHPPAYPPPPVPTPRKPAFSDMPRAHSFTSKGPGPLLPPPPPKHGLPDVGLAAEDSKRDPLCPRRAEPCPRVPATPRRMSDPPLSTMPTAPGLRKPPCFRESASPSPEPWTPGHGACSTSSAAIMATATSRNCDKLKSFHLSPRGPPTSEPPPVPANKPKFLKIAEEDPPREAAMPGLFVPPVAPRPPALKLPVPEAMARPAVLPRPEKPQLPHLQRSPPDGQSFRSFSFEKPRQPSQADTGGDDSDEDYEKVPLPNSVFVNTTESCEVERLFKATSPRGEPQDGLYCIRNSSTKSGKVLVVWDETSNKVRNYRIFEKDSKFYLEGEVLFVSVGSMVEHYHTHVLPSHQSLLLRHPYGYTGPR

SEQ ID NO: 59195 - protein, 589 aa, Artificial Sequence
  derived and/or modified sequence
MASLGPRTPAPSRSRGRRAMCWVSTISFMAAEEMHWPVPMKAIGAQNLLTMPGGVAKAGYLHKKGGTQLQLLKWPLRFVIIHKRCVYYFKSSTSASPQGAFSLSGYNRVMRAAEETTSNNVFPFKIIHISKKHRTWFFSASSEEERKSWMALLRREIGHFHEKKDLPLDTSDSSSDTDSFYGAVERPVDISLSPYPTDNEDYEHDDEDDSYLEPDSPEPGRLEDALMHPPAYPPPPVPTPRKPAFSDMPRAHSFTSKGPGPLLPPPPPKHGLPDVGLAAEDSKRDPLCPRRAEPCPRVPATPRRMSDPPLSTMPTAPGLRKPPCFRESASPSPEPWTPGHGACSTSSAAIMATATSRNCDKLKSFHLSPRGPPTSEPPPVPANKPKFLKIAEEDPPREAAMPGLFVPPVAPRPPALKLPVPEAMARPAVLPRPEKPQLPHLQRSPPDGQSFRSFSFEKPRQPSQADTGGDDSDEDYEKVPLPNSVFVNTTESCEVERLFKATSPRGEPQDGLYCIRNSSTKSGKVLVVWDETSNKVRNYRIFEKDSKFYLEGEVLFVSVGSMVEHYHTHVLPSHQSLLLRHPYGYTGPR

SEQ ID NO: 59196 - protein, 136 aa, Artificial Sequence
  derived and/or modified sequence
MAAEEMHWPVPMKAIGAQNLLTMPGGVAKAGYLHKKGGTQLQLLKWPLRFVIIHKRCVYYFKSSTSASPQGAFSLSGYNRVMRAAEETTSNNVFPFKIIHISKKHRTWFFSASSEEERKSWMALLRREIGHFHEKK

SEQ ID NO: 59197 - DNA, 1770 bp, Artificial Sequence
  derived and/or modified sequence
atggcctctctcggtcctcgcacccctgccccgagcaggtctagaggacgccgtgctatgtgttgggttagtacaatatctttcatggctgctgaggagatgcactggccagtgcccatgaaggcaatcggcgctcagaacttattgacaatgcctggcggtgtggctaaggcagggtacctacacaaaaaaggcggaacacagttacagcttctgaagtggcctctccgcttcgtcatcatacataagcgatgcgtctattactttaagagctccacctctgcaagcccacaaggcgccttctctttgtctggatacaatcgcgttatgagagctgctgaggaaactacctctaacaatgtgttcccgttcaaaatcatccatatctccaagaagcacagaacttggttcttctctgctagctcagaagaagagaggaaatcgtggatggccctgcttcggagagaaataggccacttccacgaaaagaaggatctccccctggatacaagcgactcatcaagcgacactgattctttctatggcgccgtagaacgcccagtggacatctccctgtcaccctatccaacagacaacgaggactatgaacacgatgacgaggatgactcttatctcgaacccgatagtccagaaccaggccgccttgaggacgctctgatgcaccccccagcatatccacccccacccgtgcccacgccccggaagccagccttcagcgatatgccacgcgcacatagcttcacaagcaaaggccccggcccactcctgcctccacctccccctaaacacggattaccagatgtcgggctggctgccgaagattcgaagagagatccactgtgcccacgcagggccgaaccatgtccacgcgttcctgcgaccccgcggaggatgagcgaccccccactttctactatgcccacggccccagggttgcggaaacccccgtgtttcagagagagcgcttcgccctcacctgaaccttggacacctggtcacggcgcgtgtagcacctcatcagctgcgatcatggctaccgcgacttctaggaattgtgacaagctgaagtctttccacctgagccccagaggtccgcccaccagcgagccaccccccgtgccagcaaacaagcccaaatttctgaaaattgccgaggaagatcctcctagggaggctgctatgccaggtttgttcgtcccacctgtggcccctcggcctcctgccctcaagctgcctgtacccgaggcgatggctcgtccagctgtactaccgcggccagagaagccccagctgccccacctgcagcggagccctcccgacgggcagagtttcagatcattttcattcgaaaaacctcgccagccttcacaagcagacaccggcggcgacgactccgacgaggactacgaaaaggtgccactacccaactccgtatttgtcaacactactgagtcttgtgaggtggagaggctatttaaagctacttctccccggggcgaacctcaagacggactttattgcatacggaatagtagcaccaagtccgggaaggtcctagtggtttgggacgagacatcaaataaggttaggaattaccggatctttgagaaggactcgaagttctacctggaaggcgaggttctgtttgtcagtgtagggtccatggtggagcactatcacacacacgtgctccccagccaccagtccctgttgcttaggcacccctacgggtataccggtccccgctag

SEQ ID NO: 59198 - DNA, 1770 bp, Artificial Sequence
  derived and/or modified sequence
atggccagcctgggccccaggaccccagcccccagccgcagccggggcagaagagccatgtgctgggtgtccaccatctccttcatggctgctgaggagatgcactggcctgtgcccatgaaggccatcggggcccagaacctgctgaccatgcctgggggcgtggccaaggccggctacctgcacaagaagggcggcacccagctgcagctgctgaagtggcccctgcgcttcgtcatcatccacaagagatgtgtgtactacttcaagagcagcaccagcgccagcccccagggcgccttcagcctgagcggctacaacagagtgatgagagctgctgaggagaccaccagcaacaacgtgttccccttcaagatcatccacatcagcaagaagcacaggacctggttcttcagcgccagcagcgaggaggagaggaagtcctggatggccctgctgcggcgggagatcggccacttccacgagaagaaggacctgcccctggacaccagtgacagcagcagtgacacagacagcttctatggagctgtggagaggcctgtggacatcagcctgagcccctaccccacagacaatgaagattatgaacatgatgatgaagatgacagctacctggagccagacagccctgagcccggccgcctggaggatgccctgatgcaccccccagcctacccacctcctcctgtgcccacccccaggaagccagccttcagtgacatgccccgggcccacagcttcaccagcaaaggacctggccccctgctgcccccacctccacccaagcacggcctgcctgatgtgggcctggccgctgaggacagcaagagggaccccctgtgcccccggcgggcagagccctgcccccgggtgcctgccacccccaggaggatgtctgacccccccctgagcaccatgcccacagcccctggcctgaggaagccaccctgcttccgggagagcgccagccccagccctgagccctggaccccaggccacggggcctgcagcaccagcagcgctgccatcatggccacagccaccagcaggaactgtgacaagctgaagagcttccacctgagcccccggggcccccccaccagcgagcccccacctgtgcctgccaacaagcccaagttcctgaagattgctgaagaagatcctccccgggaggccgccatgcctggcctgtttgtgccccctgtggccccccggcccccagccctgaagctgcctgtgcctgaggccatggcccggcctgctgtgctgcccaggcctgagaagccccagctgccccacctgcagaggagccccccagatggccagagcttccgctccttctcctttgagaagccccggcagcccagccaggccgacacaggaggagatgacagtgatgaggactatgagaaggtgcccctgcccaacagcgtgtttgtgaacaccacagagagctgtgaggtggagcggctcttcaaggccaccagccccagaggagagccccaggacggcctgtactgcatccggaacagcagcaccaagagcggcaaggtgctggtggtgtgggatgagaccagcaacaaggtgaggaactaccgcatctttgagaaggacagcaagttctacctggagggggaggtgctgtttgtgtctgtgggctccatggtggagcactaccacacccacgtgctgcccagccaccagagcctgctgctgcggcacccctacggctacacaggccccaggtag

SEQ ID NO: 59199 - DNA, 1770 bp, Artificial Sequence
  derived and/or modified sequence
atggccagcctgggcccccggacccccgcccccagccggagccggggcaggcgcgcaatgtgttgggtgagtaccataagcttcatggccgccgaagagatgcactggccggtgccaatgaaagctattggcgcccagaatctcctgacaatgcctggcggagtcgctaaagccggttacctgcataagaaaggaggtactcagctccagctgctgaaatggccattaaggttcgtgatcattcacaaacgctgcgtttattattttaagtcttctacttctgctagcccgcagggggccttcagtctttccggatacaatagagttatgcgggctgccgaggagactacatctaacaatgtattcccatttaaaatcatccacatctctaagaaacacagaacctggttcttttccgcttcaagtgaggaagagcgcaagagctggatggcactgctgagacgggaaattgggcactttcacgaaaaaaaggacctgcccctcgatacttccgactccagtagtgacacagacagtttctacggggccgtggaacgcccggtggacatctcactatccccctacccgaccgataacgaggactacgaacatgatgatgaagatgacagctaccttgaaccagactcccccgagccaggcaggttggaggacgccttaatgcatccaccagcatatcccccaccacctgtccccactccccgcaaacccgcctttagcgacatgccccgagctcactccttcacgtcgaagggccctggtcccctgctgccaccaccccctcccaaacatggtctccctgacgtgggattagccgccgaagattctaaacgtgacccactgtgccccagacgagccgaaccatgccctcgggtgccagccaccccgaggcggatgtcagatcccccccttagcacaatgccgacagcccctggcctacgcaagcccccatgtttccgggagtcagcaagcccgtctccagagccttggactcctggccatggtgcttgctccacctccagcgccgctatcatggctacagccacaagtcgcaattgcgacaagttaaagtcatttcatctgtctccccgcgggccgccaacttcggagccacctcccgtcccagccaataagccaaagttcctaaagatagcggaggaagatcccccgagagaagccgcaatgcccggactgtttgttccaccagtggccccgcgccccccagctcttaaactcccagtgccagaagctatggctaggcctgctgtattaccgagaccagagaaacctcagttgccacacttacagcgttccccccctgatgggcagagcttcaggtcgttttcgttcgagaaaccgcggcagccatcccaggctgacaccggaggtgatgacagtgatgaagattatgaaaaggtccctctgcccaatagtgtcttcgtgaatactactgagtcttgtgaggtcgaaagactattcaaagccacaagtcccaggggtgaaccccaagacggcttgtactgtattcgcaactcaagcactaagagtggtaaagtgttggtggtttgggatgaaacctctaataaggtgcgcaactacagaatattcgagaaagacagcaagttctacctagagggggaggtgctgttcgtatcggttggttctatggttgaacattatcatacacatgtcttacctagtcaccagagcctgctgctccggcacccatatggctatacaggaccaaggtag

SEQ ID NO: 59200 - DNA, 1770 bp, Artificial Sequence
  derived and/or modified sequence
atggctagcctcggccctcgcacacctgcgccaagcagaagtaggggaaggcgcgctatgtgttgggtaagcacgatatcgttcatggctgccgaagagatgcattggccagttcccatgaaggctattggagcgcagaaccttttaaccatgccaggcggtgtggcaaaggctggctatttgcacaagaagggaggaacacagttgcagctcttgaagtggcccctccggttcgttattattcacaaaagatgcgtgtattatttcaagtcaagtacgtccgcgagtccacaaggcgctttctccttgagcggctacaatcgtgtcatgagagcggctgaagaaaccaccagcaacaatgtgttccccttcaagattattcacattagtaagaaacataggacatggtttttctctgcctctagcgaagaggagcgtaagtcttggatggctctgctccggagagaaattggacacttccacgaaaagaaagatctgcctttagatacttcagactcttcatcagatacagattctttttatggagcagtggagagaccggtcgacattagcttgagcccctaccctacagataacgaggactacgagcacgacgacgaggacgatagctatttggaacctgacagccctgaacctgggaggttggaggacgcactcatgcacccacccgcatacccaccgcctccagtgcctacaccccgaaaacccgcattctctgatatgcccagagctcactcctttactagcaaagggcctggtccgttactgccaccaccccctcctaaacacggactgccggatgtgggcttggcagccgaggatagtaagagggacccactgtgtcctcgacgagccgagccttgcccaagagttccggctaccccacgacgtatgagtgaccctcctctgtctacaatgcccaccgctccaggactccgtaagcctccgtgcttccgggagtcagcttccccatctcccgaaccctggactccaggccacggggcttgtagtaccagctccgctgccattatggccacagcaactagtagaaactgtgacaagttaaagagctttcacttgtcccccaggggtccccctacctcggagccacccccagtcccggctaataaacctaaatttcttaagattgcggaggaggatccccctagagaagcagccatgcctggactgttcgtgcctcccgtggcccctcggcctcccgcactaaaactgccggtgcctgaggcaatggcgaggccggcagttctgccgagaccagagaaaccgcagctgccacacctccagcgttctccaccggatggccagtcatttcggagcttttcatttgagaaaccccgacagccatctcaggcagacactgggggtgacgactcagatgaggactatgagaaggtacccctaccaaatagtgtgttcgtgaatactaccgagagctgtgaagttgagcgcttgttcaaggccacctctccacgcggtgaaccgcaggacggcctctactgcattaggaacagttcaactaagagtggcaaagttctggtagtgtgggatgagacttcaaacaaggtccggaactatcggatcttcgaaaaagattcaaagttctacctcgagggcgaagtgctatttgtctcggttgggtctatggttgagcactatcacacacatgtgctgccatcccaccaaagcctcctgctgagacatccgtatggctataccggaccgagatag

SEQ ID NO: 59201 - DNA, 2318 bp, Artificial Sequence
  derived and/or modified sequence
gtgagctgtgggcacagctgtggggcagccaggcgcgtcaggcctcacatgtctgggagatgtaggctgcctgggctggtggcccctgagccgcatggcctccctgggccccaggacaccggccccgagcaggtcacgaggacggagggccatgtgttgggtcagcaccatcagcttcatggcggctgaagagatgcattggcctgtccctatgaaggccattggtgcccagaacctgctaaccatgcctgggggcgtggccaaggctggctacctgcacaagaagggcggtacccagctgcagctgctgaaatggcccctgcgctttgtcatcatccacaaacgctgcgtctactacttcaagagtagcacctctgcctccccgcagggcgccttctccctgagtggctataaccgggtgatgcgggcggctgaggagaccacgtccaacaacgttttccccttcaagatcatccatatcagcaagaagcaccgcacgtggttcttctcggcctcctccgaggaggagcgcaagagctggatggccttgctgcgcagggagattggccacttccacgaaaagaaagacctgcccttggacaccagcgactccagctcggacacagacagcttctacggcgcagttgagcggcctgtggatatcagcctttccccgtaccccacggacaatgaagactatgagcacgacgatgaggatgactcctacctggagcctgactccccggagcccggaaggcttgaggatgccctgatgcacccaccggcttacccaccacccccagtgcccacgcccaggaagccagccttctctgacatgccccgggcccactcctttacctccaagggccccggtcccctactgccacccccgccccctaagcacggcctcccagatgttggcctggctgctgaggactccaagagggacccactgtgcccgaggcgggctgagccttgccccagggtacctgctaccccccgaaggatgagcgatccccctctgagcaccatgcccaccgcacccggcctccggaaacccccttgcttccgggagagtgccagccccagcccggagccctggacccctggccacggggcctgctccacttccagtgctgccatcatggccactgccacctccagaaactgtgacaaactcaagtccttccacctgtccccccgaggaccacccacatctgagcccccacctgtgccagccaacaagcccaagttcctgaagatagctgaagaggaccccccaagggaggcagccatgcccggactctttgtgccccccgtggctccccggcctcctgcgctgaagctgccagtgcctgaggccatggcgcggcccgcagtcctgcccaggccagagaagccgcagctcccgcacctccagcgatcaccccccgatgggcagagtttcaggagcttctcctttgaaaagccccggcaaccctcacaggctgacactggcggggacgactcggacgaggactatgagaaggtgccactgcccaactcggtcttcgtcaacaccacggagtcctgcgaagtggaaaggttgttcaaggctacaagcccccggggagagccccaggatggactctactgcatccggaactcctctaccaagtcggggaaggtcctggttgtgtgggacgaaacctctaacaaagtgaggaactatcgcatttttgagaaggactctaagttctacctggagggcgaggtcctgtttgtgagtgtgggcagcatggtggagcactaccacacccacgtgctgcccagccaccagagcctgctgctgcggcacccctacggctacactgggcctaggtgatggcagtccatgtggctgccaggccaaggcagtcacaggggccctgaccccaggccacacagacggacatgggcccacatgggagggtgagcaggagcaaggctgtgcttgcctagggcctctgtgatggacatctcgtaggacccagccagtctcatccagcaggttgggttctagggctgaaccaggcgccaggctccagaggacgaagggactctgttgccccacactaacttgccctgtcccaatcccagaaacccaggaccaagctgtgcctgggctccaaggacaggaacactggtccccccatcacactcacccctaagtgggctgggagccaggcagggccagggcagctgggtgggggccggggctggccctgggacccccaggaacgctaagacacaggctccagtaggggctgttgcctccaataaagcagcagtgagctttg

SEQ ID NO: 59202 - DNA, 9211 bp, Artificial Sequence
  derived and/or modified sequence
acttggtgctgcccagggagcagggaacaggaagtcccgggtggggaggaagcaccggcggccacaggcctcagaagcagcaggagtgagctgtgggcacagctgtggggcagccaggcgcgtcaggcctcacatgtctgggagatgtaggctgcctgggctggtggcccctgagccgcatggcctccctgggccccaggacaccggccccgagcaggtcacgaggacggagggccatgtgttgggtcagcaccatcagcttcatggcggctgaagagatgcattggcctgtccctatgaaggccattggtgcccagaacctgctaaccatgcctgggggcgtggccaaggctggctacctgcacaagaagggcggtacccagctgcagctgctgaaatggcccctgcgctttgtcatcatccacaaacgctgcgtctactacttcaagagtagcacctctgcctccccgcagggcgccttctccctgagtggctataaccgggtgatgcgggcggctgaggagaccacgtccaacaacgttttccccttcaagatcatccatatcagcaagaagcaccgcacgtggttcttctcggcctcctccgaggaggagcgcaagagctggatggccttgctgcgcagggagattggccacttccacgaaaagaaagacctgcccttggacaccagcgactccagctcggacacagacagcttctacggcgcagttgagcggcctgtggatatcagcctttccccgtaccccacggacaatgaagactatgagcacgacgatgaggatgactcctacctggagcctgactccccggagcccggaaggcttgaggatgccctgatgcacccaccggcttacccaccacccccagtgcccacgcccaggaagccagccttctctgacatgccccgggcccactcctttacctccaagggccccggtcccctactgccacccccgccccctaagcacggcctcccagatgttggcctggctgctgaggactccaagagggacccactgtgcccgaggcgggctgagccttgccccagggtacctgctaccccccgaaggatgagcgatccccctctgagcaccatgcccaccgcacccggcctccggaaacccccttgcttccgggagagtgccagccccagcccggagccctggacccctggccacggggcctgctccacttccagtgctgccatcatggccactgccacctccagaaactgtgacaaactcaagtccttccacctgtccccccgaggaccacccacatctgagcccccacctgtgccagccaacaagcccaagttcctgaagatagctgaagaggaccccccaagggaggcagccatgcccggactctttgtgccccccgtggctccccggcctcctgcgctgaagctgccagtgcctgaggccatggcgcggcccgcagtcctgcccaggccagagaagccgcagctcccgcacctccagcgatcaccccccgatgggcagagtttcaggagcttctcctttgaaaagccccggcaaccctcacaggctgacactggcggggacgactcggacgaggactatgagaaggtgccactgcccaactcggtcttcgtcaacaccacggagtcctgcgaagtggaaaggttgttcaaggctacaagcccccggggagagccccaggatggactctactgcatccggaactcctctaccaagtcggggaaggtcctggttgtgtgggacgaaacctctaacaaagtgaggaactatcgcatttttgagaaggactctaagttctacctggagggcgaggtcctgtttgtgagtgtgggcagcatggtggagcactaccacacccacgtgctgcccagccaccagagcctgctgctgcggcacccctacggctacactgggcctaggtgatggcagtccatgtggctgccaggccaaggcagtcacaggggccctgaccccaggccacacagacggacatgggcccacatgggagggtgagcaggagcaaggctgtgcttgcctagggcctctgtgatggacatctcgtaggacccagccagtctcatccagcaggttgggttctagggctgaaccaggcgccaggctccagaggacgaagggactctgttgccccacactaacttgccctgtcccaatcccagaaacccaggaccaagctgtgcctgggctccaaggacaggaacactggtccccccatcacactcacccctaagtgggctgggagccaggcagggccagggcagctgggtgggggccggggctggccctgggacccccaggaacgctaagacacaggctccagtaggggctgttgcctccaataaagcagcagtgagctttgccttggtggctggggcttgattgggaaggaggggattaccagcttactgggtgcccatgctgatgtctaagtggtgaccgcagcagtacccgggaaccccaacagttggttgtcttgtcttccagggtgcaggtcactgagtgacttccccagggtgcacagcgagtaacagatcaggacccaaacttgggcagtctgggctgggagcccacaccccactcaccagttctgctgcctcaggtcaggccagggcagtgctgctgcagagctagaaggccctgcagctacagctgcttcattccctgcattagtgcctggttactgggtacctcctgagtggctgtccccgttccagaacttgcatacactgagcgggctacagagctagaaggccctgcagctacagctgcttcattccctgcattagcgagcagttattgggtacctcctgcatgcctggtcccattccagacaggggcctctggcctggctgagttcacagcccagtctggggacagctgggtatgaggtgcttacggcacagtgtccagggcagctgggtgtgcagggactgggggctcccggaagattttttggaggaagtaacagctacgatgggatgggaacagtggaccctaagcaggccaagggtgcgtagggacggtggtacccagatgcccaagtcttccaggcaatacctggctcaggcccagccccaatccatccccttactttctgccatggagttccagcaggtcactctccctggcacaccttccaggctggatttttaatgaaacagactcagggaggtaggggctggcagggaccctagaatccttgtgatttttcttagcaccttatgtcagggaaacctaaactgaggtcagcacttgggcccactgacagtgactgactgggggagaaggtcctgcagcccccttcccctgggtgtgttctggggacctgtggtttgctggcggaaacaagtgatgaggctggttagcggatgtgggaggctgtgaccccagggggccatagggtgcggtggaactgcaggccctgcagatgacggcagccagctgcttccaggaaccaggtgtccaaggccacctctgcaggggtttcctcttcagcctgcctggggtgagaggtcagtgcaccacagccgaggctggagcacagggagcttctgttgttctgatctatctctggaaaaccagccattcctcctccctgcagtcagaattctttgccctgtctgacctgaacttgcttagggagtcatgccactccccactgtggccatagtttctcttcctgtaaaattttattattttagttttttgtttttgagatgtagtctcaccctgtcgcccaggctggagtgcaatgccgtgatctccgctcactgccacctccgcctctctagttcaagcgattttcctgcctcagcctcccgagtagctgggattccaggcgcccgccaccacgcctggctaattttttgtatttttagtagagacgggattttatcatgttggccaggctggtctcgaactcctgacctcaggtgatctgcccaccttggcctcccaaagtgctgggattacaggcatgagccactgtgcctggccccttcctgtaaaatttttaaatggagaattgggtgcgagatgtggtttccagcctggtgcctggggtgctgagctagtgagtggtgcagtccaggacacctttgctttatgtcacttacacggtcacctggagccggctcaagtggctaaagcatcctggggcccagagccaggtgataggtccctctggccaactggacagttgaggcctgtggttacccgaagcccagctggggccctggtccagcctcgcctcccagactctgcacctgctagcacagctgtccacgtctgtgtgagctgctctaggccgagggcctcagtttcaagagtgtgttggggtgggatggggcaggccgtggtcctccagcatgaagaaggagccatgaggagttcccatgacctcccgagacttgccataagtgttctagtccacatataagggtagggttgggattaccatttactgaccacatctgtgaggtgccgagctgggtgcttgacatcatttgcttggagaagcagctgctagtagacccattttacaggtgagagaaccaagtctcacagaggcctgggttcaagtcccacctctgccactaactggcatgtgaccctatctatccttcactgctctgagcctagaccctggcccctgcctggctccctgccaggctccctgccacccctcacgacctctgatggtcgttgtgggggtctcttgcctggctcccagggctagggttagggctctggaggtgctttcactcaaccaagggggccacagcactggggagtgaaactgccccgcctcaccctgcgttgccctctgggtctgtgagggtgggctggcaggaggcctaggccttgccctaggggcagtcctgcttcctcattttatagatagggaaactgaggctttgggaggactcactgacatacctaccttcaagatgagttcaggtgggctcagttctggggcttgggaaaagggccccagtggctttgggaagcacccccagcccagggtgaaacatgcttcttctcttcctgtggttccatccgaaggattgtggtgagccccgtgccttcagttaataaagatttgtattgtgaaaagattttttcttttttttttgggacacagtctcactctgtcgcccaggctagagtggattggcgtgatctcggctcaatgcaaatctccagggttcaatcgattctcctgcctcaccctcccatgtagctgggattacagctgcctgccaaatttttgtatttttagtggaaccggggtttcaccatgttggccaggctggtcttgaactcctgacctcaactgatccgcccaccttggcctcccaagtgctgggattacaggcgcgagccacggcgcccagccttgaaaagatgtttttagaaccagaagaaacctcggttcccactgatccttctgggccacgttgtgcggagctcccctgctggttggggctcagcgcagccccagggaggtgcttcctgcacctcaggatgggcgagggtgggcattgggggagagggggacctgggacctgcggcttagttccctgaggcaggcagggcttattggggccatttcatagaaaggcagattgaagctcagcagggaagaggcttttgagggtgatccaggcgctggagggatggcctaggacaccagggtcacaccaggaacatgggagggccgtgcttgtctctagacgaggggaatgggggaagggccacaacctctgtttctgtgacccagcagcatcaagcccctcgctgggcacctcgcacacaccccctgccttatctctgcctgcacgccctgttccctccacctagactgcctgctgagggggcagtgccaggaggttgcctgtccttggggaagaggggcagtgaccctgtgaagatgcttgacagacaacccccaccacctcagaagtgtgtgtgagtggtgaacccttttaagccatcttccagccattctcactggagggagatttgatgggtacagagcagacccctacctgtctaccctccttcggacccctaggaagcttcgcaggccttccaggctgccagacagctgccctggcgttgccgtctgcttcttccctggccccactctgaggggctcagagctgaggcagaatccctttttcattcatttcctgcagaataaaacaacatacagaaaagtgaataaaacataaatgcacaacctaacacactgttaggaagtgaacgatctgcaaccaccatcaggaaatagttttgccagcacccaagtgccctcccctcacagtgtcacttccggcctctctgccctggcttatgtgagtcttgtgttcttgtttttctaaaaagtcttcagcacccaattatgcaggcattgcagtattttcctgtttctgtgctttatccccttgaatcatacagatgcaaattctggcagctggcttctttggctcgttattatgtctgtgagatttattcatgttgctgtgcgtagtatagtttgtgcatgttcattgctaaaaacttccattgtttggctgtatcgtagttcacagattcatttcactgtcagtcaagcttgtccaatgcatgcagcccaggatgcctttgaatgtggcccaacacaaatttgtaaactttcttaaaacattataaagatttttgtttgcgatttttttttttagctcatcagctatagttagtggtagtgtattttatgcgtgacccgagacagttcttccggtatggtccatggaagccaaaagattggacatgcctgctgtagatggacagttggtttgtttctagtttggggtaactacacacaatgctgctagcaacagttttgtccatgtctctgatgcacgtgtgttttttgcaaatggtgcacaaatttttctagggtttgtactcaggagtctgactcctgggttctagggtatgaagatctttctaaatattgttctagtttacgtgcccaccagcagtaaaacagaattcccttgccttcccatccttggcagacatttcacttttgccagtctggtggggtgtatagttatggccttaatttgcatttagctaattaccaaggagattgagcatatttttatgtttttattaaccattttgattttgtctcctgtgaagtgtctatcatcttttgcccattttttaacttgttgtctttttctttttcttttctttttttttttttctgagacagggtctcactctgttgccctggctggagtgcagtggtgcaatctcagctcactgcagccttgagtcaggctcaggtgattctctcacctcagcctcccaagtagctgggaccacaggcccacaccaccaagcccagctaattttttgtatttttaagtagagacgggtttcatcatgttatgcaggctgctctcaaactcttgagctcaagcgatctgctggcctcagcctcccaaagttgggattataggcgtgagctaccagattttttcttattaatctaataattctttgtatagtcttgatattatccataatgtgtattgcaaatatcttctctaactctggcttgactgtttatggtgtcctttttttttggggggggttttttgagacaaggtcttgctctgtcacccaggctggagtgttatggcacaatcttggcttattgcagcctcaattcctaggcttaaacagtcctcccacctcagcctcctgagtagccggaactacagtcacgcacttccatgtccagataattttttttttttttttagagataggatcttactatgccccagctggtctcaaactcctagactcaatgagcctcccatcttgacctcccaaagtgctgggagtacaggcatgagccactgtgcatgccagttcttatttttaatgcagttgaattgatcagtgttttcattttggttagtgctttttgtggcttaagaaattctttccaggctgggtacagtggctcacacctgtaatgccagcactttgggggcagaggcaggaggattacttgagctcaggagtttgagaccaacctggacaacatggcgaaacaccatctctacaaaaaatacaaaaattagctggacatggtggtgcgtgcctgtagtcccagctactcaggtggctggggtgagaggattgcttgagcccagaaggtcaaggctgcagtgagctgtgattgtgccactgcacttcagcctgtgagacagagtgagaccctatctcaaaaaaaaccaaaaaaaaaaaaaaaaaaaagaaaaccactgaaattatttccactccaaggtcatgaagatagtctcttagattatattctgaaatccttataaatgtaaatttcatatttaggcctttaattcacctagatttggttttttgcatatggtgtgaggtaaggattcactttcatttttttctctccatagggttacacacctgtcctatcattgtttgtaatctaactttctgcgcccatctgcaatgccacctctgtcatatgtccacatatgacatatgtagatctgttgttggattctttcctctgttccattagtctgtctgttcttgtgccaatatcaagctgtcttcattattatcaattatgtattgagatctgataaagtaagtcttttccaccttatttttcttctttgagagtgtcttgactattctggctctttgtattttcatgtaaggtttttctcccatataagttttaaaatcagcttgtcaattccaacaacaatgatgcacttgatagtttgggaatttattatagctatcaatcagttttgggaaaattgacgtctttacaatattgagttttctgattcatgaacatggtttacctctctttccatttgggtcttctttaaggtttaccaataggattttatatttttgtccattgtggtcttgcttatcttaagtttgatttgtaaatattttatgtttcttttagtctattgtaaattgtgtatttttaatttcatttttttttttgttaatagcatataaaacacaccttgtcttttaactggagcattttgtccattgtgtatttaatgtaattaaatctaccatcttattttatgcta

SEQ ID NO: 59203 - DNA, 2265 bp, Artificial Sequence
  derived and/or modified sequence
gggcgcgggcgggacggagctgcggcggcggcgggtcccgcgggcgggagcgcctggcggccgagtcaagccgccgcctcgacccagggcccgcgggccaggagagcgctcggcggcttcatggcggctgaagagatgcattggcctgtccctatgaaggccattggtgcccagaacctgctaaccatgcctgggggcgtggccaaggctggctacctgcacaagaagggcggtacccagctgcagctgctgaaatggcccctgcgctttgtcatcatccacaaacgctgcgtctactacttcaagagtagcacctctgcctccccgcagggcgccttctccctgagtggctataaccgggtgatgcgggcggctgaggagaccacgtccaacaacgttttccccttcaagatcatccatatcagcaagaagcaccgcacgtggttcttctcggcctcctccgaggaggagcgcaagagctggatggccttgctgcgcagggagattggccacttccacgaaaagaaagacctgcccttggacaccagcgactccagctcggacacagacagcttctacggcgcagttgagcggcctgtggatatcagcctttccccgtaccccacggacaatgaagactatgagcacgacgatgaggatgactcctacctggagcctgactccccggagcccggaaggcttgaggatgccctgatgcacccaccggcttacccaccacccccagtgcccacgcccaggaagccagccttctctgacatgccccgggcccactcctttacctccaagggccccggtcccctactgccacccccgccccctaagcacggcctcccagatgttggcctggctgctgaggactccaagagggacccactgtgcccgaggcgggctgagccttgccccagggtacctgctaccccccgaaggatgagcgatccccctctgagcaccatgcccaccgcacccggcctccggaaacccccttgcttccgggagagtgccagccccagcccggagccctggacccctggccacggggcctgctccacttccagtgctgccatcatggccactgccacctccagaaactgtgacaaactcaagtccttccacctgtccccccgaggaccacccacatctgagcccccacctgtgccagccaacaagcccaagttcctgaagatagctgaagaggaccccccaagggaggcagccatgcccggactctttgtgccccccgtggctccccggcctcctgcgctgaagctgccagtgcctgaggccatggcgcggcccgcagtcctgcccaggccagagaagccgcagctcccgcacctccagcgatcaccccccgatgggcagagtttcaggagcttctcctttgaaaagccccggcaaccctcacaggctgacactggcggggacgactcggacgaggactatgagaaggtgccactgcccaactcggtcttcgtcaacaccacggagtcctgcgaagtggaaaggttgttcaaggctacaagcccccggggagagccccaggatggactctactgcatccggaactcctctaccaagtcggggaaggtcctggttgtgtgggacgaaacctctaacaaagtgaggaactatcgcatttttgagaaggactctaagttctacctggagggcgaggtcctgtttgtgagtgtgggcagcatggtggagcactaccacacccacgtgctgcccagccaccagagcctgctgctgcggcacccctacggctacactgggcctaggtgatggcagtccatgtggctgccaggccaaggcagtcacaggggccctgaccccaggccacacagacggacatgggcccacatgggagggtgagcaggagcaaggctgtgcttgcctagggcctctgtgatggacatctcgtaggacccagccagtctcatccagcaggttgggttctagggctgaaccaggcgccaggctccagaggacgaagggactctgttgccccacactaacttgccctgtcccaatcccagaaacccaggaccaagctgtgcctgggctccaaggacaggaacactggtccccccatcacactcacccctaagtgggctgggagccaggcagggccagggcagctgggtgggggccggggctggccctgggacccccaggaacgctaagacacaggctccagtaggggctgttgcctccaataaagcagcagtgagctttgccttg

SEQ ID NO: 59204 - DNA, 1770 bp, Artificial Sequence
  derived and/or modified sequence
atggccagcctgggccccagaacccccgcccccagcagaagcagaggcagaagagccatgtgctgggtgagcaccatcagcttcatggccgccgaggagatgcactggcccgtgcccatgaaggccatcggcgcccagaacctgctgaccatgcccggcggcgtggccaaggccggctacctgcacaagaagggcggcacccagctgcagctgctgaagtggcccctgagattcgtgatcatccacaagagatgcgtgtactacttcaagagcagcaccagcgccagcccccagggcgccttcagcctgagcggctacaacagagtgatgagagccgccgaggagaccaccagcaacaacgtgttccccttcaagatcatccacatcagcaagaagcacagaacctggttcttcagcgccagcagcgaggaggagagaaagagctggatggccctgctgagaagagagatcggccacttccacgagaagaaggacctgcccctggacaccagcgacagcagcagcgacaccgacagcttctacggcgccgtggagagacccgtggacatcagcctgagcccctaccccaccgacaacgaggactacgagcacgacgacgaggacgacagctacctggagcccgacagccccgagcccggcagactggaggacgccctgatgcacccccccgcctacccccccccccccgtgcccacccccagaaagcccgccttcagcgacatgcccagagcccacagcttcaccagcaagggccccggccccctgctgcccccccccccccccaagcacggcctgcccgacgtgggcctggccgccgaggacagcaagagagaccccctgtgccccagaagagccgagccctgccccagagtgcccgccacccccagaagaatgagcgacccccccctgagcaccatgcccaccgcccccggcctgagaaagcccccctgcttcagagagagcgccagccccagccccgagccctggacccccggccacggcgcctgcagcaccagcagcgccgccatcatggccaccgccaccagcagaaactgcgacaagctgaagagcttccacctgagccccagaggcccccccaccagcgagcccccccccgtgcccgccaacaagcccaagttcctgaagatcgccgaggaggacccccccagagaggccgccatgcccggcctgttcgtgccccccgtggcccccagaccccccgccctgaagctgcccgtgcccgaggccatggccagacccgccgtgctgcccagacccgagaagccccagctgccccacctgcagagaagcccccccgacggccagagcttcagaagcttcagcttcgagaagcccagacagcccagccaggccgacaccggcggcgacgacagcgacgaggactacgagaaggtgcccctgcccaacagcgtgttcgtgaacaccaccgagagctgcgaggtggagagactgttcaaggccaccagccccagaggcgagccccaggacggcctgtactgcatcagaaacagcagcaccaagagcggcaaggtgctggtggtgtgggacgagaccagcaacaaggtgagaaactacagaatcttcgagaaggacagcaagttctacctggagggcgaggtgctgttcgtgagcgtgggcagcatggtggagcactaccacacccacgtgctgcccagccaccagagcctgctgctgagacacccctacggctacaccggccccagatag

SEQ ID NO: 59205 - protein, 1024 aa, Artificial Sequence
  derived and/or modified sequence
MSNAKERKHAKKMRNQPTNVTLSSGFVADRGVKHHSGGEKPFQAQKQEPHPGTSRQRQTRVNPHSLPDPEVNEQSSSKGMFRKKGGWKAGPEGTSQEIPKYITASTFAQARAAEISAMLKAVTQKSSNSLVFQTLPRHMRRRAMSHNVKRLPRRLQEIAQKEAEKAVHQKKEHSKNKCHKARRCHMNRTLEFNRRQKKNIWLETHIWHAKRFHMVKKWGYCLGERPTVKSHRACYRAMTNRCLLQDLSYYCCLELKGKEEEILKALSGMCNIDTGLTFAAVHCLSGKRQGSLVLYRVNKYPREMLGPVTFIWKSQRTPGDPSESRQLWIWLHPTLKQDILEEIKAACQCVEPIKSAVCIADPLPTPSQEKSQTELPDEKIGKKRKRKDDGENAKPIKKIIGDGTRDPCLPYSWISPTTGIIISDLTMEMNRFRLIGPLSHSILTEAIKAASVHTVGEDTEETPHRWWIETCKKPDSVSLHCRQEAIFELLGGITSPAEIPAGTILGLTVGDPRINLPQKKSKALPNPEKCQDNEKVRQLLLEGVPVECTHSFIWNQDICKSVTENKISDQDLNRMRSELLVPGSQLILGPHESKIPILLIQQPGKVTGEDRLGWGSGWDVLLPKGWGMAFWIPFIYRGVRVGGLKESAVHSQYKRSPNVPGDFPDCPAGMLFAEEQAKNLLEKYKRRPPAKRPNYVKLGTLAPFCCPWEQLTQDWESRVQAYEEPSVASSPNGKESDLRRSEVPCAPMPKKTHQPSDEVGTSIEHPREAEEVMDAGCQESAGPERITDQEASENHVAATGSHLCVLRSRKLLKQLSAWCGPSSEDSRGGRRAPGRGQQGLTREACLSILGHFPRALVWVSLSLLSKGSPEPHTMICVPAKEDFLQLHEDWHYCGPQESKHSDPFRSKILKQKEKKKREKRQKPGRASSDGPAGEEPVAGQEALTLGLWSGPLPRVTLHCSRTLLGFVTQGDFSMAVGCGEALGFVSLTGLLDMLSSQPAAQRGLVLLRPPASLQYRFARIAIEV

SEQ ID NO: 59206 - DNA, 3075 bp, Artificial Sequence
  derived and/or modified sequence
atgtccaatgccaaggagcggaagcatgccaagaagatgcgcaatcagccaaccaatgtgacactcagctccggatttgtggcagatcgtggagtcaaacaccattcagggggagaaaaaccttttcaagcccaaaaacaagaaccacaccccgggacttcccgccagcggcaaacacgcgtgaacccccattcactgcccgatcctgaggtgaacgagcagagtagctccaagggcatgttccggaagaagggagggtggaaggccggccctgagggtactagccaggaaattcctaaatacatcacggcgtcaactttcgcacaggccagagctgcggagatcagtgctatgctgaaggctgtcacacagaagtcctccaattccctggtgtttcagactctgccacgccatatgcgacgccgagctatgtcacacaacgttaagagactgccccgaagattgcaggagattgcccagaaagaggccgagaaagcagtccatcaaaagaaagagcactcaaagaacaagtgtcataaggccagaagatgtcacatgaacagaaccttggaatttaataggcgtcaaaaaaagaatatttggctggaaacccacatttggcacgccaagcgtttccacatggtgaaaaagtgggggtactgtttgggcgagcgccctactgttaagtcccaccgggcatgttatagggctatgaccaatcgttgtctcctacaggacctgagctactactgttgtcttgagctcaaaggaaaagaggaagaaattctgaaggctctctccggcatgtgtaacatagacaccgggttaaccttcgcagccgtgcactgcctatcgggcaaacgccagggatccctggttctgtaccgcgtcaacaaataccctcgggaaatgctgggcccagtaacatttatatggaagtctcaacgtacaccaggcgaccctagtgagtctaggcagctttggatatggctgcatccaactctgaagcaggacatactcgaagagatcaaggctgcctgtcaatgtgtggaaccaataaaatctgccgtatgtattgccgaccccttaccaaccccttcccaagagaaaagccagactgaactgcccgacgaaaaaattggcaagaaaaggaagaggaaggacgacggggagaatgctaaacccattaaaaaaatcatcggtgatggtacaagggacccctgcctgccatacagttggattagcccaaccactggcattattatctcggatctgacaatggaaatgaatcggttcagactgataggccctctgagtcatagcattcttaccgaggctattaaagcagcctccgtccataccgtaggcgaggacacagaggaaaccccccataggtggtggattgagacgtgcaagaaaccagactctgtgtcactacattgccgccaggaggcaatcttcgagctcctggggggcataacctcccccgccgagatacccgccggaaccatactggggctgactgttggcgaccctcgcataaacctccctcaaaaaaaaagtaaagcactgcctaatcctgagaagtgtcaggataatgagaaagtgcggcaactgctcctggagggcgtgcctgtggagtgtacgcactcctttatttggaatcaggatatctgtaaaagtgtgactgagaataaaatcagcgatcaagatcttaacagaatgcggagcgaacttctggtgcccgggtctcagctgatcctcgggccccacgaatcaaagatacccattctacttattcagcagccagggaaagtaacaggagaagatcgcttgggctggggatcagggtgggatgtactgttacctaagggatgggggatggcattctggatccccttcatttaccggggagtgcgagtcggcgggctcaaagaatccgcagtgcactcacagtacaagaggtcacctaacgtacctggagatttccctgactgcccggctgggatgctttttgctgaggaacaggcaaagaatctcttagagaaatacaagcgccgcccccctgctaagcgtcctaactacgtaaaacttggcacactcgccccattctgctgtccgtgggagcagctgacccaggattgggaaagccgtgtgcaagcatacgaggaaccttcagtggcttcctcccccaatggaaaggagagtgatctgcgccgtagtgaagtgccttgcgctccgatgcccaagaaaactcaccagccttccgacgaggtaggcacctctattgagcaccctagggaggctgaggaggtgatggatgctgggtgtcaggagtcagctggcccagaacggattaccgaccaagaggcttccgaaaaccatgttgccgctacagggtcccacctgtgcgtgctacgcagtcggaaactccttaaacaattgagcgcgtggtgtggcccctcgtctgaagattctcgaggcggtaggcgggcccccggcagaggtcagcaaggtctcacacgtgaggcatgtctgagtatcctgggccacttcccgagagctctcgtgtgggtaagcttaagcctcctgtctaaaggtagtccagagccccacaccatgatctgtgttccagcgaaagaggacttcttgcagttgcatgaggattggcattactgcggtcctcaggaatcaaagcacagcgatccctttagatcaaagattctgaagcagaaagagaaaaagaaaagagagaagagacagaaacccgggagggccagtagcgacggacctgcaggggaggaaccagtggccggacaggaggcactgacgctcggcctttggtccggccccctccctcgtgtgaccctgcattgcagccggacactgctcggatttgtcacccagggagattttagtatggcagtggggtgcggtgaggctctgggctttgttagtcttactgggctactggatatgctgtcttcccagcccgcggcccaacggggtttggtcttactccggccccctgcttctctacagtatagatttgcccgtattgccatagaggtatag

SEQ ID NO: 59207 - DNA, 3075 bp, Artificial Sequence
  derived and/or modified sequence
atgagtaatgccaaagagcgaaaacacgccaagaaaatgagaaaccagccaaccaacgtgacactttcttctggattcgtcgctgaccggggagtcaagcaccacagcggtggtgagaagccgtttcaggcgcagaagcaggagcctcatccaggtacctctcggcaacgccagacacgcgtgaacccgcattctctgccggacccagaggttaatgaacagagctcatctaaaggtatgtttagaaaaaaagggggctggaaggcggggccggagggaactagccaggagattccaaagtacattacagcttctacatttgctcaagctagggctgcagagatatccgctatgcttaaggccgtcacccagaagtcttcaaactctttagtgtttcagacgctccccaggcatatgcgacggagggcaatgagtcacaacgtcaaacgccttccaaggcggttgcaagagattgcgcagaaggaagcagaaaaggcagtccatcagaaaaaggagcactcaaaaaataagtgtcacaaagcccgacgctgccacatgaataggacacttgagttcaaccgtcgacagaagaaaaatatctggctcgagacacacatctggcatgccaaacgatttcacatggttaagaagtggggctactgcctgggagagaggccaacagtgaaaagccacagagcgtgctaccgcgccatgaccaaccgctgcctgcttcaggatctgtcctattattgttgtcttgaactcaagggcaaagaagaagaaatcctgaaagcattgtccggtatgtgtaatatagacacaggacttaccttcgcagctgtgcattgtctctcaggaaaacgacagggctccctcgtgttgtatagagtgaataagtatccgagggagatgctgggaccagttacttttatctggaaaagtcaaaggacacctggggatccatcagaatcgcgacagttgtggatttggctacatcccacgctcaagcaagatattctggaagaaatcaaggcagcctgccagtgtgtcgagccaatcaagagcgccgtttgcattgccgaccccctgccgaccccatctcaggagaaatctcagaccgaactgccagacgaaaagattgggaaaaagagaaaaaggaaggacgacggtgagaacgcaaagcccattaaaaagataatcggggatggtacccgcgacccttgcctgccctattcttggatttcgcccacaaccggcatcattatatctgatcttacaatggaaatgaatcgtttcaggttgattggtcctcttagccacagcattctgaccgaggctatcaaggccgcttccgttcacaccgtgggggaggatacggaagagaccccccaccggtggtggatcgagacatgcaagaaacctgattcagtatccctgcactgccggcaagaagccatttttgaactcctggggggcattacctcacccgcggagattccggccgggaccatcttgggacttacggtgggagatccacgcatcaatctgcctcagaagaaaagtaaggctcttccaaacccagaaaagtgtcaagacaatgaaaaagttcgacagctattgctggaaggggtaccagttgagtgtacacactccttcatttggaaccaagatatatgtaagtctgttactgaaaataagatctctgatcaagatcttaacaggatgagaagcgagttgttggtccccgggtctcagctgatactgggcccacacgagtccaaaattccaatacttctgatccagcagccaggcaaggtgaccggcgaagacagactgggctggggaagcgggtgggacgtgctgttaccaaagggttgggggatggctttttggattcccttcatctatcgaggagtaagggttggcggcctgaaggaatcagctgtgcactcccaatacaagaggtcccccaacgtgcctggggattttcccgattgcccggccggcatgttatttgccgaagaacaggcaaagaacctgctggagaaatataagcgacgtccaccggccaaaagacctaactacgtcaagctcggaaccctggcccccttttgttgtccatgggaacagctaactcaggattgggagtccagggtccaggcctatgaagagccatccgtggcctctagccctaacgggaaagagtccgatctgaggaggtccgaggtaccatgcgctcccatgcctaagaaaactcaccaaccgagcgacgaggtgggaacctccattgaacacccccgggaggctgaggaggtgatggacgcaggatgtcaggaaagtgccggcccagagcgcataactgatcaggaggcgtccgagaatcacgtcgccgctacaggaagtcacctatgtgtcctcagatccagaaagctcctcaaacagttatctgcttggtgcgggccctcatcagaggactcccgaggagggcgcagagctccaggccgtggccaacagggccttacacgtgaggcttgtctgtccattttaggtcatttcccaagagcacttgtttgggtcagcctctccttactaagcaaagggtctcctgagccacacaccatgatttgcgtgcctgccaaagaggatttcctgcagctacacgaagattggcattactgtggtcctcaggagagcaagcactcagaccccttcaggagcaagattctcaagcagaaagagaaaaaaaagcgggaaaagagacaaaagcctggacgagcatcatccgatggacccgctggggaagagcccgtggcggggcaggaagctctgacgcttggactttggtccggtcccttgcctagagtgacgttgcactgctctagaaccctgctgggcttcgttacccaaggcgacttctctatggccgtcggctgtggagaagccttaggttttgtctcccttacaggtctgttagacatgctatcctcacaacctgcagcccagaggggactggtcctccttagacccccagcctcgttacaatatagattcgccagaattgccatcgaagtgtag

SEQ ID NO: 59208 - DNA, 3075 bp, Artificial Sequence
  derived and/or modified sequence
atgagcaatgccaaggagaggaagcacgccaagaagatgaggaaccagcccaccaacgtgaccctgagcagcggctttgtggccgacagaggagtgaagcaccacagcggcggggagaagcccttccaggcccagaagcaggagccccaccctggcaccagccggcagaggcagaccagggtgaacccccacagcctgcctgaccctgaggtgaatgagcagagcagcagcaagggcatgttcaggaagaagggcggctggaaggccggccctgagggcaccagccaggagatccccaagtacatcacagccagcacctttgcccaggcccgggctgctgagatcagcgccatgctgaaggctgtgacccagaagagcagcaacagcctggtgttccagaccctgcccaggcacatgagaagaagagccatgagccacaacgtgaagaggctgccccggcggctgcaggagatcgcccagaaggaggccgagaaggctgtgcaccagaagaaggagcacagcaagaacaagtgccacaaggcccggcgctgccacatgaacagaaccctggagttcaacagacggcagaagaagaacatctggctggagacccacatctggcacgccaagcgcttccacatggtgaagaagtggggctactgcctgggggagcggcccaccgtgaagagccaccgggcctgctaccgggccatgaccaaccgctgcctgctgcaggacctgagctactactgctgcctggagctgaagggcaaggaggaggagatcctgaaggccctgagcggcatgtgcaacatcgacaccggcctgacctttgctgctgtgcactgcctgagcggcaagaggcagggcagcctggtgctgtacagagtgaacaagtacccccgggagatgctgggccctgtgaccttcatctggaagagccagaggacccctggggaccccagcgagagccggcagctgtggatctggctgcaccccaccctgaagcaggacatcctggaggagatcaaggccgcctgccagtgtgtggagcccatcaagtctgctgtgtgcatcgctgaccccctgcccacccccagccaggagaagagccagacagagctgcctgatgagaagattggcaagaagaggaagaggaaggatgatggagaaaatgccaagcccatcaagaagatcattggagatggcacccgggacccctgcctgccctacagctggatcagccccaccaccggcatcatcatcagtgacctgaccatggagatgaaccgcttccggctgattggccccctgagccacagcatcctgacagaggccatcaaggccgcctctgtgcacacagtgggggaggacacagaggagaccccccaccgctggtggattgagacctgcaagaagccagacagcgtgtccctgcactgccggcaggaggccatctttgagctgctgggcggcatcaccagccctgctgagatcccagctggcaccatcctgggcctgactgtgggggacccccgcatcaacctgccccagaagaagagcaaggccctgcccaaccctgagaagtgccaggacaatgagaaggtgcggcagctgctgctggagggcgtgcctgtggagtgcacccacagcttcatctggaaccaggacatctgcaagtctgtgacagagaacaagatcagtgaccaggacctgaacaggatgaggtctgagctgctggtgcccggcagccagctgatcctgggcccccatgagagcaagatccccatcctgctgatccagcagcccgggaaggtgactggagaagatcggctgggctggggcagcggctgggatgtgctgctgcccaagggctggggcatggccttctggatccccttcatctaccggggcgtgcgggtgggcggcctgaaggagagcgctgtgcacagccagtacaagaggagccccaacgtgcctggggacttcccagactgcccagctggcatgctgtttgctgaggagcaggccaagaacctgctggagaagtacaagaggcggcccccagccaagaggcccaactacgtgaagctgggcaccctggcccccttctgctgcccctgggagcagctgacccaggactgggagagccgggtgcaggcctatgaggagcccagcgtggccagcagccccaacgggaaggagagtgacctgcggcgctctgaggtgccctgtgcccccatgcccaagaagacccaccagcccagtgatgaggtgggcaccagcattgagcacccccgggaggccgaggaggtgatggatgctggctgccaggagagcgctggccctgagcgcatcacagaccaggaggcctctgaaaatcatgtggccgccaccggcagccacctgtgtgtgctgcggagcaggaagctgctgaagcagctgagcgcctggtgtggccccagcagcgaggacagccggggcggccggcgggcccctggccggggccagcagggcctgacccgggaggcctgcctgagcatcctgggccacttcccccgggccctggtgtgggtgtccctgagcctgctgagcaagggcagccctgagccccacaccatgatctgtgtgcctgccaaggaggacttcctgcagctgcacgaggactggcactactgcggcccccaggagagcaagcacagcgaccccttccgcagcaagatcctgaagcagaaggagaagaagaagcgggagaagaggcagaagccaggccgggccagcagtgatggccctgctggggaggagcctgtggccggccaggaggccctgaccctgggcctgtggagcggccccctgccccgggtgaccctgcactgcagcaggaccctgctgggctttgtgacccagggcgacttctccatggctgtgggctgtggggaggccctgggctttgtgtccctgaccggcctgctggacatgctgagcagccagcctgctgcccagaggggcctggtgctgctgcggcccccagccagcctgcagtacagatttgcccgcatcgccatcgaggtgtag

SEQ ID NO: 59209 - DNA, 3244 bp, Artificial Sequence
  derived and/or modified sequence
gtgatctggaatggcccagatcccttaaatgtcaaatgcaaaagaaagaaaacacgccaagaaaatgagaaaccagcctaccaatgtgactctgtcctctggctttgtggctgacagaggtgtaaagcaccacagtggaggtgaaaaacctttccaagctcaaaaacaagagcctcatcctggaacttcacgacagcggcaaaccagagtcaacccccattctctgcctgaccctgaagtgaatgagcagtcttcctccaaagggatgtttagaaaaaagggaggatggaaagcaggtcccgagggcacgtctcaggagatccccaagtatataactgcttctacttttgctcaagcacgagctgctgaaatcagtgctatgttaaaagctgtgacccagaagtcttcgaattcactggtttttcagactctgccacggcacatgcgacgaagagccatgagccacaacgtcaaacgccttcccagacggttacaggagattgcccagaaagaggcggagaaagccgtacatcagaaaaaagaacattcaaaaaataaatgccataaagctcgaagatgtcacatgaaccggacgctagaatttaaccgtagacaaaagaagaacatttggttagaaactcacatctggcacgccaagcggtttcatatggtcaagaagtggggctactgccttggggagaggccaacagtcaagagccacagagcctgctatcgagccatgacgaaccggtgcctcctgcaggatttatcctattactgttgtttggagttgaaaggcaaagaggaagaaatactaaaggcgctttctggaatgtgtaacatagacacagggctgacgtttgcagcagttcactgcttgtctggaaagcgccaagggagccttgtgctttatcgggtgaataaatatcccagagaaatgcttgggcctgttacgtttatctggaagtcccagaggaccccgggtgacccttctgagagcaggcagctgtggatctggctgcatccaacccttaaacaggatatcttagaggaaataaaagcagcgtgccagtgtgtggaacccatcaaatcagctgtctgcatcgctgacccacttccaacaccatcccaagaaaaaagccaaactgaattgcctgacgagaaaattggcaagaaaagaaaaaggaaagatgatggagaaaatgctaaaccaattaaaaaaattatcggtgatggaactagagatccatgtctaccatactcttggatctctccaaccacaggcattataatcagcgatttgacgatggagatgaacagattccggctgattgggccactttcccactccatcctaactgaagcaataaaagctgcttctgtccacactgtgggagaggacacagaggagacacctcaccgctggtggatagaaacctgtaagaaacctgacagcgtttcccttcattgcagacaagaagccattttcgagttgttgggaggaataacatcaccagcagaaattccggcaggtactattctgggactgacagttggggatcctcgaataaatttgccccaaaagaagtccaaagctttgcccaatccagaaaaatgccaagataatgagaaagttagacagctgcttctggagggtgtgcctgtggaatgtacgcatagctttatctggaaccaagatatctgtaagagtgtcacagagaataaaatctcggatcaggatttaaaccggatgaggagtgaattgctggtgcctgggtcacagcttattttaggtccccatgaatccaagatacctatacttttgattcagcagccaggaaaagtgactggtgaagatcgactaggctggggaagtggctgggatgtcctactcccaaagggctggggcatggctttctggattccatttatttatcgaggtgtgagagtcggagggttgaaagagtctgcagtgcattctcagtataagaggtcgcctaatgtcccaggcgattttccagactgccctgccgggatgctgtttgcggaagagcaagctaagaatcttcttgaaaagtacaaaagacgccctcctgcaaaacggcccaactacgttaagcttggcactctggcacctttctgctgtccctgggagcagttaactcaagactgggagtcaagagtccaggcttacgaagaaccttctgtagcttcatctccaaatggtaaggagagtgacctaagaagatctgaggtgccttgtgctcccatgcctaaaaaaactcatcagccatctgatgaagtgggcacatccatagagcaccccagggaggcagaggaggtaatggatgcagggtgtcaagaatcggcagggcctgagaggatcacagaccaggaggccagtgaaaaccatgttgctgccacagggagtcacctctgcgttctcaggagtagaaaattactgaagcaactgtcagcctggtgtgggcccagttctgaggatagtcggggaggccggcgagctcccggcagaggccagcaaggattgaccagagaggcttgcctgtccatcttgggccacttccccagggccctggtttgggtcagcctgtccctgctcagcaagggcagccccgagcctcacaccatgatctgtgtcccagccaaggaggacttcctccagctccatgaggactggcattactgtgggccccaggaatccaaacacagtgacccattcaggagcaagatcctgaaacagaaagagaagaagaaaagggagaagaggcagaagccaggacgtgcctcttctgatggcccggcgggggaagagcccgtggctgggcaggaagctctgactctagggctgtggtcaggccctctgccgcgtgtgacgttgcactgctccagaactctcctaggctttgtgactcagggagatttttccatggctgttggctgtggagaagccctggggtttgttagcttgacaggcttgctggatatgctgtccagccagcctgcagcgcagaggggcttagtgctactgaggcctcccgcctctctgcagtatcgatttgcgaggattgctattgaggtgtgaatgcgtgcttgtatcccagcagggcatagataatacgttattattgtctgccaagttctacatgtggagaatctgcttctgctttaaaatatcatgtgaaactccctggaaacaagaataaaaaattatgtattatgcaga

SEQ ID NO: 59210 - DNA, 4719 bp, Artificial Sequence
  derived and/or modified sequence
ctccaggagctttggctcggtgggtactgtcgcggaggcttgtcattctgacccggggattcctcacagcgtctggcagaaatgtcaaatgcaaaagaaagaaaacacgccaagaaaatgagaaaccagcctaccaatgtgactctgtcctctggctttgtggctgacagaggtgtaaagcaccacagtggaggtgaaaaacctttccaagctcaaaaacaagagcctcatcctggaacttcacgacagcggcaaaccagagtcaacccccattctctgcctgaccctgaagtgaatgagcagtcttcctccaaagggatgtttagaaaaaagggaggatggaaagcaggtcccgagggcacgtctcaggagatccccaagtatataactgcttctacttttgctcaagcacgagctgctgaaatcagtgctatgttaaaagctgtgacccagaagtcttcgaattcactggtttttcagactctgccacggcacatgcgacgaagagccatgagccacaacgtcaaacgccttcccagacggttacaggagattgcccagaaagaggcggagaaagccgtacatcagaaaaaagaacattcaaaaaataaatgccataaagctcgaagatgtcacatgaaccggacgctagaatttaaccgtagacaaaagaagaacatttggttagaaactcacatctggcacgccaagcggtttcatatggtcaagaagtggggctactgccttggggagaggccaacagtcaagagccacagagcctgctatcgagccatgacgaaccggtgcctcctgcaggatttatcctattactgttgtttggagttgaaaggcaaagaggaagaaatactaaaggcgctttctggaatgtgtaacatagacacagggctgacgtttgcagcagttcactgcttgtctggaaagcgccaagggagccttgtgctttatcgggtgaataaatatcccagagaaatgcttgggcctgttacgtttatctggaagtcccagaggaccccgggtgacccttctgagagcaggcagctgtggatctggctgcatccaacccttaaacaggatatcttagaggaaataaaagcagcgtgccagtgtgtggaacccatcaaatcagctgtctgcatcgctgacccacttccaacaccatcccaagaaaaaagccaaactgaattgcctgacgagaaaattggcaagaaaagaaaaaggaaagatgatggagaaaatgctaaaccaattaaaaaaattatcggtgatggaactagagatccatgtctaccatactcttggatctctccaaccacaggcattataatcagcgatttgacgatggagatgaacagattccggctgattgggccactttcccactccatcctaactgaagcaataaaagctgcttctgtccacactgtgggagaggacacagaggagacacctcaccgctggtggatagaaacctgtaagaaacctgacagcgtttcccttcattgcagacaagaagccattttcgagttgttgggaggaataacatcaccagcagaaattccggcaggtactattctgggactgacagttggggatcctcgaataaatttgccccaaaagaagtccaaagctttgcccaatccagaaaaatgccaagataatgagaaagttagacagctgcttctggagggtgtgcctgtggaatgtacgcatagctttatctggaaccaagatatctgtaagagtgtcacagagaataaaatctcggatcaggatttaaaccggatgaggagtgaattgctggtgcctgggtcacagcttattttaggtccccatgaatccaagatacctatacttttgattcagcagccaggaaaagtgactggtgaagatcgactaggctggggaagtggctgggatgtcctactcccaaagggctggggcatggctttctggattccatttatttatcgaggtgtgagagtcggagggttgaaagagtctgcagtgcattctcagtataagaggtcgcctaatgtcccaggcgattttccagactgccctgccgggatgctgtttgcggaagagcaagctaagaatcttcttgaaaagtacaaaagacgccctcctgcaaaacggcccaactacgttaagcttggcactctggcacctttctgctgtccctgggagcagttaactcaagactgggagtcaagagtccaggcttacgaagaaccttctgtagcttcatctccaaatggtaaggagagtgacctaagaagatctgaggtgccttgtgctcccatgcctaaaaaaactcatcagccatctgatgaagtgggcacatccatagagcaccccagggaggcagaggaggtaatggatgcagggtgtcaagaatcggcagggcctgagaggatcacagaccaggaggccagtgaaaaccatgttgctgccacagggagtcacctctgcgttctcaggagtagaaaattactgaagcaactgtcagcctggtgtgggcccagttctgaggatagtcggggaggccggcgagctcccggcagaggccagcaaggattgaccagagaggcttgcctgtccatcttgggccacttccccagggccctggtttgggtcagcctgtccctgctcagcaagggcagccccgagcctcacaccatgatctgtgtcccagccaaggaggacttcctccagctccatgaggactggcattactgtgggccccaggaatccaaacacagtgacccattcaggagcaagatcctgaaacagaaagagaagaagaaaagggagaagaggcagaagccaggacgtgcctcttctgatggcccggcgggggaagagcccgtggctgggcaggaagctctgactctagggctgtggtcaggccctctgccgcgtgtgacgttgcactgctccagaactctcctaggctttgtgactcagggagatttttccatggctgttggctgtggagaagccctggggtttgttagcttgacaggcttgctggatatgctgtccagccagcctgcagcgcagaggggcttagtgctactgaggcctcccgcctctctgcagtatcgatttgcgaggattgctattgaggtgtgaatgcgtgcttgtatcccagcagggcatagataatacgttattattgtctgccaagttctacatgtggagaatctgcttctgctttaaaatatcatgtgaaactccctggaaacaagaataaaaaattatgtattatgcagatgatgaaatgtttacatcattccagtaatgtcattgattttcatctttccctgtccttgctgtaatacttttaaattatttggccaaaagctttgtattatgatctcttggtctgtgtagttgtggctgaaaataatgagaagctctacgagttatcatcccctttttttgttagaaacaaagggcttgtcaggtctatttgaaaaacctcatagtcatgtgataagcaacaatagatgtttaatgatttcactgttatagcagaagacaagagaagacgcttggcctctgtacatgaaatatgggctcctgatggacctcattcaattctgtactgtgatttccatgccgaacaactcaagccttaaagagagaaatcatggacaactgatttctgcctgttttcaggcaggcacagtttatggcgtcagtgctaggctggaattagaaagtgggggtctatgacgtggacttcctgactctttgatctctttgttgttgaccaacacttgatcctactagttacttaatttttttaagtaaaaaattattattattttgtttctgcaaagattttctcaaagccatagaggagcatttctcagaatatgttctatgatatgtgtcacctaaaaaagtaagagattccaaggtcaggttgatatggaaactctaggttaaataaagttaagcatttctttatgaaagaacttctggaaacttccatgtgataatgtgcattgcggatctctaggaaggaaatgatagtgtatagtattttctaaatacttgtgattcctaaagttctcttacaaggagccctttgtaggaccagtgttcttagtagcgcgctttgggcagtgtggctgtgtagtgcatagctacctctgcaaggtgataactaagccggcaagctgcctttcaacactcatgcagtcacgttgtccacctgagattctcaacagggtataaaaggaaggtctcatcttgcctcacaggaagagtgggctcagtgtggcttttttccaactatggagaaactcagtgctcatctactttaagtttccacatatggcttgctcatagccttggtccttacctttcctgccataactttctagaagagcttaatgggattttttttctaaaaaatgtaaatatgcagttaggcattattttatgtaaatgcattgggtttttactgtagcatttggcactaaatggctttgggggtgatgaggtggggaaggatacagcaggtggtacagtagtcaggaagtacctgccaccaatgagatgtctgatgctttgcctcttaccatgcctctgaatgtctttggatccaacccagatgagactgaaaaaaaaaaaacagtgtaactaagtggcatctgtaaacagaataaatgaaaatgtcacctg

SEQ ID NO: 59211 - DNA, 3075 bp, Artificial Sequence
  derived and/or modified sequence
atgagcaacgccaaggagcggaagcacgccaagaagatgcggaaccagccgaccaacgtgacactatcttctgggttcgtcgccgatcgcggagtgaagcatcattccggaggcgaaaagcccttccaggcacagaaacaggaaccgcaccccggaacatccaggcaaagacagacacgtgttaacccacactccctgccagaccccgaggtgaacgaacagtcgtcttcgaagggcatgttcaggaagaagggaggatggaaggctggaccagagggtactagccaggaaataccgaagtatatcaccgcaagcacatttgcccaggctagagcggccgagatcagcgcgatgctcaaggccgtgactcagaagagtagcaacagcctcgtgttccagaccctgccaagacacatgcggcggagggccatgagccataatgtcaaacggttgcccaggaggttacaagagatagcacaaaaagaggccgagaaggccgtccatcagaagaaagagcactcaaagaataagtgccataaggccagaaggtgccatatgaacagaacactggaatttaatagaaggcaaaagaaaaacatttggcttgaaacccatatctggcatgccaagcgctttcacatggtgaaaaaatggggatattgcctgggtgaacgaccaacggtgaagtctcatagggcctgttatagagccatgaccaacaggtgcctgctccaggatttatcatactactgttgtctggagctgaaaggtaaagaagaggagattctgaaagcattatctggtatgtgcaacatcgataccggcctgaccttcgccgctgtgcattgcctttcaggcaagaggcagggctcactggtgctctaccgcgttaataagtaccccagagaaatgctaggaccagtgacattcatttggaagtcacagaggacgcccggcgacccaagcgaatcccgacagctgtggatatggttgcaccctaccctaaagcaggacatcctggaggaaatcaaggcggcttgccagtgtgttgagccaataaagagcgctgtctgtattgccgatccccttcccacccccagccaagagaaatctcaaacggagctaccagatgagaaaatcggaaaaaagaggaaacgaaaggacgacggcgagaacgccaagcccatcaagaagatcataggggacggtaccagagatccctgcctcccttatagctggattagtccgaccactggtatcatcatatctgatctgacgatggagatgaataggttcaggctgatcgggcctctctcccattccatattgacagaagccatcaaagctgcatctgtccacacagtaggggaggacactgaagaaacacctcacagatggtggattgaaacttgcaagaaacccgatagcgtgagccttcattgccggcaggaagccatctttgagctgctgggcgggataacctctcctgctgaaattccagctggcaccatcctgggtttaactgttggtgaccctagaatcaatctgccccagaagaagtctaaggccctgcccaatcctgagaaatgtcaggacaacgagaaggtcaggcagctcctccttgaaggtgttcctgtggagtgtacccattcttttatctggaatcaggacatatgcaaatcagtcacagaaaacaagatcagcgaccaagacctcaaccgcatgcgttcagagctgctggtgcctggaagccagcttattttgggacctcacgaaagcaaaataccaatccttctaatacagcagcccggcaaggtcaccggagaggaccggctgggttggggatctggctgggatgttttgctccctaaagggtggggcatggcattttggattccattcatttacagaggagtgcgagtaggcggtctcaaagagtcggctgttcactcccagtataagcgtagcccaaatgttcccggggatttcccagactgtccagccggcatgctcttcgcggaagagcaagccaaaaatctgctcgaaaagtacaaaagacgcccgccagccaagaggcccaattatgtaaagttaggcaccctggcccccttctgttgcccttgggagcagcttacacaggactgggaatcccgtgttcaggcttacgaggagccttccgtcgctagtagcccgaacggtaaagaatcggacctgaggcggtcagaagtaccatgcgccccaatgcctaaaaaaacccatcaaccctctgatgaggttggtacctccatcgaacatccgagggaggctgaggaggtcatggatgcgggctgccaggagagtgcaggtcctgagcgaattactgaccaagaagcctccgagaatcatgtcgccgcaaccggatcacacttgtgtgtcctgagaagcaggaagcttttaaaacaactctccgcatggtgcggtccttcgtctgaggacagcagggggggcaggagggcgcccgggaggggacaacagggccttaccagagaggcctgtctcagcatattaggccacttcccgcgcgcactggtttgggtatctctttccctactctcgaagggttcccccgagcctcacaccatgatttgcgtaccagccaaagaggactttctgcaactccacgaggactggcactactgtggtccccaagaaagcaagcatagtgacccctttaggtctaagattcttaagcaaaaagaaaagaagaagcgagaaaagcgccagaagccaggacgcgctagctctgacgggcctgcaggtgaggagccagtcgccggacaggaggctcttacactcggcctttggagcggccctttacctcgcgtcactctccactgctcccggacacttctggggtttgtcactcaaggggatttctctatggccgtcggatgcggggaggccctcggatttgtttcactgactgggttactggacatgcttagtagccaaccagccgcgcagcggggacttgttctgctgagaccccccgcgtccttgcaatatcgctttgctcggatcgctatagaggtatag

SEQ ID NO: 59212 - DNA, 3075 bp, Artificial Sequence
  derived and/or modified sequence
atgagcaacgccaaggagcggaagcacgccaagaagatgcggaaccagcctactaatgtgactttatcctcagggtttgtcgcagacagaggagtaaaacatcactccgggggcgagaaaccttttcaggcgcagaagcaggagccgcaccccgggacttctcgacaacgccagaccagagtcaatccccactccctaccggatcccgaggtaaatgagcagagttcttctaagggcatgttcagaaaaaagggtggttggaaggcgggaccagaagggacctctcaagaaattccgaagtacataaccgcctcaaccttcgcccaggcaagggccgcagaaatttcggcaatgctaaaggccgtgactcagaagagtagcaactccctggtattccagacattgccaaggcacatgaggaggagagctatgagccacaacgtcaaaaggctaccacggcgcttgcaagagatcgctcagaaggaggccgaaaaagctgttcatcagaaaaaggagcactcaaaaaacaaatgccataaagcacggcgctgccacatgaataggactcttgagtttaatagaaggcaaaaaaagaacatttggttagagacccacatttggcacgctaagagattccatatggtcaagaaatggggatattgcctgggtgagcggccgacagtgaaatcacaccgggcctgttaccgagctatgaccaaccgatgtctactccaggacctctcttactactgctgtttagagcttaagggcaaggaggaggagattctgaaagctttatctggcatgtgcaatatcgataccgggctgactttcgccgccgtccattgcctaagcggcaaaaggcaaggctcattggttttataccgggtgaataaatatcctagggaaatgttaggccctgtaacgttcatttggaaatcccagagaactcccggagacccttccgagagtaggcagctttggatctggctccatcccacactgaaacaagatatcctggaggagatcaaggctgcgtgccaatgcgtagaaccaattaaatctgctgtttgcatcgccgacccactcccgacaccctctcaggaaaaaagccagacggagctgccagatgaaaaaatcggcaagaaacggaagaggaaagatgacggtgaaaacgcaaagccaattaagaaaatcatcggagatgggactcgtgatccttgtcttccctacagttggatctccccaaccacagggataatcatctcagatctcacaatggagatgaaccgctttcgcctgatcggaccattaagccatagcatcctgaccgaggcgatcaaagccgcgtctgtgcacaccgtcggggaagatactgaggagaccccccatcgttggtggatagagacttgtaaaaaacccgacagcgtgagtctgcactgtcgtcaggaggccatattcgagctgttggggggaatcacatccccagcggagattccggcgggcactatactggggctgaccgtgggtgaccctaggattaacctgcctcagaaaaagagcaaagccttgcccaatccggaaaagtgtcaggataatgagaaggtccgacagctgctgttggagggagtacctgtggaatgcacccattcgtttatatggaatcaggacatatgtaagtctgtaaccgagaacaaaatctctgatcaggatctcaacaggatgcggtctgagctgctggtgcccggtagccagttaatcctgggtcctcacgaatctaagatacctatcctgcttatacagcagcctgggaaggtgaccggcgaagaccgattaggatggggaagtgggtgggacgtgctgctgccaaagggatggggcatggctttctggatccccttcatctacaggggcgtccgggtaggtggattaaaggaaagtgctgtacactcacagtacaagaggagcccgaatgtgcctggagactttcccgactgtccagcagggatgctgttcgcggaagagcaggcaaagaatctgcttgaaaaatataaacgccgtccccctgcaaagagaccaaactatgtaaaactcgggaccctggcacccttctgttgcccttgggaacaactgacacaagactgggaatcacgcgtccaggcctatgaggagccaagcgtggcaagtagtcctaacgggaaagaatccgaccttcgcagatctgaggttccgtgcgcccccatgcctaaaaaaacacatcagccctccgatgaagtgggaaccagcatagagcatcccagagaagcagaggaggtcatggatgcaggatgtcaggagtccgcaggtcctgagcggattacagaccaagaggccagtgagaatcatgtcgcagccactggctctcacctctgcgtgctcaggtcccgaaagctgctcaaacagttgagtgcgtggtgtggccctagctccgaggattcccgcgggggtagaagagctcccggtcgaggccagcagggactgacacgtgaggcctgtctttcgatactaggccattttcctcgtgctcttgtttgggtatctctgtcactactgtccaaaggcagtcccgagccacataccatgatctgtgtgccagctaaggaagacttccttcaactgcacgaggattggcattattgtggtcctcaggagtccaagcatagtgacccttttcggtccaagatcctcaagcagaaggagaagaaaaagagagagaagagacaaaagcccgggagggcatcttccgatggccctgctggtgaagaacccgtcgccggacaggaagcattaacactgggcttgtggtcaggcccgttaccccgggtgacactccactgctccagaactttgctgggctttgtcactcagggggatttttctatggctgtaggatgtggcgaggctcttggtttcgtgtccctaaccggtttacttgatatgctttctagtcaaccggccgctcaaaggggcctggttttactgagaccacccgcgtccctccagtaccggtttgctcgcattgctattgaagtgtag

SEQ ID NO: 59213 - DNA, 3075 bp, Artificial Sequence
  derived and/or modified sequence
atgagtaacgctaaagaacgtaaacacgcaaagaaaatgagaaaccagcccacaaatgtgaccctgtcttccgggtttgtggccgatcgtggcgtgaagcaccactcaggaggtgaaaagccctttcaggcccagaaacaggagcctcaccctggcacatcccggcagagacaaacgagagtgaatccacacagcctgccagaccctgaagtgaatgaacagtccagctctaagggaatgtttaggaagaaaggaggttggaaggcaggccctgagggaaccagtcaggagatcccaaaatacattacagccagtactttcgctcaggccagggctgcggagatctcagcaatgcttaaggccgtcacccagaaatcttcaaacagtttggtgtttcagactctgcctcgacatatgcgtcgacgggcaatgtcacacaatgtcaaaaggctgccgagacggctgcaggagatcgctcagaaagaagctgagaaagccgtccaccagaagaaggagcattccaagaataagtgtcataaagccaggcggtgccacatgaatcgcacccttgagtttaaccgccgtcagaagaagaacatttggctggagacccacatctggcacgccaagcggttccacatggttaaaaagtggggttactgtctcggtgaacggcctacggtgaaatcccaccgggcatgctatcgagcgatgacaaataggtgccttctccaggatctgtcttattactgctgtttagaactaaaggggaaggaagaagagattctcaaagcactttccgggatgtgcaatattgatactgggttaacgttcgctgctgtgcactgcttgagtggcaagaggcaggggagcctggtgctgtacagggttaacaagtacccacgcgagatgcttggaccagtgacatttatctggaagtcacagcgcaccccaggggatccaagtgagtctagacaactgtggatctggctgcacccaaccctaaagcaggatatcctcgaggagataaaggccgcatgtcaatgcgtggaaccaataaagtctgctgtttgcatagcagatccattacctacacccagtcaggaaaagtcccagacagaactccctgatgagaagattgggaagaaaaggaagcggaaggatgacggcgagaacgcgaagcccatcaagaaaatcatcggggacggtacccgggatccttgcctgccttacagctggataagcccaactactggcattattatctctgatttaacaatggagatgaaccggttcaggctcatcggaccgctttctcactccattctaacggaggctatcaaagcggctagcgttcataccgtgggcgaggatactgaggaaacccctcataggtggtggattgagacttgtaagaagcctgactctgttagcctgcactgccggcaggaggctatctttgaactccttggcggaataaccagccccgcagaaataccagctgggactatcttgggtctgactgtcggcgatccccgtattaacctcccacaaaaaaagagcaaggccctgccaaatccagagaaatgccaagacaacgagaaggtgcgccagctcctccttgagggagtacccgtcgaatgcacacactccttcatctggaaccaggacatctgcaagtcggttacagagaataagataagcgatcaagatctcaatagaatgagaagtgaactcttagtgcccggatcacagttgatactgggcccacacgagagtaaaatacccatcttgcttatacagcagccaggcaaagttactggagaggatagactcgggtggggatcgggttgggatgtgctgctcccgaagggctggggtatggcattctggatcccctttatctaccggggagtgagagttgggggtttgaaggagtccgccgtccactctcagtataaacggagtcctaacgtgccaggagactttccagactgccctgcaggcatgctcttcgcagaggagcaagcaaagaatttacttgaaaagtacaagaggcgacctcccgctaagaggccaaactatgtaaagctgggcactctcgcgccattctgctgtccatgggagcagttgactcaggattgggaaagtcgagtgcaggcttacgaagagccaagtgtagcatcgtcccccaatggcaaagaatctgatttgagacgctccgaagtcccctgcgccccaatgcccaaaaaaacacatcaacccagtgatgaagtggggacttcgattgagcacccacgtgaggcggaggaagtgatggatgccggttgtcaggagtcggctgggccagagaggataacggaccaggaagctagcgagaaccacgtggctgcaaccggcagccacctgtgcgtcctgagaagccgaaagctgctcaaacaactgtccgcttggtgcggccctagtagcgaggacagcagaggcggtcggagagcccctgggcgaggccaacaggggctcacccgagaggcatgcctgagcattctcgggcattttccacgggctctcgtgtgggtctccttgtccctgctgtccaaaggtagcccagagccccataccatgatctgtgtgccagccaaagaagacttccttcagttgcatgaagactggcactattgcggtccacaagagtccaaacacagtgacccttttagatcaaaaattttgaagcagaaagaaaagaaaaagcgtgagaagaggcaaaagccagggagggccagctctgatggacccgcaggggaggagcccgttgcaggccaagaggcactcacacttgggctgtggtccggccctctcccaagggtcactctccactgctccagaactttgctaggatttgtgactcagggcgacttcagcatggccgttggctgtggagaggcacttggattcgtgagcctgaccggactgttggatatgctgtccagccagccagctgctcaaaggggccttgtgctcctcaggccaccagcttcgctccagtaccgttttgctcgaattgccatagaagtgtag

SEQ ID NO: 59214 - DNA, 3075 bp, Artificial Sequence
  derived and/or modified sequence
atgtcaaatgcaaaggaacgcaagcatgccaagaagatgagaaaccagcccaccaacgttaccttgagtagtgggttcgttgccgaccgaggcgtgaagcatcattccggaggggagaagcccttccaggcgcagaagcaggagccgcatcctgggacgtcccggcagcgacagactcgggtgaatccgcattcactgcctgatccagaggtcaacgaacaaagtagttcaaaaggcatgtttaggaaaaaaggtgggtggaaggctggtcctgaaggcacgtctcaagaaatcccaaaatatatcaccgcgtcgacctttgcacaagctcgcgcagccgagatcagcgctatgctcaaagccgtgacccagaagtcctccaacagcctcgtgtttcaaactctccctagacatatgcggaggcgagctatgagtcataatgtgaaaaggctgcccaggcgactgcaggagatcgctcagaaagaagccgagaaagctgtgcaccagaaaaaagaacacagtaagaacaaatgccacaaagccaggagatgtcatatgaataggacccttgagttcaatcggagacagaagaaaaacatatggttggaaactcacatttggcacgctaagagattccatatggttaaaaaatggggatactgtctgggagaaaggccaaccgtgaagtcccatcgcgcttgctaccgggctatgaccaataggtgcctgctgcaggacctctcgtactattgttgtctcgagctgaaagggaaagaggaggaaatcttaaaagcgctttcgggcatgtgcaacatagatactggcctgacttttgcagctgtgcactgtctgagtggaaagcggcagggatccctggtgctctacagggtgaataagtatcccagagaaatgctgggacctgtgacatttatctggaagtcacagagaacaccgggtgacccatcagagtcccgccagttgtggatttggttgcacccgacactgaagcaagatattttagaagaaattaaggcagcctgtcagtgcgttgaacctatcaagtctgccgtgtgcattgcggaccctctgcccacaccctcccaagagaaatctcagactgagttgcctgatgagaaaattggtaagaaaaggaaacgcaaggatgatggcgagaacgccaagcccatcaagaagatcataggcgacggcacgcgtgatccttgtctcccatactcttggatatcccccaccaccggcataataatatctgatctcaccatggagatgaatcggttccgcttgattggcccattgtctcattctatcctgactgaagctatcaaggccgcatccgtgcacactgtgggtgaggacactgaggaaaccccccataggtggtggatcgaaacatgtaaaaaaccagactccgtgtcgctccattgcagacaagaagcgatctttgagttgctgggagggatcacctctcctgcagaaatccctgcaggaaccatactgggcctgactgttggagatccccgtattaatctgcctcagaagaaaagcaaggcacttcccaacccagaaaaatgtcaggataacgaaaaagtcaggcaactgctcctagagggcgtacccgtggaatgtactcacagcttcatttggaatcaagatatctgtaagagcgtgaccgagaacaaaatctccgatcaggaccttaaccggatgcgctccgagctgctggttcccggatctcagctcatcctgggaccacacgaaagcaaaatcccaattctcctcatccagcaacccggtaaagtgacaggggaagatagactcgggtggggctccggctgggacgtgctgcttcccaagggctggggcatggccttctggatcccttttatctatcgcggagtgcgggtgggagggctgaaggagtctgctgtgcactcgcaatacaagcgcagcccaaacgtgcccggtgacttcccggattgcccagcgggaatgttattcgcagaagaacaggcaaaaaaccttttagagaagtataagagacggccacctgccaaaaggccaaactacgtcaaactgggtaccttggcccctttctgctgtccctgggagcaattgacccaagactgggagtcacgggttcaggcctacgaagaaccaagcgtcgctagcagcccaaacggcaaggagagcgacctccggagatctgaggtgccttgtgctcctatgcctaagaagactcaccagccaagtgacgaggtgggcactagtattgaacatcccagggaagcagaggaggtgatggacgcaggctgtcaggaatccgcagggcctgaacgtatcaccgatcaagaggcctcagaaaatcacgtggcagccacgggttctcatctgtgcgttctgagaagtagaaagttgttgaagcagctgtctgcctggtgtgggccaagctctgaagactctagaggcggtcgcagagcacctggccgaggccagcaggggctcacacgggaagcatgtttgtccattcttggccacttccctcgcgcactggtatgggtgagtttgagccttctttccaaggggagtccagagccccatactatgatctgcgtccctgcaaaagaggattttttgcagctgcatgaggattggcactattgtggcccacaagagtccaaacactcagaccccttcagatccaaaattctcaagcagaaagagaaaaaaaaaagagagaagagacagaaacctgggcgagcatcctctgacggcccagcaggagaggaaccagtcgcaggacaggaagcgctgacattgggtctgtggagcggacccttgcccagagtgaccctgcattgctcccgcaccctactggggttcgttacgcagggggatttcagtatggcggtgggttgcggggaggcgttaggcttcgtatccctaaccgggttgctggatatgctatctagccagcccgctgcccagaggggattagtgcttttgcgtcccccagctagcttgcagtatcgattcgcacgcattgccatcgaagtgtag

SEQ ID NO: 59215 - DNA, 3075 bp, Artificial Sequence
  derived and/or modified sequence
atgagcaacgccaaggagagaaagcacgccaagaagatgagaaaccagcccaccaacgtgaccctgagcagcggcttcgtggccgacagaggcgtgaagcaccacagcggcggcgagaagcccttccaggcccagaagcaggagccccaccccggcaccagcagacagagacagaccagagtgaacccccacagcctgcccgaccccgaggtgaacgagcagagcagcagcaagggcatgttcagaaagaagggcggctggaaggccggccccgagggcaccagccaggagatccccaagtacatcaccgccagcaccttcgcccaggccagagccgccgagatcagcgccatgctgaaggccgtgacccagaagagcagcaacagcctggtgttccagaccctgcccagacacatgagaagaagagccatgagccacaacgtgaagagactgcccagaagactgcaggagatcgcccagaaggaggccgagaaggccgtgcaccagaagaaggagcacagcaagaacaagtgccacaaggccagaagatgccacatgaacagaaccctggagttcaacagaagacagaagaagaacatctggctggagacccacatctggcacgccaagagattccacatggtgaagaagtggggctactgcctgggcgagagacccaccgtgaagagccacagagcctgctacagagccatgaccaacagatgcctgctgcaggacctgagctactactgctgcctggagctgaagggcaaggaggaggagatcctgaaggccctgagcggcatgtgcaacatcgacaccggcctgaccttcgccgccgtgcactgcctgagcggcaagagacagggcagcctggtgctgtacagagtgaacaagtaccccagagagatgctgggccccgtgaccttcatctggaagagccagagaacccccggcgaccccagcgagagcagacagctgtggatctggctgcaccccaccctgaagcaggacatcctggaggagatcaaggccgcctgccagtgcgtggagcccatcaagagcgccgtgtgcatcgccgaccccctgcccacccccagccaggagaagagccagaccgagctgcccgacgagaagatcggcaagaagagaaagagaaaggacgacggcgagaacgccaagcccatcaagaagatcatcggcgacggcaccagagacccctgcctgccctacagctggatcagccccaccaccggcatcatcatcagcgacctgaccatggagatgaacagattcagactgatcggccccctgagccacagcatcctgaccgaggccatcaaggccgccagcgtgcacaccgtgggcgaggacaccgaggagaccccccacagatggtggatcgagacctgcaagaagcccgacagcgtgagcctgcactgcagacaggaggccatcttcgagctgctgggcggcatcaccagccccgccgagatccccgccggcaccatcctgggcctgaccgtgggcgaccccagaatcaacctgccccagaagaagagcaaggccctgcccaaccccgagaagtgccaggacaacgagaaggtgagacagctgctgctggagggcgtgcccgtggagtgcacccacagcttcatctggaaccaggacatctgcaagagcgtgaccgagaacaagatcagcgaccaggacctgaacagaatgagaagcgagctgctggtgcccggcagccagctgatcctgggcccccacgagagcaagatccccatcctgctgatccagcagcccggcaaggtgaccggcgaggacagactgggctggggcagcggctgggacgtgctgctgcccaagggctggggcatggccttctggatccccttcatctacagaggcgtgagagtgggcggcctgaaggagagcgccgtgcacagccagtacaagagaagccccaacgtgcccggcgacttccccgactgccccgccggcatgctgttcgccgaggagcaggccaagaacctgctggagaagtacaagagaagaccccccgccaagagacccaactacgtgaagctgggcaccctggcccccttctgctgcccctgggagcagctgacccaggactgggagagcagagtgcaggcctacgaggagcccagcgtggccagcagccccaacggcaaggagagcgacctgagaagaagcgaggtgccctgcgcccccatgcccaagaagacccaccagcccagcgacgaggtgggcaccagcatcgagcaccccagagaggccgaggaggtgatggacgccggctgccaggagagcgccggccccgagagaatcaccgaccaggaggccagcgagaaccacgtggccgccaccggcagccacctgtgcgtgctgagaagcagaaagctgctgaagcagctgagcgcctggtgcggccccagcagcgaggacagcagaggcggcagaagagcccccggcagaggccagcagggcctgaccagagaggcctgcctgagcatcctgggccacttccccagagccctggtgtgggtgagcctgagcctgctgagcaagggcagccccgagccccacaccatgatctgcgtgcccgccaaggaggacttcctgcagctgcacgaggactggcactactgcggcccccaggagagcaagcacagcgaccccttcagaagcaagatcctgaagcagaaggagaagaagaagagagagaagagacagaagcccggcagagccagcagcgacggccccgccggcgaggagcccgtggccggccaggaggccctgaccctgggcctgtggagcggccccctgcccagagtgaccctgcactgcagcagaaccctgctgggcttcgtgacccagggcgacttcagcatggccgtgggctgcggcgaggccctgggcttcgtgagcctgaccggcctgctggacatgctgagcagccagcccgccgcccagagaggcctggtgctgctgagaccccccgccagcctgcagtacagattcgccagaatcgccatcgaggtgtag

SEQ ID NO: 59216 - protein, 520 aa, Artificial Sequence
  derived and/or modified sequence
MAASMARRLWPLLTRRGFRPRGGCISNDSPRRSFTTEKRNRNLLYEYAREGYSALPQLDIERFCACPEEAAHALELRKGELRSADLPAIISTWQELRQLQEQIRSLEEEKAAVTEAVRALLANQDSGEVQQVRLDPGAGSIFGPTFLPFPGQLSLLVEAQLEEQFYLQALKLPNQTHPDVPVGDESQARVLHMVGDKPVFSFQPRGHLEIGEKLDIIRQKRLSHVSGHRSYYLRGAGALLQHGLVNFTFNKLLRRGFTPMTVPDLLRGAVFEGCGMTPNANPSQIYNIDPARFKDLNLAGTAEVGLAGYFMDHTVAFRDLPVRMVCSSTCYRAETNTGQEPRGLYRVHHFTKVEMFGVTGPGLEQSSQLLEEFLSLQMEILTELGLHFRVLDMPTQELGLPAYRKFDIEAWMPGRGRFGEVTSASNCTDFQSRRLHIMFQTEAGELQFAHTVNATACAVPRLLIALLESNQQKDGSVLVPPALQSYLGTDRITAPTHVPLQYIGPNQPRKPGLPGQPAVS

SEQ ID NO: 59217 - DNA, 1563 bp, Artificial Sequence
  derived and/or modified sequence
atggctgctagcatggccagacgtctctggcccctgctcacgagaaggggtttccgacctaggggcggctgtatctcgaatgactcccctcgccggtcctttacaaccgaaaaacgaaaccgaaacctgctgtacgagtatgctcgagagggatattctgccttgcctcaattagatatcgaacggttctgtgcctgccctgaagaagccgcccacgccttggagttgaggaagggtgagctgcggagtgccgacttgcccgccataatctcgacctggcaagagctcagacagctccaggaacagatccgttcgctcgaagaggagaaagctgcagtgacggaagccgttcgggcacttctagcaaatcaagacagtggggaagtgcaacaggtgcggctggatcccggtgctggctccattttcggcccaaccttcctcccatttcccgggcagctatcccttctggtggaggcccagctggaagagcagttctacctgcaggccctgaaactacccaaccaaacacacccggatgtgccagtgggggatgagtcacaggcccgggtgctgcacatggtaggcgacaagcccgtctttagcttccaaccgagaggccacttggaaatcggcgaaaagctcgacatcatcaggcagaagaggctgtctcacgtctccggccatcgtagctactacctcaggggggcaggcgctctcctccagcatggactcgttaatttcacgtttaacaagctcctgagaaggggattcacccctatgactgtgcccgaccttctgaggggggcggtcttcgaaggttgcggaatgactcctaacgctaaccccagtcagatttataacatcgaccccgctcgatttaaggatctgaacctggcaggtacagctgaggtgggactagccgggtacttcatggaccataccgtggcatttcgggacctgccggttcgcatggtgtgtagcagcacctgctatagagctgagaccaatacaggtcaggaaccccggggactgtatcgagttcaccatttcacaaaggtcgaaatgttcggcgttacaggacctggcttggaacagtcctcacagcttctcgaggaattcctatccctacaaatggaaatcctgaccgagctggggctgcacttccgggtgctcgacatgccaactcaggagttaggcttgcccgcatatcgtaagtttgatatcgaggcctggatgcctggccgcggtaggttcggcgaggtgacctccgcgtcaaactgtactgattttcaaagcagaagactccatatcatgttccagactgaggcaggggagctccagtttgcccatacagtgaatgctacagcatgtgccgtccctaggctgcttatcgctctgctggaatctaatcagcagaaagacggatctgtgcttgtgcccccagcactgcagagctacctgggcaccgaccggatcactgccccaacccatgtcccattacagtacattggtccgaaccagcccagaaagcccgggctacccggccagcctgccgtgtcttag

SEQ ID NO: 59218 - DNA, 1563 bp, Artificial Sequence
  derived and/or modified sequence
atggccgcatctatggcaaggcggctttggccactgctgacccggcgaggttttagacccaggggcggatgtatatccaacgatagcccacggagatccttcaccaccgagaagcgaaacaggaatctcctgtatgagtatgcgcgggaggggtactctgctctgccgcagctggacatcgagcgattctgtgcttgccccgaggaggccgcgcacgcattggagcttcgtaagggagagttacggagtgcagaccttcctgcaatcatcagcacgtggcaggagctaaggcagctccaagagcaaattcgcagtttagaggaagagaaagcagccgtgactgaggcagtgagggccctgctggctaatcaggattctggtgaagtgcaacaggtgaggctagaccctggtgcgggcagtatcttcggccctacttttctcccttttcccggacagctttccttgctggtcgaagcacagcttgaggagcagttctatctccaggcccttaaacttcctaatcaaacacacccagatgtccctgtgggagatgagtctcaggcccgagtgctgcacatggtgggcgataagcctgtgttctcctttcagccacgtggccatttagaaattggggaaaagctcgacattatccggcagaagcgactatctcatgttagtggacacagaagttattacctgcggggagccggcgctctgcttcagcacggcctcgtgaattttaccttcaacaagttgctgagaaggggattcaccccaatgactgtcccagacctgctgcgcggcgccgttttcgaagggtgcgggatgacgcctaacgctaaccccagccagatttataatatagatccagctcgtttcaaggacctcaatctagcaggtacagctgaggtgggtctcgccggctactttatggaccacacagtggcctttagggatttaccggtgcggatggtgtgttctagcacttgctaccgggccgagacgaatacaggccaggagccacggggcctctatcgggtgcaccattttactaaggtcgaaatgtttggtgtaacggggcccgggttagaacaatctagtcagctcctagaagagtttctgagtctgcagatggagattctgaccgaactgggtttgcattttcgcgtgttggacatgcctacccaggaattaggcctacccgcctataggaaattcgacatcgaagcttggatgccaggtagagggcgatttggagaagtgacctccgcatctaactgtaccgatttccaatccaggcgtctacacataatgtttcagacagaagcaggggaactgcagttcgctcatacagtgaatgctaccgcctgtgctgttcctcgtctccttatcgctctactggagtccaatcagcagaaggatggctctgtgctggtcccgcctgccttgcagtcctacttgggcacagaccgcattacagcccccactcacgtgccactgcagtacatcggtcctaaccaacccagaaagcccggcctccctggtcaacccgctgtgtcttag

SEQ ID NO: 59219 - DNA, 1563 bp, Artificial Sequence
  derived and/or modified sequence
atggccgcctccatggcccggcggctgtggcccctgctgacccggcggggcttccggccccggggcggctgcatcagcaatgacagccccaggaggagcttcaccacagagaagaggaacagaaacctgctgtatgaatatgcccgggagggctacagcgccctgccccagctggacatcgagcgcttctgtgcctgcccagaggaggccgcccacgccctggagctgaggaagggggagctgcggtctgctgacctgcctgccatcatcagcacctggcaggagctgcggcagctgcaggagcagatccgcagcctggaggaggagaaggctgctgtgacagaggccgtgcgggccctgctggccaaccaggacagcggggaggtgcagcaggtgcggctggaccccggggccggcagcatcttcggccccaccttcctgcccttccctggccagctgagcctgctggtggaggcccagctggaggagcagttctacctgcaggccctgaagctgcccaaccagacccacccagatgtgcctgtgggagatgagagccaggcccgggtgctgcacatggtgggggacaagcctgtgttctccttccagccccggggccacctggagatcggggagaagctggacatcatccggcagaagaggctgagccacgtgtctggccacaggagctactacctgcggggggccggggccctgctgcagcacggcctggtgaacttcaccttcaacaagctgctgcggcggggcttcacccccatgacagtgcctgacctgctgcggggagctgtgtttgagggctgcggcatgaccccaaatgccaaccccagccagatctacaacatcgaccctgcccgcttcaaggacctgaacctggccggcacagctgaggtgggcctggccggctacttcatggaccacacagtggccttccgggacctgcctgtgaggatggtgtgcagcagcacctgctacagagctgagaccaacacaggccaggagccccggggcctgtacagagtgcaccacttcaccaaggtggagatgtttggagtgactggacctggcctggagcagagcagccagctgctggaggagttcctgagcctgcagatggagatcctgacagagctgggcctgcacttccgggtgctggacatgcccacccaggagctgggcctgcctgcctacaggaagtttgacatcgaggcctggatgcctggccggggccgctttggagaggtgaccagcgccagcaactgcacagacttccagagccggcggctgcacatcatgttccagacagaagctggggagctgcagtttgcccacacagtgaatgccacagcctgtgctgtgccccggctgctgattgccctgctggagagcaaccagcagaaggatggctctgtgctggtgcccccagccctgcagagctacctgggcacagaccgcatcacagcccccacccacgtgcccctgcagtacatcggccccaaccagcccaggaagccaggcctgcccggccagcctgctgtgtcctag

SEQ ID NO: 59220 - DNA, 1563 bp, Artificial Sequence
  derived and/or modified sequence
atggccgccagcatggcccggcggctgtggcccctgctgacccggagagggtttcgcccgaggggaggctgtatatcgaatgactcaccacgaaggtcgttcaccactgaaaaacggaacaggaatcttctgtacgaatatgcgagagaagggtactccgccctcccgcagctggacattgagcggttctgcgcttgtcctgaagaagctgcccacgcccttgaactgcgaaaaggcgagttgcgcagcgccgatctccccgcgattatcagcacctggcaagagctccgtcagctacaggaacaaatccgctcactggaggaggagaaagcagcagtcaccgaagctgtgagggctttgctcgcaaatcaggactccggggaggtacagcaagtacgcctagatcccggggcaggtagcatcttcggacctacatttttgccctttcccggacagctgtccttgttagttgaggcccagctggaggaacaattctatcttcaggcactcaagctgcctaatcagacacacccagacgttcctgtgggagacgagtcccaggccagagtacttcatatggtgggcgacaagcctgttttctcatttcagccccggggacaccttgaaatcggagaaaagctcgacataatcaggcagaagagacttagtcacgtgagtggacataggtcatactatctgcgaggagctggcgctctcctccagcacggcctcgtcaacttcacattcaacaaactcctaaggcggggcttcacaccgatgaccgtgcctgacctgctgagaggcgcggtgttcgaaggttgtggaatgacccccaatgccaacccgtcccagatctacaatattgacccagctagattcaaggacctaaacctcgctgggaccgcagaggtaggcttggccgggtactttatggaccacaccgtggcatttcgggacttacctgtaaggatggtctgctcctcaacctgctaccgtgccgaaaccaatacaggacaggaacctagaggcctttacagagtgcatcacttcactaaagtggagatgtttggagtcacgggacctggattggaacagagctcacagttgctggaggagttcttgtccctccagatggagatcttgacagagcttggcctccactttagggtactggacatgccaacgcaggagctgggactccctgcctacaggaaattcgacatagaggcctggatgccaggacgaggtcgctttggtgaggtgacgagcgcaagcaattgtacagacttccagtcacggagacttcacatcatgtttcaaaccgaggccggcgaattacaatttgcccatacagtgaatgcaaccgcttgcgctgttccccgcctgctgattgcattgctggagtccaaccagcagaaggacggctctgttctggtgccacctgccctccagtcctacctgggcacagatcgcatcacagcacctacacatgtccctttgcagtatatagggcctaaccaaccaagaaagcctggcttgccaggacaacccgcggtatcctag

SEQ ID NO: 59221 - DNA, 1563 bp, Artificial Sequence
  derived and/or modified sequence
atggccgccagcatggcccggcggctgtggcccctgctgacccggcgggggttcaggcctcggggaggctgcatttccaacgacagcccccggcgctcattcacgaccgagaaacgaaatcgcaatcttctatacgagtacgcgcgggaggggtactccgctctcccgcagctagacatcgagcggttctgcgcctgtcccgaggaggctgctcatgccctcgagctcagaaaaggagagctacggtccgccgatctgccggcaatcattagtacatggcaagaactaaggcagctccaggaacagattagatctttggaggaagaaaaggcagccgtgacagaagccgttagagccctgctcgcaaaccaggattccggcgaagtgcagcaggtcagattggatcctggcgcaggaagtatttttggcccaaccttcctccccttccctgggcagttgagtctgctcgtggaagctcagctggaagagcagttttacctgcaggccttgaaactccctaatcagacacacccagatgtgccagtaggtgacgagtcacaggctagagtgcttcatatggtaggcgataaacctgtcttctccttccaacccagaggtcatttggagattggcgaaaagctcgacatcatccggcaaaaaaggcttagccatgtgtctggtcacagatcatattacctccgcggggccggagctctcttacagcacggactggtgaactttacgtttaataagttgttgcgcaggggcttcactccgatgaccgtacctgatctccttcggggtgccgtgttcgaaggctgcgggatgacgcccaatgcaaatccaagccagatctataacatagatcccgcccgctttaaggacctgaatttggcaggtactgctgaggtgggattagcagggtatttcatggatcatacagtcgctttccgtgacctgccagtgagaatggtctgctcctctacctgctacagagccgagaccaataccggtcaggaaccacgcgggttatatagggtccatcacttcaccaaggtggaaatgtttggagtgactgggccaggattggagcagtcaagtcagctgctggaggaattcctgtcattgcaaatggaaattctaacagaactgggcctccattttagggtgctggacatgcccacacaggagctcggtctaccagcttatcggaagttcgatatcgaggcatggatgccaggacggggcaggtttggagaggttacctcagctagcaattgcactgacttccagtctaggcgacttcatatcatgttccagactgaagccggcgaactccagtttgcacacacagttaatgcaaccgcttgcgcagtccctaggttactgattgctttgttagaatctaaccagcagaaggacggaagtgtgctggtgcctccagccttgcaatcatatctgggaacagatagaatcaccgcccctactcacgtgcctcttcagtacatcggccccaaccaaccccgaaaacccggactgcctggacagcctgccgtgagctag

SEQ ID NO: 59222 - DNA, 1563 bp, Artificial Sequence
  derived and/or modified sequence
atggcagcctcaatggctagacgtctctggcctctcctgacccgcaggggatttcgaccaaggggtggatgtattagtaacgattctccacggaggtctttcactacagagaagcgcaaccggaatctcctctacgaatacgctcgcgagggctactccgccttgcctcagctggatatagaaaggttttgcgcctgccccgaggaggcggctcatgccctggaattgcgcaaaggcgaactgcgttctgctgacctccccgcaattattagtacatggcaggagctcaggcagttgcaagagcaaatccgctccttggaagaggaaaaggccgcagtgactgaggccgtgcgcgcattgctggccaatcaggattccggcgaggtgcaacaggttagactggaccccggtgctggcagtatttttgggccaacattcttgcctttccctggtcagctaagcctgctggtggaagcccaactggaggagcagttttatctgcaggcactcaagcttcccaatcagacacaccctgacgttcccgtaggggacgagagccaggctcgcgtgctgcatatggttggcgataagcccgtattctctttccagccgaggggtcacctggagattggagagaagctggatatcatccgccagaaacggttgtcacacgtgtctggccatagaagctattacctgcgaggagctggcgctctgctccagcatggactagtgaatttcacttttaacaaactactgagacggggtttcactcccatgacagttccggacctgcttcgtggcgctgtctttgaggggtgcggtatgacccccaatgcaaacccctcccagatttacaacatagatcccgcacgcttcaaggacctaaatctagcgggaactgctgaagttggtctcgccggatacttcatggatcatacggttgcgtttcgcgaccttcccgtgaggatggtgtgcagttctacgtgttatcgggcagaaactaacacaggacaggagcctcgtggcctttaccgggtgcatcactttaccaaggtggagatgtttggggttaccggcccaggtctcgaacagagcagtcagttgctcgaggaattcctgtcacttcagatggagatactgacggagctgggtcttcacttcagagtacttgacatgccaactcaggagttgggtctcccagcttacagaaagtttgatattgaggcctggatgccaggaaggggacggtttggagaagttactagcgcgagcaattgtacagattttcaatctaggcgattgcatatcatgtttcagaccgaggcgggagaactgcaattcgctcacacagtgaacgccacagcttgcgcagtgcccaggctcctaatcgctctgctcgagagtaaccagcagaaggacggaagtgtgctcgtacccccagccctccaatcatatctgggcactgaccggatcactgcccctactcatgttcctctccagtacatcggacctaaccagcctcgaaaacctgggctgcccggacagcctgcagtgagttag

SEQ ID NO: 59223 - DNA, 1563 bp, Artificial Sequence
  derived and/or modified sequence
atggccgcttcaatggctcgacgcctgtggcccctgctaacccgtcgcggattcaggccaaggggtggttgcataagcaacgactcccctaggcgcagctttacgacagagaaacggaacaggaacttgctttacgaatatgcacgtgaaggctatagtgccctgccccagcttgacattgaaagattctgcgcctgccccgaagaagccgcacacgccctggaactccggaagggagaactcagatcagcggatctgcccgctattatcagtacttggcaggaattgaggcagctgcaagagcaaattcgttcgctcgaggaggagaaagctgcagtgaccgaagcagtcagggccctgcttgccaaccaggattcaggagaggtccagcaggttaggctggaccctggcgctggatctattttcgggccaactttcctccccttccccggtcagcttagcctccttgtggaggcccagctggaggagcagttctacctgcaggctttgaagctgccaaatcagacgcacccagacgtccccgtgggagacgagagtcaagcaagagtccttcatatggttggggacaagccagtattctccttccaaccacgcggacacctcgagatcggagagaaactggacatcattcgacagaagagactgtcacacgtgagtggtcatcgatcttattatctgcgaggagcaggtgcactcctacagcacggcttggtgaacttcacgtttaacaaactgttaaggcggggattcacacccatgacagtgcccgacttgctgaggggtgctgttttcgagggttgcggaatgaccccaaacgctaacccctcgcagatatataacattgaccccgcacgattcaaagacctgaaccttgctggtacagctgaggtcggcctcgctgggtacttcatggatcatacggtcgcctttagagacctgccagtacgcatggtttgttcctccacatgctatcgcgctgaaaccaataccgggcaggagccacggggtctataccgagttcaccactttactaaggtggagatgtttggcgtgactggccctggcctggaacaatcctctcagctgctggaggagttcctctctctacagatggagattctgactgagctggggctccactttagggtcctcgacatgcccacgcaggaattggggctgccggcttaccgtaagtttgacatcgaggcgtggatgcctggtcgtggacggttcggggaggttaccagcgcctcaaactgtacagactttcagagccgtcggctccacatcatgtttcagaccgaggccggtgagctgcagttcgcccatacagttaacgccactgcctgcgcggtcccacgccttctcatcgcattgctggagagcaaccagcagaaggatggctctgtgctggtgcccccagcgctgcagtcttatctcgggacagaccggattactgcgcctacccacgtccccctgcaatatatcggacccaaccaacctagaaaacccggtctgcctggtcagcccgctgtgagctag

SEQ ID NO: 59224 - DNA, 1630 bp, Artificial Sequence
  derived and/or modified sequence
agtgccgccttgttcccggtccaagatggctgcgtccatggcgcggcgcttgtggcctttgctgactcgtcgggggttccggccccggggaggctgcatctccaacgatagtccaaggagaagtttcactacagagaaacgaaaccggaacctcctgtacgagtatgcgcgcgagggctacagcgcactccctcagctggacatagagcggttctgcgcatgcccagaagaggccgcacacgccctggagctccgcaagggggagctgcgctcggcggacctgcccgcgatcatctcgacatggcaggagctgaggcagctgcaggagcagatccggagcctggaggaagagaaggcagctgtgactgaggcagtgcgggccctgctggcaaaccaggacagtggtgaagtgcagcaggtgcggctggatccaggtgctggctccatatttggtcctacgttcctcccattcccaggccagctttctctccttgtggaggcccagcttgaggagcagttctacctgcaggcgctgaagctgcccaaccagacccacccagacgtgcccgtcggggatgagagccaggctcgagtgctccacatggtcggagacaagccagttttctccttccaacctcggggccacctggaaattggcgagaaactcgacatcatccgtcagaagcgcctgtcccacgtgtctggccaccggtcctattacctgcgcggggctggagccctcctgcagcacggcctggtcaacttcacattcaacaagcttctccgccggggcttcacccccatgacggtgccagaccttctccgcggagcagtgtttgaaggctgtgggatgacaccaaatgccaacccatcccaaatttacaacatcgaccctgcccgcttcaaagatctcaacctggctggaacagcggaggtggggcttgcaggctacttcatggaccacaccgtggccttcagggacctgccagtcaggatggtttgctccagcacctgctaccgggcagagacaaacacgggacaggaaccccgggggctgtatcgagtacaccacttcaccaaggtggagatgtttggggtgacaggccctgggctggagcagagctcacagctgctggaggagttcctgtcccttcagatggagatcttgacagagctgggcttgcacttccgggtcctggatatgcccacccaagaactgggcctccccgcctaccgcaagtttgacattgaggcctggatgccaggccgaggccgctttggagaggtcaccagtgcttccaactgcacagacttccagagccgccgcctccacatcatgttccagaccgaggctggggagctgcagtttgcccacacggtgaacgccaccgcctgtgctgtcccccgccttctcatcgcgctcctggagagtaaccagcagaaggacggctcagtgctcgtgccccctgccctccagtcctacctcggcactgatcggatcacagcccctacccacgtgcctctccagtacatcggccccaaccagccccggaagcctgggctgcctggccagcctgctgtaagctaagaacccacccacagcagccctcgggggtgtcactgcttcctg

SEQ ID NO: 59225 - DNA, 2065 bp, Artificial Sequence
  derived and/or modified sequence
tgaagaggcgggacacagacgacgattgggcgacgaaggactctatcgcggtcaactttcctcaggatctgattggctcgtcacggtcaggttcgctgccttgcaattggtctaaacgcggagtgggcgggacgaagtgccgccttgttcccggtccaagatggctgcgtccatggcgcggcgcttgtggcctttgctgactcgtcgggggttccggccccggggaggctgcatctccaacgatagtccaaggagaagtttcactacagagaaacgaaaccggaacctcctgtacgagtatgcgcgcgagggctacagcgcactccctcagctggacatagagcggttctgcgcatgcccagaagaggccgcacacgccctggagctccgcaagggggagctgcgctcggcggacctgcccgcgatcatctcgacatggcaggagctgaggcagctgcaggagcagatccggagcctggaggaagagaaggcagctgtgactgaggcagtgcgggccctgctggcaaaccaggacagtggtgaagtgcagcaggtgcggctggatccaggtgctggctccatatttggtcctacgttcctcccattcccaggccagctttctctccttgtggaggcccagcttgaggagcagttctacctgcaggcgctgaagctgcccaaccagacccacccagacgtgcccgtcggggatgagagccaggctcgagtgctccacatggtcggagacaagccagttttctccttccaacctcggggccacctggaaattggcgagaaactcgacatcatccgtcagaagcgcctgtcccacgtgtctggccaccggtcctattacctgcgcggggctggagccctcctgcagcacggcctggtcaacttcacattcaacaagcttctccgccggggcttcacccccatgacggtgccagaccttctccgcggagcagtgtttgaaggctgtgggatgacaccaaatgccaacccatcccaaatttacaacatcgaccctgcccgcttcaaagatctcaacctggctggaacagcggaggtggggcttgcaggctacttcatggaccacaccgtggccttcagggacctgccagtcaggatggtttgctccagcacctgctaccgggcagagacaaacacgggacaggaaccccgggggctgtatcgagtacaccacttcaccaaggtggagatgtttggggtgacaggccctgggctggagcagagctcacagctgctggaggagttcctgtcccttcagatggagatcttgacagagctgggcttgcacttccgggtcctggatatgcccacccaagaactgggcctccccgcctaccgcaagtttgacattgaggcctggatgccaggccgaggccgctttggagaggtcaccagtgcttccaactgcacagacttccagagccgccgcctccacatcatgttccagaccgaggctggggagctgcagtttgcccacacggtgaacgccaccgcctgtgctgtcccccgccttctcatcgcgctcctggagagtaaccagcagaaggacggctcagtgctcgtgccccctgccctccagtcctacctcggcactgatcggatcacagcccctacccacgtgcctctccagtacatcggccccaaccagccccggaagcctgggctgcctggccagcctgctgtaagctaagaacccacccacagcagccctcgggggtgtcactgcttcctggagttcaggagaccccggacacctgggacctgtgttgctgagcccgtcctgacatctgtgttcttcctgtcagctccacgcccgggcccctggaccacggggtccacctctcctctgtccttgctgcctcagagtcagtcactgaccctgttatcattgagggtcccagtgggaagcaggacgtctgggctttacggttctagggacaggagaagcagaggaagaggcttccatccctccttccttctttcctcctacagtgctgagcaaaaagtccccaataaatggtcaggacaaagg

SEQ ID NO: 59226 - DNA, 1563 bp, Artificial Sequence
  derived and/or modified sequence
atggccgccagcatggccagaagactgtggcccctgctgaccagaagaggcttcagacccagaggcggctgcatcagcaacgacagccccagaagaagcttcaccaccgagaagagaaacagaaacctgctgtacgagtacgccagagagggctacagcgccctgccccagctggacatcgagagattctgcgcctgccccgaggaggccgcccacgccctggagctgagaaagggcgagctgagaagcgccgacctgcccgccatcatcagcacctggcaggagctgagacagctgcaggagcagatcagaagcctggaggaggagaaggccgccgtgaccgaggccgtgagagccctgctggccaaccaggacagcggcgaggtgcagcaggtgagactggaccccggcgccggcagcatcttcggccccaccttcctgcccttccccggccagctgagcctgctggtggaggcccagctggaggagcagttctacctgcaggccctgaagctgcccaaccagacccaccccgacgtgcccgtgggcgacgagagccaggccagagtgctgcacatggtgggcgacaagcccgtgttcagcttccagcccagaggccacctggagatcggcgagaagctggacatcatcagacagaagagactgagccacgtgagcggccacagaagctactacctgagaggcgccggcgccctgctgcagcacggcctggtgaacttcaccttcaacaagctgctgagaagaggcttcacccccatgaccgtgcccgacctgctgagaggcgccgtgttcgagggctgcggcatgacccccaacgccaaccccagccagatctacaacatcgaccccgccagattcaaggacctgaacctggccggcaccgccgaggtgggcctggccggctacttcatggaccacaccgtggccttcagagacctgcccgtgagaatggtgtgcagcagcacctgctacagagccgagaccaacaccggccaggagcccagaggcctgtacagagtgcaccacttcaccaaggtggagatgttcggcgtgaccggccccggcctggagcagagcagccagctgctggaggagttcctgagcctgcagatggagatcctgaccgagctgggcctgcacttcagagtgctggacatgcccacccaggagctgggcctgcccgcctacagaaagttcgacatcgaggcctggatgcccggcagaggcagattcggcgaggtgaccagcgccagcaactgcaccgacttccagagcagaagactgcacatcatgttccagaccgaggccggcgagctgcagttcgcccacaccgtgaacgccaccgcctgcgccgtgcccagactgctgatcgccctgctggagagcaaccagcagaaggacggcagcgtgctggtgccccccgccctgcagagctacctgggcaccgacagaatcaccgcccccacccacgtgcccctgcagtacatcggccccaaccagcccagaaagcccggcctgcccggccagcccgccgtgagctag

SEQ ID NO: 59227 - protein, 353 aa, Artificial Sequence
  derived and/or modified sequence
MGPLMVLFCLLFLYPAGHCPNPGISLGAVRTGFRFGHGDKVRYRCSSNLVLTGSSERECQGNGVWSGTEPICRQPYSYDFPEDVAPALGTSFSHMLGATNPTQKTKESLGRKIQIQRSGHLNLYLLLDCSQSVSENDFLIFKESASLMVDRIFSFEINVSVAIITFASEPKVLMSVLNDNSRDMTEVISSLENANYKDHENGTGTNTYAALNSVYLMMNNQMRLLGMETMAWQEIRHAIILLTDGKSNMGGSPKTAVDHIREILNINQKRNDYLDIYAIGVGKLDVDWRELNELGSKKDGERHAFILQDTKALHQVFEHMLDVSKLTDTICGVGNMSANASDQERTPWHVTIK

SEQ ID NO: 59228 - protein, 134 aa, Artificial Sequence
  derived and/or modified sequence
  misc_feature (1)..(1): Xaa can be any naturally occurring amino acid
XGHCPNPGISLGAVRTGFRFGHGDKVRYRCSSNLVLTGSSERECQGNGVWSGTEPICRQPYSYDFPEDVAPALGTSFSHMLGATNPTQKTKESLGRKIQIQRSGHLNLYLLLDCSQSVSENDFLIFKESASLMV

SEQ ID NO: 59229 - protein, 158 aa, Artificial Sequence
  derived and/or modified sequence
MRALCIRETCSSELGFSRNWSRRKAGHCPNPGISLGAVRTGFRFGHGDKVRYRCSSNLVLTGSSERECQGNGVWSGTEPICRQPYSYDFPEDVAPALGTSFSHMLGATNPTQKTKESLGRKIQIQRSGHLNLYLLLDCSQSVSENDFLIFKESASLMV

SEQ ID NO: 59230 - protein, 620 aa, Artificial Sequence
  derived and/or modified sequence
MGPLMVLFCLLFLYPAGHCPNPGISLGAVRTGFRFGHGDKVRYRCSSNLVLTGSSERECQGNGVWSGTEPICRQPYSYDFPEDVAPALGTSFSHMLGATNPTQKTKESLGRKIQIQRSGHLNLYLLLDCSQSVSENDFLIFKESASLMVDRIFSFEINVSVAIITFASEPKVLMSVLNDNSRDMTEVISSLENANYKDHENGTGTNTYAALNSVYLMMNNQMRLLGMETMAWQEIRHAIILLTDGKSNMGGSPKTAVDHIREILNINQKRNDYLDIYAIGVGKLDVDWRELNELGSKKDGERHAFILQDTKALHQVFEHMLDVSKLTDTICGVGNMSANASDQERTPWHVTIKPKSQETCRGALISDQWVLTAAHCFRDGNDHSLWRVNVGDPKSQWGKEFLIEKAVISPGFDVFAKKNQGILEFYGDDIALLKLAQKVKMSTHARPICLPCTMEANLALRRPQGSTCRDHENELLNKQSVPAHFVALNGSKLNINLKMGVEWTSCAEVVSQEKTMFPNLTDVREVVTDQFLCSGTQEDESPCKGESGGAVFLERRFRFFQVGLVSWGLYNPCLGSADKNSRKRAPRSKVPPPRDFHINLFRMQPWLRQHLGDVLNFLPL

SEQ ID NO: 59231 - DNA, 1062 bp, Artificial Sequence
  derived and/or modified sequence
atgggccccttgatggtgctgttttgtttgttgtttctataccccgcgggacactgtcctaacccaggcatttcattaggtgccgtgcgcaccggcttcagatttggccacggggacaaggttagataccggtgctcttcaaatctagttctaacgggaagctctgagcgggagtgccaaggcaatggcgtctggtctggaactgagccgatttgcaggcagccctacagctacgactttcccgaagatgtggcccctgcactcggtactagctttagccatatgcttggagctaccaatcctacccagaagacaaaggagtcactgggaaggaaaattcagatacagcggagcggacacctcaacttatatctgctgctggattgttcccagtcagtgtcagagaacgactttctgattttcaaagagtcggcctctttgatggtcgacagaatctttagcttcgaaatcaatgtgtctgttgcaatcataacattcgcctctgaaccaaaggtgctgatgtccgtgctgaatgataactcgcgcgacatgactgaagtaatttctagcctggagaatgccaattataaagatcacgaaaatggcacggggaccaacacttacgccgccctgaattcggtttacctgatgatgaacaaccaaatgagattgctcggcatggagaccatggcttggcaggaaattaggcatgctatcattctgctgaccgacggcaagtctaacatgggggggtctccaaagactgccgtcgatcatatccgggagatcttgaacattaatcagaagcgaaacgactacctggatatatatgcgatcggggtcggtaagctcgacgtggactggcgggaactgaatgagcttggatctaaaaaggatggagaacgtcatgcattcattctgcaggatactaaagcactacaccaggtcttcgagcacatgttggatgtcagcaaactcactgacacaatttgcggagttggcaatatgtccgcgaatgcaagcgaccaggagaggactccatggcatgtaactattaaatag

SEQ ID NO: 59232 - DNA, 1062 bp, Artificial Sequence
  derived and/or modified sequence
atgggccctctgatggtgcttttttgtttgctcttcctgtatccagccggtcactgtcctaatcctgggatctctctgggggccgtgcgtactggattccgctttggacatggcgacaaagtgcgctatcgctgttccagcaatctcgtgctgaccgggagctctgaaagagaatgtcaagggaacggcgtatggtccggaacagagcctatttgccgccaaccttactcttatgatttcccagaggacgtggcaccagcgctgggaacaagcttcagtcatatgttgggtgccacaaatcccacacagaagaccaaggagtccctggggagaaagatccagatacaaaggtccgggcatctcaatctttacttgctcctagactgctcacagagcgtgtctgaaaatgactttctcatttttaaagagtccgcttctctgatggtcgatcggatttttagtttcgaaatcaatgtgagcgtggcaatcattacattcgccagcgagcctaaagtgttgatgtcagtgttgaatgataactccagggatatgaccgaggttatttcaagcctggagaacgccaactataaagatcacgaaaatgggactggaactaacacttatgccgctctgaattctgtgtatctgatgatgaacaatcagatgcgccttctgggaatggaaacgatggcttggcaggagatccggcatgccataattctgttaaccgacggtaaatcgaatatgggcgggtctcctaagaccgccgtagatcacatcagggaaatcttgaacattaatcagaagaggaacgattaccttgatatatacgccattggtgttggtaagctggatgtagactggagagagttgaacgaactgggtagcaagaaagatggcgaacgtcacgcctttattttgcaagatacaaaagccttgcaccaagtgttcgagcacatgctagacgtctccaaactgacagacacaatttgcggagtagggaacatgtcggccaatgccagcgaccaggagcgtactccctggcatgttaccattaagtag

SEQ ID NO: 59233 - DNA, 1062 bp, Artificial Sequence
  derived and/or modified sequence
atgggacccctcatggtgctcttttgcctcctcttcctatatcctgccggccactgccccaatccaggcatatctctcggtgcagtaagaactgggttcaggttcggacacggcgacaaggtgcgttaccgatgttcatccaatctggtgcttaccggatcttcagaacgggaatgccagggcaacggagtgtggagcggcaccgagccaatttgtcggcaaccgtatagttacgacttccctgaagatgttgccccggccctaggcacctcattcagccacatgttgggcgccaccaatccaactcagaagacaaaagaaagtctggggcggaagatccaaattcaaaggtctggacaccttaacctctacctgctcctggactgcagccagtcagtctccgaaaacgattttttgatattcaaggagagcgcctctctcatggttgatcgcattttttcattcgaaataaatgtaagcgtcgccatcattacatttgctagcgaaccaaaggttctaatgagcgtgcttaatgacaatagtagggacatgaccgaggtgattagcagcttggaaaacgcaaactacaaggaccacgaaaacggcacggggacaaacacttacgctgccctaaatagcgtctacctgatgatgaacaatcagatgagactgcttggtatggaaacaatggcctggcaggagattcgccacgctataattctgctcaccgacggcaagagtaacatgggaggaagtcctaagaccgctgtcgaccatattagagaaatattgaatatcaatcagaagagaaacgattacctagacatatatgctattggcgtcgggaaacttgacgtggattggcgcgagctcaacgagctaggctcgaaaaaagacggcgaacggcatgccttcattctgcaggacactaaggccttacatcaggtattcgaacatatgctggatgtctccaagctgacggataccatctgcggcgtgggaaatatgtccgcgaatgccagcgatcaagaacgaaccccttggcatgttactataaagtag

SEQ ID NO: 59234 - DNA, 1062 bp, Artificial Sequence
  derived and/or modified sequence
atgggtccattaatggttctgttttgcctgttatttctgtacccagccgggcattgtccaaatcctggcataagtttgggggctgtcaggactggtttccggtttgggcatggcgataaggtgcggtaccgctgttcttcaaatttggttttgaccggcagctcggaaagggaatgccagggtaatggtgtgtggtccgggactgagccaatctgcaggcagccatatagttatgactttccagaggacgtggcccccgcattgggtaccagttttagccatatgctgggtgccacgaacccaacacaaaaaacaaaggagagtttaggcaggaaaattcagatccagaggtcaggacatcttaacctttacctcttactagactgctctcagtctgtctccgagaatgactttctgatttttaaggaatccgccagcttaatggttgatagaatcttttcatttgagatcaacgttagcgtagctatcataacctttgcttctgagccaaaggtcttgatgagtgtgctcaacgacaatagcagagatatgacggaggtgatttcttcgcttgagaatgcaaactacaaggaccacgaaaatgggactggcacaaacacctatgctgctcttaactcagtctacctcatgatgaataaccagatgcgccttctcgggatggagacgatggcatggcaggaaatacgccacgcgataattctgctgacggacggtaagagcaacatgggtggctcccctaaaactgctgttgatcacattagggaaatcctgaacatcaaccagaagaggaatgattacctggacatttatgccattggggtgggaaagctggatgtagactggcgcgaactgaatgagcttggttccaaaaaggacggtgaacgccacgcattcatcctccaggacacaaaagctttgcatcaggtattcgagcacatgctggatgtcagtaagttgactgataccatctgtggagtaggaaatatgagcgctaatgcctcagatcaggagaggaccccctggcatgttactattaaatag

SEQ ID NO: 59235 - DNA, 1062 bp, Artificial Sequence
  derived and/or modified sequence
atgggccccctgatggtgctcttttgtctgcttttcctctacccagccgggcattgccccaacccaggaatctctttgggcgccgtgcggactgggtttcgctttggccacggcgataaggtgcgatatcggtgttcaagcaacctcgtcctcacaggcagcagcgaacgggagtgccagggcaacggcgtatggagcggaaccgagccgatctgccggcagccctactcctacgatttcccagaggatgtggcgccggcactgggcacatcattttcacatatgctcggggcaaccaatcccacgcagaagaccaaggaaagtcttggcaggaaaattcagatacagaggtctggccacttgaacctctacctcttgctggactgtagccagagcgtaagtgagaacgattttttgatattcaaggagtccgccagtctcatggttgacaggattttcagttttgaaatcaatgtcagcgttgcgattatcactttcgccagcgaaccaaaagtgctgatgagcgtccttaatgacaattcccgcgatatgacagaggttattagttctcttgaaaacgccaactataaagaccacgagaatggcacagggaccaacacctacgcagctctcaatagcgtctacctgatgatgaacaaccagatgcgcctccttgggatggaaacgatggcctggcaggaaattagacatgctattatcctcttgactgatggaaaatctaacatgggcgggtcacccaagaccgccgttgaccacatcagggagatcctcaatattaaccagaagagaaatgattatttggatatttacgctatcggcgtgggtaaattggatgtggactggcgcgagctgaatgagctgggcagcaagaaggatggtgaaaggcacgcgtttattctccaggacacaaaagccctccaccaggtgttcgagcatatgttagatgtttctaagttaacagacacaatctgtggagtgggcaatatgtcggccaatgcttcagaccaagagcgcacaccctggcacgtcaccatcaagtag

SEQ ID NO: 59236 - DNA, 1062 bp, Artificial Sequence
  derived and/or modified sequence
atggggcccctcatggtattgttttgcctcctctttctctacccggcaggacactgtcccaatcctggtatatctttgggtgctgttcgaacggggtttcggttcggtcatggcgacaaggtgaggtacagatgcagcagtaatcttgtattaactgggtctagcgagagggagtgccagggcaatggggtctggagcggtaccgagcccatctgtcgacagccgtacagctatgactttcccgaggatgtggccccggccctgggtaccagtttctctcacatgctgggcgccacaaatccaactcagaagactaaagagagcctggggcgcaaaattcagatccagcggtcaggccatctgaatctctatctcctgctagactgtagtcagtccgtatctgaaaatgattttctaatatttaaggagtccgcaagtttaatggtagaccgtatttttagttttgagataaatgtctctgtcgctattatcacattcgccagtgagcctaaagtgctgatgtcagtgctgaacgataactccagagacatgaccgaagtcatatcaagtctcgaaaatgcaaactataaagaccacgagaatggcacaggaaccaacacctatgccgcattgaattcagtatacctgatgatgaataaccagatgagactcttgggcatggagacaatggcctggcaagagatccgccacgctattatcctactgacagacggaaaaagcaatatgggcggttctcccaagacagctgtggatcacatccgcgaaatcctgaacataaaccagaagcggaatgattaccttgacatctatgcaatcggcgtcgggaagctggatgtggattggagggaacttaacgagttgggttcaaaaaaggatggggagcggcacgctttcattttgcaagacactaaagcacttcaccaggtgttcgagcatatgctcgatgtatccaagctgacggacactatatgcggagtcggaaacatgtctgccaatgcttctgaccaagagcggactccttggcatgtgacaattaagtag

SEQ ID NO: 59237 - DNA, 1863 bp, Artificial Sequence
  derived and/or modified sequence
atgggaccattgatggtgcttttctgtcttttatttctgtatccagccggacattgtccaaaccctggtatttctttgggcgctgtgagaacgggtttcagatttgggcacggggacaaggttcgttatcgatgctcaagtaaccttgtgctgaccggcagttctgagcgagaatgtcagggtaatggcgtatggtctggaacagaacccatttgtagacaaccctatagctacgattttccagaggatgtcgccccggctctgggaacttctttctctcatatgctgggcgcgacaaacccaactcaaaagacaaaggagagcctggggcggaagattcaaatccaacgcagcgggcacttgaatttgtatcttctgctggattgttcccagtctgtgagcgaaaacgatttccttatttttaaggagtccgcctccctgatggtggatcgaattttttccttcgagattaacgtatccgtcgctatcattacctttgcttccgaacccaaggtgttaatgagcgtgttaaatgataactcacgggatatgactgaagtaattagctccctggagaacgctaactacaaggaccatgagaatggcaccggaaccaatacatacgctgctcttaatagcgtatatctgatgatgaacaaccagatgcgacttctcggcatggaaactatggcctggcaggaaataagacacgccataatcttgctgactgatggaaaaagcaacatgggaggttcgccaaaaacagcagtagaccatattcgggaaatcctgaacataaaccagaaaagaaacgattacctagatatttacgctattggcgtgggcaagcttgatgtggactggcgtgagcttaatgaactagggtccaagaaagacggtgagaggcatgcctttatcctgcaggataccaaggccctgcaccaggtgttcgagcacatgctggatgtgtccaaactgactgacaccatttgtggcgttggtaatatgtccgcgaatgcgtccgaccaggaacgtacaccatggcatgtgactatcaagcctaagtcacaagaaacctgcaggggggctttgatttctgaccagtgggttttgacagccgcccattgctttcgcgatggtaatgatcatagtctgtggcgcgtgaacgtcggcgatcctaaaagtcagtggggcaaggagtttttaatcgagaaagccgtgataagccctggttttgacgtgtttgcaaaaaagaaccaggggatcctcgaattctacggagacgatatcgctctgctgaagctggcacaaaaggtgaagatgagcacccacgctagacccatctgtcttccctgcacaatggaagccaatctggccctgcggcgaccccagggctcaacatgtcgagatcacgaaaatgagctccttaataaacagagcgttcctgctcacttcgtagcccttaacggctccaaactgaacatcaatttgaagatgggtgtagagtggacctcatgcgcggaggtagtatcgcaggagaaaacaatgttcccaaacctgaccgatgtcagggaagttgtcactgaccagtttctgtgctcagggacacaggaagatgagtccccatgtaaaggagagagcggaggggcagtgtttctggagcgccgcttcaggttttttcaggtgggcctcgtgagttgggggctgtacaacccatgcctcggcagcgccgataagaattcgcgcaagcgggcgcctcgcagcaaagtgccccctccccgtgacttccacatcaatctgtttcgcatgcaaccatggcttcggcaacacctcggggacgtcctgaactttcttccactctag

SEQ ID NO: 59238 - DNA, 1863 bp, Artificial Sequence
  derived and/or modified sequence
atggggcccctgatggtgctcttctgtctgctgttcctgtacccagccggacactgtcccaaccccggtatcagcttaggtgcggtgaggactggctttagattcggccatggagataaagtacgctatcgatgcagcagcaacctagtgctgacaggctcttccgaaagagagtgccaggggaacggcgtgtggtcaggaacagaacccatttgccggcagccttatagttacgattttcccgaagacgtggcccctgcgctgggtacctccttttctcatatgctgggcgccaccaaccctacccagaagacaaaagagagcctaggccgaaagatccagatccagaggtctgggcacttaaacttatacctattgcttgattgttcccagagcgtgagcgagaatgacttccttattttcaaggagtcagcctccctcatggtggataggatcttttcctttgagatcaatgtctccgtggctataatcacattcgccagcgagcctaaggttctgatgagcgtcctgaacgacaattctcgggacatgaccgaggttatcagtagtctggagaatgcaaactataaagatcacgaaaacggaaccggcactaatacctacgctgccctcaactccgtgtatctgatgatgaacaaccagatgcgactgctgggaatggagacaatggcttggcaggagatcagacacgccatcattctactaactgacggaaaaagtaacatgggagggtccccaaaaaccgcagttgatcacataagagagatcctcaacatcaatcagaagaggaatgattatctggacatttatgccataggggtggggaagctggatgttgactggagagagcttaacgagttgggatccaagaaggatggtgagagacacgcttttatactccaggacacaaaggcgctgcaccaggtgtttgaacacatgctggatgttagcaaactgaccgataccatttgcggtgtggggaatatgtccgctaatgccagcgatcaagagcgaaccccatggcacgtgactattaaacccaaatcccaagagacgtgtagaggggctcttatctccgatcagtgggtcctgactgcggcccattgcttccgtgacggcaatgaccactctctgtggcgggtgaacgttggggatcctaaatctcagtgggggaaagagtttcttatagaaaaggctgtcattagccctggcttcgatgtgttcgctaaaaagaatcaggggatccttgagttttatggcgatgacattgccctgttaaaactcgctcagaaggtgaaaatgagcacacacgccagaccaatttgtcttccctgcactatggaagcgaacctggcactgcgcagacctcagggatccacctgcagggatcacgagaatgaacttcttaacaagcaatcagttcccgctcacttcgtggccttgaacggtagcaaactcaatatcaatttaaagatgggagttgagtggaccagttgtgctgaggtggtgagtcaggagaaaacaatgttcccaaaccttaccgacgtcagggaggtggtgacggaccagttcctctgttccggaacccaagaggacgagtccccgtgcaagggcgagtccggcggcgccgtatttctcgaacgacgattccggttctttcaggtgggattagtcagctggggcctttataacccctgccttggctccgccgataaaaactccagaaaacgagcacctcggtccaaagtgccgccccctcgggatttccatatcaacctcttccgcatgcagccctggttacggcagcatctgggcgatgtgctgaatttcctccccttgtag

SEQ ID NO: 59239 - DNA, 1863 bp, Artificial Sequence
  derived and/or modified sequence
atgggcccccttatggtactgttctgcttactgttcctgtatcccgctggtcactgtcctaaccccggcatttccctgggcgcggtgagaacagggtttaggtttggccatggggacaaggtccggtatcgctgttcatccaatctggtcctaacaggctcatcagaacgggagtgtcaaggcaacggggtctggtcagggaccgagcctatctgtcggcagccttatagctacgactttccagaagatgtggccccagctcttggtaccagcttcagtcacatgcttggggccaccaaccccacccagaagacaaaagaaagtctggggagaaagattcagatccagaggtcagggcacctcaacctttacctcctgctggattgcagccaatccgtgtccgagaatgatttcttgatttttaaggaaagcgcttccctcatggttgaccgtatcttcagttttgaaatcaatgttagcgtagcaatcattacctttgcctctgaaccgaaggtcttgatgagcgtattgaacgacaattcgcgcgacatgacggaggtgatttcatcattagaaaatgcaaactataaagatcacgaaaatgggacagggacaaatacgtatgcagcgttgaattccgtttatctgatgatgaacaaccaaatgcgtctgcttgggatggagacgatggcctggcaggagatccgtcacgccatcatcctgttgacggatggcaagtcaaatatgggcggaagtcctaagacagccgtggatcatatccgggagattcttaacattaaccagaaaaggaacgattatctcgatatttacgcaattggagtgggtaaattagatgtcgattggcgcgaattaaatgagctcggatcaaaaaaagacggtgaacgccatgcgttcatccttcaggatactaaagcgctacaccaggtttttgaacatatgctggacgtttctaaactgacggatacaatttgtggcgtgggcaatatgagtgccaatgcctccgatcaggaacggaccccatggcacgtgaccatcaagcccaaatctcaggaaacctgccgtggagccctaatatccgaccagtgggtcttgaccgctgcccactgcttcagggacgggaacgatcatagcctgtggagggtaaacgtcggggaccccaaatcgcagtggggtaaagagttccttatagagaaagcggtgatttcgccaggctttgacgtatttgcgaaaaagaatcaaggtatcctcgagttttacggcgatgatatcgctttactgaaactggcgcagaaggtgaagatgagcactcacgcgcggccgatatgtttgccgtgcaccatggaagccaacctggcactcaggcggcctcagggctccacctgtcgcgaccacgaaaacgagctgctaaataagcagtccgtacccgcccacttcgtggcactaaatggcagtaaactgaacataaatttgaaaatgggagttgagtggacctcttgcgccgaggtggtcagccaggaaaaaacaatgttccccaaccttaccgatgttagagaggttgtgacagaccagttcttatgctccgggactcaagaagacgagagcccttgtaaaggcgaatccgggggcgccgtattcttggagagaagattcaggttcttccaggtggggttggttagttggggcctttacaacccctgtctcggaagcgctgataaaaactcacgcaagcgcgctccccgttctaaggtaccaccaccaagagattttcacattaatttatttaggatgcagccatggttgcgccaacacctgggggacgttctcaacttcctccctttgtag

SEQ ID NO: 59240 - DNA, 1863 bp, Artificial Sequence
  derived and/or modified sequence
atggggccactgatggttctcttttgcctgctcttcttgtatccagctggccactgcccgaacccaggcatttctctgggggctgtgcgcaccggctttagattcgggcacggggataaggtgagatatcgttgcagcagcaatcttgtgcttaccggaagttccgagcgggaatgccagggtaatggggtttggtccggcacagagccaatatgcagacaaccatacagctacgattttcccgaagatgtggctcccgcccttggtacatcattcagtcacatgttgggcgccacaaatccgacacagaaaactaaggagtcactcggacggaagatccaaattcaacgatccggccacctgaacttgtacctcctgcttgattgcagccagagcgtctccgaaaacgattttctcatctttaaagagagcgctagtcttatggttgatcgcatcttctcattcgagattaacgtttcagtggcgatcattacatttgcctccgaacctaaagtactgatgtccgtgctcaatgacaactcgagggacatgacagaagttatctctagcctggagaatgcgaattacaaagatcatgaaaatggtactgggaccaatacctacgctgccctgaatagtgtgtacctgatgatgaacaatcagatgcgactgcttggaatggagaccatggcttggcaagagatccggcatgctattatcttgttaactgatggaaagtcaaacatgggtggcagccccaaaaccgccgtagaccacattcgggagatcctcaacatcaaccagaagcgtaacgactacctggacatttacgcaatcggtgtcgggaaactggatgtggattggcgagagttgaatgagcttggctctaagaaagatggcgaacggcatgccttcatcctgcaggacaccaaagcactgcaccaggtttttgagcatatgctcgacgtgtccaagcttaccgacacgatatgcggagtgggtaacatgtctgctaatgcctccgatcaagagcgaaccccttggcatgtcacaattaaaccgaagagccaggagacctgccggggagcactgattagcgatcagtgggtcctaaccgccgctcattgcttccgagacggtaatgaccactcactctggagggtcaacgttggagatccgaagtctcaatggggcaaagaatttctcatagagaaggcggtaatttcccccgggttcgatgtgttcgcgaagaagaatcaggggatcctggagttttacggagacgacattgcccttcttaaacttgcacagaaagtgaaaatgagtacacatgcccggcccatttgcctgccatgcactatggaggcaaatctggctctgagaagacctcagggatctacctgccgcgatcacgaaaatgagctgctgaacaagcagtccgtgcctgcacatttcgtcgcactcaatggcagcaagttgaatattaacctgaagatgggcgtggaatggacttcttgcgcagaagttgtctctcaagaaaagaccatgttccccaatttgacagacgttcgcgaggtggttactgaccagtttttgtgcagcggaactcaggaggacgaatcaccatgtaagggagagtctgggggcgctgtgttcctagagcgcagattccgattttttcaggtcggtttggtatcatggggcctgtataacccctgtctggggagtgctgataagaactctcgcaagcgagctccccgcagtaaggtgcctccaccgcgcgacttccacatcaaccttttcagaatgcagccctggctaagacagcacctaggcgacgtgttgaattttctccccctctag

SEQ ID NO: 59241 - DNA, 1863 bp, Artificial Sequence
  derived and/or modified sequence
atgggtcccctcatggtgctgttctgcctcttgttcttgtaccctgcgggccactgtcccaaccctggcataagcctcggggctgtgagaacaggttttaggttcggccatggcgacaaggtgaggtaccggtgctcctctaatcttgtgctcaccggaagcagtgaaagggaatgccagggcaacggagtgtggtcaggaactgagcccatctgtcgccagccctattcctacgatttccccgaggatgtagccccagcactgggtacctctttttcacacatgttgggtgccactaatccgacccaaaagaccaaagagagtcttggacggaagatacagatacagcgaagtggtcatctgaacctgtacctgctgttggactgcagccagtcagttagtgaaaacgatttcctgatctttaaagaatcagcatctctaatggtggatcgcatattctcgtttgagattaatgtcagcgtcgctatcatcacttttgcctctgaacccaaggtgctgatgtcagtcctcaatgataattctagggatatgacagaagtgatttcttctcttgaaaacgcaaactacaaggatcacgagaatgggaccggaacaaatacttatgcagcgctcaactcagtgtatttgatgatgaacaaccaaatgaggctgctggggatggaaaccatggcttggcaggagatccgccatgcgatcatactcctcaccgacgggaagtccaatatggggggctcgcccaagacagcagtcgaccacatacgtgagattctgaacatcaatcagaaacgcaatgactatctggatatctatgcaataggtgtgggtaagctggatgtcgactggagggaattgaatgagctgggctctaaaaaggatggtgaacggcatgcttttatcctccaagatactaaagcgctgcatcaagtgttcgaacacatgctggatgtatccaagttgacagataccatatgcggagtgggaaatatgagtgcgaacgcttccgatcaggagcgcaccccgtggcacgtgactataaaacctaaatcccaagagacctgcaggggcgcccttatcagcgatcagtgggtccttactgcggcccactgttttcgagatggcaacgatcattcgctgtggcgagtaaatgtgggtgaccccaaatcccagtgggggaaggaatttctgattgagaaggcggttatcagtccaggctttgatgtttttgctaaaaagaaccaggggatactggaattctatggcgacgatattgctctgctcaaactcgctcaaaaggttaagatgtccactcatgcccgaccaatctgtctgccttgtacaatggaagcgaatctggctcttcgacgccctcagggctctacctgcagagatcacgaaaatgagttactaaataagcagtccgttcctgctcactttgtcgcgctgaatggtagcaagctgaacatcaatttgaaaatgggggtcgagtggacctcttgtgctgaggtggtctcacaggagaagacaatgttcccaaatttgacggacgtgagagaagtggttactgatcagtttctgtgcagcgggacccaggaggatgagagcccttgcaaaggtgagtccggtggagcggtatttctagagaggcgtttcaggttttttcaagtgggcctggtgtcttggggcctgtacaacccttgtttgggcagcgctgacaaaaacagccgcaaaagggcaccacgatccaaggtgccacccccaagggactttcatatcaatctgttccggatgcagccctggcttcgacagcacctgggcgatgtactgaattttctccccctatag

SEQ ID NO: 59242 - DNA, 1863 bp, Artificial Sequence
  derived and/or modified sequence
atgggtcccctcatggtgttgttttgcttgttattcctgtatcctgcaggccactgccccaatccggggattagcctgggcgctgttcgaaccggattccgcttcggtcacggcgataaagtaagatatcgatgctcatctaatctagtcttgactggcagttccgagcgagagtgccagggtaacggcgtgtggagtggcacagaacctatttgccgccagccttatagttatgatttccccgaggatgtagctccagcacttggaacttccttcagtcatatgctaggtgctacaaacccgacacagaagaccaaagagagtctcggacgaaaaatccaaattcagagatccgggcatttaaacctttatttactactggactgtagtcagtccgtgtctgagaatgacttcttaatatttaaagagagtgcatccctgatggtagatcgcatcttctcctttgagattaacgtgtccgtagccatcatcacgttcgcctctgagccaaaggtgttgatgtcagttctgaatgacaatagtcgcgacatgactgaagttatttcatccttagagaacgcaaactacaaagaccacgagaacgggaccggaacaaacacctatgcagccctcaacagcgtctacctgatgatgaacaaccagatgagactgttgggcatggagacaatggcctggcaggagatccgacatgctatcatacttctgaccgacggaaagtcaaatatggggggaagtcccaagaccgctgttgatcatattagggaaattctgaacatcaaccagaagcgtaatgattatttagatatttacgcgattggggtgggtaagttggacgtcgactggcgggaattgaacgaattgggttccaagaaggacggtgagaggcatgcgttcatacttcaagatacaaaggctttgcatcaggtgttcgaacatatgttggacgtgtctaagttaacagatacaatctgcggagtcggaaacatgtccgctaacgccagcgatcaggagaggacgccatggcatgtgaccataaagccaaagagtcaggaaacctgtcggggcgcgctaatatccgaccagtgggtactgactgctgctcattgcttccgggatgggaatgatcactccctttggcgggtgaatgtgggagacccaaagtctcagtggggcaaggagttcctcatcgagaaggcggtgatttctccaggcttcgacgtttttgctaaaaaaaatcagggaatcctggagttctatggcgacgatattgcgcttctgaaactcgcccagaaagtcaaaatgtctacccacgctagacccatttgtttaccatgtactatggaggctaatctggctcttcgtcgtccacagggatcgacgtgtcgagaccacgaaaacgaactcttgaacaaacaatcagtgccagcgcacttcgtggccctcaacgggagtaagctgaatatcaatctgaaaatgggcgtggagtggacctcttgtgcagaagtcgtcagccaagagaaaacaatgttccctaacctcacggatgtgcgggaagtggtgactgatcaattcctgtgctcaggcacacaggaggacgagagcccttgtaagggggagagtggcggcgccgtgtttctggagcggaggttcagatttttccaggtagggcttgtatcctgggggctttataatccatgtcttggttccgcagataagaattcccgcaagagggctccacggagcaaggtgcctcctcccagagactttcatattaacctgtttagaatgcaaccctggttgcggcagcacctgggggacgtgctcaacttcctccccctctag

SEQ ID NO: 59243 - DNA, 1863 bp, Artificial Sequence
  derived and/or modified sequence
atgggtccattaatggtactgttctgccttcttttcttgtaccctgccggccactgtccaaacccggggatatcccttggggcagttcgcaccggctttagatttggccacggagataaagtaagataccggtgcagctctaatttggtccttaccggatcctctgagagggaatgccagggcaacggcgtttggtccgggacggaacctatctgtaggcagccgtacagctacgacttccctgaggacgtggcaccagcgctcggtacttctttctcccatatgctgggggcaactaaccccacccaaaaaactaaggaatccctgggaagaaaaatacagattcagcggtctggtcacttgaacctttatttactgcttgactgcagtcagagcgtgtcagaaaatgactttttgatttttaaagagagcgcctctctgatggttgaccggatttttagctttgagatcaatgtttctgtggccatcatcactttcgctagcgagcctaaggtgctcatgagcgtgctcaacgacaatagtagagatatgacagaagtgatttcctctctggaaaacgccaattataaagatcatgaaaatgggaccggcactaacacatatgccgctcttaactcagtctatctgatgatgaacaaccagatgcgcttgcttgggatggaaactatggcttggcaggagatccgccatgcaattattctgcttacagatggtaaatccaacatggggggcagtcccaaaaccgccgtagatcacatcagggaaattctgaatattaatcagaagcgtaacgattacttagacatttacgcaatcggggtcggaaaactggatgtggactggagggaactgaacgagctggggtcaaaaaaagacggagaacgacacgctttcattcttcaggataccaaggcacttcatcaagttttcgaacatatgttagatgtgtctaagcttacagatacaatctgcggagtgggtaacatgtccgctaatgcttctgaccaggaaaggacgccgtggcacgtaacaatcaaaccaaagtcacaggagacctgtcggggagctctgattagcgaccagtgggtgctgacagccgcacactgtttcagagacggcaatgaccatagtctttggagggtcaacgttggagatcctaagagtcaatggggcaaagagtttctcatagaaaaggctgtgattagccccgggttcgacgtcttcgcaaaaaaaaaccagggaatcttagaattttatggtgatgatatagccctgctcaagttagcccagaaggttaagatgtccacacacgcccggccaatttgcctgccttgcaccatggaggcaaaccttgccctgcgacgcccacagggcagtacctgtcgcgaccatgaaaatgagttgctgaacaagcagtccgtgccagcccacttcgtagcgcttaacggaagcaagttaaacattaatctcaagatgggcgttgaatggacctcctgtgctgaggtagttagccaagagaaaactatgttccctaatcttactgatgtaagggaggttgttactgatcaatttttgtgttccggaacccaagaggatgaatcaccctgcaagggcgagtcaggaggagccgtttttctggaacgccgttttaggttttttcaggtcgggctcgtatcctggggactgtacaacccatgccttggcagcgccgataaaaactcccggaagagagctccccgcagtaaggtcccacctccccgagactttcacatcaacctgtttagaatgcagccgtggttgcgtcaacacctgggtgacgtgttgaatttcctgcccctctag

SEQ ID NO: 59244 - DNA, 1062 bp, Artificial Sequence
  derived and/or modified sequence
atgggccccctgatggtgctcttctgcctgctcttcctgtacccagctggccactgccccaaccctggcatcagcctgggcgctgtgaggacaggcttccgctttggacatggagacaaggtgcgctaccgctgcagcagcaacctggtgctgaccggcagcagcgagcgggagtgccagggcaatggagtgtggagcggcacagagcccatctgccggcagccctacagctatgacttcccagaagatgtggccccagccctgggcaccagcttcagccacatgctgggcgccaccaaccccacccagaagaccaaggagagcctgggcaggaagatccagatccagaggagcggccacctgaacctgtacctgctgctggactgcagccagagcgtgtctgaaaatgacttcctgatcttcaaggagagcgccagcctgatggtggaccgcatcttctcctttgagatcaacgtgtctgtggccatcatcacctttgccagcgagcccaaggtgctgatgtctgtgctgaatgacaacagccgggacatgacagaggtgatcagcagcctggagaatgccaactacaaggaccatgaaaatggaacaggcaccaacacctatgctgccctgaacagcgtgtacctgatgatgaacaaccagatgaggctgctgggcatggagaccatggcctggcaggagatcagacatgccatcatcctgctgacagatggcaagagcaacatgggcggcagccccaagacagctgtggaccacatccgggagatcctgaacatcaaccagaagagaaatgactacctggacatctatgccatcggcgtgggcaagctggatgtggactggagggagctgaatgagctgggcagcaagaaggatggagagagacatgccttcatcctgcaggacaccaaggccctgcaccaggtgtttgagcacatgctggatgtgtccaagctgacagacaccatctgtggggtgggcaacatgtctgccaatgccagtgaccaggagaggaccccctggcacgtgaccatcaagtag

SEQ ID NO: 59245 - DNA, 1863 bp, Artificial Sequence
  derived and/or modified sequence
atgggccccctgatggtgctcttctgcctgctcttcctgtacccagctggccactgccccaaccctggcatcagcctgggcgctgtgaggacaggcttccgctttggacatggagacaaggtgcgctaccgctgcagcagcaacctggtgctgaccggcagcagcgagcgggagtgccagggcaatggagtgtggagcggcacagagcccatctgccggcagccctacagctatgacttcccagaagatgtggccccagccctgggcaccagcttcagccacatgctgggcgccaccaaccccacccagaagaccaaggagagcctgggcaggaagatccagatccagaggagcggccacctgaacctgtacctgctgctggactgcagccagagcgtgtctgaaaatgacttcctgatcttcaaggagagcgccagcctgatggtggaccgcatcttctcctttgagatcaacgtgtctgtggccatcatcacctttgccagcgagcccaaggtgctgatgtctgtgctgaatgacaacagccgggacatgacagaggtgatcagcagcctggagaatgccaactacaaggaccatgaaaatggaacaggcaccaacacctatgctgccctgaacagcgtgtacctgatgatgaacaaccagatgaggctgctgggcatggagaccatggcctggcaggagatcagacatgccatcatcctgctgacagatggcaagagcaacatgggcggcagccccaagacagctgtggaccacatccgggagatcctgaacatcaaccagaagagaaatgactacctggacatctatgccatcggcgtgggcaagctggatgtggactggagggagctgaatgagctgggcagcaagaaggatggagagagacatgccttcatcctgcaggacaccaaggccctgcaccaggtgtttgagcacatgctggatgtgtccaagctgacagacaccatctgtggggtgggcaacatgtctgccaatgccagtgaccaggagaggaccccctggcacgtgaccatcaagcccaagagccaggagacctgccgcggggccctgatcagtgaccagtgggtgctgacagctgcccactgcttcagagatggaaatgaccacagcctgtggagggtgaatgtgggggaccccaagagccagtggggcaaggagttcctgattgagaaggccgtcatcagccctggctttgatgtgtttgccaagaagaaccagggcatcctggagttctatggagatgacatcgccctgctgaagctggcccagaaggtgaagatgagcacccacgcccggcccatctgcctgccctgcaccatggaggccaacctggccctgcggcggccccagggcagcacctgccgggaccatgaaaatgagctgctgaacaagcagagcgtgcctgcccactttgtggccctgaatggcagcaagctgaacatcaacctgaagatgggcgtggagtggaccagctgtgccgaggtggtgtcccaggagaagaccatgttccccaacctgacagatgtgcgggaggtggtgacagaccagttcctgtgcagcggcacccaggaggatgagagcccctgcaagggggagagcggcggcgctgtgttcctggagcggcgcttccgcttcttccaggtgggcctggtgtcctggggcctgtacaacccctgcctgggcagcgctgacaagaacagcaggaagagggcccccaggagcaaggtgcccccaccccgggacttccacatcaacctcttcaggatgcagccctggctgcggcagcacctgggagatgtgctgaacttcctgcccctgtag

SEQ ID NO: 59246 - DNA, 1062 bp, Artificial Sequence
  derived and/or modified sequence
atgggccccctgatggtgctgttctgcctgctgttcctgtaccccgcaggacattgcccaaatccaggaatcagcctaggtgcagtgcggactgggtttagattcggccacggcgataaggtccggtatcgctgctctagcaacctggtactgactggttcctccgagagggagtgtcaaggaaatggcgtctggtctggcaccgaaccgatctgcaggcagccgtactcttacgattttcccgaggatgttgccccagcactgggaaccagcttcagccatatgctcggggcaactaatccaacccagaagacaaaggaaagtctgggtaggaagattcagattcagcggtccggccatcttaacttgtatctgcttttagattgctctcagtccgtcagtgagaatgactttctcatcttcaaggagtctgccagtctgatggtggatcgaatcttctcttttgagattaacgtgagtgtggctattatcactttcgcgtccgagccaaaggttctcatgagtgttttgaatgacaactcgcgggacatgacagaggtcatctcctccttagaaaatgctaattataaggaccatgagaacggcacagggaccaacacatacgcagccctaaactcagtctacctaatgatgaacaaccaaatgagactgcttggcatggagacaatggcatggcaggagatccgccatgccatcatcttgctaacagacggcaaaagcaatatggggggttctccaaagacagctgtggaccatattagggaaatactgaatattaatcaaaagcggaatgactatttggacatctatgcaattggcgttgggaagttggatgtcgactggcgagagctgaacgagttgggatctaaaaaagacggggagcggcacgcttttatcctccaggataccaaagcactccaccaagtctttgagcatatgttggacgtatccaaactcaccgacacaatctgcggcgtcggcaatatgagcgccaacgccagcgaccaggagagaactccatggcatgtgacaattaaatag

SEQ ID NO: 59247 - DNA, 1062 bp, Artificial Sequence
  derived and/or modified sequence
atgggccccctgatggtgctgttctgcctgctgttcctgtaccccgctggtcattgtcccaaccccgggatctcattaggggctgtgaggaccggatttcggttcgggcatggcgacaaggtccgctatcgctgctcctctaacttggtgctgactggctcttccgagcgggaatgtcagggcaacggagtgtggtccggaactgaaccaatttgtagacagccctattcgtatgactttcccgaggacgtggccccagccctcggcacatccttttcacacatgcttggcgcgaccaatccaacacaaaaaactaaagaaagtctgggcagaaagatacagatacagagatccggacacctgaatttgtacttgcttttagattgtagccaatccgtgtctgaaaacgacttcctcattttcaaggagagtgcctctcttatggtagatagaattttcagctttgaaattaacgtatcagtcgctattataactttcgcatcagaacctaaggtcctgatgagtgtgttgaacgataactcccgtgatatgaccgaggtgattagcagtttagagaatgcaaattataaggatcatgaaaacggcactggaaccaatacttacgccgcccttaattctgtatacctcatgatgaacaatcagatgaggctgctgggcatggagacaatggcatggcaggagatccgccacgccatcatactcctgacagacggaaagtctaacatgggcggctcgcccaaaaccgccgtggatcatatccgagaaattttgaacattaatcagaaaaggaatgactacctcgatatttacgcaatcggcgttggtaaactcgatgtggactggagggaactcaacgagttagggtcaaagaaggatggtgagcggcacgcctttattctgcaagacactaaagctctgcaccaggtatttgagcacatgctggatgtctctaaacttacagacaccatttgtggggttggtaacatgtccgccaatgctagcgaccaggagaggaccccatggcatgtgacaattaaatag

SEQ ID NO: 59248 - DNA, 1062 bp, Artificial Sequence
  derived and/or modified sequence
atgggccccctgatggtgctgttctgcctgctgttcctgtaccccgccggccactgtccaaaccccggcatcagcctgggtgccgtgcgaacaggatttagattcggccacggagacaaagtccggtacagatgcagcagcaacctggtgcttacggggtctagcgagagagagtgccagggcaatggagtgtggtctggcacagagcccatctgtcggcaaccctacagctatgactttcccgaagatgtggcacccgctctaggtacaagctttagccatatgctgggagctactaaccctacgcaaaagacaaaggaatctctaggaagaaagatccagattcagaggtccggccacctgaacctgtacctcctgctcgattgctctcagtctgtgagcgagaatgacttcctgatttttaaagaatctgcatcgttaatggtggaccggatcttctcatttgagatcaacgtaagtgtcgctataattaccttcgcttccgagccaaaggtcctaatgagtgtgctgaatgacaactccagagacatgactgaggtcataagctctctggagaacgctaattacaaggaccatgagaacggcaccggtacaaacacttacgcagcactgaatagtgtgtatctcatgatgaataatcagatgcggcttcttggcatggaaaccatggcctggcaggagatcagacatgccataatcctgctcaccgatgggaagagtaatatgggcggaagcccgaaaaccgcagtcgaccacatccgggagatattaaatatcaaccagaagcgtaacgattacctggacatctacgctatcggagtgggcaagctggacgtggactggagagagcttaatgagcttggctccaaaaaagacggagaacggcacgcctttatcctgcaagacactaaagctctccaccaggtgtttgaacacatgctcgatgtgtctaaactgactgacacgatttgcggcgtgggtaatatgtccgcaaacgcatctgaccaggaaaggacaccgtggcatgtgacaatcaaatag

SEQ ID NO: 59249 - DNA, 1062 bp, Artificial Sequence
  derived and/or modified sequence
atgggccccctgatggtgctgttctgcctgctgttcctgtaccccgccggccattgccctaatcctggcatctcactgggcgccgtgagaaccgggtttaggttcggccatggagataaggttcgttaccgctgttcctccaatctcgtacttaccgggtccagtgaacgcgagtgccagggtaatggtgtatggagcggcactgagcctatttgccgccagccttactcgtacgatttccctgaggacgtggcgcccgcactagggacctcgttttcccacatgctgggtgcaactaatcccacacaaaagactaaggaatctctggggagaaaaattcagattcagcgctccggccaccttaatttatatctactgcttgattgctcccagagcgtgagcgagaacgactttttaatcttcaaggagtccgcctcgctgatggtggatcgcattttctcatttgagattaatgtgagcgtggccataatcacctttgcatcagagcccaaggtcttaatgtcagtcctgaacgacaactctcgcgatatgactgaagtgatctcgagtctagaaaacgctaactacaaggaccacgaaaatggaaccggcaccaacacatacgcagcccttaactcagtgtacttaatgatgaacaaccagatgcgacttctcggcatggaaacgatggcatggcaggagatacggcacgccattatacttctgactgatggaaagtcaaatatggggggttctcccaagaccgccgtcgatcacatccgcgagatcctgaatattaaccagaagcgcaacgactacttagacatttatgccattggggtggggaaacttgacgtcgactggcgcgagttgaatgagttgggatccaaaaaggatggcgagcggcacgctttcattctgcaggacacgaaggctctgcaccaagtgttcgaacacatgctggatgtatcaaaactgacggatacgatatgtggagtgggcaatatgtccgctaatgcctcagatcaggagcgcacgccttggcacgtgaccattaagtag

SEQ ID NO: 59250 - DNA, 1062 bp, Artificial Sequence
  derived and/or modified sequence
atgggccccctgatggtgctgttctgcctgctgttcctgtaccccgctggtcattgcccaaatcctggaatctctctgggagctgtgcgcactgggttccgatttgggcacggtgacaaagtgcgctaccgctgttcctccaatttagtgctcactggatcctcagagagagagtgccaggggaacggcgtgtggagtggcaccgagcctatttgcaggcaaccctacagttacgacttcccagaggatgttgccccagccttagggaccagttttagccatatgctgggagctactaaccccacgcagaagactaaagagtccctggggaggaaaattcagatccagagatctggacacctcaatttatacttgctgctggactgttctcagtccgtgagcgagaatgactttctgatcttcaaggaaagcgcctctttaatggtggacaggattttttcctttgagatcaacgtgagcgtagctatcatcactttcgcttcggaacccaaagtcctcatgtccgtgttgaacgataactctcgagacatgaccgaagttatcagcagtctcgagaacgctaattataaggatcacgaaaatggtacaggaaccaacacttacgctgccctgaacagcgtgtacttaatgatgaacaaccagatgaggttgctgggtatggagacaatggcttggcaagaaattaggcatgcaatcattctcttgacagatggaaagagcaatatggggggttctccaaaaacagcggtggaccatataagggaaatactcaacataaatcaaaaacgaaacgactatctggacatttatgcaattggggttggaaagctcgacgtcgactggcgcgaattaaatgaacttggctccaagaaagacggtgaaaggcacgcgtttatcctccaggacacaaaggcgttgcaccaggtgttcgaacatatgttagatgtgagcaagctaacagacactatctgcggcgttggcaacatgagcgccaatgcctctgaccaagagcgcacaccatggcatgtgaccattaagtag

SEQ ID NO: 59251 - DNA, 1062 bp, Artificial Sequence
  derived and/or modified sequence
atgggccccctgatggtgctgttctgcctgctgttcctgtaccccgccggacactgccccaatcccggcatctccctcggcgccgttaggaccgggtttcgcttcggccacggagacaaagtgagatatagatgtagttctaacctagtgttgacaggatccagtgagcgtgaatgccaggggaatggcgtctggtctggcacagagcccatttgccgtcaaccatactcctacgatttccctgaggacgtggcaccagctctcggcacctcattttcccatatgctgggagccaccaatccgacccagaagacaaaggaaagcttggggcgtaaaatccagatccagaggagcggccaccttaatctgtatttgctgctcgattgttcccagagtgtgagtgaaaatgattttcttatttttaaagagagcgccagcctcatggtggatcgcatattctcattcgagattaatgtctctgttgctataattactttcgcatcagaacccaaggtgcttatgtccgtgttgaacgataactcaagagacatgactgaagtaatctcatctcttgagaacgcgaactataaagaccacgaaaatggaactggcactaacacctacgcagccctaaactcagtgtacctgatgatgaataaccaaatgaggctgctgggcatggagaccatggcctggcaagaaattaggcacgccatcattctgctaaccgacgggaaatccaatatgggaggcagtccaaaaaccgccgttgatcacattcgggagatattgaacattaatcaaaaacggaacgattatctggacatctatgcgattggcgtcggtaaactcgatgtggattggagggagctcaacgaactcgggtcaaaaaaggacggggagcgccacgctttcatcttgcaagacaccaaggctctgcaccaagtgttcgaacacatgctggatgtatcaaagctgaccgacacaatatgcggcgttgggaatatgagcgccaatgcttctgatcaagaaaggaccccgtggcacgtcacaattaaatag

SEQ ID NO: 59252 - DNA, 1863 bp, Artificial Sequence
  derived and/or modified sequence
atgggccccctgatggtgctgttctgcctgctgttcctgtaccccgccggacactgccctaacccagggatttcgctgggcgccgtccgaactgggttccgctttgggcacggcgacaaagtgcgataccgttgcagttccaacctcgtactcacaggcagctcagagcgagaatgccaggggaatggcgtgtggtccggaacggagcctatttgcagacagccctatagctatgacttccctgaggacgtcgcgcctgccctcggcacatcattctcacacatgctaggggcaaccaaccctacccagaaaaccaaggagagcctgggacggaagattcagatccagaggtcagggcacctgaacctctacctgctgctggactgttctcagtccgtgtcagaaaatgacttcctgatctttaaggagtcagcgtctctgatggttgatcgcatcttttcttttgagataaatgtttcagtggctataattacctttgcctccgaacccaaagtcttgatgagcgttctgaacgacaattcgagagacatgaccgaggtcataagctctctcgaaaacgccaattataaggaccacgagaacgggaccggcactaatacctacgctgccctgaactcggtttacctgatgatgaacaatcagatgcggctgctggggatggagactatggcctggcaagaaatccgacacgccatcatcctcttgacggatggcaagtccaatatgggagggtctcccaagactgctgtcgaccacatccgcgaaatcctgaatatcaaccagaagcgtaacgattatttggacatctatgccatcggagtggggaagttagacgtggactggcgggagcttaacgagttgggatctaaaaaggacggcgagaggcacgcattcatcctgcaggacactaaagcactgcaccaagtctttgaacatatgctggacgtctccaagttaaccgatactatttgtggcgtcggaaacatgtctgctaacgcgagtgaccaggagcggacgccatggcatgtcaccatcaaaccaaaatcacaggaaacctgccggggagccctcatcagcgaccaatgggtcctcacggcagcccattgcttccgagacggcaatgaccattctctgtggcgtgttaacgtgggggaccccaagtctcagtgggggaaagagtttctgatcgaaaaggcagtcatctccccaggtttcgacgtttttgccaaaaaaaatcagggcatcctggaattttacggagacgatatcgctctccttaagcttgcacagaaggtaaagatgtctacacatgcccggcccatatgtctaccatgtaccatggaagctaacctggcactaaggaggccacaggggtcaacttgcagagatcacgagaacgaactcttgaacaaacagagtgttccggctcattttgtagccctgaacgggtcaaagctgaacattaatttaaagatgggtgtggaatggacatcttgtgcggaagtggtatcgcaggagaagactatgtttccaaacctgaccgacgtaagggaggtggtgactgatcagttcctgtgctccggcacacaggaggatgaaagtccctgcaaaggtgaaagcgggggagcagtgttcctagagcgccggttccggttctttcaggttggcctggtgtcttggggattgtacaacccttgtctcgggtccgcagataagaattcccggaagcgtgctccacgctccaaggttccccctcctcgtgacttccacattaacctgtttaggatgcagccgtggttaaggcagcacttgggcgacgtactcaactttctgcccctttag

SEQ ID NO: 59253 - DNA, 1863 bp, Artificial Sequence
  derived and/or modified sequence
atgggccccctgatggtgctgttctgcctgctgttcctgtaccccgccggacactgcccaaaccccgggatatcgctaggggctgtgagaactgggtttcgctttggccacggcgataaagtccgctacagatgcagctctaaccttgttctcacaggatcatccgagcgcgaatgccagggaaacggggtgtggagcggaacagagccgatctgcagacagccatacagctacgactttcctgaagatgtggctccagcgctggggacctcattctcccacatgctgggtgcgacgaatcctacgcaaaagacaaaggagtctctcggcaggaaaattcaaatccagaggagcggtcacctgaatctctatctgcttttggactgttcacagtctgttagtgagaatgactttttgatattcaaggagtctgcctccttaatggttgaccgaatcttctcctttgagatcaatgtgtcagtggccatcattacgttcgccagtgagcccaaagtactcatgtccgtgctgaacgacaactcgagggacatgaccgaagtcatctccagtttggagaatgctaactacaaagaccatgagaacgggacaggaactaatacctatgcagctctgaacagcgtgtacctgatgatgaacaaccaaatgaggcttcttggcatggagacaatggcgtggcaggagattaggcatgccatcatcctactaacagacggcaagtctaatatggggggatcacctaagactgccgtagatcacatccgtgaaatcctcaacattaaccagaagcgtaacgactatctggatatctatgctatcggcgttggcaagttagacgtggattggcgggagcttaatgaactgggatctaagaaagatggcgagaggcacgccttcattcttcaagatactaaggccctgcatcaggtgttcgaacacatgctggacgtgtcaaagttgactgatacgatctgtggggtaggcaatatgtcggccaatgcctccgatcaggagaggaccccatggcatgtgacaattaagccgaaatcccaggaaacatgccgcggcgccctgattagtgaccagtgggtcttgacagccgcccactgctttagagatggaaacgaccattccctatggcgggtgaacgtgggggatcctaaatcacagtgggggaaggaattcctgatcgagaaggccgttatctctcctgggttcgatgtttttgccaagaaaaatcagggcattctggagttctacggagacgacattgcactcttgaaactggcccagaaggtgaagatgagtacccacgccaggcccatttgcctgccatgcactatggaggcaaacctggccctgagaagacctcagggatcgacttgccgagaccatgaaaacgaactgctcaacaaacagagcgtacccgcacactttgtcgccctcaacggttctaaactgaacatcaatcttaagatgggcgtagaatggacctcatgcgctgaagtagtgtcccaggaaaaaacgatgttcccaaatcttactgacgtgagggaggtcgtgaccgaccaatttctgtgctcaggaactcaggaagacgagtcaccatgcaagggagaatcgggtggtgctgtgtttctggaacgcagatttcgtttcttccaagtgggactggtgtcgtgggggctttacaatccctgtctgggtagcgccgacaaaaactctcggaaacgcgccccacgctctaaggtgccccctcctcgagactttcatattaacctgttccggatgcagccctggctccgccagcacctgggggatgttctcaactttctccccttgtag

SEQ ID NO: 59254 - DNA, 1863 bp, Artificial Sequence
  derived and/or modified sequence
atgggccccctgatggtgctgttctgcctgctgttcctgtaccccgctggccactgccctaatccggggatttctttaggggccgtaagaactggatttcgtttcggacatggcgataaagtgcgctatagatgctcgagtaatttggtgttgaccggaagtagtgagagagagtgtcagggcaacggcgtctggtcagggacggagcctatctgccgccagccttattcctacgacttcccggaagatgttgcccccgccctgggcacgtcattttcccatatgctgggagcaaccaatccaacccagaaaaccaaggagagcctcggcaggaaaatccagatccagaggagtgggcacctcaacctctacctactcctcgactgctcccaaagcgtgtccgagaatgatttcttgatatttaaggagagcgctagtctgatggtggaccgaatcttctcattcgaaatcaatgtgtccgttgccattatcacatttgcgtccgaaccgaaggttctgatgtctgtgctgaatgacaactcccgagatatgactgaggtaattagctcactcgaaaacgccaactacaaggaccatgagaatggcactggaaccaacacgtacgctgctctgaatagcgtgtacctgatgatgaataatcagatgcgcttgttgggtatggagaccatggcctggcaggaaattcgccacgctatcattcttctgactgacggaaaatcaaacatggggggcagcccaaaaacggctgtggatcatattcgcgagatcttaaatattaaccagaagagaaatgactatctcgacatatatgccattggcgtcggcaagctggacgtggattggcgggaattgaatgagctgggtagcaaaaaggacggtgagcggcatgcctttattctgcaggatacaaaagcgctacaccaggtattcgagcacatgctggacgtgagcaagttaacagataccatctgtggcgtcggcaatatgagtgctaacgctagcgaccaggaaagaactccttggcacgttaccattaaacccaaatcccaggagacctgtcgcggggccctaatttctgatcagtgggtgttaacagcagcccactgttttcgtgacggcaacgaccattcactatggagagtcaacgtgggtgatccaaaatcacagtggggcaaagagtttctgattgagaaagctgtgatatcaccgggattcgacgtgtttgcaaaaaaaaatcaggggattctggagttctatggcgatgacatcgcgctcctcaagctcgctcagaaagttaagatgtcaacgcacgccaggcccatttgtcttccttgcacaatggaggccaaccttgccctgcgaagaccccagggttccacctgccgggatcacgaaaatgagctactaaacaaacaaagcgtaccagctcatttcgtcgccttaaacggctctaaattgaacattaacctgaaaatgggcgttgagtggaccagctgtgctgaagtagtgtcgcaagaaaagaccatgtttcccaatctgactgacgtgagagaagtggtgacagatcaatttttgtgctctggcacacaggaagacgagtcgccatgcaagggcgaaagtgggggcgccgttttcctcgagcgccgatttagattttttcaggtgggcctggtgtcttggggtctctataatccatgtctaggcagcgctgataagaacagcagaaaaagggctccgagaagtaaggtgcccccaccccgggactttcacatcaacctgtttcgcatgcagccatggctccgccagcatctgggcgacgtactcaacttcctgccattgtag

SEQ ID NO: 59255 - DNA, 1863 bp, Artificial Sequence
  derived and/or modified sequence
atgggccccctgatggtgctgttctgcctgctgttcctgtaccccgctggtcactgtccgaatccagggatctctctcggggctgtcagaaccggcttccggttcggacatggtgacaaagttagataccgctgctcctctaacctggttcttactggaagttccgagcgagagtgtcagggcaacggggtgtggtcaggtaccgagcccatctgtaggcagccctactcatacgatttccctgaggatgtggcgccggccttgggaacctccttttcccacatgctgggcgccaccaatccaacacagaagaccaaggaaagtctaggaagaaagatacagattcagaggtctgggcacctgaacctctatctgctgctggactgttcccaatctgtaagtgaaaacgatttcctgatattcaaagagagcgcatctcttatggtagataggatcttttcgtttgagattaatgtaagcgtcgccatcatcacattcgcttctgagccgaaagtgcttatgtccgtgctcaacgataacagtagagatatgacggaggtgatctcaagccttgagaacgccaactataaggaccacgaaaatggaacaggaaccaatacctacgcagctctgaacagcgtgtacttgatgatgaacaaccagatgcgtctgctcgggatggaaaccatggcttggcaagaaatcagacacgccatcattctgctgacggatgggaaatctaacatgggaggatcccctaagactgccgtcgatcatatacgggaaatactcaatatcaatcagaagcgaaatgactacttggacatatatgcgatcggagttggtaagctggatgtggattggcgcgagttgaacgaacttgggtccaagaaggacggtgaacgccacgccttcatcctgcaggatactaaggccctacaccaagtctttgaacacatgctcgacgtatccaagctaacggacactatttgcggggtggggaatatgtcggccaatgcatctgatcaagaaaggaccccgtggcacgtcaccattaagcccaagtctcaagagacttgcagaggtgcacttattagcgaccaatgggtgctcaccgccgctcactgctttcgcgacggcaacgaccatagcttgtggcgcgttaacgtgggcgatcctaaaagccagtggggcaaagagtttctcatcgagaaagctgttatctcccccggctttgatgtgtttgccaagaagaatcagggcatactggaattttacggcgacgacatagccctcctcaaacttgcacagaaggtgaagatgtccacgcacgccaggcccatatgtttgccatgcacgatggaggccaatttggctctacggaggccacaaggttctacctgtagagatcacgagaacgagcttctcaacaagcagtccgtgccagcgcatttcgtggctctcaatgggagcaagctcaacattaatctcaagatgggtgtggagtggaccagctgcgctgaggttgtaagccaggagaaaacaatgttccccaacctaaccgatgtgagagaagtcgtcacggatcaatttttgtgctcaggaacccaggaggacgagtctccctgtaaaggcgaatcagggggtgcagtattcctggaacgcagatttagatttttccaagtgggcctcgtgtcttggggactgtataacccctgcctcggttccgcagacaagaacagtaggaagcgcgctcccagatcaaaggtgcctccccctcgcgactttcacattaacctttttcgaatgcagccttggcttaggcagcacttaggcgacgtgcttaactttcttccactctag

SEQ ID NO: 59256 - DNA, 1863 bp, Artificial Sequence
  derived and/or modified sequence
atgggccccctgatggtgctgttctgcctgctgttcctgtaccccgccggccattgccctaaccctgggatatcccttggagccgtgagaaccggtttccggttcgggcacggggataaggtgcggtatagatgcagttcgaatctagtgcttacaggatcctcagagcgagagtgccaggggaatggcgtgtggagtgggacagaacccatttgtaggcagccctatagttacgatttccccgaggacgtggctccagccttaggaactagcttctctcacatgttgggcgccaccaacccaactcaaaagactaaagagagcttagggcgcaagattcaaatacaaaggtctgggcacctgaacttgtaccttctactggactgctcccagagtgtatccgagaatgatttccttatcttcaaggaatccgcttctctgatggtcgatcggattttttcctttgaaattaacgtgtctgtagcaatcattacattcgcatctgagcctaaggtcctgatgtctgttttgaacgacaattctcgtgatatgacggaagtgattagcagcctagagaatgccaattacaaagaccacgaaaatggcaccgggaccaacacttacgccgcactgaacagtgtctatctcatgatgaataatcaaatgcggttgctcggcatggaaaccatggcctggcaggaaattcgacacgctattattctactcacagacggtaaatccaatatgggcgggtcccccaagactgcagtcgaccatataagggaaatactaaatataaatcagaagcgcaacgactacctggatatctacgcaatcggagttggtaagctcgacgtggactggcgtgaactgaacgaactcggaagtaagaaggatggcgagagacatgcatttatcttgcaggacacgaaggcacttcatcaggtgtttgaacatatgctggacgttagcaaactgactgacacaatttgtggggtaggtaatatgagcgccaacgcctccgaccaagagcgtacaccttggcatgtgacaatcaagcctaagagccaggaaacctgtcgtggggctctaatcagcgatcagtgggttttgaccgccgctcactgtttcagggacggtaatgaccattctctctggagggtgaatgtgggggacccaaagagtcagtgggggaaagaattcttgatagagaaagctgtaatctcacccggcttcgacgtgtttgccaagaagaatcagggtattcttgagttttacggagacgatatagcccttctgaagctggctcaaaaggttaagatgtcaacccatgctagacccatctgcttgccctgcaccatggaggccaacctcgccctgagaaggccccaaggaagcacctgcagggaccacgaaaacgagctactgaataagcagtcagtgcctgcacacttcgtggccctcaacgggtccaagctgaatatcaatctgaaaatgggcgtggaatggaccagctgcgctgaggttgtgtctcaggagaagacaatgtttcctaacctgacagatgtcagggaagtggtgaccgatcaattcctgtgtagtggaacacaagaagatgaatcaccttgcaagggagaatccggcggcgcagtgtttttggagaggcgattccgcttctttcaagtggggctggtgagctggggactgtataatccttgcttaggctcagccgataaaaactcacgtaaacgggcgcctcgatcaaaagtaccccctccccgcgacttccacataaatctgttccggatgcaaccttggctcagacagcatctcggcgatgtgctgaattttctgcccctgtag

SEQ ID NO: 59257 - DNA, 1863 bp, Artificial Sequence
  derived and/or modified sequence
atgggccccctgatggtgctgttctgcctgctgttcctgtaccccgcaggccactgcccaaatcctggcatctccctaggcgccgttagaacagggtttcgcttcggacatggggataaggtcagatataggtgctccagcaatctggtgctgacaggatcatcagaaagggaatgccagggcaatggcgtctggtctggcacagaaccaatttgcagacagccttattcttatgattttcccgaagatgtagcccctgctctcggcaccagcttctcccacatgctgggagctaccaacccgacccagaagactaaagagtccctggggcgtaaaattcagatccaacgaagcgggcaccttaacctgtaccttttgctggactgttcgcagagtgtgtccgagaatgatttcctaatcttcaaggaatcagcctccttgatggtagaccgtatctttagctttgagatcaacgtgtcagtggcaatcattacctttgcgtccgagcctaaagtgctgatgagcgtgctgaatgacaactcgcgcgatatgacagaagttatttctagtctggagaatgccaactataaagatcatgaaaacggaactggaacaaacacctacgctgcgcttaatagcgtttatctcatgatgaataaccagatgcggctgctcggtatggaaaccatggcgtggcaggagatcaggcacgcaatcatactgcttaccgacggcaaatcaaacatgggagggagtccaaagaccgccgttgatcacatacgagaaatcctcaatatcaatcagaagcgaaatgactacctcgatatctacgctataggcgttggtaaactcgacgtggactggagggagctgaacgagctggggtctaagaaagatggggagcggcacgcttttatacttcaggacaccaaagcgctgcaccaggtgtttgaacatatgttggatgttagtaagctgaccgacactatttgcggcgttggcaacatgagtgccaatgctagtgatcaggaaagaaccccttggcacgttacaatcaagcctaaaagccaggagacctgtcggggggcactcatttcggaccagtgggtgttaaccgctgctcactgcttccgcgacggaaatgatcactccctgtggagggtgaacgttggggatcctaagagtcagtggggaaaagagtttctgattgagaaggcagtgattagccctggttttgacgtgtttgccaagaaaaatcaagggatcctagaattttatggagatgatatagccctgcttaagctggctcaaaaagtgaagatgtcgacccacgctagacctatttgcttgccttgtacaatggaggcgaatcttgcactgcggaggcctcaggggagcacctgtagagaccacgagaacgaactgttgaacaagcaaagcgtgcccgctcactttgtggcattgaacgggtcgaagctgaacattaatctgaagatgggagtagagtggacatcttgtgccgaggtggtgagccaggagaagaccatgttcccaaacttgactgatgtacgcgaggtagttacagatcaattcctctgttccggtacacaggaggatgaatcaccatgcaaaggggagtcagggggtgccgtgtttttggaacgcaggttccgattttttcaggttggtttagtgtcttgggggttgtataacccatgccttgggtccgccgataagaactctcgtaagcgggccccgcgttcgaaggtacctcctcctagagactttcacattaacctttttaggatgcagccgtggttgcggcagcatctaggcgacgtcttgaatttcctgcccttgtag

SEQ ID NO: 59258 - DNA, 1863 bp, Artificial Sequence
  derived and/or modified sequence
atgggccccctgatggtgctgttctgcctgctgttcctgtaccccgctggtcattgtccgaacccaggtattagtctcggcgctgtcaggactggttttagattcgggcacggagataaggtcaggtacaggtgcagctccaacctcgtcctcaccggatccagcgaacgcgaatgccagggcaatggagtgtggagcggaaccgaaccaatatgtagacaaccatattcttacgattttccagaggacgtcgctcctgcactaggaaccagcttctctcatatgctcggggcgaccaaccctacccagaagaccaaggagagcctgggccgcaagatccagattcagcgaagcgggcatctgaacctgtacctcctgttggactgctcccagtctgtgagtgaaaacgatttccttatctttaaggaatcagcctctcttatggtggatcgcatcttttcttttgagattaatgtgagtgtggcaattatcacctttgcctcggaacccaaagtccttatgtctgtgctgaacgacaacagtagagatatgaccgaggtgataagttccttagagaatgcgaattataaggaccatgagaacgggaccggaaccaatacttatgctgccctgaacagcgtctatctgatgatgaacaaccagatgcgactcttgggtatggagaccatggcttggcaggagattcgtcatgcgatcatactgttgaccgacggcaagagtaacatgggcggcagccccaagaccgctgtggaccacattagggagatcctcaatatcaatcagaagagaaacgactatctggatatctatgccattggtgttggcaagctggatgtagactggcgagagctgaacgaactaggtagtaagaaggacggcgaacggcacgcgttcatccttcaagatacaaaagctctgcatcaagtcttcgaacacatgttggatgtctcaaaacttactgacaccatatgtggtgttggaaacatgtccgccaatgcatccgaccaagagaggacgccctggcacgtaactataaaaccaaaaagccaggaaacctgtaggggcgccctgatctcagaccagtgggtgctcactgccgcacattgttttagggacggtaacgaccactctctgtggagagttaacgtgggagatcccaaaagccaatggggtaaggaattcctcattgagaaggcagtgatctcgcccggattcgatgtcttcgctaagaaaaatcaggggatcctggaattttacggagacgacatagcactcctaaaactagcccagaaggtcaaaatgagcacccatgcccgaccaatctgcttaccatgtactatggaagccaatctggcactgagacggcctcaggggagtacctgtagagaccatgaaaacgagctgctgaacaaacagagtgtgccagcgcacttcgtcgctctcaacggcagtaaattaaacatcaatctgaaaatgggcgtggaatggacctcatgcgccgaagtggtgtcccaggaaaaaacaatgtttccgaacctaactgatgtcagagaggtggtcacagatcagtttctctgtagtgggacacaggaggacgagtctccttgtaaaggtgagtccggcggcgctgtgttcctggagaggcggtttcgcttcttccaggttgggctggtgtcttggggcctgtacaatccctgtttgggctcagccgataaaaattcacgcaagcgcgcaccccgtagtaaggtgccccccccgcgggacttccatattaatctgttccgtatgcagccatggctcagacaacacttgggcgacgttctgaacttcttaccactctag

SEQ ID NO: 59259 - DNA, 1062 bp, Artificial Sequence
  derived and/or modified sequence
atgggccctctgatggtactcttttgcctactgtttctttatccggctggccactgcccaaatcccggtatttcactgggggcagtccgcaccgggttccggtttgggcacggggataaagtgcgttatcgttgctcctcaaacttggtgcttactggatcaagcgagagagaatgtcaaggaaatggcgtgtggagcggtacagagcctatttgtcgccagccctacagctatgactttcccgaggatgtagcccctgctctgggcacaagctttagtcatatgctgggcgctactaatccaacccagaagacgaaagaaagcctgggtcgaaagattcaaatccaaaggtcaggccatcttaacctgtacctgctcctggactgcagccaatccgtgtcagagaacgatttccttattttcaaagagtcagcctccctgatggtggatcgcattttttcattcgagatcaacgtaagcgtagcgattattacttttgcctcggagccaaaagtcctcatgtcagtccttaacgacaacagccgggacatgactgaggttatatccagcctggaaaacgcaaactataaggaccatgaaaacggaacaggcacaaatacttatgctgcactgaactctgtctacctgatgatgaacaatcaaatgcgactcctgggcatggagacgatggcctggcaggagataaggcatgccatcatcctgttaaccgacgggaaatccaatatgggtggatccccaaaaaccgccgtcgaccatattcgagagatcctcaacatcaatcagaagaggaacgattatctcgacatttatgcaatcggcgttggaaagctggatgtggattggcgggagctgaatgaattaggatctaaaaaagacggcgagagacacgcatttatactccaggatacaaaagccctgcaccaggtctttgagcacatgcttgacgtgagcaagctgaccgatacaatttgcggcgtgggaaacatgagcgccaatgccagtgaccaggagcgcacaccttggcacgtgaccattaagtag

SEQ ID NO: 59260 - DNA, 1062 bp, Artificial Sequence
  derived and/or modified sequence
atgggacccctcatggttctgttctgcctcctgtttctctacccagccggacactgccccaatccgggtatctctctaggcgctgtcaggacaggatttcgatttggccacggagacaaagtgaggtataggtgtagttccaacctggtgctgaccggttccagcgagagggagtgtcagggaaacggggtctggagtgggacagaaccgatctgccggcaaccttattcatacgacttccctgaggacgtggcaccagctctgggtacatcatttagccacatgcttggtgcaaccaatcctacccaaaagacaaaggagagcttagggcgaaagatacaaattcagcgcagcggccacctgaacctctacctgctattagactgcagccagagcgtgtcagaaaacgattttctgatcttcaaagagtcagcaagcctgatggtggataggattttctccttcgagattaatgtgtctgtagcgattatcactttcgcctcggagcccaaagtgctgatgagcgtgcttaacgacaacagcagggacatgaccgaggttatctccagtttggagaatgcgaattacaaggatcacgagaacggaactgggactaatacatacgcagctctgaattcggtatatctaatgatgaacaaccagatgcgcctgcttggcatggaaacaatggcgtggcaagaaatacgccatgccattatcctattaactgacggtaagtcaaatatggggggtagtcctaaaaccgcagtagaccacatcagagagattctgaacattaaccagaaaaggaacgactacctggatatctatgccatcggggtgggcaagcttgatgtggattggcgcgaactgaacgagctcgggagcaagaaggatggagagcggcatgcattcatcctacaggacactaaggctttgcatcaggtatttgaacatatgttggatgtgtcaaaactgacggacaccatatgcggagtgggtaacatgagcgccaatgcaagcgatcaggagcgaaccccatggcacgtcaccatcaagtag

SEQ ID NO: 59261 - DNA, 1062 bp, Artificial Sequence
  derived and/or modified sequence
atgggtcccctcatggtcttattctgcctcctcttcttgtaccccgctggccactgccctaacccgggaatttctcttggtgccgtgagaacaggattccggtttggccatggcgacaaagtacgatatcggtgctcctctaatctggtactgactggctcctcagaacgcgagtgccagggtaatggtgtgtggtccggcacagaacccatctgtcggcagccttattcatacgatttccccgaagacgttgccccagcacttgggacttcctttagtcacatgttaggggctaccaacccgacccaaaagacaaaggaatctctgggcagaaagattcagatccagaggagtggtcatttgaacttgtacttactgctcgattgttcccagtccgtgtcagagaatgactttctaatctttaaggaatctgcgtcactgatggtagaccgcatcttcagtttcgagatcaacgtgagcgtagccataatcacatttgccagcgagcctaaggtgctgatgagcgtgttaaatgataactcgcgtgacatgacggaggttataagctccctggagaatgcaaattacaaggaccacgagaatgggacgggaacaaacacgtacgctgctctgaacagtgtgtatctgatgatgaataatcagatgaggctgctcgggatggaaacaatggcgtggcaggaaatacgccacgcaatcattttgttgacagatggtaagtctaacatgggcggatctccaaagactgctgttgaccatatcagggaaattctgaatattaaccagaaaaggaatgattaccttgacatctacgcaattggggtcggcaagttagatgtagattggcgggaactcaatgagctcggaagcaagaaggacggcgaacgccacgcttttatactgcaggatactaaggccttgcatcaagtgtttgagcacatgctggacgtgtccaagcttactgatacgatctgcggcgttggcaatatgagcgccaatgcttcagatcaagagaggaccccttggcatgtaactataaagtag

SEQ ID NO: 59262 - DNA, 1062 bp, Artificial Sequence
  derived and/or modified sequence
atgggcccactgatggtcctgttctgcctgctgttcctctacccggctgggcattgccctaatcctgggatatctctcggtgctgtgagaaccgggttcagatttgggcacggggataaggtccggtatcgatgctcctctaatcttgtcctcacgggcagctcagaaagggagtgccaagggaacggcgtctggagcgggacagagccgatatgcagacagccatacagctatgattttcccgaagacgtggctcctgcgttgggtaccagcttctctcacatgcttggggcaactaacccgacccagaagacgaaagaatctttaggtcggaagattcagatacaacgttcaggccatctgaatctgtacctgctgctggactgtagccaatcagtcagcgaaaacgacttcctcatcttcaaagagtccgcctctctgatggttgaccgcattttctcgttcgaaatcaatgtgagcgtggccatcattaccttcgcctcagagccaaaagttctcatgtcagtcctgaatgataacagtagagatatgaccgaggtcatttctagtctcgagaacgccaactacaaggatcatgaaaacggcacgggcacaaacacatatgccgcacttaactccgtgtacctgatgatgaataatcagatgagactgctgggcatggaaaccatggcttggcaggaaatacgacacgctatcattttgctgacagacggcaaaagcaacatgggaggaagccccaaaaccgctgtggaccacatccgagagattctcaatatcaatcaaaaacggaacgactacctagacatctatgccattggcgttggaaagttagatgtggactggcgggagttaaacgaacttggcagtaaaaaagacggcgagagacacgccttcatactgcaagatacaaaggctcttcaccaggtgtttgagcatatgctagacgtcagcaaactcacggacactatttgcggggtgggtaatatgtcagcgaacgcctccgaccaagaaagaaccccatggcacgttactatcaaatag

SEQ ID NO: 59263 - DNA, 1062 bp, Artificial Sequence
  derived and/or modified sequence
atgggccctctgatggtgctgttctgccttcttttcctttacccggcaggtcactgcccaaaccccggaatctctctcggcgcagtgcgtactggatttcgcttcggacatggtgataaggtgagatacagatgctcatctaatcttgtgctgacggggtcgtccgagcgtgagtgccagggtaatggtgtgtggtcaggtaccgaaccgatctgccgccagccctactcttatgacttccctgaagatgtcgctccagcactgggtacatctttctcccacatgctgggcgctaccaaccctacccaaaagactaaagagagcctgggaagaaagatccagattcagagatcaggtcacttgaacctgtaccttctcttggattgttcgcagtcagtatccgagaatgattttctgatttttaaagaaagtgcctcactgatggttgatcgcattttctcttttgagatcaatgtctctgtggctatcatcaccttcgcttcagaaccaaaagttctcatgtcggtccttaatgataactctcgggacatgactgaagtgattagtagccttgaaaacgcgaattacaaagatcacgagaacggaacagggacgaacacctatgccgcacttaattcggtttaccttatgatgaataaccaaatgcgcttgttaggcatggaaactatggcctggcaggagattcgccacgctatcattctcctcaccgatggcaagtccaatatgggcggtagccctaagacagccgtggaccacattcgcgagatactgaacattaaccaaaaaagaaacgattatctcgacatctatgcaatcggcgtaggcaagttagacgttgactggcgggaactcaacgaactggggagcaaaaaggacggtgagagacacgcctttatcctccaagatactaaggccctgcaccaggtatttgagcacatgttggatgtgagcaagttgaccgatactatctgtggagttggaaacatgtcagcaaacgcgagcgaccaagaacgcactccctggcatgtcacgatcaagtag

SEQ ID NO: 59264 - DNA, 1062 bp, Artificial Sequence
  derived and/or modified sequence
atggggccactcatggtccttttttgtcttttattcctctatcccgcagggcactgccccaatcccggtatctccctaggcgcagtcaggaccgggtttcgtttcggccacggtgataaggtaagataccgatgtagctcaaacctggtcttgaccggttcttccgagcgggagtgccaaggaaatggagtgtggtcagggaccgaacccatatgtaggcagccttactcatatgacttccctgaggatgtggcccctgcgctagggacctctttttcccatatgctgggtgctacaaacccaacacagaagaccaaagaatccctgggcaggaagatccagattcagagatcagggcatctgaacctgtatcttctgctggactgttcacagagcgtcagcgagaatgattttttaatcttcaaagagtccgcttctctgatggtggacagaatatttagtttcgaaataaacgtatcagttgcaatcattaccttcgctagcgagcctaaagtcctgatgagcgttctgaacgacaatagtcgggacatgaccgaggtcatctctagcctggaaaacgctaactacaaagaccacgaaaatgggaccggtaccaacacatacgccgctctgaactcagtttatctgatgatgaataaccagatgaggctactggggatggaaactatggcttggcaggagatacggcatgctataattcttctcaccgacggaaagtccaacatgggaggcagccccaagacagcggtagatcatattagggagattttgaatatcaatcagaagaggaatgactatttggacatatacgccatcggggttggaaagctggatgtcgattggcgagagctgaacgagctgggcagtaagaaggatggcgaacggcacgcctttatcttacaagatactaaagctctgcaccaagtattcgagcacatgctggacgtgagcaaactcaccgataccatttgcggtgtcgggaacatgtcagccaatgccagcgatcaagaaagaactccttggcatgtcacaatcaaatag

SEQ ID NO: 59265 - DNA, 1863 bp, Artificial Sequence
  derived and/or modified sequence
atgggcccacttatggtgttgttttgccttctgttcctgtaccctgccggacactgtcctaatccaggcatctcgttgggagctgtgcgcacaggatttaggtttggacatggtgacaaagtgaggtatcggtgttcttccaacttggtacttactggctcctccgagagggagtgtcagggcaatggtgtctggtctgggactgagcctatatgtagacagccctactcttatgattttccagaggatgttgcgcctgctctgggaacatcatttagccacatgctgggcgcaaccaacccaacccagaaaaccaaggagtctctgggtcgcaaaatccaaatccagcgcagtggccacctcaatttatatctgctgctggattgtagccagagtgtgtccgaaaacgacttcctcatctttaaagaatctgccagcctcatggtagatcggatattcagcttcgagatcaacgtgtctgtcgctatcattactttcgcttccgaacctaaggttctgatgtcggtcctcaatgacaacagccgcgatatgactgaagtcatttcgtctttggagaacgccaattacaaggatcatgaaaatggcactggaaccaatacatatgccgctcttaactctgtgtaccttatgatgaataaccagatgcgtcttctggggatggaaaccatggcatggcaggagattagacacgccattattctgttaaccgacggcaaatctaatatgggaggcagccccaagacagccgtggatcatattcgggagatccttaatatcaatcagaaacggaatgattacctcgacatctacgctatcggagtaggcaaactggacgttgactggagagagctgaatgaactaggttcaaaaaaggatggtgagaggcacgctttcatcttacaggacacaaaggcccttcatcaggtgttcgagcatatgctggacgtgtccaaattaaccgatacgatatgtggagtgggaaacatgagcgctaacgcttcggaccaggaacgcacaccatggcatgtgaccatcaaacccaaatcccaggagacgtgtcgtggagcattgatcagtgaccaatgggtccttactgccgcacactgtttcagggacgggaacgatcactcactatggagagtaaatgtgggggacccaaagtcccagtggggtaaagagtttctgatcgagaaagcagttattagccccggattcgatgtattcgccaagaaaaatcagggcatcctggaattctatggtgatgacatcgccctgttgaagctcgcacagaaggtgaagatgtccacacacgcacgtccgatctgcttgccctgcaccatggaggcaaatctggcgcttcggagacctcagggatccacttgtagagaccacgagaacgaattgctgaataagcaaagtgtgcccgcacacttcgtggcgctgaatggaagcaagctgaatattaacttaaagatgggagttgagtggacaagttgcgctgaagtagtatctcaagaaaaaactatgttcccaaaccttacagacgtgagggaggtcgttaccgaccagttcctgtgctcgggcacccaggaggatgagagtccctgcaagggagaatccggaggcgctgttttcctggaaagaaggtttcgcttcttccaggtgggtttagtgagctgggggctgtataatccatgcttgggaagcgctgacaagaattctcggaaacgagccccacgatctaaggttccccctcccagagactttcacatcaatttatttagaatgcagccatggctgcgacagcatctcggtgatgtgctcaactttctgccactgtag

SEQ ID NO: 59266 - DNA, 1863 bp, Artificial Sequence
  derived and/or modified sequence
atgggcccacttatggtgctcttctgtctcctgtttctttatccagcaggtcactgccccaaccccggtatctcattgggggcagtacgaactggttttaggttcggacatggagacaaggtacggtatagatgctcaagcaatctggttttgaccggttcttctgaacgagagtgccagggaaacggtgtgtggtcgggcacagaaccaatttgtagacagccctattcatacgacttccccgaagatgtcgccccagccctagggactagctttagtcatatgttgggcgctacaaatccgacacagaaaaccaaggagtcgcttggtcgcaagatacagatccagcgttctgggcacctgaacctttacctcctgcttgactgtagccagagtgtgagcgaaaacgatttcctgatcttcaaggagtcagcatcattaatggtggaccggattttctcatttgaaattaacgtgtccgttgcgataatcacttttgcatcagagccaaaagttttaatgtccgtgcttaacgacaattctcgagacatgaccgaagtgattagcagcctggagaacgccaactacaaagaccacgagaatgggaccggcaccaacacatatgccgctctaaactccgtgtatctgatgatgaacaaccagatgcgactcctgggcatggagacaatggcatggcaggaaatcagacacgcgatcattctccttacagacggcaaatcaaatatgggaggatctcccaaaaccgctgttgaccacattagagaaattctgaatatcaaccaaaagcggaacgactacctggacatctatgcgatcggggtgggaaagctcgacgtcgactggcgagaactgaatgaactgggttctaagaaggatggagagcgccatgcattcatcttgcaggataccaaggcgcttcaccaagtatttgagcacatgctggacgtgagtaagctcactgacaccatttgtggagttggcaatatgtcagccaatgcaagtgaccaggaacgcactccatggcacgtgaccatcaagccaaagtctcaggagacttgtcggggagccctgatctctgatcagtgggtgctgacagctgctcactgcttcagagatggtaatgaccacagcctttggcgggttaacgtgggcgacccgaagtctcagtgggggaaagagtttcttatcgagaaggccgtcataagtccagggttcgatgtcttcgccaagaaaaatcagggcatcctcgaattttacggcgacgatatcgcactcttgaaactggcacagaaagtgaaaatgtctacacatgcacgcccaatttgtttaccatgtaccatggaggcgaatctcgcattgagaagaccccagggctccacatgtagggatcacgagaacgagctgctgaataagcagtccgtcccagctcacttcgtggctctaaatgggtctaaactgaacatcaatctgaaaatgggggtcgagtggacgagttgcgccgaagttgtttcacaagagaagactatgttccccaacctaaccgatgtccgggaggtggtgacagatcagttcctttgcagcgggactcaggaggacgagtctccctgcaagggagaatcaggcggagctgtctttttggagcgccgatttcgcttcttccaggtcgggctcgtgtcatggggcctgtacaatccttgtctgggaagtgctgacaagaactctaggaaaagggcaccccgatctaaggtgcccccaccaagagatttccatatcaacctgtttcggatgcaaccatggctgagacagcacttaggcgacgttctgaactttctgcccctgtag

SEQ ID NO: 59267 - DNA, 1863 bp, Artificial Sequence
  derived and/or modified sequence
atgggccctttaatggtgttattctgtctgctgttcctctatcctgcaggtcattgccctaaccctggaatcagtttaggagccgttaggaccggattccgattcggccacggagacaaggtgaggtaccgctgcagcagtaaccttgtgttaacgggcagctcagagcgcgaatgccaaggaaatggcgtttggtccgggaccgaacccatctgtcgacagccttatagctatgacttcccagaggatgtggcgcctgcattgggtacctcgtttagccatatgctgggggctacaaatcctacacaaaagactaaggagtctctgggtcgcaagattcagatccagcggtcgggacaccttaatctctacctgcttttggactgttcccagtccgtgagcgagaacgattttctgatctttaaagaaagcgctagcttgatggttgatcgcatcttttcttttgaaatcaatgtgtctgtagccataatcacgttcgcttccgaaccaaaggtccttatgtccgttctgaacgacaactctagggatatgaccgaagtcatcagctccctcgagaatgccaattataaggaccacgagaacgggacaggtaccaacacatacgctgcacttaactcggtctacctcatgatgaacaatcagatgcgactgctcggcatggagacgatggcctggcaggagatcagacacgccatcatcctgctgacagatgggaaatctaacatgggagggtcccccaaaactgccgtggatcacattcgcgaaatcctgaacatcaaccaaaagcgtaacgactatctggacatctacgccattggagttggaaagttggatgtagactggagggaactgaatgaattaggaagcaagaaagacggagagcgtcacgcttttattctgcaagataccaaggcactccatcaggtcttcgaacacatgctggatgtcagtaagctcaccgacacaatctgcggagtcggcaacatgtccgccaacgcctccgaccaagagagaacaccatggcatgtgaccatcaaaccaaagagccaggagacctgtagaggggctctgatatcggaccagtgggttcttacagccgctcattgcttcagagatggcaatgaccacagtctctggcgcgtgaacgtcggagatcctaaaagtcagtggggaaaagagtttctgatagagaaagcagtcatttcacccggatttgacgtattcgcaaaaaagaaccagggaatccttgagttctacggggatgatattgcactgcttaaactggcccagaaggtgaagatgagcacccacgcacgcccaatttgtctcccttgtactatggaagctaatttagccttacgcagaccacagggatccacctgtagagaccacgagaatgagcttttgaacaagcagagcgtccctgcgcactttgtggccctgaacggaagtaagttgaatataaacttaaagatgggggtggagtggacctcatgtgctgaggttgtgagtcaagagaaaacaatgttccccaacctgacagatgtcagggaagtggttactgatcagttcctttgtagtgggacccaagaagacgagagtccatgcaagggcgagagtggcggagctgtctttttggagagacggtttcggttctttcaggtcggactggtaagttggggactgtacaatccatgcctgggtagtgctgacaaaaactctcggaagcgtgcaccacggagcaaagtccccccacccagagacttccacatcaacctattccgtatgcaaccctggctgcggcaacacctcggcgacgtacttaattttttgcccctgtag

SEQ ID NO: 59268 - DNA, 1863 bp, Artificial Sequence
  derived and/or modified sequence
atgggaccactgatggtcctattttgtcttctctttttgtatcccgctggccattgcccgaatccaggtatcagtctaggcgctgtacgcacaggcttcaggtttggccacggagataaagtgagataccgctgctctagcaatctggttctcacaggatcttcagaacgagagtgccaaggaaacggggtgtggtctggaacagaacctatatgcagacagccgtattcctacgacttccccgaagacgtcgccccagctcttgggacgagtttctctcacatgctcggagctacaaatccaactcagaagaccaaggagagcctgggacgtaagattcaaatccaaaggagcggtcatctgaacttgtatctgctgctggactgttctcaatccgtgtcagagaacgacttcctgattttcaaagagtccgcatccctaatggtggatcgtatcttcagcttcgaaattaatgtgtctgtggccatcattactttcgcatccgagcctaaagtccttatgagcgtgcttaatgataattcccgtgatatgaccgaagtcatcagtagcctggagaatgccaattacaaggatcacgaaaacggcaccggtactaacacgtacgccgcactgaatagcgtttacctgatgatgaacaaccagatgagattgctcgggatggagactatggcatggcaagaaattcggcatgccattatactgctgacagacgggaagtctaatatggggggtagcccaaaaacagccgtagatcacatcagagagattcttaacataaaccaaaagcgcaacgactatctcgatatttacgcaattggagtggggaaactggacgtggattggagagagcttaacgagcttggctccaagaaggacggcgaaagacatgcatttatcctgcaggatacaaaggccctccaccaggtgttcgagcatatgctagatgtgtccaagcttacagacaccatctgcggagttggcaatatgtcagccaatgcttccgaccaggagcggaccccctggcatgtcaccattaagcccaagagtcaagagacttgtagaggggctctgatttctgaccagtgggtgctgacagcggctcactgcttcagggacggcaacgaccacagcctgtggagggttaacgtgggtgatccgaaatctcaatggggaaaagagttcctcatcgagaaagccgtaatctcccctggctttgatgtgtttgccaaaaaaaatcagggaatcctggagttttatggggatgacattgccttattaaaactggcgcaaaaggtcaagatgtctacccacgctcggccaatatgtttaccttgtaccatggaggcgaacttggcgctccggcgaccgcaggggagcacctgtcgcgaccatgagaatgagctcctcaataaacagtccgtgcctgctcactttgtagcgctgaatgggtccaaactcaatatcaacctgaaaatgggtgtcgaatggacctcctgcgcagaagtggtgagccaggagaagactatgttcccaaatttaacagatgtcagggaggttgtcaccgatcagttcctctgttccggaacccaggaggacgagagcccctgcaagggtgagtctggcggagccgtctttctggagcgcaggtttagattcttccaggtggggctggtcagctgggggctgtataatccctgcttaggaagtgcagacaaaaattcacggaagcgggctcctagatctaaggtcccgcctccacgggattttcacatcaacctttttagaatgcagccatggctccggcagcacttaggtgatgtgttaaatttcctgccgctgtag

SEQ ID NO: 59269 - DNA, 1863 bp, Artificial Sequence
  derived and/or modified sequence
atggggccacttatggtcctcttttgtcttctgttcctgtaccctgctggccattgtccaaaccccggtattagcctgggcgctgtgagaacgggcttccggttcggacacggtgacaaagtgcgctatagatgctcaagcaacttagtcctaacagggtcatctgagcgtgagtgccagggcaacggagtgtggtccgggaccgagcccatctgccggcagccctacagctatgactttccagaagacgtggcccctgcactcggcacatccttttctcatatgctaggtgccactaacccgacccagaagaccaaagagagcctgggtcgcaagatccagatccaacgttccgggcacctcaatctgtatctgctgctggactgttctcaaagtgtgagtgagaatgacttcctcatctttaaggaatccgcgtccctgatggtagatcgcatcttttccttcgaaattaacgtctcagtcgccatcatcacattcgcatctgagcctaaggtgctcatgagcgtcctcaacgataacagcagagatatgacagaggttatctcgagcctggagaacgcgaattataaagaccacgagaacggaactggcactaacacttatgcagcccttaactcagtgtatctcatgatgaacaaccagatgcggcttttggggatggaaactatggcttggcaagaaatcaggcatgccattattttgttgacagacggtaaaagcaatatgggaggctccccgaaaaccgcggtggaccatatcagggagatcttaaatatcaaccagaagaggaatgattacttggatatttacgctatcggggtgggcaagctcgacgtggactggagagaacttaatgagctgggctcaaaaaaagacggcgagcggcatgcattcattttacaagacaccaaggctctacaccaggtttttgagcacatgctggacgtctccaagctgactgacacaatctgcggtgtaggtaacatgtcggccaatgcctcagaccaggagagaaccccctggcacgtgacgatcaaacctaagtcccaggagacctgccgcggtgccctcattagtgatcagtgggtgctcaccgcagcccattgttttcgggatggcaatgatcactccctgtggagggtgaatgtcggagacccgaaaagccagtggggcaaggagtttctgatagagaaagccgtgatttcacccggttttgacgtgtttgcaaagaagaaccagggcatcctcgaattttacggggatgacattgcactgctgaaattggctcaaaaggtcaagatgtcaacccacgcgcgacctatatgtttgccatgtacgatggaggccaacctcgcgctgcggcgtccacagggctcgacgtgtcgcgaccacgagaacgagctcctgaataagcagagtgtccccgcacactttgtggctctaaatggttccaaacttaatattaacttgaaaatgggcgttgagtggaccagctgcgcagaagtggtgtcacaggagaagactatgtttcctaacctcacagatgtgcgagaggtcgtgactgaccaatttctgtgctcagggacacaagaggatgagagcccttgcaagggagagtcggggggagccgttttcctagaacgaagattcagatttttccaggtgggactggtgagctggggtctgtataatccatgcttggggtctgccgacaagaattcacgcaaacgcgcacctcgcagcaaagtaccccctccgcgtgattttcatatcaaccttttcaggatgcaaccatggctgcgacagcatctcggtgacgtattaaattttctgccactctag

SEQ ID NO: 59270 - DNA, 1863 bp, Artificial Sequence
  derived and/or modified sequence
atgggacccttgatggtccttttttgcctcctcttcttgtaccctgctggacactgtcccaatcctggcatttctctgggggctgtccggaccggctttcgcttcggccatggggacaaggttagataccgttgttcttccaatctggtcttgaccggctcctcagaacgggagtgccagggcaatggagtgtggagcggtactgagcctatatgtcgccaaccttacagctatgactttccagaggacgttgcccctgctctgggaacttctttttcacatatgctcggagctacaaacccaacccagaagactaaagaaagcctcggtcggaagattcagatccagcgcagcggacacttaaatctttacctactccttgattgctcacagagtgtctccgaaaacgactttctcattttcaaggagtctgcctccctgatggtggaccgtatctttagttttgagattaacgtgtccgtcgcaataattaccttcgcctctgaaccaaaggttcttatgtccgtgctcaatgacaattcccgcgatatgaccgaggtgatttcttctctggaaaacgccaactacaaggaccacgagaatggtacaggaactaacacatatgcagccctaaattccgtgtatttgatgatgaacaaccagatgagactcctggggatggagacaatggcctggcaggagatccgtcatgccatcattcttctcaccgacggtaagagcaacatggggggtagtccgaaaactgcagtcgaccacataagagaaattttaaatattaaccagaagcggaatgactacctggatatttatgccattggcgtggggaagttggacgtcgactggcgggagctgaatgaacttggcagcaagaaggatggcgagagacatgctttcattcttcaggacacaaaagcactacaccaggttttcgagcatatgttagacgtctctaagctgacagacaccatctgtggagtcggtaacatgtcagcaaacgcttcagaccaggaaagaacgccttggcacgtaacaattaagcccaagagccaggagacctgcagaggggctctcatttccgaccagtgggtgttgactgcagcccactgttttagagatggaaatgatcattctctttggagagtgaacgtgggcgatcccaaatcacagtggggtaaggagtttctcatagaaaaggcagtgatttccccaggattcgatgtgttcgcaaaaaagaaccagggcatcctcgaattttacggtgacgacatcgcactactgaaattagctcagaaggtaaaaatgagtacacatgccagacctatctgcctgccttgtaccatggaggcaaatctggctttgcgtcggccacaggggagcacctgcagagatcatgaaaacgagttactgaacaaacagtccgtcccggcacatttcgtagcccttaatggctcgaagctgaacatcaatctcaagatgggggtagaatggactagttgcgcggaggttgtgtctcaggagaaaaccatgttccctaacctgactgacgtgcgcgaagtcgtgacagaccagtttctttgctccggaacccaggaggacgaatccccttgcaagggagaatcaggaggcgcagtgttcttagagagacgctttcgcttcttccaggtggggttagtgagctggggattatataatccctgcttaggcagcgcggacaagaattcaagaaagcgagccccaaggtctaaagtgccccctcccagggatttccacatcaacttatttaggatgcagccttggttgaggcagcacctcggcgatgtgcttaactttttacccttgtag

SEQ ID NO: 59271 - DNA, 1863 bp, Artificial Sequence
  derived and/or modified sequence
atgggacctctaatggttcttttttgtcttcttttcctgtaccccgctgggcattgcccaaaccccggaatttctttgggcgctgttcgcaccggcttccggtttggtcatggggacaaggtgcgttaccggtgttcgtctaatctagtcctcaccggaagctctgaaagggaatgccagggaaacggcgtatggtccggcaccgagcctatatgtcgccagccatattcatacgacttccctgaagacgtggcgcctgcactgggaactagtttctcccacatgttgggagctaccaacccaactcagaaaaccaaggaaagcttgggcaggaaaatccagatccagcggagcgggcaccttaatttgtatctactcctcgactgttcgcagtccgtgtcagaaaacgattttcttatctttaaagaatcagccagcttaatggtggatagaattttctcattcgagatcaatgtgagcgtggctataataaccttcgccagtgagcctaaggtgcttatgtcagttctaaacgataattcccgcgatatgaccgaggttattagctccctggagaatgccaattataaggaccatgagaacggcaccgggaccaacacatacgccgctctcaactctgtatatctgatgatgaataatcaaatgagactgctcggaatggagaccatggcttggcaggaaatcagacacgcaattatcctcctcaccgacgggaagtcaaacatgggtggcagcccgaaaacggcagtggaccatatacgcgagatcctgaacatcaaccagaagagaaatgactatttggatatctatgccattggagtcgggaagctcgacgtggattggcgtgagctcaacgagctggggtcgaagaaggacggcgagaggcatgcttttattttgcaggacactaaagctctgcatcaagtcttcgaacacatgctggacgtgtccaaactcaccgataccatatgcggcgtgggtaacatgagcgctaatgcctccgaccaagagaggacgccttggcacgttaccattaagcccaagtcccaggaaacctgtcgaggtgccctgatctctgatcagtgggttctcactgccgcacattgttttcgggatgggaatgatcactccctttggagggttaatgtcggggacccgaagagccagtggggtaaggaattcctgatcgagaaagcagttatcagcccaggcttcgatgtctttgcgaagaagaaccaggggattctcgagttctatggcgatgatatcgccctcctgaagctggcccagaaggtgaaaatgtccactcacgctcgcccaatatgcctgccatgtacaatggaggccaacctcgcgctccggagaccccagggttccacgtgcagagaccacgaaaatgaactgctgaacaagcagtccgtacccgctcatttcgtcgctttgaacggctcaaaattgaatatcaacctcaaaatgggggtggagtggactagctgcgccgaggtagtaagtcaagagaaaactatgttcccaaatcttaccgacgtgagagaggtcgtcacagatcagtttctgtgctctggcactcaggaggacgagtccccctgtaagggtgagagtggtggcgcagtcttcttagagcgcaggtttaggttcttccaggtggggctcgtgagctggggcctctacaacccctgtctgggttctgctgataaaaattcaagaaagagagcacccagaagcaaggtgccaccacctagggacttccacatcaacctattcaggatgcaaccctggttaaggcagcatctcggtgacgttttgaacttcctgcccctgtag

SEQ ID NO: 59272 - DNA, 1863 bp, Artificial Sequence
  derived and/or modified sequence
atggggcccctgatggtactgttttgtctgctgtttctgtatcccgctggacactgccccaaccctgggattagcctaggcgccgtccgaaccggattccgattcggccatggcgacaaggttagatacagatgctctagcaatctcgtactcacagggtcgagtgaacgcgagtgtcaaggcaacggagtatggagtggcactgaacccatttgccgacaaccctattcatacgattttccagaagatgtggcaccagctctaggtacaagcttctctcatatgctgggcgcaactaaccccacccaaaagacgaaggaaagcctgggccgaaagatacaaatccagcgaagcgggcacctcaacctgtacttactgctggattgttcacagtccgtcagcgaaaatgactttctgattttcaaggagagcgcgtctctgatggtggacagaatcttctccttcgagattaatgtgagcgtcgccatcataaccttcgcttccgagcccaaggtactgatgtctgttctgaacgacaactcaagggacatgactgaagtgatctcatcactcgaaaatgcaaattacaaggaccacgagaacggcactggtacaaatacatatgccgcactcaattcagtgtatctcatgatgaacaaccagatgaggctgctcgggatggaaacaatggcttggcaagagattcgacatgcgataattctgctcaccgacggcaaatctaacatgggaggctctcctaaaaccgcggtcgaccacatccgggagattttgaatattaatcagaaacgaaacgactatctggatatctatgccatcggcgtgggcaagctggacgtggactggagagagctgaatgagctggggtcaaagaaagacggggaaagacatgcctttatactccaggacaccaaggccctgcaccaggtttttgaacatatgctggacgtttcaaagctgaccgataccatctgcggtgtgggtaatatgtcagccaatgcctctgatcaggaaagaaccccttggcatgtgactatcaaacccaaaagtcaggagacttgcaggggagcattgatcagcgatcaatgggtgctaactgctgcccactgtttccgtgacggaaatgatcattccctctggcgggtcaacgtgggcgatcctaagtcccaatgggggaaggaatttctgatcgagaaggcagtgattagccctggatttgatgttttcgctaaaaagaatcaggggattctggaattctacggggacgacattgcgctgctcaagcttgcccaaaaggtgaagatgtctacacatgcccggcctatttgcttaccttgcacaatggaagcaaatcttgcgctaaggagaccccagggctcaacctgccgcgaccacgaaaacgagctgttaaataaacaaagtgtaccagcacactttgtagcactgaatggaagtaaacttaatataaacttgaaaatgggggttgaatggacatcctgcgctgaagttgtaagccaggaaaagacaatgttcccaaatctgaccgacgttcgggaggtggttaccgaccagttcctctgtagcggaacccaggaggacgaatctccctgtaagggcgaatccggcggcgcagtgtttcttgagcgtcgcttccggttctttcaagtcggactggtgtcatggggcctgtataatccctgtctgggctctgccgataagaacagccgcaagcgagccccccggtcaaaggtcccaccaccgcgagattttcacataaacttattcaggatgcagccctggctgcgacagcatcttggcgatgttttgaatttcctgccattatag

SEQ ID NO: 59273 - DNA, 1863 bp, Artificial Sequence
  derived and/or modified sequence
atggggcccctgatggtactgttttgtctgctgtttctgtatcccgctggacactgccccaaccctgggattagcctaggcgccgtccgaaccggattccgattcggccatggcgacaaggttagatacagatgctctagcaatctcgtactcacagggtcgagtgaacgcgagtgtcaaggcaacggagtatggagtggcactgaacccatttgccgacaaccctattcatacgattttccagaagatgtggcaccagctctaggtacaagcttctctcatatgctgggcgcaactaaccccacacagaagactaaggagagcttaggaagaaaaatccaaatccagagatccggccacttgaacctgtaccttttactggattgtagccagtccgtgtctgaaaacgattttttaatatttaaggaatcagcttctctgatggttgaccgaatttttagctttgagataaatgtgagcgtggcaatcatcaccttcgctagcgagcccaaagtactgatgagtgtgctgaatgacaacagtagagacatgaccgaagttattagttcccttgaaaacgctaactataaggatcatgaaaatggaacggggacgaacacatacgccgctttaaacagtgtttacctcatgatgaacaaccaaatgcgattgttgggtatggaaactatggcttggcaagaaatacggcatgcaattatccttttaaccgacggaaagtccaatatgggcggatcacccaaaaccgctgtggatcacattagggagattcttaacataaatcagaaacggaacgattatctcgatatttatgcgataggtgtgggcaaactggatgtggattggcgggaactgaacgaactggggtcaaaaaaggatggcgaaagacatgcttttatcttgcaggacaccaaagccttacaccaagtatttgaacacatgttggacgtcagcaagctaaccgatacaatttgtggtgtcggcaatatgtcggcgaacgcctctgatcaagagcggactccttggcacgttacaatcaaacccaaatcacaagagacctgccgcggagctttaatttcagatcagtgggtgctaacggccgcacattgctttagggacgggaatgatcattcactctggagagtgaacgtcggtgacccaaagtctcagtggggcaaagaatttctgattgagaaagccgtcatttcccctggcttcgatgtattcgccaagaaaaatcaaggcatattggaattctacggcgatgacatcgccctgctgaaactcgcccagaaagtgaaaatgagcacgcacgcccggccgatctgtctgccctgtactatggaagctaatctcgctctgaggcgacctcaaggatccacgtgccgcgatcatgagaatgagctcctaaacaaacaatccgtcccagcacactttgttgccctgaacggctcaaaacttaatataaatcttaaaatgggagtcgagtggaccagctgtgcagaagtggtgagtcaagaaaagactatgttccccaatcttactgacgtacgagaagtggtcacggatcagttcctttgttcggggacccaagaggatgaatccccatgcaaaggtgaatcaggcggcgcggtatttcttgagcgcaggttccgtttctttcaggtcggactggttagctggggcctgtacaatccttgcctcggatctgcggacaaaaactcacggaaaagggcgccaagaagcaaagtacccccacccagagattttcacattaacttatttcgtatgcagccctggcttagacaacacctaggcgacgtcctcaactttctgccattatag

SEQ ID NO: 59274 - DNA, 1281 bp, Artificial Sequence
  derived and/or modified sequence
atattagcatcagggagacagggcaaaggtttcacccttcagttcagtccccaatccctgcttattatttccctaacagaagaccatcccccttgccactccctggtttttcttctctggcagcaatgaagcagctgctgacccagctctagttttcgggaagtcagatgaccttttccctcccgcggctctctacctctcgccgcccctagggaggacaccatgggcccactgatggttcttttttgcctgctgttcctgtacccagctggccactgccccaacccaggcatttcactgggcgcagtgcggacaggcttccgctttggtcatggggacaaggtccgctatcgctgctcctcgaatcttgtgctcacggggtcttcggagcgggagtgccagggcaacggggtctggagtggaacggagcccatctgccgccaaccctactcttatgacttccctgaggacgtggcccctgccctgggcacttccttctcccacatgcttggggccaccaatcccacccagaagacaaaggaaagcctgggccgtaaaatccaaatccagcgctctggtcatctgaacctctacctgctcctggactgttcgcagagtgtgtcggaaaatgactttctcatcttcaaggagagcgcctccctcatggtggacaggatcttcagctttgagatcaatgtgagcgttgccattatcacctttgcctcagagcccaaagtcctcatgtctgtcctgaacgacaactcccgggatatgactgaggtgatcagcagcctggaaaatgccaactataaagatcatgaaaatggaactgggactaacacctatgcagccttaaacagtgtctatctcatgatgaacaaccaaatgcgactcctcggcatggaaacgatggcctggcaggaaatccgacatgccatcatccttctgacagatggaaagtccaatatgggtggctctcccaagacagctgttgaccatatcagagagatcctgaacatcaaccagaagaggaatgactatctggacatctatgccatcggggtgggcaagctggatgtggactggagagaactgaatgagctagggtccaagaaggatggtgagaggcatgccttcattctgcaggacacaaaggctctgcaccaggtctttgaacatatgctggatgtctccaagctcacagacaccatctgcggggtggggaacatgtcagcaaacgcctctgaccaggagaggacaccctggcatgtcactattaag

SEQ ID NO: 59275 - DNA, 1281 bp, Artificial Sequence
  derived and/or modified sequence
atattagcatcagggagacagggcaaaggtttcacccttcagttcagtccccaatccctgcttattatttccctaacagaagaccatcccccttgccactccctggtttttcttctctggcagcaatgaagcagctgctgacccagctctagttttcgggaagtcagatgaccttttccctcccgcggctctctacctctcgccgcccctagggaggacaccatgggcccactgatggttcttttttgcctgctgttcctgtacccagctggccactgccccaacccaggcatttcactgggcgcagtgcggacaggcttccgctttggtcatggggacaaggtccgctatcgctgctcctcgaatcttgtgctcacggggtcttcggagcgggagtgccagggcaacggggtctggagtggaacggagcccatctgccgccaaccctactcttatgacttccctgaggacgtggcccctgccctgggcacttccttctcccacatgcttggggccaccaatcccacccagaagacaaaggaaagcctgggccgtaaaatccaaatccagcgctctggtcatctgaacctctacctgctcctggactgttcgcagagtgtgtcggaaaatgactttctcatcttcaaggagagcgcctccctcatggtggacaggatcttcagctttgagatcaatgtgagcgttgccattatcacctttgcctcagagcccaaagtcctcatgtctgtcctgaacgacaactcccgggatatgactgaggtgatcagcagcctggaaaatgccaactataaagatcatgaaaatggaactgggactaacacctatgcggccttaaacagtgtctatctcatgatgaacaaccaaatgcgactcctcggcatggaaacgatggcctggcaggaaatccgacatgccatcatccttctgacagatggaaagtccaatatgggtggctctcccaagacagctgttgaccatatcagagagatcctgaacatcaaccagaagaggaatgactatctggacatctatgccatcggggtgggcaagctggatgtggactggagagaactgaatgagctagggtccaagaaggatggtgagaggcatgccttcattctgcaggacacaaaggctctgcaccaggtctttgaacatatgctggatgtctccaagctcacagacaccatctgcggggtggggaacatgtcagcaaacgcctctgaccaggagaggacaccctggcatgtcactattaag

SEQ ID NO: 59276 - DNA, 2434 bp, Artificial Sequence
  derived and/or modified sequence
aaagcctgtgggggagatctattgaccctatagatatattagcatcagggagacagggcaaaggtttcacccttcagttcagtccccaatccctgcttattatttccctaacagaagaccatcccccttgccactccctggtttttcttctctggcagcaatgaagcagctgctgacccagctctagttttcgggaagtcagatgaccttttccctcccgcggctctctacctctcgccgcccctagggaggacaccatgggcccactgatggttcttttttgcctgctgttcctgtacccagctggccactgccccaacccaggcatttcactgggcgcagtgcggacaggcttccgctttggtcatggggacaaggtccgctatcgctgctcctcgaatcttgtgctcacggggtcttcggagcgggagtgccagggcaacggggtctggagtggaacggagcccatctgccgccaaccctactcttatgacttccctgaggacgtggcccctgccctgggcacttccttctcccacatgcttggggccaccaatcccacccagaagacaaaggaaagcctgggccgtaaaatccaaatccagcgctctggtcatctgaacctctacctgctcctggactgttcgcagagtgtgtcggaaaatgactttctcatcttcaaggagagcgcctccctcatggtggacaggatcttcagctttgagatcaatgtgagcgttgccattatcacctttgcctcagagcccaaagtcctcatgtctgtcctgaacgacaactcccgggatatgactgaggtgatcagcagcctggaaaatgccaactataaagatcatgaaaatggaactgggactaacacctatgcggccttaaacagtgtctatctcatgatgaacaaccaaatgcgactcctcggcatggaaacgatggcctggcaggaaatccgacatgccatcatccttctgacagatggaaagtccaatatgggtggctctcccaagacagctgttgaccatatcagagagatcctgaacatcaaccagaagaggaatgactatctggacatctatgccatcggggtgggcaagctggatgtggactggagagaactgaatgagctagggtccaagaaggatggtgagaggcatgccttcattctgcaggacacaaaggctctgcaccaggtctttgaacatatgctggatgtctccaagctcacagacaccatctgcggggtggggaacatgtcagcaaacgcctctgaccaggagaggacaccctggcatgtcactattaagcccaagagccaagagacctgccggggggccctcatctccgaccaatgggtcctgacagcagctcattgcttccgcgatggcaacgaccactccctgtggagggtcaatgtgggagaccccaaatcccagtggggcaaagaattccttattgagaaggcggtgatctccccagggtttgatgtctttgccaaaaagaaccagggaatcctggagttctatggtgatgacatagctctgctgaagctggcccagaaagtaaagatgtccacccatgccaggcccatctgccttccctgcacgatggaggccaatctggctctgcggagacctcaaggcagcacctgtagggaccatgagaatgaactgctgaacaaacagagtgttcctgctcattttgtcgccttgaatgggagcaaactgaacattaaccttaagatgggagtggagtggacaagctgtgccgaggttgtctcccaagaaaaaaccatgttccccaacttgacagatgtcagggaggtggtgacagaccagttcctatgcagtgggacccaggaggatgagagtccctgcaagggagaatctgggggagcagttttccttgagcggagattcaggttttttcaggtgggtctggtgagctggggtctttacaacccctgccttggctctgctgacaaaaactcccgcaaaagggcccctcgtagcaaggtcccgccgccacgagactttcacatcaatctcttccgcatgcagccctggctgaggcagcacctgggggatgtcctgaattttttacccctctagccatggccactgagccctctgctgccctgccagaatctgccgcccctccatcttctacctctgaatggccacccttagaccctgtgatccatcctctctcctagctgagtaaatccgggtctctaggatgccagaggcagcgcacacaagctgggaaatcctcagggctcctaccagcaggactgcctcgctgccccacctcccgctccttggcctgtccccagattccttccctggttgacttgactcatgcttgtttcactttcacatggaatttcccagttatgaaattaataaaaatcaatggtttccac

SEQ ID NO: 59277 - DNA, 2439 bp, Artificial Sequence
  derived and/or modified sequence
agtacacaaagcctgtgggggagatctattgaccctatagatatattagcatcagggagacagggcaaaggtttcacccttcagttcagtccccaatccctgcttattatttccctaacagaagaccatcccccttgccactccctggtttttcttctctggcagcaatgaagcagctgctgacccagctctagttttcgggaagtcagatgaccttttccctcccgcggctctctacctctcgccgcccctagggaggacaccatgggcccactgatggttcttttttgcctgctgttcctgtacccagctggccactgccccaacccaggcatttcactgggcgcagtgcggacaggcttccgctttggtcatggggacaaggtccgctatcgctgctcctcgaatcttgtgctcacggggtcttcggagcgggagtgccagggcaacggggtctggagtggaacggagcccatctgccgccaaccctactcttatgacttccctgaggacgtggcccctgccctgggcacttccttctcccacatgcttggggccaccaatcccacccagaagacaaaggaaagcctgggccgtaaaatccaaatccagcgctctggtcatctgaacctctacctgctcctggactgttcgcagagtgtgtcggaaaatgactttctcatcttcaaggagagcgcctccctcatggtggacaggatcttcagctttgagatcaatgtgagcgttgccattatcacctttgcctcagagcccaaagtcctcatgtctgtcctgaacgacaactcccgggatatgactgaggtgatcagcagcctggaaaatgccaactataaagatcatgaaaatggaactgggactaacacctatgcggccttaaacagtgtctatctcatgatgaacaaccaaatgcgactcctcggcatggaaacgatggcctggcaggaaatccgacatgccatcatccttctgacagatggaaagtccaatatgggtggctctcccaagacagctgttgaccatatcagagagatcctgaacatcaaccagaagaggaatgactatctggacatctatgccatcggggtgggcaagctggatgtggactggagagaactgaatgagctagggtccaagaaggatggtgagaggcatgccttcattctgcaggacacaaaggctctgcaccaggtctttgaacatatgctggatgtctccaagctcacagacaccatctgcggggtggggaacatgtcagcaaacgcctctgaccaggagaggacaccctggcatgtcactattaagcccaagagccaagagacctgccggggggccctcatctccgaccaatgggtcctgacagcagctcattgcttccgcgatggcaacgaccactccctgtggagggtcaatgtgggagaccccaaatcccagtggggcaaagaattccttattgagaaggcggtgatctccccagggtttgatgtctttgccaaaaagaaccagggaatcctggagttctatggtgatgacatagctctgctgaagctggcccagaaagtaaagatgtccacccatgccaggcccatctgccttccctgcacgatggaggccaatctggctctgcggagacctcaaggcagcacctgtagggaccatgagaatgaactgctgaacaaacagagtgttcctgctcattttgtcgccttgaatgggagcaaactgaacattaaccttaagatgggagtggagtggacaagctgtgccgaggttgtctcccaagaaaaaaccatgttccccaacttgacagatgtcagggaggtggtgacagaccagttcctatgcagtgggacccaggaggatgagagtccctgcaagggagaatctgggggagcagttttccttgagcggagattcaggttttttcaggtgggtctggtgagctggggtctttacaacccctgccttggctctgctgacaaaaactcccgcaaaagggcccctcgtagcaaggtcccgccgccacgagactttcacatcaatctcttccgcatgcagccctggctgaggcagcacctgggggatgtcctgaattttttacccctctagccatggccactgagccctctgctgccctgccagaatctgccgcccctccatcttctacctctgaatggccacccttagaccctgtgatccatcctctctcctagctgagtaaatccgggtctctaggatgccagaggcagcgcacacaagctgggaaatcctcagggctcctaccagcaggactgcctcgctgccccacctcccgctccttggcctgtccccagattccttccctggttgacttgactcatgcttgtttcactttcacatggaatttcccagttatgaaattaataaaaatcaatggtttcc

SEQ ID NO: 59278 - DNA, 2439 bp, Artificial Sequence
  derived and/or modified sequence
agtacacaaagcctgtgggggagatctattgaccctatagatatattagcatcagggagacagggcaaaggtttcacccttcagttcagtccccaatccctgcttattatttccctaacagaagaccatcccccttgccactccctggtttttcttctctggcagcaatgaagcagctgctgacccagctctagttttcgggaagtcagatgaccttttccctcccgcggctctctacctctcgccgcccctagggaggacaccatgggcccactgatggttcttttttgcctgctgttcctgtacccagctggccactgccccaacccaggcatttcactgggcgcagtgcggacaggcttccgctttggtcatggggacaaggtccgctatcgctgctcctcgaatcttgtgctcacggggtcttcggagcgggagtgccagggcaacggggtctggagtggaacggagcccatctgccgccaaccctactcttatgacttccctgaggacgtggcccctgccctgggcacttccttctcccacatgcttggggccaccaatcccacccagaagacaaaggaaagcctgggccgtaaaatccaaatccagcgctctggtcatctgaacctctacctgctcctggactgttcgcagagtgtgtcggaaaatgactttctcatcttcaaggagagcgcctccctcatggtggacaggatcttcagctttgagatcaatgtgagcgttgccattatcacctttgcctcagagcccaaagtcctcatgtctgtcctgaacgacaactcccgggatatgactgaggtgatcagcagcctggaaaatgccaactataaagatcatgaaaatggaactgggactaacacctatgcagccttaaacagtgtctatctcatgatgaacaaccaaatgcgactcctcggcatggaaacgatggcctggcaggaaatccgacatgccatcatccttctgacagatggaaagtccaatatgggtggctctcccaagacagctgttgaccatatcagagagatcctgaacatcaaccagaagaggaatgactatctggacatctatgccatcggggtgggcaagctggatgtggactggagagaactgaatgagctagggtccaagaaggatggtgagaggcatgccttcattctgcaggacacaaaggctctgcaccaggtctttgaacatatgctggatgtctccaagctcacagacaccatctgcggggtggggaacatgtcagcaaacgcctctgaccaggagaggacaccctggcatgtcactattaagcccaagagccaagagacctgccggggggccctcatctccgaccaatgggtcctgacagcagctcattgcttccgcgatggcaacgaccactccctgtggagggtcaatgtgggagaccccaaatcccagtggggcaaagaattccttattgagaaggcggtgatctccccagggtttgatgtctttgccaaaaagaaccagggaatcctggagttctatggtgatgacatagctctgctgaagctggcccagaaagtaaagatgtccacccatgccaggcccatctgccttccctgcacgatggaggccaatctggctctgcggagacctcaaggcagcacctgtagggaccatgagaatgaactgctgaacaaacagagtgttcctgctcattttgtcgccttgaatgggagcaaactgaacattaaccttaagatgggagtggagtggacaagctgtgccgaggttgtctcccaagaaaaaaccatgttccccaacttgacagatgtcagggaggtggtgacagaccagttcctatgcagtgggacccaggaggatgagagtccctgcaagggagaatctgggggagcagttttccttgagcggagattcaggttttttcaggtgggtctggtgagctggggtctttacaacccctgccttggctctgctgacaaaaactcccgcaaaagggcccctcgtagcaaggtcccgccgccacgagactttcacatcaatctcttccgcatgcagccctggctgaggcagcacctgggggatgtcctgaattttttacccctctagccatggccactgagccctctgctgccctgccagaatctgccgcccctccatcttctacctctgaatggccacccttagaccctgtgatccatcctctctcctagctgagtaaatccgggtctctaggatgccagaggcagcgcacacaagctgggaaatcctcagggctcctaccagcaggactgcctcgctgccccacctcccgctccttggcctgtccccagattccttccctggttgacttgactcatgcttgtttcactttcacatggaatttcccagttatgaaattaataaaaatcaatggtttcc

SEQ ID NO: 59279 - DNA, 1062 bp, Artificial Sequence
  derived and/or modified sequence
atgggccccctgatggtgctgttctgcctgctgttcctgtaccccgccggccactgccccaaccccggcatcagcctgggcgccgtgagaaccggcttcagattcggccacggcgacaaggtgagatacagatgcagcagcaacctggtgctgaccggcagcagcgagagagagtgccagggcaacggcgtgtggagcggcaccgagcccatctgcagacagccctacagctacgacttccccgaggacgtggcccccgccctgggcaccagcttcagccacatgctgggcgccaccaaccccacccagaagaccaaggagagcctgggcagaaagatccagatccagagaagcggccacctgaacctgtacctgctgctggactgcagccagagcgtgagcgagaacgacttcctgatcttcaaggagagcgccagcctgatggtggacagaatcttcagcttcgagatcaacgtgagcgtggccatcatcaccttcgccagcgagcccaaggtgctgatgagcgtgctgaacgacaacagcagagacatgaccgaggtgatcagcagcctggagaacgccaactacaaggaccacgagaacggcaccggcaccaacacctacgccgccctgaacagcgtgtacctgatgatgaacaaccagatgagactgctgggcatggagaccatggcctggcaggagatcagacacgccatcatcctgctgaccgacggcaagagcaacatgggcggcagccccaagaccgccgtggaccacatcagagagatcctgaacatcaaccagaagagaaacgactacctggacatctacgccatcggcgtgggcaagctggacgtggactggagagagctgaacgagctgggcagcaagaaggacggcgagagacacgccttcatcctgcaggacaccaaggccctgcaccaggtgttcgagcacatgctggacgtgagcaagctgaccgacaccatctgcggcgtgggcaacatgagcgccaacgccagcgaccaggagagaaccccctggcacgtgaccatcaagtag

SEQ ID NO: 59280 - DNA, 1863 bp, Artificial Sequence
  derived and/or modified sequence
atgggccccctgatggtgctgttctgcctgctgttcctgtaccccgccggccactgccccaaccccggcatcagcctgggcgccgtgagaaccggcttcagattcggccacggcgacaaggtgagatacagatgcagcagcaacctggtgctgaccggcagcagcgagagagagtgccagggcaacggcgtgtggagcggcaccgagcccatctgcagacagccctacagctacgacttccccgaggacgtggcccccgccctgggcaccagcttcagccacatgctgggcgccaccaaccccacccagaagaccaaggagagcctgggcagaaagatccagatccagagaagcggccacctgaacctgtacctgctgctggactgcagccagagcgtgagcgagaacgacttcctgatcttcaaggagagcgccagcctgatggtggacagaatcttcagcttcgagatcaacgtgagcgtggccatcatcaccttcgccagcgagcccaaggtgctgatgagcgtgctgaacgacaacagcagagacatgaccgaggtgatcagcagcctggagaacgccaactacaaggaccacgagaacggcaccggcaccaacacctacgccgccctgaacagcgtgtacctgatgatgaacaaccagatgagactgctgggcatggagaccatggcctggcaggagatcagacacgccatcatcctgctgaccgacggcaagagcaacatgggcggcagccccaagaccgccgtggaccacatcagagagatcctgaacatcaaccagaagagaaacgactacctggacatctacgccatcggcgtgggcaagctggacgtggactggagagagctgaacgagctgggcagcaagaaggacggcgagagacacgccttcatcctgcaggacaccaaggccctgcaccaggtgttcgagcacatgctggacgtgagcaagctgaccgacaccatctgcggcgtgggcaacatgagcgccaacgccagcgaccaggagagaaccccctggcacgtgaccatcaagcccaagagccaggagacctgcagaggcgccctgatcagcgaccagtgggtgctgaccgccgcccactgcttcagagacggcaacgaccacagcctgtggagagtgaacgtgggcgaccccaagagccagtggggcaaggagttcctgatcgagaaggccgtgatcagccccggcttcgacgtgttcgccaagaagaaccagggcatcctggagttctacggcgacgacatcgccctgctgaagctggcccagaaggtgaagatgagcacccacgccagacccatctgcctgccctgcaccatggaggccaacctggccctgagaagaccccagggcagcacctgcagagaccacgagaacgagctgctgaacaagcagagcgtgcccgcccacttcgtggccctgaacggcagcaagctgaacatcaacctgaagatgggcgtggagtggaccagctgcgccgaggtggtgagccaggagaagaccatgttccccaacctgaccgacgtgagagaggtggtgaccgaccagttcctgtgcagcggcacccaggaggacgagagcccctgcaagggcgagagcggcggcgccgtgttcctggagagaagattcagattcttccaggtgggcctggtgagctggggcctgtacaacccctgcctgggcagcgccgacaagaacagcagaaagagagcccccagaagcaaggtgcccccccccagagacttccacatcaacctgttcagaatgcagccctggctgagacagcacctgggcgacgtgctgaacttcctgcccctgtag

SEQ ID NO: 59281 - protein, 1154 aa, Artificial Sequence
  derived and/or modified sequence
MKTKYIFCNITERKDAEGWETVQRGRPIRSRSTAVMPKVSLATEATRSKDDSDKENVCLLPDESIQKGQFVGDGTSNTIESHPKDSLHSCDHPLAEKTQFTVSTLDDVKNSGSIRDNYVRTSEISAVHIDTECVSVMLQAGTPPLQVNEEKFPAEKARIENEMDPSDISNSMAEVLAKKEELADRLEKANEEAIASAIAEEEQLTREIEAEENNDINIETDNDSDFSASMGSGSVSFCGMSMDWNDVLADYEARESWRQNTSWGDIVEEEPARPPGHGIHMHEKLSSPSRKRTIAESKKKHEEKQMKAQQLREKLREEKTLKLQKLLEREKDVRKWKEELLDQRRRMMEEKLLHAEFKREVQLQAIVKKAQEEEAKVNEIAFINTLEAQNKRHDVLSKLKEYEQRLNELQEERQRRQEEKQARDEAVQERKRALEAERQARVEELLMKRKEQEARIEQQRQEKEKAREDAARERARDREERLAALTAAQQEAMEELQKKIQLKHDESIRRHMEQIEQRKEKAAELSSGRHANTDYAPKLTPYERKKQCSLCNVLISSEVYLFSHVKGRKHQQAVRENTSIQGRELSDEEVEHLSLKKYIIDIVVESTAPAEALKDGEERQKNKKKAKKIKARMNFRAKEYESLMETKNSGSDSPYKAKLQRLAKDLLKQVQVQDSGSWANNKVSALDRTLGEITRILEKENVADQIAFQAAGGLTALEHILQAVVPATNVNTVLRIPPKSLCNAINVYNLTCNNCSENCSDVLFSNKITFLMDLLIHQLTVYVPDENNTILGRNTNKQVFEGLTTGLLKVSAVVLGCLIANRPDGNCQPATPKIPTQEMKNKPSQGDPFNNRVQDLISYVVNMGLIDKLCACFLSVQGPVDENPKMAIFLQHAAGLLHAMCTLCFAVTGRSYSIFDNNRQDPTGLTAALQATDLAGVLHMLYCVLFHGTILDPSTASPKENYTQNTIQVAIQSLRFFNSFAALHLPAFQSIVGAEGLSLAFRHMASSLLGHCSQVSCESLLHEVIVCVGYFTVNHPDNQVIVQSGRHPTVLQKLCQLPFQYFSDPRLIKVLFPSLIAACYNNHQNKIILEQEMSCVLLATFIQDLAQTPGQAENQPYQPKGKCLGSQDYLELANRFPQQAWEEARQFFLKKEKK

SEQ ID NO: 59282 - DNA, 3465 bp, Artificial Sequence
  derived and/or modified sequence
atgaagaccaagtacatcttctgcaacatcaccgagagaaaggacgccgagggctgggagaccgtgcagagaggcagacccatcagaagcagaagcaccgccgtgatgcccaaggtgagcctggccaccgaggccaccagaagcaaggacgacagcgacaaggagaacgtgtgcctgctgcccgacgagagcatccagaagggccagttcgtgggcgacggcaccagcaacaccatcgagagccaccccaaggacagcctgcacagctgcgaccaccccctggccgagaagacccagttcaccgtgagcaccctggacgacgtgaagaacagcggcagcatcagagacaactacgtgagaaccagcgagatcagcgccgtgcacatcgacaccgagtgcgtgagcgtgatgctgcaggccggcaccccccccctgcaggtgaacgaggagaagttccccgccgagaaggccagaatcgagaacgagatggaccccagcgacatcagcaacagcatggccgaggtgctggccaagaaggaggagctggccgacagactggagaaggccaacgaggaggccatcgccagcgccatcgccgaggaggagcagctgaccagagagatcgaggccgaggagaacaacgacatcaacatcgagaccgacaacgacagcgacttcagcgccagcatgggcagcggcagcgtgagcttctgcggcatgagcatggactggaacgacgtgctggccgactacgaggccagagagagctggagacagaacaccagctggggcgacatcgtggaggaggagcccgccagaccccccggccacggcatccacatgcacgagaagctgagcagccccagcagaaagagaaccatcgccgagagcaagaagaagcacgaggagaagcagatgaaggcccagcagctgagagagaagctgagagaggagaagaccctgaagctgcagaagctgctggagagagagaaggacgtgagaaagtggaaggaggagctgctggaccagagaagaagaatgatggaggagaagctgctgcacgccgagttcaagagagaggtgcagctgcaggccatcgtgaagaaggcccaggaggaggaggccaaggtgaacgagatcgccttcatcaacaccctggaggcccagaacaagagacacgacgtgctgagcaagctgaaggagtacgagcagagactgaacgagctgcaggaggagagacagagaagacaggaggagaagcaggccagagacgaggccgtgcaggagagaaagagagccctggaggccgagagacaggccagagtggaggagctgctgatgaagagaaaggagcaggaggccagaatcgagcagcagagacaggagaaggagaaggccagagaggacgccgccagagagagagccagagacagagaggagagactggccgccctgaccgccgcccagcaggaggccatggaggagctgcagaagaagatccagctgaagcacgacgagagcatcagaagacacatggagcagatcgagcagagaaaggagaaggccgccgagctgagcagcggcagacacgccaacaccgactacgcccccaagctgaccccctacgagagaaagaagcagtgcagcctgtgcaacgtgctgatcagcagcgaggtgtacctgttcagccacgtgaagggcagaaagcaccagcaggccgtgagagagaacaccagcatccagggcagagagctgagcgacgaggaggtggagcacctgagcctgaagaagtacatcatcgacatcgtggtggagagcaccgcccccgccgaggccctgaaggacggcgaggagagacagaagaacaagaagaaggccaagaagatcaaggccagaatgaacttcagagccaaggagtacgagagcctgatggagaccaagaacagcggcagcgacagcccctacaaggccaagctgcagagactggccaaggacctgctgaagcaggtgcaggtgcaggacagcggcagctgggccaacaacaaggtgagcgccctggacagaaccctgggcgagatcaccagaatcctggagaaggagaacgtggccgaccagatcgccttccaggccgccggcggcctgaccgccctggagcacatcctgcaggccgtggtgcccgccaccaacgtgaacaccgtgctgagaatcccccccaagagcctgtgcaacgccatcaacgtgtacaacctgacctgcaacaactgcagcgagaactgcagcgacgtgctgttcagcaacaagatcaccttcctgatggacctgctgatccaccagctgaccgtgtacgtgcccgacgagaacaacaccatcctgggcagaaacaccaacaagcaggtgttcgagggcctgaccaccggcctgctgaaggtgagcgccgtggtgctgggctgcctgatcgccaacagacccgacggcaactgccagcccgccacccccaagatccccacccaggagatgaagaacaagcccagccagggcgaccccttcaacaacagagtgcaggacctgatcagctacgtggtgaacatgggcctgatcgacaagctgtgcgcctgcttcctgagcgtgcagggccccgtggacgagaaccccaagatggccatcttcctgcagcacgccgccggcctgctgcacgccatgtgcaccctgtgcttcgccgtgaccggcagaagctacagcatcttcgacaacaacagacaggaccccaccggcctgaccgccgccctgcaggccaccgacctggccggcgtgctgcacatgctgtactgcgtgctgttccacggcaccatcctggaccccagcaccgccagccccaaggagaactacacccagaacaccatccaggtggccatccagagcctgagattcttcaacagcttcgccgccctgcacctgcccgccttccagagcatcgtgggcgccgagggcctgagcctggccttcagacacatggccagcagcctgctgggccactgcagccaggtgagctgcgagagcctgctgcacgaggtgatcgtgtgcgtgggctacttcaccgtgaaccaccccgacaaccaggtgatcgtgcagagcggcagacaccccaccgtgctgcagaagctgtgccagctgcccttccagtacttcagcgaccccagactgatcaaggtgctgttccccagcctgatcgccgcctgctacaacaaccaccagaacaagatcatcctggagcaggagatgagctgcgtgctgctggccaccttcatccaggacctggcccagacccccggccaggccgagaaccagccctaccagcccaagggcaagtgcctgggcagccaggactacctggagctggccaacagattcccccagcaggcctgggaggaggccagacagttcttcctgaagaaggagaagaagtag

SEQ ID NO: 59283 - DNA, 3465 bp, Artificial Sequence
  derived and/or modified sequence
atgaagactaagtacattttctgcaacattaccgaaaggaaggatgccgaaggctgggagaccgtccagcgtgggcgcccaattcggtctcgctccaccgcagtcatgccgaaggtttctctcgccaccgaggctacccgatctaaagacgattccgataaagaaaatgtgtgcctcctgcctgacgagtctattcagaaagggcaattcgttggcgacggcacgtctaataccatcgagtctcacccaaaggattcgctgcattcatgtgatcatccactggccgagaagacccagttcaccgtatccaccctggacgatgtaaaaaacagtgggtctattcgcgacaattatgtcaggacaagtgaaatcagcgccgtgcacatcgacacagagtgtgtttccgtgatgctccaagcgggaacacctccgctacaggtgaatgaggaaaagttccccgcggaaaaagccaggatagagaacgaaatggatccctctgatatctcgaactcaatggctgaggtgctggccaaaaaggaagaactggccgatcgactggagaaagccaatgaggaggccatcgccagcgctattgccgaggaggaacagttgacgagagagatcgaggcagaagaaaataacgatatcaatatcgaaacagacaatgacagtgatttttcggcctcaatgggttccggatctgtgtcgttttgcggtatgagcatggactggaacgacgtcctagccgattatgaagcgagagagtcctggcggcagaataccagttggggggacattgtggaagaagagcccgcgaggccacccggacatggcatccacatgcacgaaaaactttcttcccccagtcgaaagcgcacaatcgccgagagcaagaagaaacatgaagaaaaacagatgaaggcccagcaactgagggagaagctgcgggaggaaaagacgctgaaactgcagaaactgctggaacgcgaaaaagatgtccgcaagtggaaggaggaactcctggatcagagacgcagaatgatggaggagaaactgcttcacgctgaattcaaaagagaggtccaacttcaggctatcgtgaagaaggcccaggaggaggaagcgaaagtgaacgagatagcgttcatcaacaccctcgaggcccagaataaacgccatgatgtgctgtccaaactgaaagaatacgagcaaaggcttaacgaactgcaggaggaacgccagcggaggcaggaagagaagcaggcacgggacgaggccgtccaggaacggaagcgggccctggaagccgagcgacaggccagggtagaggaactgctgatgaagcgcaaggagcaggaggccagaatcgagcagcaaaggcaggaaaaggagaaagccagggaggatgccgcaagggaacgtgcaagggaccgggaagagaggcttgccgccctgacagctgcacagcaggaggcaatggaagagctgcaaaagaaaattcagcttaagcatgatgaatccattagacgccacatggaacagatcgagcagagaaaggaaaaagccgccgagttgagcagcggcaggcacgccaatactgactacgcaccaaaactaactccctacgaaagaaagaaacagtgctccttgtgtaatgttctgatcagctccgaagtgtacctgtttagtcatgttaaaggtagaaagcaccagcaggcagtgcgcgagaacacatccatccagggaagggaactaagtgacgaggaagtggaacatctctcgctgaaaaagtacatcatcgatatagttgttgagtccacagcaccagccgaagctttgaaagatggcgaagagcgccagaagaacaaaaaaaaagctaagaaaatcaaggctagaatgaactttcgggccaaagagtacgaaagcctcatggagacgaagaatagtggttcagattcaccttataaagccaaactacaacggctcgccaaggacttgctgaagcaggtgcaggttcaagattccggttcatgggctaataacaaggttagcgctcttgaccgcaccttgggagaaataacccggatcctggagaaggaaaacgttgccgaccagatcgcgtttcaagcagcaggaggtctcaccgctctggagcatatccttcaagctgtcgtgccagctacaaatgttaatactgtgttacgcattcctcctaagtcactgtgtaacgccataaatgtatacaatctgacatgcaacaattgctctgagaactgtagcgatgtactgtttagcaacaagataacatttctgatggacctgctcattcaccaattgactgtgtatgtacctgacgagaataataccatcctcggcagaaacaccaataagcaggtgttcgaagggttgactaccggactgttgaaggttagtgcagttgtgcttggttgcctaatcgccaatcggccggacggcaattgccagccagctacgccaaaaatccccacacaggagatgaaaaacaaaccctcccagggggacccattcaacaacagagtacaggacctgattagctacgttgtgaatatgggtctcatcgacaagctttgcgcatgtttcctgagtgtccagggtcccgtcgacgagaaccccaaaatggccatctttcttcagcacgcagcaggcttgctgcatgccatgtgcactctgtgctttgcggttaccgggaggagctattctatcttcgacaacaaccggcaagaccccactggacttactgccgctctgcaagcgactgatttagccggcgttctgcacatgctctattgcgtgctgtttcatgggaccatcctcgatcccagtactgcatctccaaaagagaactacacacagaataccattcaggtggctatacaatctctgaggttcttcaattcatttgccgccttacacctgccagccttccagagcattgtgggcgccgagggcttaagcctcgcttttcgccacatggcgtcctctctccttggacactgtagccaggtgagctgcgaatcccttctgcatgaggttatcgtgtgcgtgggctacttcactgtcaatcaccccgacaatcaagtcattgtacagagtggtcgccatcccaccgtcctgcaaaaactttgccaattacccttccaatacttctctgacccccggttaattaaggttcttttccccagtctgatcgccgcatgctacaataaccatcagaacaaaattattctagaacaggagatgtcttgcgtccttctggcaacctttattcaggatctggctcagacgccgggtcaagctgaaaaccaaccttaccaaccaaaaggcaaatgtctaggcagccaagattacttagagctggcaaatcggtttcctcagcaggcctgggaagaggctcgacagttttttctgaagaaagaaaagaagtag

SEQ ID NO: 59284 - DNA, 3465 bp, Artificial Sequence
  derived and/or modified sequence
atgaagaccaagtacatcttctgcaacatcacagagaggaaggatgctgagggctgggagaccgtgcagaggggccggcccatccgcagccgcagcacagctgtgatgcccaaggtgtccctggccacagaggccaccaggagcaaggatgacagcgacaaggaaaatgtgtgcctgctgcctgatgagagcatccagaagggccagtttgtgggagatggcaccagcaacaccatcgagagccaccccaaggacagcctgcacagctgtgaccaccccctggccgagaagacccagttcaccgtgtccaccctggatgatgtgaagaacagcggcagcatccgggacaactacgtgaggaccagcgagatctctgctgtgcacatcgacacagaatgtgtgtctgtgatgctgcaggccggcaccccacccctgcaggtgaatgaggagaagtttcctgctgagaaggccagaattgaaaatgagatggaccccagcgacatcagcaacagcatggccgaggtgctggccaagaaggaggagctggccgaccggctggagaaggccaatgaggaggccatcgccagcgccatcgccgaggaggagcagctgacccgggagattgaggccgaggagaacaatgacatcaacatcgagacagacaatgacagcgacttcagcgcctccatgggcagcggctctgtgtccttctgtggcatgtccatggactggaatgatgtgctggccgactatgaggcccgggagagctggaggcagaacacctcctggggagacatcgtggaggaggagcccgcccggcccccaggccacggcatccacatgcatgagaagctgagcagccccagcaggaagaggaccatcgccgagagcaagaagaagcatgaggagaagcagatgaaggcccagcagctgcgggagaagctgcgggaggagaagaccctgaagctgcagaagctgctggagcgggagaaggatgtgaggaagtggaaggaggagctgctggaccagaggaggaggatgatggaggagaagctgctgcatgctgagttcaagcgggaggtgcagctgcaggccatcgtgaagaaggcccaggaggaggaggccaaggtgaatgagatcgccttcatcaacaccctggaggcccagaacaagagacatgatgtgctgagcaagctgaaggagtatgagcagaggctgaatgagctgcaggaggagcggcagaggcggcaggaggagaagcaggccagagatgaggccgtgcaggagaggaagagggccctggaggccgagcggcaggcccgggtggaggagctgctgatgaagaggaaggagcaggaggcccgcatcgagcagcagaggcaggagaaggagaaggcccgggaggatgctgcccgggagcgggcccgggaccgggaggagcggctggccgccctgacagctgcccagcaggaggccatggaggagctgcagaagaagatccagctgaagcatgatgagagcatcagaagacacatggagcagatcgagcagaggaaggagaaggctgctgagctgagcagcggcagacatgccaacacagattatgcccccaagctgaccccctatgaaaggaagaagcagtgcagcctgtgcaatgtgctgatcagcagcgaggtgtacctgttcagccacgtgaagggcaggaagcaccagcaggccgtgcgggagaacaccagcatccagggccgggagctgagtgatgaggaggtggagcacctgagcctgaagaagtacatcatcgacatcgtggtggagagcacagccccagctgaggccctgaaggatggagaggagcggcagaagaacaagaagaaggccaagaagatcaaggccaggatgaacttccgggccaaggagtatgagagcctgatggagaccaagaacagcggcagtgacagcccctacaaggccaagctgcagaggctggccaaggacctgctgaagcaggtgcaggtgcaggacagcggctcctgggccaacaacaaggtgtctgccctggacaggaccctgggggagatcacccgcatcctggagaaggaaaatgtggccgaccagatcgccttccaggccgccggcggcctgacagccctggagcacatcctgcaggccgtggtgcctgccaccaacgtgaacacagtgctgcgcatcccccccaagagcctgtgcaatgccatcaacgtgtacaacctgacctgcaacaactgcagcgagaactgcagtgatgtgctcttcagcaacaagatcaccttcctgatggacctgctgatccaccagctgactgtgtatgtgcctgatgagaacaacaccatcctgggcaggaacaccaacaagcaggtgtttgagggcctgaccaccggcctgctgaaggtgtctgctgtggtgctgggctgcctgattgccaacagaccagatggcaactgccagcctgccacccccaagatccccacccaggagatgaagaacaagcccagccagggcgaccccttcaacaacagagtgcaggacctgatctcctatgtggtgaacatgggcctgattgacaagctgtgtgcctgcttcctgtctgtgcagggccctgtggatgagaaccccaagatggccatcttcctgcagcacgccgccggcctgctgcacgccatgtgcaccctgtgctttgctgtgacaggccgcagctacagcatctttgacaacaaccggcaggaccccaccggcctgacagctgccctgcaggccacagacctggccggcgtgctgcacatgctgtactgtgtgctcttccacggcaccatcctggaccccagcacagccagccccaaggagaactacacccagaacaccatccaggtggccatccagagcctgcgcttcttcaacagctttgctgccctgcacctgcctgccttccagagcatcgtgggcgctgagggcctgagcctggccttccgccacatggccagcagcctgctgggccactgcagccaggtgtcctgtgagagcctgctgcacgaggtgattgtgtgtgtgggctacttcaccgtgaaccacccagacaaccaggtgattgtgcagagcggccgccaccccaccgtgctgcagaagctgtgccagctgcccttccagtacttcagtgaccccaggctcatcaaggtgctcttccccagcctgattgctgcctgctacaacaaccaccagaacaagatcatcctggagcaggagatgagctgtgtgctgctggccaccttcatccaggacctggcccagaccccaggccaggccgagaaccagccctaccagcccaagggcaagtgcctgggcagccaggactacctggagctggccaaccgcttcccccagcaggcctgggaggaggcccggcagttcttcctgaagaaggagaagaagtag

SEQ ID NO: 59285 - DNA, 3465 bp, Artificial Sequence
  derived and/or modified sequence
atgaagaccaagtacatcttctgcaacatcaccgagcggaaggacgccgaaggttgggaaacagtacagcggggccggcccattagatctcggtccaccgccgtgatgcccaaagtatcattagctaccgaggcgacccgcagcaaggatgactcagacaaagaaaatgtctgtttgctccccgatgaatccatccagaaaggacagttcgtgggcgacggtacatctaatacaatagaaagtcatcctaaggactcacttcactcatgcgatcatccacttgcagagaagacacagttcacagtatcaaccttggatgatgtgaaaaatagtggctcgattagagataactacgtccggacctccgagatctcagcagtgcatatcgatactgaatgtgtgtcagtgatgctgcaggctgggacccccccgctgcaggtcaatgaggaaaagttccccgctgagaaagctaggatcgaaaacgagatggatccctccgacattagcaattcaatggcagaagttctggccaagaaggaggagctagcagatcgtctggaaaaggcaaacgaagaagccatcgcgagtgctatcgccgaagaggagcagctgacaagagaaattgaggctgaggaaaataacgacatcaatattgagacagacaacgatagtgactttagtgcttccatgggaagcggtagcgtgagcttctgcgggatgagtatggattggaacgacgtcctggctgattacgaggcccgtgagtcttggaggcagaacacaagttggggggacatcgtggaagaagagccggcccgcccacccggccacggcatccacatgcacgagaaattgtcctcgccctcacggaagcgtacgattgccgaaagcaagaaaaagcatgaggaaaagcagatgaaggcacagcagctgcgggagaagctccgtgaagaaaagactcttaaactgcagaaacttttggaaagagagaaggatgttcggaagtggaaggaggaacttttagaccaaaggagacgcatgatggaagaaaagctattgcacgccgagtttaaaagggaagtgcaattacaggccattgttaagaaagctcaagaagaagaggctaaagtgaacgagatcgcttttatcaatactttggaagcacagaacaagagacacgacgttttatctaagctgaaagagtacgagcagaggctcaacgaacttcaggaggaaagacagcggcgtcaggaagagaagcaggcccgagatgaggcagttcaggagcgaaaaagggctctcgaggctgaacgacaggcccgggtggaggaactgctgatgaaacgaaaggaacaggaggcccgcatcgagcagcagagacaagaaaaggaaaaggctagggaggatgccgcgagggagagggctagggatagggaggagcggctggcggcgcttaccgcagcccaacaggaggctatggaggaactgcagaagaagatccagctgaaacacgatgagagtataagaaggcacatggagcagatcgaacagcgcaaggagaaggccgccgagctaagctccggccggcatgcaaacactgattacgcaccgaagcttacaccttacgaaaggaaaaaacagtgctccctgtgtaacgtcctgatttcttcagaggtatacttattttcacacgtgaagggccgcaaacatcaacaagcagtccgcgaaaacacgtcgatccagggtcgggaactctcagacgaagaggtggaacacctcagcttgaagaaatatataatcgatatcgtagtggagagcacagctcctgcagaggccctcaaggacggagaggagaggcagaaaaataaaaagaaggcaaagaaaatcaaagccaggatgaatttcagagctaaggagtacgagagtctgatggaaaccaagaactccggaagcgacagtccttataaggccaaactgcagcgattggcaaaagatttgttgaaacaggtacaggtgcaagatagtggatcctgggccaacaataaggtaagcgccctggacaggactttaggggaaatcacgagaattctcgagaaggagaacgtcgctgaccagatagcctttcaggccgcagggggacttacagctctcgaacacatcttgcaggccgtcgtgccagccactaatgtaaatacagtgctgcgcataccccctaaatccctgtgcaatgcaattaacgtgtacaacctaacttgcaacaattgtagcgagaactgttccgatgtgctgttcagcaataaaatcacttttttaatggacctccttattcaccaactcacggtgtatgttcctgatgagaacaatacgatactggggcgtaacactaataagcaggtttttgaaggactaacaactggactgctcaaggtgtcagccgtcgttctcgggtgtctgatcgctaaccggccggatggcaattgccagcccgcaacgcccaagatccccactcaggaaatgaaaaataagccctctcaaggagatccattcaacaatagggtccaggatctcatatcttacgtagtcaatatgggtttaattgataagctatgtgcatgcttccttagtgttcaaggaccagtcgacgagaacccaaaaatggccatctttctgcaacacgcagctggccttcttcatgctatgtgcacactgtgcttcgccgttacaggcaggagctatagcatcttcgacaacaacaggcaggaccccaccggcctcactgcagctctccaggccacagatctagctggggttttgcacatgttgtattgtgtgctatttcacgggactatactcgatccttctaccgcttcccccaaagaaaattacacacagaacactattcaggtcgcaatccaaagccttcgctttttcaacagttttgctgcactgcacctcccagcatttcagtcaatcgtgggcgccgagggcctctcgctggcattccgccatatggcctcctccctgttgggacactgctcacaagtttcctgcgagtccttactccacgaagtcattgtgtgcgtgggctatttcactgtaaatcacccggacaatcaggtaatcgttcaatctgggaggcacccaactgttttgcagaagctgtgtcagctgcccttccaatacttctcagacccccgactcattaaagtgctttttccatctctcattgccgcgtgctacaacaatcaccagaataaaattattctggagcaggagatgtcctgtgtactgctcgccacttttattcaggacctggcccagacaccaggccaggcagaaaaccagccctaccaaccgaagggtaagtgtctagggtctcaggactatctggaactcgctaataggttccctcagcaggcttgggaagaggcgagacagttctttctgaagaaagagaaaaaatag

SEQ ID NO: 59286 - DNA, 3465 bp, Artificial Sequence
  derived and/or modified sequence
atgaaaacaaagtatattttttgcaatatcaccgagagaaaagacgccgagggatgggaaacagtccaacggggtagacccatccgcagccgctcaacagccgttatgcctaaagtctcccttgccaccgaggcaacacgcagcaaggacgactcagacaaagaaaacgtgtgcttgttgcccgatgagagcatacagaagggacaatttgtcggggatggcacctctaataccattgaatcccatcccaaagatagcttgcactcttgcgatcatccacttgcagagaaaactcagtttaccgtgagcacgttggacgatgtgaagaactccggaagcattcgcgacaattacgttcgcacctctgaaatcagcgcagtccacatcgacaccgagtgcgtatctgtcatgctgcaggctggaacccctcccttgcaggttaacgaggagaaatttccagcagagaaagccaggatcgaaaacgagatggatccttccgacatcagcaatagcatggccgaggttctggccaaaaaggaagagctggcagatagactggagaaggctaacgaggaggccattgcgtcagccattgcagaggaggaacagttaacacgggagatcgaagcagaggaaaacaatgacattaatatcgaaacagataacgacagcgacttttccgccagcatgggttccgggagcgtgagtttttgtggcatgtccatggactggaacgacgtacttgccgactatgaagcacgggagtcctggaggcagaatacaagctggggggacattgtggaggaggagccagcacggccaccaggccacgggattcatatgcacgaaaagctttcaagcccgagccgcaaaaggacgatagctgaatcaaaaaagaaacacgaagaaaagcagatgaaggctcagcagcttcgagagaagctgagagaagaaaagacgttaaaacttcagaagctgctggagcgcgagaaagacgtgagaaagtggaaggaagagctcctggatcagagacgtaggatgatggaagaaaagttgctgcacgcggagttcaagcgcgaagtacagcttcaggctatcgttaagaaagcccaagaggaggaagccaaagtcaatgaaatcgcctttatcaacacgctagaagcacagaacaagcgacatgacgtactgtcgaaactgaaggagtacgagcagaggctgaacgaacttcaggaggaaaggcaacgaaggcaggaagaaaaacaggccagagacgaggccgtccaggaaagaaagagggccctcgaagcagagaggcaggcccgagttgaggaactcctgatgaagagaaaggaacaggaggcaaggattgagcaacagcgccaggaaaaggagaaggctcgggaagatgctgcaagggagcgagccagagacagggaggagagactggctgcactgactgccgcacagcaggaagcgatggaagaactccaaaagaaaattcagctgaaacacgatgagagtattagaagacatatggagcagattgagcagcgcaaggaaaaagctgcggaactgtcctcaggccgacacgcgaataccgactacgcacccaagttgaccccttacgagcggaagaaacagtgcagcctgtgcaatgtattgatcagcagcgaagtataccttttctctcatgtcaaaggccgaaaacaccagcaagcggtacgggagaacaccagtattcaagggagggagctgagcgacgaggaggtggaacatctttctctgaagaagtacatcatcgacatcgtagtggagagcacagcacccgcagaagctctgaaagacggtgaggagcgccaaaagaacaaaaaaaaagccaaaaagataaaagctcgtatgaactttcgagctaaggagtatgagtccctgatggaaactaagaatagtggttccgacagtccgtacaaagcgaagctgcagcggttggccaaggatctcctcaaacaggtccaggtccaggattcagggtcttgggctaataataaggtgagcgctctggacaggaccttaggcgaaatcacccggattctggagaaagaaaacgtggccgatcagatagcttttcaggccgctggcggactgaccgccctcgagcacatccttcaggccgtggtgcccgcaaccaacgtgaatacagtccttcgaatccctccgaagtccctgtgtaatgctattaatgtgtacaatctgacctgtaataattgtagcgaaaattgttccgacgtgttattttcgaacaagataacctttctcatggacttgctcattcatcagctgactgtttatgttcctgacgagaataatactatactaggcagaaacactaacaaacaagtattcgaaggactgacaacgggactgcttaaagtgagtgcagtggtcctcggatgtttgatagctaaccgccctgacggaaattgccagcccgcaacccccaagatcccaacacaggagatgaaaaacaagccttctcagggagatccctttaataacagagtgcaggatctgataagctacgtggttaacatgggcttgattgataaactgtgtgcatgcttcctctctgtgcaaggccctgtagacgagaaccctaagatggcaatatttctccagcacgccgcaggactcctccatgcaatgtgcacactgtgctttgctgtgactggtcggagctattcaatctttgacaacaaccgccaagaccccacaggtctgactgccgctttgcaggctacagatctggccggtgttctacacatgctctactgtgtgctgttccatgggaccattctagaccctagcactgcctcacctaaggagaattatacccagaatacgatccaggtggccatccagagtctgagattttttaatagtttcgccgcactacacctacccgctttccagtccatcgttggcgctgagggactctccttggccttccggcacatggcctcgtcactgctcggacactgtagccaggtgagctgtgagtctctactgcatgaagttatcgtatgcgtgggttacttcactgtgaaccaccctgacaatcaggtcatcgttcagtccggacggcaccctacagtacttcagaagctttgtcagctcccctttcagtattttagtgatccccgactgatcaaggtgctgtttccttccctgatcgccgcttgctacaacaaccatcaaaacaagatcattttggagcaagagatgtcatgcgtgctgctggcgacctttatccaggacctggcccaaaccccagggcaggcagagaaccagccataccagcccaaggggaagtgtctcggatcccaggactaccttgaattggcaaacagattcccccagcaagcgtgggaagaggcgcgacagttcttcctgaaaaaagaaaaaaagtag

SEQ ID NO: 59287 - protein, 336 aa, Artificial Sequence
  derived and/or modified sequence
MSVLFFYIMRYKQSDPENPDNDRFVLAKIATRKACGLALAKLGYANNRVVVLDGDTRYSTFSEIFNKEYPERFIECFMAEQNMVSVALGCASRGRTIAFASTFAAFLTRAFDHIRIGGLAESNINIIGSHCGVSVGDDGASQMALEDIAMFRTIPKCTIFYPTDAVSTEHAVALAANAKGMCFIRTTRPETMVIYTPQERFEIGQAKVLRHCVSDKVTVIGAGITVYEALAAADELSKQDIFIRVIDLFTIKPLDVATIVSSAKATEGRIITVEDHYPQGGIGEAVCAAVSMDPDIQVHSLAVSGVPQSGKSEELLDMYGISARHIIVAVKCMLLN

SEQ ID NO: 59288 - protein, 557 aa, Artificial Sequence
  derived and/or modified sequence
MSVLFFYIMRYKQSDPENPDNDRFVLAKRLSFVDVATGWLGQGLGVACGMAYTGKYFDRASYRVFCLMSDGESSEGSVWEAMAFASYYSLDNLVAIFDVNRLGHSGALPAEHCINIYQRRCEAFGWNTYVVDGRDVEALCQVFWQASQVKHKPTAVVAKTFKGRGTPSIEDAESWHAKPMPRERADAIIKLIESQIQTSRNLDPQPPIEDSPEVNITDVRMTSPPDYRVGDKIATRKACGLALAKLGYANNRVVVLDGDTRYSTFSEIFNKEYPERFIECFMAEQNMVSVALGCASRGRTIAFASTFAAFLTRAFDHIRIGGLAESNINIIGSHCGVSVGDDGASQMALEDIAMFRTIPKCTIFYPTDAVSTEHAVALAANAKGMCFIRTTRPETMVIYTPQERFEIGQAKGVSMLQDSWSSVISYQKVLRHCVSDKVTVIGAGITVYEALAAADELSKQDIFIRVIDLFTIKPLDVATIVSSAKATEGRIITVEDHYPQGGIGEAVCAAVSMDPDIQVHSLAVSGVPQSGKSEELLDMYGISARHIIVAVKCMLLN

SEQ ID NO: 59289 - DNA, 2566 bp, Artificial Sequence
  derived and/or modified sequence
aaacttgccccgagtccacggtgctctgcggttaggagctggcctcactgtgcacagggggaggggtggtgagcttaccgggctttaaagcgcccttccaacctgtgagccctgcattccttacccttggttggattcttcccgggctgggagaaatgaccgcttctatgaggagaccatgtgccgaggtcgtgtgctaggaagccagttgctgtgagaaatgaccagtgtcatgtctgtctttcagccaccctacatcatgtagcagttcttctgagatcatgtctgtgctgttcttctacatcatgaggtacaagcagtcagatccagagaatccggacaacgaccgatttgtcctcgcaaagagactgtcgtttgtggatgtggcaacaggatggctcggacaaggactgggagttgcatgtggaatggcatatactggcaagtacttcgacagggccagctaccgggtgttctgcctcatgagtgatggcgagtcctcagaaggctctgtctgggaggcaatggcctttgcttcctactacagtctggacaatcttgtggcaatctttgatgtgaaccgcctgggacacagtggtgcattgcccgccgagcactgcataaacatctatcagaggcgctgcgaagcctttgggtggaacacttatgtggtggacggccgggacgtggaggcactgtgccaggtattctggcaggcttctcaggtgaagcacaagcccactgctgtggtggccaagaccttcaagggccggggcaccccaagtattgaggatgcagaaagttggcatgcaaagccaatgccgagagaaagagcagatgccattatcaaattaattgagagccagatacagaccagcaggaatcttgacccacagccccccattgaggactcacctgaagtcaacatcacagatgtaaggatgacctctccacctgattacagagttggtgacaagatagctactcggaaagcatgcggtctggctctggctaagctgggctacgcgaacaacagagtcgttgtgctggatggtgacaccaggtactctactttctctgagatattcaacaaggagtaccctgagcgcttcatcgagtgctttatggctgaacaaaacatggtgagcgtggctctgggctgtgcctcccgtggacggaccattgcttttgctagcacctttgctgcctttctgactcgagcatttgatcacatccggataggaggcctcgctgagagcaacatcaacattattggttcccactgtggggtatctgttggtgacgatggtgcttcccagatggccctggaggatatagccatgttccgaaccattcccaagtgcacgatcttctacccaactgatgccgtctccacggagcatgctgttgctctggcagccaatgccaaggggatgtgcttcattcggaccacccgaccagaaactatggttatttacaccccacaagaacgctttgagatcggacaggccaaggtcctccgccactgtgtcagtgacaaggtcacagttattggagctggaattactgtgtatgaagccttagcagctgctgatgagctttcgaaacaagatatttttatccgtgtcatcgacctgtttaccattaaacctctggatgtcgccaccatcgtctccagtgcaaaagccacagagggccggatcattacagtggaggatcactacccgcaaggtggcatcggggaagctgtctgcgcagccgtctccatggatcctgacattcaggttcattcgctggcagtgtcgggagtgccccagagtgggaagtccgaggaattgctggatatgtatggaattagtgccagacatatcatagtggccgtgaaatgcatgttgctgaactaaaatagctgttagctttggtcttttggcctctttaccctgtgtttatgtttgttccaaaaccatcatttaaatctctactgtcacattttgtttcttaaaagcaaagccagctaacaccttcattcatccctagttcggaaattcaagctaactacttaccctttaaactgtcactgcatatgcaagtaccgctctaatttttggatcattaaagggagttacacaacttttaagtgaaaaaaataggtaacaaaacaaccacctgatagtaagttttctgataagactatagataagtggtagaggtaatcaattcttccgaagtgtttccttcgtgaataactggtagaggtaatagttttttcaatgtatttccttcatgagtaaagaaaatgtggattgaagtatagattccagtagcctagtttccacagcacgataacaccatgacgcctactgctgttcccaccttgggattctgtgtgctgccatcccacctgcagctgccctggaattcccttcgctgtttgccttcatctccctccacgtttgagaggctgtcaggcagcagcgaaagcttgttaggatgtcctgtgctgcttgtgatgagagcctccacactgtactgttcaagtcaatgttaataaagcatttcaaaacca

SEQ ID NO: 59290 - DNA, 1674 bp, Artificial Sequence
  derived and/or modified sequence
atgagcgtgctgttcttctacatcatgagatacaagcagagcgaccccgagaaccccgacaacgacagattcgtgctggccaagagactgagcttcgtggacgtggccaccggctggctgggccagggcctgggcgtggcctgcggcatggcctacaccggcaagtacttcgacagagccagctacagagtgttctgcctgatgagcgacggcgagagcagcgagggcagcgtgtgggaggccatggccttcgccagctactacagcctggacaacctggtggccatcttcgacgtgaacagactgggccacagcggcgccctgcccgccgagcactgcatcaacatctaccagagaagatgcgaggccttcggctggaacacctacgtggtggacggcagagacgtggaggccctgtgccaggtgttctggcaggccagccaggtgaagcacaagcccaccgccgtggtggccaagaccttcaagggcagaggcacccccagcatcgaggacgccgagagctggcacgccaagcccatgcccagagagagagccgacgccatcatcaagctgatcgagagccagatccagaccagcagaaacctggacccccagccccccatcgaggacagccccgaggtgaacatcaccgacgtgagaatgaccagcccccccgactacagagtgggcgacaagatcgccaccagaaaggcctgcggcctggccctggccaagctgggctacgccaacaacagagtggtggtgctggacggcgacaccagatacagcaccttcagcgagatcttcaacaaggagtaccccgagagattcatcgagtgcttcatggccgagcagaacatggtgagcgtggccctgggctgcgccagcagaggcagaaccatcgccttcgccagcaccttcgccgccttcctgaccagagccttcgaccacatcagaatcggcggcctggccgagagcaacatcaacatcatcggcagccactgcggcgtgagcgtgggcgacgacggcgccagccagatggccctggaggacatcgccatgttcagaaccatccccaagtgcaccatcttctaccccaccgacgccgtgagcaccgagcacgccgtggccctggccgccaacgccaagggcatgtgcttcatcagaaccaccagacccgagaccatggtgatctacaccccccaggagagattcgagatcggccaggccaagggcgtgagcatgctgcaggacagctggagcagcgtgatcagctaccagaaggtgctgagacactgcgtgagcgacaaggtgaccgtgatcggcgccggcatcaccgtgtacgaggccctggccgccgccgacgagctgagcaagcaggacatcttcatcagagtgatcgacctgttcaccatcaagcccctggacgtggccaccatcgtgagcagcgccaaggccaccgagggcagaatcatcaccgtggaggaccactacccccagggcggcatcggcgaggccgtgtgcgccgccgtgagcatggaccccgacatccaggtgcacagcctggccgtgagcggcgtgccccagagcggcaagagcgaggagctgctggacatgtacggcatcagcgccagacacatcatcgtggccgtgaagtgcatgctgctgaactag

SEQ ID NO: 59291 - DNA, 1623 bp, Artificial Sequence
  derived and/or modified sequence
atgagcgtgctgttcttctacatcatgagatacaagcagagcgaccccgagaaccccgacaacgacagattcgtgctggccaagagactgagcttcgtggacgtggccaccggctggctgggccagggcctgggcgtggcctgcggcatggcctacaccggcaagtacttcgacagagccagctacagagtgttctgcctgatgagcgacggcgagagcagcgagggcagcgtgtgggaggccatggccttcgccagctactacagcctggacaacctggtggccatcttcgacgtgaacagactgggccacagcggcgccctgcccgccgagcactgcatcaacatctaccagagaagatgcgaggccttcggctggaacacctacgtggtggacggcagagacgtggaggccctgtgccaggtgttctggcaggccagccaggtgaagcacaagcccaccgccgtggtggccaagaccttcaagggcagaggcacccccagcatcgaggacgccgagagctggcacgccaagcccatgcccagagagagagccgacgccatcatcaagctgatcgagagccagatccagaccagcagaaacctggacccccagccccccatcgaggacagccccgaggtgaacatcaccgacgtgagaatgaccagcccccccgactacagagtgggcgacaagatcgccaccagaaaggcctgcggcctggccctggccaagctgggctacgccaacaacagagtggtggtgctggacggcgacaccagatacagcaccttcagcgagatcttcaacaaggagtaccccgagagattcatcgagtgcttcatggccgagcagaacatggtgagcgtggccctgggctgcgccagcagaggcagaaccatcgccttcgccagcaccttcgccgccttcctgaccagagccttcgaccacatcagaatcggcggcctggccgagagcaacatcaacatcatcggcagccactgcggcgtgagcgtgggcgacgacggcgccagccagatggccctggaggacatcgccatgttcagaaccatccccaagtgcaccatcttctaccccaccgacgccgtgagcaccgagcacgccgtggccctggccgccaacgccaagggcatgtgcttcatcagaaccaccagacccgagaccatggtgatctacaccccccaggagagattcgagatcggccaggccaaggtgctgagacactgcgtgagcgacaaggtgaccgtgatcggcgccggcatcaccgtgtacgaggccctggccgccgccgacgagctgagcaagcaggacatcttcatcagagtgatcgacctgttcaccatcaagcccctggacgtggccaccatcgtgagcagcgccaaggccaccgagggcagaatcatcaccgtggaggaccactacccccagggcggcatcggcgaggccgtgtgcgccgccgtgagcatggaccccgacatccaggtgcacagcctggccgtgagcggcgtgccccagagcggcaagagcgaggagctgctggacatgtacggcatcagcgccagacacatcatcgtggccgtgaagtgcatgctgctgaactag

SEQ ID NO: 59292 - DNA, 1011 bp, Artificial Sequence
  derived and/or modified sequence
atgtcagttttgttcttttacattatgaggtacaagcaaagtgaccctgagaacccagataatgatcgcttcgtgctggccaagattgccactaggaaagcgtgtggactggcacttgccaagctgggctatgcaaataaccgagtggtggttctcgacggagacacaaggtatagcactttttccgagatatttaacaaggagtacccagagcggtttatcgaatgctttatggccgaacaaaatatggttagcgtggctctcggttgcgcctctcgaggtcgtacaatcgcattcgctagtacgttcgcagccttcctaacccgggccttcgatcatataagaattggaggcctcgccgaaagcaacatcaatatcatcggaagtcactgcggtgtgagcgtgggagacgacggcgcgtcccagatggctctagaagacatcgctatgttcaggaccataccaaagtgtacaatcttctatccaaccgacgccgtgtctaccgagcacgccgttgcgttggcagccaatgcaaagggcatgtgtttcattagaacaacccgcccagagaccatggttatctacacgccccaggagcggtttgagattgggcaagctaaggtactccgtcactgtgtctccgataaggttacagtgatcggagccggaattactgtttacgaagcactggcagcagccgacgagctgtcaaagcaggacatttttattagggttatagacctgttcaccataaagccactggatgtcgctacaatcgtgtcgagcgcgaaagctacagaaggaaggatcataaccgtcgaggaccactatccacagggcggcatcggagaggccgtgtgtgcggcggtaagcatggatccagatattcaggtgcactcgctggccgtctccggggtgcctcagtccggcaagtctgaggagctgcttgacatgtatgggatctcggctcgacacattatcgtcgccgtcaagtgcatgctgctaaactag

SEQ ID NO: 59293 - DNA, 1674 bp, Artificial Sequence
  derived and/or modified sequence
atgtccgtgcttttcttctatatcatgagatataagcagtccgaccctgaaaaccctgacaacgatagatttgttctggccaaaaggctctcgttcgtggacgttgcaacaggctggctgggccagggactgggcgtggcatgcggcatggcttatacagggaagtactttgatcgagcttcataccgcgtgttttgcctaatgagcgacggtgagtcatccgaggggtcagtttgggaggccatggccttcgcttcttactatagcttggacaacctggtggctatctttgacgtgaatcggctgggccacagtggcgccttacctgccgagcactgtatcaatatctaccagcggagatgcgaggcttttggatggaacacctacgttgtagacgggagagacgtggaagctctttgtcaggtcttctggcaggctagccaggttaagcacaagcctaccgccgtggtggccaagactttcaagggtagaggaacaccttctatcgaggacgccgaaagttggcacgccaagcccatgccacgagaacgggctgacgccattatcaagctaattgaaagtcagatacagacctctcggaacctggacccacagccgcccatcgaggatagtcccgaagttaatatcacagacgtgagaatgacttcaccccctgactatagagttggcgataaaatagctactaggaaggcttgcggattggccctggccaagctgggctacgccaataatcgcgtggtcgtcttagatggagatactagatacagtaccttctcagagatctttaataaagagtaccctgagaggttcatcgagtgtttcatggccgagcaaaacatggtgagcgtagcacttgggtgcgcttcccggggtcgcaccatcgcattcgcgtctacctttgctgctttcctcacgcgcgcctttgaccatatccgcataggggggctggccgaatccaatattaacattataggaagccattgcggggttagtgtaggggacgacggcgcctcccagatggccctggaagacatcgccatgttcaggactattccgaaatgcaccattttctatcctaccgatgcagtatcaaccgaacacgccgtggccttagccgctaatgcaaaggggatgtgttttatacgaactacccgacctgaaactatggtcatctataccccgcaggagaggttcgagatcggtcaggctaagggtgtgtcaatgctccaggacagctggtcaagcgtaatttcctaccagaaagtgctcaggcactgtgtgtctgataaagtgactgtcatcggagcaggcattacagtctacgaagctttagctgcagccgacgaattgtctaaacaagacatctttatacgagttatcgatctgttcacaattaaacctctggacgtcgccaccatcgtgtcctccgccaaggccactgaggggcgtattatcaccgtggaggatcactacccccaaggggggatcggagaagcagtgtgcgcagctgtgtctatggacccagacatccaggtgcatagtctcgctgtctctggtgttccacaaagtggcaaaagcgaggagctgctagatatgtatggtatttccgcacggcacatcatagtggcggtgaagtgtatgctccttaattag

SEQ ID NO: 59294 - DNA, 1623 bp, Artificial Sequence
  derived and/or modified sequence
atgtccgttctgtttttttacattatgaggtataagcagtccgatccggaaaacccagacaatgatcgtttcgtcttggcgaagcgcctttccttcgttgatgtggcgaccggctggttagggcaggggctcggtgtcgcctgtggtatggcttatacgggtaagtattttgatagagctagctaccgagtgttctgtttaatgagcgacggcgagagctctgagggctccgtgtgggaggccatggccttcgccagttactactcactggacaacctcgttgcgatctttgacgtcaaccgtttagggcattctggcgcattgcctgcggagcactgcatcaatatctaccagcgcaggtgcgaggcattcggctggaacacatacgttgtggacggaagagatgttgaggctctgtgccaagtgttctggcaggcaagccaggtgaagcacaagcccacggccgttgtagcaaaaacgtttaaagggcgaggcacaccatcaatcgaggacgccgagagctggcatgctaagccgatgccacgggagcgggctgacgcgattatcaagctgattgagtcccaaatccaaactagtaggaatctagatccacaaccacctattgaggactctcccgaggttaatattacagatgtgaggatgacgtcgccacccgactacagggtgggggataaaattgcaactcgtaaggcttgtggccttgccctagctaagctggggtacgctaacaaccgcgtggttgtccttgacggtgatactcggtatagcaccttttctgaaatattcaataaggagtatccagagcgtttcatcgagtgtttcatggcggagcagaacatggtgtctgtagccttgggatgcgcatccagaggcaggaccatagccttcgcctctacctttgcagcctttttgacacgcgctttcgaccatattaggattggcggtctggctgagtccaacatcaacataatcgggagtcactgtggtgtttcagttggagatgacggcgcaagtcagatggccctagaagatattgcaatgtttaggactatccccaaatgcacgattttctacccgacagacgctgtgtcgactgaacatgcggttgccctggccgcaaatgctaaggggatgtgttttatccggaccacacggcctgaaacgatggtgatctatacaccccaagaaagatttgagattggccaggctaaggttcttaggcactgcgtctccgacaaagtaaccgtgataggagcgggaatcaccgtgtacgaggctttagccgctgcggatgagctgagcaagcaggatattttcatccgagtgatagatctgttcaccattaagcctctggatgtggccaccatcgtgagtagcgcaaaagccacagagggccgtattattaccgtggaagaccattaccctcagggaggaatcggggaggccgtgtgcgctgcagtctctatggacccagatattcaggtgcactcacttgcagtgagcggagtgccccagtccgggaaatccgaagagctgctcgacatgtatgggataagtgcccgacatattatcgtggccgttaagtgcatgctcctcaactag

SEQ ID NO: 59295 - DNA, 1011 bp, Artificial Sequence
  derived and/or modified sequence
atgtctgtgctcttcttctacatcatgagatacaagcagagcgaccctgaaaatccagacaatgacagatttgtgctggccaagatcgccaccaggaaggcctgtggcctggccctggccaagctgggctacgccaacaacagagtggtggtgctggatggagacacccgctacagcaccttcagcgagatcttcaacaaggagtacccagagcgcttcatcgagtgcttcatggccgagcagaacatggtgtctgtggccctgggctgtgccagccggggccgcaccatcgcctttgccagcacctttgctgccttcctgacccgggcctttgaccacatccgcatcggcggcctggccgagagcaacatcaacatcatcggcagccactgcggcgtgtctgtgggagatgatggagccagccagatggccctggaggacatcgccatgttccgcaccatccccaagtgcaccatcttctaccccacagatgctgtgtccacagagcacgctgtggccctggccgccaatgccaagggcatgtgcttcatccgcaccaccaggcctgagaccatggtgatctacaccccccaggagagatttgaaattggccaggccaaggtgctgcggcactgtgtgtctgacaaggtgaccgtcatcggggccggcatcaccgtgtatgaggccctggccgctgctgatgagctgagcaagcaggacatcttcatccgggtcatcgacctcttcaccatcaagcccctggatgtggccaccatcgtgagcagcgccaaggccacagagggccgcatcatcaccgtggaggaccactacccccagggcggcatcggggaggccgtgtgtgccgctgtgtccatggaccctgacatccaggtgcacagcctggccgtgtctggagtgccccagagcggcaagtctgaggagctgctggacatgtatggcatcagcgcccggcacatcatcgtggccgtgaagtgcatgctgctgaactag

SEQ ID NO: 59296 - DNA, 1674 bp, Artificial Sequence
  derived and/or modified sequence
atgtctgtgctcttcttctacatcatgagatacaagcagagcgaccctgaaaatccagacaatgacagatttgtgctggccaagaggctgagctttgtggatgtggccaccggctggctgggccagggcctgggcgtggcctgtggcatggcctacacaggcaagtactttgaccgggccagctacagagtcttctgcctgatgtctgatggagagagcagcgagggctctgtgtgggaggccatggcctttgccagctactacagcctggacaacctggtggccatctttgatgtgaaccggctgggccacagcggggccctgcctgctgagcactgcatcaacatctaccagaggcgctgtgaggccttcggctggaacacctacgtggtggatggaagagatgtggaggccctgtgccaggtgttctggcaggccagccaggtgaagcacaagcccacagctgtggtggccaagaccttcaagggccggggcacccccagcattgaagatgctgagagctggcacgccaagcccatgccccgggagcgggcagatgccatcatcaagctgattgagagccagatccagaccagcaggaacctggacccccagccccccatcgaggacagccctgaggtgaacatcacagatgtgaggatgaccagccccccagactacagagtgggggacaagatcgccaccaggaaggcctgtggcctggccctggccaagctgggctacgccaacaacagagtggtggtgctggatggagacacccgctacagcaccttcagcgagatcttcaacaaggagtacccagagcgcttcatcgagtgcttcatggccgagcagaacatggtgtctgtggccctgggctgtgccagccggggccgcaccatcgcctttgccagcacctttgctgccttcctgacccgggcctttgaccacatccgcatcggcggcctggccgagagcaacatcaacatcatcggcagccactgcggcgtgtctgtgggagatgatggagccagccagatggccctggaggacatcgccatgttccgcaccatccccaagtgcaccatcttctaccccacagatgctgtgtccacagagcacgctgtggccctggccgccaatgccaagggcatgtgcttcatccgcaccaccaggcctgagaccatggtgatctacaccccccaggagagatttgaaattggccaggccaagggcgtgtccatgctgcaggacagctggagcagcgtcatctcctaccagaaggtgctgcggcactgtgtgtctgacaaggtgacagtgattggagctggcatcaccgtgtatgaggccctggccgctgctgatgagctgagcaagcaggacatcttcatccgggtgattgacctcttcaccatcaagcccctggatgtggccaccatcgtgtcctctgccaaggccacagagggccgcatcatcaccgtggaggaccactacccccagggcggcattggagaggccgtgtgtgccgctgtgtccatggaccctgacatccaggtgcacagcctggccgtgtctggagtgccccagagcggcaagtctgaggagctgctggacatgtatggcatcagcgcccggcacatcatcgtggccgtgaagtgcatgctgctgaactag

SEQ ID NO: 59297 - DNA, 1623 bp, Artificial Sequence
  derived and/or modified sequence
atgtctgtgctcttcttctacatcatgagatacaagcagagcgaccctgaaaatccagacaatgacagatttgtgctggccaagaggctgagctttgtggatgtggccaccggctggctgggccagggcctgggcgtggcctgtggcatggcctacacaggcaagtactttgaccgggccagctacagagtcttctgcctgatgtctgatggagagagcagcgagggctctgtgtgggaggccatggcctttgccagctactacagcctggacaacctggtggccatctttgatgtgaaccggctgggccacagcggggccctgcctgctgagcactgcatcaacatctaccagaggcgctgtgaggccttcggctggaacacctacgtggtggatggaagagatgtggaggccctgtgccaggtgttctggcaggccagccaggtgaagcacaagcccacagctgtggtggccaagaccttcaagggccggggcacccccagcattgaagatgctgagagctggcacgccaagcccatgccccgggagcgggcagatgccatcatcaagctgattgagagccagatccagaccagcaggaacctggacccccagccccccatcgaggacagccctgaggtgaacatcacagatgtgaggatgaccagccccccagactacagagtgggggacaagatcgccaccaggaaggcctgtggcctggccctggccaagctgggctacgccaacaacagagtggtggtgctggatggagacacccgctacagcaccttcagcgagatcttcaacaaggagtacccagagcgcttcatcgagtgcttcatggccgagcagaacatggtgtctgtggccctgggctgtgccagccggggccgcaccatcgcctttgccagcacctttgctgccttcctgacccgggcctttgaccacatccgcatcggcggcctggccgagagcaacatcaacatcatcggcagccactgcggcgtgtctgtgggagatgatggagccagccagatggccctggaggacatcgccatgttccgcaccatccccaagtgcaccatcttctaccccacagatgctgtgtccacagagcacgctgtggccctggccgccaatgccaagggcatgtgcttcatccgcaccaccaggcctgagaccatggtgatctacaccccccaggagagatttgaaattggccaggccaaggtgctgcggcactgtgtgtctgacaaggtgaccgtcatcggggccggcatcaccgtgtatgaggccctggccgctgctgatgagctgagcaagcaggacatcttcatccgggtcatcgacctcttcaccatcaagcccctggatgtggccaccatcgtgagcagcgccaaggccacagagggccgcatcatcaccgtggaggaccactacccccagggcggcatcggggaggccgtgtgtgccgctgtgtccatggaccctgacatccaggtgcacagcctggccgtgtctggagtgccccagagcggcaagtctgaggagctgctggacatgtatggcatcagcgcccggcacatcatcgtggccgtgaagtgcatgctgctgaactag

SEQ ID NO: 59298 - DNA, 1011 bp, Artificial Sequence
  derived and/or modified sequence
atgagcgtgctgttcttctacatcatgcggtacaagcagagcgaccccgagaaccccgataatgatagatttgtgctggccaagattgccacacgcaaagcatgcgggttagctctggcaaagctgggttatgctaataaccgggtggtagttctggacggcgacacacggtacagcaccttctcagaaatattcaacaaagaatacccggagcggtttatcgagtgcttcatggccgaacaaaacatggttagcgttgctctaggctgtgcttctagaggacgaacaattgctttcgcttcaactttcgctgccttcctaacgagagcatttgaccatattcgcataggcggtttggccgagtcaaatatcaacatcattgggtcgcactgcggagttagtgttggagacgatggggccagtcaaatggctctcgaggacatcgcgatgtttagaaccattccaaaatgcacaatcttctatccaaccgatgccgtaagcaccgaacacgctgtcgccctcgcagcaaacgcgaaagggatgtgcttcattagaacaacaaggcccgagacgatggtgatatatacaccacaggagcgctttgagattgggcaggctaaggttctccgccattgtgtctccgacaaggtgacagtgattggggccggaatcaccgtgtacgaagctcttgcagccgcagacgagctttctaagcaggatatttttatacgagttattgatttgttcactattaagccattggacgttgcgacgatcgtgtcttccgcgaaagcgacagaaggccggattattacggtggaagaccactatccccagggagggattggagaagccgtgtgtgccgccgtatccatggatcctgacattcaggtgcacagtctagccgtttcaggtgttccacagagtggcaaatcagaggagctgctggacatgtatgggatctccgcccgtcatatcatagtcgcagtgaagtgtatgctacttaactag

SEQ ID NO: 59299 - DNA, 1674 bp, Artificial Sequence
  derived and/or modified sequence
atgagcgtgctgttcttctacatcatgcggtacaagcagagcgaccctgagaaccctgacaatgacaggttcgtcctcgccaaacgcctctcgtttgtcgacgttgccacagggtggctggggcagggcctcggggttgcgtgcggaatggcttacaccgggaaatatttcgaccgcgccagttaccgggtattttgcctaatgtctgatggcgaatcttcggaaggctccgtatgggaagccatggcgtttgcttcctattacagccttgataacctggtggctattttcgatgtgaatcggctcggacactcaggcgcacttcccgctgagcactgtatcaatatctatcagagacgttgcgaggcctttggttggaacacatatgtggtagatggtcgagatgtggaagccctttgtcaagtcttttggcaggccagccaagtcaaacacaagcccaccgctgtggtggcaaaaacattcaagggacgcggcacaccatccatcgaagacgcggagtcctggcacgccaagcctatgcctcgagagagggccgatgccatcataaagctgatcgagtctcagatccaaacttctcgcaacttggacccccaacctccaattgaggatagccctgaggtgaacattactgacgtacggatgacaagcccacccgattaccgagtaggggacaagatcgccacgcgtaaggcttgtggtctggccctggcaaaactcggttacgccaataaccgtgtggtagttctggatggggataccagatacagcaccttcagcgagatctttaataaggagtaccctgagaggtttattgagtgttttatggcagagcaaaatatggtctcagttgccctgggctgtgcttcccgaggacggaccattgcatttgcatcgacttttgctgccttccttacacgagcatttgaccacattcggattggcgggctggccgaaagcaatattaatatcatcggctctcactgtggggtctctgtgggcgatgacggagcgagccagatggccctggaggacattgccatgttccgcaccatccctaaatgtaccatcttttacccaacagacgccgttagtacagaacatgcagtcgccctggcagccaatgccaaggggatgtgctttatacggaccaccaggcctgaaacgatggtgatatacacacctcaggagcggttcgagatcgggcaggccaaaggagtgtcaatgctgcaggattcctggagttctgtgatctcttatcagaaggttctgcggcattgcgtctccgacaaggtgacagttatcggcgccggtattacagtttacgaagctctcgccgccgccgacgagctcagtaagcaggacatcttcatcagggtgattgatttgtttacgattaaaccattggacgtcgcgaccattgtcagctccgctaaagctacagagggaaggataataactgtggaagaccactatcctcagggcgggattggcgaagccgtgtgtgccgccgttagtatggatcccgacattcaggtgcatagcctcgcagtctcgggagtgccccagtctggtaaaagcgaggaactgttagatatgtacggaatttccgctcggcatatcatagttgctgtcaagtgcatgttactcaattag

SEQ ID NO: 59300 - DNA, 1623 bp, Artificial Sequence
  derived and/or modified sequence
atgagcgtgctgttcttctacatcatgcggtacaagcagagcgaccccgaaaatcccgataacgacagattcgttctagctaagagactgtccttcgttgacgtggcaacgggctggctcggacagggattaggcgtggcatgcggtatggcctacaccgggaagtattttgacagggcctcatatcgggttttctgcctgatgagtgatggagagagcagtgagggaagcgtttgggaggctatggcttttgcctcctattactctctagataatctagtggccatttttgacgtgaatcggttgggacacagtggcgcacttccggccgaacactgcattaacatttaccagagacggtgtgaagcgttcggatggaacacctatgtggtagatggaagggacgtagaggctctgtgccaagttttctggcaggcatcgcaagtgaagcacaagccaaccgcggtggttgcaaagacttttaagggaaggggcactccatcaattgaggacgcagagtcctggcacgccaagccaatgccacgggagcgagctgatgctatcataaagttaattgagtcacagatacagacttctcgtaacctggacccacaaccccccatcgaggactcaccagaagttaatataaccgatgttaggatgacatctccaccggattacagagtgggagacaagattgccacgcggaaggcttgcgggctggccctggcgaaattaggatatgcaaataaccgggtggttgtcttggatggggacacacgttatagcacttttagtgagatatttaacaaagaatatccggagagattcattgagtgcttcatggcggagcagaacatggttagcgtcgcgctcggttgcgcctcaaggggacgcaccatagcctttgcttccacctttgctgctttccttaccagagcgttcgatcatatccggattgggggtctggcggagagtaacataaacattatcgggtctcattgcggggtgtccgtcggggacgatggcgcttctcagatggcacttgaggacatcgccatgttcagaactatccctaaatgtaccatattctaccctactgacgcagtgtccactgaacacgcagtcgctttggcagccaatgctaaagggatgtgctttatacggaccacaagaccggaaaccatggttatctacacaccccaggagcgcttcgaaatcggtcaggctaaggtgctgaggcactgcgttagtgacaaagtgactgtcataggtgccggcatcacagtttatgaggctttggctgcggcagatgagctgagcaagcaggatatttttatacgggtgatcgatctgtttacaataaagccgctcgatgttgcaactattgtcagttcagccaaggcaaccgagggccgcataattacagtggaggatcactatccacaaggcggcattggagaggctgtgtgtgcagcagtttccatggaccccgacatccaggtgcattctttggccgttagcggagtccctcaatcaggcaagagcgaggagttgctagatatgtacgggatttccgcccggcacattatagttgcggttaagtgcatgctcttaaattag

SEQ ID NO: 59301 - DNA, 1011 bp, Artificial Sequence
  derived and/or modified sequence
atgtctgtgctatttttttatatcatgcgatataagcagagtgaccctgaaaaccctgacaatgatcggttcgtgctcgctaaaatcgccactagaaaggcatgtgggctagccttggccaagctcggctatgcaaacaatcgggtcgtggtcctggatggcgacactcgctacagcactttcagcgagatcttcaacaaagaataccctgaaagatttattgagtgttttatggccgagcagaacatggtgtcagtggccttaggctgcgcgtctagaggaagaactattgccttcgcgtctacatttgcggctttcctaacccgagcgttcgaccacattcggatcggcggattggcggagtcaaatatcaacatcattggctcccactgtggggtctctgtaggagatgatggagcttcccagatggccctggaggatatcgccatgtttaggaccatccctaagtgcaccattttttatcctacagatgctgtcagtaccgagcatgccgtagcccttgccgctaatgccaagggcatgtgcttcatcaggaccacacgtcccgaaacgatggtgatttacacaccacaggagaggtttgagattggacaagcaaaagtgctgaggcattgtgtctccgataaagtaaccgtgattggcgcaggcatcaccgtttacgaggcactcgctgctgccgatgaactgagtaagcaggatatttttatcagagttatagatctatttaccatcaaaccattggacgtcgctacaattgtgagcagcgcaaaagcaaccgaaggtcggattataaccgtggaggaccactacccacagggcggaatcggggaagcagtctgtgcagcagtgagcatggacccagacattcaggtccactccctggccgttagtggggtcccgcaatccggcaaatcagaggagctgttagacatgtacggcatatccgccagacatattattgtagctgtaaagtgcatgctgctaaattag

SEQ ID NO: 59302 - DNA, 1674 bp, Artificial Sequence
  derived and/or modified sequence
atgtccgttttatttttttatataatgcggtacaagcagtctgaccctgagaatcccgacaacgacaggttcgtgctggcaaaaaggttatccttcgtagacgtggccacaggctggctggggcaaggcctgggcgtagcttgtggcatggcatatacgggcaagtattttgatcgagcctcgtatagagtgttctgcctgatgtccgacggtgaaagcagcgaaggctccgtatgggaagccatggctttcgccagctactattcattggacaacctggtcgcaatctttgacgttaatcgcctaggccattctggcgctctgccagccgagcattgtatcaacatttaccagcggagatgtgaagccttcggctggaatacatacgtggttgatggtagggatgttgaagctttgtgccaggtgttttggcaggcttcacaggtaaaacataagccgacagccgtcgtggctaagaccttcaagggtaggggcacaccctctatcgaagatgctgagtcatggcacgctaaaccgatgccacgggagcgggctgatgcaatcatcaagctcattgagagccaaattcagaccagcagaaatctggatcctcaaccacccattgaagacagccccgaggtcaacatcactgatgtgaggatgacttctccacctgactacagggtcggcgataaaatcgcaacccggaaagcatgtgggttggctctggctaagttgggatacgccaataaccgggtggttgtgctcgatggggatacccgctactctaccttctctgaaatcttcaataaagaatatccggagaggttcatcgagtgctttatggccgagcagaacatggtgtccgtagcactggggtgtgcttccagaggaagaactattgcctttgcatcaactttcgctgcctttctgacaagggcattcgaccacattagaattggaggacttgcggaaagcaatatcaatataattggtagccactgtggcgtaagcgtcggggacgacggtgccagccaaatggctctggaggatatcgccatgtttcgcacaattccaaaatgcactatcttttatcctacagatgccgtgagcaccgagcacgctgtcgccctggcagcaaatgcaaagggaatgtgcttcattaggactacaaggccagaaactatggtcatctacaccccccaggagagatttgaaattggacaggctaaaggggtcagcatgttacaggactcctggagctctgttataagttatcagaaagtattgcgacattgcgtgagcgacaaagtcactgttattggggctggtatcactgtatatgaagctctagccgctgcagacgaacttagcaagcaggacattttcatcagggttatcgatctgttcacaatcaaacctttggatgttgccaccatcgtgtcttcagcgaaagccaccgaaggccgtatcatcacggtggaggatcactacccacaggggggtattggcgaagctgtctgcgccgctgtttcgatggatccggacattcaggtccactcactcgctgtaagcggtgtgccccagtccggcaagtcggaggagctgctggatatgtatggcatctccgctcggcacattattgttgcggtcaaatgcatgctcctgaattag

SEQ ID NO: 59303 - DNA, 1623 bp, Artificial Sequence
  derived and/or modified sequence
atgtccgtacttttcttttacatcatgcgctataagcagtctgatccagagaatccggataatgatagattcgtgctggccaaacggctgtcttttgtggatgtagccaccggatggctgggacagggactcggggtggcatgtggtatggcctacacaggtaaatactttgaccgtgctagttatcgtgtattttgtttaatgtccgacggagagtcatcagaagggtccgtctgggaggctatggcattcgcatcatattatagccttgataacctggttgctatttttgatgtgaacaggcttggtcattcaggcgctcttcccgcagagcactgcatcaacatctatcaacggagatgcgaggcctttgggtggaacacatacgtcgtggatggtcgggacgtggaggcactttgtcaagttttttggcaggcttcccaggttaagcataaacccactgccgttgtcgccaaaacttttaagggccgaggaacacctagtatcgaagacgccgagtcgtggcatgccaagcccatgcccagggaacgagctgacgctattataaaactcattgagtctcagatccaaaccagtaggaacctcgacccacaacccccaattgaggattcccctgaggtcaacattacagatgtgagaatgacatcccccccagactatagggtgggcgacaagattgcaacacgcaaggcttgtggcctcgctttggccaaattgggttacgctaataaccgcgtggtcgttctggatggcgacacccggtactctaccttttctgaaatctttaacaaagaatatcctgaaaggttcatcgaatgctttatggccgagcagaatatggtgtcggtggcattggggtgcgcgtccagggggaggactattgcgttcgcatccaccttcgccgctttcttgactagggccttcgaccatatccgcattggcggactcgccgagtcaaacatcaacatcatcggatcccattgtggcgtgagcgtaggggacgacggagcctctcaaatggccctggaggacatcgccatgttcagaactattcctaaatgcactatcttctaccccaccgatgctgtctccaccgagcatgctgtggcgctggcagcaaacgctaaaggcatgtgcttcattcgaactacccgccctgaaacaatggtcatctacacgccgcaagaacgtttcgagataggccaggcaaaggtcctgaggcattgtgtgagtgacaaagtaactgtgatcggggctgggataaccgtttacgaggcccttgccgctgctgatgaactgtcaaagcaagacattttcatcagggtgatcgacctgtttactataaagcctcttgacgtggcaacaattgtgtcttcagccaaggctaccgagggacgcatcatcactgtcgaagaccattacccccagggcggtataggcgaagccgtgtgtgctgcagtttctatggatccagacattcaggttcacagcttagctgtaagtggggttccgcagagtgggaaatctgaggagcttctggacatgtacgggattagcgcaagacatatcattgttgcagtgaaatgcatgctgcttaattag

SEQ ID NO: 59304 - DNA, 1278 bp, Artificial Sequence
  derived and/or modified sequence
ttcgctcttcagacgccggagacgtaggagtgggtcttcagactccaaaggggttggactaatggcggatgctgaggcgagggctgagttcccggaggaggccagacctgacaggggcaccttgcaggtgttgcaagatatggccagccgcttgcgaatccattccatcagggccacatgctccacgagctccggccaccctacatcatgtagcagttcttctgagatcatgtctgtgctgttcttctacatcatgaggtacaagcagtcagatccagagaatccggacaacgaccgatttgtcctcgcaaagatagctactcggaaagcatgcggtctggctctggctaagctgggctacgcgaacaacagagtcgttgtgctggatggtgacaccaggtactctactttctctgagatattcaacaaggagtaccctgagcgcttcatcgagtgctttatggctgaacaaaacatggtgagcgtggctctgggctgtgcctcccgtggacggaccattgcttttgctagcacctttgctgcctttctgactcgagcatttgatcacatccggataggaggcctcgctgagagcaacatcaacattattggttcccactgtggggtatctgttggtgacgatggtgcttcccagatggccctggaggatatagccatgttccgaaccattcccaagtgcacgatcttctacccaactgatgccgtctccacggagcatgctgttgctctggcagccaatgccaaggggatgtgcttcattcggaccacccgaccagaaactatggttatttacaccccacaagaacgctttgagatcggacaggccaaggtcctccgccactgtgtcagtgacaaggtcacagttattggagctggaattactgtgtatgaagccttagcagctgctgatgagctttcgaaacaagatatttttatccgtgtcatcgacctgtttaccattaaacctctggatgtcgccaccatcgtctccagtgcaaaagccacagagggccggatcattacagtggaggatcactacccgcaaggtggcatcggggaagctgtctgcgcagccgtctccatggatcctgacattcaggttcattcgctggcagtgtcgggagtgccccagagtgggaagtccgaggaattgctggatatgtatggaattagtgccagacatatcatagtggccgtgaaatgcatgttgctgaactaaaatagctgttagctttggtcttttggcctctttaccct

SEQ ID NO: 59305 - DNA, 1011 bp, Artificial Sequence
  derived and/or modified sequence
atgagcgtgctgttcttctacatcatgagatacaagcagagcgaccccgagaaccccgacaacgacagattcgtgctggccaagatcgccaccagaaaggcctgcggcctggccctggccaagctgggctacgccaacaacagagtggtggtgctggacggcgacaccagatacagcaccttcagcgagatcttcaacaaggagtaccccgagagattcatcgagtgcttcatggccgagcagaacatggtgagcgtggccctgggctgcgccagcagaggcagaaccatcgccttcgccagcaccttcgccgccttcctgaccagagccttcgaccacatcagaatcggcggcctggccgagagcaacatcaacatcatcggcagccactgcggcgtgagcgtgggcgacgacggcgccagccagatggccctggaggacatcgccatgttcagaaccatccccaagtgcaccatcttctaccccaccgacgccgtgagcaccgagcacgccgtggccctggccgccaacgccaagggcatgtgcttcatcagaaccaccagacccgagaccatggtgatctacaccccccaggagagattcgagatcggccaggccaaggtgctgagacactgcgtgagcgacaaggtgaccgtgatcggcgccggcatcaccgtgtacgaggccctggccgccgccgacgagctgagcaagcaggacatcttcatcagagtgatcgacctgttcaccatcaagcccctggacgtggccaccatcgtgagcagcgccaaggccaccgagggcagaatcatcaccgtggaggaccactacccccagggcggcatcggcgaggccgtgtgcgccgccgtgagcatggaccccgacatccaggtgcacagcctggccgtgagcggcgtgccccagagcggcaagagcgaggagctgctggacatgtacggcatcagcgccagacacatcatcgtggccgtgaagtgcatgctgctgaactag

SEQ ID NO: 59306 - protein, 663 aa, Artificial Sequence
  derived and/or modified sequence
MDTSSKENIQLFCKTSVQPVGRPSFKTEYPSSEEKQPCCGELKVFLCALSFVYFAKALAEGYLKSTITQIERRFDIPSSLVGVIDGSFEIGNLLVITFVSYFGAKLHRPKIIGAGCVIMGVGTLLIAMPQFFMEQYKYERYSPSSNSTLSISPCLLESSSQLPVSVMEKSKSKISNGCVQTVAIIGPIFGFLLGSLCAKLYVDIGFVNLDHITITPKDPQWVGAWWLGYLIAGIISLLAAVPFWYLPKSLPRSQSREDSNSSSEKSKFIIDDHTDYQTPQGENAKIMEMARDFLPSLKNLFGNPVYFLYLCTSTVQFNSLFGMVTYKPKYIEQQYGQSSSRANFVIGLINIPAVALGIFSGGIVMKKFRISVCGAAKLYLGSSVFGYLLFLSLFALGCENSDVAGLTVSYQGTKPVSYHERALFSDCNSRCKCSETKWEPMCGENGITYVSACLAGCQTSNRSGKNIIFYNCTCVGIAASKSGNSSGIVGRCQKDNGCPQMFLYFLVISVITSYTLSLGGIPGYILLLRCIKPQLKSFALGIYTLAIRVLAGIPAPVYFGVLIDTSCLKWGFKRCGSRGSCRLYDSNVFRHIYLGLTVILGTVSILLSIAVLFILKKNYVSKHRSFITKRERTMVSTRFQKENYTTSDHLLQPNYWPGKETQL

SEQ ID NO: 59307 - DNA, 1992 bp, Artificial Sequence
  derived and/or modified sequence
atggacaccagcagcaaggagaacatccagctgttctgcaagaccagcgtgcagcccgtgggcagacccagcttcaagaccgagtaccccagcagcgaggagaagcagccctgctgcggcgagctgaaggtgttcctgtgcgccctgagcttcgtgtacttcgccaaggccctggccgagggctacctgaagagcaccatcacccagatcgagagaagattcgacatccccagcagcctggtgggcgtgatcgacggcagcttcgagatcggcaacctgctggtgatcaccttcgtgagctacttcggcgccaagctgcacagacccaagatcatcggcgccggctgcgtgatcatgggcgtgggcaccctgctgatcgccatgccccagttcttcatggagcagtacaagtacgagagatacagccccagcagcaacagcaccctgagcatcagcccctgcctgctggagagcagcagccagctgcccgtgagcgtgatggagaagagcaagagcaagatcagcaacggctgcgtgcagaccgtggccatcatcggccccatcttcggcttcctgctgggcagcctgtgcgccaagctgtacgtggacatcggcttcgtgaacctggaccacatcaccatcacccccaaggacccccagtgggtgggcgcctggtggctgggctacctgatcgccggcatcatcagcctgctggccgccgtgcccttctggtacctgcccaagagcctgcccagaagccagagcagagaggacagcaacagcagcagcgagaagagcaagttcatcatcgacgaccacaccgactaccagaccccccagggcgagaacgccaagatcatggagatggccagagacttcctgcccagcctgaagaacctgttcggcaaccccgtgtacttcctgtacctgtgcaccagcaccgtgcagttcaacagcctgttcggcatggtgacctacaagcccaagtacatcgagcagcagtacggccagagcagcagcagagccaacttcgtgatcggcctgatcaacatccccgccgtggccctgggcatcttcagcggcggcatcgtgatgaagaagttcagaatcagcgtgtgcggcgccgccaagctgtacctgggcagcagcgtgttcggctacctgctgttcctgagcctgttcgccctgggctgcgagaacagcgacgtggccggcctgaccgtgagctaccagggcaccaagcccgtgagctaccacgagagagccctgttcagcgactgcaacagcagatgcaagtgcagcgagaccaagtgggagcccatgtgcggcgagaacggcatcacctacgtgagcgcctgcctggccggctgccagaccagcaacagaagcggcaagaacatcatcttctacaactgcacctgcgtgggcatcgccgccagcaagagcggcaacagcagcggcatcgtgggcagatgccagaaggacaacggctgcccccagatgttcctgtacttcctggtgatcagcgtgatcaccagctacaccctgagcctgggcggcatccccggctacatcctgctgctgagatgcatcaagccccagctgaagagcttcgccctgggcatctacaccctggccatcagagtgctggccggcatccccgcccccgtgtacttcggcgtgctgatcgacaccagctgcctgaagtggggcttcaagagatgcggcagcagaggcagctgcagactgtacgacagcaacgtgttcagacacatctacctgggcctgaccgtgatcctgggcaccgtgagcatcctgctgagcatcgccgtgctgttcatcctgaagaagaactacgtgagcaagcacagaagcttcatcaccaagagagagagaaccatggtgagcaccagattccagaaggagaactacaccaccagcgaccacctgctgcagcccaactactggcccggcaaggagacccagctgtag

SEQ ID NO: 59308 - DNA, 1992 bp, Artificial Sequence
  derived and/or modified sequence
atggatacttctagtaaggaaaacattcagctcttttgtaaaacatccgtccagccagtgggacgtccctcatttaaaaccgagtaccctagtagtgaggagaagcagccctgttgtggagaactaaaggtttttttatgcgcattgagcttcgtctacttcgccaaggcactagccgaaggctatctaaagtcgactatcacacagattgaacgacgctttgacatcccatctagtctggtgggcgttatcgacggcagcttcgaaatcgggaacctccttgtgataactttcgtaagctatttcggagccaaattgcatagacccaaaattataggagccggatgtgtcatcatgggtgtcggtacgttgctcatcgccatgcctcaattcttcatggagcagtataagtatgagagatatagcccttcctccaattcgacactgagcatctctccctgtctgctggagagtagcagccagctacccgtgtccgtgatggaaaaatccaaatccaagattagcaacggatgcgtgcagaccgtcgcaattatcgggcccattttcggctttctgttgggatccctgtgtgccaaattgtatgtggatattggatttgtgaatctggaccatattaccataactccaaaggatccgcaatgggtgggggcctggtggctgggttacctcatcgctggcatcatcagccttcttgccgctgttccattttggtatctgcccaagagcctgcctcgctcgcagtctcgagaggactcgaactctagctctgagaagtcgaagttcataattgatgaccacaccgattatcaaacaccccagggtgaaaacgcaaagataatggagatggctcgcgacttcttgcccagcctgaaaaacctgtttggcaacccggtctatttcctgtacctctgcacatcaactgttcagttcaacagtctgtttggcatggtgacatacaagcccaaatatatagaacagcagtacggacagagtagcagtcgggcgaattttgtcattgggcttatcaacattccagcggtcgccctcggtatcttttccggggggattgttatgaagaagtttcgtatcagtgtgtgtggagcagctaagctgtacctgggcagtagcgtgtttggatatctcctgtttcttagcctgttcgccttagggtgcgagaatagtgacgtagccggcttaacggtgtcttaccaggggaccaagcccgtctcatatcacgagcgcgccctgtttagcgactgcaacagcaggtgtaagtgcagcgaaacgaaatgggagccaatgtgcggagagaacggaatcacttatgtaagtgcctgtctcgctggctgtcagacttcaaaccgttccggtaagaatatcatattttacaactgcacatgtgtgggtatagccgcgtctaagtcaggcaatagtagcggtatcgttggaaggtgtcagaaagataacggatgcccacagatgttcctctacttcttggtgatcagcgtcatcaccagctatacactgagtcttggggggatcccaggctatatcctcctgctcaggtgcatcaagccacaactgaaatccttcgctctgggaatctacaccctcgcaatccgcgtgctcgcaggaataccggcccctgtgtactttggagtattaatcgatacttcttgcctcaagtggggcttcaaacgctgcggctcccgtgggtcttgccggctctatgactctaacgttttcaggcacatttacctcggcctgactgtcatcctaggaacggtaagtattcttctgtcaatcgcagtgttatttatcttgaaaaagaactacgtcagtaaacaccgttcgtttatcaccaagcgagagaggaccatggtgtctactcggtttcagaaagagaattataccacgagtgatcatctgctgcagccaaactattggcccggcaaagagacccaactctag

SEQ ID NO: 59309 - DNA, 1992 bp, Artificial Sequence
  derived and/or modified sequence
atggacaccagcagcaaagaaaacatccagctgttctgcaagacctctgtgcagcctgtgggccggcccagcttcaagacagagtaccccagcagcgaggagaagcagccctgctgcggggagctgaaggtgttcctgtgtgccctgagctttgtgtactttgccaaggccctggccgagggctacctgaagagcaccatcacccagatcgagaggagatttgacatccccagcagcctggtgggcgtgattgatggcagctttgagatcggcaacctgctggtgatcacctttgtgtcctactttggagccaagctgcaccggcccaagatcatcggggccggctgcgtcatcatgggcgtgggcaccctgctgattgccatgccccagttcttcatggagcagtacaagtatgaaagatacagccccagcagcaacagcaccctgagcatcagcccctgcctgctggagagcagcagccagctgcctgtgtctgtgatggagaagagcaagagcaagatcagcaatggctgtgtgcagacagtggccatcatcggccccatcttcggcttcctgctgggcagcctgtgtgccaagctgtatgtggacatcggctttgtgaacctggaccacatcaccatcacccccaaggacccccagtgggtgggcgcctggtggctgggctacctgattgctggcatcatcagcctgctggccgctgtgcccttctggtacctgcccaagagcctgcccaggagccagagccgggaggacagcaacagcagcagcgagaagagcaagttcatcattgatgaccacacagactaccagaccccccagggagaaaatgccaagatcatggagatggcccgggacttcctgcccagcctgaagaacctgtttggaaatcctgtgtacttcctgtacctgtgcaccagcacagtgcagttcaacagcctgtttggcatggtgacctacaagcccaagtacatcgagcagcagtatggccagagcagcagccgggccaacttcgtcatcggcctcatcaacatcccagctgtggccctgggcatcttcagcggcggcatcgtgatgaagaagttccgcatctctgtgtgtggggccgccaagctgtacctgggcagctctgtgtttggctacctgctcttcctgagcctgtttgccctgggctgtgaaaattctgatgtggccggcctgactgtgtcctaccagggcaccaagcctgtgtcctaccacgagcgggccctcttcagtgactgcaacagccgctgcaagtgcagcgagaccaagtgggagcccatgtgtggggagaatggcatcacctacgtgtctgcctgcctggccggctgccagaccagcaacagaagtggcaagaacatcatcttctacaactgcacctgtgtgggcattgctgccagcaagagcggcaacagcagcggcatcgtgggccgctgccagaaggacaatggctgcccccagatgttcctgtacttcctggtgatcagcgtcatcaccagctacaccctgagcctgggcggcatccctggctacatcctgctgctgcgctgcatcaagccccagctgaagagctttgccctgggcatctacaccctggccatccgggtgctggccggcatcccagcccctgtgtactttggagtgctgattgacaccagctgcctgaagtggggcttcaagagatgtggcagccggggcagctgccgcctgtatgacagcaatgtgttccgccacatctacctgggcctgaccgtcatcctgggcaccgtgtccatcctgctgagcattgctgtgctcttcatcctgaagaagaactacgtgtccaagcaccgctccttcatcaccaagcgggagaggaccatggtgtccacccgcttccagaaggagaactacaccaccagtgaccacctgctgcagcccaactactggccaggcaaggagacccagctgtag

SEQ ID NO: 59310 - DNA, 1992 bp, Artificial Sequence
  derived and/or modified sequence
atggacaccagcagcaaggagaacatccagctgttctgcaagaccagcgttcagccggtagggaggccttcatttaaaaccgagtacccctcttcagaggaaaaacagccttgctgtggcgagctgaaggtgtttctttgtgctctgtctttcgtttacttcgctaaagctttggccgaagggtatttgaagtctaccattacgcagatcgagcgccggtttgatattccaagctcccttgtgggtgttattgacggatctttcgagattggaaatctactggtaatcacattcgtgtcgtatttcggtgctaaactacaccggccgaaaattattggcgcggggtgcgtgattatgggggtcggtactctcctgatcgctatgccccagttctttatggagcaatataagtacgagagatactcgccgtccagtaacagcacactctcaattagtccgtgcctgctggaaagttcttctcagctccccgtgagcgtgatggaaaagagcaagagcaaaattagcaacgggtgtgttcagactgtggccatcatcgggcccatattcggctttctactcggttccctgtgcgctaaactgtacgtggacatcggcttcgttaacctggaccacatcacaattactccaaaggaccctcagtgggtgggcgcttggtggctcggatacttgatagccggtattattagcctgttggcagccgtgcctttctggtatctgcccaaaagcctgcctaggtcccagtcccgcgaggacagtaatagttctagcgaaaagtctaagttcatcattgatgatcacaccgactatcaaacgccacagggggagaatgccaagatcatggagatggctcgggacttcttaccaagccttaagaacctcttcggcaaccccgtctactttctctatctgtgcacttctaccgtccaatttaatagcctgttcggcatggtcacctataagccaaagtatatcgagcagcagtacggtcagagctcgagtagggcgaatttcgtcattgggctgatcaatatacctgcggtcgcacttggaattttttcaggaggaattgtcatgaaaaagtttaggatcagtgtatgcggagccgccaaactgtacctgggatcaagcgtgtttggatatttgctgtttctttccctgttcgcacttggatgtgagaatagtgacgtcgcaggtctgactgtatcttaccaggggacaaaaccagttagctaccacgagagagcgctgttctctgattgcaactcccgttgtaagtgttccgaaactaaatgggagcctatgtgcggcgaaaacggaattacatatgtgagcgcttgcttggccggttgtcaaacctcaaacagaagcggaaagaatattattttctataattgcacctgcgtaggcatagcggccagcaagagcgggaacagttcaggcattgtgggtcgctgccagaaagataacgggtgtcctcagatgtttctgtattttctggtaatttccgtcatcactagctatacgctgtccctggggggcatccctgggtatatcttattgttgcgttgtattaagccgcagctcaaatcatttgccttgggtatctatacactggctataagggtgctggcaggcatccccgctcctgtgtacttcggtgtgcttatcgacactagctgtctcaagtgggggttcaaaagatgcggctctcgtggaagctgccgcctctacgattcaaacgtgttcagacatatctatctcggcctcacagtaattttaggaacagtaagtatcctgttgtcaattgccgtcctttttatcctcaagaagaattatgtttctaagcacagatcctttatcactaagcgcgagcggactatggtgtcgaccaggtttcagaaggaaaattataccacatcggatcatctgttgcagccgaactactggcctgggaaagaaacccagctctag

SEQ ID NO: 59311 - DNA, 1992 bp, Artificial Sequence
  derived and/or modified sequence
atggacaccagtagcaaggaaaacattcagttgttctgcaagacatctgtccagccagtgggcagaccgtcttttaagacagagtaccctagttccgaagaaaagcagccatgctgtggcgagcttaaggtttttttatgtgcactctcatttgtctacttcgctaaggctctggccgagggatatttaaagagtaccatcactcaaattgagcgcagatttgatattcccagttcactcgtaggtgtcattgatggaagcttcgagatcgggaacctgttggtaattacgtttgtgagctactttggggcaaagctacacaggcccaaaatcattggggcaggctgtgttattatgggtgtcgggactttactgatagcaatgcctcagttctttatggaacagtataagtatgagagatactctcccagttccaacagcaccctttctatatcgccctgcctactggaatcatcctcacagctgcccgtcagcgtaatggaaaagtcgaaaagtaaaatcagcaatggctgtgtccagacggtggccatcatcggcccaatatttgggttcctgcttggatccctttgtgctaaactgtacgtggacattggtttcgtgaatctcgaccatataactatcacccctaaggacccacaatgggtaggcgcttggtggctgggatacctgatagccggaatcatcagtctcctagccgctgtgcctttttggtacttgccaaaaagcctgccacgatctcagtcacgcgaggacagcaatagttcaagcgaaaaatccaagtttatcatcgatgaccacacggactatcaaaccccacagggagagaatgctaagattatggaaatggcccgtgacttcctgccatcactcaagaatctgttcggaaatccagtctatttcctgtatttgtgtacttccaccgtgcaattcaactctctattcgggatggtcacctacaaacctaaatacattgagcagcagtacggtcagagttctagcagggcgaacttcgttatagggctcatcaacataccagccgtggctctagggatcttcagcggaggcatcgtgatgaagaagttcagaatatcagtatgcggcgctgctaaactatacctggggtcttcagtcttcggctacctgctgtttctgtccctctttgccttaggatgcgaaaattctgacgtggctggattgacagtctcctatcaggggactaaacctgtttcatatcacgagagggctctctttagcgactgcaacagcaggtgtaagtgctcagaaacaaagtgggagccaatgtgcggagagaacggaattacgtatgtgtctgcttgcctagcgggatgtcagacctcgaacaggtcaggtaagaacatcattttctacaactgtacatgcgtgggcattgcggcttcaaagagcggtaactctagtggtatcgtgggccgatgccagaaagacaatggatgtccccagatgttcctgtattttctggtcatatcggtaatcacctcctatacactgagcctgggcggaattcctggctacatcctcctgctgagatgcataaaaccccaattgaaaagcttcgctctgggcatttacaccctggcaattcgggtcctagcgggtattcctgccccagtctactttggggttcttattgatacctcttgtctgaagtggggattcaaacgatgcgggtctcgcggaagctgtcgactatatgacagcaacgtctttagacacatctacctggggctgacggtcatcctgggcacagtgagcatcctgctctccatcgccgtgctgtttattctcaaaaaaaattacgtgagcaaacaccggtccttcattaccaagagggagaggaccatggtgagtacacggttccagaaagaaaactacactacatccgaccacttgctgcagcccaattactggccaggaaaagagacacaactctag

SEQ ID NO: 59312 - DNA, 2529 bp, Artificial Sequence
  derived and/or modified sequence
attgcaaagaaatggctcaaaagcttcagctctttctgtgccctgggagctgagatgcacgtcagtggccttgccagcgtggccaattctctgctgactgccagaaaaaagaggccaggaagaaagaggaaagagaagagatcgctcagggtctgtggtgtgtggtccatcctcttgctgagcacattgaaaggaactggctatctttgatctcttcctccagatcagagtcaaggaatgtgtttataatggacacttcatccaaagaaaatatccagttgttctgcaaaacttcagtgcaacctgttggaaggccttcttttaaaacagaatatccctcctcagaagaaaagcaaccatgctgtggtgaactaaaggtgttcttgtgtgccttgtcttttgtttactttgccaaagcattggcagaaggctatctgaagagcaccatcactcagatagagagaaggtttgatatcccttcttcactggtgggagttattgatggtagttttgaaattgggaatctcttagttataacatttgttagctactttggagccaaacttcacaggccaaaaataattggagcagggtgtgtaatcatgggagttggaacactgctcattgcaatgcctcagttcttcatggagcagtacaaatatgagagatattctccttcctccaattccactctcagcatctctccgtgtctcctagagtcaagcagtcaattaccagtttcagttatggaaaaatcaaaatccaaaataagtaacgggtgtgtgcagacggttgcaattataggaccaatctttggtttcctgttaggctcattatgtgccaaactatatgttgacattggctttgtaaacctagatcacataaccattaccccaaaagatccccagtgggtaggagcctggtggcttggctatctaatagcaggaatcataagtcttcttgcagctgtgcctttctggtatttaccaaagagtttaccaagatcccaaagtagagaggattctaattcttcctctgagaaatccaagtttattatagatgatcacacagactaccaaacaccccagggagaaaatgcaaaaataatggaaatggcaagagattttcttccatcactgaagaatctttttggaaacccagtatacttcctatatttatgtacaagcactgttcagttcaattctctgttcggcatggtgacgtacaaaccaaagtacattgagcagcagtatggacagtcatcctccagggccaactttgtgatcgggctcatcaacattccagcagtggcccttggaatattctctggggggatagttatgaaaaaattcagaatcagtgtgtgtggagctgcaaaactctacttgggatcatctgtctttggttacctcctatttctttccctgtttgcactgggctgtgaaaattctgatgtggcaggactaactgtctcctaccaaggaaccaaacctgtctcttatcatgaacgagctctcttttcagattgcaactcaagatgcaaatgttcagagacaaaatgggaacccatgtgcggtgaaaatggaatcacatatgtatcagcttgtcttgctggttgtcaaacctccaacaggagtggaaaaaatattatattttacaactgcacttgtgtgggaattgcagcttctaaatccggaaattcctcaggcatagtgggaagatgtcagaaagacaatggatgtccccaaatgtttctgtatttccttgtaatttcagtcatcacatcctatactttatccctaggtggcatacctggatacatattacttctgaggtgcattaagccacagcttaagtcttttgccttgggtatctacacattagcaataagagttcttgcaggaatcccagctccagtgtattttggagttttgattgatacttcatgcctcaaatggggatttaaaagatgtggaagtagaggatcatgcagattatatgattcaaatgtcttcagacatatatatctgggactaactgtgatactgggcacagtgtcaattctcctaagcattgcagtacttttcattttaaagaaaaattatgtttcaaaacacagaagttttataaccaagagagaaagaacaatggtgtctacaagattccaaaaggaaaattacactacaagtgatcatctgctacaacccaactactggccaggcaaggaaactcaactttagaaacatgatgactggaagtcatgtcttctaattggttgacattttgcaaacaaataaattgtaatcaaaagagctctaaatttgtaatttctttctcctttcaaaaaatgtctactttgttttggtcctaggcattaggtaatataactgataatatactgaaacatataatggaagatgcagatgataaaactaattttgaactttttaatttatataaattattttatatcacttacttatttcactttattttgctttgtgctcattgatatatattagctgtact

SEQ ID NO: 59313 - protein, 730 aa, Artificial Sequence
  derived and/or modified sequence
MDTSSKENIQLFCKTSVQPVGRPSFKTEYPSSEEKQPCCGELKVFLCALSFVYFAKALAEGYLKSTITQIERRFDIPSSLVGVIDGSFEIGNLLVITFVSYFGAKLHRPKIIGAGCVIMGVGTLLIAMPQFFMEQYKYERYSPSSNSTLSISPCLLESSSQLPVSVMEKSKSKISNECEVDTSSSMWIYVFLGNLLRGIGETPIQPLGIAYLDDFASEDNAAFYIGCVQTVAIIGPIFGFLLGSLCAKLYVDIGFVNLDHITITPKDPQWVGAWWLGYLIAGIISLLAAVPFWYLPKSLPRSQSREDSNSSSEKSKFIIDDHTDYQTPQGENAKIMEMARDFLPSLKNLFGNPVYFLYLCTSTVQFNSLFGMVTYKPKYIEQQYGQSSSRANFVIGLINIPAVALGIFSGGIVMKKFRISVCGAAKLYLGSSVFGYLLFLSLFALGCENSDVAGLTVSYQGTKPVSYHERALFSDCNSRCKCSETKWEPMCGENGITYVSACLAGCQTSNRSGKNIIFYNCTCVGIAASKSGNSSGIVGRCQKDNGCPQMFLYFLVISVITSYTLSLGGIPGYILLLRCIKPQLKSFALGIYTLAIRVLAGIPAPVYFGVLIDTSCLKWGFKRCGSRGSCRLYDSNVFRYQIKSIPASHCYSIPDLHNATDTNKFSCHFTACKTYISGTNCDTGHSVNSPKHCSTFHFKEKLCFKTQKFYNQERKNNGVYKIPKGKLHYK

SEQ ID NO: 59314 - protein, 612 aa, Artificial Sequence
  derived and/or modified sequence
MGVGTLLIAMPQFFMEQYKYERYSPSSNSTLSISPCLLESSSQLPVSVMEKSKSKISNECEVDTSSSMWIYVFLGNLLRGIGETPIQPLGIAYLDDFASEDNAAFYIGCVQTVAIIGPIFGFLLGSLCAKLYVDIGFVNLDHITITPKDPQWVGAWWLGYLIAGIISLLAAVPFWYLPKSLPRSQSREDSNSSSEKSKFIIDDHTDYQTPQGENAKIMEMARDFLPSLKNLFGNPVYFLYLCTSTVQFNSLFGMVTYKPKYIEQQYGQSSSRANFVIGLINIPAVALGIFSGGIVMKKFRISVCGAAKLYLGSSVFGYLLFLSLFALGCENSDVAGLTVSYQGTKPVSYHERALFSDCNSRCKCSETKWEPMCGENGITYVSACLAGCQTSNRSGKNIIFYNCTCVGIAASKSGNSSGIVGRCQKDNGCPQMFLYFLVISVITSYTLSLGGIPGYILLLRCIKPQLKSFALGIYTLAIRVLAGIPAPVYFGVLIDTSCLKWGFKRCGSRGSCRLYDSNVFRYQIKSIPASHCYSIPDLHNATDTNKFSCHFTACKTYISGTNCDTGHSVNSPKHCSTFHFKEKLCFKTQKFYNQERKNNGVYKIPKGKLHYK

SEQ ID NO: 59315 - DNA, 2193 bp, Artificial Sequence
  derived and/or modified sequence
atggacaccagcagcaaggagaacatccagctgttctgcaagaccagcgtgcagcccgtgggcagacccagcttcaagaccgagtaccccagcagcgaggagaagcagccctgctgcggcgagctgaaggtgttcctgtgcgccctgagcttcgtgtacttcgccaaggccctggccgagggctacctgaagagcaccatcacccagatcgagagaagattcgacatccccagcagcctggtgggcgtgatcgacggcagcttcgagatcggcaacctgctggtgatcaccttcgtgagctacttcggcgccaagctgcacagacccaagatcatcggcgccggctgcgtgatcatgggcgtgggcaccctgctgatcgccatgccccagttcttcatggagcagtacaagtacgagagatacagccccagcagcaacagcaccctgagcatcagcccctgcctgctggagagcagcagccagctgcccgtgagcgtgatggagaagagcaagagcaagatcagcaacgagtgcgaggtggacaccagcagcagcatgtggatctacgtgttcctgggcaacctgctgagaggcatcggcgagacccccatccagcccctgggcatcgcctacctggacgacttcgccagcgaggacaacgccgccttctacatcggctgcgtgcagaccgtggccatcatcggccccatcttcggcttcctgctgggcagcctgtgcgccaagctgtacgtggacatcggcttcgtgaacctggaccacatcaccatcacccccaaggacccccagtgggtgggcgcctggtggctgggctacctgatcgccggcatcatcagcctgctggccgccgtgcccttctggtacctgcccaagagcctgcccagaagccagagcagagaggacagcaacagcagcagcgagaagagcaagttcatcatcgacgaccacaccgactaccagaccccccagggcgagaacgccaagatcatggagatggccagagacttcctgcccagcctgaagaacctgttcggcaaccccgtgtacttcctgtacctgtgcaccagcaccgtgcagttcaacagcctgttcggcatggtgacctacaagcccaagtacatcgagcagcagtacggccagagcagcagcagagccaacttcgtgatcggcctgatcaacatccccgccgtggccctgggcatcttcagcggcggcatcgtgatgaagaagttcagaatcagcgtgtgcggcgccgccaagctgtacctgggcagcagcgtgttcggctacctgctgttcctgagcctgttcgccctgggctgcgagaacagcgacgtggccggcctgaccgtgagctaccagggcaccaagcccgtgagctaccacgagagagccctgttcagcgactgcaacagcagatgcaagtgcagcgagaccaagtgggagcccatgtgcggcgagaacggcatcacctacgtgagcgcctgcctggccggctgccagaccagcaacagaagcggcaagaacatcatcttctacaactgcacctgcgtgggcatcgccgccagcaagagcggcaacagcagcggcatcgtgggcagatgccagaaggacaacggctgcccccagatgttcctgtacttcctggtgatcagcgtgatcaccagctacaccctgagcctgggcggcatccccggctacatcctgctgctgagatgcatcaagccccagctgaagagcttcgccctgggcatctacaccctggccatcagagtgctggccggcatccccgcccccgtgtacttcggcgtgctgatcgacaccagctgcctgaagtggggcttcaagagatgcggcagcagaggcagctgcagactgtacgacagcaacgtgttcagataccagatcaagagcatccccgccagccactgctacagcatccccgacctgcacaacgccaccgacaccaacaagttcagctgccacttcaccgcctgcaagacctacatcagcggcaccaactgcgacaccggccacagcgtgaacagccccaagcactgcagcaccttccacttcaaggagaagctgtgcttcaagacccagaagttctacaaccaggagagaaagaacaacggcgtgtacaagatccccaagggcaagctgcactacaagtag

SEQ ID NO: 59316 - DNA, 1839 bp, Artificial Sequence
  derived and/or modified sequence
atgggcgtgggcaccctgctgatcgccatgccccagttcttcatggagcagtacaagtacgagagatacagccccagcagcaacagcaccctgagcatcagcccctgcctgctggagagcagcagccagctgcccgtgagcgtgatggagaagagcaagagcaagatcagcaacgagtgcgaggtggacaccagcagcagcatgtggatctacgtgttcctgggcaacctgctgagaggcatcggcgagacccccatccagcccctgggcatcgcctacctggacgacttcgccagcgaggacaacgccgccttctacatcggctgcgtgcagaccgtggccatcatcggccccatcttcggcttcctgctgggcagcctgtgcgccaagctgtacgtggacatcggcttcgtgaacctggaccacatcaccatcacccccaaggacccccagtgggtgggcgcctggtggctgggctacctgatcgccggcatcatcagcctgctggccgccgtgcccttctggtacctgcccaagagcctgcccagaagccagagcagagaggacagcaacagcagcagcgagaagagcaagttcatcatcgacgaccacaccgactaccagaccccccagggcgagaacgccaagatcatggagatggccagagacttcctgcccagcctgaagaacctgttcggcaaccccgtgtacttcctgtacctgtgcaccagcaccgtgcagttcaacagcctgttcggcatggtgacctacaagcccaagtacatcgagcagcagtacggccagagcagcagcagagccaacttcgtgatcggcctgatcaacatccccgccgtggccctgggcatcttcagcggcggcatcgtgatgaagaagttcagaatcagcgtgtgcggcgccgccaagctgtacctgggcagcagcgtgttcggctacctgctgttcctgagcctgttcgccctgggctgcgagaacagcgacgtggccggcctgaccgtgagctaccagggcaccaagcccgtgagctaccacgagagagccctgttcagcgactgcaacagcagatgcaagtgcagcgagaccaagtgggagcccatgtgcggcgagaacggcatcacctacgtgagcgcctgcctggccggctgccagaccagcaacagaagcggcaagaacatcatcttctacaactgcacctgcgtgggcatcgccgccagcaagagcggcaacagcagcggcatcgtgggcagatgccagaaggacaacggctgcccccagatgttcctgtacttcctggtgatcagcgtgatcaccagctacaccctgagcctgggcggcatccccggctacatcctgctgctgagatgcatcaagccccagctgaagagcttcgccctgggcatctacaccctggccatcagagtgctggccggcatccccgcccccgtgtacttcggcgtgctgatcgacaccagctgcctgaagtggggcttcaagagatgcggcagcagaggcagctgcagactgtacgacagcaacgtgttcagataccagatcaagagcatccccgccagccactgctacagcatccccgacctgcacaacgccaccgacaccaacaagttcagctgccacttcaccgcctgcaagacctacatcagcggcaccaactgcgacaccggccacagcgtgaacagccccaagcactgcagcaccttccacttcaaggagaagctgtgcttcaagacccagaagttctacaaccaggagagaaagaacaacggcgtgtacaagatccccaagggcaagctgcactacaagtag

SEQ ID NO: 59317 - DNA, 2193 bp, Artificial Sequence
  derived and/or modified sequence
atggacacgtcctctaaggaaaacatccagctgttctgtaagacaagcgtgcagccggtcggtcgccctagcttcaaaactgaatacccatcatctgaagagaagcagccgtgctgtggagagctgaaggtttttctgtgcgccctttccttcgtgtactttgccaaagccttggccgagggctacctgaagtctactattacacagattgaacgacgatttgacattcctagttcattggtgggcgtcatcgacgggagcttcgaaatcggaaacttgttggttataaccttcgtgagctatttcggagcaaagctgcacagacccaagataatcggggcaggatgtgtgatcatgggcgttggtactctcctgatcgctatgccacagttttttatggaacaatataaatacgagcggtacagtccttcaagcaactccacactttctatcagtccatgcctgttagagagcagctcacagctccccgtgtctgtgatggagaagagtaagagcaagatcagcaacgagtgcgaagtagatacaagttcttccatgtggatctacgtgttcctggggaacctgctgaggggaatcggagaaacccctatccagccactgggaatcgcgtacctggacgattttgctagcgaggacaacgcagccttttacatcggatgcgtgcagaccgtcgccattattggtccaattttcggttttctgcttgggagtctgtgcgccaaattatacgtggatattggcttcgtgaatttggaccacattacaataacaccgaaggatccgcagtgggtgggcgcctggtggctgggctacctaatagcaggtattatttctttgctggccgccgttccgttctggtacctacccaagagccttcccagaagccagtcaagagaggactcaaatagttcaagcgaaaagagcaagtttatcattgacgatcacactgattaccaaaccccacaaggagaaaacgcaaaaattatggagatggcaagggacttcctaccgtccctcaagaatctattcggcaatcccgtgtacttcctgtacctttgcactagcacagtccagttcaacagtttatttggcatggtgacttacaaacctaagtatatcgaacaacagtatggacagagttcgtctcgcgcaaacttcgtgatcggcctcattaatattcccgcagtcgctctaggcatcttcagtggagggattgtaatgaaaaaattccgtatcagcgtatgcggcgcggccaaactgtatctgggcagttccgtgttcggctacctactgtttctgtccctcttcgcgttgggctgcgagaactcggacgtggcaggattgaccgtttcctaccagggtactaagcctgtgtcctaccatgaaagggccctgttctcagattgtaattcccgctgcaagtgcagtgagacaaagtgggagccaatgtgcggagaaaatggcattacttatgtttcagcttgtttggcaggctgccaaacatctaaccgttccggcaagaacatcatcttctacaattgtacctgcgtgggtatagccgcatctaaatcaggcaattcgtctgggatcgtcggcaggtgccagaaagacaatgggtgcccccaaatgtttctgtatttcctggtgatttcagtgatcactagctacacgctctccctgggcggcatccccggatatatcttgctgctccgctgtataaagcctcagctgaagtccttcgcactgggcatttataccctcgccatacgggtcctggcaggcattccggcgcctgtgtattttggcgtcctcatagacacctcttgtcttaagtggggatttaagagatgtggaagcagaggaagctgtaggttgtatgattctaatgtgtttcgatatcagatcaaaagcattccagcctcacattgctacagcatacctgacctgcacaacgccactgacacgaataagttcagctgtcacttcacagcctgtaaaacctacatttccgggacaaactgcgatactgggcactctgtgaattcccctaagcattgcagtacattccatttcaaggaaaaactctgctttaagacccagaagttctacaaccaggagagaaaaaataatggcgtctacaagattccaaagggaaaactacactataaatag

SEQ ID NO: 59318 - DNA, 1839 bp, Artificial Sequence
  derived and/or modified sequence
atgggggtaggcactctgttgatcgccatgccccagtttttcatggaacaatataagtatgagaggtatagcccttcgtcaaacagtacgctgtcaataagtccctgcttgctggagagctcatcacaactccctgtgagtgtgatggaaaagtcaaagagtaaaatttctaatgaatgcgaagtcgatacaagctctagcatgtggatttacgtgtttctgggtaaccttctgcggggaattggcgagacacccatccaacctttgggtattgcttatctcgatgatttcgcctcagaagacaatgccgccttttatatcggttgtgtccaaaccgtggccattattggaccaatcttcggctttctactgggctccttatgcgcaaaactgtatgtagatatcgggtttgttaacctggatcacatcaccattacacccaaggacccccaatgggtgggagcctggtggctcgggtacctgattgccggcatcatttcattattggccgctgtgccattctggtacctccccaagagcctgccacgttcgcagtccagggaagactcgaacagttccagtgagaagagtaagtttattattgacgaccacaccgactaccaaaccccccagggagagaatgctaagatcatggaaatggctcgcgacttcttgccgtctctgaaaaacctcttcggtaacccggtgtacttcctgtacctctgtacaagcactgttcagtttaatagtctgttcggaatggttacttacaaaccaaaatatattgaacagcagtacgggcagtcttctagcagggccaacttcgtaattggactcattaacatccccgcagtcgcattagggatcttttcagggggaattgtaatgaagaagtttcggatcagtgtctgcggagccgctaagctctatttaggatcaagcgtattcggctacctcctctttctgtcattattcgccttggggtgcgagaacagcgacgtcgctggattaaccgtctcttaccaaggcacgaaaccagtcagttaccatgagagggccctgttctcagattgcaactccaggtgcaagtgtagcgaaaccaaatgggagcctatgtgtggagagaacggtatcacctacgtgtcagcgtgtttagccggatgccagaccagtaacagatccgggaaaaatattatcttctacaactgcacctgcgtaggaattgcagcttcaaagtctggaaactcaagcggtatcgttggcagatgccagaaagacaatggatgtccccagatgttcttgtacttcctggtaataagcgtgatcacaagctacaccctatcgttgggtggcatcccgggctacatcctgctacttaggtgtatcaagccccaactcaaaagcttcgctctcggaatatacacactggctatcagagttttggcggggatacctgcccccgtctacttcggggtgctgattgacactagctgcctgaagtggggattcaaacggtgcggctcaaggggctcctgtaggctttatgacagtaatgtattccgttatcaaatcaagtcaatcccagctagtcattgctactcaatcccagacctgcataatgctacagacaccaataaattctcttgtcatttcaccgcctgtaagacatacatttccggaacgaattgcgatacggggcatagcgtcaattcacccaagcactgttctacgtttcacttcaaagagaaactatgtttcaaaactcagaaattttataatcaggagagaaaaaacaatggtgtttataagatccccaagggcaaacttcattacaaatag

SEQ ID NO: 59319 - DNA, 2193 bp, Artificial Sequence
  derived and/or modified sequence
atggacacgtcaagcaaggaaaatatccaacttttttgtaagacttcagtgcagccggtgggcaggccgtcgtttaaaaccgaataccccagctctgaagagaaacaaccttgctgcggggaacttaaagtcttcctatgcgccctctcctttgtgtacttcgctaaggcattggccgagggctatctaaaatctacaattacccagatcgaacggcggttcgacattccaagctctcttgtgggagtgattgatggctcttttgagatcggcaatctcctcgttatcacttttgtgtcctatttcggcgccaaactgcaccgccctaaaattatcggtgccgggtgcgtgatcatgggcgtgggtacattgctgattgccatgccacagttttttatggaacagtacaagtacgagcggtacagcccgagtagtaattccacattgtcaatatcaccatgtctgctggagtcatcttcccaactccctgtgtccgtgatggagaagagcaagtccaaaatcagtaatgaatgcgaggtagatactagttctagcatgtggatttacgtgtttcttggaaatctgctgagaggtataggagagacacccattcagccactgggtatcgcctacctggatgatttcgcgtctgaggacaacgctgcgttctatataggctgcgtgcagactgtggccatcataggacccatttttgggtttttgctgggcagcctatgcgcgaagctctacgtcgacattggttttgtgaacttggatcacatcacgatcacaccaaaagaccctcagtgggtcggagcttggtggttgggttatcttatcgctggtatcatcagcttgctggcagccgtccctttctggtacttgccgaaatctctgccccggagtcagagcagggaggactccaacagctcctctgagaaatctaaattcatcattgatgaccacacagactatcagacaccccagggtgagaatgccaaaataatggaaatggcaagagactttctgcctagtttaaagaacctcttcggcaatcccgtctactttttgtatctatgtacaagcacagtacagtttaattcactgtttggcatggtgacatataaaccgaaatacatcgaacagcagtacggccagtcttcttcccgggccaattttgtcatcggactcatcaacatccccgctgtggcccttggaatatttagtggcggcattgttatgaaaaagtttcggatctcagtatgtggcgctgctaagctttatctcggaagttccgttttcggctatctgctatttctctcgctttttgcactcggatgcgagaatagcgacgtagccggcctcacggtgtcatatcagggaaccaagcccgtctcttaccacgagagggccctgttctcagactgtaattccaggtgcaagtgttccgagacgaagtgggagcctatgtgcggagagaatggcataacgtatgtctccgcctgcttggccgggtgccagacttccaatcgctccggcaagaacattatattctacaactgcacgtgcgtgggaatcgcagccagcaagtcggggaactctagtggcattgtaggtaggtgccagaaggataatgggtgcccccagatgtttctctacttcctggtgattagtgtcatcacatcctacacactgagcctcgggggcatccccggatacattctgctgctgcgctgtataaaaccacagctgaaatctttcgccctcgggatctataccctcgcgattcgggtgctggctggcatcccagcccccgtgtatttcggggtgctgatagatacgagctgcttgaagtggggctttaagcgctgcgggtcacgcggcagctgtcgcctgtacgacagcaacgtgtttcgatatcagataaaatctataccagcgtctcattgctattctattccagacttgcataatgctactgacaccaacaaattcagttgccatttcacagcttgtaagacatacattagcgggactaattgtgacactggccattcagtcaattccccaaaacactgttcgacctttcactttaaagagaaattgtgtttcaaaactcagaaattctataaccaggaaagaaaaaacaatggggtttataaaatccctaagggaaagctccattataagtag

SEQ ID NO: 59320 - DNA, 2193 bp, Artificial Sequence
  derived and/or modified sequence
atggacaccagcagcaaagaaaacatccagctgttctgcaagacctctgtgcagcctgtgggccggcccagcttcaagacagagtaccccagcagcgaggagaagcagccctgctgcggggagctgaaggtgttcctgtgtgccctgagctttgtgtactttgccaaggccctggccgagggctacctgaagagcaccatcacccagatcgagaggagatttgacatccccagcagcctggtgggcgtgattgatggcagctttgagatcggcaacctgctggtgatcacctttgtgtcctactttggagccaagctgcaccggcccaagatcatcggggccggctgcgtcatcatgggcgtgggcaccctgctgattgccatgccccagttcttcatggagcagtacaagtatgaaagatacagccccagcagcaacagcaccctgagcatcagcccctgcctgctggagagcagcagccagctgcctgtgtctgtgatggagaagagcaagagcaagatcagcaatgaatgtgaggtggacaccagcagctccatgtggatctacgtgttcctgggcaacctgctgcggggcattggagagacccccatccagcccctgggcatcgcctacctggatgactttgccagcgaggacaatgctgccttctacatcggctgtgtgcagacagtggccatcatcggccccatcttcggcttcctgctgggcagcctgtgtgccaagctgtatgtggacattggatttgtgaacctggaccacatcaccatcacccccaaggacccccagtgggtgggcgcctggtggctgggctacctgattgctggcatcatcagcctgctggccgctgtgcccttctggtacctgcccaagagcctgcccaggagccagagccgggaggacagcaacagcagcagcgagaagagcaagttcatcattgatgaccacacagactaccagaccccccagggagaaaatgccaagatcatggagatggcccgggacttcctgcccagcctgaagaacctgtttggaaatcctgtgtacttcctgtacctgtgcaccagcacagtgcagttcaacagcctgtttggcatggtgacctacaagcccaagtacatcgagcagcagtatggccagagcagcagccgggccaactttgtgattggcctcatcaacatcccagctgtggccctgggcatcttcagcggcggcatcgtgatgaagaagttccgcatctctgtgtgtggggccgccaagctgtacctgggcagctctgtgtttggctacctgctcttcctgagcctgtttgccctgggctgtgagaacagtgatgtggccggcctgactgtgtcctaccagggcaccaagcctgtgtcctaccacgagcgggccctcttcagtgactgcaacagccgctgcaagtgcagcgagaccaagtgggagcccatgtgtggagaaaatggcatcacctacgtgtctgcctgcctggccggctgccagaccagcaacagaagtggcaagaacatcatcttctacaactgcacctgtgtgggcattgctgccagcaagagcggcaacagcagcggcatcgtgggccgctgccagaaggacaatggctgcccccagatgttcctgtacttcctggtgatcagcgtcatcaccagctacaccctgagcctgggcggcatccctggctacatcctgctgctgcgctgcatcaagccccagctgaagagctttgccctgggcatctacaccctggccatccgggtgctggccggcatcccagcccctgtgtactttggagtgctgattgacaccagctgcctgaagtggggcttcaagagatgtggcagccggggcagctgccgcctgtatgacagcaatgtgttccgctaccagatcaagagcatcccagccagccactgctacagcatcccagacctgcacaatgccacagacaccaacaagttcagctgccacttcaccgcctgcaagacctacatcagcggcaccaactgtgacaccggccacagcgtgaacagccccaagcactgcagcaccttccacttcaaggagaagctgtgcttcaagacccagaagttctacaaccaggagaggaagaacaatggagtgtacaagatccccaagggcaagctgcactacaagtag

SEQ ID NO: 59321 - DNA, 1839 bp, Artificial Sequence
  derived and/or modified sequence
atgggcgtgggcaccctgctgattgccatgccccagttcttcatggagcagtacaagtatgaaagatacagccccagcagcaacagcaccctgagcatcagcccctgcctgctggagagcagcagccagctgcctgtgtctgtgatggagaagagcaagagcaagatcagcaatgaatgtgaggtggacaccagcagctccatgtggatctacgtgttcctgggcaacctgctgcggggcattggagagacccccatccagcccctgggcatcgcctacctggatgactttgccagcgaggacaatgctgccttctacatcggctgtgtgcagacagtggccatcatcggccccatcttcggcttcctgctgggcagcctgtgtgccaagctgtatgtggacattggatttgtgaacctggaccacatcaccatcacccccaaggacccccagtgggtgggcgcctggtggctgggctacctgattgctggcatcatcagcctgctggccgctgtgcccttctggtacctgcccaagagcctgcccaggagccagagccgggaggacagcaacagcagcagcgagaagagcaagttcatcattgatgaccacacagactaccagaccccccagggagaaaatgccaagatcatggagatggcccgggacttcctgcccagcctgaagaacctgtttggaaatcctgtgtacttcctgtacctgtgcaccagcacagtgcagttcaacagcctgtttggcatggtgacctacaagcccaagtacatcgagcagcagtatggccagagcagcagccgggccaactttgtgattggcctcatcaacatcccagctgtggccctgggcatcttcagcggcggcatcgtgatgaagaagttccgcatctctgtgtgtggggccgccaagctgtacctgggcagctctgtgtttggctacctgctcttcctgagcctgtttgccctgggctgtgagaacagtgatgtggccggcctgactgtgtcctaccagggcaccaagcctgtgtcctaccacgagcgggccctcttcagtgactgcaacagccgctgcaagtgcagcgagaccaagtgggagcccatgtgtggagaaaatggcatcacctacgtgtctgcctgcctggccggctgccagaccagcaacagaagtggcaagaacatcatcttctacaactgcacctgtgtgggcattgctgccagcaagagcggcaacagcagcggcatcgtgggccgctgccagaaggacaatggctgcccccagatgttcctgtacttcctggtgatcagcgtcatcaccagctacaccctgagcctgggcggcatccctggctacatcctgctgctgcgctgcatcaagccccagctgaagagctttgccctgggcatctacaccctggccatccgggtgctggccggcatcccagcccctgtgtactttggagtgctgattgacaccagctgcctgaagtggggcttcaagagatgtggcagccggggcagctgccgcctgtatgacagcaatgtgttccgctaccagatcaagagcatcccagccagccactgctacagcatcccagacctgcacaatgccacagacaccaacaagttcagctgccacttcaccgcctgcaagacctacatcagcggcaccaactgtgacaccggccacagcgtgaacagccccaagcactgcagcaccttccacttcaaggagaagctgtgcttcaagacccagaagttctacaaccaggagaggaagaacaatggagtgtacaagatccccaagggcaagctgcactacaagtag

SEQ ID NO: 59322 - DNA, 2193 bp, Artificial Sequence
  derived and/or modified sequence
atggacaccagcagcaaggagaacatccagctgttctgcaagaccagcgtgcaacccgtaggccggccctctttcaaaacggagtatccatccagtgaggaaaagcagccttgctgtggagagctcaaggtgttcctgtgcgcactgtccttcgtatacttcgcaaaggccctcgccgagggctatctgaaaagcaccattacgcagattgagcgtcgctttgacatacctagtagtctggtgggggtgatcgacggctcattcgaaattgggaacttgctggtcataacatttgtgtcttatttcggagctaaactccatagacccaaaatcataggagctggctgcgtgatcatgggggtgggcactctattgattgctatgccacagttttttatggaacaatataaatatgaaaggtattcgcctagttcaaattcaacgctgagcatttccccctgtttgctcgaaagtagcagtcagctgcccgtctctgttatggagaaaagtaaatctaaaatttcaaatgagtgcgaggtcgacacctcaagtagtatgtggatctacgtatttctgggtaacttattaaggggaataggagaaaccccaatccaacccctgggcatcgcatacctagacgactttgccagtgaagataatgctgccttttacataggatgtgtgcagaccgtcgcaatcatagggccaatctttgggtttttgctgggatccttgtgtgctaaactgtacgttgacattgggtttgttaatctggatcacatcacgatcaccccgaaggaccctcagtgggttggcgcctggtggctggggtacttaattgccgggatcatcagtttgctggccgcagtgcctttttggtatctccctaagagtctgcccagatcacaatcaagagaggactcaaactcttcaagtgagaagtcaaaatttattatcgacgaccatacagactaccaaacccctcaaggagagaatgccaaaattatggagatggctcgtgattttctcccatctcttaagaacctatttggtaatccggtgtacttcctttacctctgtacttcaacagtccagttcaactcactcttcggcatggtgacctacaaacccaaatatatcgagcagcagtatggccagagcagttctcgcgctaattttgttattggactgatcaatatccctgccgtagccctgggaatcttcagtggcggaatcgtcatgaagaagtttcgcatctcggtgtgcggcgctgctaagctttatctgggtagcagtgtgttcggctacctcctatttctgtctctctttgcactggggtgcgaaaattccgacgttgcagggctgacagtctcctaccagggcacaaagcccgtctcttatcatgaacgggccctcttctcggattgtaactcaagatgcaaatgtagtgaaacaaagtgggaaccaatgtgtggcgaaaatggtatcacgtacgtgtcggcctgtctggcgggctgccaaacctcaaaccgcagtggtaaaaacatcattttctacaattgtacctgtgtcggaatcgcagcaagcaaatctggcaacagtagcggcatcgtgggccgctgtcaaaaagacaatggatgccctcagatgtttttatattttcttgtgatttctgtgataacctcatacaccctaagcttaggaggcatccccgggtatattctcctgcttcggtgcataaagccccagctcaaatctttcgcactgggcatctacacactggctattcgggttcttgcgggtatcccagccccggtgtactttggcgtgctcattgataccagctgcctaaaatgggggtttaagcgatgcgggtctcggggctcatgccgactatacgatagcaatgtcttcaggtatcagatcaaaagcatcccagcttcccactgttactctatccctgatctgcacaacgcgactgatactaataagttctcatgccacttcacagcctgcaagacgtacatttccggcaccaactgtgacacgggacactctgtaaatagtcctaagcactgcagcactttccacttcaaggagaaattatgcttcaaaactcagaagttttacaatcaggagaggaagaacaacggagtctacaaaattccaaaaggaaagctccattataagtag

SEQ ID NO: 59323 - DNA, 1839 bp, Artificial Sequence
  derived and/or modified sequence
atgggcgtgggcaccctgctgatcgccatgccccagttcttcatggagcagtataaatatgagcggtacagccccagctcgaattcaactttgagcatttctccctgcttgctggagagtagctcacaacttcctgtttccgtcatggagaagtcaaagagcaagatcagcaacgagtgcgaggtcgacacttctagctccatgtggatatacgtcttcctgggcaatctgcttcgtgggataggcgagaccccaatacagccccttggaattgcttacctcgacgatttcgctagcgaggacaatgccgcattctatattggctgcgtacagacagtggccattatcgggccgatttttgggttccttctggggtccctgtgtgcgaagttgtacgtcgacatcggtttcgttaatctcgaccacatcaccatcactcctaaagacccccaatgggtcggcgcctggtggcttgggtacctgatcgcgggcattataagcctcctggctgcagttccattttggtacttaccaaagtctctcccaaggtcacagtcccgggaagatagtaactccagctcagagaagagcaagttcatcattgatgaccacaccgattatcagacacctcaaggtgaaaatgccaaaataatggagatggcacgagacttcctgcctagcctcaagaatctattcggcaacccggtgtactttttatacttatgtacatcgacagtgcagttcaactccctctttggtatggtcacatataagcccaagtacatagagcagcagtacggccagtcctcatcccgggcaaactttgttatcggccttatcaatattcctgctgtagcattaggcattttttcagggggcattgtcatgaaaaagttccgaatcagcgtgtgcggggcggccaaactataccttggctctagcgttttcggctacctgctgttcctgagcctttttgccttaggatgtgagaattccgatgtggccgggttaacagtcagttaccaaggaactaagccagtttcttatcacgaacgggctcttttttctgattgtaattcacgctgcaaatgcagtgaaaccaagtgggagcccatgtgcggtgagaatgggatcacctacgtgtccgcctgtctggccgggtgtcagacctctaacaggtccggcaagaacatcattttttataattgcacctgtgttgggattgccgcaagtaagtccggaaacagctccggtatcgtcgggagatgccagaaggacaacggctgtcctcagatgttcctatatttcctggttatctccgtgataacttcttacacactctctctgggcggaatccccggctacattctgctgttgcgctgtattaagccacagcttaagtctttcgccctgggtatttacactctggccatccgggtgttagccggaatccctgctcctgtgtactttggggtcttgatcgacacatcatgccttaagtggggattcaagaggtgtggcagccggggctcatgcaggctgtacgacagtaacgtttttcgatatcagattaaaagtattcccgcctcacattgctattctatccccgacctgcacaacgctacagacacgaacaaattctcttgtcacttcaccgcctgcaagacatacatctcaggaacaaactgtgataccggacacagtgtcaattctcccaaacattgcagcacatttcatttcaaagaaaagctctgttttaagacacaaaagttctataaccaagagaggaaaaacaatggagtgtataagatcccgaagggcaaactccattacaagtag

SEQ ID NO: 59324 - DNA, 2193 bp, Artificial Sequence
  derived and/or modified sequence
atggacaccagcagcaaggagaacatccagctgttctgcaagacctccgtccagccagtcggaagaccctcttttaaaactgaatatccatcatccgaagagaaacagccatgctgcggagagctgaaggtctttctgtgtgccctgagcttcgtttacttcgccaaggcattggctgaaggctatctgaaaagtacaatcacccagatcgaaaggaggtttgatattccatccagtttagtgggtgtcatcgacggatcattcgaaattgggaacctacttgtgattacatttgtgtcttactttggcgcaaagctccaccgacccaagatcattggcgccggttgtgttattatgggggtcggcacattgcttattgcaatgccacaattctttatggagcagtacaaatatgagcggtacagtcccagttctaactcaactctgtccatcagcccatgtctcttggagtcatcgagccagctgccagtgtctgtgatggagaaaagtaaatctaaaatatctaacgagtgcgaggttgacacctcctcaagtatgtggatctatgtgtttctaggcaatctgctgagggggataggtgaaacaccgattcaaccacttggcatcgcctatctggacgacttcgctagcgaagataacgctgcgttctacattggctgcgttcagaccgtcgccattattgggccaatcttcggatttctcttgggtagtctttgcgccaaactgtatgtcgatatcgggttcgtcaacctcgatcatataacgatcactccgaaggatcctcagtgggtgggtgcttggtggctgggttacttgattgctggtatcattagcttgcttgcagctgtgcctttttggtacttaccaaaatcgctgcccaggagccaatcccgtgaggactctaattcctcaagcgaaaaatcaaagttcataatagacgatcacacagactaccagacaccacagggggagaacgccaagattatggagatggcacgcgactttcttccttctcttaagaatctgttcggaaaccccgtctatttcctttacttgtgcaccagcacagtccagttcaactctttattcggcatggtgacctacaaaccaaaatacatcgagcagcagtatggccagtcctcatctagagccaattttgtgataggtctgattaacatcccagctgtggctctcggcatcttcagcggaggcatcgtcatgaagaagttcaggatctctgtgtgtggagccgcaaaactctacttgggcagctcggtgttcgggtaccttcttttcctatcgctctttgcacttggatgcgagaatagcgacgtcgccggactgaccgtttcataccagggcacgaaacccgtatcctaccacgaacgggctttattttccgattgcaattcccggtgtaagtgctctgaaacaaaatgggagcctatgtgcggcgagaacggaattacgtacgtgagcgcgtgcctcgcaggctgccagaccagcaacagatccggcaagaatatcatcttttacaactgtacctgcgttggcattgccgcatccaaatctggcaattcgagtggaattgtcgggcgatgtcagaaggataacggatgcccccagatgtttttgtactttctggttattagcgtgattacatcttacacactgagtcttggtggcatcccaggctacatcttactgttacggtgtatcaaaccacaactcaagtccttcgctctgggaatctacactttggccataagggttctcgccggtatcccagcacccgtgtacttcggcgttttaatagatacctcctgcctgaaatgggggtttaagcggtgcgggtctcgagggtcatgccggctgtacgacagcaacgtgtttagataccagataaaaagtattcccgcgagccattgttatagcatccctgatctgcacaatgctacagacaccaataagtttagttgtcacttcacagcctgtaagacctacatctccggaacaaattgcgacacaggacattccgtgaactcaccgaagcattgttccaccttccattttaaagaaaagctctgttttaaaacgcagaaattctataaccaggaacgaaagaataacggcgtgtacaaaattcctaaggggaagttacactataagtag

SEQ ID NO: 59325 - DNA, 2193 bp, Artificial Sequence
  derived and/or modified sequence
atggacacttcatcaaaagaaaacattcagctgttttgtaagacctccgtccagcctgtgggacggcctagcttcaagaccgaatacccttcatctgaggagaaacagccttgctgtggggaattgaaggtgttcctgtgtgcactctcattcgtctacttcgccaaggccctggccgaggggtaccttaagagtaccataactcagatcgagagacgcttcgacattccgagttccttggtgggcgtcattgatggttcatttgagataggaaatctactagttattaccttcgtatcctacttcggagctaagctccacaggccgaaaatcattggagccggatgcgtgattatgggggtgggaacactgttgattgccatgccccagtttttcatggagcagtacaagtatgagcgatacagccctagtagcaactccaccctttcaatctcaccatgcctgctggagagttctagtcaactgccagtttctgtgatggaaaagtcgaagtccaagataagtaacgagtgcgaggttgacacttctagtagtatgtggatttatgtcttccttggaaatctcctccggggaataggggaaacccccattcaacccctagggatagcgtacctcgatgacttcgcatccgaggataacgccgcattctatatcggctgtgtgcagaccgtggccattattggcccaatattcggctttctgctaggctcactctgtgccaaactgtacgtcgatatcggctttgtcaaccttgaccacatcaccattacgccaaaagatccccaatgggtgggggcttggtggctaggttacctcattgctggcatcatctctctcttggccgcagtgcccttttggtacctacccaagtctctgcctcggtcccagtcccgggaggactcaaacagcagcagcgaaaaaagcaagtttataattgatgaccacactgattatcagactcctcagggagaaaacgcaaagatcatggaaatggcaagagacttcctgcctagtttaaagaaccttttcggaaatcctgtctactttctgtacctgtgtaccagcacagttcagttcaattccctcttcggcatggtgacttataagcccaaatacatcgaacagcaatacggacagtcctcttcacgggcaaactttgttatcggtttgataaacattcctgccgtggccttaggtatcttttccggcggaattgtcatgaaaaagtttagaatatccgtctgtggagctgctaagctctacttagggtctagcgttttcggctatttgttgttcctgagtttgttcgcgttagggtgcgagaacagcgacgtggcaggcctcactgtgtcctaccagggaactaaaccagtctcgtatcacgagagggccttatttagcgactgtaactctagatgtaaatgttccgagacaaaatgggagccaatgtgcggagagaacggtatcacctacgtatctgcttgtctggccggatgtcagacctccaacaggagtgggaaaaacataatcttctacaactgcacttgcgtaggaatcgccgcttcgaaatctgggaactcctcaggcatcgtcggccgttgccagaaagacaacgggtgcccgcagatgttcctgtactttctggtgattagcgtaattacatcatacacgctctctctaggagggatacccggatacatcctgttactgcgttgcattaagccccaattgaagtcattcgccctcggcatatacacactggctatccgcgttctggctggtatccctgcaccagtatattttggggtactgatcgatacctcctgtctgaaatgggggtttaagcgctgtggctctaggggctcttgccggctttatgattccaacgtttttaggtaccagattaagtctatccccgcttcccactgctattccatccctgatctgcataatgccaccgacacaaacaaatttagctgtcacttcaccgcctgcaagacctacatctctgggacgaattgtgacacagggcactcggtgaactcgcccaaacactgctcaacctttcacttcaaagagaaactgtgctttaagactcagaagttctacaaccaggaacgcaagaacaatggcgtctacaagattccgaaaggcaaattgcactataagtag

SEQ ID NO: 59326 - DNA, 1839 bp, Artificial Sequence
  derived and/or modified sequence
atgggggtgggcaccctgctgatcgctatgccgcagtttttcatggaacagtataaatacgagcgctactccccctcatccaattctactttaagcatcagcccctgtttgcttgaatcctcctctcaactgccagtatcagtcatggaaaagtctaaaagtaagatttcaaacgaatgtgaggtcgacacatcgtcttccatgtggatctatgttttcctcgggaacctcctaagaggcatcggggagacacccatccagcctctgggaatcgcgtatctcgatgatttcgcatctgaggataatgccgcattctatatcgggtgtgttcagacagttgcgatcattgggcctatcttcgggtttctgcttggttccctatgtgcaaagctgtatgtggacattgggtttgttaacctggatcacatcactataactcccaaggatccgcagtgggtgggggcatggtggttggggtatctcatcgcaggaatcatctccctccttgcagcggtcccgttttggtacctgcccaaatctctcccacggtctcagtccagggaggattcgaacagttccagtgagaagtctaagtttattattgacgaccacacagattaccagacccctcagggagagaacgccaaaatcatggagatggctcgggactttctgccctcgctgaagaacttgtttgggaatccggtgtatttcctctacctctgcacaagtactgtccagtttaattccctattcggtatggtcacgtataaaccaaaatacattgagcaacagtacggacagagctctagcagggccaacttcgtgatcggcctgatcaacatccctgccgttgccctcggtatattctctgggggaattgtgatgaagaagtttcgcatcagtgtctgcggcgcagctaaactgtatttgggctcctctgtcttcggatacttactcttccttagcctgttcgccttgggctgcgagaattctgatgttgcaggccttaccgtgtcttaccagggtaccaaacctgtgagctatcacgagcgagcactattctctgactgtaactctcggtgcaaatgcagcgagaccaagtgggagcctatgtgcggggagaatggcattacatacgtctctgcctgcctcgctggatgtcagacctcaaatcgcagcggaaaaaacatcatcttctacaattgtacatgtgtgggcatagcagcgagcaagtccggcaactctagcgggatcgtaggacgctgtcagaaagacaacggttgcccccagatgtttctgtacttcttggtgattagcgttattacgtcctatactctctctctgggcggtatcccagggtatatccttctcctgcgctgtataaagcctcaactgaagtcgtttgccctgggcatttacaccttagctatccgcgtgctggctggcatccctgccccagtttatttcggtgtacttatcgatacctcctgtttgaaatggggcttcaaacgttgcggatcgcgtgggagttgtcggttatacgatagtaatgtcttcagataccagatcaagtcaatcccagccagtcactgctacagcattcctgaccttcacaatgccactgatacaaataagttttcctgtcacttcactgcctgtaagacttacataagcggaacgaattgcgacaccgggcactcagtgaacagccccaaacattgcagcacgtttcattttaaggagaaactttgttttaagacacagaagttctataatcaggagcggaaaaataacggggtatacaagatcccgaagggcaagcttcactacaagtag

SEQ ID NO: 59327 - DNA, 2193 bp, Artificial Sequence
  derived and/or modified sequence
atggacacgtccagtaaggagaatattcaattattttgcaagactagcgttcagccagtgggcaggccatcgtttaagactgaatacccctcgtctgaggagaagcagccctgctgtggggagctcaaagtattcctgtgcgctttgtccttcgtctattttgctaaagccctggctgagggctatctgaagtccaccattactcagattgagagaagatttgacattcctagttcactggttggagtaatcgacggtagctttgagatcggaaacctactggtgatcacatttgtcagctattttggagccaagctgcacaggcccaagataatcggtgccggatgtgtcattatgggcgtaggtactctgctgatcgccatgccccagtttttcatggagcagtataagtacgaacgttattcgccttcatctaattccactctgagcataagcccttgtcttcttgaatctagcagccagttgccagtaagcgttatggagaaaagcaagtccaaaatatctaatgagtgcgaagtggataccagtagtagtatgtggatctacgtgttcctcgggaacctcttgcgtggcatcggcgaaactcctatccagcctctcgggatcgcctacctggacgactttgccagtgaggacaatgccgctttttacatcggctgcgtccagaccgttgccataatcggtcccatctttggattcttactggggagcttgtgtgccaagttatacgtcgatattggattcgtgaacctcgaccatattaccattacgccaaaggacccccagtgggtcggggcatggtggctgggttatctgatcgccggaatcatctctctcctcgcggcagtgcccttctggtacctcccaaagtcattaccgagaagccagtcacgggaagattcgaattcttcgtctgaaaagagcaagttcatcatcgatgatcacaccgattatcagacccctcagggcgaaaatgccaagatcatggagatggcccgagacttccttccctcactgaaaaacctcttcggaaacccagtttatttcctgtatctttgcacttccactgtccaatttaatagtctgtttggaatggtgacttataaacctaaatacattgagcaacaatacggacagtcgagtagcagagcgaattttgtaatcggccttattaatatccctgctgtcgctctgggaatcttttcgggaggaattgtgatgaagaaattccgtatctctgtttgtggagccgctaagctttacttgggatcttcagtctttggatatctcctcttcctctctctcttcgctctggggtgtgagaacagcgacgttgcaggattaacagtctcctatcaaggaacgaaaccagtctcctatcacgagagagctctcttttctgattgcaactcaaggtgcaaatgttcagagacaaaatgggaacctatgtgtggtgaaaacggaattacatacgtgtccgcatgccttgcaggttgtcagactagcaacaggtccggcaaaaacattatcttctataattgcacatgcgtcggcattgctgcgtctaagagtggcaatagctccggcatcgtgggcaggtgccagaaggacaacggatgtcctcagatgtttctctacttcctcgtgatttctgtgattacttcatatacgctgagtttgggcggaattcccggatacatccttctattgagatgcatcaagccccaactgaaaagtttcgctctgggtatttacaccctggctattcgggttcttgccggaatacctgccccagtttatttcggcgttcttattgacacttcttgcctgaaatgggggtttaagcgatgtggaagccgcggtagctgccgtctgtatgacagtaatgtctttcggtaccagataaagtccattccagctagtcactgttacagcattccggatctgcacaacgcaaccgacacgaataaatttagctgtcatttcactgcctgcaagacatatatttctggcacaaattgcgacactggccactctgtgaattcaccaaagcactgctcaaccttccatttcaaggaaaaattatgttttaaaacacagaagttttacaaccaggaaagaaaaaataacggcgtttacaagattcctaaagggaaactgcattataaatag

SEQ ID NO: 59328 - DNA, 3466 bp, Artificial Sequence
  derived and/or modified sequence
gcaaagaaatggctcaaaagcttcagctctttctgtgccctgggagctgagatgcacgtcagtggccttgccagcgtggccaattctctgctgactgccagaaaaaagaggccaggaagaaagaggaaagagaagagatcgctcaggggtgagaccatgcccttcatcttttcttttccctaatctcctctgcttgtgtccacccacactctccccacctggcaaaattgttcaaaattgctgtggagtttacctcagtttcctctttcagtctgtggtgtgtggtccatcctcttgctgagcacattgaaaggaactggctatctttgatctcttcctccagatcagagtcaaggaatgtgtttataatggacacttcatccaaagaaaatatccagttgttctgcaaaacttcagtgcaacctgttggaaggccttcttttaaaacagaatatccctcctcagaagaaaagcaaccatgctgtggtgaactaaaggtgttcttgtgtgccttgtcttttgtttactttgccaaagcattggcagaaggctatctgaagagcaccatcactcagatagagagaaggtttgatatcccttcttcactggtgggagttattgatggtagttttgaaattgggaatctcttagttataacatttgttagctactttggagccaaacttcacaggccaaaaataattggagcagggtgtgtaatcatgggagttggaacactgctcattgcaatgcctcagttcttcatggagcagtacaaatatgagagatattctccttcctccaattccactctcagcatctctccgtgtctcctagagtcaagcagtcaattaccagtttcagttatggaaaaatcaaaatccaaaataagtaacgaatgtgaagtggacactagctcttccatgtggatttatgttttcctgggcaatcttcttcgtggaataggagaaactcccattcagcctttgggcattgcctacctggatgattttgccagtgaagacaatgcagctttctatattgggtgtgtgcagacggttgcaattataggaccaatctttggtttcctgttaggctcattatgtgccaaactatatgttgacattggctttgtaaacctagatcacataaccattaccccaaaagatccccagtgggtaggagcctggtggcttggctatctaatagcaggaatcataagtcttcttgcagctgtgcctttctggtatttaccaaagagtttaccaagatcccaaagtagagaggattctaattcttcctctgagaaatccaagtttattatagatgatcacacagactaccaaacaccccagggagaaaatgcaaaaataatggaaatggcaagagattttcttccatcactgaagaatctttttggaaacccagtatacttcctatatttatgtacaagcactgttcagttcaattctctgttcggcatggtgacgtacaaaccaaagtacattgagcagcagtatggacagtcatcctccagggccaactttgtgatcgggctcatcaacattccagcagtggcccttggaatattctctggggggatagttatgaaaaaattcagaatcagtgtgtgtggagctgcaaaactctacttgggatcatctgtctttggttacctcctatttctttccctgtttgcactgggctgtgaaaattctgatgtggcaggactaactgtctcctaccaaggaaccaaacctgtctcttatcatgaacgagctctcttttcagattgcaactcaagatgcaaatgttcagagacaaaatgggaacccatgtgcggtgaaaatggaatcacatatgtatcagcttgtcttgctggttgtcaaacctccaacaggagtggaaaaaatattatattttacaactgcacttgtgtgggaattgcagcttctaaatccggaaattcctcaggcatagtgggaagatgtcagaaagacaatggatgtccccaaatgtttctgtatttccttgtaatttcagtcatcacatcctatactttatccctaggtggcatacctggatacatattacttctgaggtgcattaagccacagcttaagtcttttgccttgggtatctacacattagcaataagagttcttgcaggaatcccagctccagtgtattttggagttttgattgatacttcatgcctcaaatggggatttaaaagatgtggaagtagaggatcatgcagattatatgattcaaatgtcttcaggtaccaaatcaaaagcattcccgcatctcattgctacagcatcccagatttacacaatgccactgacactaacaagttttcatgtcatttcactgcttgtaagacatatatatctgggactaactgtgatactgggcacagtgtcaattctcctaagcattgcagtacttttcattttaaagaaaaattatgtttcaaaacacagaagttttataaccaagagagaaagaacaatggtgtctacaagattccaaaaggaaaattacactacaagtgatcatctgctacaacccaactactggccaggcaaggaaactcaactttagaaacatgatgactggaagtcatgtcttctaattggttgacattttgcaaacaaataaattgtaatcaaaagagctctaaatttgtaatttctttctcctttcaaaaaatgtctactttgttttggtcctaggcattaggtaatataactgataatatactgaaacatataatggaagatgcagatgataaaactaattttgaactttttaatttatataaattattttatatcacttacttatttcactttattttgctttgtgctcattgatatatattagctgtactcctagaagaacaattgtctctattgtcacacatggttatatttaaagtaatttctgaactgtgtaatgtgtctagagtaagcaaatactgctaacaattaactcataccttgggttccttcaagtattactcctatagtattttctcccatagctgtcttcatctgtgtattttaataatgatcttaggatggagcagaacatggagaggaagatttcattttaagctcctccttttctttgaaatacaataatttatatagaaatgtgtagcagcaaattatattggggattagaattttgaattaatagctctcctactattaatttacatgtgctttttgtgtggcgctataagtgactatggttgtaaagtaataaaattgatgttaacatgcccaattattgttcttttatgaatccaatgaatttaaaactattgttaaatataatactgccccactttaatatatgtaagcaacttcctacttatacacgacgtgttcctaaaacatgtttgaaaggtgaatttctgaaagtctacaataaatgtaggtgttacaacagg

SEQ ID NO: 59329 - DNA, 2868 bp, Artificial Sequence
  derived and/or modified sequence
aagagatcgctcaggggtgagaccatgcccttcatcttttcttttccctaatctcctctgcttgtgtccacccacactctccccacctggcaaaattgttcaaaattgctgtggagtttacctcagtttcctctttcagtctgtggtgtgtggtccatcctcttgctgagcacattgaaaggaactggctatctttgatctcttcctccagggaatctcttagttataacatttgttagctactttggagccaaacttcacaggccaaaaataattggagcagggtgtgtaatcatgggagttggaacactgctcattgcaatgcctcagttcttcatggagcagtacaaatatgagagatattctccttcctccaattccactctcagcatctctccgtgtctcctagagtcaagcagtcaattaccagtttcagttatggaaaaatcaaaatccaaaataagtaacgaatgtgaagtggacactagctcttccatgtggatttatgttttcctgggcaatcttcttcgtggaataggagaaactcccattcagcctttgggcattgcctacctggatgattttgccagtgaagacaatgcagctttctatattgggtgtgtgcagacggttgcaattataggaccaatctttggtttcctgttaggctcattatgtgccaaactatatgttgacattggctttgtaaacctagatcacataaccattaccccaaaagatccccagtgggtaggagcctggtggcttggctatctaatagcaggaatcataagtcttcttgcagctgtgcctttctggtatttaccaaagagtttaccaagatcccaaagtagagaggattctaattcttcctctgagaaatccaagtttattatagatgatcacacagactaccaaacaccccagggagaaaatgcaaaaataatggaaatggcaagagattttcttccatcactgaagaatctttttggaaacccagtatacttcctatatttatgtacaagcactgttcagttcaattctctgttcggcatggtgacgtacaaaccaaagtacattgagcagcagtatggacagtcatcctccagggccaactttgtgatcgggctcatcaacattccagcagtggcccttggaatattctctggggggatagttatgaaaaaattcagaatcagtgtgtgtggagctgcaaaactctacttgggatcatctgtctttggttacctcctatttctttccctgtttgcactgggctgtgaaaattctgatgtggcaggactaactgtctcctaccaaggaaccaaacctgtctcttatcatgaacgagctctcttttcagattgcaactcaagatgcaaatgttcagagacaaaatgggaacccatgtgcggtgaaaatggaatcacatatgtatcagcttgtcttgctggttgtcaaacctccaacaggagtggaaaaaatattatattttacaactgcacttgtgtgggaattgcagcttctaaatccggaaattcctcaggcatagtgggaagatgtcagaaagacaatggatgtccccaaatgtttctgtatttccttgtaatttcagtcatcacatcctatactttatccctaggtggcatacctggatacatattacttctgaggtgcattaagccacagcttaagtcttttgccttgggtatctacacattagcaataagagttcttgcaggaatcccagctccagtgtattttggagttttgattgatacttcatgcctcaaatggggatttaaaagatgtggaagtagaggatcatgcagattatatgattcaaatgtcttcaggtaccaaatcaaaagcattcccgcatctcattgctacagcatcccagatttacacaatgccactgacactaacaagttttcatgtcatttcactgcttgtaagacatatatatctgggactaactgtgatactgggcacagtgtcaattctcctaagcattgcagtacttttcattttaaagaaaaattatgtttcaaaacacagaagttttataaccaagagagaaagaacaatggtgtctacaagattccaaaaggaaaattacactacaagtgatcatctgctacaacccaactactggccaggcaaggaaactcaactttagaaacatgatgactggaagtcatgtcttctaattggttgacattttgcaaacaaataaattgtaatcaaaagagctctaaatttgtaatttctttctcctttcaaaaaatgtctactttgttttggtcctaggcattaggtaatataactgataatatactgaaacatataatggaagatgcagatgataaaactaattttgaactttttaatttatataaattattttatatcacttacttatttcactttattttgctttgtgctcattgatatatattagctgtactcctagaagaacaattgtctctattgtcacacatggttatatttaaagtaatttctgaactgtgtaatgtgtctagagtaagcaaatactgctaacaattaactcataccttgggttccttcaagtattactcctatagtattttctcccatagctgtcttcatctgtgtattttaataatgatcttaggatggagcagaacatggagaggaagatttcattttaagctcctccttttctttgaaatacaataatttatatagaaatgtgtagcagcaaattatattggggattagaattttgaattaatagctctcctactattaatttacatgtgctttttgtgtggcgctataagtgactatggttgtaaagtaataaaattgatgttaacatgc

SEQ ID NO: 59330 - DNA, 3453 bp, Artificial Sequence
  derived and/or modified sequence
gttgtgttttctgggaatcagcaagtaagatcacaagtggtcttttcttttattcactctctcccataaagaaagctttatcacgtgtggccttaaacttgcagcaaattgcaaagaaatggctcaaaagcttcagctctttctgtgccctgggagctgagatgcacgtcagtggccttgccagcgtggccaattctctgctgactgccagaaaaaagaggccaggaagaaagaggaaagagaagagatcgctcagggtctgtggtgtgtggtccatcctcttgctgagcacattgaaaggaactggctatctttgatctcttcctccagatcagagtcaaggaatgtgtttataatggacacttcatccaaagaaaatatccagttgttctgcaaaacttcagtgcaacctgttggaaggccttcttttaaaacagaatatccctcctcagaagaaaagcaaccatgctgtggtgaactaaaggtgttcttgtgtgccttgtcttttgtttactttgccaaagcattggcagaaggctatctgaagagcaccatcactcagatagagagaaggtttgatatcccttcttcactggtgggagttattgatggtagttttgaaattgggaatctcttagttataacatttgttagctactttggagccaaacttcacaggccaaaaataattggagcagggtgtgtaatcatgggagttggaacactgctcattgcaatgcctcagttcttcatggagcagtacaaatatgagagatattctccttcctccaattccactctcagcatctctccgtgtctcctagagtcaagcagtcaattaccagtttcagttatggaaaaatcaaaatccaaaataagtaacgaatgtgaagtggacactagctcttccatgtggatttatgttttcctgggcaatcttcttcgtggaataggagaaactcccattcagcctttgggcattgcctacctggatgattttgccagtgaagacaatgcagctttctatattgggtgtgtgcagacggttgcaattataggaccaatctttggtttcctgttaggctcattatgtgccaaactatatgttgacattggctttgtaaacctagatcacataaccattaccccaaaagatccccagtgggtaggagcctggtggcttggctatctaatagcaggaatcataagtcttcttgcagctgtgcctttctggtatttaccaaagagtttaccaagatcccaaagtagagaggattctaattcttcctctgagaaatccaagtttattatagatgatcacacagactaccaaacaccccagggagaaaatgcaaaaataatggaaatggcaagagattttcttccatcactgaagaatctttttggaaacccagtatacttcctatatttatgtacaagcactgttcagttcaattctctgttcggcatggtgacgtacaaaccaaagtacattgagcagcagtatggacagtcatcctccagggccaactttgtgatcgggctcatcaacattccagcagtggcccttggaatattctctggggggatagttatgaaaaaattcagaatcagtgtgtgtggagctgcaaaactctacttgggatcatctgtctttggttacctcctatttctttccctgtttgcactgggctgtgaaaattctgatgtggcaggactaactgtctcctaccaaggaaccaaacctgtctcttatcatgaacgagctctcttttcagattgcaactcaagatgcaaatgttcagagacaaaatgggaacccatgtgcggtgaaaatggaatcacatatgtatcagcttgtcttgctggttgtcaaacctccaacaggagtggaaaaaatattatattttacaactgcacttgtgtgggaattgcagcttctaaatccggaaattcctcaggcatagtgggaagatgtcagaaagacaatggatgtccccaaatgtttctgtatttccttgtaatttcagtcatcacatcctatactttatccctaggtggcatacctggatacatattacttctgaggtgcattaagccacagcttaagtcttttgccttgggtatctacacattagcaataagagttcttgcaggaatcccagctccagtgtattttggagttttgattgatacttcatgcctcaaatggggatttaaaagatgtggaagtagaggatcatgcagattatatgattcaaatgtcttcaggtaccaaatcaaaagcattcccgcatctcattgctacagcatcccagatttacacaatgccactgacactaacaagttttcatgtcatttcactgcttgtaagacatatatatctgggactaactgtgatactgggcacagtgtcaattctcctaagcattgcagtacttttcattttaaagaaaaattatgtttcaaaacacagaagttttataaccaagagagaaagaacaatggtgtctacaagattccaaaaggaaaattacactacaagtgatcatctgctacaacccaactactggccaggcaaggaaactcaactttagaaacatgatgactggaagtcatgtcttctaattggttgacattttgcaaacaaataaattgtaatcaaaagagctctaaatttgtaatttctttctcctttcaaaaaatgtctactttgttttggtcctaggcattaggtaatataactgataatatactgaaacatataatggaagatgcagatgataaaactaattttgaactttttaatttatataaattattttatatcacttacttatttcactttattttgctttgtgctcattgatatatattagctgtactcctagaagaacaattgtctctattgtcacacatggttatatttaaagtaatttctgaactgtgtaatgtgtctagagtaagcaaatactgctaacaattaactcataccttgggttccttcaagtattactcctatagtattttctcccatagctgtcttcatctgtgtattttaataatgatcttaggatggagcagaacatggagaggaagatttcattttaagctcctccttttctttgaaatacaataatttatatagaaatgtgtagcagcaaattatattggggattagaattttgaattaatagctctcctactattaatttacatgtgctttttgtgtggcgctataagtgactatggttgtaaagtaataaaattgatgttaacatgcccaattattgttcttttatgaatccaatgaatttaaaactattgttaaatataatactgccccactttaatatatgtaagcaacttcctacttatacacgacgtgttcctaaaacatgtttgaaaggtgaatttctgaaagtctacaataaatgtaggtgttacaacagg

SEQ ID NO: 59331 - DNA, 2343 bp, Artificial Sequence
  derived and/or modified sequence
atgccacattttacagtggttcctgtcgatggacctcgtagaggggattatgataatctagaaggtctcagttgggtggattacggggagagggctgaacttgatgacagcgatgggcatggcaatcacagagagtcttcccccttcctgtcccctcttgaagcttctagagggatagattattacgacagaaacctcgccctcttcgaagaggagctagacataagacctaaagtcagttccctcttgggcaaacttgtctcctacacaaatctgacccaaggggccaaggagcatgaggaggctgaaagcggggagggcacaagacggcgcgccgccgaagccccctccatgggcaccctaatgggggtgtaccttccatgccttcagaacatatttggtgtgattttatttctacgcttaacctggatggtcgggaccgctggcgttctccaggccctactgatcgtcctcatttgttgttgttgtaccctgcttaccgccatctccatgtcagcaatcgcaaccaatggggtggtccccgcgggcggctcctacttcatgatatcgagatctctgggccccgagttcggtggggcagtcgggctgtgcttttatctcggaaccacatttgccgccgccatgtatatcctcggagcaattgagatcctgctaacttatatcgcaccccctgctgcaatcttctacccatccggggcacacgacacctctaacgcgaccctgaacaatatgcgggtgtacgggacaatcttcctcacctttatgaccttggtcgtcttcgtcggcgtgaagtacgtgaataagtttgcttcgcttttcttggcatgtgttatcattagcattctgagtatatacgccggcggaattaagagtatctttgatcctcctgtgttccctgtttgtatgctgggaaacagaaccctgagtagagaccagtttgacatttgcgccaagacggctgtcgtggataatgaaaccgtcgccacccagctgtggagctttttctgtcactcaccaaacctgacaacagactcttgcgatccgtacttcatgctgaacaacgtgacagaaattccgggcatcccaggagcagccgccggggtgcttcaagaaaatctctggagtgcttatttggagaaaggagacattgtcgagaagcatggactgcccagtgcagatgccccatcactgaaggaaagtctgcctttgtacgtggtggctgacatcgccacttcctttacagtcttagtgggtattttttttccaagcgttaccggcatcatggcaggttctaaccgctccggagatttgcgggacgcccagaaatccattcccgttggcaccatcctcgccatcataactacgagcctggtgtatttttcctcagtggtcctgtttggtgcctgtattgagggagttgttttgcgggataaatacggcgacggcgtcagccgcaatctggtcgtagggactctggcctggccttcgccttgggtgatagttatcgggtcctttttttctacctgtggcgccggcctacagagcttaacaggcgcccccaggcttctacaagccattgcaaaagataatattattccctttctcagagtgttcggacacggcaaagtcaatggtgaacccacatgggccctcctgcttacagccctgatcgcggaactgggaatccttatagcctcgctggacatggtggctcctatcttgtccatgttctttttaatgtgctatcttttcgtcaacctggcgtgtgccgtacagacccttctaaggactccgaattggcggcctcggttcaagtattaccattgggcactttccttcctcggaatgtctctctgcctcgctcttatgtttgtttcaagttggtattacgctctggttgcaatgctcatcgcgggtatgatctataagtatatcgagtaccaaggtgctgaaaaggagtggggagacgggatacggggcctttctctgtcggccgcgcgatacgctctactgcgtttggaggaaggccccccccacacaaaaaattggcggccgcaactgctcgtcctgttgaagctggatgaggatctgcacgttaaatatcccaggttgctgacctttgcctctcagctgaaagccggaaaggggttaaccattgtcggctctgttatccagggcagttttctcgagtcttatggagaagctcaagctgctgaacagaccccatgtgctgcattgcgattgcccacctggccttgctcttgtcctcgaacaagtccaagcaccccggccactacaagtgccacttggcgcgccacctag

SEQ ID NO: 59332 - DNA, 2343 bp, Artificial Sequence
  derived and/or modified sequence
atgccccacttcaccgtggtgcctgtggatggccccaggagaggagactatgacaacctggagggcctgtcctgggtggactatggagagcgggcagagctggatgacagtgatggccacggcaaccaccgggagagcagccccttcctgagccccctggaggccagccggggcatcgactactatgacaggaacctggccctgtttgaggaggagctggacatccggcccaaggtgagcagcctgctgggcaagctggtgtcctacaccaacctgacccagggcgccaaggagcacgaggaggccgagagcggggagggcacccggcggcgggctgctgaggcccccagcatgggcaccctgatgggcgtgtacctgccctgcctgcagaacatctttggagtcatcctcttcctgcggctgacctggatggtgggcacagctggggtgctgcaggccctgctgattgtgctgatctgctgctgctgcaccctgctgacagccatctccatgtctgccatcgccaccaatggagtggtgcctgctgggggcagctacttcatgatcagccgcagcctgggccctgagtttggaggagctgtgggcctgtgcttctacctgggcaccacctttgctgctgccatgtacatcctgggcgccatcgagatcctgctgacctacatcgcccccccagctgccatcttctaccccagcggggcccatgacaccagcaatgccaccctgaacaacatgagggtgtatggcaccatcttcctgaccttcatgaccctggtggtgtttgtgggcgtgaagtatgtgaacaagtttgccagcctcttcctggcctgtgtgatcatcagcatcctgagcatctatgccggcggcatcaagagcatctttgacccccctgtgtttcctgtgtgcatgctgggcaacagaaccctgagccgggaccagtttgacatctgtgccaagacagctgtggtggacaatgaaacagtggccacccagctgtggagcttcttctgccacagccccaacctgaccacagacagctgtgacccctacttcatgctgaacaacgtgacagagatccctggcatccctggagctgctgctggggtgctgcaggagaacctgtggagcgcctacctggagaagggggacatcgtggagaagcacggcctgcccagcgcagatgcccccagcctgaaggagagcctgcccctgtatgtggtggccgacatcgccaccagcttcaccgtgctggtgggcatcttcttccccagcgtgacaggcatcatggccggcagcaacagaagtggggacctgagagatgcccagaagagcatccctgtgggcaccatcctggccatcatcaccaccagcctggtgtacttcagctctgtggtgctgtttggagcctgcattgaaggagtggtgctgcgggacaagtatggagatggagtgtccaggaacctggtggtgggcaccctggcctggcccagcccctgggtgattgtgattggcagcttcttcagcacctgtggggccggcctgcagagcctgaccggggccccccggctgctgcaggccatcgccaaggacaacatcatccccttcctgcgggtgtttggacatggcaaggtgaatggagagcccacctgggccctgctgctgacagccctgattgctgagctgggcatcctgattgccagcctggacatggtggcccccatcctgtccatgttcttcctgatgtgctacctgtttgtgaacctggcctgtgctgtgcagaccctgctgcggacccccaactggaggccccgcttcaagtactaccactgggccctgtccttcctgggcatgagcctgtgcctggccctgatgtttgtgtcctcctggtactatgccctggtggccatgctgattgctggcatgatctacaagtacatcgagtaccagggcgctgagaaggagtggggagatggcatccggggcctgagcctgtctgctgcccgctatgccctgctgcggctggaggagggccccccccacaccaagaactggaggccccagctgctggtgctgctgaagctggatgaggacctgcacgtgaagtacccccggctgctgacctttgccagccagctgaaggccggcaagggcctgaccatcgtgggcagcgtcatccagggcagcttcctggagagctatggagaggcccaggccgctgagcagaccccctgtgccgccctgcggctgcccacctggccctgcagctgccccaggaccagccccagcaccccagccaccaccagcgccacctggagggccacctag

SEQ ID NO: 59333 - DNA, 2343 bp, Artificial Sequence
  derived and/or modified sequence
atgccccacttcaccgtggtgcccgtggacggcccccggcggggcgattacgataatctggaaggcctgtcttgggtagattatggagaacgagcagagttggatgatagtgacgggcatgggaaccatcgggagagttctccttttttgagcccactggaagcctcacgcggaatcgattactatgatagaaacctggcactgttcgaggaggagttagacatccgccccaaagtgtcctccctgttgggaaagctagtgtcctatacgaacttgacccagggtgccaaggagcacgaggaagccgagtcgggagaggggacccgccggagagcggctgaggctccaagtatgggaacgcttatgggcgtgtatctcccttgcctgcagaatattttcggagtgattttgtttctgcgtcttacatggatggtcggtaccgcaggcgtgcttcaggcgctgttgatcgtgttaatatgctgttgctgcacgctccttacggctataagcatgtccgctatcgcaacgaatggtgtggtacccgccggcggatcctatttcatgatttctaggagcctggggccggagttcggaggagcagtgggcctgtgtttctacctaggcaccaccttcgctgccgcaatgtatatcttgggagccatcgagatcttactgacctacattgcgccaccagcagccatcttttatccgtcaggcgcacatgataccagcaacgctacgctgaacaacatgcgggtgtatggcaccatcttcctgacattcatgaccctggttgtgttcgtgggtgtgaaatatgtgaataaattcgctagcctattcctggcctgcgtgatcatctctatcctgtccatttacgccggggggatcaagtctatattcgatccccccgtcttcccagtgtgtatgctcggaaatagaactttgtccagagaccaattcgatatttgcgcaaagactgctgtggtggataacgaaacagtcgcaacccagttatggtcttttttctgccacagccccaatcttactacggacagttgcgacccttattttatgctaaataacgtaacagagattcccggcattccaggggccgccgccggagttctgcaggagaatttgtggagcgcttatctggaaaagggagacattgtcgagaagcacggattgcctagcgctgacgctccctcgttgaaagagagtctgcccctgtacgtggttgccgacattgcgacaagctttaccgtgctggtgggaattttctttcccagcgtgacgggaatcatggctggaagcaatcgttccggcgacctgagagatgcccagaagtccatcccggtaggcactatcctggctatcattaccacgagtcttgtgtacttttcctcagtggttttgttcggggcatgcattgaaggcgttgttctaagggacaaatacggggatggagtgtctagaaacctggtggtggggactctcgcatggccctctccctgggtgatcgtgatcggatctttttttagtacttgtggtgccggactccaaagtctgaccggggccccaaggttattgcaggccattgctaaggataatattatccccttcttgcgcgtgttcgggcacggaaaagtcaatggagagcccacatgggccttgctgctcacagccctgattgcagaactcggtatattgatcgctagtctggacatggtggcaccgatcctgagcatgttttttcttatgtgctatttattcgtgaatcttgcctgtgccgtgcagaccctgttgcgaacaccaaattggagaccaagattcaaatactaccactgggccttgtcctttctgggtatgagcctttgcctggctctgatgtttgtgtctagttggtactatgcgctcgtcgccatgcttattgctggcatgatttataagtacattgaatatcaaggtgctgaaaaagagtggggagatggcattcggggccttagccttagcgccgccagatacgctctgcttcggttggaggagggccccccccacacaaaaaactggaggccacagctcttggttctcctgaagctcgacgaggacctccacgtcaaatacccccggctgcttacattcgcctcccaactaaaagccgggaaaggtctcaccatagttggttccgtcatccagggctccttcctggagtcctatggtgaagctcaggctgccgagcagacgccttgcgctgctttgagactgcccacttggccgtgctcatgccccagaacatctccgtctactccagcaaccacctccgccacctggcgagcgacctag

SEQ ID NO: 59334 - DNA, 2343 bp, Artificial Sequence
  derived and/or modified sequence
atgccacactttactgttgtccccgttgatggccctagacgcggtgactacgacaatctcgaagggttgagctgggtcgattacggagaacgggcagagctggatgattccgatggtcacggcaaccacagagaatcttcccccttccttagtcccttggaggccagcagggggatcgattattatgatagaaaccttgcactgtttgaagaagagctagatatccggccaaaggtgtcttcattgctcggcaagctggttagctacaccaatctgactcagggggcaaaagagcacgaggaggccgagtcaggcgagggcacacgacgccgagctgccgaagccccatcaatgggaactctgatgggcgtgtacttgccatgccttcagaatatctttggggtcattcttttcctgcgtctgacttggatggtcggtactgcaggtgtgctccaggccttgctgatagttctgatctgctgttgctgcaccctgcttaccgcaattagcatgtctgccatcgcaacgaacggtgtggtgcccgcaggagggagctactttatgatttcccggtctctcgggcctgagttcgggggtgccgtgggcctgtgtttttaccttggaactacattcgcagcagctatgtacattctgggggcaatcgagatcctccttacctatatcgcaccacctgctgcaatattctaccccagtggcgcacacgatactagcaacgccactttgaacaatatgcgagtctacggcaccatcttcctaaccttcatgacacttgtggtgttcgttggggtaaagtatgttaataaatttgcaagtctgtttctggcctgcgtgatcatcagcatcttatcaatttacgcaggagggatcaaatccatctttgatcctccagtgtttcctgtttgcatgctcggaaacagaaccctgtcgagagatcagttcgacatttgcgccaaaaccgcggtcgtcgacaatgagactgttgccacgcagctttggtcatttttttgtcacagtcccaatctgacaacagatagctgtgatccctacttcatgcttaacaatgtgacggaaatccctggcattccaggagcagctgccggagtattgcaggaaaatctgtggagtgcctacctggaaaagggtgatattgtcgaaaaacacggattaccttccgctgacgccccaagcctgaaagaaagtctgccactgtacgttgtcgccgacatagctacttccttcacggttttagtcggaattttctttccctcagttaccggaattatggctggctcaaatagatcaggggatctaagggatgcacagaagtccatacctgtggggactatactcgcgatcatcaccacctctctggtgtacttttcctctgtagttctgttcggcgcatgcatcgaaggagtagtcctcagggataagtacggtgacggagtctcacgaaacctggtggtaggcaccctcgcctggcctagcccttgggttattgtgataggttccttcttctcaacttgcggcgctggtctgcagtccttgacaggagccccacggctcctgcaggccattgccaaagataacatcattccctttctcagggtgttcgggcacgggaaggtgaatggcgagcctacctgggcgctgcttctgactgccctgatagctgaactgggcatcctcatcgccagtttggacatggtcgctcctattctgtccatgttcttcctgatgtgctacctgtttgtcaatctcgcctgtgccgttcaaactttgctgagaactcctaattggcggcctcgtttcaaatattaccactgggccctgtccttcctaggcatgtcactttgcctggcgctcatgttcgtgtcatcttggtactacgccttggtagctatgctcatagcaggtatgatttacaagtacattgagtaccaaggggctgagaaggagtggggggacgggattcggggactttcactgagcgccgctcgctatgcccttctaaggttggaagagggccctccacacactaaaaactggcgcccacagttactggttctgctgaagctggacgaggacttgcatgtgaagtaccccaggctgctcactttcgcgtctcagttaaaagctgggaagggactcaccatcgtaggatccgtcatccagggttccttcctggagtcttacggggaggcccaggctgccgaacaaacaccatgtgctgccttacggctcccaacctggccgtgctcttgtcctaggacatcaccgtctactccggcaacaacatccgccacctggagagcaacgtag

SEQ ID NO: 59335 - DNA, 3644 bp, Artificial Sequence
  derived and/or modified sequence
ggcggggacagcggcggggacagcggcgggcggctgggacggcgggtgcggcggggccgagcccgcacgatgcctcacttcaccgtggtgccagtggacgggccgaggcgcggcgactatgacaacctcgaggggctcagttgggtggactacggggagcgcgccgagctggatgactcggacggacatggcaaccacagagagagcagcccttttctttcccccttggaggcttccagaggaattgactactatgacaggaacctggcactgtttgaggaagagctggacatccgcccaaaggtatcgtctcttctgggaaagctcgtcagctacaccaacctcacccagggcgccaaagagcatgaggaggccgagagtggggagggcacccgccggagggcagccgaggcacccagcatgggcaccctcatgggggtgtacctgccctgcctgcagaatatctttggggttatcctcttcctgcggctgacctggatggtgggcacagcaggtgtgctacaggccctcctcatcgtgcttatctgctgctgttgtaccctgctgacggccatctccatgagtgccatcgccaccaacggtgtggttccagctgggggctcctatttcatgatctctcgttcactggggccagaatttggaggtgctgtgggcctgtgcttctacctgggaacaacattcgcagcagccatgtacatcctgggggccatcgagatcttgctgacctacattgccccaccagctgccattttttacccatcgggtgctcatgacacgtcgaatgccactttgaacaatatgcgtgtgtatgggaccattttcctgaccttcatgaccctggtggtgtttgtgggggtcaagtatgtgaacaaatttgcctcgctcttcctggcctgtgtgatcatctccatcctctccatctatgctgggggcataaagtctatatttgaccctcccgtgtttccggtatgcatgctgggcaacaggaccctgtcccgggaccagtttgacatctgtgccaagacagctgtagtggacaatgagacagtggccacccagctatggagtttcttctgccacagccccaaccttacgaccgactcctgtgacccctacttcatgctcaacaatgtgaccgagatccctggcatccccggggcagctgctggtgtgctccaggaaaacctgtggagcgcctacctggagaagggtgacatcgtggagaagcatgggctgccctccgcagatgccccgagcctgaaggagagcctgcctctgtacgtggtcgctgacatcgccacatccttcaccgtgctggtcggcatcttcttcccttctgtaacaggcatcatggctggctcaaaccgctctggggaccttcgtgacgcccagaagtctatccctgtggggaccattctggccatcattacaacttccctcgtgtacttcagcagtgtggttctctttggtgcctgcattgagggtgtggttctccgggacaagtatggcgatggtgtcagcaggaacttggtggtgggcacactggcctggccttcaccctgggtcatcgtcatcggctccttcttttcaacgtgtggcgctggcctccagagcctcacaggggcaccacgcctattgcaggccattgccaaggacaacatcatccccttcctccgggtgtttggccacgggaaggtgaatggtgaacccacatgggcactcctcctgacggcactcatcgccgagctgggcatcctcatcgcctccctcgacatggtggcccccatcttatccatgttctttctgatgtgctacctgttcgtgaacctcgcctgtgcggtgcagacactcctgaggacccccaactggcggccccggttcaagtactatcactgggcgctgtccttcctgggcatgagtctctgcctggcccttatgtttgtctcctcctggtactatgccctggtggccatgctcatcgccggcatgatctacaaatacatcgagtaccaaggggctgagaaggagtggggtgacgggatccgaggcctgtccctgagcgctgcccgctacgcgctgttgcggctggaggaggggcctcctcacaccaagaactggcggccgcagctgctggtgctgctgaagctggacgaggacctccacgtgaagtacccgcggctcctcaccttcgcctcccagctcaaggctggcaagggcctgaccattgttggttctgtcatccaggggagcttcttggagagctatggcgaggctcaggccgccgagcagacaccgtgcgctgcactacggctgcccacctggccctgctcgtgcccaagaacatcgccttctaccccagcaaccacgagcgctacctggagggccacatagacgtgtggtggatcgtgcacgatggtggcatgctcatgcttctgcccttcctgctgcgccagcataaggtctggaggaagtgccggatgcgcatcttcacagtggcccagatggatgacaacagcatccagatgaagaaggacctggctgtctttctgtaccatctgcgccttgaggccgaggtggaggtggtggagatgcataacagtgacatctctgcatacacctacgagcggacgctgatgatggagcagcggtcgcagatgctgcggcagatgagactgaccaagactgagcgggagcgagaagcccagctggtcaaggatcggcactcggccctgcggctggagagcctgtactcggacgaggaagatgagtctgcagtgggggctgacaagatccagatgacgtggaccagggacaagtacatgactgagacctgggaccccagccatgcccctgacaatttccgggagctggtgcacattaagccggaccaatccaatgtgcggcgcatgcacactgctgtgaagctcaatgaagtcattgtcacgcgctcccacgacgcccgcctggttctcctaaacatgcctggcccacccaggaacagtgagggcgacgagaactacatggagttcctcgaggtgctgaccgagggccttgagcgggtgctgttggtgcgcggtggtggccgtgaagtcatcaccatctactcctgagcccagtgtcatcttgtggcctggagtcgaggtcttggccaggacataacaagctgtggtctggggtaacagcctcttcccagcacccacctgccagccctgcttgcctggccctgtcctggacccagctttgctaggtctccttggaaaccaggcctgggcctcaaaatggagatggatcccaggtcttgtgggaccctgggatgtttggggactttactatctagcaccccagtaggcctgtcctggccagagaagactggtaggggccgagtggggtttgaaggcagccggcccggcccagcccaggagcgctatttattgcatatttattgtttggatgtcaccatcagagacgaagggaagggtagccagggagggagtccagcccagctgcctgcaggaagatctggctcagtctactatgggcagggccccccaccaagctgagccgaatggagacagctgagctgaggcctgactttttcaataaaacattgtgtagttctgggc

SEQ ID NO: 59336 - DNA, 2343 bp, Artificial Sequence
  derived and/or modified sequence
atgccccacttcaccgtggtgcccgtggacggccccagaagaggcgactacgacaacctggagggcctgagctgggtggactacggcgagagagccgagctggacgacagcgacggccacggcaaccacagagagagcagccccttcctgagccccctggaggccagcagaggcatcgactactacgacagaaacctggccctgttcgaggaggagctggacatcagacccaaggtgagcagcctgctgggcaagctggtgagctacaccaacctgacccagggcgccaaggagcacgaggaggccgagagcggcgagggcaccagaagaagagccgccgaggcccccagcatgggcaccctgatgggcgtgtacctgccctgcctgcagaacatcttcggcgtgatcctgttcctgagactgacctggatggtgggcaccgccggcgtgctgcaggccctgctgatcgtgctgatctgctgctgctgcaccctgctgaccgccatcagcatgagcgccatcgccaccaacggcgtggtgcccgccggcggcagctacttcatgatcagcagaagcctgggccccgagttcggcggcgccgtgggcctgtgcttctacctgggcaccaccttcgccgccgccatgtacatcctgggcgccatcgagatcctgctgacctacatcgccccccccgccgccatcttctaccccagcggcgcccacgacaccagcaacgccaccctgaacaacatgagagtgtacggcaccatcttcctgaccttcatgaccctggtggtgttcgtgggcgtgaagtacgtgaacaagttcgccagcctgttcctggcctgcgtgatcatcagcatcctgagcatctacgccggcggcatcaagagcatcttcgacccccccgtgttccccgtgtgcatgctgggcaacagaaccctgagcagagaccagttcgacatctgcgccaagaccgccgtggtggacaacgagaccgtggccacccagctgtggagcttcttctgccacagccccaacctgaccaccgacagctgcgacccctacttcatgctgaacaacgtgaccgagatccccggcatccccggcgccgccgccggcgtgctgcaggagaacctgtggagcgcctacctggagaagggcgacatcgtggagaagcacggcctgcccagcgccgacgcccccagcctgaaggagagcctgcccctgtacgtggtggccgacatcgccaccagcttcaccgtgctggtgggcatcttcttccccagcgtgaccggcatcatggccggcagcaacagaagcggcgacctgagagacgcccagaagagcatccccgtgggcaccatcctggccatcatcaccaccagcctggtgtacttcagcagcgtggtgctgttcggcgcctgcatcgagggcgtggtgctgagagacaagtacggcgacggcgtgagcagaaacctggtggtgggcaccctggcctggcccagcccctgggtgatcgtgatcggcagcttcttcagcacctgcggcgccggcctgcagagcctgaccggcgcccccagactgctgcaggccatcgccaaggacaacatcatccccttcctgagagtgttcggccacggcaaggtgaacggcgagcccacctgggccctgctgctgaccgccctgatcgccgagctgggcatcctgatcgccagcctggacatggtggcccccatcctgagcatgttcttcctgatgtgctacctgttcgtgaacctggcctgcgccgtgcagaccctgctgagaacccccaactggagacccagattcaagtactaccactgggccctgagcttcctgggcatgagcctgtgcctggccctgatgttcgtgagcagctggtactacgccctggtggccatgctgatcgccggcatgatctacaagtacatcgagtaccagggcgccgagaaggagtggggcgacggcatcagaggcctgagcctgagcgccgccagatacgccctgctgagactggaggagggccccccccacaccaagaactggagaccccagctgctggtgctgctgaagctggacgaggacctgcacgtgaagtaccccagactgctgaccttcgccagccagctgaaggccggcaagggcctgaccatcgtgggcagcgtgatccagggcagcttcctggagagctacggcgaggcccaggccgccgagcagaccccctgcgccgccctgagactgcccacctggccctgcagctgccccagaaccagccccagcacccccgccaccaccagcgccacctggagagccacctag

SEQ ID NO: 59337 - protein, 1087 aa, Artificial Sequence
  derived and/or modified sequence
MRAGGACRPGAAGTAAGTAAGGWDGGCGGAEPARCLTSPWCQWTGRGAATMTTSRGSVGWTTGSAPSWMTRTEELDIRPKVSSLLGKLVSYTNLTQGAKEHEEAESGEGTRRRAAEAPSMGTLMGVYLPCLQNIFGVILFLRLTWMVGTAGVLQALLIVLICCCCTLLTAISMSAIATNGVVPAGGSYFMISRSLGPEFGGAVGLCFYLGTTFAAAMYILGAIEILLTYIAPPAAIFYPSGAHDTSNATLNNMRVYGTIFLTFMTLVVFVGVKYVNKFASLFLACVIISILSIYAGGIKSIFDPPVFPVCMLGNRTLSRDQFDICAKTAVVDNETVATQLWSFFCHSPNLTTDSCDPYFMLNNVTEIPGIPGAAAGVLQENLWSAYLEKGDIVEKHGLPSADAPSLKESLPLYVVADIATSFTVLVGIFFPSVTGIMAGSNRSGDLRDAQKSIPVGTILAIITTSLVYFSSVVLFGACIEGVVLRDKYGDGVSRNLVVGTLAWPSPWVIVIGSFFSTCGAGLQSLTGAPRLLQAIAKDNIIPFLRVFGHGKVNGEPTWALLLTALIAELGILIASLDMVAPILSMFFLMCYLFVNLACAVQTLLRTPNWRPRFKYYHWALSFLGMSLCLALMFVSSWYYALVAMLIAGMIYKYIEYQGAEKEWGDGIRGLSLSAARYALLRLEEGPPHTKNWRPQLLVLLKLDEDLHVKYPRLLTFASQLKAGKGLTIVGSVIQGSFLESYGEAQAAEQTIKNMMEIEKVKGFCQVVVASKVREGLAHLIQSCGLGGMRHNSVVLGWPYGWRQSEDPRAWKTFIDTVRCTTAAHLALLVPKNIAFYPSNHERYLEGHIDVWWIVHDGGMLMLLPFLLRQHKVWRKCRMRIFTVAQMDDNSIQMKKDLAVFLYHLRLEAEVEVVEMHNSDISAYTYERTLMMEQRSQMLRQMRLTKTEREREAQLVKDRHSALRLESLYSDEEDESAVGADKIQMTWTRDKYMTETWDPSHAPDNFRELVHIKPDQSNVRRMHTAVKLNEVIVTRSHDARLVLLNMPGPPRNSEGDENYMEFLEVLTEGLERVLLVRGGGREVITIYS

SEQ ID NO: 59338 - DNA, 3264 bp, Artificial Sequence
  derived and/or modified sequence
atgcgtgccgggggcgcctgccggccgggtgctgcgggcactgctgccgggaccgcagctggaggttgggacgggggctgtgggggtgcagagcctgcaaggtgtttgaccagcccttggtgccagtggacaggccgtggtgcggccacaatgacaaccagcaggggatcggttggttggactacaggaagcgcaccgagttggatgacacgaactgaggagctggacattcggcctaaagtgagtagcctgctggggaaactggtctcgtataccaatcttacccaaggagcgaaagagcatgaggaggccgaaagtggggaagggacaaggaggagggccgccgaggctccgagcatgggcactctgatgggggtctacctcccatgtctgcagaatatctttggagttattctctttctacgcttaacctggatggtcgggacagccggagttctgcaggcattgttaatagtgctgatatgctgttgttgtaccttgctgactgccattagtatgagtgctatcgctacaaatggcgtggtgccggccggaggctcatattttatgattagcagaagtctgggacccgaatttggaggcgcggttgggctttgcttttacctcgggactacgttcgccgccgccatgtacatacttggagctatagagatcctgttaacttacattgcgccccccgccgctattttctacccctcaggagcccatgacaccagtaacgccaccttgaataacatgcgggtgtacgggaccatcttcctgaccttcatgactctcgttgtctttgtgggagttaagtacgtgaataagttcgcttcactgtttctggcgtgcgtgatcataagcatcctgtccatttatgccggaggcatcaaaagcatcttcgatcctccagtctttccggtctgcatgttggggaaccgtaccctgagtcgagaccagtttgacatatgcgcgaagaccgcagttgtggacaacgagactgtggcaacacagctctggtctttcttctgccactcaccgaacctaacgacagatagctgcgacccatatttcatgcttaataatgtgaccgaaattcccggcatccccggagccgctgccggggtgctgcaggaaaacctgtggtcagcgtatctcgagaaaggtgacattgtggaaaagcatgggcttcctagcgccgatgcaccgagtttgaaagagagcttaccactttacgtggtggccgacatcgctacatcatttactgttcttgtcggcatttttttcccttcggtaaccggtatcatggctgggagcaatagatctggagatctgagggacgctcaaaagtcaattccagtcggcacaatcctggcaatcataacgacttccctggtgtatttctcttccgtggtgctcttcggtgcatgtatcgaaggcgtggtgttacgagataagtatggcgacggggtatcgcgaaacctggtggttgggacactcgcgtggccctctccctgggtcattgtgatcggtagttttttttcaacctgcggcgcaggcctgcagtcattgacaggggctccaagattactccaggccattgctaaggacaatataattccttttcttagagtattcggccacggaaaggtgaacggcgaacctacatgggccttactcctgactgcactaatcgcagaactcggaatcctcattgcatctctagacatggtggctccaattctgagcatgttctttctgatgtgttatctattcgtgaacctggcttgtgccgtccagaccctgctaaggactccaaactggcgaccgcggtttaaatactaccactgggccctgtcctttttaggtatgtccctctgcctggcactgatgtttgtttcttcatggtactatgcacttgtggctatgctaattgccgggatgatctacaagtacattgagtaccagggcgcagaaaaggagtggggggacggaatcaggggcctgagcctttccgctgctcgctacgcactgctacggctggaagagggtcccccacacacaaaaaactggaggccccagctgttagtgctgctgaaactggatgaggatctgcacgttaagtatcccagactgctgacgttcgcttctcagcttaaggccggcaagggattaacaatcgtcggctccgtgattcaggggtcatttcttgaaagctatggggaagctcaagccgcagagcagaccatcaagaacatgatggaaatcgagaaagtcaaggggttctgtcaggtggtcgttgcttccaaggtcagggaaggactcgcccacctgatccaaagttgtggcttgggcggtatgcggcacaactccgtggtactcggctggccatacggatggagacaaagcgaagaccctagagcttggaagacgtttattgacacggttcggtgcactaccgccgcccacctggctctcctagtacctaaaaacattgccttctacccgtctaaccacgaaagatacctggaaggtcatatcgatgtctggtggatagtccatgacggaggaatgctgatgctgctgcctttcctgttacggcagcacaaagtgtggcgcaaatgtcgcatgcggatattcactgtggcccagatggacgacaatagtattcagatgaagaaggacctcgctgtgtttctttaccacctgagactggaagctgaggtggaagtagttgagatgcacaacagcgacatttccgcctacacatatgaaagaacactgatgatggaacaacgctcacagatgctccgccagatgagacttacaaaaaccgaacgtgaacgggaagcccaattggtaaaagacagacactctgctctgcgtctggagtcactctattctgacgaggaggatgagagcgcagtgggggccgacaaaatccaaatgacctggacccgcgacaaatacatgactgagacgtgggatcccagtcacgcacccgacaatttccgagaactagtgcatattaagcccgatcagagcaacgtgcgacgcatgcacaccgcagtgaagctgaacgaggtgatcgtgacccgctcccacgatgctcgcttagtgctgctcaacatgcctgggccgccacgcaattccgagggtgatgaaaactacatggaatttctggaggtgcttacagagggcctggaacgagtgttactggtccggggaggcgggcgagaagtcattacaatctatagttag

SEQ ID NO: 59339 - DNA, 3264 bp, Artificial Sequence
  derived and/or modified sequence
atgagagctggaggagcctgcaggcctggagctgctggaacagctgctggaacagctgctgggggctgggatggcggctgcggcggcgctgagcccgcccgctgcctgaccagcccctggtgccagtggacaggccgcggggccgccaccatgaccaccagccggggctctgtgggctggaccaccggcagcgcccccagctggatgaccaggacagaggagctggacatccggcccaaggtgagcagcctgctgggcaagctggtgtcctacaccaacctgacccagggcgccaaggagcacgaggaggccgagagcggggagggcacccggcggcgggctgctgaggcccccagcatgggcaccctgatgggcgtgtacctgccctgcctgcagaacatctttggagtcatcctcttcctgcggctgacctggatggtgggcacagctggggtgctgcaggccctgctgattgtgctgatctgctgctgctgcaccctgctgacagccatctccatgtctgccatcgccaccaatggagtggtgcctgctgggggcagctacttcatgatcagccgcagcctgggccctgagtttggaggagctgtgggcctgtgcttctacctgggcaccacctttgctgctgccatgtacatcctgggcgccatcgagatcctgctgacctacatcgcccccccagctgccatcttctaccccagcggggcccatgacaccagcaatgccaccctgaacaacatgagggtgtatggcaccatcttcctgaccttcatgaccctggtggtgtttgtgggcgtgaagtatgtgaacaagtttgccagcctcttcctggcctgtgtgatcatcagcatcctgagcatctatgccggcggcatcaagagcatctttgacccccctgtgtttcctgtgtgcatgctgggcaacagaaccctgagccgggaccagtttgacatctgtgccaagacagctgtggtggacaatgaaacagtggccacccagctgtggagcttcttctgccacagccccaacctgaccacagacagctgtgacccctacttcatgctgaacaacgtgacagagatccctggcatccctggagctgctgctggggtgctgcaggagaacctgtggagcgcctacctggagaagggggacatcgtggagaagcacggcctgcccagcgcagatgcccccagcctgaaggagagcctgcccctgtatgtggtggccgacatcgccaccagcttcaccgtgctggtgggcatcttcttccccagcgtgacaggcatcatggccggcagcaacagaagtggggacctgagagatgcccagaagagcatccctgtgggcaccatcctggccatcatcaccaccagcctggtgtacttcagctctgtggtgctgtttggagcctgcattgaaggagtggtgctgcgggacaagtatggagatggagtgtccaggaacctggtggtgggcaccctggcctggcccagcccctgggtgattgtgattggcagcttcttcagcacctgtggggccggcctgcagagcctgaccggggccccccggctgctgcaggccatcgccaaggacaacatcatccccttcctgcgggtgtttggacatggcaaggtgaatggagagcccacctgggccctgctgctgacagccctgattgctgagctgggcatcctgattgccagcctggacatggtggcccccatcctgtccatgttcttcctgatgtgctacctgtttgtgaacctggcctgtgctgtgcagaccctgctgcggacccccaactggaggccccgcttcaagtactaccactgggccctgtccttcctgggcatgagcctgtgcctggccctgatgtttgtgtcctcctggtactatgccctggtggccatgctgattgctggcatgatctacaagtacatcgagtaccagggcgctgagaaggagtggggagatggcatccggggcctgagcctgtctgctgcccgctatgccctgctgcggctggaggagggccccccccacaccaagaactggaggccccagctgctggtgctgctgaagctggatgaggacctgcacgtgaagtacccccggctgctgacctttgccagccagctgaaggccggcaagggcctgaccatcgtgggcagcgtcatccagggcagcttcctggagagctatggagaggcccaggccgctgagcagaccatcaagaacatgatggagattgagaaggtgaagggcttctgccaggtggtggtggccagcaaggtgcgggagggcctggcccacctgatccagagctgtggcctgggcggcatgaggcacaacagcgtggtgctgggctggccctacggctggaggcagagcgaggacccccgggcctggaagaccttcatcgacacagtgcgctgcaccacagctgcccacctggccctgctggtgcccaagaacatcgccttctaccccagcaaccacgagcgctacctggagggccacattgatgtgtggtggatcgtgcatgatggcggcatgctgatgctgctgcccttcctgctgcggcagcacaaggtgtggaggaaatgtaggatgaggatcttcaccgtggcccagatggatgacaacagcatccagatgaagaaggacctggccgtgttcctgtaccacctgcggctggaggccgaggtggaggtggtggagatgcacaacagcgacatcagcgcctacacctatgaaagaaccctgatgatggagcagaggagccagatgctgcggcagatgaggctgaccaagacagagcgggagcgggaggcccagctggtgaaggacagacacagcgccctgcggctggagagcctgtacagtgatgaggaggatgaatctgctgtgggcgctgacaagatccagatgacctggacccgggacaagtacatgacagagacctgggaccccagccacgccccagacaacttccgggagctggtgcacatcaagccagaccagagcaatgtgcggaggatgcacacagctgtgaagctgaatgaggtgattgtgaccaggagccatgatgcccggctggtgctgctgaacatgcctggcccccccaggaacagtgaaggagatgagaactacatggagttcctggaggtgctgacagagggcctggagcgggtgctgctggtgcggggcggcggccgggaggtgatcaccatctacagctag

SEQ ID NO: 59340 - DNA, 3264 bp, Artificial Sequence
  derived and/or modified sequence
atgcgggccggcggcgcctgccggcccggcgccgccggcaccgccgctgggactgctgctggcggatgggacggcggctgtggcggcgctgagcccgccagatgtttgaccagcccctggtgccagtggactgggcgcggcgcggccacaatgactaccagccgcggcagcgtgggctggacgaccgggagcgcaccttcctggatgactcggacagaagagttagatattcgccccaaagtttccagtctgctgggcaagcttgtctcttatacaaatctgactcagggtgcaaaggagcacgaggaagccgaatcgggcgaggggacacgtcgccgtgcagccgaggctcctagcatgggcacgctcatgggggtgtaccttccgtgtctccagaatatcttcggcgtgatcctgttcctgagactgacgtggatggtgggtacggccggtgtgctgcaggccctgctgattgtcctgatctgttgctgttgtaccctactgaccgccatttcaatgtctgcaatagccactaatggcgtggtcccggccggcggctcctatttcatgatcagtcgtagcctgggtcccgaatttgggggtgccgtaggtctgtgcttctatctcggcaccactttcgctgcggcaatgtacattctgggggccattgagatactcctgacctatatcgctcccccagctgctatcttctatccttccggggcccacgacactagtaacgctacactcaataatatgagggtatacggcaccatcttcctcacattcatgaccctggtggtgtttgtcggcgtcaaatatgtaaacaaatttgcaagtctcttcctggcctgtgtcatcatctctatcctcagcatctatgccggaggcattaaaagtatcttcgacccgcccgttttcccggtgtgtatgttaggaaacaggaccttgtctagggatcagttcgatatctgcgcaaaaacggccgtcgtagataatgaaacggtcgccacacagctgtggagtttcttttgccactccccaaacttgactaccgacagttgtgacccctattttatgctgaataatgtgacggagataccaggtattccaggggccgccgccggcgttcttcaggaaaatctttggtccgcctacctcgaaaagggtgacatcgtggagaagcacggcctgcccagtgctgacgccccatcgctaaaggagagcctccctctgtatgttgtagctgacatagctacgtcatttaccgttctagtcggcatcttctttccgtccgtgaccggaataatggcgggaagcaacagatccggcgatctcagggacgcccagaagagcattcctgtggggactatactggctatcattacaaccagcctggtttatttctctagcgtggtcctcttcggagcttgcatagaaggtgtagttttgagagacaaatacggcgatggagtcagtagaaatctggtcgttggcacccttgcttggccttccccctgggttattgttatcggcagctttttcagtacttgcggagccggcctgcaatctctgaccggagctcctcgcctactgcaggctattgcaaaggacaacattatccctttccttcgcgtgtttgggcatggaaaagtgaatggcgagcccacttgggcactgcttctaaccgcacttatcgctgaattgggcatactgatcgcttcactggacatggtcgcccctatactgagcatgttctttctcatgtgctacctgtttgttaatctcgcttgcgcagttcagactctgcttcggactccaaattggaggccccgttttaaatactatcactgggcgctttcattcttgggtatgagtctttgcttggctctgatgtttgtgtctagttggtattacgccctagtggctatgcttattgcaggaatgatctacaaatacatcgagtaccagggggccgagaaagaatggggtgacgggatcaggggtctgtccttgtccgccgccagatatgctctcctccggctcgaggagggtccaccacacacaaagaactggcgcccccagctgcttgttcttctgaaactggatgaagacctgcatgtcaagtatcctagactacttacatttgcctcccagctgaaggctggcaaaggacttaccattgttggtagtgtgatacaaggctcatttctggaaagttacggcgaggctcaggccgccgaacagacaattaaaaacatgatggagattgaaaaggtgaaagggttttgccaggtggtggtggcttcgaaggtgcgcgaaggtctagcccacctgatccagtcctgtggactgggagggatgcgccataactcagtggtgcttggctggccatatgggtggcgacagtctgaagatccacgtgcatggaagacctttatcgacacagtgagatgcaccaccgctgcccacctggcacttctggtacccaagaacattgcattttacccaagcaaccatgagcgatacctggaaggtcacatcgatgtgtggtggatcgtgcacgatggcggtatgcttatgctgctgccatttttacttagacagcacaaggtgtggcggaaatgcagaatgcgcattttcactgttgcacagatggacgacaattccattcagatgaaaaaagaccttgccgtgtttttataccatctcaggctggaagccgaagtcgaggtggtcgagatgcataattccgacatttctgcttatacctacgagcgcaccctgatgatggaacaacgctcccagatgttgagacaaatgagattaaccaaaaccgagagggaaagagaggcccagcttgtgaaggaccgccattcggccctgagactggagtctctgtactccgacgaggaggatgagtccgccgtcggagcagacaaaatacagatgacgtggactagggacaagtacatgacagagacctgggatcccagtcacgccccagacaattttagggagctggttcacatcaagccagaccagtccaacgtaaggcgaatgcataccgccgtgaagctaaacgaggtgattgtgaccagatctcatgacgcacggctggtgcttctgaacatgcccggacctccacggaacagtgaaggcgacgagaattacatggaattcctggaagtcctgacagaaggacttgagcgggtgctgctggtacgagggggtgggcgcgaggtaatcactatttactcatag

SEQ ID NO: 59341 - DNA, 3264 bp, Artificial Sequence
  derived and/or modified sequence
atgcgtgcgggtggagcatgcaggcccggtgcagctggaactgccgctggcaccgctgcgggtggctgggatggcggttgcggcggagcagagcctgcacgctgcctcacttcaccctggtgccaatggactggaagaggcgctgctaccatgactacaagcaggggtagcgtggggtggaccacaggaagcgcaccttcttggatgacgcgtactgaagaacttgacattagaccgaaggtgtcgtcactccttggcaagctcgtgtcctacacaaatcttacccagggtgcaaaggagcatgaagaagcagaatccggggagggtactcgacggagggccgcagaggctccctctatgggcacattgatgggggtttacttgccctgcctgcaaaatatttttggcgtgattcttttcttgcggctgacttggatggtgggcaccgccggagtcttgcaagctctcctgattgtgctgatctgttgttgctgtacgctcctcacagccattagtatgtcggctatcgcaaccaacggggtggtgccagccggaggatcctactttatgatctcacggtctttgggaccagagtttggcggtgcggtagggctatgtttctacttgggcacaacctttgccgcagctatgtatattctgggggctattgagatcctgttgacttacatcgcgcctccggctgccatcttttacccatccggtgcgcacgacacaagtaacgccaccctgaataatatgcgtgtatatggtaccatttttttaacttttatgacactcgtggtgttcgtaggcgtgaagtacgtgaataaattcgcctcactctttcttgcctgtgtgattatttccatcctctctatctatgccggtggcattaagagcattttcgatcccccagtttttcccgtttgtatgttgggaaatcgcaccttgtcaagagaccagttcgacatctgcgctaagacagcagtagtggacaacgaaacagttgcaactcaactgtggtcgttcttctgtcattcccctaatctaacgacagacagctgcgacccatacttcatgctgaacaatgtgacagaaatcccaggcatccctggagccgctgccggagtcttgcaagagaatctgtggagcgcttacctggaaaaaggtgacatcgtagaaaaacatggccttccaagtgcggatgctccctccctcaaagaatccctgcctctgtacgtcgttgctgatattgccacatctttcaccgtgttagtgggtatttttttcccatccgttaccggaatcatggctggctccaatcgctctggcgatctgagggacgcacaaaagtctatccctgtgggtactattttggcaatcatcacaacctcgctagtgtatttctcttctgtagttcttttcggtgcatgcatcgaaggtgtggtgttaagggacaaatatggagacggggtcagcaggaaccttgtggtgggaacattggcctggccgtcaccctgggtgattgttatcggaagcttttttagcacctgcggagctggtcttcaaagcctgactggagctcctcgcctgctgcaggccattgccaaggataatatcatcccttttctgcgcgtgttcggtcacggaaaggtgaatggagagccgacctgggctcttctgctgactgctctgatcgctgagttgggtatacttatcgcttccttggacatggtcgcaccaatcctgagcatgtttttcctaatgtgctacctgttcgtgaatctggcctgcgccgtgcagacactcctccggacacctaattggagacccagattcaaatattatcactgggcactttcctttctggggatgtctctctgtctagccttgatgttcgtctccagttggtactacgcgctcgtagctatgctgatcgccggaatgatctacaagtacatcgagtaccagggcgctgagaaggaatggggagacggcattagaggcctaagtctatctgcggcacgatacgcgttgctcagattggaagagggcccaccccacacaaagaattggcgcccacagcttttagtgttattgaaattagacgaagaccttcatgttaagtaccctagactactgacctttgcttctcaactcaaagccggaaaagggctgaccatcgtggggagcgtgattcaaggctcatttctcgagtcttacggcgaagcccaggctgccgaacagactatcaagaatatgatggagatcgaaaaagtgaaagggttttgtcaggtcgtcgtggcttcaaaggtaagggaggggctggctcatttaatccagtcatgtggtctcggcggaatgagacataactcagttgttctaggttggccctatggatggcggcagagtgaggaccctcgagcctggaagacgtttatcgacactgtacggtgcaccactgcagcccatctggccctcctcgtacccaagaatattgcattctatccgtcaaaccacgagaggtacctggaagggcatattgacgtctggtggatcgtgcacgacggagggatgctgatgctcctgccctttttgcttaggcagcataaggtctggcgcaagtgtaggatgagaattttcacggttgcccagatggatgataactccatccaaatgaagaaagacctggccgtgttcctatatcacctgaggctggaagccgaagtggaggtggtggagatgcataactcagacatctccgcctacacgtacgaacgtacacttatgatggaacaaagatcacagatgctgaggcagatgagactgactaagactgagcgggagcgggaagcccagcttgtaaaggataggcatagcgcgctgaggctagaatctttgtacagcgatgaagaggatgaaagtgccgtgggagccgacaagattcaaatgacgtggactcgggataagtacatgaccgagacatgggatccatcacacgccccagataatttcagggagctggtccacataaaaccagaccagtctaacgtcaggcgcatgcacaccgccgtgaagctgaatgaagtgattgtaaccagaagccatgacgcgaggctggtcttgctgaacatgcccggacctcctaggaactcagagggtgatgagaattatatggagtttctcgaggtgctcaccgaaggacttgagagagtcctcctggtccgaggcggaggtagagaggttataactatctacagttag

SEQ ID NO: 59342 - DNA, 4670 bp, Artificial Sequence
  derived and/or modified sequence
cccggggggcgggcggaggaagtgagcgcagcggggaggaatgcgagcgggcggggcgtgtcggcccggggcggcggggacagcggcggggacagcggcgggcggctgggacggcgggtgcggcggggccgagcccgcacgatgcctcacttcaccgtggtgccagtggacgggccgaggcgcggcgactatgacaacctcgaggggctcagttgggtggactacggggagcgcgccgagctggatgactcggacggaagagctggacatccgcccaaaggtatcgtctcttctgggaaagctcgtcagctacaccaacctcacccagggcgccaaagagcatgaggaggccgagagtggggagggcacccgccggagggcagccgaggcacccagcatgggcaccctcatgggggtgtacctgccctgcctgcagaatatctttggggttatcctcttcctgcggctgacctggatggtgggcacagcaggtgtgctacaggccctcctcatcgtgcttatctgctgctgttgtaccctgctgacggccatctccatgagtgccatcgccaccaacggtgtggttccagctgggggctcctatttcatgatctctcgttcactggggccagaatttggaggtgctgtgggcctgtgcttctacctgggaacaacattcgcagcagccatgtacatcctgggggccatcgagatcttgctgacctacattgccccaccagctgccattttttacccatcgggtgctcatgacacgtcgaatgccactttgaacaatatgcgtgtgtatgggaccattttcctgaccttcatgaccctggtggtgtttgtgggggtcaagtatgtgaacaaatttgcctcgctcttcctggcctgtgtgatcatctccatcctctccatctatgctgggggcataaagtctatatttgaccctcccgtgtttccggtatgcatgctgggcaacaggaccctgtcccgggaccagtttgacatctgtgccaagacagctgtagtggacaatgagacagtggccacccagctatggagtttcttctgccacagccccaaccttacgaccgactcctgtgacccctacttcatgctcaacaatgtgaccgagatccctggcatccccggggcagctgctggtgtgctccaggaaaacctgtggagcgcctacctggagaagggtgacatcgtggagaagcatgggctgccctccgcagatgccccgagcctgaaggagagcctgcctctgtacgtggtcgctgacatcgccacatccttcaccgtgctggtcggcatcttcttcccttctgtaacaggcatcatggctggctcaaaccgctctggggaccttcgtgacgcccagaagtctatccctgtggggaccattctggccatcattacaacttccctcgtgtacttcagcagtgtggttctctttggtgcctgcattgagggtgtggttctccgggacaagtatggcgatggtgtcagcaggaacttggtggtgggcacactggcctggccttcaccctgggtcatcgtcatcggctccttcttttcaacgtgtggcgctggcctccagagcctcacaggggcaccacgcctattgcaggccattgccaaggacaacatcatccccttcctccgggtgtttggccacgggaaggtgaatggtgaacccacatgggcactcctcctgacggcactcatcgccgagctgggcatcctcatcgcctccctcgacatggtggcccccatcttatccatgttctttctgatgtgctacctgttcgtgaacctcgcctgtgcggtgcagacactcctgaggacccccaactggcggccccggttcaagtactatcactgggcgctgtccttcctgggcatgagtctctgcctggcccttatgtttgtctcctcctggtactatgccctggtggccatgctcatcgccggcatgatctacaaatacatcgagtaccaaggggctgagaaggagtggggtgacgggatccgaggcctgtccctgagcgctgcccgctacgcgctgttgcggctggaggaggggcctcctcacaccaagaactggcggccgcagctgctggtgctgctgaagctggacgaggacctccacgtgaagtacccgcggctcctcaccttcgcctcccagctcaaggctggcaagggcctgaccattgttggttctgtcatccaggggagcttcttggagagctatggcgaggctcaggccgccgagcagaccatcaagaacatgatggaaattgagaaggtgaagggcttctgccaggtggtggtggccagcaaggtgcgggaggggctggcccacctcatccagtcctgtggcctgggaggcatgcggcataactccgtggtgctgggctggccctacggctggcgacagagcgaggacccccgtgcctggaagaccttcattgacaccgtgcgctgcactacggctgcccacctggccctgctcgtgcccaagaacatcgccttctaccccagcaaccacgagcgctacctggagggccacatagacgtgtggtggatcgtgcacgatggtggcatgctcatgcttctgcccttcctgctgcgccagcataaggtctggaggaagtgccggatgcgcatcttcacagtggcccagatggatgacaacagcatccagatgaagaaggacctggctgtctttctgtaccatctgcgccttgaggccgaggtggaggtggtggagatgcataacagtgacatctctgcatacacctacgagcggacgctgatgatggagcagcggtcgcagatgctgcggcagatgagactgaccaagactgagcgggagcgagaagcccagctggtcaaggatcggcactcggccctgcggctggagagcctgtactcggacgaggaagatgagtctgcagtgggggctgacaagatccagatgacgtggaccagggacaagtacatgactgagacctgggaccccagccatgcccctgacaatttccgggagctggtgcacattaagccggaccaatccaatgtgcggcgcatgcacactgctgtgaagctcaatgaagtcattgtcacgcgctcccacgacgcccgcctggttctcctaaacatgcctggcccacccaggaacagtgagggcgacgagaactacatggagttcctcgaggtgctgaccgagggccttgagcgggtgctgttggtgcgcggtggtggccgtgaagtcatcaccatctactcctgagcccagtgtcatcttgtggcctggagtcgaggtcttggccaggacataacaagctgtggtctggggtaacagcctcttcccagcacccacctgccagccctgcttgcctggccctgtcctggacccagctttgctaggtctccttggaaaccaggcctgggcctcaaaatggagatggatcccaggtcttgtgggaccctgggatgtttggggactttactatctagcaccccagtaggcctgtcctggccagagaagactggtaggggccgagtggggtttgaaggcagccggcccggcccagcccaggagcgctatttattgcatatttattgtttggatgtcaccatcagagacgaagggaagggtagccagggagggagtccagcccagctgcctgcaggaagatctggctcagtctactatgggcagggccccccaccaagctgagccgaatggagacagctgagctgaggcctgactttttcaataaaacattgtgtagttctgggcctcctgctgccccggctctgtttcccctggcgccaagagaagaaggcggaactgaacccaggcccagagccggctccctgaggctgtgcccctttccggcaatctctggccacaacccccactggccaggccgtccctcccactggccctagggcccctcccactcccacaccagataaggacagcccagtgccgctttctctggcagtaggcaccagggctggaatggggccgcccggctccccatggcagtgggtgacgctgctgctggggctgctgctccctcctgccgcccccttctggctcctcaatgtgctcttccccccgcacaccacgcccaaggctgagctcagtaaccacacacggcccgtcatcctcggtaagcccccaccaggcccctgatgcaccacgccagaccctggggagcctgggccccagcccctggcagctgacctggccaaagcccttctgccctgcataagccccgacataagtacctgccctggtgtggggaggggccaaaagcttgtcccttagaggaatgacgtcccttctcccaccacactgtgactctcagttgtctaacccagggggggcggagtgggggacggggtgtgcctgaggtcttggctggggcatcacaagctgtggtcagtcacagccacaccagactctgggccaagccccaccactccttccttggcccccacccaccaaggacaagatgcccagcccaggatcggtgagcaggagaggcccatccatgcccggcccctattaggcccagcccccatgcccccagacctatctgttcccaccttggactttggcaataaaggagcgccagactggg

SEQ ID NO: 59343 - DNA, 3264 bp, Artificial Sequence
  derived and/or modified sequence
atgagagccggcggcgcctgcagacccggcgccgccggcaccgccgccggcaccgccgccggcggctgggacggcggctgcggcggcgccgagcccgccagatgcctgaccagcccctggtgccagtggaccggcagaggcgccgccaccatgaccaccagcagaggcagcgtgggctggaccaccggcagcgcccccagctggatgaccagaaccgaggagctggacatcagacccaaggtgagcagcctgctgggcaagctggtgagctacaccaacctgacccagggcgccaaggagcacgaggaggccgagagcggcgagggcaccagaagaagagccgccgaggcccccagcatgggcaccctgatgggcgtgtacctgccctgcctgcagaacatcttcggcgtgatcctgttcctgagactgacctggatggtgggcaccgccggcgtgctgcaggccctgctgatcgtgctgatctgctgctgctgcaccctgctgaccgccatcagcatgagcgccatcgccaccaacggcgtggtgcccgccggcggcagctacttcatgatcagcagaagcctgggccccgagttcggcggcgccgtgggcctgtgcttctacctgggcaccaccttcgccgccgccatgtacatcctgggcgccatcgagatcctgctgacctacatcgccccccccgccgccatcttctaccccagcggcgcccacgacaccagcaacgccaccctgaacaacatgagagtgtacggcaccatcttcctgaccttcatgaccctggtggtgttcgtgggcgtgaagtacgtgaacaagttcgccagcctgttcctggcctgcgtgatcatcagcatcctgagcatctacgccggcggcatcaagagcatcttcgacccccccgtgttccccgtgtgcatgctgggcaacagaaccctgagcagagaccagttcgacatctgcgccaagaccgccgtggtggacaacgagaccgtggccacccagctgtggagcttcttctgccacagccccaacctgaccaccgacagctgcgacccctacttcatgctgaacaacgtgaccgagatccccggcatccccggcgccgccgccggcgtgctgcaggagaacctgtggagcgcctacctggagaagggcgacatcgtggagaagcacggcctgcccagcgccgacgcccccagcctgaaggagagcctgcccctgtacgtggtggccgacatcgccaccagcttcaccgtgctggtgggcatcttcttccccagcgtgaccggcatcatggccggcagcaacagaagcggcgacctgagagacgcccagaagagcatccccgtgggcaccatcctggccatcatcaccaccagcctggtgtacttcagcagcgtggtgctgttcggcgcctgcatcgagggcgtggtgctgagagacaagtacggcgacggcgtgagcagaaacctggtggtgggcaccctggcctggcccagcccctgggtgatcgtgatcggcagcttcttcagcacctgcggcgccggcctgcagagcctgaccggcgcccccagactgctgcaggccatcgccaaggacaacatcatccccttcctgagagtgttcggccacggcaaggtgaacggcgagcccacctgggccctgctgctgaccgccctgatcgccgagctgggcatcctgatcgccagcctggacatggtggcccccatcctgagcatgttcttcctgatgtgctacctgttcgtgaacctggcctgcgccgtgcagaccctgctgagaacccccaactggagacccagattcaagtactaccactgggccctgagcttcctgggcatgagcctgtgcctggccctgatgttcgtgagcagctggtactacgccctggtggccatgctgatcgccggcatgatctacaagtacatcgagtaccagggcgccgagaaggagtggggcgacggcatcagaggcctgagcctgagcgccgccagatacgccctgctgagactggaggagggccccccccacaccaagaactggagaccccagctgctggtgctgctgaagctggacgaggacctgcacgtgaagtaccccagactgctgaccttcgccagccagctgaaggccggcaagggcctgaccatcgtgggcagcgtgatccagggcagcttcctggagagctacggcgaggcccaggccgccgagcagaccatcaagaacatgatggagatcgagaaggtgaagggcttctgccaggtggtggtggccagcaaggtgagagagggcctggcccacctgatccagagctgcggcctgggcggcatgagacacaacagcgtggtgctgggctggccctacggctggagacagagcgaggaccccagagcctggaagaccttcatcgacaccgtgagatgcaccaccgccgcccacctggccctgctggtgcccaagaacatcgccttctaccccagcaaccacgagagatacctggagggccacatcgacgtgtggtggatcgtgcacgacggcggcatgctgatgctgctgcccttcctgctgagacagcacaaggtgtggagaaagtgcagaatgagaatcttcaccgtggcccagatggacgacaacagcatccagatgaagaaggacctggccgtgttcctgtaccacctgagactggaggccgaggtggaggtggtggagatgcacaacagcgacatcagcgcctacacctacgagagaaccctgatgatggagcagagaagccagatgctgagacagatgagactgaccaagaccgagagagagagagaggcccagctggtgaaggacagacacagcgccctgagactggagagcctgtacagcgacgaggaggacgagagcgccgtgggcgccgacaagatccagatgacctggaccagagacaagtacatgaccgagacctgggaccccagccacgcccccgacaacttcagagagctggtgcacatcaagcccgaccagagcaacgtgagaagaatgcacaccgccgtgaagctgaacgaggtgatcgtgaccagaagccacgacgccagactggtgctgctgaacatgcccggcccccccagaaacagcgagggcgacgagaactacatggagttcctggaggtgctgaccgagggcctggagagagtgctgctggtgagaggcggcggcagagaggtgatcaccatctacagctag

SEQ ID NO: 59344 - protein, 1079 aa, Artificial Sequence
  derived and/or modified sequence
MAAEGAVCGFVYLEGTAWAVPEDTEPLASCTLGHGNHRESSPFLSPLEASRGIDYYDRNLALFEEELDIRPKVSSLLGKLVSYTNLTQGAKEHEEAESGEGTRRRAAEAPSMGTLMGVYLPCLQNIFGVILFLRLTWMVGTAGVLQALLIVLICCCCTLLTAISMSAIATNGVVPAGGSYFMISRSLGPEFGGAVGLCFYLGTTFAAAMYILGAIEILLTYIAPPAAIFYPSGAHDTSNATLNNMRVYGTIFLTFMTLVVFVGVKYVNKFASLFLACVIISILSIYAGGIKSIFDPPVFPVCMLGNRTLSRDQFDICAKTAVVDNETVATQLWSFFCHSPNLTTDSCDPYFMLNNVTEIPGIPGAAAGVLQENLWSAYLEKGDIVEKHGLPSADAPSLKESLPLYVVADIATSFTVLVGIFFPSVTGIMAGSNRSGDLRDAQKSIPVGTILAIITTSLVYFSSVVLFGACIEGVVLRDKYGDGVSRNLVVGTLAWPSPWVIVIGSFFSTCGAGLQSLTGAPRLLQAIAKDNIIPFLRVFGHGKVNGEPTWALLLTALIAELGILIASLDMVAPILSMFFLMCYLFVNLACAVQTLLRTPNWRPRFKYYHWALSFLGMSLCLALMFVSSWYYALVAMLIAGMIYKYIEYQGAEKEWGDGIRGLSLSAARYALLRLEEGPPHTKNWRPQLLVLLKLDEDLHVKYPRLLTFASQLKAGKGLTIVGSVIQGSFLESYGEAQAAEQTIKNMMEIEKVKGFCQVVVASKVREGLAHLIQSCGLGGMRHNSVVLGWPYGWRQSEDPRAWKTFIDTVRCTTAAHLALLVPKNIAFYPSNHERYLEGHIDVWWIVHDGGMLMLLPFLLRQHKVWRKCRMRIFTVAQMDDNSIQMKKDLAVFLYHLRLEAEVEVVEMHNSDISAYTYERTLMMEQRSQMLRQMRLTKTEREREAQLVKDRHSALRLESLYSDEEDESAVGADKIQMTWTRDKYMTETWDPSHAPDNFRELVHIKPDQSNVRRMHTAVKLNEVIVTRSHDARLVLLNMPGPPRNSEGDENYMEFLEVLTEGLERVLLVRGGGREVITIYS

SEQ ID NO: 59345 - DNA, 3240 bp, Artificial Sequence
  derived and/or modified sequence
atggccgccgaaggggctgtgtgcggcttcgtgtatttagaaggcactgcttgggccgtccctgaagatacggagcctcttgcttcctgcaccttagggcatgggaatcaccgcgagtctagcccattcctatcccctctggaagcctcccgaggaattgactattacgatcgcaatctggctctcttcgaggaggagctcgacatacgccccaaggtgtcctcccttcttggcaaactagttagctacacaaatcttactcagggtgctaaggaacacgaagaggccgagtcaggagagggcacacgccgcagggcagctgaggccccgtcaatggggacactcatgggcgtatatctcccttgtctgcagaatatcttcggagttatcttgtttctgcgcctaacttggatggtaggcactgctggcgtcctccaggccctcctaatcgttctaatttgctgctgctgcactctgttgaccgcgatctcaatgtccgctattgccactaacggagtggtacccgctggaggcagctactttatgatcagccgctccctgggcccagagttcgggggcgcggttggactgtgcttttatctgggcacgacattcgccgctgcgatgtatattttgggcgccatagagatcctgctgacatacatcgcaccccccgctgcaattttttacccctcgggagcgcacgacacttctaacgccaccctgaataacatgcgggtctacggaactatctttttgacttttatgactctggtagtgttcgtgggagtcaaatatgttaataaattcgcctccctctttcttgcctgtgtcatcatatcaatactctctatatatgcaggtgggataaaatcaatattcgacccgcccgtttttccagtttgtatgcttggcaacaggacattgtcccgggatcagtttgacatttgtgccaagactgccgtcgtcgacaatgaaaccgtcgccacccagctgtggagcttcttttgtcactctcccaacctcactaccgattcatgtgacccctactttatgcttaataacgtgaccgagattccgggcattcctggggccgctgccggagtgctccaggagaacctctggagcgcatatctggagaagggtgatatcgtcgagaaacacggtcttccttctgcagatgcccctagtctgaaggaaagtctcccgctttacgttgtggccgatatcgccacgagcttcacagtattggtcggaatcttctttccatctgtcacaggaataatggcagggagtaataggtccggcgatttgagggatgcccaaaagtctatacccgtgggcactattctggcaattattaccacgagccttgtctacttcagctcggtggtgctatttggcgcctgtatcgagggcgtggtattaagagacaagtatggggacggtgtaagcagaaaccttgtggttggaaccctggcatggccttcaccttgggtgatcgtgatcggatccttttttagtacctgcggtgctggtctgcagtctctcacaggtgctccgcggctactgcaagctatcgctaaagacaatatcattcctttcttaagagtgttcggtcacggcaaagtgaatggcgagcccacatgggcactgctgctcactgccttgatcgcagagctcggaattttaatcgcttcacttgacatggttgcgccaatcctgagtatgttctttcttatgtgttatctgttcgtcaacttagcctgtgcagtgcaaacactgttgaggacccccaactggaggccccggttcaaatactatcactgggcccttagcttcttaggcatgtctttgtgcctggccctgatgtttgtttcaagctggtattacgcccttgtggcgatgctcatcgccggcatgatttataaatatatcgagtaccaaggggcagaaaaagaatggggagatggcatacgtggcctgagcctgtccgcagctaggtatgcgctgttaagactggaggagggccctccacacaccaagaattggcgcccccagctgctcgtactcctgaaactggacgaagatctgcatgtgaagtaccctagactgctgaccttcgcgtcccaactaaaggccgggaagggcctgactatcgtggggtccgtcattcaaggcagctttcttgaatcttacggcgaggcacaggccgccgaacagaccattaagaacatgatggaaatagaaaaagtcaaggggttctgtcaagttgtggtggcaagtaaggtacgggaggggttggcccatctcatacagtcttgtggccttggtggaatgcgtcataacagcgtagttctgggctggccttatggctggcggcagtcggaggatccgcgcgcctggaaaacatttattgatactgtacgttgtaccacagcagcacacttagcccttctagtccctaaaaatatcgctttttaccccagcaaccatgaaagatacctggagggccatatcgatgtgtggtggattgtgcacgacggaggaatgctgatgctgctgcccttcctgctaagacagcataaggtgtggagaaaatgtagaatgcgcattttcactgttgcacagatggacgataattcaattcagatgaagaaggatctggctgtattcctgtatcacctgcggctcgaagctgaggtagaggtcgtagaaatgcacaactctgacatcagtgcatatacttacgagagaacattgatgatggagcagcggagtcagatgcttcgacagatgcggctgaccaaaacagagcgcgagcgggaagcacaacttgtcaaggaccggcactcagccctaaggctggaatcactctactctgacgaagaagacgaatctgccgtgggagccgataagatccagatgacctggactagggataagtacatgactgaaacttgggatccttcccatgctccggacaactttagagaactggttcacattaaaccagaccagagcaacgtgcgacggatgcatacggcagtgaagctgaatgaagttatagtgaccagatcccacgatgcccggctggtattgctgaatatgcctggtccccccaggaattccgaaggtgacgagaattacatggaattcttagaggttctcaccgagggcctggaaagagtcctacttgtgcggggcgggggccgtgaagtaataactatctattcttag

SEQ ID NO: 59346 - DNA, 3240 bp, Artificial Sequence
  derived and/or modified sequence
atggctgctgagggcgctgtgtgtggctttgtgtacctggagggcacagcctgggccgtgcctgaggacacagagcccctggccagctgcaccctgggccacggcaaccaccgggagagcagccccttcctgagccccctggaggccagccggggcatcgactactatgacaggaacctggccctgtttgaggaggagctggacatccggcccaaggtgagcagcctgctgggcaagctggtgtcctacaccaacctgacccagggcgccaaggagcacgaggaggccgagagcggggagggcacccggcggcgggctgctgaggcccccagcatgggcaccctgatgggcgtgtacctgccctgcctgcagaacatctttggagtcatcctcttcctgcggctgacctggatggtgggcacagctggggtgctgcaggccctgctgattgtgctgatctgctgctgctgcaccctgctgacagccatctccatgtctgccatcgccaccaatggagtggtgcctgctgggggcagctacttcatgatcagccgcagcctgggccctgagtttggaggagctgtgggcctgtgcttctacctgggcaccacctttgctgctgccatgtacatcctgggcgccatcgagatcctgctgacctacatcgcccccccagctgccatcttctaccccagcggggcccatgacaccagcaatgccaccctgaacaacatgagggtgtatggcaccatcttcctgaccttcatgaccctggtggtgtttgtgggcgtgaagtatgtgaacaagtttgccagcctcttcctggcctgtgtgatcatcagcatcctgagcatctatgccggcggcatcaagagcatctttgacccccctgtgtttcctgtgtgcatgctgggcaacagaaccctgagccgggaccagtttgacatctgtgccaagacagctgtggtggacaatgaaacagtggccacccagctgtggagcttcttctgccacagccccaacctgaccacagacagctgtgacccctacttcatgctgaacaacgtgacagagatccctggcatccctggagctgctgctggggtgctgcaggagaacctgtggagcgcctacctggagaagggggacatcgtggagaagcacggcctgcccagcgcagatgcccccagcctgaaggagagcctgcccctgtatgtggtggccgacatcgccaccagcttcaccgtgctggtgggcatcttcttccccagcgtgacaggcatcatggccggcagcaacagaagtggggacctgagagatgcccagaagagcatccctgtgggcaccatcctggccatcatcaccaccagcctggtgtacttcagctctgtggtgctgtttggagcctgcattgaaggagtggtgctgcgggacaagtatggagatggagtgtccaggaacctggtggtgggcaccctggcctggcccagcccctgggtgattgtgattggcagcttcttcagcacctgtggggccggcctgcagagcctgaccggggccccccggctgctgcaggccatcgccaaggacaacatcatccccttcctgcgggtgtttggacatggcaaggtgaatggagagcccacctgggccctgctgctgacagccctgattgctgagctgggcatcctgattgccagcctggacatggtggcccccatcctgtccatgttcttcctgatgtgctacctgtttgtgaacctggcctgtgctgtgcagaccctgctgcggacccccaactggaggccccgcttcaagtactaccactgggccctgtccttcctgggcatgagcctgtgcctggccctgatgtttgtgtcctcctggtactatgccctggtggccatgctgattgctggcatgatctacaagtacatcgagtaccagggcgctgagaaggagtggggagatggcatccggggcctgagcctgtctgctgcccgctatgccctgctgcggctggaggagggccccccccacaccaagaactggaggccccagctgctggtgctgctgaagctggatgaggacctgcacgtgaagtacccccggctgctgacctttgccagccagctgaaggccggcaagggcctgaccatcgtgggcagcgtcatccagggcagcttcctggagagctatggagaggcccaggccgctgagcagaccatcaagaacatgatggagattgagaaggtgaagggcttctgccaggtggtggtggccagcaaggtgcgggagggcctggcccacctgatccagagctgtggcctgggcggcatgaggcacaacagcgtggtgctgggctggccctacggctggaggcagagcgaggacccccgggcctggaagaccttcatcgacacagtgcgctgcaccacagctgcccacctggccctgctggtgcccaagaacatcgccttctaccccagcaaccacgagcgctacctggagggccacattgatgtgtggtggatcgtgcatgatggcggcatgctgatgctgctgcccttcctgctgcggcagcacaaggtgtggaggaaatgtaggatgaggatcttcaccgtggcccagatggatgacaacagcatccagatgaagaaggacctggccgtgttcctgtaccacctgcggctggaggccgaggtggaggtggtggagatgcacaacagcgacatcagcgcctacacctatgaaagaaccctgatgatggagcagaggagccagatgctgcggcagatgaggctgaccaagacagagcgggagcgggaggcccagctggtgaaggacagacacagcgccctgcggctggagagcctgtacagtgatgaggaggatgaatctgctgtgggcgctgacaagatccagatgacctggacccgggacaagtacatgacagagacctgggaccccagccacgccccagacaacttccgggagctggtgcacatcaagccagaccagagcaatgtgcggaggatgcacacagctgtgaagctgaatgaggtgattgtgaccaggagccatgatgcccggctggtgctgctgaacatgcctggcccccccaggaacagtgaaggagatgagaactacatggagttcctggaggtgctgacagagggcctggagcgggtgctgctggtgcggggcggcggccgggaggtgatcaccatctacagctag

SEQ ID NO: 59347 - DNA, 3240 bp, Artificial Sequence
  derived and/or modified sequence
atggccgccgagggcgccgtgtgcggcttcgtgtacctggagggcacggcatgggccgtgccggaagacaccgagccgttggcttcctgtaccttagggcacggcaatcatcgggagtctagccccttcctgagccccctcgaggccagtagaggtattgattactacgacagaaatctggccctgtttgaggaagagctcgacatccgccccaaagtgagctctctgctcggcaagctcgtgagttacaccaatctgactcagggagcaaaggaacatgaggaagccgagtctggcgagggcacccggaggcgggctgccgaagcccccagtatggggacactcatgggtgtgtacctcccctgtctccagaatatctttggcgtgatcctttttctccgccttacatggatggttggcactgccggggtccttcaggctctgcttatcgtgctcatttgttgttgctgcactctgctgacagcgatctccatgtcagccatcgcaaccaatggtgttgtcccggccggcggctcatattttatgatctctcgcagcttggggccggagtttgggggcgcggtggggctctgtttctacctggggacgaccttcgccgcagccatgtacattctcggcgccatcgaaatcctgttgacatatattgcaccacctgcggctatcttttacccctccggtgctcacgacacctccaatgctaccctgaataacatgagagtctacggtacaattttcctcaccttcatgaccctagtcgtgttcgtgggtgtgaagtacgtaaacaagttcgcctccctgttcctcgcctgtgttatcatttctattttatctatttatgccggagggataaagagcatctttgacccgccagtcttccccgtttgtatgctcggaaacaggaccctgtcaagagaccagttcgatatttgcgctaagactgcggtggtggacaacgagacggtggccacacaattatggtcattcttttgtcacagcccaaacttgactactgatagctgtgatccttattttatgctgaataatgtcactgaaattccgggaatccccggagcagccgccggagtgctccaagagaatttgtggagcgcttacctggaaaagggcgatattgtggaaaagcacggtctgcctagtgccgatgctccctccttgaaagagtctctgccactgtatgttgtggccgacattgcaacatcattcacagtgctggttggaatattcttcccttccgtgacgggcatcatggccggttccaatagatctggcgatctgcgcgatgcacagaagtcgatccccgtggggaccatcttggctatcattacaacgtccctagtgtacttttcttcagtggtcctgtttggtgcctgcattgagggcgtggtgttgagggataaatatggggatggagtgagtaggaatctggtggtcggcacactggcatggcccagtccttgggttattgtgatcggttctttcttttcaacctgtggggccgggctccagagcttgaccggtgctccccggttgctgcaggctatcgcaaaagacaatattatccccttcctgagggtttttggtcatggaaaagtgaacggggagcccacctgggcactcctgttaaccgccctcattgctgagctcggaatattaatcgcctcattggatatggtggcccccatcttgtccatgttctttctgatgtgctacctctttgtgaaccttgcctgcgccgtccagactcttctgagaactcctaattggaggcccagattcaaatattaccactgggctctgtctttcctgggtatgtcactgtgtctcgccttgatgttcgtttcgtcctggtattatgccctcgttgccatgctgatcgccgggatgatttacaagtatatcgagtaccagggcgcagagaaggagtggggcgacggcatccggggcctctctctctctgccgcccggtatgcccttctgcggttggaagaggggcctccccataccaagaattggaggcctcaacttctggtcttactgaagttagatgaggaccttcacgtgaagtaccctcggctcttgacttttgcatctcaactcaaggcaggcaaggggttgaccattgtgggctccgttatccagggctcttttctagaaagctacggtgaggcccaggccgctgaacagaccatcaagaacatgatggagattgagaaagtaaaagggttttgccaagttgtggttgccagtaaggttagggaaggcctcgcccatctgattcagagctgcggcctcggtggcatgcggcataatagcgtagtgctgggatggccttatggctggcgccaatctgaggatccacgcgcctggaagacatttatcgatacagtcaggtgcaccaccgccgctcatctcgccctgttagttccaaagaacatagctttttatccctccaaccacgaaaggtatctagagggacacatcgacgtgtggtggatcgtgcatgacggcggcatgctcatgctgctgccgttcctgctccgtcagcataaggtttggagaaaatgtcggatgcgtatcttcactgtcgcccagatggatgataattcaattcaaatgaaaaaggaccttgccgtcttcttgtatcatctgagattggaggctgaggtggaagtggtggaaatgcataatagcgacatatcagcctatacgtacgaaagaacgctcatgatggagcagagaagccagatgttacgacagatgcggctcacaaagacggagagagagagggaagcccagctcgtcaaggacagacactcggcactgcggctggaatctctatatagtgacgaggaggatgagagcgcagtgggcgcagacaaaattcagatgacttggacacgggacaagtacatgacggagacctgggatccctcacacgccccagataattttagagagctggtgcacataaagcccgaccagtctaatgtgcggaggatgcataccgctgtgaagctgaacgaagtgattgtgactagaagccatgacgccaggctagtgcttctgaacatgccaggcccacctcggaattcagagggcgatgaaaattatatggaattcctggaagtcctgactgaagggttagagcgcgtcctgctggtgcgcggaggcgggcgcgaagtgataacgatttatagctag

SEQ ID NO: 59348 - DNA, 3240 bp, Artificial Sequence
  derived and/or modified sequence
atggctgcagaaggcgctgtttgcgggtttgtgtacctggaaggaaccgcatgggctgtgcccgaggatacagagccgctggcaagctgtactcttggacacggcaaccaccgggagagcagtcccttcctctcgcctttggaggcttccaggggaattgactactacgatagaaatctggcccttttcgaggaagaacttgacatccgccctaaggtctcttctttacttggcaagttggtaagctacaccaacctcacgcaaggggctaaagaacacgaagaggcagagagtggagaggggacgcggagacgcgcagctgaggctccttctatgggcacgctcatgggagtttacctcccatgccttcagaatatattcggtgttatcctatttctccgacttacatggatggtgggcaccgctggggtcctacaggctctgctgatcgtgctgatctgttgttgttgcaccctgctgaccgccatctcgatgtctgctatcgctaccaacggggtggtccccgctggcggatcgtactttatgatctccagatcactggggcctgaatttggtggggcagtgggcctgtgtttctacctggggacaactttcgccgctgccatgtatatcctcggcgcaatcgaaatactattgacgtacatcgctcctccagcagctatcttctacccaagtggcgctcacgatacaagcaacgcaaccctgaataatatgcgcgtgtacgggaccatcttcctgacttttatgaccctggtcgtgttcgttggggtgaagtatgtcaacaaatttgcaagcttgttccttgcctgtgtaattatttctatccttagcatctacgctggcggaattaaatcgatctttgacccgccagtgttccctgtatgcatgctcgggaatagaactctgagtagggatcagtttgacatctgtgcaaagaccgcagtggtagataatgagacagtggcgacccagctatggtctttcttctgccattctcctaatttgaccacagattcttgcgacccatactttatgctcaataatgtcacagagattccagggatacctggagcagccgcaggtgtccttcaagaaaacctgtggagtgcgtacctagaaaagggcgatatcgttgaaaagcacgggctgccatctgccgacgctccttccctcaaggaatccctaccgctgtacgttgtcgctgatattgccaccagtttcacggtacttgtcggaatattcttcccctccgtgacagggattatggcaggttcaaaccgatccggcgatcttcgcgacgcccagaagtctattcccgtggggaccatcctcgcgatcattacaacgtctctggtgtatttctcctccgttgtgctgtttggtgcctgcatagaaggggtcgtcctccgcgacaagtatggtgatggggttagccggaacttggtagtcggaaccctggcctggccatctccctgggttattgtcataggaagtttcttttctacttgcggggctggattacagtctcttacgggagctccaagactgcttcaagcgatagccaaagataatatcattccatttttaagagttttcggccacggcaaagtgaatggtgagcccacctgggctctgctgttaactgccttgatcgccgagctcgggatcctgattgcctccctggatatggtggctcctatcttatcaatgttttttctaatgtgctacctctttgtgaatctggcttgtgccgtacagacgcttctgagaacccctaattggaggccacgattcaagtactaccactgggcgctgagctttctgggtatgtctttatgcctcgccctcatgtttgtgtcatcatggtattatgcactcgtcgccatgctgatcgccggaatgatctacaaatatatagaatatcagggtgccgagaaagagtggggagacggcattaggggcttgtccttatcggctgctagatatgccctgctgcggcttgaggaaggaccaccacatacaaagaactggagacctcagctgttggtgttactcaagttagatgaagatcttcacgttaagtatcctcggttgttgacattcgccagccaactaaaagctgggaagggcttaactatcgtgggatcagtcattcagggttcattcctggagtcctatggcgaagcgcaagcggcagagcagacaattaaaaacatgatggaaatcgaaaaggtcaagggtttctgtcaagtggtggtggcgagcaaggttcgtgaaggcttagctcacctgatccaatcttgtggcctcggcggtatgaggcacaattccgtggtgctaggttggccatatggctggcgccagtccgaagatcctagagcctggaaaacttttatcgacactgtgcggtgcaccaccgcggctcatctagctctgctggtgcccaaaaatattgcgttttatcccagcaaccatgagaggtacctggaggggcatattgacgtctggtggatcgtgcatgacgggggtatgcttatgttacttcccttcctgttgcgacaacacaaggtgtggagaaaatgccgtatgcgtattttcaccgtggcacagatggacgacaatagcattcagatgaaaaaagaccttgccgtctttctctaccacctccggttagaggcggaggtggaggtcgtcgaaatgcacaattctgacatcagtgcttatacttacgagcgaactctcatgatggagcagaggtcgcagatgttgcggcaaatgagattgacaaaaactgagagggagcgggaggctcaactggtaaaagatcggcatagcgcccttcgactagagtctctttacagtgatgaggaggatgaaagtgctgttggagcagacaaaatccaaatgacttggacaagggataaatacatgacggagacgtgggatccctcacacgctccagacaatttcagggaactggtccacattaagccggatcagagtaatgtgagaaggatgcatactgcggtgaaactgaatgaagtgatcgtcactcggtctcatgatgccaggctggtcctgctgaacatgcccggaccgccaagaaacagtgagggcgacgagaattacatggaattcctggaagtgctgaccgaggggctcgagcgtgtgctcttggttcgcggaggcggtcgggaggtaataacgatttactcttag

SEQ ID NO: 59349 - DNA, 4644 bp, Artificial Sequence
  derived and/or modified sequence
agtgcatggtggggtagccagccggccacctttgggccatggcagccgaaggtgctgtgtgcggcttcgtctatctggagggcactgcctgggcggtccctgaggacaccgaacccttggcatcctgcacattgggacatggcaaccacagagagagcagcccttttctttcccccttggaggcttccagaggaattgactactatgacaggaacctggcactgtttgaggaagagctggacatccgcccaaaggtatcgtctcttctgggaaagctcgtcagctacaccaacctcacccagggcgccaaagagcatgaggaggccgagagtggggagggcacccgccggagggcagccgaggcacccagcatgggcaccctcatgggggtgtacctgccctgcctgcagaatatctttggggttatcctcttcctgcggctgacctggatggtgggcacagcaggtgtgctacaggccctcctcatcgtgcttatctgctgctgttgtaccctgctgacggccatctccatgagtgccatcgccaccaacggtgtggttccagctgggggctcctatttcatgatctctcgttcactggggccagaatttggaggtgctgtgggcctgtgcttctacctgggaacaacattcgcagcagccatgtacatcctgggggccatcgagatcttgctgacctacattgccccaccagctgccattttttacccatcgggtgctcatgacacgtcgaatgccactttgaacaatatgcgtgtgtatgggaccattttcctgaccttcatgaccctggtggtgtttgtgggggtcaagtatgtgaacaaatttgcctcgctcttcctggcctgtgtgatcatctccatcctctccatctatgctgggggcataaagtctatatttgaccctcccgtgtttccggtatgcatgctgggcaacaggaccctgtcccgggaccagtttgacatctgtgccaagacagctgtagtggacaatgagacagtggccacccagctatggagtttcttctgccacagccccaaccttacgaccgactcctgtgacccctacttcatgctcaacaatgtgaccgagatccctggcatccccggggcagctgctggtgtgctccaggaaaacctgtggagcgcctacctggagaagggtgacatcgtggagaagcatgggctgccctccgcagatgccccgagcctgaaggagagcctgcctctgtacgtggtcgctgacatcgccacatccttcaccgtgctggtcggcatcttcttcccttctgtaacaggcatcatggctggctcaaaccgctctggggaccttcgtgacgcccagaagtctatccctgtggggaccattctggccatcattacaacttccctcgtgtacttcagcagtgtggttctctttggtgcctgcattgagggtgtggttctccgggacaagtatggcgatggtgtcagcaggaacttggtggtgggcacactggcctggccttcaccctgggtcatcgtcatcggctccttcttttcaacgtgtggcgctggcctccagagcctcacaggggcaccacgcctattgcaggccattgccaaggacaacatcatccccttcctccgggtgtttggccacgggaaggtgaatggtgaacccacatgggcactcctcctgacggcactcatcgccgagctgggcatcctcatcgcctccctcgacatggtggcccccatcttatccatgttctttctgatgtgctacctgttcgtgaacctcgcctgtgcggtgcagacactcctgaggacccccaactggcggccccggttcaagtactatcactgggcgctgtccttcctgggcatgagtctctgcctggcccttatgtttgtctcctcctggtactatgccctggtggccatgctcatcgccggcatgatctacaaatacatcgagtaccaaggggctgagaaggagtggggtgacgggatccgaggcctgtccctgagcgctgcccgctacgcgctgttgcggctggaggaggggcctcctcacaccaagaactggcggccgcagctgctggtgctgctgaagctggacgaggacctccacgtgaagtacccgcggctcctcaccttcgcctcccagctcaaggctggcaagggcctgaccattgttggttctgtcatccaggggagcttcttggagagctatggcgaggctcaggccgccgagcagaccatcaagaacatgatggaaattgagaaggtgaagggcttctgccaggtggtggtggccagcaaggtgcgggaggggctggcccacctcatccagtcctgtggcctgggaggcatgcggcataactccgtggtgctgggctggccctacggctggcgacagagcgaggacccccgtgcctggaagaccttcattgacaccgtgcgctgcactacggctgcccacctggccctgctcgtgcccaagaacatcgccttctaccccagcaaccacgagcgctacctggagggccacatagacgtgtggtggatcgtgcacgatggtggcatgctcatgcttctgcccttcctgctgcgccagcataaggtctggaggaagtgccggatgcgcatcttcacagtggcccagatggatgacaacagcatccagatgaagaaggacctggctgtctttctgtaccatctgcgccttgaggccgaggtggaggtggtggagatgcataacagtgacatctctgcatacacctacgagcggacgctgatgatggagcagcggtcgcagatgctgcggcagatgagactgaccaagactgagcgggagcgagaagcccagctggtcaaggatcggcactcggccctgcggctggagagcctgtactcggacgaggaagatgagtctgcagtgggggctgacaagatccagatgacgtggaccagggacaagtacatgactgagacctgggaccccagccatgcccctgacaatttccgggagctggtgcacattaagccggaccaatccaatgtgcggcgcatgcacactgctgtgaagctcaatgaagtcattgtcacgcgctcccacgacgcccgcctggttctcctaaacatgcctggcccacccaggaacagtgagggcgacgagaactacatggagttcctcgaggtgctgaccgagggccttgagcgggtgctgttggtgcgcggtggtggccgtgaagtcatcaccatctactcctgagcccagtgtcatcttgtggcctggagtcgaggtcttggccaggacataacaagctgtggtctggggtaacagcctcttcccagcacccacctgccagccctgcttgcctggccctgtcctggacccagctttgctaggtctccttggaaaccaggcctgggcctcaaaatggagatggatcccaggtcttgtgggaccctgggatgtttggggactttactatctagcaccccagtaggcctgtcctggccagagaagactggtaggggccgagtggggtttgaaggcagccggcccggcccagcccaggagcgctatttattgcatatttattgtttggatgtcaccatcagagacgaagggaagggtagccagggagggagtccagcccagctgcctgcaggaagatctggctcagtctactatgggcagggccccccaccaagctgagccgaatggagacagctgagctgaggcctgactttttcaataaaacattgtgtagttctgggcctcctgctgccccggctctgtttcccctggcgccaagagaagaaggcggaactgaacccaggcccagagccggctccctgaggctgtgcccctttccggcaatctctggccacaacccccactggccaggccgtccctcccactggccctagggcccctcccactcccacaccagataaggacagcccagtgccgctttctctggcagtaggcaccagggctggaatggggccgcccggctccccatggcagtgggtgacgctgctgctggggctgctgctccctcctgccgcccccttctggctcctcaatgtgctcttccccccgcacaccacgcccaaggctgagctcagtaaccacacacggcccgtcatcctcggtaagcccccaccaggcccctgatgcaccacgccagaccctggggagcctgggccccagcccctggcagctgacctggccaaagcccttctgccctgcataagccccgacataagtacctgccctggtgtggggaggggccaaaagcttgtcccttagaggaatgacgtcccttctcccaccacactgtgactctcagttgtctaacccagggggggcggagtgggggacggggtgtgcctgaggtcttggctggggcatcacaagctgtggtcagtcacagccacaccagactctgggccaagccccaccactccttccttggcccccacccaccaaggacaagatgcccagcccaggatcggtgagcaggagaggcccatccatgcccggcccctattaggcccagcccccatgcccccagacctatctgttcccaccttggactttggcaataaaggagcgccagactggg

SEQ ID NO: 59350 - DNA, 3240 bp, Artificial Sequence
  derived and/or modified sequence
atggccgccgagggcgccgtgtgcggcttcgtgtacctggagggcaccgcctgggccgtgcccgaggacaccgagcccctggccagctgcaccctgggccacggcaaccacagagagagcagccccttcctgagccccctggaggccagcagaggcatcgactactacgacagaaacctggccctgttcgaggaggagctggacatcagacccaaggtgagcagcctgctgggcaagctggtgagctacaccaacctgacccagggcgccaaggagcacgaggaggccgagagcggcgagggcaccagaagaagagccgccgaggcccccagcatgggcaccctgatgggcgtgtacctgccctgcctgcagaacatcttcggcgtgatcctgttcctgagactgacctggatggtgggcaccgccggcgtgctgcaggccctgctgatcgtgctgatctgctgctgctgcaccctgctgaccgccatcagcatgagcgccatcgccaccaacggcgtggtgcccgccggcggcagctacttcatgatcagcagaagcctgggccccgagttcggcggcgccgtgggcctgtgcttctacctgggcaccaccttcgccgccgccatgtacatcctgggcgccatcgagatcctgctgacctacatcgccccccccgccgccatcttctaccccagcggcgcccacgacaccagcaacgccaccctgaacaacatgagagtgtacggcaccatcttcctgaccttcatgaccctggtggtgttcgtgggcgtgaagtacgtgaacaagttcgccagcctgttcctggcctgcgtgatcatcagcatcctgagcatctacgccggcggcatcaagagcatcttcgacccccccgtgttccccgtgtgcatgctgggcaacagaaccctgagcagagaccagttcgacatctgcgccaagaccgccgtggtggacaacgagaccgtggccacccagctgtggagcttcttctgccacagccccaacctgaccaccgacagctgcgacccctacttcatgctgaacaacgtgaccgagatccccggcatccccggcgccgccgccggcgtgctgcaggagaacctgtggagcgcctacctggagaagggcgacatcgtggagaagcacggcctgcccagcgccgacgcccccagcctgaaggagagcctgcccctgtacgtggtggccgacatcgccaccagcttcaccgtgctggtgggcatcttcttccccagcgtgaccggcatcatggccggcagcaacagaagcggcgacctgagagacgcccagaagagcatccccgtgggcaccatcctggccatcatcaccaccagcctggtgtacttcagcagcgtggtgctgttcggcgcctgcatcgagggcgtggtgctgagagacaagtacggcgacggcgtgagcagaaacctggtggtgggcaccctggcctggcccagcccctgggtgatcgtgatcggcagcttcttcagcacctgcggcgccggcctgcagagcctgaccggcgcccccagactgctgcaggccatcgccaaggacaacatcatccccttcctgagagtgttcggccacggcaaggtgaacggcgagcccacctgggccctgctgctgaccgccctgatcgccgagctgggcatcctgatcgccagcctggacatggtggcccccatcctgagcatgttcttcctgatgtgctacctgttcgtgaacctggcctgcgccgtgcagaccctgctgagaacccccaactggagacccagattcaagtactaccactgggccctgagcttcctgggcatgagcctgtgcctggccctgatgttcgtgagcagctggtactacgccctggtggccatgctgatcgccggcatgatctacaagtacatcgagtaccagggcgccgagaaggagtggggcgacggcatcagaggcctgagcctgagcgccgccagatacgccctgctgagactggaggagggccccccccacaccaagaactggagaccccagctgctggtgctgctgaagctggacgaggacctgcacgtgaagtaccccagactgctgaccttcgccagccagctgaaggccggcaagggcctgaccatcgtgggcagcgtgatccagggcagcttcctggagagctacggcgaggcccaggccgccgagcagaccatcaagaacatgatggagatcgagaaggtgaagggcttctgccaggtggtggtggccagcaaggtgagagagggcctggcccacctgatccagagctgcggcctgggcggcatgagacacaacagcgtggtgctgggctggccctacggctggagacagagcgaggaccccagagcctggaagaccttcatcgacaccgtgagatgcaccaccgccgcccacctggccctgctggtgcccaagaacatcgccttctaccccagcaaccacgagagatacctggagggccacatcgacgtgtggtggatcgtgcacgacggcggcatgctgatgctgctgcccttcctgctgagacagcacaaggtgtggagaaagtgcagaatgagaatcttcaccgtggcccagatggacgacaacagcatccagatgaagaaggacctggccgtgttcctgtaccacctgagactggaggccgaggtggaggtggtggagatgcacaacagcgacatcagcgcctacacctacgagagaaccctgatgatggagcagagaagccagatgctgagacagatgagactgaccaagaccgagagagagagagaggcccagctggtgaaggacagacacagcgccctgagactggagagcctgtacagcgacgaggaggacgagagcgccgtgggcgccgacaagatccagatgacctggaccagagacaagtacatgaccgagacctgggaccccagccacgcccccgacaacttcagagagctggtgcacatcaagcccgaccagagcaacgtgagaagaatgcacaccgccgtgaagctgaacgaggtgatcgtgaccagaagccacgacgccagactggtgctgctgaacatgcccggcccccccagaaacagcgagggcgacgagaactacatggagttcctggaggtgctgaccgagggcctggagagagtgctgctggtgagaggcggcggcagagaggtgatcaccatctacagctag

SEQ ID NO: 59351 - protein, 1054 aa, Artificial Sequence
  derived and/or modified sequence
MGDTLSPGHGNHRESSPFLSPLEASRGIDYYDRNLALFEEELDIRPKVSSLLGKLVSYTNLTQGAKEHEEAESGEGTRRRAAEAPSMGTLMGVYLPCLQNIFGVILFLRLTWMVGTAGVLQALLIVLICCCCTLLTAISMSAIATNGVVPAGGSYFMISRSLGPEFGGAVGLCFYLGTTFAAAMYILGAIEILLTYIAPPAAIFYPSGAHDTSNATLNNMRVYGTIFLTFMTLVVFVGVKYVNKFASLFLACVIISILSIYAGGIKSIFDPPVFPVCMLGNRTLSRDQFDICAKTAVVDNETVATQLWSFFCHSPNLTTDSCDPYFMLNNVTEIPGIPGAAAGVLQENLWSAYLEKGDIVEKHGLPSADAPSLKESLPLYVVADIATSFTVLVGIFFPSVTGIMAGSNRSGDLRDAQKSIPVGTILAIITTSLVYFSSVVLFGACIEGVVLRDKYGDGVSRNLVVGTLAWPSPWVIVIGSFFSTCGAGLQSLTGAPRLLQAIAKDNIIPFLRVFGHGKVNGEPTWALLLTALIAELGILIASLDMVAPILSMFFLMCYLFVNLACAVQTLLRTPNWRPRFKYYHWALSFLGMSLCLALMFVSSWYYALVAMLIAGMIYKYIEYQGAEKEWGDGIRGLSLSAARYALLRLEEGPPHTKNWRPQLLVLLKLDEDLHVKYPRLLTFASQLKAGKGLTIVGSVIQGSFLESYGEAQAAEQTIKNMMEIEKVKGFCQVVVASKVREGLAHLIQSCGLGGMRHNSVVLGWPYGWRQSEDPRAWKTFIDTVRCTTAAHLALLVPKNIAFYPSNHERYLEGHIDVWWIVHDGGMLMLLPFLLRQHKVWRKCRMRIFTVAQMDDNSIQMKKDLAVFLYHLRLEAEVEVVEMHNSDISAYTYERTLMMEQRSQMLRQMRLTKTEREREAQLVKDRHSALRLESLYSDEEDESAVGADKIQMTWTRDKYMTETWDPSHAPDNFRELVHIKPDQSNVRRMHTAVKLNEVIVTRSHDARLVLLNMPGPPRNSEGDENYMEFLEVLTEGLERVLLVRGGGREVITIYS

SEQ ID NO: 59352 - DNA, 3165 bp, Artificial Sequence
  derived and/or modified sequence
atgggagacactctctcaccaggacacggtaaccaccgagagtcctctcctttcttgagccctctggaagctagtcggggcattgattattacgatagaaatctggcactttttgaggaggagctcgatattcggcctaaggtgtcgtctctcctcggtaagttagtgtcctatacaaatttaactcaaggagcaaaggaacacgaagaggcggagtctggcgaaggcactcgacgcagagctgcagaggcaccgtcaatgggcaccctcatgggggtatatctgccctgtcttcagaacatattcggggtcatactgtttctgaggctcacctggatggtggggaccgccggggtgctgcaggcgcttcttatcgttctaatatgttgctgctgcacactcctgaccgctatttcaatgtcagccatcgccacgaatggagtcgtaccagctggcggctcctacttcatgatttcgcgaagcttgggccctgagttcggaggtgcagtgggtctttgcttctatttagggactacgttcgcggccgcaatgtacattctgggggccatcgaaatactgctgacatacattgctcccccggccgccatcttttacccatctggagctcacgataccagcaacgccaccttgaataatatgagagtgtacggcacaattttcctgactttcatgactttggttgtgttcgtaggggtgaagtacgtcaataagttcgcttctcttttcctagcctgtgttataatttcgatcctgtctatttatgcaggagggatcaagagcatcttcgacccacctgtgttcccagtatgcatgctggggaacagaacgctgtctagagaccagttcgacatctgcgctaagaccgctgtagtggacaatgaaactgtggctacccagctttggtcgtttttttgtcacagccccaatctgacgaccgacagctgtgatccgtactttatgttaaataacgtgacagaaatccccggaatccccggggctgctgcgggagtcctgcaggaaaacttgtggagtgcttacctggaaaagggtgacatcgttgagaaacatggacttccaagcgctgacgccccatctctaaaggaaagccttccgctgtatgtggtggctgatattgctacgtccttcacggtgttggttgggatcttctttcccagtgtgactggcataatggctggctccaacagatcaggcgacttaagagatgcgcaaaaatcaattccagttggcaccatactggccatcattacaacaagcttggtgtatttctcatctgtggtactgttcggggcctgtatcgagggagttgtcttgcgcgataagtatggagatggcgtgtcgagaaacttggtggttggtacgcttgcttggccgtcaccttgggtgatcgtcattgggtcctttttcagtacttgcggtgccggtctgcagtcattgactggcgccccacgcttgctgcaagctatcgccaaagacaatatcattccgtttctccgggtgttcggccatggaaaggtcaatggggagcccacctgggccttgttactgaccgccctcattgctgaactcggcatactcatcgccagccttgatatggtagccccaatactatctatgtttttcctgatgtgctatctttttgttaacctcgcctgcgccgtccagaccctcctgaggacacctaactggaggccgcgcttcaaatactaccactgggctctgagctttctgggcatgtccttgtgcctcgccctaatgttcgtttcgagctggtactacgctctggtggcaatgctgattgctggaatgatctacaagtatattgagtaccagggcgcggaaaaggagtggggcgatgggatacgcggactctctctctcagccgccaggtatgcattgctgagactggaggaaggccctccacataccaaaaattggagaccacagctgctggtgctcctcaaactggacgaggacttacatgttaagtatccccgcttgctcaccttcgcctcccaactaaaggcaggtaagggcttgacaattgtaggatctgtgatacaaggttcatttctcgagagttatggcgaggctcaggcagcagaacagaccattaagaacatgatggagatcgagaaagtgaaaggcttctgtcaggtcgtcgtagcgagcaaggtccgcgaggggctggctcatctgatccagtcgtgtggacttggcggaatgagacacaatagcgtcgtactcggctggccctatggttggcgccaatccgaggacccacgtgcctggaagaccttcatcgacaccgttcggtgcaccaccgcggcccaccttgctctgctagtgcccaaaaatatcgctttctatccatcaaaccacgagcggtaccttgagggccatatagacgtgtggtggattgtgcatgacggggggatgctgatgttactgcctttcctcctgcgccagcataaggtgtggaggaagtgcaggatgcgcatttttaccgtggctcagatggacgataactcaattcaaatgaaaaaggacttagctgtatttttgtatcacctgaggctggaagccgaagtcgaggtggtggagatgcataacagcgacatctctgcttatacttatgagcggactctgatgatggagcagcgcagccagatgcttagacaaatgaggctgaccaaaacagaaagagaacgggaggcgcagttggtcaaggataggcattctgctctgcggcttgaatctctttattccgatgaggaagacgagagcgctgtgggcgctgacaaaatacaaatgacttggacccgggataagtatatgaccgagacttgggatccctctcatgcacccgacaacttccgggagttagttcacattaagcctgaccaaagcaatgtgaggcgtatgcacaccgcagttaagctcaacgaagtgatcgtcacccggagtcatgatgccaggctcgttttgctgaatatgcctggccctcctaggaattctgagggagacgagaactacatggaatttcttgaggttctgacagaaggacttgagcgggtcctgctggtgaggggcggtggtagagaggttatcaccatctatagctag

SEQ ID NO: 59353 - DNA, 3165 bp, Artificial Sequence
  derived and/or modified sequence
atgggagacaccctgagccctggccacggcaaccaccgggagagcagccccttcctgagccccctggaggccagccggggcatcgactactatgacaggaacctggccctgtttgaggaggagctggacatccggcccaaggtgagcagcctgctgggcaagctggtgtcctacaccaacctgacccagggcgccaaggagcacgaggaggccgagagcggggagggcaccaggagaagagctgctgaggcccccagcatgggcaccctgatgggcgtgtacctgccctgcctgcagaacatctttggagtcatcctcttcctgcggctgacctggatggtgggcacagctggggtgctgcaggccctgctgattgtgctgatctgctgctgctgcaccctgctgacagccatctccatgtctgccatcgccaccaacggggtggtgcctgctgggggcagctacttcatgatcagccgcagcctgggccctgagtttggaggagctgtgggcctgtgcttctacctgggcaccacctttgctgctgccatgtacatcctgggcgccatcgagatcctgctgacctacatcgcccctcctgctgccatcttctaccccagcggggcccatgacaccagcaatgccaccctgaacaacatgagggtgtatggcaccatcttcctgaccttcatgaccctggtggtgtttgtgggcgtgaagtatgtgaacaagtttgccagcctcttcctggcctgcgtcatcatcagcatcctgagcatctatgctgggggcatcaagagcatctttgatcctcctgtgtttcctgtgtgcatgctgggcaacagaaccctgagccgggaccagtttgacatctgtgccaagacagctgtggtggacaatgagaccgtggccacccagctgtggagcttcttctgccacagccccaacctgaccacagacagctgtgacccctacttcatgctgaacaacgtgacagagatccctggcatccctggagctgctgctggggtgctgcaggagaacctgtggagcgcctacctggagaagggggacatcgtggagaagcacggcctgcccagcgcagatgcccccagcctgaaggagagcctgcccctgtatgtggtggccgacatcgccaccagcttcaccgtgctggtgggcatcttcttccccagcgtgacaggcatcatggccggcagcaacagaagtggggacctgagagatgcccagaagagcatccctgtgggcaccatcctggccatcatcaccaccagcctggtgtacttcagctctgtggtgctgtttggagcctgcatcgagggcgtggtgctgcgggacaagtatggagatggagtgtccaggaacctggtggtgggcaccctggcctggcccagcccctgggtgattgtcatcggcagcttcttcagcacctgtggggccggcctgcagagcctgactggagccccccggctgctgcaggccatcgccaaggacaacatcatccccttcctgcgggtgtttggccacggcaaggtgaatggagagcccacctgggccctgctgctgacagccctgattgctgagctgggcatcctgattgccagcctggacatggtggcccccatcctgtccatgttcttcctgatgtgctacctgtttgtgaacctggcctgtgctgtgcagaccctgctgcggacccccaactggaggccccgcttcaagtactaccactgggccctgtccttcctgggcatgagcctgtgcctggccctgatgtttgtgtcctcctggtactatgccctggtggccatgctgattgctggcatgatctacaagtacatcgagtaccagggcgctgagaaggagtggggagatggcatccggggcctgagcctgtctgctgcccgctatgccctgctgcggctggaggagggccccccccacaccaagaactggaggccccagctgctggtgctgctgaagctggatgaggacctgcacgtgaagtacccccggctgctgacctttgccagccagctgaaggccggcaagggcctgaccatcgtgggcagcgtcatccagggcagcttcctggagagctatggagaggcccaggccgctgagcagaccatcaagaacatgatggagattgagaaggtgaagggcttctgccaggtggtggtggccagcaaggtgcgggagggcctggcccacctgatccagagctgtggcctgggcggcatgaggcacaacagcgtggtgctgggctggccctacggctggaggcagagcgaggacccccgggcctggaagaccttcatcgacacagtgcgctgcaccacagctgcccacctggccctgctggtgcccaagaacatcgccttctaccccagcaaccacgagcgctacctggagggccacattgatgtgtggtggatcgtgcatgatggcggcatgctgatgctgctgcccttcctgctgcggcagcacaaggtgtggaggaagtgcaggatgaggatcttcaccgtggcccagatggatgacaacagcatccagatgaagaaggacctggccgtgttcctgtaccacctgcggctggaggccgaggtggaggtggtggagatgcacaacagcgacatcagcgcctacacctatgaaagaaccctgatgatggagcagaggagccagatgctgcggcagatgaggctgaccaagacagagcgggagcgggaggcccagctggtgaaggacagacattctgccctgcggctggagagcctgtacagtgatgaagaagatgagagcgctgtgggcgctgacaagatccagatgacctggacccgggacaagtacatgacagagacctgggaccccagccacgccccagacaacttccgggagctggtgcacatcaagccagaccagagcaatgtgcggaggatgcacacagctgtgaagctgaatgaagtcatcgtgaccaggagccatgatgcccggctggtgctgctgaacatgcctggccccccaagaaattctgaaggagatgagaactacatggagttcctggaggtgctgacagagggcctggagcgggtgctgctggtgcggggcggcggccgggaggtgatcaccatctacagctag

SEQ ID NO: 59354 - DNA, 3165 bp, Artificial Sequence
  derived and/or modified sequence
atgggcgacaccctgagccccggccacggcaaccaccgggagagctcaccctttttaagcccacttgaggcgtcacgagggattgattactacgaccgaaaccttgccctatttgaggaggaattagatatccgccccaaggtgagtagcttgctggggaagctggtgagttatactaatttgacgcagggcgctaaggaacacgaggaggcggagagtggtgagggcactcggcgacgcgccgctgaggctccatccatgggaacattgatgggagtttaccttccgtgcctccagaacatttttggtgtaatcttattcctgcgcttgacctggatggtcggtaccgctggtgtgcttcaggcactcctgattgtgctcatttgctgttgctgtacactgctgactgccataagtatgagtgcaatcgccacaaatggcgttgttccagccggaggcagctacttcatgatatctcgatcactggggccggagttcggaggagccgtaggactgtgtttctatttagggacaacattcgccgccgccatgtatatactgggggcaatcgaaatcctgctgacatacatagcccctcccgctgctatcttctaccctagcggggctcatgacaccagcaacgccaccctgaataatatgcgagtgtatggtacaattttcctgacctttatgactttagtcgtgttcgtaggcgtgaagtacgtgaacaagttcgcgagtctgttcttagcgtgcgtcataattagtatcctgagtatatatgccggggggatcaagagcattttcgatcccccagtatttcccgtgtgtatgcttggtaacagaaccttaagccgggatcagtttgacatttgtgccaagaccgccgtcgtggacaacgagacggtggccacccagttatggagttttttttgccattcacccaatctgacaaccgactcttgtgatccttatttcatgctgaataatgtgacggagatccccggtattccgggagccgccgcaggagttctgcaagagaacctgtggtcagcttacctagaaaaaggcgatatcgtcgagaaacacgggctgccctccgccgacgccccatcactgaaagagtcattgccactctatgtggtggctgacattgccacaagcttcactgtgctagtgggcatatttttcccctcggtgaccggcatcatggctggcagcaatcgcagcggagatcttcgcgacgcccagaagtccatccccgtgggtaccattttggcaattatcacgaccagtctggtatacttttctagcgtggttctattcggagcatgtattgaaggcgtggtgctgcgggataaatatggagatggcgtgtcacgcaatctggtggtgggcactttggcctggccatcaccgtgggtgatagtgataggaagtttcttctccacttgtggcgctggactgcagagccttacaggagccccccgtctgctgcaggccatagctaaggacaatatcattcctttcctgcgcgtgttcggtcacggaaaagtgaacggagagcctacttgggccttgctgttgactgctttgatcgccgaattaggcatcttaatagctagtctggacatggtggctccaatcctgtcgatgtttttcttgatgtgctacctgtttgtgaacctggcttgcgcagtccagacactcctcagaaccccaaattggagaccccgttttaagtactaccactgggctttgtccttccttggcatgtccctgtgtttggccctcatgtttgtcagttcctggtattacgccctcgtggccatgctgatcgcaggcatgatttacaaatacatagaatatcagggcgcagagaaggagtggggtgacggaatcaggggactgagcctatcagctgcccgctatgctctgctgaggctagaggagggacccccacacactaagaactggaggccccaactcctggtgctgctgaaactggacgaagacttacacgtgaaatatccccggctcctgacatttgcatcacagctgaaagctggcaaggggcttaccatcgttgggagtgtgattcagggatcgtttcttgagtcgtacggagaagcacaggccgcggaacagacgataaaaaatatgatggagattgaaaaggttaaggggttctgtcaggtcgtggtagcatcaaaagtgagggaagggcttgcccacctgattcagtcctgtggtctgggcgggatgcggcacaattccgtggtcctggggtggccttacggttggaggcagtctgaggatccccgcgcctggaaaacgttcatcgacaccgtaaggtgtaccaccgcagcgcatcttgcccttctggtgccaaaaaatatcgccttctacccttcgaaccacgaacggtatctggaaggacatattgatgtgtggtggattgtgcatgatggaggcatgctcatgttgctccctttccttttgcggcagcacaaggtctggcgcaagtgcaggatgagaattttcacggttgctcaaatggatgacaacagtatacagatgaaaaaagatttagcagtatttctgtaccatcttaggctagaggctgaggtggaggttgtggaaatgcacaattccgacatctcggcttacacctacgagagaaccctaatgatggagcaaaggtctcagatgttaagacagatgaggttgacgaaaacggaacgagaacgcgaggcccaactcgtgaaggaccggcactctgctctcaggttggagtctctatattctgacgaggaggatgagagcgcggtgggtgcagataagatccagatgacctggacgcgcgataagtacatgactgaaacatgggacccctctcacgctcccgataattttagagaactggtccatattaaacccgaccaaagcaatgttaggcgcatgcatactgctgtgaagctgaatgaggtgattgtgaccaggtcccacgatgctaggcttgttcttctgaacatgccggggccaccgcgcaattccgaaggagatgagaattacatggaatttctcgaggttctgactgagggccttgaaagggtgcttctcgtgaggggaggcggcagagaggttattaccatctattcctag

SEQ ID NO: 59355 - DNA, 3165 bp, Artificial Sequence
  derived and/or modified sequence
atgggggacaccttgtccccgggacacggtaaccaccgagagtccagccccttcctcagtcccctggaagccagccgcggtattgattattacgatagaaacctcgcactcttcgaggaggagctcgacatccggcctaaagtcagcagcctgctaggcaaactcgtctcttataccaatcttacgcagggggctaaggagcacgaagaggctgagtcgggggaagggaccagacggcgagcagccgaagctccttcgatgggtacgctgatgggtgtttacctcccttgcctccaaaacatttttggagtcattctattcctccggctgacatggatggtggggactgctggtgtcctgcaggctctgctcatcgtgcttatttgctgttgttgtacattattaactgctatatccatgtctgccattgcaactaacggggtggtccccgcagggggttcctacttcatgattagcagaagtctgggcccagagtttggtggcgctgtgggtctatgtttttacttaggcaccacgttcgcagcagccatgtacattctgggagctatcgaaatccttttgacgtatattgccccacccgctgctatcttctatccttctggagcacatgatacctccaacgcgacccttaacaatatgagggtctatggaaccatatttctgacattcatgaccctggtggtctttgtcggcgttaagtacgtgaacaaatttgcctccctgttcctcgcctgtgtgattatttctatcctttcaatttatgcaggcggaatcaaatcaatcttcgacccacccgtgtttcctgtgtgcatgctcgggaacagaacactgagtcgggaccaattcgacatctgtgcaaagaccgcagtcgtagacaatgagaccgtggctacccagctttggtccttcttctgccactcacccaatttgaccactgactcttgtgacccatattttatgctgaataacgtcacggagataccagggatccccggagctgctgccggagtgctgcaggagaatttgtggagtgcctacctggaaaagggagacattgtggaaaagcatggcctgcccagcgccgatgctccatcactcaaagaatcactgccactgtatgtcgtcgccgacattgctacgagttttacagtgctcgtaggaattttttttccctccgtgactggaataatggccggaagtaacaggagcggggatttgcgagacgcgcagaaatcaattcccgtgggcacaatcctcgctatcattactacctctttagtatacttttccagcgtggtgctgtttggcgcatgcattgaaggcgtcgtgttaagggataaatacggagacggtgttagtcgcaacttggtggtaggcacactggcgtggcctagtccgtgggttatagttatcggttcgtttttctccacatgcggcgctggtctgcaaagccttacgggagctccacggttgttacaagccatcgccaaagacaatattatccctttcctgagagtgttcggccatggcaaggtaaacggcgaaccgacatgggcacttcttctgacagccctgatcgcagaactcggtattttaatcgcatctctggatatggtggctccaatcttgtctatgtttttcctcatgtgttatctattcgtgaatctcgcttgtgctgtccagacattgctcaggacacccaactggcgcccaagattcaaatattaccactgggcgctctccttcctgggcatgtctctttgccttgccctgatgttcgtctcttcctggtattacgcattagtcgcaatgctaatcgcagggatgatatataagtacattgagtatcagggggcagagaaggagtggggcgacggaattagagggttgtcgttgagtgccgcacggtacgcattgcttcggctggaagaaggaccgccacacacaaagaactggcgaccccagctgctggttctgttgaagctggacgaggatctgcacgtcaaataccctaggctgttgacattcgcctcccaactgaaagccggtaagggtctcacaattgttggatctgtcatccagggcagctttctggaaagctacggagaggctcaggctgcagagcagacaatcaaaaatatgatggaaatagaaaaggtcaaaggattctgccaggtggtcgtagcttccaaggttcgggaaggcctggcccatctgatccagagctgcgggctgggagggatgagacacaatagcgtggtgctggggtggccctatgggtggaggcagtctgaggaccctcgggcatggaagacttttatcgacactgtaaggtgtaccacagctgcacacctcgcactcttagttcccaaaaatatcgcattctacccctcaaaccacgagcgctacctggaggggcacattgatgtctggtggatcgtgcacgacggtggtatgttaatgttgttacctttccttctgcgtcagcacaaggtgtggaggaagtgcaggatgcgaattttcacggtcgcccaaatggatgacaatagcattcaaatgaagaaagacctcgccgtcttcctgtatcatctgagattggaggcagaggtagaggtcgtggaaatgcataacagtgacataagcgcctatacatacgagagaacactcatgatggagcagaggtcacagatgttgcgccagatgcgattgaccaaaacagagcgagagagggaagctcaattggttaaggacaggcacagcgcccttcgattggaaagcctgtacagtgacgaggaggacgaaagcgccgtaggcgctgataaaatacagatgacttggactcgcgataagtacatgactgaaacctgggacccgagccacgcaccagacaattttcgagagctcgtccatatcaagcctgaccagtccaacgtgagaaggatgcatacagcggtcaagcttaacgaagtgattgttacccgctcccacgacgccagactggtgctgctgaatatgccagggccacccagaaatagtgagggcgacgagaattatatggagttcctcgaagtgcttaccgagggtttagagcgtgtacttctggttcgtgggggtggtagagaggtcataaccatctactcgtag

SEQ ID NO: 59356 - DNA, 4635 bp, Artificial Sequence
  derived and/or modified sequence
gagtcctgctagatccccgcaagctaggccagctcctcccactgcctcccttcctctttctcctcctcttactcctttccagccagaccttggctgtctacaggatgggggacaccctgagccccggacatggcaaccacagagagagcagcccttttctttcccccttggaggcttccagaggaattgactactatgacaggaacctggcactgtttgaggaagagctggacatccgcccaaaggtatcgtctcttctgggaaagctcgtcagctacaccaacctcacccagggcgccaaagagcatgaggaggccgagagtggggagggcacccgccggagggcagccgaggcacccagcatgggcaccctcatgggggtgtacctgccctgcctgcagaatatctttggggttatcctcttcctgcggctgacctggatggtgggcacagcaggtgtgctacaggccctcctcatcgtgcttatctgctgctgttgtaccctgctgacggccatctccatgagtgccatcgccaccaacggtgtggttccagctgggggctcctatttcatgatctctcgttcactggggccagaatttggaggtgctgtgggcctgtgcttctacctgggaacaacattcgcagcagccatgtacatcctgggggccatcgagatcttgctgacctacattgccccaccagctgccattttttacccatcgggtgctcatgacacgtcgaatgccactttgaacaatatgcgtgtgtatgggaccattttcctgaccttcatgaccctggtggtgtttgtgggggtcaagtatgtgaacaaatttgcctcgctcttcctggcctgtgtgatcatctccatcctctccatctatgctgggggcataaagtctatatttgaccctcccgtgtttccggtatgcatgctgggcaacaggaccctgtcccgggaccagtttgacatctgtgccaagacagctgtagtggacaatgagacagtggccacccagctatggagtttcttctgccacagccccaaccttacgaccgactcctgtgacccctacttcatgctcaacaatgtgaccgagatccctggcatccccggggcagctgctggtgtgctccaggaaaacctgtggagcgcctacctggagaagggtgacatcgtggagaagcatgggctgccctccgcagatgccccgagcctgaaggagagcctgcctctgtacgtggtcgctgacatcgccacatccttcaccgtgctggtcggcatcttcttcccttctgtaacaggcatcatggctggctcaaaccgctctggggaccttcgtgacgcccagaagtctatccctgtggggaccattctggccatcattacaacttccctcgtgtacttcagcagtgtggttctctttggtgcctgcattgagggtgtggttctccgggacaagtatggcgatggtgtcagcaggaacttggtggtgggcacactggcctggccttcaccctgggtcatcgtcatcggctccttcttttcaacgtgtggcgctggcctccagagcctcacaggggcaccacgcctattgcaggccattgccaaggacaacatcatccccttcctccgggtgtttggccacgggaaggtgaatggtgaacccacatgggcactcctcctgacggcactcatcgccgagctgggcatcctcatcgcctccctcgacatggtggcccccatcttatccatgttctttctgatgtgctacctgttcgtgaacctcgcctgtgcggtgcagacactcctgaggacccccaactggcggccccggttcaagtactatcactgggcgctgtccttcctgggcatgagtctctgcctggcccttatgtttgtctcctcctggtactatgccctggtggccatgctcatcgccggcatgatctacaaatacatcgagtaccaaggggctgagaaggagtggggtgacgggatccgaggcctgtccctgagcgctgcccgctacgcgctgttgcggctggaggaggggcctcctcacaccaagaactggcggccgcagctgctggtgctgctgaagctggacgaggacctccacgtgaagtacccgcggctcctcaccttcgcctcccagctcaaggctggcaagggcctgaccattgttggttctgtcatccaggggagcttcttggagagctatggcgaggctcaggccgccgagcagaccatcaagaacatgatggaaattgagaaggtgaagggcttctgccaggtggtggtggccagcaaggtgcgggaggggctggcccacctcatccagtcctgtggcctgggaggcatgcggcataactccgtggtgctgggctggccctacggctggcgacagagcgaggacccccgtgcctggaagaccttcattgacaccgtgcgctgcactacggctgcccacctggccctgctcgtgcccaagaacatcgccttctaccccagcaaccacgagcgctacctggagggccacatagacgtgtggtggatcgtgcacgatggtggcatgctcatgcttctgcccttcctgctgcgccagcataaggtctggaggaagtgccggatgcgcatcttcacagtggcccagatggatgacaacagcatccagatgaagaaggacctggctgtctttctgtaccatctgcgccttgaggccgaggtggaggtggtggagatgcataacagtgacatctctgcatacacctacgagcggacgctgatgatggagcagcggtcgcagatgctgcggcagatgagactgaccaagactgagcgggagcgagaagcccagctggtcaaggatcggcactcggccctgcggctggagagcctgtactcggacgaggaagatgagtctgcagtgggggctgacaagatccagatgacgtggaccagggacaagtacatgactgagacctgggaccccagccatgcccctgacaatttccgggagctggtgcacattaagccggaccaatccaatgtgcggcgcatgcacactgctgtgaagctcaatgaagtcattgtcacgcgctcccacgacgcccgcctggttctcctaaacatgcctggcccacccaggaacagtgagggcgacgagaactacatggagttcctcgaggtgctgaccgagggccttgagcgggtgctgttggtgcgcggtggtggccgtgaagtcatcaccatctactcctgagcccagtgtcatcttgtggcctggagtcgaggtcttggccaggacataacaagctgtggtctggggtaacagcctcttcccagcacccacctgccagccctgcttgcctggccctgtcctggacccagctttgctaggtctccttggaaaccaggcctgggcctcaaaatggagatggatcccaggtcttgtgggaccctgggatgtttggggactttactatctagcaccccagtaggcctgtcctggccagagaagactggtaggggccgagtggggtttgaaggcagccggcccggcccagcccaggagcgctatttattgcatatttattgtttggatgtcaccatcagagacgaagggaagggtagccagggagggagtccagcccagctgcctgcaggaagatctggctcagtctactatgggcagggccccccaccaagctgagccgaatggagacagctgagctgaggcctgactttttcaataaaacattgtgtagttctgggcctcctgctgccccggctctgtttcccctggcgccaagagaagaaggcggaactgaacccaggcccagagccggctccctgaggctgtgcccctttccggcaatctctggccacaacccccactggccaggccgtccctcccactggccctagggcccctcccactcccacaccagataaggacagcccagtgccgctttctctggcagtaggcaccagggctggaatggggccgcccggctccccatggcagtgggtgacgctgctgctggggctgctgctccctcctgccgcccccttctggctcctcaatgtgctcttccccccgcacaccacgcccaaggctgagctcagtaaccacacacggcccgtcatcctcggtaagcccccaccaggcccctgatgcaccacgccagaccctggggagcctgggccccagcccctggcagctgacctggccaaagcccttctgccctgcataagccccgacataagtacctgccctggtgtggggaggggccaaaagcttgtcccttagaggaatgacgtcccttctcccaccacactgtgactctcagttgtctaacccagggggggcggagtgggggacggggtgtgcctgaggtcttggctggggcatcacaagctgtggtcagtcacagccacaccagactctgggccaagccccaccactccttccttggcccccacccaccaaggacaagatgcccagcccaggatcggtgagcaggagaggcccatccatgcccggcccctattaggcccagcccccatgcccccagacctatctgttcccaccttggactttggcaataaaggagcgccagactggg

SEQ ID NO: 59357 - DNA, 3165 bp, Artificial Sequence
  derived and/or modified sequence
atgggcgacaccctgagccccggccacggcaaccacagagagagcagccccttcctgagccccctggaggccagcagaggcatcgactactacgacagaaacctggccctgttcgaggaggagctggacatcagacccaaggtgagcagcctgctgggcaagctggtgagctacaccaacctgacccagggcgccaaggagcacgaggaggccgagagcggcgagggcaccagaagaagagccgccgaggcccccagcatgggcaccctgatgggcgtgtacctgccctgcctgcagaacatcttcggcgtgatcctgttcctgagactgacctggatggtgggcaccgccggcgtgctgcaggccctgctgatcgtgctgatctgctgctgctgcaccctgctgaccgccatcagcatgagcgccatcgccaccaacggcgtggtgcccgccggcggcagctacttcatgatcagcagaagcctgggccccgagttcggcggcgccgtgggcctgtgcttctacctgggcaccaccttcgccgccgccatgtacatcctgggcgccatcgagatcctgctgacctacatcgccccccccgccgccatcttctaccccagcggcgcccacgacaccagcaacgccaccctgaacaacatgagagtgtacggcaccatcttcctgaccttcatgaccctggtggtgttcgtgggcgtgaagtacgtgaacaagttcgccagcctgttcctggcctgcgtgatcatcagcatcctgagcatctacgccggcggcatcaagagcatcttcgacccccccgtgttccccgtgtgcatgctgggcaacagaaccctgagcagagaccagttcgacatctgcgccaagaccgccgtggtggacaacgagaccgtggccacccagctgtggagcttcttctgccacagccccaacctgaccaccgacagctgcgacccctacttcatgctgaacaacgtgaccgagatccccggcatccccggcgccgccgccggcgtgctgcaggagaacctgtggagcgcctacctggagaagggcgacatcgtggagaagcacggcctgcccagcgccgacgcccccagcctgaaggagagcctgcccctgtacgtggtggccgacatcgccaccagcttcaccgtgctggtgggcatcttcttccccagcgtgaccggcatcatggccggcagcaacagaagcggcgacctgagagacgcccagaagagcatccccgtgggcaccatcctggccatcatcaccaccagcctggtgtacttcagcagcgtggtgctgttcggcgcctgcatcgagggcgtggtgctgagagacaagtacggcgacggcgtgagcagaaacctggtggtgggcaccctggcctggcccagcccctgggtgatcgtgatcggcagcttcttcagcacctgcggcgccggcctgcagagcctgaccggcgcccccagactgctgcaggccatcgccaaggacaacatcatccccttcctgagagtgttcggccacggcaaggtgaacggcgagcccacctgggccctgctgctgaccgccctgatcgccgagctgggcatcctgatcgccagcctggacatggtggcccccatcctgagcatgttcttcctgatgtgctacctgttcgtgaacctggcctgcgccgtgcagaccctgctgagaacccccaactggagacccagattcaagtactaccactgggccctgagcttcctgggcatgagcctgtgcctggccctgatgttcgtgagcagctggtactacgccctggtggccatgctgatcgccggcatgatctacaagtacatcgagtaccagggcgccgagaaggagtggggcgacggcatcagaggcctgagcctgagcgccgccagatacgccctgctgagactggaggagggccccccccacaccaagaactggagaccccagctgctggtgctgctgaagctggacgaggacctgcacgtgaagtaccccagactgctgaccttcgccagccagctgaaggccggcaagggcctgaccatcgtgggcagcgtgatccagggcagcttcctggagagctacggcgaggcccaggccgccgagcagaccatcaagaacatgatggagatcgagaaggtgaagggcttctgccaggtggtggtggccagcaaggtgagagagggcctggcccacctgatccagagctgcggcctgggcggcatgagacacaacagcgtggtgctgggctggccctacggctggagacagagcgaggaccccagagcctggaagaccttcatcgacaccgtgagatgcaccaccgccgcccacctggccctgctggtgcccaagaacatcgccttctaccccagcaaccacgagagatacctggagggccacatcgacgtgtggtggatcgtgcacgacggcggcatgctgatgctgctgcccttcctgctgagacagcacaaggtgtggagaaagtgcagaatgagaatcttcaccgtggcccagatggacgacaacagcatccagatgaagaaggacctggccgtgttcctgtaccacctgagactggaggccgaggtggaggtggtggagatgcacaacagcgacatcagcgcctacacctacgagagaaccctgatgatggagcagagaagccagatgctgagacagatgagactgaccaagaccgagagagagagagaggcccagctggtgaaggacagacacagcgccctgagactggagagcctgtacagcgacgaggaggacgagagcgccgtgggcgccgacaagatccagatgacctggaccagagacaagtacatgaccgagacctgggaccccagccacgcccccgacaacttcagagagctggtgcacatcaagcccgaccagagcaacgtgagaagaatgcacaccgccgtgaagctgaacgaggtgatcgtgaccagaagccacgacgccagactggtgctgctgaacatgcccggcccccccagaaacagcgagggcgacgagaactacatggagttcctggaggtgctgaccgagggcctggagagagtgctgctggtgagaggcggcggcagagaggtgatcaccatctacagctag

SEQ ID NO: 59358 - protein, 416 aa, Artificial Sequence
  derived and/or modified sequence
MWPTRRLVTIKRSGVDGPHFPLSLSTCLFGRYENESLQNGRKSTEFPRKIREQEPARRVSRSSFSSDPDESEGIPLKRRRVSFGGHLRPELFDENLPPNTPLKRGEAPTKRKSLVMHTPPVLKKIIKEQPQPSGKQESGSEIHVEVKAQSLVISPPAPSPRKTPVASDQRRRSCKTAPASSSKSQTEVPKRGGRKSGNLPSKRVSISRSQHDILQMICSKRRSGASEANLIVAKSWADVVKLGAKQTQTKVIKHGPQRSMNKRQRRPATPKKPVGEVHSQFSTGHANSPCTIIIGKAHTEKVHVPARPYRVLNNFISNQKMDFKEDLSGIAEMFKTPVKEQPQLTSTCHIAISNSENLLGKQFQGTDSGEEPLLPTSESFGGNVFFSAQNAAKQPSDKCSASPPLRRQCIRENGNV

SEQ ID NO: 59359 - protein, 2896 aa, Artificial Sequence
  derived and/or modified sequence
MWPTRRLVTIKRSGVDGPHFPLSLSTCLFGRGIECDIRIQLPVVSKQHCKIEIHEQEAILHNFSSTNPTQVNGSVIDEPVRLKHGDVITIIDRSFRYENESLQNGRKSTEFPRKIREQEPARRVSRSSFSSDPDESEGIPLKRRRVSFGGHLRPELFDENLPPNTPLKRGEAPTKRKSLVMHTPPVLKKIIKEQPQPSGKQESGSEIHVEVKAQSLVISPPAPSPRKTPVASDQRRRSCKTAPASSSKSQTEVPKRGGRKSGNLPSKRVSISRSQHDILQMICSKRRSGASEANLIVAKSWADVVKLGAKQTQTKVIKHGPQRSMNKRQRRPATPKKPVGEVHSQFSTGHANSPCTIIIGKAHTEKVHVPARPYRVLNNFISNQKMDFKEDLSGIAEMFKTPVKEQPQLTSTCHIAISNSENLLGKQFQGTDSGEEPLLPTSESFGGNVFFSAQNAAKQPSDKCSASPPLRRQCIRENGNVAKTPRNTYKMTSLETKTSDTETEPSKTVSTANRSGRSTEFRNIQKLPVESKSEETNTEIVECILKRGQKATLLQQRREGEMKEIERPFETYKENIELKENDEKMKAMKRSRTWGQKCAPMSDLTDLKSLPDTELMKDTARGQNLLQTQDHAKAPKSEKGKITKMPCQSLQPEPINTPTHTKQQLKASLGKVGVKEELLAVGKFTRTSGETTHTHREPAGDGKSIRTFKESPKQILDPAARVTGMKKWPRTPKEEAQSLEDLAGFKELFQTPGPSEESMTDEKTTKIACKSPPPESVDTPTSTKQWPKRSLRKADVEEEFLALRKLTPSAGKAMLTPKPAGGDEKDIKAFMGTPVQKLDLAGTLPGSKRQLQTPKEKAQALEDLAGFKELFQTPGHTEELVAAGKTTKIPCDSPQSDPVDTPTSTKQRPKRSIRKADVEGELLACRNLMPSAGKAMHTPKPSVGEEKDIIIFVGTPVQKLDLTENLTGSKRRPQTPKEEAQALEDLTGFKELFQTPGHTEEAVAAGKTTKMPCESSPPESADTPTSTRRQPKTPLEKRDVQKELSALKKLTQTSGETTHTDKVPGGEDKSINAFRETAKQKLDPAASVTGSKRHPKTKEKAQPLEDLAGLKELFQTPVCTDKPTTHEKTTKIACRSQPDPVDTPTSSKPQSKRSLRKVDVEEEFFALRKRTPSAGKAMHTPKPAVSGEKNIYAFMGTPVQKLDLTENLTGSKRRLQTPKEKAQALEDLAGFKELFQTRGHTEESMTNDKTAKVACKSSQPDPDKNPASSKRRLKTSLGKVGVKEELLAVGKLTQTSGETTHTHTEPTGDGKSMKAFMESPKQILDSAASLTGSKRQLRTPKGKSEVPEDLAGFIELFQTPSHTKESMTNEKTTKVSYRASQPDLVDTPTSSKPQPKRSLRKADTEEEFLAFRKQTPSAGKAMHTPKPAVGEEKDINTFLGTPVQKLDQPGNLPGSNRRLQTRKEKAQALEELTGFRELFQTPCTDNPTTDEKTTKKILCKSPQSDPADTPTNTKQRPKRSLKKADVEEEFLAFRKLTPSAGKAMHTPKAAVGEEKDINTFVGTPVEKLDLLGNLPGSKRRPQTPKEKAKALEDLAGFKELFQTPGHTEESMTDDKITEVSCKSPQPDPVKTPTSSKQRLKISLGKVGVKEEVLPVGKLTQTSGKTTQTHRETAGDGKSIKAFKESAKQMLDPANYGTGMERWPRTPKEEAQSLEDLAGFKELFQTPDHTEESTTDDKTTKIACKSPPPESMDTPTSTRRRPKTPLGKRDIVEELSALKQLTQTTHTDKVPGDEDKGINVFRETAKQKLDPAASVTGSKRQPRTPKGKAQPLEDLAGLKELFQTPICTDKPTTHEKTTKIACRSPQPDPVGTPTIFKPQSKRSLRKADVEEESLALRKRTPSVGKAMDTPKPAGGDEKDMKAFMGTPVQKLDLPGNLPGSKRWPQTPKEKAQALEDLAGFKELFQTPGTDKPTTDEKTTKIACKSPQPDPVDTPASTKQRPKRNLRKADVEEEFLALRKRTPSAGKAMDTPKPAVSDEKNINTFVETPVQKLDLLGNLPGSKRQPQTPKEKAEALEDLVGFKELFQTPGHTEESMTDDKITEVSCKSPQPESFKTSRSSKQRLKIPLVKVDMKEEPLAVSKLTRTSGETTQTHTEPTGDSKSIKAFKESPKQILDPAASVTGSRRQLRTRKEKARALEDLVDFKELFSAPGHTEESMTIDKNTKIPCKSPPPELTDTATSTKRCPKTRPRKEVKEELSAVERLTQTSGQSTHTHKEPASGDEGIKVLKQRAKKKPNPVEEEPSRRRPRAPKEKAQPLEDLAGFTELSETSGHTQESLTAGKATKIPCESPPLEVVDTTASTKRHLRTRVQKVQVKEEPSAVKFTQTSGETTDADKEPAGEDKGIKALKESAKQTPAPAASVTGSRRRPRAPRESAQAIEDLAGFKDPAAGHTEESMTDDKTTKIPCKSSPELEDTATSSKRRPRTRAQKVEVKEELLAVGKLTQTSGETTHTDKEPVGEGKGTKAFKQPAKRKLDAEDVIGSRRQPRAPKEKAQPLEDLASFQELSQTPGHTEELANGAADSFTSAPKQTPDSGKPLKISRRVLRAPKVEPVGDVVSTRDPVKSQSKSNTSLPPLPFKRGGGKDGSVTGTKRLRCMPAPEEIVEELPASKKQRVAPRARGKSSEPVVIMKRSLRTSAKRIEPAEELNSNDMKTNKEEHKLQDSVPENKGISLRSRRQNKTEAEQQITEVFVLAERIEINRNEKKPMKTSPEMDIQNPDDGARKPIPRDKVTENKRCLRSARQNESSQPKVAEESGGQKSAKVLMQNQKGKGEAGNSDSMCLRSRKTKSQPAASTLESKSVQRVTRSVKRCAENPKKAEDNVCVKKIRTRSHRDSEDI

SEQ ID NO: 59360 - DNA, 1251 bp, Artificial Sequence
  derived and/or modified sequence
atgtggccaaccagacggcttgtaaccatcaagagatcaggtgtggacggtccgcactttcccttgtccctgtccacttgtctgttcggacgatatgaaaatgagtcactgcagaacggccgaaagagtacagagttccctcggaaaattcgggagcaggagcccgcacgtagagttagtcgcagttccttcagctccgaccccgacgaatcggaagggatacccctgaaacggcgccgtgtcagtttcggcggccatttgaggccggaattatttgacgagaatctaccccccaacacccccctgaaaagaggtgaagcaccaacaaagcgcaaatctctggtgatgcacaccccgccagtactaaaaaagatcattaaagagcagccacagccatccggaaagcaggagtccggatccgaaatacacgttgaggttaaggctcagtcactggtgataagtccacctgcgcctagcccccgaaagacccctgtcgcttccgatcaacggcgacgctcatgcaaaactgcgcccgcatcgtcgtcgaagtcccaaaccgaggtaccaaagcgcggggggaggaaaagcgggaatcttccctccaaacgcgtgagcatctctaggtctcagcacgacattcttcaaatgatctgtagcaagagaagatctggagcatcagaggctaacctgatcgtggcaaaaagctgggccgatgtggtgaaactgggggctaagcagactcaaactaaagtaattaaacatggcccacagagaagcatgaataagcgccagcggcggcctgccaccccaaagaagccagtgggggaggtccatagtcagttctccactggacacgctaactccccttgcaccataatcatcggcaaggcccacacagagaaggttcacgtaccagccagaccttatcgggtcctgaataactttatttctaaccaaaagatggatttcaaagaggatctctcgggcattgcagaaatgttcaaaacaccggtaaaagaacaacctcagctgactagtacttgtcatatcgccatatccaattccgagaatctgctgggaaaacaattccaaggcacagacagcggtgaggagccgttgctgccaaccagtgaatctttcggaggcaatgtcttcttctccgctcagaacgccgcgaaacagccgtctgataagtgctcggcttcaccccctcttcggagacaatgcattagggagaacgggaacgtttag

SEQ ID NO: 59361 - DNA, 8691 bp, Artificial Sequence
  derived and/or modified sequence
atgtggcccactaggagactggtgaccatcaagcgttcaggtgtcgacggcccccattttccattgagtttgtctacttgcctttttgggcgcggtatcgagtgcgacattcgcattcagctacccgtcgtatcaaagcagcactgcaaaattgagattcatgagcaggaagctattttgcataactttagctcaactaatcccacacaggtaaatggtagcgtgatcgacgagccggtgcgcctgaagcacggtgatgtcattaccattatcgaccgatcattccgatacgaaaatgagtctctccagaatgggagaaagtcgaccgaatttcctagaaagattagggaacaggaaccagcgcgaagggtttcacgcagctcttttagctccgacccagacgagtccgagggaattccacttaaacggcgtcgggtctcctttggcgggcatttgcggcctgaacttttcgatgagaaccttcccccaaacacgccacttaaacggggtgaggcgcccacgaaacgcaagtctttagtaatgcatacccctcctgtactgaaaaagatcattaaagaacagccacagccatctggcaaacaggagtccggctctgagatacatgtcgaagttaaggctcaatctcttgttatatctcccccagccccatctccgagaaagactcctgtggctagcgatcagcgccgaaggtcttgcaaaacagcaccagcgagctcctcgaagagccagacggaggttcccaagagagggggcaggaaatctggcaatctgccaagcaagagggtaagcatctcccgttctcagcacgacatcctgcagatgatctgtagcaaacgccgatccggtgcgagtgaagccaacctgattgtggcaaaatcttgggctgacgttgtgaaactgggagcgaaacagactcagactaaggttatcaagcatgggccccaacggtcaatgaacaaaagacagagacggcccgcaactccaaagaagcctgtgggagaagtgcactctcagttcagcaccggccacgctaactctccttgtactatcatcataggtaaggcccatactgagaaggttcacgtgccagcacgcccctacagggtgctgaataactttatttcaaaccagaagatggatttcaaggaagacctatcagggatcgccgaaatgtttaagacccctgtcaaggagcagccacagcttaccagtacatgtcatatcgcaatttctaattcggaaaacttactgggtaagcagttccagggcacagactccggagaagaacctctcctgcccacatcagagtcttttggcggcaatgtatttttcagcgctcagaatgctgcaaaacaacccagcgacaagtgcagcgcctcccctccactgcggagacagtgtattagagaaaatggcaacgtagccaagaccccacggaacacctacaaaatgacctctcttgagaccaaaacctctgatactgagaccgaaccctctaagactgtctctactgcaaatcgatcagggagaagcaccgaattccgtaacatacagaagctgcctgtggaatcaaagagtgaagagacaaatactgaaattgtcgagtgtatcctcaagagagggcagaaagctaccctgctccagcagagacgcgaaggagagatgaaagagatcgagcgaccatttgagacctacaaggaaaacatcgagctaaaggaaaacgatgaaaagatgaaggccatgaagcggtccagaacttggggtcaaaagtgcgctccaatgtctgacctcaccgacctgaaaagcctgccagacacagaactaatgaaggacacggctcgcggccagaacctgctgcagactcaggaccatgcaaaggcaccaaaaagcgagaagggcaagatcacgaaaatgccttgtcaaagcctacagcctgagcctatcaatactccaacccataccaagcagcagctgaaggctagcctgggcaaagtcggtgtgaaggaagagctgctcgccgtgggaaaattcacacggacgtccggagagaccactcacactcatcgagaacccgctggcgacggaaaatcaattcgtacattcaaagagtcccccaagcagattctggatccagcagcccgggtcacaggaatgaagaaatggcctcggacacctaaagaggaagcgcagtcgctcgaggaccttgccggctttaaagagctgttccagacccccggcccctctgaagaaagtatgaccgatgagaagacaaccaagattgcctgtaagagtccccccccggaaagcgtcgacacaccaaccagcactaaacagtggcctaagagatctcttaggaaggccgacgtggaggaggagtttctcgcgctgagaaagctcacaccctcagcgggtaaggctatgcttacccccaaaccggcaggtggcgatgaaaaggatattaaggcatttatgggtaccccggtgcagaaactagatttggcaggaaccctgccgggcagcaagcgccagctgcaaactccaaaagagaaagctcaagctcttgaggacctggcgggtttcaaagagctgttccagacccccggacacactgaagaactggtggcggcggggaaaacaacaaagataccgtgtgattctcctcagtcagacccagttgatacccccaccagtactaagcagaggcccaagcgctccatacggaaggccgatgtcgagggagagttacttgcttgtagaaatctgatgcctagtgctgggaaagccatgcacacacccaaaccatcagtcggtgaggagaaggatatcatcatatttgttggaacaccagtgcagaaactggacttgaccgagaatctaaccggctccaagagacggcctcagacccccaaagaggaggctcaggctctggaggaccttacagggttcaaagaattgttccagactccaggacatacagaggaggccgtggccgccgggaaaacaacaaagatgccctgcgagagttccccacctgagagtgcagacacgcccacttctacgcgccgacagccgaaaactcccttagaaaagcgggatgtacagaaagaactgtctgctctgaagaaactgactcagacttccggtgaaacaacgcataccgataaggttccaggcggcgaggacaagtccattaacgctttcagggaaaccgccaagcagaaattggaccccgctgcatccgtcaccggtagcaaaagacaccctaagacaaaagaaaaagctcaaccacttgaggacctggctggactgaaggaactttttcagacgcctgtgtgtacagacaagcccacgacccacgaaaagactacgaagatcgcatgccggtcccaacccgatcccgtggatacccccacttcatcaaaaccgcagagcaagcgatccctgaggaaagttgatgtcgaggaagagttctttgcccttcgtaaaaggacgccctctgccggcaaagcgatgcatactcctaagcctgctgtttccggcgagaagaacatctatgccttcatgggaacaccggtccagaaactagatctgaccgagaatttaaccggtagtaaacgaaggctgcaaacgcccaaagaaaaggcccaggctctggaagacctggcggggttcaaagagctctttcagaccaggggccatacagaagagagcatgacaaacgacaagaccgctaaggtcgcctgtaagagttcacaacctgacccggacaagaatcccgcaagtagcaagaggcgtctgaagacgtccctgggcaaagtcggtgttaaggaggagctccttgctgtcgggaagctaacacagacatccggagaaacaactcatacacatacggagcccacaggggacgggaagagtatgaaggcattcatggagtcccccaaacagattctggattcggctgcttcacttaccggttcgaaacgtcagctcagaactccaaaaggtaagtccgaagttcctgaagatctagccgggtttatagagctgtttcagactcctagccacaccaaggagagcatgaccaatgaaaaaacaaccaaagtgagctaccgggcctcccagcccgacttggtagataccccaactagctctaagcctcagccgaaaaggagtctgcggaaagcggacaccgaggaggaatttctcgcattccgcaagcaaactccatccgccggcaaggctatgcacacacctaaacccgccgtgggcgaggaaaaagatattaatactttcctggggacccctgtgcaaaagctggaccaaccaggaaatcttccagggagcaataggcgactccaaaccagaaaggagaaggcccaggcccttgaagaacttactggattcagggagctgtttcaaacaccatgtactgataacccaacaactgatgagaagaccacaaagaagatcttgtgcaaaagtccacagagcgacccagccgatactcctactaacacaaaacagcggcctaaacgaagcctgaagaaagctgacgtggaggaggagtttctcgcctttcgaaaattgactccatcggcaggtaaagccatgcacactcccaaggccgcagttggagaggagaaggatatcaatactttcgtaggaacacctgtcgagaagctggatcttcttgggaatctgcctgggtccaagaggaggccccaaactcctaaggaaaaagcaaaggctctggaggatctcgccggattcaaggaactgttccagacaccgggacacacagaagagtctatgacagatgacaaaatcaccgaggtaagttgcaaatccccccagcccgatcccgtgaagactcctacaagctccaagcagaggttgaagatctccctcggcaaggtgggcgtcaaggaggaggtcttacctgttgggaaactgacccagacatctggtaaaactacacagacgcaccgtgaaacagcaggcgatggcaagagcataaaggccttcaaggagagtgccaagcagatgctcgatccagcaaactatggcaccgggatggaacgctggcccaggactcctaaagaggaggctcagagtcttgaggacctggcaggctttaaggagctgtttcagactccggatcatactgaagagagcacaactgacgacaagacgaccaagattgcctgtaagtcaccccccccagaatccatggacacccctacatcgaccaggcgtcgtccaaagacaccccttggcaagcgcgatatcgtggaggagctgagcgccctgaagcaactgacccaaaccacccacactgataaagtgcccggcgacgaagacaaggggattaatgtctttagggaaaccgctaagcagaagctggatccagcggccagcgttactggttccaaaaggcaacctcgcacaccaaaaggaaaggcccagccactggaggatcttgcaggcctcaaggagctgtttcagacccctatttgtaccgacaaacctacgacccacgaaaaaacaaccaaaatcgcttgtagatccccccaacccgatccggttggaactccaactattttcaaaccgcaatcaaagaggtctctgcgcaaagccgacgtcgaagaggaatctctggcactgagaaagcggaccccctccgtgggaaaggcgatggacacccccaaacctgcgggcggcgatgagaaggatatgaaggcttttatgggaactcctgtgcaaaagctcgatttgccagggaacctgcctggcagtaagcgctggccacaaacaccaaaagaaaaggcccaagccctggaagacctggcgggattcaaagagctgtttcagacaccggggaccgacaagccaacaaccgatgaaaagactaccaagatcgcctgcaaatcccctcagccagatcccgtcgatacccctgcctctacgaaacaacgccctaagcggaacttacgtaaggctgacgtcgaggaagaatttctcgcgctccgcaagaggacgcctagcgccggaaaggcgatggatacaccgaaacctgcggtatcggacgaaaaaaatatcaacaccttcgtggaaacccctgtgcaaaaactagacctgctgggtaacttacctggctccaagcggcagccccaaacccccaaagaaaaggctgaggcactggaagacctagtcggtttcaaggagctgtttcaaacacccgggcatacggaagaatccatgactgacgacaaaatcactgaggtttcatgcaaatcccctcaacctgagagctttaagaccagtaggtccagcaagcaaagactgaagattccactggtcaaagtcgatatgaaggaggagcctctcgctgtgagtaagttaacccggacctccggagaaactactcagactcacaccgaacctacaggggatagcaagtccattaaagcctttaaagagtcgccaaagcagattctcgaccccgctgcttctgtgacaggctctcgacggcagctgaggaccagaaaggaaaaggcaagagcactggaagatctcgtcgacttcaaggaactcttctccgccccaggtcacacggaggaaagtatgactattgacaagaataccaagattccctgcaaaagtcctcccccagagctgacagacacggccacatcaaccaaaaggtgtccaaagactcgtccccggaaagaagttaaagaggagctcagcgccgttgagcgactcacccagactagcgggcaatctacacatacacacaaagagccagcatccggcgacgaggggatcaaggtccttaaacagagagccaagaaaaagcccaacccggtagaggaagaaccctcaaggcgcagaccacgtgcacccaaagaaaaagcccaacctctcgaggacctggccggcttcacagaactgagcgaaacttcaggtcacactcaggaatcactcaccgcggggaaggccaccaaaatcccttgtgagagtccaccactggaggtggtcgacaccaccgcctccaccaagcggcaccttcgaaccagagtacagaaggtgcaggtgaaggaggaaccatcagcagttaaattcactcaaacttcgggagagaccaccgacgccgacaaagagcccgctggggaagacaagggaattaaggcactgaaggaatccgcgaaacagacacctgcacccgcggcatcagtcactggatcccggcgaagaccaagagcccccagggagtctgcccaggcaattgaagacttggcggggttcaaagaccccgctgctggacacactgaggagagtatgaccgacgacaaaaccactaaaatcccatgcaagtccagtcccgagctggaagatacggcaaccagttccaagaggagaccccgcaccagagctcagaaggtggaagtgaaggaggagctgctggctgtcggcaagctgactcagacaagcggagagacgacacacacagacaaggagcccgtgggtgaagggaagggtacaaaagcttttaagcagcccgcgaaacggaagcttgacgctgaggatgtcatcgggtctcgccgtcaaccccgggcccctaaagaaaaggcccagccactggaagacctagcttcttttcaggagctgtcccagacgcccggccacaccgaagagttggccaatggcgctgccgattcattcacctcggctccaaaacagaccccagattcggggaagcccctaaagataagtagacgagttttgagggcgcctaaagtggagccagtcggcgacgtcgtctctacaagggaccccgtgaaatcacaatccaaatctaataccagcttgcctcctctccccttcaaaaggggcggtgggaaggacgggagtgtcaccgggacaaagaggttgcgctgtatgcccgctcccgaggagattgtcgaggagctgcccgcatcgaagaaacagcgggtggcgccacgcgcccgaggaaaaagctccgagccagtggtgattatgaagagaagcttacgtacaagtgcaaagaggatagaacccgctgaggagctcaatagcaacgatatgaagactaacaaagaggagcataagcttcaggacagcgtgcccgagaataagggaatatcactgagatcgaggagacagaacaagacagaggccgaacagcagataaccgaagtattcgtgttggccgagaggatagagattaatcgtaatgagaaaaaacctatgaagactagtcccgagatggatatccagaaccccgacgatggcgcaaggaagccgatcccacgagataaggttactgagaacaaacgctgtctcagatccgctcgacagaatgaatctagccaaccgaaagtagcggaggagagcggaggacagaaatcagcaaaggtcctgatgcagaaccagaagggaaagggtgaagccggcaattcagactctatgtgtctccggtcgaggaaaaccaagagtcagccagccgcctcaacattagagagcaagagcgtgcaaagggtgaccagaagtgtgaagaggtgtgctgaaaacccaaagaaggccgaagataacgtatgtgtcaagaaaattcggaccagaagccatcgggacagcgaagacatctag

SEQ ID NO: 59362 - DNA, 1251 bp, Artificial Sequence
  derived and/or modified sequence
atgtggcccacccggcggctggtgaccatcaagaggtctggagtggatggcccccacttccccctgagcctgagcacctgcctgtttggccgctatgaaaatgaaagcctgcagaatggaaggaagagcacagagttccccaggaagatccgggagcaggagcccgccaggagagtgagccgcagcagcttcagcagtgaccctgatgaaagtgagggcatccccctgaagagaagaagagtgtcctttggaggccacctgcggcctgagctgtttgatgagaacctgccccccaacacccccctgaagagaggagaggcccccaccaagaggaagagcctggtgatgcacaccccacctgtgctgaagaagatcatcaaggagcagccccagcccagcggcaagcaggagagcggcagcgagatccacgtggaggtgaaggcccagagcctggtgatcagccccccagcccccagccccaggaagacccctgtggccagtgaccagaggagaagaagctgcaagacagccccagccagcagcagcaagagccagacagaggtgcccaagaggggcggcaggaagagcggcaacctgcccagcaagagggtgtccatcagccgcagccagcacgacatcctgcagatgatctgcagcaagagaagaagtggggccagcgaggccaacctgattgtggccaagtcctgggcagatgtggtgaagctgggcgccaagcagacccagaccaaggtgatcaagcacggcccccagaggtccatgaacaagaggcagaggaggcctgccacccccaagaagcctgtgggggaggtgcacagccagttcagcactggacatgccaacagcccctgcaccatcatcatcggcaaggcccacacagagaaggtgcacgtgcctgcccggccctacagagtgctgaacaacttcatcagcaaccagaagatggacttcaaggaggacctgagcggcattgctgagatgttcaagacccctgtgaaggagcagccccagctgaccagcacctgccacatcgccatcagcaacagcgagaacctgctgggcaagcagttccagggcacagacagcggggaggagcccctgctgcccaccagcgagagctttggaggaaatgtgttcttcagcgcccagaatgctgccaagcagcccagcgacaagtgcagcgccagcccccccctgcggcggcagtgcatccgggagaatggaaatgtgtag

SEQ ID NO: 59363 - DNA, 8691 bp, Artificial Sequence
  derived and/or modified sequence
atgtggcccacccggcggctggtgaccatcaagaggtctggagtggatggcccccacttccccctgagcctgagcacctgcctgtttggccggggcattgaatgtgacatccgcatccagctgcctgtggtgtccaagcagcactgcaagattgagatccacgagcaggaggccatcctgcacaacttcagcagcaccaaccccacccaggtgaatggatctgtgattgatgagcctgtgcggctgaagcatggagatgtgatcaccatcatcgacaggagcttccgctatgaaaatgaaagcctgcagaatggaaggaagagcacagagttccccaggaagatccgggagcaggagcccgcccggcgggtgagccgcagcagcttcagcagtgaccctgatgagagcgagggcatccccctgaagagaagaagagtgtcctttggaggccacctgcggcctgagctgtttgatgagaacctgccccccaacacccccctgaagagaggagaggcccccaccaagaggaagagcctggtgatgcacaccccacctgtgctgaagaagatcatcaaggagcagccccagcccagcggcaagcaggagagcggcagcgagatccacgtggaggtgaaggcccagagcctggtgatcagccccccagcccccagccccaggaagacccctgtggccagtgaccagaggcggcgcagctgcaagacagccccagccagcagcagcaagagccagacagaggtgcccaagagaggaggcaggaagagcggcaacctgcccagcaagagggtgtccatcagccgcagccagcacgacatcctgcagatgatctgcagcaagagaagaagtggggccagcgaggccaacctgattgtggccaagtcctgggcagatgtggtgaagctgggcgccaagcagacccagaccaaggtgatcaagcacggcccccagaggtccatgaacaagaggcagaggaggcctgccacccccaagaagcctgtgggggaggtgcacagccagttcagcacaggccacgccaacagcccctgcaccatcatcatcggcaaggcccacacagagaaggtgcacgtgcctgcccggccctacagagtgctgaacaacttcatcagcaaccagaagatggacttcaaggaggacctgtctggaattgctgagatgttcaagacccctgtgaaggagcagccccagctgaccagcacctgccacatcgccatcagcaacagcgagaacctgctgggcaagcagttccagggcacagattctggagaggagcccctgctgcccaccagcgagagctttggaggaaatgtgttcttcagcgcccagaatgctgccaagcagcccagcgacaagtgcagcgccagcccccccctgcggcggcagtgcatcagagaaaatggaaatgtggccaagacccccaggaacacctacaagatgaccagcctggagaccaagaccagtgacacagaaacagagcccagcaagacagtgtccacagccaacagaagtggccgcagcacagagttcaggaacatccagaagctgcctgtggagagcaagtctgaggagaccaacacagagatcgtggagtgcatcctgaagaggggccagaaggccaccctgctgcagcagaggcgggagggggagatgaaggagattgagcggccctttgagacctacaaggagaacatcgagctgaaggaaaatgatgagaagatgaaggccatgaagaggagcaggacctggggccagaagtgtgcccccatgtctgacctgacagacctgaagagcctgcctgacacagagctgatgaaggacacagcccggggccagaacctgctgcagacccaggaccacgccaaggcccccaagtctgagaagggcaagatcaccaagatgccctgccagagcctgcagcctgagcccatcaacacccccacccacaccaagcagcagctgaaggccagcctgggcaaggtgggcgtgaaggaggagctgctggccgtgggcaagttcaccaggaccagcggggagaccacccacacccaccgggagcctgctggagatggcaagagcatccgcaccttcaaggagagccccaagcagatcctggaccctgctgcccgggtgacaggcatgaagaagtggcccaggacccccaaggaggaggcccagagcctggaggacctggccggcttcaaggagctgttccagaccccaggccccagcgaggagagcatgacagatgagaagaccaccaagatcgcctgcaagagccccccacctgagagcgtggacacccccaccagcaccaagcagtggcccaagaggagcctgaggaaggcagatgtggaggaggagttcctggccctgaggaagctgaccccatctgctgggaaggccatgctgacccccaagccagctggaggagatgagaaggacatcaaggccttcatgggcacccctgtgcagaagctggacctggccggcaccctgcccggcagcaagaggcagctgcagacccccaaggagaaggcccaggccctggaggacctggccggcttcaaggagctgttccagaccccaggccacacagaggagctggtggccgccggcaagaccaccaagatcccctgtgacagcccccagagcgaccctgtggacacccccaccagcaccaagcagaggcccaagaggagcatcaggaaggcagatgtggagggggagctgctggcctgcaggaacctgatgcccagcgctgggaaggccatgcacacccccaagcccagcgtgggggaggagaaggacatcatcatctttgtgggcacccctgtgcagaagctggacctgacagagaacctgaccggcagcaagagaagaccccagacccccaaggaggaggcccaggccctggaggacctgaccggcttcaaggagctgttccagaccccaggccacacagaggaggccgtggccgccggcaagaccaccaagatgccctgtgagagcagccccccagagagcgctgacacccccaccagcacccggcggcagcccaagacccccctggagaagagagatgtgcagaaggagctgagcgccctgaagaagctgacccagaccagcggggagaccacccacacagacaaggtgcctggaggagaggacaagagcatcaatgccttccgggagacagccaagcagaagctggaccctgctgcctctgtgacaggcagcaagaggcaccccaagaccaaggagaaggcccagcccctggaggacctggccggcctgaaggagctgttccagacccctgtgtgcacagacaagcccaccacccatgagaagaccaccaagatcgcctgccgcagccagcctgaccctgtggacacccccaccagcagcaagccccagagcaagaggagcctgaggaaggtggatgtggaggaggagttctttgccctgaggaagaggaccccatctgctgggaaggccatgcacacccccaagccagctgtgtctggagagaagaacatctatgccttcatgggcacccctgtgcagaagctggacctgacagagaacctgaccggcagcaagaggcggctgcagacccccaaggagaaggcccaggccctggaggacctggccggcttcaaggagctgttccagacccggggccacacagaggagagcatgaccaatgacaagacagccaaggtggcctgcaagagcagccagcctgaccctgacaagaacccagccagcagcaagaggcggctgaagaccagcctgggcaaggtgggcgtgaaggaggagctgctggccgtgggcaagctgacccagaccagcggggagaccacccacacccacacagagcccactggagatggcaagtccatgaaggccttcatggagagccccaagcagatcctggacagcgctgccagcctgaccggcagcaagaggcagctgcggacccccaagggcaagtctgaggtgcctgaggacctggccggcttcatcgagctgttccagacccccagccacaccaaggagagcatgaccaatgagaagaccaccaaggtgtcctaccgggccagccagcctgacctggtggacacccccaccagcagcaagccccagcccaagaggagcctgaggaaggctgacacagaggaggagttcctggccttcaggaagcagaccccatctgctgggaaggccatgcacacccccaagccagctgtgggggaggagaaggacatcaacaccttcctgggcacccctgtgcagaagctggaccagcccggcaacctgcccggcagcaacagaaggctgcagaccaggaaggagaaggcccaggccctggaggagctgaccggcttccgggagctgttccagaccccctgcacagacaaccccaccacagatgagaagaccaccaagaagatcctgtgcaagagcccccagagcgaccctgctgacacccccaccaacaccaagcagaggcccaagaggagcctgaagaaggcagatgtggaggaggagttcctggccttcaggaagctgaccccatctgctgggaaggccatgcacacccccaaggctgctgtgggggaggagaaggacatcaacacctttgtgggcacccctgtggagaagctggacctgctgggcaacctgcccggcagcaagagaagaccccagacccccaaggagaaggccaaggccctggaggacctggccggcttcaaggagctgttccagaccccaggccacacagaggagagcatgacagatgacaagatcacagaggtgtcctgcaagagcccccagcctgaccctgtgaagacccccaccagcagcaagcagaggctgaagatcagcctgggcaaggtgggcgtgaaggaggaggtgctgcctgtgggcaagctgacccagaccagcggcaagaccacccagacccaccgggagacagctggagatggcaagagcatcaaggccttcaaggagagcgccaagcagatgctggaccctgccaactatggaacaggcatggagcgctggcccaggacccccaaggaggaggcccagagcctggaggacctggccggcttcaaggagctgttccagaccccagaccacacagaggagagcaccacagatgacaagaccaccaagatcgcctgcaagagccccccacctgagagcatggacacccccaccagcaccaggagaagacccaagacccccctgggcaagagggacatcgtggaggagctgagcgccctgaagcagctgacccagaccacccacacagacaaggtgcctggagatgaagataaaggcatcaacgtgttccgggagacagccaagcagaagctggaccctgctgcctctgtgacaggcagcaagaggcagcccaggacccccaagggcaaggcccagcccctggaggacctggccggcctgaaggagctgttccagacccccatctgcacagacaagcccaccacccatgagaagaccaccaagatcgcctgccgcagcccccagcctgaccctgtgggcacccccaccatcttcaagccccagagcaagaggagcctgaggaaggcagatgtggaggaggagagcctggccctgaggaagaggaccccatctgtgggcaaggccatggacacccccaagccagctggaggagatgagaaggacatgaaggccttcatgggcacccctgtgcagaagctggacctgcccggcaacctgcccggcagcaagcgctggccccagacccccaaggagaaggcccaggccctggaggacctggccggcttcaaggagctgttccagaccccaggcacagacaagcccaccacagatgagaagaccaccaagatcgcctgcaagagcccccagcctgaccctgtggacaccccagccagcaccaagcagaggcccaagaggaacctgaggaaggcagatgtggaggaggagttcctggccctgaggaagaggacccccagcgctgggaaggccatggacacccccaagccagctgtgtctgatgagaagaacatcaacacctttgtggagacccctgtgcagaagctggacctgctgggcaacctgcccggcagcaagaggcagccccagacccccaaggagaaggccgaggccctggaggacctggtgggcttcaaggagctgttccagaccccaggccacacagaggagagcatgacagatgacaagatcacagaggtgtcctgcaagagcccccagcctgagagcttcaagaccagccgcagcagcaagcagaggctgaagatccccctggtgaaggtggacatgaaggaggagcccctggccgtgtccaagctgaccaggaccagcggggagaccacccagacccacacagagcccaccggggacagcaagagcatcaaggccttcaaggagagccccaagcagatcctggaccctgctgcctctgtgacaggcagccggcggcagctgcggaccaggaaggagaaggcccgggccctggaggacctggtggacttcaaggagctgttcagcgcccctggccacacagaggagagcatgaccatcgacaagaacaccaagatcccctgcaagagccccccacctgagctgacagacacagccaccagcaccaagcgctgccccaagacccggcccaggaaggaggtgaaggaggagctgtctgctgtggagcggctgacccagaccagcggccagagcacccacacccacaaggagcccgccagcggagatgagggcatcaaggtgctgaagcagagggccaagaagaagcccaaccctgtggaggaggagcccagcagaagaagaccccgggcccccaaggagaaggcccagcccctggaggacctggccggcttcacagagctgtctgagaccagcggccacacccaggagagcctgacagctgggaaggccaccaagatcccctgtgagagcccccccctggaggtggtggacaccacagccagcaccaagaggcacctgcggaccagggtgcagaaggtgcaggtgaaggaggagcccagcgctgtgaagttcacccagaccagcggggagaccacagatgctgacaaggagcctgctggagaagataaaggcatcaaggccctgaaggagagcgccaagcagaccccagccccagctgcctctgtgacaggcagcagaagaagaccccgggccccccgggagagcgcccaggccatcgaggacctggccggcttcaaggaccctgctgctggccacacagaggagagcatgacagatgacaagaccaccaagatcccctgcaagagcagccctgagctggaggacacagccaccagcagcaagaggcggcccaggacccgggcccagaaggtggaggtgaaggaggagctgctggccgtgggcaagctgacccagaccagcggggagaccacccacacagacaaggagcctgtgggggagggcaagggcaccaaggccttcaagcagcctgccaagaggaagctggatgctgaagatgtgattggcagccggcggcagccccgggcccccaaggagaaggcccagcccctggaggacctggccagcttccaggagctgagccagaccccaggccacacagaggagctggccaacggggctgctgacagcttcaccagcgcccccaagcagaccccagacagcggcaagcccctgaagatcagccggcgggtgctgcgggcccccaaggtggagcctgtgggagatgtggtgtccacccgggaccctgtgaagagccagagcaagagcaacaccagcctgccccccctgcccttcaagagaggaggcggcaaggatggctctgtgacaggcaccaagaggctgcgctgcatgcctgcccctgaggagatcgtggaggagctgcctgccagcaagaagcagagggtggccccccgggcccggggcaagagcagcgagcctgtggtgatcatgaagaggagcctgcggaccagcgccaagagaattgagcctgctgaggagctgaacagcaatgacatgaagaccaacaaggaggagcacaagctgcaggacagcgtgcctgaaaataaaggcatcagcctgcggagccggcggcagaacaagacagaagctgagcagcagatcacagaggtgtttgtgctggccgagagaattgagatcaacagaaatgagaagaagcccatgaagaccagccctgagatggacatccagaacccagatgatggagccaggaagcccatcccccgggacaaggtgacagagaacaagcgctgcctgcggagcgcccggcagaatgaaagcagccagcccaaggtggccgaggagagcggcggccagaagagcgccaaggtgctgatgcagaaccagaagggcaaaggagaggccggcaacagcgacagcatgtgcctgcggagcaggaagaccaagagccagcctgctgccagcaccctggagagcaagtctgtgcagagggtgaccaggtctgtgaagagatgtgccgagaaccccaagaaggcagaagataatgtgtgtgtgaagaagatccgcaccaggagccaccgggacagcgaggacatctag

SEQ ID NO: 59364 - DNA, 1251 bp, Artificial Sequence
  derived and/or modified sequence
atgtggcccacccggcggctggtgaccatcaagcggagcggcgtggacggtccccactttcccctttccctcagcacctgcctgtttggcaggtatgagaacgaatcgctgcagaatggacgcaaaagcactgagttccccagaaagattagggaacaggagcccgctaggagggtttccagatctagtttctcttccgaccctgacgagagcgagggaatcccgttgaagaggaggcgggtgagctttggaggccacttaagacctgagcttttcgatgagaatttgccgccaaatactcctttgaagcggggggaggctccaactaaacggaaatcgctcgtcatgcacaccccaccagtgctgaaaaaaatcattaaagaacaaccacagccttccgggaaacaggagagcggcagcgaaatccatgtggaggttaaagcgcaaagcttggtgataagccccccagcaccatcaccacgtaaaacccccgtagcaagtgaccaacgccgacgctcatgtaagaccgcccccgcctcctcgagtaagtcccaaactgaagttccaaagcgggggggccgaaagtccggaaacctgccctcaaaacgagtgagcatctcgagatcacagcacgacatcctccaaatgatttgctccaagaggcgttctggcgcttccgaggcaaatctcattgtggcaaagagttgggccgatgtggtgaagctgggagcaaagcagactcagaccaaggtgatcaagcacggcccccagagatcaatgaataaacgccagaggcgcccggcgactcccaagaagcccgtgggcgaggtgcactctcaattctcaaccgggcacgctaacagcccttgcaccatcataatcggaaaggcccacacagagaaggtgcacgtgccggcgcgaccttacagggtactcaataactttatttccaaccagaagatggattttaaggaggacttgtctggtatagctgagatgtttaaaacaccagtcaaagagcagccccagctcacctctacatgccatatagccattagcaattctgagaatctgctcggcaagcaatttcaaggcactgatagtggtgaagagcccctgctccccactagcgaatcattcggaggcaatgtgtttttctctgcccagaacgcagccaagcagcctagcgacaaatgctcggctagcccaccactgaggaggcagtgcatccgagagaacggcaacgtgtag

SEQ ID NO: 59365 - DNA, 8691 bp, Artificial Sequence
  derived and/or modified sequence
atgtggcccacccggcggctggtgaccatcaagcggagcggcgtggatggacctcactttccactgtcactttcaacctgcttatttggcaggggtattgaatgcgatattcgaatccagctgcccgtggtgagcaagcaacactgtaagattgagatacatgagcaggaggcaatccttcacaacttttcttccaccaatcctacacaggtgaacgggtccgtgattgacgagcctgtgcgcttgaagcacggtgatgtaattaccatcatcgatcggtctttccgctacgaaaacgagagcctgcagaacggacggaaatctaccgagttccccagaaaaattcgagagcaggagcctgcccggagagtctccagatccagcttctcgtccgaccctgatgagtctgagggcatcccgctgaagcggcggcgggtgtcgtttggcggtcacctgcgtcctgagcttttcgatgagaacctgcccccaaacactcctctaaaacgtggggaggctcccacaaagcggaagtctctggtgatgcatactcctccagttttgaaaaagatcatcaaagagcaaccccagccaagcggtaagcaggagtcggggtctgagattcacgtggaggttaaggcccagagcctggtaatttccccacctgcccctagccccaggaaaactccagtcgcgtcagaccagcggagacgatcctgcaagaccgcgccggccagctcaagcaagtcccagaccgaggttcctaagcggggaggacgcaagtccgggaatttgcctagcaaacgagtttcgatatcgcggagccaacacgatattttgcagatgatatgttcaaagcgccggtcaggcgctagcgaagcaaatcttattgtggccaagagctgggctgatgttgtgaaactgggcgcaaaacagacacagactaaagtcattaaacacggcccacagagaagtatgaacaagcgccagagaagacctgccacgccgaagaagcctgtgggagaggtgcatagtcagttttctaccggtcacgcgaattccccatgtaccatcatcattggcaaagcccatactgagaaggtgcatgtgcccgctaggccatacagagtgctgaacaatttcatctcaaaccagaaaatggattttaaagaggacttatccggcatcgctgagatgttcaagacacccgtgaaggagcagccccaacttacctccacctgccacattgcaatttccaatagcgaaaatctgctggggaagcaattccagggtactgatagcggagaggaacctttgctccccacgagcgaatcctttggggggaatgtgtttttctctgcacaaaacgctgctaaacagccatccgacaagtgttcagcctctccacctctcagacggcagtgcattagggagaacggcaacgttgcgaagacacccaggaacacctacaagatgacaagtctggagacaaaaactagcgacaccgagactgagccttcaaagaccgtatcaaccgccaatcggtctggaaggtcgactgaattccggaatatccaaaaactacctgtagagtccaaatccgaggagaccaacacggaaatcgtcgaatgtatcctcaagaggggtcaaaaagccaccctgcttcagcaaaggcgcgagggcgagatgaaggaaattgaaaggccttttgagacatataaggagaatattgagctgaaggagaacgacgagaagatgaaggccatgaagcggtcacgtacatgggggcagaagtgcgcacctatgtccgacttaaccgatctgaagtcgctccccgatactgagttgatgaaggatactgcacgaggacagaatctgctccagacccaagatcatgcaaaagcacctaaaagtgagaaggggaaaattaccaaaatgccttgtcagtccctgcagcccgaaccgatcaacacccccacccataccaagcagcaattgaaggcgtccctgggaaaggtgggcgtgaaagaagaacttctagccgtgggcaagtttactaggactagtggcgagacgacacatacacatcgcgaaccagccggcgatggcaaaagtatcaggacttttaaggagtcaccgaagcagatacttgatcccgccgccagagtgactggcatgaagaagtggcccaggaccccaaaagaagaggcccagagcctcgaagacctggccggcttcaaggaactattccaaactccagggccttccgaagagtccatgacagacgagaaaaccaccaaaatagcctgtaagtcacccccacctgagagcgtggacactcccacgagcacaaagcagtggccaaagaggtccctgagaaaagcggacgtcgaagaggaatttctggctctaagaaaacttactccaagtgctggaaaagcgatgctgacaccaaagcccgctgggggcgatgagaaagatatcaaggctttcatggggaccccagtccagaagttggacctggccggaaccctgccgggctctaagagacagctgcagacccccaaagaaaaagcccaggcgctggaagacctggcagggtttaaggaactgttccaaactccaggccatacagaggaattggttgccgctgggaagaccaccaaaatcccttgcgactcacctcagagcgacccagtagacactcccactagcacaaagcagaggcccaagcggagcatcagaaaagccgacgttgagggggaactgctggcctgccgcaatctcatgccctcagcagggaaggcaatgcatactcctaagccctccgtaggcgaggagaaggacatcatcatctttgttggcactcccgtccagaagctcgaccttaccgagaacctcactggctcgaagagaagacctcaaacacccaaagaggaggcccaggctctggaggatttgaccggcttcaaggagctgttccagacacctgggcatacagaggaggcagtggcagcagggaagacaactaagatgccctgcgagtcatccccccctgaaagtgctgatacccctacaagtacacgacgccaaccaaaaactccattggagaaaagggacgtacagaaggaattaagcgcacttaagaagcttacccagacttctggggagactactcacacagacaaggttcctggcggcgaggataaaagtataaatgcgttcagggaaactgccaaacagaaactggatccagctgcaagtgttacggggtctaagcgacaccccaaaacaaaagaaaaggcccagccccttgaagacttggcagggctgaaagagctgttccagactcctgtttgtacagacaagcccaccacccacgagaaaacgaccaagatcgcctgcagatcgcagcctgatcccgtcgatacccccacctcctccaagccccagagtaagcgttctctccgtaaggttgacgtggaagaagagttctttgccttgaggaagcgaacacctagtgctggtaaagccatgcacacccctaagcccgctgttagcggcgaaaaaaacatctatgcgtttatgggaactccagtgcagaaactggaccttactgaaaatcttaccgggtctaaaagaaggttgcagacccccaaggagaaggcacaggcattagaggatctcgctgggtttaaggaactgtttcagaccagagggcatactgaggaatcaatgaccaacgataagaccgctaaagtggcctgcaaatcaagtcagcccgatcccgataagaatcccgcttcgtctaagcgaaggctcaagacaagcctgggaaaagtcggagtgaaggaggaactgctggctgtgggcaagctcacccagacctctggcgagactacccacacccatacggaacccaccggagacgggaagagcatgaaggcctttatggaatctcctaagcagatcctcgattctgctgcctctcttaccggaagtaagagacaattgagaacacccaagggtaagtcggaagtcccagaagatctggcaggttttatcgagctcttccaaacacctagtcacaccaaagaatctatgaccaacgagaaaactactaaggtttcctaccgcgccagccagcccgacctagtggatacgccaacctcaagtaaaccacagcctaaaagatctctgcgaaaagccgacaccgaggaagagttcctggcatttaggaagcaaactccctctgctggaaaagcaatgcacaccccaaaaccagctgtcggcgaggaaaaagacatcaacaccttcctgggaacccctgtccagaagctagaccaacccgggaatctgcccggcagtaatagaaggctgcagacacggaaagagaaagcgcaggccctagaggaattaaccggcttccgagaattattccagactccctgtacggataaccccaccactgatgagaagaccacaaagaagatcctttgcaaatctccccaatctgacccagcggataccccgaccaacaccaagcagcgacccaagcgctctttaaaaaaggcggatgtcgaagaggagttcctcgccttcagaaagctgaccccttccgcaggcaaagccatgcatacccccaaggctgctgtcggagaagagaaggacatcaatacgttcgttggaacaccggtggagaaactggatctgctggggaacttgcccggctccaaacggcgtccccagacacccaaggagaaggccaaagcacttgaggacttagcggggtttaaagaactttttcagacccccggacataccgaggaaagcatgaccgacgacaagattacagaagtctcatgcaaatccccccaaccagatcctgtcaaaactcccacctcctctaagcagcgtctcaaaatcagcttaggaaaagtcggggtgaaggaagaagtgctgccggtgggcaagctgactcagacgtcagggaaaaccacgcagacccaccgcgaaaccgccggcgacgggaagtctattaaggcttttaaagagagtgccaaacagatgttggatcctgctaattacggaacgggaatggagcggtggccaagaacaccaaaggaagaggctcagtccctagaagatcttgctggcttcaaagagctcttccagactcccgaccacacggaagaatctaccaccgatgataagaccactaagatcgcttgtaaatccccaccgccggagagtatggacacacccacttcgacacgaaggaggccaaaaaccccattgggcaaacgggacatcgttgaggaattaagcgcccttaagcagcttactcagacaacccacactgataaggtgcctggcgacgaagataagggcattaatgtctttcgtgagacagccaaacagaagctggatcccgcagcgtcagtcacggggtcgaagagacagccccgcacacccaaagggaaggcccagcccctggaggatcttgctggcctgaaggaactgtttcagaccccaatctgcactgataaacctactactcacgagaaaactacaaaaatagcatgccggagtccacagcctgatccagtcgggacgcccacaatctttaaacctcagtcgaagaggtccttgcgcaaagccgatgttgaggaggaatctttggctcttaggaagcggacgccttccgttggaaaagctatggacacccctaaaccagcaggaggcgatgagaaagacatgaaggccttcatgggcacccctgttcagaagctggacctccctgggaatctccccggaagtaaacgatggcctcagactcctaaagagaaggcacaggcattggaggacctggccggcttcaaggagctctttcaaaccccgggtaccgataagcccacaaccgatgaaaagacaaccaaaatcgcctgtaagtccccacagcccgacccagtcgatactcctgcaagtacaaagcaaagaccaaagcgcaatctcagaaaggcagacgtcgaggaggagttcctggctctgaggaagagaacacccagcgccggcaaggcgatggatacacctaagccagctgtgagcgatgagaagaatatcaatactttcgtggaaacgccggtccaaaagctggatctgcttggaaatctgcccgggtccaaaaggcagccccagacccctaaggaaaaggctgaggctctggaagatctggttggctttaaggagctgtttcagacacccggccatacagaagagtccatgacggacgacaaaatcacagaggtgtcatgtaaaagcccccaacccgagtctttcaaaacgtcccggtccagcaagcagagattgaagataccccttgttaaggttgatatgaaagaggaacctctagcagtttccaaactgacccgcacctccggtgagaccacccagacacacacagagccaacgggagacagtaagtccataaaagcgtttaaggagtcaccaaagcagatcctggaccccgccgccagtgtgactggctctcgacggcagctgaggacaagaaaagagaaggcccgggcgctggaggacttggtcgattttaaggagcttttctccgcccccggccataccgaagagtccatgacaatcgacaagaacaccaaaattccctgtaagagtccccccccagaactcactgatacagccaccagcaccaagagatgtcctaaaacacggcccaggaaagaggtgaaagaggagctgagcgctgtcgaacgactcacacaaaccagcggccagtccacacatactcacaaagagcctgccagcggggatgaagggatcaaagtgttaaaacagcgggctaaaaagaaacccaaccccgtggaggaggaaccatctcgccggagaccaagggccccaaaagaaaaggcccaacctctcgaggatcttgccgggtttacagagctgtccgagactagcggccatacgcaggaatcactgaccgccggaaaagcaactaagatcccctgcgaatcacccccgctcgaggtcgtagacactacagcctccacaaaaaggcatttgcggacacgcgtgcagaaggttcaggtgaaggaggaaccctcagctgttaaatttacacagactagcggtgaaacaaccgacgcagacaaagagcccgccggggaggacaaaggaattaaagccttgaaggaaagcgccaagcagacaccagcccctgccgcttctgttactggcagtcggagaagacctcgggccccccgagagtccgctcaggcaattgaagaccttgctggctttaaagatcctgctgctggacatacggaggaatccatgactgacgacaagaccaccaagatcccttgcaagtcaagccctgaactcgaggacaccgctacatccagcaaacggaggcctcgcacaagggcccagaaggtggaagtcaaagaagagttactggctgttggcaaactgacccaaaccagtggggagaccactcataccgacaaggagcccgtgggagaaggaaaaggaaccaaggccttcaagcagcccgccaagaggaaactggacgcagaggatgtcatcggtagtaggcggcagcctcgggcaccaaaggagaaggctcaaccgctggaggatctggccagctttcaggaactgtcgcagacgcccggacacaccgaggagcttgcgaatggtgcagccgattcctttacctccgcacctaagcaaactcccgacagcggcaaaccactgaagatcagccgccgggtcttgcgcgcaccaaaggtcgaaccggtcggagacgtagtttcaaccagagacccagtgaagagtcaaagcaaaagcaacacaagcttgcctccactgcctttcaagagaggtggcggaaaagacggcagtgtcaccggaactaaaaggctgaggtgcatgcctgctcccgaggagatcgtcgaggaattacccgcttctaaaaagcagcgggtcgcaccacgggctcgggggaagtcctccgagccagtggtgatcatgaagcgatccctaaggacttcagctaagcggatcgagcctgccgaggagctgaacagtaacgacatgaaaacaaacaaagaggagcacaagttacaggacagcgtccccgaaaataagggaatttcactccgcagcaggcgccaaaacaaaaccgaggctgagcagcagatcactgaggtgtttgttctggcggagcgcatcgagatcaacagaaacgagaagaaaccgatgaagactagtccggagatggatattcaaaatccagatgatggagcgaggaaaccaatccccagggacaaggtgacggaaaacaaacgatgtttgcgcagtgcaagacaaaacgaaagctcccagcctaaggttgccgaagagtctggcgggcagaagagcgccaaggtcttgatgcaaaaccaaaaggggaagggagaagcgggcaactcagacagcatgtgtctcagatcacgcaaaaccaaatcccagcccgccgcttctacactcgagtcaaagtctgtccagagggtgacaaggtctgttaagcgttgcgctgagaatcctaagaaggctgaggacaatgtgtgcgtgaaaaaaattcgcacgaggtctcaccgggattcagaggacatctag

SEQ ID NO: 59366 - DNA, 1251 bp, Artificial Sequence
  derived and/or modified sequence
atgtggcccacacgtaggctggtaaccattaagcgctcaggcgttgacggacctcacttccccctttccctatccacttgcctctttggcaggtatgagaacgaatccctccagaacggtcgcaagtccacagagttccctcgaaagatcagggaacaagagccggctcggagagtctcaagaagtagcttctcgtctgaccccgacgagtccgaggggattcctctcaaaagaagacgggtgagctttgggggtcacctgcgccctgaacttttcgatgagaatctgcctcctaataccccactaaaaaggggcgaagcccctactaaaagaaaaagtttggtgatgcatacaccccctgtgctgaagaaaatcataaaggaacagccccagccgagtggtaaacaggagagcgggagcgagattcacgttgaggtcaaggcgcagagtcttgtgatttcgcctccggctccgtccccccgtaaaactcccgtggcctcagatcaaaggagacggtcctgtaaaaccgcacccgcttcgtcatcgaaatctcagaccgaggtacctaagcggggaggcagaaagtccgggaatcttccctccaaacgggtttcaatctctcgcagccagcacgatatcctgcagatgatctgcagtaagcggcgaagtggcgcttctgaggccaatctaatcgtggcaaagtcctgggccgatgtcgtgaagctaggcgctaaacagacacaaacaaaggtgattaagcatggtccacagaggtctatgaataaacggcagagaagacccgcaacgccaaagaagcctgtgggcgaagttcactcccagttcagcactggccacgcaaacagtccttgcaccatcattatcggtaaagcgcacaccgagaaggtgcatgtaccagcacgaccttacagggtgctgaataacttcatctccaaccagaaaatggacttcaaagaggacttgagtggtattgccgaaatgttcaaaactcccgtcaaagagcagccccagctcaccagtacgtgtcatatagccatcagcaattccgaaaatctactcgggaagcagtttcaaggaactgattccggcgaagagcccttgctgccgacctcggagagcttcggcggaaacgtgttctttagcgcacagaatgcagctaagcagcccagtgataagtgttccgcctcccctcccctgcgccgtcaatgtatccgtgagaacgggaacgtctag

SEQ ID NO: 59367 - DNA, 8690 bp, Artificial Sequence
  derived and/or modified sequence
atgtggccgacaaggcgcttagtgacaatcaagcggtccggcgtggacggtccacacttccctctatctctgtccacatgtctcttcgggaggggtattgaatgcgatatacggatccaactccctgtcgtgtccaaacagcactgcaaaattgagatccacgaacaggaagctatcctgcacaacttctcgtcaactaaccccacccaggtgaatggaagcgtgatcgatgagccagtgagacttaagcatggagacgtgatcactatcatcgataggtcattccgctacgaaaacgaatccttgcaaaatggaaggaagtccaccgagtttccacggaagatacgggagcaagagcccgctaggcgggtctcaagaagcagcttttccagtgacccagatgaaagtgaaggaatccccctgaaaaggagacgagtttcattcggtgggcatctccggcctgaattatttgacgagaacctgcctcctaacacaccgcttaagcggggagaggcacctactaaacgcaaatcactggtgatgcatactccgcctgtgctcaagaagatcattaaagagcagccccagccaagcgggaaacaggagtcagggtctgagatacacgttgaagttaaggctcaatctttggtcattagcccacctgcgccaagtccgagaaagacccccgtggcttccgaccagcgtagacgttcctgcaagaccgcccctgcttcatcctctaagagccagacagaagtgccaaaaagagggggtaggaagtcaggaaatttaccaagtaaacgggtgtctatctctcgctcccagcacgatatactccagatgatatgtagcaaacggaggtccggagcttccgaggctaatttgatagtggctaaaagttgggccgacgtggttaaactcggagccaagcagactcagaccaaagtaattaagcacggaccccagaggtctatgaacaaaagacaaagacggcctgcgacacccaaaaagcctgttggtgaggtccacagtcagttctccacagggcatgcaaatagtccctgcaccatcataattgggaaggcacacacggaaaaggtgcacgtgcctgctcggccatatcgggtactcaataactttattagtaatcagaagatggattttaaagaagacctctctggaatcgctgagatgttcaaaactcccgtgaaagagcagccgcagcttacgagtacttgccatatcgcaatctccaattcagaaaacctactgggcaagcagtttcaaggaaccgacagcggcgaggagcccctgttgcctacctccgagtcgtttggcggaaacgttttctttagcgcccagaatgccgctaagcagccctccgacaagtgctcggcctcaccgcctttgagacgccagtgcataagggaaaatggtaacgtggctaaaacacccaggaacacctacaaaatgacgtcattggaaactaaaacttcagataccgagacggagccgagcaaaactgtttcgactgcaaaccggagcggcagatccaccgaattcaggaatatccagaagctgcccgtcgagagcaagtcagaggagacaaatacggagatagtcgaatgcattctaaagcgtgggcagaaggccactctcctgcaacagcgacgcgagggggagatgaaggaaatcgagcgaccattcgaaacatataaagaaaacattgagctgaaagagaacgatgagaagatgaaggctatgaagcgatcgcggacttggggccagaagtgcgctcccatgtccgatcttacggacttgaaatcactgccagacacagagctgatgaaggatacagccagggggcagaaccttctgcagacccaagatcatgcgaaagctcccaaatccgagaagggtaagatcactaaaatgccctgccaatcgctgcagcctgaaccgatcaatacacctacacacacaaagcagcagctgaaggccagcctagggaaagtaggagtaaaagaagaacttctggccgtaggcaagttcacgcgtacatccggcgagactacacatacacatcgagagcccgcaggcgacgggaagtctattagaacattcaaggaaagccccaaacaaatcctggacccagcagctcgagtgacaggtatgaaaaagtggcctcgcactcccaaagaggaggcccagtccctggaggatttggctggcttcaaggaactctttcagacgcccggaccctccgaggagagcatgaccgacgagaagaccaccaagatcgcgtgcaagagtccacctcccgaatctgttgacactcccacctcaaccaagcaatggccaaaaaggtctctcaggaaggctgacgtggaagaggaattccttgcactgaggaaattaactcctagcgctggcaaagcaatgcttactcccaagcctgcaggcggagacgaaaaggacatcaaagcgttcatgggcacacctgtccagaaactcgatctcgccggaacactccctggctcaaagagacagctccaaaccccaaaggagaaagctcaagccctggaggatctggcgggattcaaagaactgtttcaaaccccagggcataccgaggaactggtagcagctggcaaaacgactaaaatcccatgcgactccccgcagtcagatccagtggataccccaacttctactaagcaaaggcccaagcgaagtatcagaaaagcagacgttgaaggagagctgctcgcatgtcgaaatctgatgccctcagcgggaaaggctatgcacacacccaaaccctccgtgggcgaagagaaagatataatcatctttgtgggaactcccgtgcagaaactggacctaaccgaaaatctaactggcagcaaacgcaggccacagacacctaaagaagaggcccaagctctggaggatctgacgggcttcaaggaactgtttcagaccccaggtcacactgaagaggccgtagccgcaggcaaaaccacaaagatgccatgtgagagttctccccctgagtctgctgatactcccacaagcacacgccgacaaccgaagaccccgctggaaaaacgagacgttcagaaggaattaagcgcacttaagaaactcacgcaaacgtccggcgaaactacccatacagacaaggtgccaggtggagaggataaatcaataaacgctttcagggaaactgctaaacagaagcttgatcctgcggcttccgttaccggatccaagcgccatccaaagactaaggagaaggcccagccactagaggatttagcgggacttaaagagttatttcaaactccagtttgcacagataagcccacaacacatgaaaagacaaccaagatagcatgcaggagtcagcccgaccctgtggatacccccacctccagcaaaccacagtccaaaagatctttgcgcaaggtggacgtggaagaggagttttttgcccttaggaagcgcaccccatctgcgggaaaagcgatgcacactccaaagccagctgtcagtggtgagaaaaacatttatgcctttatgggcacacccgtccagaaactggaccttacagagaacttgacaggctcgaagaggcgcttgcagaccccgaaagagaaggcccaggctctggaagacctcgccggatttaaagagcttttccagaccagagggcataccgaagagagcatgaccaatgacaagacggccaaagttgcgtgcaaatctagccagccagatccagacaaaaatcccgctagctcgaaacggaggttaaagactagcctcgggaaagtcggggtcaaggaggagctgctggccgtgggtaaactaacgcaaacctccggagagacaacacacactcacactgaacctaccggagacggcaagtctatgaaagcattcatggaatctcctaagcagatcctggatagcgccgcttccctgactgggagcaagcggcaactgcggaccccaaagggcaagagcgaggtgcccgaggacctagccggattcatcgagctgtttcagacgccatcccacacaaaggagtctatgaccaacgagaagacaaccaaggtgtcctaccgggcaagtcagcctgacttggttgacacccccaccagttcgaagccccaacccaagcggtccttgcgtaaagccgatactgaggaggagttcctggcattcagaaagcagaccccgtctgccggaaaggccatgcatacccccaagccagccgtcggcgaagagaaggacataaatacgttccttggcacaccagtgcaaaaactggaccagccaggcaacttgcccggatccaataggaggttgcaaacaagaaaagagaaggcacaggctttagaggaactcactggctttagagaactcttccagactccatgcaccgataatcctaccacggacgagaagacaacaaagaagattttgtgcaaaagcccccagtccgaccctgccgacacacctactaacaccaagcagcgtcccaaaagatcactaaaaaaggcagatgtcgaagaagagttcctggcctttcgcaaattaaccccttctgccggtaaagctatgcatacacctaaagctgccgtgggtgaggagaaagacatcaatacgtttgtcggtactcccgtggagaaactagatctgctaggaaatctccctggatccaagcggcgtcctcagactcccaaggagaaggccaaggccctggaggatctggccggattcaaagaactgttccagactcccggacacactgaagaaagtatgactgacgataaaataacagaggtctcatgcaagtctcctcaacccgacccagtgaaaacaccaacctccagtaagcagcgtctcaaaatcagtctcgggaaagtcggcgttaaagaggaagtgcttcctgtcggcaaactgacccaaacttccgggaaaacaacccagacccacagagagactgcgggagacggtaaaagcataaaggccttcaaagaaagtgctaagcagatgttggacccagccaactacggtacaggtatggaacgctggcccaggaccccgaaagaggaagcccagtctcttgaggacttggccggttttaaagagctgttccagaccccagaccatactgaggagtcaacaacagatgacaagaccacgaagatagcctgcaaaagcccccctcccgagagcatggacacgccaacatcaactaggagacgccctaagacccccttggggaagcgtgatattgtggaggagctaagcgcactgaaacaactcacacagaccacacatacagacaaggtgccaggcgacgaagacaaaggcatcaacgtatttagagagacagctaagcagaagttagacccagcagctagcgtgacagggtcaaagaggcagccacgaacacctaagggaaaagcacagccactcgaggaccttgcaggacttaaagaactgttccagactcctatttgtaccgataaacccacgacacatgaaaagacgaccaagatcgcttgtcgctccccccagcccgatcctgttggaactcccacaatcttcaaaccacaatcgaaaagatctctgagaaaagccgacgtcgaagaagaaagtctggccctgcgcaagaggactccgtccgtggggaaggcgatggacacccccaaacctgcgggaggtgacgagaaggacatgaaagcatttatgggtacacccgtccaaaaactggacttgcctgggaatctgcctggctctaaaaggtggccccagactccaaaggagaaggcccaggcactggaggatctcgccggatttaaggagctatttcagacaccaggaactgataaacccaccactgatgagaagactactaagatcgcttgtaagtccccacaacccgaccctgtagatacccccgctagcaccaaacagcgccctaaaagaaatctcaggaaagcagatgtagaagaagagttcctagctctgaggaagagaacaccctccgcaggtaaagccatggatacacccaaacctgccgtgagcgatgagaagaacattaacactttcgtggagacacccgtgcagaaactcgatctacttggcaatctgcccggatctaaacgccaaccccagacacccaaggagaaggccgaagcattagaggatctggtcgggttcaaggaactgttccagactcccggtcacacagaagagtcgatgaccgacgataagattaccgaggtctcttgtaaaagccctcaacctgaatcatttaagacgagtagatcttcaaagcagcgcctcaaaatcccactggtgaaggtggacatgaaagaggagccactcgccgtgagcaagcttacacgaacttctggcgagacgacccagactcataccgaacccaccggggacagtaagagcatcaaggctttcaaggagtcgcccaagcaaatcctcgatcccgcagcctcagtgaccggcagccgcagacagctgcgcaccaggaaggagaaagcaagggccctcgaggatcttgtggatttcaaggagctgttcagcgctccagggcatactgaggaaagcatgactatcgacaaaaacactaaaattccctgtaaaagccctcctcctgagctcacagataccgcgacgagtaccaagaggtgcccgaaaactcgccctagaaaggaggtgaaagaagaactctctgccgtggagaggctcacacagacctcggggcaatccacacatacccataaagagccggctagcggtgacgaggggattaaggtgctcaaacagagagcgaaaaagaagcctaaccctgttgaggaagaaccttctaggcggaggccgagggcacccaaggaaaaagcccagccactcgaggacctggccggattcacagaactaagcgaaacatccggacatacacaggaaagtctgactgcgggtaaggccacaaaaatcccctgtgagagtcctcctctggaggtggttgacaccactgcatccaccaagaggcatctgagaaccagagtgcagaaggtccaggttaaagaagagccatcagctgtgaaattcacccagaccagcggcgagaccacagacgccgacaaggagccagcgggtgaggacaagggtatcaaggcgctgaaagagagtgcaaagcagacacccgctcctgctgctagcgtcactggatcacgaagaaggccgagagcccctcgagagtcagctcaggccatcgaagatttggcagggttcaaagaccctgctgccggtcacacagaagaaagtatgactgacgacaaaactactaaaatcccttgcaaatcttccccagagctggaagacacagctaccagcagtaaacggcgacccagaacaagagcgcagaaggtggaagttaaggaagagctgctggcagttggcaagcttacccagacaagcggagaaaccacccatactgacaaagaaccagtgggggaagggaagggcacaaaggcttttaaacaacctgcaaaacgaaagctggacgcagaagatgtcatcggaagcaggcggcagcccagggctcccaaagagaaggctcagccactggaagatttggcctcctttcaggaactgtcccaaacgcccggacatactgaagaattagccaatggtgcagctgacagctttacgtcagcaccaaagcagacccccgattctgggaaacccttgaaaatatcacggagggtgctacgtgcgcctaaggtggagcctgtcggcgacgtcgtgtccacccgagacccagtcaaaagccagtccaaatcaaacacttccttgccaccgcttccattcaaacggggtgggggaaaggacggaagtgtgaccggaacaaagaggctgaggtgtatgccagcccctgaggagatcgttgaggaactgccggcatccaagaagcagagggtggcccctagagccagaggcaagtcaagcgaaccagtggtgatcatgaaacggagtctgcggacctcggctaagcggattgaaccagcggaagagctgaatagtaacgacatgaagaccaacaaggaagagcataagctgcaggactctgttccagagaacaagggtatatcactgagatcccgacggcaaaataaaacagaggcagagcagcagataacagaggtcttcgtactggcagagaggatcgagatcaatcggaacgagaaaaaaccgatgaagacgagcccagagatggacatccagaatccggacgacggcgctcggaagccaatccctcgggacaaggtgactgagaacaaacgctgtttgcgtagtgcaagacagaacgaaagttctcaaccaaaggttgcagaggagagcgggggacaaaaaagcgctaaagtgttgatgcaaaatcagaagggtaaaggggaggccggtaactcagactccatgtgtctaaggtccaggaagaccaaatcccagccagccgcatcaactcttgagagcaaatcagtacagcgtgtgaccagaagcgtgaagagatgcgctgaaaatccaaagaaggcagaggacaatgtgtgtgttaagaagatcagaactcgcagccaccgcgattccgaagacatcta

SEQ ID NO: 59368 - DNA, 11218 bp, Artificial Sequence
  derived and/or modified sequence
taccgggcggaggtgagcgcggcgccggctcctcctgcggcggactttgggtgcgacttgacgagcggtggttcgacaagtggccttgcgggccggatcgtcccagtggaagagttgtaaatttgcttctggccttcccctacggattatacctggccttcccctacggattatactcaacttactgtttagaaaatgtggcccacgagacgcctggttactatcaaaaggagcggggtcgacggtccccactttcccctgagcctcagcacctgcttgtttggaaggtatgaaaatgaaagtcttcagaatggaaggaagtcaactgaatttccaagaaaaatacgtgaacaggagccagcacgtcgtgtctcaagatctagcttctcttctgaccctgatgagagtgagggaatacctttgaaaagaaggcgtgtgtcctttggtgggcacctaagacctgaactatttgatgaaaacttgcctcctaatacgcctctcaaaaggggagaagccccaaccaaaagaaagtctctggtaatgcacactccacctgtcctgaagaaaatcatcaaggaacagcctcaaccatcaggaaaacaagagtcaggttcagaaatccatgtggaagtgaaggcacaaagcttggttataagccctccagctcctagtcctaggaaaactccagttgccagtgatcaacgccgtaggtcctgcaaaacagcccctgcttccagcagcaaatctcagacagaggttcctaagagaggagggagaaagagtggcaacctgccttcaaagagagtgtctatcagccgaagtcaacatgatattttacagatgatatgttccaaaagaagaagtggtgcttcggaagcaaatctgattgttgcaaaatcatgggcagatgtagtaaaacttggtgcaaaacaaacacaaactaaagtcataaaacatggtcctcaaaggtcaatgaacaaaaggcaaagaagacctgctactccaaagaagcctgtgggcgaagttcacagtcaatttagtacaggccacgcaaactctccttgtaccataataatagggaaagctcatactgaaaaagtacatgtgcctgctcgaccctacagagtgctcaacaacttcatttccaaccaaaaaatggactttaaggaagatctttcaggaatagctgaaatgttcaagaccccagtgaaggagcaaccgcagttgacaagcacatgtcacatcgctatttcaaattcagagaatttgcttggaaaacagtttcaaggaactgattcaggagaagaacctctgctccccacctcagagagttttggaggaaatgtgttcttcagtgcacagaatgcagcaaaacagccatctgataaatgctctgcaagccctcccttaagacggcagtgtattagagaaaatggaaacgtagcaaaaacgcccaggaacacctacaaaatgacttctctggagacaaaaacttcagatactgagacagagccttcaaaaacagtatccactgcaaacaggtcaggaaggtctacagagttcaggaatatacagaagctacctgtggaaagtaagagtgaagaaacaaatacagaaattgttgagtgcatcctaaaaagaggtcagaaggcaacactactacaacaaaggagagaaggagagatgaaggaaatagaaagaccttttgagacatataaggaaaatattgaattaaaagaaaacgatgaaaagatgaaagcaatgaagagatcaagaacttgggggcagaaatgtgcaccaatgtctgacctgacagacctcaagagcttgcctgatacagaactcatgaaagacacggcacgtggccagaatctcctccaaacccaagatcatgccaaggcaccaaagagtgagaaaggcaaaatcactaaaatgccctgccagtcattacaaccagaaccaataaacaccccaacacacacaaaacaacagttgaaggcatccctggggaaagtaggtgtgaaagaagagctcctagcagtcggcaagttcacacggacgtcaggggagaccacgcacacgcacagagagccagcaggagatggcaagagcatcagaacgtttaaggagtctccaaagcagatcctggacccagcagcccgtgtaactggaatgaagaagtggccaagaacgcctaaggaagaggcccagtcactagaagacctggctggcttcaaagagctcttccagacaccaggtccctctgaggaatcaatgactgatgagaaaactaccaaaatagcctgcaaatctccaccaccagaatcagtggacactccaacaagcacaaagcaatggcctaagagaagtctcaggaaagcagatgtagaggaagaattcttagcactcaggaaactaacaccatcagcagggaaagccatgcttacgcccaaaccagcaggaggtgatgagaaagacattaaagcatttatgggaactccagtgcagaaactggacctggcaggaactttacctggcagcaaaagacagctacagactcctaaggaaaaggcccaggctctagaagacctggctggctttaaagagctcttccagactcctggtcacaccgaggaattagtggctgctggtaaaaccactaaaataccctgcgactctccacagtcagacccagtggacaccccaacaagcacaaagcaacgacccaagagaagtatcaggaaagcagatgtagagggagaactcttagcgtgcaggaatctaatgccatcagcaggcaaagccatgcacacgcctaaaccatcagtaggtgaagagaaagacatcatcatatttgtgggaactccagtgcagaaactggacctgacagagaacttaaccggcagcaagagacggccacaaactcctaaggaagaggcccaggctctggaagacctgactggctttaaagagctcttccagacccctggtcatactgaagaagcagtggctgctggcaaaactactaaaatgccctgcgaatcttctccaccagaatcagcagacaccccaacaagcacaagaaggcagcccaagacacctttggagaaaagggacgtacagaaggagctctcagccctgaagaagctcacacagacatcaggggaaaccacacacacagataaagtaccaggaggtgaggataaaagcatcaacgcgtttagggaaactgcaaaacagaaactggacccagcagcaagtgtaactggtagcaagaggcacccaaaaactaaggaaaaggcccaacccctagaagacctggctggcttgaaagagctcttccagacaccagtatgcactgacaagcccacgactcacgagaaaactaccaaaatagcctgcagatcacaaccagacccagtggacacaccaacaagctccaagccacagtccaagagaagtctcaggaaagtggacgtagaagaagaattcttcgcactcaggaaacgaacaccatcagcaggcaaagccatgcacacacccaaaccagcagtaagtggtgagaaaaacatctacgcatttatgggaactccagtgcagaaactggacctgacagagaacttaactggcagcaagagacggctacaaactcctaaggaaaaggcccaggctctagaagacctggctggctttaaagagctcttccagacacgaggtcacactgaggaatcaatgactaacgataaaactgccaaagtagcctgcaaatcttcacaaccagacccagacaaaaacccagcaagctccaagcgacggctcaagacatccctggggaaagtgggcgtgaaagaagagctcctagcagttggcaagctcacacagacatcaggagagactacacacacacacacagagccaacaggagatggtaagagcatgaaagcatttatggagtctccaaagcagatcttagactcagcagcaagtctaactggcagcaagaggcagctgagaactcctaagggaaagtctgaagtccctgaagacctggccggcttcatcgagctcttccagacaccaagtcacactaaggaatcaatgactaacgaaaaaactaccaaagtatcctacagagcttcacagccagacctagtggacaccccaacaagctccaagccacagcccaagagaagtctcaggaaagcagacactgaagaagaatttttagcatttaggaaacaaacgccatcagcaggcaaagccatgcacacacccaaaccagcagtaggtgaagagaaagacatcaacacgtttttgggaactccagtgcagaaactggaccagccaggaaatttacctggcagcaatagacggctacaaactcgtaaggaaaaggcccaggctctagaagaactgactggcttcagagagcttttccagacaccatgcactgataaccccacgactgatgagaaaactaccaaaaaaatactctgcaaatctccgcaatcagacccagcggacaccccaacaaacacaaagcaacggcccaagagaagcctcaagaaagcagacgtagaggaagaatttttagcattcaggaaactaacaccatcagcaggcaaagccatgcacacgcctaaagcagcagtaggtgaagagaaagacatcaacacatttgtggggactccagtggagaaactggacctgctaggaaatttacctggcagcaagagacggccacaaactcctaaagaaaaggccaaggctctagaagatctggctggcttcaaagagctcttccagacaccaggtcacactgaggaatcaatgaccgatgacaaaatcacagaagtatcctgcaaatctccacaaccagacccagtcaaaaccccaacaagctccaagcaacgactcaagatatccttggggaaagtaggtgtgaaagaagaggtcctaccagtcggcaagctcacacagacgtcagggaagaccacacagacacacagagagacagcaggagatggaaagagcatcaaagcgtttaaggaatctgcaaagcagatgctggacccagcaaactatggaactgggatggagaggtggccaagaacacctaaggaagaggcccaatcactagaagacctggccggcttcaaagagctcttccagacaccagaccacactgaggaatcaacaactgatgacaaaactaccaaaatagcctgcaaatctccaccaccagaatcaatggacactccaacaagcacaaggaggcggcccaaaacacctttggggaaaagggatatagtggaagagctctcagccctgaagcagctcacacagaccacacacacagacaaagtaccaggagatgaggataaaggcatcaacgtgttcagggaaactgcaaaacagaaactggacccagcagcaagtgtaactggtagcaagaggcagccaagaactcctaagggaaaagcccaacccctagaagacttggctggcttgaaagagctcttccagacaccaatatgcactgacaagcccacgactcatgagaaaactaccaaaatagcctgcagatctccacaaccagacccagtgggtaccccaacaatcttcaagccacagtccaagagaagtctcaggaaagcagacgtagaggaagaatccttagcactcaggaaacgaacaccatcagtagggaaagctatggacacacccaaaccagcaggaggtgatgagaaagacatgaaagcatttatgggaactccagtgcagaaattggacctgccaggaaatttacctggcagcaaaagatggccacaaactcctaaggaaaaggcccaggctctagaagacctggctggcttcaaagagctcttccagacaccaggcactgacaagcccacgactgatgagaaaactaccaaaatagcctgcaaatctccacaaccagacccagtggacaccccagcaagcacaaagcaacggcccaagagaaacctcaggaaagcagacgtagaggaagaatttttagcactcaggaaacgaacaccatcagcaggcaaagccatggacacaccaaaaccagcagtaagtgatgagaaaaatatcaacacatttgtggaaactccagtgcagaaactggacctgctaggaaatttacctggcagcaagagacagccacagactcctaaggaaaaggctgaggctctagaggacctggttggcttcaaagaactcttccagacaccaggtcacactgaggaatcaatgactgatgacaaaatcacagaagtatcctgtaaatctccacagccagagtcattcaaaacctcaagaagctccaagcaaaggctcaagatacccctggtgaaagtggacatgaaagaagagcccctagcagtcagcaagctcacacggacatcaggggagactacgcaaacacacacagagccaacaggagatagtaagagcatcaaagcgtttaaggagtctccaaagcagatcctggacccagcagcaagtgtaactggtagcaggaggcagctgagaactcgtaaggaaaaggcccgtgctctagaagacctggttgacttcaaagagctcttctcagcaccaggtcacactgaagagtcaatgactattgacaaaaacacaaaaattccctgcaaatctcccccaccagaactaacagacactgccacgagcacaaagagatgccccaagacacgtcccaggaaagaagtaaaagaggagctctcagcagttgagaggctcacgcaaacatcagggcaaagcacacacacacacaaagaaccagcaagcggtgatgagggcatcaaagtattgaagcaacgtgcaaagaagaaaccaaacccagtagaagaggaacccagcaggagaaggccaagagcacctaaggaaaaggcccaacccctggaagacctggccggcttcacagagctctctgaaacatcaggtcacactcaggaatcactgactgctggcaaagccactaaaataccctgcgaatctcccccactagaagtggtagacaccacagcaagcacaaagaggcatctcaggacacgtgtgcagaaggtacaagtaaaagaagagccttcagcagtcaagttcacacaaacatcaggggaaaccacggatgcagacaaagaaccagcaggtgaagataaaggcatcaaagcattgaaggaatctgcaaaacagacaccggctccagcagcaagtgtaactggcagcaggagacggccaagagcacccagggaaagtgcccaagccatagaagacctagctggcttcaaagacccagcagcaggtcacactgaagaatcaatgactgatgacaaaaccactaaaataccctgcaaatcatcaccagaactagaagacaccgcaacaagctcaaagagacggcccaggacacgtgcccagaaagtagaagtgaaggaggagctgttagcagttggcaagctcacacaaacctcaggggagaccacgcacaccgacaaagagccggtaggtgagggcaaaggcacgaaagcatttaagcaacctgcaaagcggaagctggacgcagaagatgtaattggcagcaggagacagccaagagcacctaaggaaaaggcccaacccctggaagatctggccagcttccaagagctctctcaaacaccaggccacactgaggaactggcaaatggtgctgctgatagctttacaagcgctccaaagcaaacacctgacagtggaaaacctctaaaaatatccagaagagttcttcgggcccctaaagtagaacccgtgggagacgtggtaagcaccagagaccctgtaaaatcacaaagcaaaagcaacacttccctgcccccactgcccttcaagaggggaggtggcaaagatggaagcgtcacgggaaccaagaggctgcgctgcatgccagcaccagaggaaattgtggaggagctgccagccagcaagaagcagagggttgctcccagggcaagaggcaaatcatccgaacccgtggtcatcatgaagagaagtttgaggacttctgcaaaaagaattgaacctgcggaagagctgaacagcaacgacatgaaaaccaacaaagaggaacacaaattacaagactcggtccctgaaaataagggaatatccctgcgctccagacgccaaaataagactgaggcagaacagcaaataactgaggtctttgtattagcagaaagaatagaaataaacagaaatgaaaagaagcccatgaagacctccccagagatggacattcagaatccagatgatggagcccggaaacccatacctagagacaaagtcactgagaacaaaaggtgcttgaggtctgctagacagaatgagagctcccagcctaaggtggcagaggagagcggagggcagaagagtgcgaaggttctcatgcagaatcagaaagggaaaggagaagcaggaaattcagactccatgtgcctgagatcaagaaagacaaaaagccagcctgcagcaagcactttggagagcaaatctgtgcagagagtaacgcggagtgtcaagaggtgtgcagaaaatccaaagaaggctgaggacaatgtgtgtgtcaagaaaataagaaccagaagtcatagggacagtgaagatatttgacagaaaaatcgaactgggaaaaatataataaagttagttttgtgataagttctagtgcagtttttgtcataaattacaagtgaattctgtaagtaaggctgtcagtctgcttaagggaagaaaactttggatttgctgggtctgaatcggcttcataaactccactgggagcactgctgggctcctggactgagaatagttgaacaccgggggctttgtgaaggagtctgggccaaggtttgccctcagctttgcagaatgaagccttgaggtctgtcaccacccacagccaccctacagcagccttaactgtgacacttgccacactgtgtcgtcgtttgtttgcctatgtcctccagggcacggtggcaggaacaactatcctcgtctgtcccaacactgagcaggcactcggtaaacacgaatgaatggatgagcgcacggatgaatggagcttacaagatctgtctttccaatggccgggggcatttggtccccaaattaaggctattggacatctgcacaggacagtcctatttttgatgtcctttcctttctgaaaataaagttttgtgctttggagaatgactcgtgagcacatctttagggaccaagagtgactttctgtaaggagtgactcgtggcttgccttggtctcttgggaatacttttctaactagggttgctctcacctgagacattctccacccgcggaatctcagggtcccaggctgtgggccatcacgacctcaaactggctcctaatctccagctttcctgtcattgaaagcttcggaagtttactggctctgctcccgcctgttttctttctgactctatctggcagcccgatgccacccagtacaggaagtgacaccagtactctgtaaagcatcatcatccttggagagactgagcactcagcaccttcagccacgatttcaggatcgcttccttgtgagccgctgcctccgaaatctcctttgaagcccagacatctttctccagcttcagacttgtagatataactcgttcatcttcatttactttccactttgccccctgtcctctctgtgttccccaaatcagagaatagcccgccatcccccaggtcacctgtctggattcctccccattcacccaccttgccaggtgcaggtgaggatggtgcaccagacagggtagctgtcccccaaaatgtgccctgtgcgggcagtgccctgtctccacgtttgtttccccagtgtctggcggggagccaggtgacatcataaatacttgctgaatgaatgcagaaatcagcggtactgacttgtactatattggctgccatgatagggttctcacagcgtcatccatgatcgtaagggagaatgacattctgcttgagggagggaatagaaaggggcagggaggggacatctgagggcttcacagggctgcaaagggtacagggattgcaccagggcagaacaggggagggtgttcaaggaagagtggctcttagcagaggcactttggaaggtgtgaggcataaatgcttccttctacgtaggccaacctcaaaactttcagtaggaatgttgctatgatcaagttgttctaacactttagacttagtagtaattatgaacctcacatagaaaaatttcatccagccatatgcctgtggagtggaatattctgtttagtagaaaaatcctttagagttcagctctaaccagaaatcttgctgaagtatgtcagcaccttttctcaccctggtaagtacagtatttcaagagcacgctaagggtggttttcattttacagggctgttgatgatgggttaaaaatgttcatttaagggctacccccgtgtttaatagatgaacaccacttctacacaaccctccttggtactgggggagggagagatctgacaaatactgcccattcccctaggctgactggatttgagaacaaatacccacccatttccaccatggtatggtaacttctctgagcttcagtttccaagtgaatttccatgtaataggacattcccattaaatacaagctgtttttactttttcgcctcccagggcctgtgggatctggtcccccagcctctcttgggctttcttacactaactctgtacctaccatctcctgcctcccttaggcaggcacctccaaccaccacacactccctgctgttttccctgcctggaactttccctcctgccccaccaagatcatttcatccagtcctgagctcagcttaagggaggcttcttgcctgtgggttccctcacccccatgcctgtcctccaggctggggcaggttcttagtttgcctggaattgttctgtacctctttgtagcacgtagtgttgtggaaactaagccactaattgagtttctggctcccctcctggggttgtaagttttgttcattcatgagggccgactgcatttcctggttactctatcccagtgaccagccacaggagatgtccaataaagtatgtgatgaaatggtctt

SEQ ID NO: 59369 - DNA, 11417 bp, Artificial Sequence
  derived and/or modified sequence
taccgggcggaggtgagcgcggcgccggctcctcctgcggcggactttgggtgcgacttgacgagcggtggttcgacaagtggccttgcgggccggatcgtcccagtggaagagttgtaaatttgcttctggccttcccctacggattatacctggccttcccctacggattatactcaacttactgtttagaaaatgtggcccacgagacgcctggttactatcaaaaggagcggggtcgacggtccccactttcccctgagcctcagcacctgcttgtttggaaggggtattgaatgtgacatccgtatccagcttcctgttgtgtcaaaacaacattgcaaaattgaaatccatgagcaggaggcaatattacataatttcagttccacaaatccaacacaagtaaatgggtctgttattgatgagcctgtacggctaaaacatggagatgtaataactattattgatcgttccttcaggtatgaaaatgaaagtcttcagaatggaaggaagtcaactgaatttccaagaaaaatacgtgaacaggagccagcacgtcgtgtctcaagatctagcttctcttctgaccctgatgagagtgagggaatacctttgaaaagaaggcgtgtgtcctttggtgggcacctaagacctgaactatttgatgaaaacttgcctcctaatacgcctctcaaaaggggagaagccccaaccaaaagaaagtctctggtaatgcacactccacctgtcctgaagaaaatcatcaaggaacagcctcaaccatcaggaaaacaagagtcaggttcagaaatccatgtggaagtgaaggcacaaagcttggttataagccctccagctcctagtcctaggaaaactccagttgccagtgatcaacgccgtaggtcctgcaaaacagcccctgcttccagcagcaaatctcagacagaggttcctaagagaggagggagaaagagtggcaacctgccttcaaagagagtgtctatcagccgaagtcaacatgatattttacagatgatatgttccaaaagaagaagtggtgcttcggaagcaaatctgattgttgcaaaatcatgggcagatgtagtaaaacttggtgcaaaacaaacacaaactaaagtcataaaacatggtcctcaaaggtcaatgaacaaaaggcaaagaagacctgctactccaaagaagcctgtgggcgaagttcacagtcaatttagtacaggccacgcaaactctccttgtaccataataatagggaaagctcatactgaaaaagtacatgtgcctgctcgaccctacagagtgctcaacaacttcatttccaaccaaaaaatggactttaaggaagatctttcaggaatagctgaaatgttcaagaccccagtgaaggagcaaccgcagttgacaagcacatgtcacatcgctatttcaaattcagagaatttgcttggaaaacagtttcaaggaactgattcaggagaagaacctctgctccccacctcagagagttttggaggaaatgtgttcttcagtgcacagaatgcagcaaaacagccatctgataaatgctctgcaagccctcccttaagacggcagtgtattagagaaaatggaaacgtagcaaaaacgcccaggaacacctacaaaatgacttctctggagacaaaaacttcagatactgagacagagccttcaaaaacagtatccactgcaaacaggtcaggaaggtctacagagttcaggaatatacagaagctacctgtggaaagtaagagtgaagaaacaaatacagaaattgttgagtgcatcctaaaaagaggtcagaaggcaacactactacaacaaaggagagaaggagagatgaaggaaatagaaagaccttttgagacatataaggaaaatattgaattaaaagaaaacgatgaaaagatgaaagcaatgaagagatcaagaacttgggggcagaaatgtgcaccaatgtctgacctgacagacctcaagagcttgcctgatacagaactcatgaaagacacggcacgtggccagaatctcctccaaacccaagatcatgccaaggcaccaaagagtgagaaaggcaaaatcactaaaatgccctgccagtcattacaaccagaaccaataaacaccccaacacacacaaaacaacagttgaaggcatccctggggaaagtaggtgtgaaagaagagctcctagcagtcggcaagttcacacggacgtcaggggagaccacgcacacgcacagagagccagcaggagatggcaagagcatcagaacgtttaaggagtctccaaagcagatcctggacccagcagcccgtgtaactggaatgaagaagtggccaagaacgcctaaggaagaggcccagtcactagaagacctggctggcttcaaagagctcttccagacaccaggtccctctgaggaatcaatgactgatgagaaaactaccaaaatagcctgcaaatctccaccaccagaatcagtggacactccaacaagcacaaagcaatggcctaagagaagtctcaggaaagcagatgtagaggaagaattcttagcactcaggaaactaacaccatcagcagggaaagccatgcttacgcccaaaccagcaggaggtgatgagaaagacattaaagcatttatgggaactccagtgcagaaactggacctggcaggaactttacctggcagcaaaagacagctacagactcctaaggaaaaggcccaggctctagaagacctggctggctttaaagagctcttccagactcctggtcacaccgaggaattagtggctgctggtaaaaccactaaaataccctgcgactctccacagtcagacccagtggacaccccaacaagcacaaagcaacgacccaagagaagtatcaggaaagcagatgtagagggagaactcttagcgtgcaggaatctaatgccatcagcaggcaaagccatgcacacgcctaaaccatcagtaggtgaagagaaagacatcatcatatttgtgggaactccagtgcagaaactggacctgacagagaacttaaccggcagcaagagacggccacaaactcctaaggaagaggcccaggctctggaagacctgactggctttaaagagctcttccagacccctggtcatactgaagaagcagtggctgctggcaaaactactaaaatgccctgcgaatcttctccaccagaatcagcagacaccccaacaagcacaagaaggcagcccaagacacctttggagaaaagggacgtacagaaggagctctcagccctgaagaagctcacacagacatcaggggaaaccacacacacagataaagtaccaggaggtgaggataaaagcatcaacgcgtttagggaaactgcaaaacagaaactggacccagcagcaagtgtaactggtagcaagaggcacccaaaaactaaggaaaaggcccaacccctagaagacctggctggcttgaaagagctcttccagacaccagtatgcactgacaagcccacgactcacgagaaaactaccaaaatagcctgcagatcacaaccagacccagtggacacaccaacaagctccaagccacagtccaagagaagtctcaggaaagtggacgtagaagaagaattcttcgcactcaggaaacgaacaccatcagcaggcaaagccatgcacacacccaaaccagcagtaagtggtgagaaaaacatctacgcatttatgggaactccagtgcagaaactggacctgacagagaacttaactggcagcaagagacggctacaaactcctaaggaaaaggcccaggctctagaagacctggctggctttaaagagctcttccagacacgaggtcacactgaggaatcaatgactaacgataaaactgccaaagtagcctgcaaatcttcacaaccagacccagacaaaaacccagcaagctccaagcgacggctcaagacatccctggggaaagtgggcgtgaaagaagagctcctagcagttggcaagctcacacagacatcaggagagactacacacacacacacagagccaacaggagatggtaagagcatgaaagcatttatggagtctccaaagcagatcttagactcagcagcaagtctaactggcagcaagaggcagctgagaactcctaagggaaagtctgaagtccctgaagacctggccggcttcatcgagctcttccagacaccaagtcacactaaggaatcaatgactaacgaaaaaactaccaaagtatcctacagagcttcacagccagacctagtggacaccccaacaagctccaagccacagcccaagagaagtctcaggaaagcagacactgaagaagaatttttagcatttaggaaacaaacgccatcagcaggcaaagccatgcacacacccaaaccagcagtaggtgaagagaaagacatcaacacgtttttgggaactccagtgcagaaactggaccagccaggaaatttacctggcagcaatagacggctacaaactcgtaaggaaaaggcccaggctctagaagaactgactggcttcagagagcttttccagacaccatgcactgataaccccacgactgatgagaaaactaccaaaaaaatactctgcaaatctccgcaatcagacccagcggacaccccaacaaacacaaagcaacggcccaagagaagcctcaagaaagcagacgtagaggaagaatttttagcattcaggaaactaacaccatcagcaggcaaagccatgcacacgcctaaagcagcagtaggtgaagagaaagacatcaacacatttgtggggactccagtggagaaactggacctgctaggaaatttacctggcagcaagagacggccacaaactcctaaagaaaaggccaaggctctagaagatctggctggcttcaaagagctcttccagacaccaggtcacactgaggaatcaatgaccgatgacaaaatcacagaagtatcctgcaaatctccacaaccagacccagtcaaaaccccaacaagctccaagcaacgactcaagatatccttggggaaagtaggtgtgaaagaagaggtcctaccagtcggcaagctcacacagacgtcagggaagaccacacagacacacagagagacagcaggagatggaaagagcatcaaagcgtttaaggaatctgcaaagcagatgctggacccagcaaactatggaactgggatggagaggtggccaagaacacctaaggaagaggcccaatcactagaagacctggccggcttcaaagagctcttccagacaccagaccacactgaggaatcaacaactgatgacaaaactaccaaaatagcctgcaaatctccaccaccagaatcaatggacactccaacaagcacaaggaggcggcccaaaacacctttggggaaaagggatatagtggaagagctctcagccctgaagcagctcacacagaccacacacacagacaaagtaccaggagatgaggataaaggcatcaacgtgttcagggaaactgcaaaacagaaactggacccagcagcaagtgtaactggtagcaagaggcagccaagaactcctaagggaaaagcccaacccctagaagacttggctggcttgaaagagctcttccagacaccaatatgcactgacaagcccacgactcatgagaaaactaccaaaatagcctgcagatctccacaaccagacccagtgggtaccccaacaatcttcaagccacagtccaagagaagtctcaggaaagcagacgtagaggaagaatccttagcactcaggaaacgaacaccatcagtagggaaagctatggacacacccaaaccagcaggaggtgatgagaaagacatgaaagcatttatgggaactccagtgcagaaattggacctgccaggaaatttacctggcagcaaaagatggccacaaactcctaaggaaaaggcccaggctctagaagacctggctggcttcaaagagctcttccagacaccaggcactgacaagcccacgactgatgagaaaactaccaaaatagcctgcaaatctccacaaccagacccagtggacaccccagcaagcacaaagcaacggcccaagagaaacctcaggaaagcagacgtagaggaagaatttttagcactcaggaaacgaacaccatcagcaggcaaagccatggacacaccaaaaccagcagtaagtgatgagaaaaatatcaacacatttgtggaaactccagtgcagaaactggacctgctaggaaatttacctggcagcaagagacagccacagactcctaaggaaaaggctgaggctctagaggacctggttggcttcaaagaactcttccagacaccaggtcacactgaggaatcaatgactgatgacaaaatcacagaagtatcctgtaaatctccacagccagagtcattcaaaacctcaagaagctccaagcaaaggctcaagatacccctggtgaaagtggacatgaaagaagagcccctagcagtcagcaagctcacacggacatcaggggagactacgcaaacacacacagagccaacaggagatagtaagagcatcaaagcgtttaaggagtctccaaagcagatcctggacccagcagcaagtgtaactggtagcaggaggcagctgagaactcgtaaggaaaaggcccgtgctctagaagacctggttgacttcaaagagctcttctcagcaccaggtcacactgaagagtcaatgactattgacaaaaacacaaaaattccctgcaaatctcccccaccagaactaacagacactgccacgagcacaaagagatgccccaagacacgtcccaggaaagaagtaaaagaggagctctcagcagttgagaggctcacgcaaacatcagggcaaagcacacacacacacaaagaaccagcaagcggtgatgagggcatcaaagtattgaagcaacgtgcaaagaagaaaccaaacccagtagaagaggaacccagcaggagaaggccaagagcacctaaggaaaaggcccaacccctggaagacctggccggcttcacagagctctctgaaacatcaggtcacactcaggaatcactgactgctggcaaagccactaaaataccctgcgaatctcccccactagaagtggtagacaccacagcaagcacaaagaggcatctcaggacacgtgtgcagaaggtacaagtaaaagaagagccttcagcagtcaagttcacacaaacatcaggggaaaccacggatgcagacaaagaaccagcaggtgaagataaaggcatcaaagcattgaaggaatctgcaaaacagacaccggctccagcagcaagtgtaactggcagcaggagacggccaagagcacccagggaaagtgcccaagccatagaagacctagctggcttcaaagacccagcagcaggtcacactgaagaatcaatgactgatgacaaaaccactaaaataccctgcaaatcatcaccagaactagaagacaccgcaacaagctcaaagagacggcccaggacacgtgcccagaaagtagaagtgaaggaggagctgttagcagttggcaagctcacacaaacctcaggggagaccacgcacaccgacaaagagccggtaggtgagggcaaaggcacgaaagcatttaagcaacctgcaaagcggaagctggacgcagaagatgtaattggcagcaggagacagccaagagcacctaaggaaaaggcccaacccctggaagatctggccagcttccaagagctctctcaaacaccaggccacactgaggaactggcaaatggtgctgctgatagctttacaagcgctccaaagcaaacacctgacagtggaaaacctctaaaaatatccagaagagttcttcgggcccctaaagtagaacccgtgggagacgtggtaagcaccagagaccctgtaaaatcacaaagcaaaagcaacacttccctgcccccactgcccttcaagaggggaggtggcaaagatggaagcgtcacgggaaccaagaggctgcgctgcatgccagcaccagaggaaattgtggaggagctgccagccagcaagaagcagagggttgctcccagggcaagaggcaaatcatccgaacccgtggtcatcatgaagagaagtttgaggacttctgcaaaaagaattgaacctgcggaagagctgaacagcaacgacatgaaaaccaacaaagaggaacacaaattacaagactcggtccctgaaaataagggaatatccctgcgctccagacgccaaaataagactgaggcagaacagcaaataactgaggtctttgtattagcagaaagaatagaaataaacagaaatgaaaagaagcccatgaagacctccccagagatggacattcagaatccagatgatggagcccggaaacccatacctagagacaaagtcactgagaacaaaaggtgcttgaggtctgctagacagaatgagagctcccagcctaaggtggcagaggagagcggagggcagaagagtgcgaaggttctcatgcagaatcagaaagggaaaggagaagcaggaaattcagactccatgtgcctgagatcaagaaagacaaaaagccagcctgcagcaagcactttggagagcaaatctgtgcagagagtaacgcggagtgtcaagaggtgtgcagaaaatccaaagaaggctgaggacaatgtgtgtgtcaagaaaataagaaccagaagtcatagggacagtgaagatatttgacagaaaaatcgaactgggaaaaatataataaagttagttttgtgataagttctagtgcagtttttgtcataaattacaagtgaattctgtaagtaaggctgtcagtctgcttaagggaagaaaactttggatttgctgggtctgaatcggcttcataaactccactgggagcactgctgggctcctggactgagaatagttgaacaccgggggctttgtgaaggagtctgggccaaggtttgccctcagctttgcagaatgaagccttgaggtctgtcaccacccacagccaccctacagcagccttaactgtgacacttgccacactgtgtcgtcgtttgtttgcctatgtcctccagggcacggtggcaggaacaactatcctcgtctgtcccaacactgagcaggcactcggtaaacacgaatgaatggatgagcgcacggatgaatggagcttacaagatctgtctttccaatggccgggggcatttggtccccaaattaaggctattggacatctgcacaggacagtcctatttttgatgtcctttcctttctgaaaataaagttttgtgctttggagaatgactcgtgagcacatctttagggaccaagagtgactttctgtaaggagtgactcgtggcttgccttggtctcttgggaatacttttctaactagggttgctctcacctgagacattctccacccgcggaatctcagggtcccaggctgtgggccatcacgacctcaaactggctcctaatctccagctttcctgtcattgaaagcttcggaagtttactggctctgctcccgcctgttttctttctgactctatctggcagcccgatgccacccagtacaggaagtgacaccagtactctgtaaagcatcatcatccttggagagactgagcactcagcaccttcagccacgatttcaggatcgcttccttgtgagccgctgcctccgaaatctcctttgaagcccagacatctttctccagcttcagacttgtagatataactcgttcatcttcatttactttccactttgccccctgtcctctctgtgttccccaaatcagagaatagcccgccatcccccaggtcacctgtctggattcctccccattcacccaccttgccaggtgcaggtgaggatggtgcaccagacagggtagctgtcccccaaaatgtgccctgtgcgggcagtgccctgtctccacgtttgtttccccagtgtctggcggggagccaggtgacatcataaatacttgctgaatgaatgcagaaatcagcggtactgacttgtactatattggctgccatgatagggttctcacagcgtcatccatgatcgtaagggagaatgacattctgcttgagggagggaatagaaaggggcagggaggggacatctgagggcttcacagggctgcaaagggtacagggattgcaccagggcagaacaggggagggtgttcaaggaagagtggctcttagcagaggcactttggaaggtgtgaggcataaatgcttccttctacgtaggccaacctcaaaactttcagtaggaatgttgctatgatcaagttgttctaacactttagacttagtagtaattatgaacctcacatagaaaaatttcatccagccatatgcctgtggagtggaatattctgtttagtagaaaaatcctttagagttcagctctaaccagaaatcttgctgaagtatgtcagcaccttttctcaccctggtaagtacagtatttcaagagcacgctaagggtggttttcattttacagggctgttgatgatgggttaaaaatgttcatttaagggctacccccgtgtttaatagatgaacaccacttctacacaaccctccttggtactgggggagggagagatctgacaaatactgcccattcccctaggctgactggatttgagaacaaatacccacccatttccaccatggtatggtaacttctctgagcttcagtttccaagtgaatttccatgtaataggacattcccattaaatacaagctgtttttactttttcgcctcccagggcctgtgggatctggtcccccagcctctcttgggctttcttacactaactctgtacctaccatctcctgcctcccttaggcaggcacctccaaccaccacacactccctgctgttttccctgcctggaactttccctcctgccccaccaagatcatttcatccagtcctgagctcagcttaagggaggcttcttgcctgtgggttccctcacccccatgcctgtcctccaggctggggcaggttcttagtttgcctggaattgttctgtacctctttgtagcacgtagtgttgtggaaactaagccactaattgagtttctggctcccctcctggggttgtaagttttgttcattcatgagggccgactgcatttcctggttactctatcccagtgaccagccacaggagatgtccaataaagtatgtgatgaaatggtcttaaaa

SEQ ID NO: 59370 - DNA, 1251 bp, Artificial Sequence
  derived and/or modified sequence
atgtggcccaccagaagactggtgaccatcaagagaagcggcgtggacggcccccacttccccctgagcctgagcacctgcctgttcggcagatacgagaacgagagcctgcagaacggcagaaagagcaccgagttccccagaaagatcagagagcaggagcccgccagaagagtgagcagaagcagcttcagcagcgaccccgacgagagcgagggcatccccctgaagagaagaagagtgagcttcggcggccacctgagacccgagctgttcgacgagaacctgccccccaacacccccctgaagagaggcgaggcccccaccaagagaaagagcctggtgatgcacaccccccccgtgctgaagaagatcatcaaggagcagccccagcccagcggcaagcaggagagcggcagcgagatccacgtggaggtgaaggcccagagcctggtgatcagcccccccgcccccagccccagaaagacccccgtggccagcgaccagagaagaagaagctgcaagaccgcccccgccagcagcagcaagagccagaccgaggtgcccaagagaggcggcagaaagagcggcaacctgcccagcaagagagtgagcatcagcagaagccagcacgacatcctgcagatgatctgcagcaagagaagaagcggcgccagcgaggccaacctgatcgtggccaagagctgggccgacgtggtgaagctgggcgccaagcagacccagaccaaggtgatcaagcacggcccccagagaagcatgaacaagagacagagaagacccgccacccccaagaagcccgtgggcgaggtgcacagccagttcagcaccggccacgccaacagcccctgcaccatcatcatcggcaaggcccacaccgagaaggtgcacgtgcccgccagaccctacagagtgctgaacaacttcatcagcaaccagaagatggacttcaaggaggacctgagcggcatcgccgagatgttcaagacccccgtgaaggagcagccccagctgaccagcacctgccacatcgccatcagcaacagcgagaacctgctgggcaagcagttccagggcaccgacagcggcgaggagcccctgctgcccaccagcgagagcttcggcggcaacgtgttcttcagcgcccagaacgccgccaagcagcccagcgacaagtgcagcgccagcccccccctgagaagacagtgcatcagagagaacggcaacgtgtag

SEQ ID NO: 59371 - DNA, 8691 bp, Artificial Sequence
  derived and/or modified sequence
atgtggcccaccagaagactggtgaccatcaagagaagcggcgtggacggcccccacttccccctgagcctgagcacctgcctgttcggcagaggcatcgagtgcgacatcagaatccagctgcccgtggtgagcaagcagcactgcaagatcgagatccacgagcaggaggccatcctgcacaacttcagcagcaccaaccccacccaggtgaacggcagcgtgatcgacgagcccgtgagactgaagcacggcgacgtgatcaccatcatcgacagaagcttcagatacgagaacgagagcctgcagaacggcagaaagagcaccgagttccccagaaagatcagagagcaggagcccgccagaagagtgagcagaagcagcttcagcagcgaccccgacgagagcgagggcatccccctgaagagaagaagagtgagcttcggcggccacctgagacccgagctgttcgacgagaacctgccccccaacacccccctgaagagaggcgaggcccccaccaagagaaagagcctggtgatgcacaccccccccgtgctgaagaagatcatcaaggagcagccccagcccagcggcaagcaggagagcggcagcgagatccacgtggaggtgaaggcccagagcctggtgatcagcccccccgcccccagccccagaaagacccccgtggccagcgaccagagaagaagaagctgcaagaccgcccccgccagcagcagcaagagccagaccgaggtgcccaagagaggcggcagaaagagcggcaacctgcccagcaagagagtgagcatcagcagaagccagcacgacatcctgcagatgatctgcagcaagagaagaagcggcgccagcgaggccaacctgatcgtggccaagagctgggccgacgtggtgaagctgggcgccaagcagacccagaccaaggtgatcaagcacggcccccagagaagcatgaacaagagacagagaagacccgccacccccaagaagcccgtgggcgaggtgcacagccagttcagcaccggccacgccaacagcccctgcaccatcatcatcggcaaggcccacaccgagaaggtgcacgtgcccgccagaccctacagagtgctgaacaacttcatcagcaaccagaagatggacttcaaggaggacctgagcggcatcgccgagatgttcaagacccccgtgaaggagcagccccagctgaccagcacctgccacatcgccatcagcaacagcgagaacctgctgggcaagcagttccagggcaccgacagcggcgaggagcccctgctgcccaccagcgagagcttcggcggcaacgtgttcttcagcgcccagaacgccgccaagcagcccagcgacaagtgcagcgccagcccccccctgagaagacagtgcatcagagagaacggcaacgtggccaagacccccagaaacacctacaagatgaccagcctggagaccaagaccagcgacaccgagaccgagcccagcaagaccgtgagcaccgccaacagaagcggcagaagcaccgagttcagaaacatccagaagctgcccgtggagagcaagagcgaggagaccaacaccgagatcgtggagtgcatcctgaagagaggccagaaggccaccctgctgcagcagagaagagagggcgagatgaaggagatcgagagacccttcgagacctacaaggagaacatcgagctgaaggagaacgacgagaagatgaaggccatgaagagaagcagaacctggggccagaagtgcgcccccatgagcgacctgaccgacctgaagagcctgcccgacaccgagctgatgaaggacaccgccagaggccagaacctgctgcagacccaggaccacgccaaggcccccaagagcgagaagggcaagatcaccaagatgccctgccagagcctgcagcccgagcccatcaacacccccacccacaccaagcagcagctgaaggccagcctgggcaaggtgggcgtgaaggaggagctgctggccgtgggcaagttcaccagaaccagcggcgagaccacccacacccacagagagcccgccggcgacggcaagagcatcagaaccttcaaggagagccccaagcagatcctggaccccgccgccagagtgaccggcatgaagaagtggcccagaacccccaaggaggaggcccagagcctggaggacctggccggcttcaaggagctgttccagacccccggccccagcgaggagagcatgaccgacgagaagaccaccaagatcgcctgcaagagccccccccccgagagcgtggacacccccaccagcaccaagcagtggcccaagagaagcctgagaaaggccgacgtggaggaggagttcctggccctgagaaagctgacccccagcgccggcaaggccatgctgacccccaagcccgccggcggcgacgagaaggacatcaaggccttcatgggcacccccgtgcagaagctggacctggccggcaccctgcccggcagcaagagacagctgcagacccccaaggagaaggcccaggccctggaggacctggccggcttcaaggagctgttccagacccccggccacaccgaggagctggtggccgccggcaagaccaccaagatcccctgcgacagcccccagagcgaccccgtggacacccccaccagcaccaagcagagacccaagagaagcatcagaaaggccgacgtggagggcgagctgctggcctgcagaaacctgatgcccagcgccggcaaggccatgcacacccccaagcccagcgtgggcgaggagaaggacatcatcatcttcgtgggcacccccgtgcagaagctggacctgaccgagaacctgaccggcagcaagagaagaccccagacccccaaggaggaggcccaggccctggaggacctgaccggcttcaaggagctgttccagacccccggccacaccgaggaggccgtggccgccggcaagaccaccaagatgccctgcgagagcagcccccccgagagcgccgacacccccaccagcaccagaagacagcccaagacccccctggagaagagagacgtgcagaaggagctgagcgccctgaagaagctgacccagaccagcggcgagaccacccacaccgacaaggtgcccggcggcgaggacaagagcatcaacgccttcagagagaccgccaagcagaagctggaccccgccgccagcgtgaccggcagcaagagacaccccaagaccaaggagaaggcccagcccctggaggacctggccggcctgaaggagctgttccagacccccgtgtgcaccgacaagcccaccacccacgagaagaccaccaagatcgcctgcagaagccagcccgaccccgtggacacccccaccagcagcaagccccagagcaagagaagcctgagaaaggtggacgtggaggaggagttcttcgccctgagaaagagaacccccagcgccggcaaggccatgcacacccccaagcccgccgtgagcggcgagaagaacatctacgccttcatgggcacccccgtgcagaagctggacctgaccgagaacctgaccggcagcaagagaagactgcagacccccaaggagaaggcccaggccctggaggacctggccggcttcaaggagctgttccagaccagaggccacaccgaggagagcatgaccaacgacaagaccgccaaggtggcctgcaagagcagccagcccgaccccgacaagaaccccgccagcagcaagagaagactgaagaccagcctgggcaaggtgggcgtgaaggaggagctgctggccgtgggcaagctgacccagaccagcggcgagaccacccacacccacaccgagcccaccggcgacggcaagagcatgaaggccttcatggagagccccaagcagatcctggacagcgccgccagcctgaccggcagcaagagacagctgagaacccccaagggcaagagcgaggtgcccgaggacctggccggcttcatcgagctgttccagacccccagccacaccaaggagagcatgaccaacgagaagaccaccaaggtgagctacagagccagccagcccgacctggtggacacccccaccagcagcaagccccagcccaagagaagcctgagaaaggccgacaccgaggaggagttcctggccttcagaaagcagacccccagcgccggcaaggccatgcacacccccaagcccgccgtgggcgaggagaaggacatcaacaccttcctgggcacccccgtgcagaagctggaccagcccggcaacctgcccggcagcaacagaagactgcagaccagaaaggagaaggcccaggccctggaggagctgaccggcttcagagagctgttccagaccccctgcaccgacaaccccaccaccgacgagaagaccaccaagaagatcctgtgcaagagcccccagagcgaccccgccgacacccccaccaacaccaagcagagacccaagagaagcctgaagaaggccgacgtggaggaggagttcctggccttcagaaagctgacccccagcgccggcaaggccatgcacacccccaaggccgccgtgggcgaggagaaggacatcaacaccttcgtgggcacccccgtggagaagctggacctgctgggcaacctgcccggcagcaagagaagaccccagacccccaaggagaaggccaaggccctggaggacctggccggcttcaaggagctgttccagacccccggccacaccgaggagagcatgaccgacgacaagatcaccgaggtgagctgcaagagcccccagcccgaccccgtgaagacccccaccagcagcaagcagagactgaagatcagcctgggcaaggtgggcgtgaaggaggaggtgctgcccgtgggcaagctgacccagaccagcggcaagaccacccagacccacagagagaccgccggcgacggcaagagcatcaaggccttcaaggagagcgccaagcagatgctggaccccgccaactacggcaccggcatggagagatggcccagaacccccaaggaggaggcccagagcctggaggacctggccggcttcaaggagctgttccagacccccgaccacaccgaggagagcaccaccgacgacaagaccaccaagatcgcctgcaagagccccccccccgagagcatggacacccccaccagcaccagaagaagacccaagacccccctgggcaagagagacatcgtggaggagctgagcgccctgaagcagctgacccagaccacccacaccgacaaggtgcccggcgacgaggacaagggcatcaacgtgttcagagagaccgccaagcagaagctggaccccgccgccagcgtgaccggcagcaagagacagcccagaacccccaagggcaaggcccagcccctggaggacctggccggcctgaaggagctgttccagacccccatctgcaccgacaagcccaccacccacgagaagaccaccaagatcgcctgcagaagcccccagcccgaccccgtgggcacccccaccatcttcaagccccagagcaagagaagcctgagaaaggccgacgtggaggaggagagcctggccctgagaaagagaacccccagcgtgggcaaggccatggacacccccaagcccgccggcggcgacgagaaggacatgaaggccttcatgggcacccccgtgcagaagctggacctgcccggcaacctgcccggcagcaagagatggccccagacccccaaggagaaggcccaggccctggaggacctggccggcttcaaggagctgttccagacccccggcaccgacaagcccaccaccgacgagaagaccaccaagatcgcctgcaagagcccccagcccgaccccgtggacacccccgccagcaccaagcagagacccaagagaaacctgagaaaggccgacgtggaggaggagttcctggccctgagaaagagaacccccagcgccggcaaggccatggacacccccaagcccgccgtgagcgacgagaagaacatcaacaccttcgtggagacccccgtgcagaagctggacctgctgggcaacctgcccggcagcaagagacagccccagacccccaaggagaaggccgaggccctggaggacctggtgggcttcaaggagctgttccagacccccggccacaccgaggagagcatgaccgacgacaagatcaccgaggtgagctgcaagagcccccagcccgagagcttcaagaccagcagaagcagcaagcagagactgaagatccccctggtgaaggtggacatgaaggaggagcccctggccgtgagcaagctgaccagaaccagcggcgagaccacccagacccacaccgagcccaccggcgacagcaagagcatcaaggccttcaaggagagccccaagcagatcctggaccccgccgccagcgtgaccggcagcagaagacagctgagaaccagaaaggagaaggccagagccctggaggacctggtggacttcaaggagctgttcagcgcccccggccacaccgaggagagcatgaccatcgacaagaacaccaagatcccctgcaagagccccccccccgagctgaccgacaccgccaccagcaccaagagatgccccaagaccagacccagaaaggaggtgaaggaggagctgagcgccgtggagagactgacccagaccagcggccagagcacccacacccacaaggagcccgccagcggcgacgagggcatcaaggtgctgaagcagagagccaagaagaagcccaaccccgtggaggaggagcccagcagaagaagacccagagcccccaaggagaaggcccagcccctggaggacctggccggcttcaccgagctgagcgagaccagcggccacacccaggagagcctgaccgccggcaaggccaccaagatcccctgcgagagcccccccctggaggtggtggacaccaccgccagcaccaagagacacctgagaaccagagtgcagaaggtgcaggtgaaggaggagcccagcgccgtgaagttcacccagaccagcggcgagaccaccgacgccgacaaggagcccgccggcgaggacaagggcatcaaggccctgaaggagagcgccaagcagacccccgcccccgccgccagcgtgaccggcagcagaagaagacccagagcccccagagagagcgcccaggccatcgaggacctggccggcttcaaggaccccgccgccggccacaccgaggagagcatgaccgacgacaagaccaccaagatcccctgcaagagcagccccgagctggaggacaccgccaccagcagcaagagaagacccagaaccagagcccagaaggtggaggtgaaggaggagctgctggccgtgggcaagctgacccagaccagcggcgagaccacccacaccgacaaggagcccgtgggcgagggcaagggcaccaaggccttcaagcagcccgccaagagaaagctggacgccgaggacgtgatcggcagcagaagacagcccagagcccccaaggagaaggcccagcccctggaggacctggccagcttccaggagctgagccagacccccggccacaccgaggagctggccaacggcgccgccgacagcttcaccagcgcccccaagcagacccccgacagcggcaagcccctgaagatcagcagaagagtgctgagagcccccaaggtggagcccgtgggcgacgtggtgagcaccagagaccccgtgaagagccagagcaagagcaacaccagcctgccccccctgcccttcaagagaggcggcggcaaggacggcagcgtgaccggcaccaagagactgagatgcatgcccgcccccgaggagatcgtggaggagctgcccgccagcaagaagcagagagtggcccccagagccagaggcaagagcagcgagcccgtggtgatcatgaagagaagcctgagaaccagcgccaagagaatcgagcccgccgaggagctgaacagcaacgacatgaagaccaacaaggaggagcacaagctgcaggacagcgtgcccgagaacaagggcatcagcctgagaagcagaagacagaacaagaccgaggccgagcagcagatcaccgaggtgttcgtgctggccgagagaatcgagatcaacagaaacgagaagaagcccatgaagaccagccccgagatggacatccagaaccccgacgacggcgccagaaagcccatccccagagacaaggtgaccgagaacaagagatgcctgagaagcgccagacagaacgagagcagccagcccaaggtggccgaggagagcggcggccagaagagcgccaaggtgctgatgcagaaccagaagggcaagggcgaggccggcaacagcgacagcatgtgcctgagaagcagaaagaccaagagccagcccgccgccagcaccctggagagcaagagcgtgcagagagtgaccagaagcgtgaagagatgcgccgagaaccccaagaaggccgaggacaacgtgtgcgtgaagaagatcagaaccagaagccacagagacagcgaggacatctag

SEQ ID NO: 59372 - protein, 641 aa, Artificial Sequence
  derived and/or modified sequence
MATCWQALWAYRSYLIVFFVPILLLPLPILVPSKEAYCAYAIILMALFWCTEALPLAVTALFPLILFPMMGIVDASEIIQRPFPSSFESPGECQSVGMSVTASHNLGGTVGDSRVFPPLSHVSTCQVAVEYLKDSNLLFFGGLLVAIAVEHWNLHKRIALRVLLIVGVRPAPLILGFMLVTAFLSMWISNTATSAMMVPIAHAVLDQLHSSQASSNVEEGSNNPTFELQEPSPQKEVTKLDNGQALPVTSASSEGRAHLSQKHLHLTQCMSLCVCYSASIGGIATLTGTAPNLVLQGQINSLFPQNGNVVNFASWFSFAFPTMVILLLLAWLWLQILFLGFNFRKNFGIGEKMQEQQQAAYCVIQTEHRLLGPMTFAEKAISILFVILVLLWFTREPGFFLGWGNLAFPNAKGESMVSDGTVAIFIGIIMFIIPSKFPGLTQDPENPGKLKAPLGLLDWKTVNQKMPWNIVLLLGGGYALAKGSERSGLSEWLGNKLTPLQSVPAPAIAIILSLLVATFTECTSNVATTTIFLPILASMAQAICLHPLYVMLPCTLATSLAFMLPVATPPNAIVFSFGDLKVLDMARAGFLLNIIGVLIIALAINSWGIPLFSLHSFPSWAQSNTTAQCLPSLANTTTPSP

SEQ ID NO: 59373 - DNA, 1926 bp, Artificial Sequence
  derived and/or modified sequence
atggctacctgttggcaagctctgtgggcgtatcgttcttacctgattgtcttcttcgtccctattctgttattgcctttacctattctggtgccatctaaggaagcttattgtgcttatgccatcatcttgatggcgctgttctggtgcaccgaggccctgcccctcgccgttactgccctttttcctctgattctgttcccgatgatggggatcgtggatgcatcagagatcatccaaaggcccttcccctcgtctttcgagtccccgggcgagtgccagtctgtggggatgtcagtgacagcctcgcacaacctgggaggaacagtgggcgatagtcgggtatttccccctttgtcccacgtgtccacttgccaggtagctgtcgaatacctgaaagattcaaatctgcttttcttcggcggactcctcgtggcgatcgccgtggaacactggaatctgcacaagagaatagcccttcgcgtgttgctgattgttggggtgcgtcccgctcccctaattttgggcttcatgctggttactgccttcctctccatgtggatttcaaatacagcaacctctgccatgatggtccccattgctcatgctgtgcttgatcagctacatagcagccaggcctcttctaacgtagaggagggttccaacaacccgacctttgaactacaggagccatcccctcagaaagaagtgacgaagctggacaacgggcaggccttgcccgtcacttcagcctcaagcgaaggccgagctcacctctcccagaaacaccttcatcttactcagtgcatgagtctttgcgtctgctactctgcctcaattggtggcatcgctacgttaacgggaactgctcctaatctcgtcctgcagggacaaatcaatagtctgttcccccaaaatggcaatgtggttaacttcgcttcatggtttagcttcgctttcccgacaatggtaatactactgctgttggcctggctctggctgcaaatcctctttttgggttttaattttaggaaaaactttggcatcggcgaaaaaatgcaggagcagcaacaggccgcctactgcgtgatccaaacggaacacagattgttaggcccaatgacctttgccgagaaggccattagcatcttgttcgtcatccttgtgctgctctggttcactagggaaccgggttttttcctgggctggggaaacttggctttccctaacgccaagggcgaaagcatggtctctgatggcactgtcgctatatttatagggatcatcatgttcattatccctagtaagttccctggactgacccaagaccctgaaaatcctggcaaattaaaagctccactgggtctcttagattggaagaccgtcaaccagaagatgccctggaatattgtgctcctcctgggcgggggttacgccctggccaagggatctgagcgctcaggcctgagcgaatggctcggtaacaagttaactcccctccagagcgtgccagccccagcgatcgcaattattctgtccctcctggtcgccacattcacagaatgcacttcaaacgttgccacgacaaccatattcctcccaatcttggctagcatggctcaggccatttgcctccatcccttgtacgtaatgctgccatgtacgttggcaacaagcttggcatttatgctgcccgtggccacgccacctaacgcaattgtttttagctttggcgatctgaaagtgctcgacatggcccgggccggcttccttctgaacataatcggcgtgctgatcattgctctggcaatcaactcatggggaattccactgttcagcctgcacagctttcctagttgggctcagtctaacactacagctcaatgtctaccttctctggccaatactactacacccagtccgtag

SEQ ID NO: 59374 - DNA, 1926 bp, Artificial Sequence
  derived and/or modified sequence
atggccacctgctggcaggccctgtgggcctaccgcagctacctgattgtgttctttgtgcccatcctgctgctgcccctgcccatcctggtgcccagcaaggaggcctactgtgcctatgccatcatcctgatggccctcttctggtgcacagaggccctgcccctggccgtgacagccctcttccccctcatcctcttccccatgatgggcatcgtggatgccagcgagatcatccagaggcccttccccagcagctttgagagccctggagagtgccagagcgtgggcatgtctgtgacagccagccacaacctgggcggcaccgtgggggacagcagggtcttcccccccctgagccacgtgtccacctgccaggtggccgtggagtacctgaaggacagcaacctgctcttcttcggcggcctgctggtggccatcgctgtggagcactggaacctgcacaagagaattgccctgcgggtgctgctgattgtgggcgtgcggcctgcccccctcatcctgggcttcatgctggtgacagccttcctgtccatgtggatcagcaacacagccaccagcgccatgatggtgcccatcgcccatgctgtgctggaccagctgcacagcagccaggccagcagcaatgtggaggagggcagcaacaaccccacctttgagctgcaggagcccagcccccagaaggaggtgaccaagctggacaatggccaggccctgcctgtgaccagcgccagcagcgagggccgggcccacctgagccagaagcacctgcacctgacccagtgcatgagcctgtgtgtgtgctacagcgccagcatcggcggcatcgccaccctgactggaacagcccccaacctggtgctgcagggccagatcaacagcctcttcccccagaatggaaatgtggtgaactttgcctcctggttctcctttgccttccccaccatggtgatcctgctgctgctggcctggctgtggctgcagatcctcttcctgggcttcaacttcaggaagaactttggaattggagagaagatgcaggagcagcagcaggccgcctactgcgtcatccagacagagcaccggctgctgggccccatgacctttgctgagaaggccatcagcatcctgtttgtgatcctggtgctgctgtggttcacccgggagcccggcttcttcctgggctggggcaacctggccttccccaatgccaagggggagagcatggtgtctgatggcaccgtggccatcttcatcggcatcatcatgttcatcatccccagcaagtttcctggcctgacccaggaccctgaaaatcctgggaagctgaaggcccccctgggcctgctggactggaagacagtgaaccagaagatgccctggaacatcgtgctgctgctgggcggcggctacgccctggccaagggcagcgagaggagcggcctgtctgagtggctgggcaacaagctgacccccctgcagagcgtgcctgccccagccatcgccatcatcctgagcctgctggtggccaccttcacagaatgtaccagcaatgtggccaccaccaccatcttcctgcccatcctggcctccatggcccaggccatctgcctgcaccccctgtatgtgatgctgccctgcaccctggccaccagcctggccttcatgctgcctgtggccaccccaccaaatgccatcgtgttctcctttggagacctgaaggtgctggacatggcccgggccggcttcctgctgaacatcattggagtgctgatcatcgccctggccatcaacagctggggcatccccctcttcagcctgcacagcttccccagctgggcccagagcaacaccacagcccagtgcctgcccagcctggccaacaccaccacccccagcccctag

SEQ ID NO: 59375 - DNA, 1926 bp, Artificial Sequence
  derived and/or modified sequence
atggccacctgctggcaggccctgtgggcctaccggagctacctgatcgtcttctttgtcccgatcttgttgctccccctcccaattctcgttccttcaaaggaggcatactgtgcttacgctattattcttatggccttattctggtgcacagaggccttacccctggcagtgacggcattgttccccttgattctgtttcccatgatgggcattgtggacgcctcagaaatcatacaacgacctttccccagctcatttgagtcccccggagagtgccaatccgtgggaatgagcgtcaccgcttcccacaatctagggggcactgtgggtgactctagagtgtttccacctctctcacatgtcagcacgtgccaggtggctgtagaatacctgaaggacagtaatctcctattttttggtggcctgcttgtcgccatcgctgtcgaacactggaatctccacaagcgcatcgcgctgcgggttctgttgatcgtaggcgtccgtccagcccccctgatcctgggattcatgctggtgacagcttttctgtcaatgtggatcagcaataccgcgacttcagcaatgatggtacccatcgcgcacgctgtgctggatcaactgcattcttcccaggcatcttccaacgtggaagagggttcaaacaatcccacatttgaattgcaggagccttcaccacagaaagaagtgacaaagcttgacaacggccaggctctgcctgttacatctgcctcctctgaaggaagagcacacctcagtcaaaaacatctgcatttaacacaatgtatgtctttgtgcgtatgctacagcgcgtccattggcggcatcgcaaccctaactggaactgcccccaatctggtcctgcagggacagatcaactccctgttcccccagaacggcaatgtggtgaactttgccagttggtttagttttgctttccccaccatggttattcttctgctgctcgcgtggctgtggctgcagatcctcttcctggggtttaactttcgcaagaattttggcattggtgagaagatgcaggagcaacagcaggccgcctactgtgtaatacagacggaacaccggttgcttggacccatgacattcgccgaaaaggcaatatccatcctttttgtgatactggtgctgttgtggtttactagggaaccggggttcttcctgggctggggtaatctggcgttccctaacgccaaaggggaatctatggtttccgatggtactgttgctatttttattggaattatcatgttcataatcccctctaaatttcccggattgacacaggacccggagaatccagggaaactcaaagcaccgctcggactgttggattggaaaactgtcaatcaaaaaatgccttggaatattgtgctcctgctaggagggggttacgccttggcaaaaggatccgaacgaagcggtttaagcgagtggttgggaaacaagctcacccctctacagagcgtgccagcccctgccatagcgattatactgtctctgctggtagcaacattcactgagtgtacatcaaatgtggcgactaccactattttcctccctatccttgcatctatggcacaggcaatatgtctgcaccccctctatgtgatgctaccatgcaccctggcaacttcactggcctttatgctcccagtcgccacaccccctaacgctatcgtgttcagttttggcgacttgaaagtactcgacatggcacgtgccggctttctcctcaatatcattggcgtgttaattattgccttagctatcaactcatggggaattcctcttttttccctccattcctttccatcctgggcccagtcaaatactactgcccagtgcctcccatccctcgctaacactactactccaagcccttag

SEQ ID NO: 59376 - DNA, 1926 bp, Artificial Sequence
  derived and/or modified sequence
atggccacctgctggcaggctctgtgggcatacagaagctatctaatagtgttttttgtccccatcctgctcctccccctccctattttagtccctagcaaggaggcctattgcgcctatgccattatactcatggcgctgttctggtgcaccgaggctcttccactggccgtgaccgccctgtttccgctgattctattccccatgatggggatcgtggacgctagcgaaatcatccagcggccatttccttctagcttcgagtcccccggagagtgccagagcgtgggtatgagcgttaccgccagtcataatttaggtggcactgtaggcgactcgcgcgtttttcccccattaagccacgtctcaacttgtcaggtcgctgttgaatatctgaaggacagcaatcttctatttttcggcggacttctcgtggcgatcgccgtagagcactggaacctacataaacggatcgctttgcgcgtcctgctgatcgtgggagtgagaccagcacccttaattcttgggtttatgctggttacagcgttcctctctatgtggatcagcaataccgccacatctgctatgatggtgccgattgcccacgcagtgttggaccagctgcacagctctcaggcttctagtaacgtggaagaggggagcaacaatccaaccttcgaactgcaggaaccttcccctcaaaaggaggtgacaaaattggacaacggtcaggcactgcccgtgaccagcgcatcatctgagggcagagctcatctgtcacagaagcaccttcacttaacccagtgtatgagcctgtgcgtatgttactcagcctctatcggcggtattgccaccctcactggaaccgcccctaacctggtcctgcaaggccaaattaactcccttttccctcaaaatggcaacgtcgtcaacttcgcctcatggttcagcttcgcctttccaactatggtgatactcctgctcctggcttggctctggctacagatcctgtttttgggttttaatttcaggaagaactttggtatcggcgaaaagatgcaggagcagcagcaggccgcatactgcgtcatccaaactgagcacagactgctgggtcccatgacatttgccgagaaagcaatatccatcctgttcgttatcttagtcctgctttggttcacgcgagagcccggatttttcttgggctggggaaacctcgcatttcccaatgctaagggcgaatctatggtgagcgatggcaccgtagccatctttattggaattatcatgtttataatcccatctaaatttccagggctaacccaggacccagagaatcctggcaagctaaaagcacccttagggttgttggattggaaaacagttaaccaaaagatgccgtggaatatagtactgctgctgggaggaggttacgccctggctaaaggtagcgagaggagcggcctgagcgagtggcttgggaacaagctcacaccattacaatccgtacctgcccctgctattgctattattttgtcgctcctggtagccaccttcacagagtgtacatcaaatgtggctacaacaactatcttcctgcctatccttgcttccatggcccaggccatttgcctccacccactgtacgtaatgttgccatgcacgttagccactagcttagctttcatgctacccgtggccaccccccctaacgctattgtattctcctttggagatctaaaagtgctggacatggccagagcaggcttcctgctcaatattataggtgtactgatcatcgccctggcgataaactcctggggtatcccactgttcagcctgcacagcttccccagctgggctcagtcaaatacgaccgcccagtgcctccctagtttagccaatacaactactccttcaccctag

SEQ ID NO: 59377 - DNA, 2502 bp, Artificial Sequence
  derived and/or modified sequence
atctttggtccttctgttacccagctcctggaggcagtggctgtagcagcccttgctgctccacaccatggccacctgctggcaggccctgtgggcctatcgctcctacctgatcgtgttcttcgtgcccattctcctgctgcctctgcccatcctcgtccccagtaaggaggcctactgcgcgtatgccatcatcctcatggcgctcttctggtgcactgaggccctgcccctggccgtcactgccctcttccccttaatcctgttccctatgatgggcatcgtggatgcctctgagatcattcagagaccatttccatccagtttcgagagcccaggggaatgccagtctgtgggaatgtcagtgactgcatcccataacctcgggggcaccgtgggagactccagggtcttcccgccgctcagccatgtctccacctgccaggttgccgtcgagtatcttaaggactccaacctcctgttcttcggggggctgctggtggccatcgcggtggaacactggaacctgcataaacgcatcgccctccgtgtcctcctcatcgttggggtgcggcctgccccgctaatcctgggcttcatgctggtcacggccttcctgtccatgtggatcagcaacacggccacctcagccatgatggtgcccatcgcacatgccgtcctggaccagctgcacagctcgcaagccagcagcaacgtcgaggagggcagcaacaaccccaccttcgagctccaggaaccaagtccccagaaggaggtgaccaagcttgataatgggcaggccctccctgtcacgtctgcctcttcggaggggagggcacatctcagccagaagcatctccacctcacccagtgcatgagcctgtgcgtgtgctactccgccagcatcgggggcatcgccacgctgactggcaccgcacccaacctggtgctgcaaggccagatcaactcgctcttcccccaaaacggcaacgtggtgaacttcgcctcctggttcagcttcgccttccccaccatggtcatcttgctgctgctggcctggttgtggctgcagatcctcttcctgggcttcaacttccggaagaactttggcattggggaaaagatgcaggagcaacagcaggcagcctactgcgtcatccagaccgagcacaggctgctgggccccatgacctttgcagaaaaggccatcagcatcctattcgtcatcctggtgctgctctggttcacccgggagccgggcttttttcttggctggggcaatttggcttttcccaatgccaagggggagagcatggtgtccgatgggacagtggccatcttcatcggcataattatgttcatcataccctccaagttcccagggctgacccaggacccagaaaacccagggaagctgaaggcccctcttggcctcctcgactggaagacggtgaaccagaagatgccgtggaatatcgtgttattgctgggtggtggctatgccctggccaagggcagtgagcgatcgggcctgtcagagtggctgggaaacaagctgaccccactgcagagtgtgccagctccagccattgccatcatcctctccctcctggtggccaccttcaccgagtgcactagcaacgtggccaccactacgatcttcctgcccatcctagcctccatggcccaggccatctgcctccaccctctctacgtcatgctcccctgcactctggccacctccctggccttcatgttgcctgtggccaccccgcccaatgccatcgtcttctctttcggggacctcaaagtgttggatatggcccgggcaggattcctcctcaacatcattggagtcctgatcatcgcactggccatcaacagctggggcatccccctcttcagcctgcactctttcccctcctgggcacagtccaacaccacagcccagtgcctgccaagcctggccaacaccaccacaccaagcccctaggctggggcacagcctggccatgcccaggaagacccaccccattcccactcctctgagcccggaggggacaccccaagctccaagctccaagctccaggccaaaggctgaaaggcacgtgtgtacataatctcttgcgtgtctgtaaggaaggggtgtatgctcagtttcctatgtgctggaataaaaggtgtgtgcatgtgtgtgtgcgcatatgtgtgcgcctgcatggatgtgaggggtgtgtgacgtgaggctatctgaggggggctgtgtgcatgcacatgatcctaggtatgtatgttggacagtgcacacgtgtgtgttcacagacaatacaacatgccctctctggtgccccaggtcttggtatccccagcttagtgaccagacttacttgcactgtatttattgaaattcaggcttggagtggcctgggaggagggcctgccagcagctgccacgggaacagcctctgggctgttaaagtcacattaaagtctttttcagt

SEQ ID NO: 59378 - DNA, 1926 bp, Artificial Sequence
  derived and/or modified sequence
atggccacctgctggcaggccctgtgggcctacagaagctacctgatcgtgttcttcgtgcccatcctgctgctgcccctgcccatcctggtgcccagcaaggaggcctactgcgcctacgccatcatcctgatggccctgttctggtgcaccgaggccctgcccctggccgtgaccgccctgttccccctgatcctgttccccatgatgggcatcgtggacgccagcgagatcatccagagacccttccccagcagcttcgagagccccggcgagtgccagagcgtgggcatgagcgtgaccgccagccacaacctgggcggcaccgtgggcgacagcagagtgttcccccccctgagccacgtgagcacctgccaggtggccgtggagtacctgaaggacagcaacctgctgttcttcggcggcctgctggtggccatcgccgtggagcactggaacctgcacaagagaatcgccctgagagtgctgctgatcgtgggcgtgagacccgcccccctgatcctgggcttcatgctggtgaccgccttcctgagcatgtggatcagcaacaccgccaccagcgccatgatggtgcccatcgcccacgccgtgctggaccagctgcacagcagccaggccagcagcaacgtggaggagggcagcaacaaccccaccttcgagctgcaggagcccagcccccagaaggaggtgaccaagctggacaacggccaggccctgcccgtgaccagcgccagcagcgagggcagagcccacctgagccagaagcacctgcacctgacccagtgcatgagcctgtgcgtgtgctacagcgccagcatcggcggcatcgccaccctgaccggcaccgcccccaacctggtgctgcagggccagatcaacagcctgttcccccagaacggcaacgtggtgaacttcgccagctggttcagcttcgccttccccaccatggtgatcctgctgctgctggcctggctgtggctgcagatcctgttcctgggcttcaacttcagaaagaacttcggcatcggcgagaagatgcaggagcagcagcaggccgcctactgcgtgatccagaccgagcacagactgctgggccccatgaccttcgccgagaaggccatcagcatcctgttcgtgatcctggtgctgctgtggttcaccagagagcccggcttcttcctgggctggggcaacctggccttccccaacgccaagggcgagagcatggtgagcgacggcaccgtggccatcttcatcggcatcatcatgttcatcatccccagcaagttccccggcctgacccaggaccccgagaaccccggcaagctgaaggcccccctgggcctgctggactggaagaccgtgaaccagaagatgccctggaacatcgtgctgctgctgggcggcggctacgccctggccaagggcagcgagagaagcggcctgagcgagtggctgggcaacaagctgacccccctgcagagcgtgcccgcccccgccatcgccatcatcctgagcctgctggtggccaccttcaccgagtgcaccagcaacgtggccaccaccaccatcttcctgcccatcctggccagcatggcccaggccatctgcctgcaccccctgtacgtgatgctgccctgcaccctggccaccagcctggccttcatgctgcccgtggccaccccccccaacgccatcgtgttcagcttcggcgacctgaaggtgctggacatggccagagccggcttcctgctgaacatcatcggcgtgctgatcatcgccctggccatcaacagctggggcatccccctgttcagcctgcacagcttccccagctgggcccagagcaacaccaccgcccagtgcctgcccagcctggccaacaccaccacccccagcccctag

SEQ ID NO: 59379 - protein, 698 aa, Artificial Sequence
  derived and/or modified sequence
MNPFQKNESKETLFSPVSIEEVPPRPPSPPKKPSPTICGSNYPLSIAFIVVNEFCERFSYYGMKAVLILYFLYFLHWNEDTSTSIYHAFSSLCYFTPILGAAIADSWLGKFKVLSLIGLSLIALGTGGIKPCVAAFGGDQFEEKHAEERTRYFSVFYLSINAGSLISTFITPMLRGDVQCFGEDCYALAFGVPGLLMVIALVVFAMGSKIYNKPPPEGNIVAQVFKCIWFAISNRFKNRSGDIPKRQHWLDWAAEKYPKQLIMDVKALTRVLFLYIPLPMFWALLDQQGSRWTLQAIRMNRNLGFFVLQPDQMQVLNPLLVLIFIPLFDFVIYRLVSKCGINFSSLRKMAVGMILACLAFAVAAAVEIKINEMAPAQPGPQEVFLQVLNLADDEVKVTVVGNENNSLLIESIKSFQKTPHYSKLHLKTKSQDFHFHLKYHNLSLYTEHSVQEKNWYSLVIREDGNSISSMMVKDTESRTTNGMTTVRFVNTLHKDVNISLSTDTSLNVGEDYGVSAYRTVQRGEYPAVHCRTEDKNFSLNLGLLDFGAAYLFVITNNTNQGLQAWKIEDIPANKMSIAWQLPQYALVTAGEVMFSVTGLEFSYSQAPSSMKSVLQAAWLLTIAVGNIIVLVVAQFSGLVQWAEFILFSCLLLVICLIFSIMGYYYVPVKTEDMRGPADKHIPHIQGNMIKLETKKTKL

SEQ ID NO: 59380 - protein, 691 aa, Artificial Sequence
  derived and/or modified sequence
MSPRKLFFPVSIEEVPPRPPSPPKKPSPTICGSNYPLSIAFIVVNEFCERFSYYGMKAVLILYFLYFLHWNEDTSTSIYHAFSSLCYFTPILGAAIADSWLGKFKVLSLIGLSLIALGTGGIKPCVAAFGGDQFEEKHAEERTRYFSVFYLSINAGSLISTFITPMLRGDVQCFGEDCYALAFGVPGLLMVIALVVFAMGSKIYNKPPPEGNIVAQVFKCIWFAISNRFKNRSGDIPKRQHWLDWAAEKYPKQLIMDVKALTRVLFLYIPLPMFWALLDQQGSRWTLQAIRMNRNLGFFVLQPDQMQVLNPLLVLIFIPLFDFVIYRLVSKCGINFSSLRKMAVGMILACLAFAVAAAVEIKINEMAPAQPGPQEVFLQVLNLADDEVKVTVVGNENNSLLIESIKSFQKTPHYSKLHLKTKSQDFHFHLKYHNLSLYTEHSVQEKNWYSLVIREDGNSISSMMVKDTESRTTNGMTTVRFVNTLHKDVNISLSTDTSLNVGEDYGVSAYRTVQRGEYPAVHCRTEDKNFSLNLGLLDFGAAYLFVITNNTNQGLQAWKIEDIPANKMSIAWQLPQYALVTAGEVMFSVTGLEFSYSQAPSSMKSVLQAAWLLTIAVGNIIVLVVAQFSGLVQWAEFILFSCLLLVICLIFSIMGYYYVPVKTEDMRGPADKHIPHIQGNMIKLETKKTKL

SEQ ID NO: 59381 - DNA, 2097 bp, Artificial Sequence
  derived and/or modified sequence
atgaaccccttccagaagaacgagagcaaggagaccctgttcagccccgtgagcatcgaggaggtgccccccagaccccccagcccccccaagaagcccagccccaccatctgcggcagcaactaccccctgagcatcgccttcatcgtggtgaacgagttctgcgagagattcagctactacggcatgaaggccgtgctgatcctgtacttcctgtacttcctgcactggaacgaggacaccagcaccagcatctaccacgccttcagcagcctgtgctacttcacccccatcctgggcgccgccatcgccgacagctggctgggcaagttcaaggtgctgagcctgatcggcctgagcctgatcgccctgggcaccggcggcatcaagccctgcgtggccgccttcggcggcgaccagttcgaggagaagcacgccgaggagagaaccagatacttcagcgtgttctacctgagcatcaacgccggcagcctgatcagcaccttcatcacccccatgctgagaggcgacgtgcagtgcttcggcgaggactgctacgccctggccttcggcgtgcccggcctgctgatggtgatcgccctggtggtgttcgccatgggcagcaagatctacaacaagcccccccccgagggcaacatcgtggcccaggtgttcaagtgcatctggttcgccatcagcaacagattcaagaacagaagcggcgacatccccaagagacagcactggctggactgggccgccgagaagtaccccaagcagctgatcatggacgtgaaggccctgaccagagtgctgttcctgtacatccccctgcccatgttctgggccctgctggaccagcagggcagcagatggaccctgcaggccatcagaatgaacagaaacctgggcttcttcgtgctgcagcccgaccagatgcaggtgctgaaccccctgctggtgctgatcttcatccccctgttcgacttcgtgatctacagactggtgagcaagtgcggcatcaacttcagcagcctgagaaagatggccgtgggcatgatcctggcctgcctggccttcgccgtggccgccgccgtggagatcaagatcaacgagatggcccccgcccagcccggcccccaggaggtgttcctgcaggtgctgaacctggccgacgacgaggtgaaggtgaccgtggtgggcaacgagaacaacagcctgctgatcgagagcatcaagagcttccagaagaccccccactacagcaagctgcacctgaagaccaagagccaggacttccacttccacctgaagtaccacaacctgagcctgtacaccgagcacagcgtgcaggagaagaactggtacagcctggtgatcagagaggacggcaacagcatcagcagcatgatggtgaaggacaccgagagcagaaccaccaacggcatgaccaccgtgagattcgtgaacaccctgcacaaggacgtgaacatcagcctgagcaccgacaccagcctgaacgtgggcgaggactacggcgtgagcgcctacagaaccgtgcagagaggcgagtaccccgccgtgcactgcagaaccgaggacaagaacttcagcctgaacctgggcctgctggacttcggcgccgcctacctgttcgtgatcaccaacaacaccaaccagggcctgcaggcctggaagatcgaggacatccccgccaacaagatgagcatcgcctggcagctgccccagtacgccctggtgaccgccggcgaggtgatgttcagcgtgaccggcctggagttcagctacagccaggcccccagcagcatgaagagcgtgctgcaggccgcctggctgctgaccatcgccgtgggcaacatcatcgtgctggtggtggcccagttcagcggcctggtgcagtgggccgagttcatcctgttcagctgcctgctgctggtgatctgcctgatcttcagcatcatgggctactactacgtgcccgtgaagaccgaggacatgagaggccccgccgacaagcacatcccccacatccagggcaacatgatcaagctggagaccaagaagaccaagctgtag

SEQ ID NO: 59382 - DNA, 2076 bp, Artificial Sequence
  derived and/or modified sequence
atgagccccagaaagctgttcttccccgtgagcatcgaggaggtgccccccagaccccccagcccccccaagaagcccagccccaccatctgcggcagcaactaccccctgagcatcgccttcatcgtggtgaacgagttctgcgagagattcagctactacggcatgaaggccgtgctgatcctgtacttcctgtacttcctgcactggaacgaggacaccagcaccagcatctaccacgccttcagcagcctgtgctacttcacccccatcctgggcgccgccatcgccgacagctggctgggcaagttcaaggtgctgagcctgatcggcctgagcctgatcgccctgggcaccggcggcatcaagccctgcgtggccgccttcggcggcgaccagttcgaggagaagcacgccgaggagagaaccagatacttcagcgtgttctacctgagcatcaacgccggcagcctgatcagcaccttcatcacccccatgctgagaggcgacgtgcagtgcttcggcgaggactgctacgccctggccttcggcgtgcccggcctgctgatggtgatcgccctggtggtgttcgccatgggcagcaagatctacaacaagcccccccccgagggcaacatcgtggcccaggtgttcaagtgcatctggttcgccatcagcaacagattcaagaacagaagcggcgacatccccaagagacagcactggctggactgggccgccgagaagtaccccaagcagctgatcatggacgtgaaggccctgaccagagtgctgttcctgtacatccccctgcccatgttctgggccctgctggaccagcagggcagcagatggaccctgcaggccatcagaatgaacagaaacctgggcttcttcgtgctgcagcccgaccagatgcaggtgctgaaccccctgctggtgctgatcttcatccccctgttcgacttcgtgatctacagactggtgagcaagtgcggcatcaacttcagcagcctgagaaagatggccgtgggcatgatcctggcctgcctggccttcgccgtggccgccgccgtggagatcaagatcaacgagatggcccccgcccagcccggcccccaggaggtgttcctgcaggtgctgaacctggccgacgacgaggtgaaggtgaccgtggtgggcaacgagaacaacagcctgctgatcgagagcatcaagagcttccagaagaccccccactacagcaagctgcacctgaagaccaagagccaggacttccacttccacctgaagtaccacaacctgagcctgtacaccgagcacagcgtgcaggagaagaactggtacagcctggtgatcagagaggacggcaacagcatcagcagcatgatggtgaaggacaccgagagcagaaccaccaacggcatgaccaccgtgagattcgtgaacaccctgcacaaggacgtgaacatcagcctgagcaccgacaccagcctgaacgtgggcgaggactacggcgtgagcgcctacagaaccgtgcagagaggcgagtaccccgccgtgcactgcagaaccgaggacaagaacttcagcctgaacctgggcctgctggacttcggcgccgcctacctgttcgtgatcaccaacaacaccaaccagggcctgcaggcctggaagatcgaggacatccccgccaacaagatgagcatcgcctggcagctgccccagtacgccctggtgaccgccggcgaggtgatgttcagcgtgaccggcctggagttcagctacagccaggcccccagcagcatgaagagcgtgctgcaggccgcctggctgctgaccatcgccgtgggcaacatcatcgtgctggtggtggcccagttcagcggcctggtgcagtgggccgagttcatcctgttcagctgcctgctgctggtgatctgcctgatcttcagcatcatgggctactactacgtgcccgtgaagaccgaggacatgagaggccccgccgacaagcacatcccccacatccagggcaacatgatcaagctggagaccaagaagaccaagctgtag

SEQ ID NO: 59383 - DNA, 2097 bp, Artificial Sequence
  derived and/or modified sequence
atgaatcccttccagaagaatgagtctaaggagaccctgttttcccctgtaagcatagaagaggtccccccccggcccccttcacccccaaagaaaccctcaccaacaatttgcgggtccaactaccctctgtctatagccttcatcgtagtgaatgaattctgtgagaggttcagttactatggtatgaaggctgttttgatactgtacttcctgtactttctgcattggaacgaggatacttcaacttctatctaccatgccttttcttctctatgctacttcacccctatactcggcgccgctattgccgactcatggcttggcaagtttaaggttttgagcctcatcggactatcccttatagcccttggaaccggggggattaaaccctgcgtggctgccttcggtggggatcaattcgaagaaaagcatgcagaggagaggactagatacttctcggtcttctatctgagcatcaatgcaggatctctcatcagtactttcattacccctatgttaaggggagacgtgcagtgcttcggagaggattgttatgcacttgccttcggcgtgccaggactgctgatggtgatcgctctggttgtgttcgccatgggctccaaaatctataacaagcccccccctgaaggaaatatcgtggcacaggtgtttaaatgtatctggttcgcaatcagcaataggttcaaaaataggagcggcgacataccaaaacgccagcattggcttgattgggcagccgagaaatatccgaagcaactgattatggacgtgaaggccctgactagagtgctatttctctacatacctttgcccatgttttgggcccttctagaccagcaaggttcaaggtggactttgcaggcgatccgtatgaatcgtaacttggggttcttcgtgctgcaacccgatcagatgcaggtgcttaatccgcttctggtcttaatttttattcctctgtttgatttcgtgatttacaggcttgtgtcaaagtgcggcattaatttttcatccctccggaaaatggccgtgggtatgattctggcctgcctggcctttgctgtggccgccgccgtggaaatcaagataaacgaaatggcccctgcccagccaggacctcaggaggttttcttgcaggttcttaacctggccgatgatgaggtcaaggtcaccgtagtgggaaatgaaaataacagtttactcatagagtctatcaaatcattccagaagaccccccactactctaagctccaccttaaaacgaagtcacaggatttccattttcaccttaaatatcacaatttatccctctacactgagcactcagttcaggaaaagaactggtactcattagtgattagagaggatggcaacagtatcagctcaatgatggtcaaagatacagaaagtcgaacaaccaacggtatgaccacagtgcggttcgtgaacaccctgcacaaggacgtgaatatctcattgagtacagatacttcattgaatgtgggagaagattacggtgtttctgcctatagaacagtgcagagaggagaatatccagctgtccactgtaggaccgaggataaaaatttctcgttgaaccttggccttctggacttcggagccgcatatctctttgtgattaccaataacactaaccagggcctgcaggcctggaaaattgaggatatccccgctaataagatgagtatcgcttggcagttgccccagtacgccctcgtcacggccggagaagtaatgttctccgtgaccggactcgaattctcctattcccaggcgccatccagtatgaaatcggtactgcaggctgcctggttactgacaatagccgtcggaaacattattgttctagtggtggcacagttcagtgggctcgtgcaatgggctgagttcatactgttctcttgtctactgcttgtaatatgtctgatttttagtatcatggggtactattacgtacctgtgaagaccgaggatatgagagggcctgctgacaagcacatcccacatattcagggcaatatgatcaagctagagacgaaaaaaaccaagttatag

SEQ ID NO: 59384 - DNA, 2076 bp, Artificial Sequence
  derived and/or modified sequence
atgtctcctaggaagctcttcttcccagtgtctatcgaagaggttccccctaggcctccttctccacccaagaagccttcccccacaatatgtggaagtaattatccgctgtctatcgcatttatagtagttaacgagttttgcgaacggttctcctactatggcatgaaagccgttctgatcctgtactttctctattttcttcattggaatgaagacaccagtacctccatctaccacgcgttttcttcattatgctacttcacccctatcctcggggcggccatagccgactcatggctggggaaattcaaggtgctctcactgatcggcttgtccttgatcgccctcggaacaggcggcattaagccgtgtgtggcagcatttggtggcgatcagttcgaggaaaaacatgccgaagagcgcacacgatacttttcagtgttttacttgtcaataaatgctggcagcttgatttccacattcatcacacctatgctccggggcgacgtgcagtgtttcggggaggattgttacgcactggcctttggggtgcccgggttactgatggtaatcgccttagtggtgttcgcgatgggcagtaagatctacaacaagccgcccccagagggcaacattgtcgcacaagtgtttaagtgtatatggtttgccatctcaaatcggttcaaaaatcgcagcggagacatccctaaacgccaacactggctggattgggccgccgaaaaatacccaaagcagctaatcatggatgtgaaagcacttacaagggttctcttcttatatatacctctaccaatgttttgggccttgctcgatcagcaaggctcacgctggacacttcaggccatcagaatgaatagaaaccttgggttcttcgtcctccagcccgatcagatgcaggttctcaatccactgctcgtgctgatttttattccactgttcgacttcgtgatctaccgcctggtctctaaatgcggcataaatttcagcagtttgcgaaaaatggctgtaggcatgatactagcatgtctcgccttcgcggtggctgccgccgttgagatcaagataaatgagatggcccctgctcaacccggcccacaggaagtgttccttcaagtgctcaatctggctgatgacgaggtgaaggtaaccgtggttggcaacgaaaacaacagtctccttattgagtccatcaagtccttccaaaaaacaccacattatagtaagctgcacctcaaaaccaaatcccaagactttcactttcacctcaagtatcacaacctatccctctatacagagcattcagttcaggaaaaaaattggtattctcttgtgatcagagaggacggtaatagcatctctagtatgatggtcaaagatactgagtcccgcaccaccaatggcatgaccaccgttcggttcgttaataccctccataaggacgtgaatatttcactgagtacagacacttcactgaacgtgggcgaagattacggtgtgagtgcctatagaactgttcagcggggagagtaccccgcagtccattgccgaacagaggataaaaacttcagcctgaatctagggttactggacttcggggctgcctacctgtttgtaattaccaacaatactaaccagggactgcaagcatggaagatagaggatattcccgctaacaagatgagcattgcttggcagttgccccagtacgcactagtaacagctggggaagtgatgttctccgtcaccggactggaattttcttactctcaagcaccgtcttctatgaaaagtgttctgcaagccgcctggcttttgaccattgctgtaggaaacatcattgtgctggtggtagcccaattcagcggtctggtccagtgggccgagttcatcttattctcttgtcttctgttggtgatttgtttaatttttagcattatgggctactactacgtgccagtgaaaacagaagatatgcggggacccgctgacaaacacatcccgcatatacaggggaacatgattaaactcgaaacaaagaagacaaagctctag

SEQ ID NO: 59385 - DNA, 2097 bp, Artificial Sequence
  derived and/or modified sequence
atgaaccccttccagaagaatgaaagcaaggagaccctcttcagccctgtgtccattgaggaggtgcccccccggccccccagcccccccaagaagcccagccccaccatctgtggcagcaactaccccctgagcatcgccttcatcgtggtgaatgagttctgtgagcgcttctcctactacggcatgaaggctgtgctgatcctgtacttcctgtacttcctgcactggaatgaagacaccagcaccagcatctaccacgccttcagcagcctgtgctacttcacccccatcctgggcgccgccatcgctgacagctggctgggcaagttcaaggtgctgagcctgattggcctgagcctcatcgccctgggcaccggcggcatcaagccctgtgtggccgccttcggcggggaccagtttgaggagaagcacgccgaggagaggacccgctacttcagcgtcttctacctgagcatcaatgccggcagcctcatcagcaccttcatcacccccatgctgcggggagatgtgcagtgctttggagaggactgctacgccctggccttcggcgtgcccggcctgctgatggtgattgccctggtggtgtttgccatgggcagcaagatctacaacaagcccccacctgagggcaacatcgtggcccaggtgttcaagtgcatctggtttgccatcagcaaccgcttcaagaacagaagtggggacatccccaagaggcagcactggctggactgggccgctgagaagtaccccaagcagctgatcatggatgtgaaggccctgaccagggtgctcttcctgtacatccccctgcccatgttctgggccctgctggaccagcagggcagccgctggaccctgcaggccatccgcatgaacagaaacctgggcttctttgtgctgcagcctgaccagatgcaggtgctgaaccccctgctggtgctgatcttcatccccctgtttgattttgtgatctaccgcctggtgtccaaatgtggcatcaacttcagcagcctgaggaagatggctgtgggcatgatcctggcctgcctggcctttgctgtggccgctgctgtggagatcaagatcaatgagatggccccagcccagcccggcccccaggaggtgttcctgcaggtgctgaacctggctgatgatgaggtgaaggtgacagtggtgggcaatgaaaacaacagcctgctgattgagagcatcaagagcttccagaagaccccccactacagcaagctgcacctgaagaccaagagccaggacttccacttccacctgaagtaccacaacctgagcctgtacacagagcacagcgtgcaggagaagaactggtacagcctggtgatccgggaggatggcaacagcatcagctccatgatggtgaaggacacagagagcaggaccaccaacggcatgaccaccgtgcgctttgtgaacaccctgcacaaggatgtgaacatcagcctgagcacagacaccagcctgaatgtgggggaggactatggagtgtctgcctacagaacagtgcagagaggagagtacccagctgtgcactgcaggacagaggacaagaacttcagcctgaacctgggcctgctggactttggagctgcctacctgtttgtgatcaccaacaacaccaaccagggcctgcaggcctggaagattgaggacatcccagccaacaagatgagcatcgcctggcagctgccccagtatgccctggtgacagctggggaggtgatgttttctgtgacaggcctggagttctcctacagccaggcccccagctccatgaagtctgtgctgcaggccgcctggctgctgaccatcgctgtgggcaacatcatcgtgctggtggtggcccagttcagcggcctggtgcagtgggccgagttcatcctcttcagctgcctgctgctggtgatctgcctgatcttcagcatcatgggctactactacgtgcctgtgaagacagaggacatgaggggccctgctgacaagcacatcccccacatccagggcaacatgatcaagctggagaccaagaagaccaagctgtag

SEQ ID NO: 59386 - DNA, 2076 bp, Artificial Sequence
  derived and/or modified sequence
atgagccccaggaagctgttcttccctgtgtccattgaggaggtgccccccaggcctcccagcccccccaagaagcccagccccaccatctgtggcagcaactaccccctgagcatcgccttcatcgtggtgaatgagttctgtgagcgcttctcctactacggcatgaaggctgtgctgatcctgtacttcctgtacttcctgcactggaatgaagacaccagcaccagcatctaccacgccttcagcagcctgtgctacttcacccccatcctgggcgccgccatcgctgacagctggctgggcaagttcaaggtgctgagcctcatcggcctgagcctgattgccctgggcactggaggcatcaagccctgtgtggccgcctttggaggagaccagtttgaggagaagcatgctgaggagaggacccgctacttctctgtgttctacctgagcatcaatgccggcagcctcatcagcaccttcatcacccccatgctgcggggagatgtgcagtgcttcggggaggactgctacgccctggcctttggagtgcccggcctgctgatggtgattgccctggtggtgtttgccatgggcagcaagatctacaacaagcccccacctgagggcaacatcgtggcccaggtgttcaagtgcatctggtttgccatcagcaaccgcttcaagaacagaagtggggacatccccaagaggcagcactggctggactgggccgctgagaagtaccccaagcagctgatcatggatgtgaaggccctgaccagggtgctcttcctgtacatccccctgcccatgttctgggccctgctggaccagcagggcagccgctggaccctgcaggccatccgcatgaacagaaacctgggcttctttgtgctgcagcctgaccagatgcaggtgctgaaccccctgctggtgctgatcttcatccccctgtttgattttgtgatctaccgcctggtgtccaaatgtggcatcaacttcagcagcctgaggaagatggctgtgggcatgatcctggcctgcctggcctttgctgtggccgctgctgtggagatcaagatcaatgagatggccccagcccagcccggcccccaggaggtgttcctgcaggtgctgaacctggctgatgatgaggtgaaggtgacagtggtgggcaatgaaaacaacagcctgctgattgagagcatcaagagcttccagaagaccccccactacagcaagctgcacctgaagaccaagagccaggacttccacttccacctgaagtaccacaacctgagcctgtacacagagcacagcgtgcaggagaagaactggtacagcctggtgatcagagaagatggcaacagcatcagctccatgatggtgaaggacacagagagcaggaccaccaacggcatgaccaccgtgcgctttgtgaacaccctgcacaaggatgtgaacatcagcctgagcacagacaccagcctgaatgtgggagaagattatggagtgtctgcctacagaacagtgcagagaggagagtacccagctgtgcactgcaggacagaggacaagaacttcagcctgaacctgggcctgctggactttggagctgcctacctgtttgtgatcaccaacaacaccaaccagggcctgcaggcctggaagattgaggacatcccagccaacaagatgagcatcgcctggcagctgccccagtatgccctggtgacagctggggaggtgatgttttctgtgacaggcctggagttctcctacagccaggcccccagctccatgaagtctgtgctgcaggccgcctggctgctgaccatcgctgtgggcaacatcatcgtgctggtggtggcccagttcagcggcctggtgcagtgggccgagttcatcctcttcagctgcctgctgctggtgatctgcctgatcttcagcatcatgggctactactacgtgcctgtgaagacagaggacatgaggggccctgctgacaagcacatcccccacatccagggcaacatgatcaagctggagaccaagaagaccaagctgtag

SEQ ID NO: 59387 - DNA, 2097 bp, Artificial Sequence
  derived and/or modified sequence
atgaaccccttccagaagaacgagagcaaggagaccctgttcagccccgtctcaatcgaagaagtgcctccccgccccccgtccccacctaaaaagccatctcctacgatctgtgggagcaattatccgctctctatcgcattcatagtggttaatgagttttgcgaaaggttttcttactacggcatgaaagccgtcttgatactgtacttcctgtatttcctgcactggaacgaggacacttctacctctatctatcacgcttttagctccctctgctatttcacgcctattctgggcgccgcgatcgctgacagttggttaggcaaattcaaagtcttgtctttgatagggctctctctgatcgcattgggaaccggtggcattaaaccctgcgtcgccgcattcgggggggatcagtttgaagagaagcatgcggaggagagaacacgttacttttcagtattctatctcagcatcaatgcgggctcactcatctcaactttcattaccccaatgctgcgaggagatgtgcaatgcttcggagaggactgctatgctctcgccttcggggtgcctggcctgctgatggttatagccctcgtggttttcgcaatggggtcaaagatctataacaaacccccccctgagggcaatattgtggcccaagtgtttaagtgtatttggtttgcaataagtaacaggttcaagaacagaagcggagacattccaaagagacagcattggcttgattgggcagctgagaagtaccctaagcaactgataatggatgtgaaggccctgacacgagtcctctttctctacatccctctgccaatgttttgggccttgctagatcagcaaggcagcaggtggacactccaggcaattcgaatgaatcgcaacctggggtttttcgtgctccagcccgatcagatgcaggtgctcaatccacttcttgtgctgatctttatccccctgttcgatttcgttatctatcgccttgtgtccaaatgtggaatcaacttctcaagcctgcgcaagatggctgtgggcatgatactggcttgcctcgcattcgcggtggcggctgccgtggaaatcaagattaacgaaatggctccggcacagccagggccccaggaggtcttcctacaggttctcaatctggctgatgatgaagtgaaggtcaccgtggtggggaacgagaacaacagtctcctaattgaatcaattaagtcatttcagaaaaccccccactatagcaagctgcatctcaaaaccaagagccaggactttcattttcacctcaagtaccacaacctgtctttgtataccgaacactcagtgcaggagaaaaattggtactccctcgtgatcagagaagacggaaatagcatttcgagtatgatggtaaaagacactgaaagtaggaccaccaacggtatgaccacagttaggttcgtaaacaccctccacaaggacgtgaatatttccctgagtaccgacacctcactgaatgtcggagaagattacggagtctccgcctatcgcaccgtgcagaggggggagtaccctgctgtgcattgtcggacagaagataaaaacttttcactgaacctggggctgcttgactttggagcagcctacctgttcgtaataaccaataatacgaaccagggactgcaagcatggaagatcgaggacatcccagcaaacaaaatgagtattgcctggcagcttccccagtatgctctggtcaccgctggcgaagtgatgttttccgttacaggtcttgaattcagttacagtcaggcacccagttccatgaagtccgtccttcaggccgcatggctgttgactatcgctgttgggaacataatcgtgttagtggtggcgcagttctccggacttgtacagtgggccgaattcatcctctttagctgtctgctcctggtgatatgtctgatcttctccatcatggggtattactatgtcccagtgaaaactgaggacatgcgaggccccgctgataaacatatacctcatatccagggcaatatgattaagctcgaaacgaaaaagaccaagttatag

SEQ ID NO: 59388 - DNA, 2076 bp, Artificial Sequence
  derived and/or modified sequence
atgagcccccggaagctgttcttccccgtgagcatcgaggaggtgcccccacgtccaccttccccaccgaaaaaaccgagccccacgatttgcggctcgaactacccattaagtattgctttcattgtcgtcaatgagttctgcgagcgcttcagttactatgggatgaaagccgtattgatcctgtacttcttatatttcctgcattggaacgaggatacttcgactagtatttatcatgccttctccagtttatgttactttacacccatccttggtgcagctattgctgattcgtggctcggcaaatttaaggtgcttagcttgatcggcctgtccttaatcgcactgggtacagggggaatcaaaccttgcgtcgcagcattcggcggcgaccaattcgaggaaaaacatgctgaagaaaggacacgttactttagcgtgttttatctcagcattaacgcaggaagtctgatcagcaccttcattacccctatgctgcggggcgatgtacagtgttttggtgaggactgttacgctcttgcctttggtgtacccggcttactaatggtcattgccttggtggtgttcgctatgggaagcaagatttataacaaacctcctcccgagggtaacatcgtggcccaagtgtttaagtgtatctggttcgcaatctccaatcgcttcaaaaacaggagcggagatataccaaaaaggcaacactggctagactgggcagccgaaaaatatccgaagcaactgattatggatgtcaaggcattgacacgcgtgctgtttttatacatccccttaccaatgttttgggctctcttggaccaacaggggagccggtggacattgcaggcaatcagaatgaaccggaatctcgggttctttgtccttcaacctgatcagatgcaggttctaaacccgttactggtgctcatcttcatcccactattcgacttcgtaatttaccgtctggttagcaagtgtggcattaatttcagttctctcagaaagatggcagtcggaatgatcttagcctgcctcgccttcgccgtcgccgccgctgtcgagatcaagatcaatgagatggccccagcgcagccgggtccgcaggaggtattcctccaggtgttgaatttggcggatgatgaagtgaaggtgaccgtggtaggaaacgagaacaacagcttgttgatcgagagtatcaagagcttccagaaaacaccccactactctaagctccacctaaagactaaatctcaggactttcacttccaccttaaataccacaacctgagtctctatactgagcatagtgtccaagagaagaactggtattcactggttatacgagaggacggaaactcaatctccagcatgatggtgaaagacaccgaatcacggaccaccaacgggatgaccaccgtgcgctttgtgaacactctacacaaagacgtcaacattagcctgtctactgacactagtttaaacgtcggggaggattatggggtgagtgcgtacagaactgtgcagcggggtgagtatccagctgtacattgcagaaccgaggacaagaacttcagcctgaacctaggactccttgactttggggccgcctacctcttcgtcataactaataacaccaaccaaggactgcaagcgtggaagatcgaggacattccagccaataaaatgagtattgcgtggcaactgccgcagtatgcactcgtaacggcaggagaagtgatgttttctgttactggattagagttttcatactcacaagctccttcctctatgaagtccgttctgcaagccgcatggttactaactatcgccgttggcaacattatagtgttggtggtagcccagtttagcggtctcgtgcagtgggcggagttcatcctgttctcgtgcctcctgctcgttatctgtttgatcttcagcataatgggttattattatgtaccagtgaagacggaagacatgaggggtccagccgacaagcacattccccatatccagggcaatatgataaaattggagactaaaaaaacaaagctgtag

SEQ ID NO: 59389 - DNA, 2097 bp, Artificial Sequence
  derived and/or modified sequence
atgaacccctttcagaaaaatgaaagtaaagagaccttgtttagtcccgtaagcatcgaagaagtgcccccaagaccaccatcgccgccaaagaaaccctctccaactatctgtggaagtaactaccccctctccatcgcctttattgtcgtcaatgagttctgtgaaaggttcagctattatggcatgaaggctgtgctgattctttattttttgtattttctacattggaacgaggacacttcaaccagcatctaccacgctttttcctccctctgctactttaccccgatactgggagcagccattgccgactcctggctgggcaagttcaaggtgctttccttgatcgggctctcactcattgccctggggaccggcggtattaagccgtgtgtggcggctttcggtggcgaccagttcgaggaaaagcacgctgaagagaggacgagatacttctcagttttttacctctctattaacgcaggttctcttatcagtacattcatcacaccgatgctcagaggcgatgtacagtgtttcggagaggattgctatgccctggcatttggcgtgccaggactgctcatggtgatcgccctggtcgttttcgcaatggggtctaagatatacaataagcctcccccagaaggaaacattgtggcccaggtgttcaaatgtatctggtttgccatcagcaacaggtttaagaacagatcaggggatattccgaagaggcagcactggctggactgggccgctgagaaatatcctaaacaactgatcatggatgtaaaggctctcactagggtcctgttcctgtatattcccttgccaatgttctgggcgttgctagaccagcaaggatcaaggtggacactgcaggccattagaatgaaccgaaatctggggtttttcgttctccaaccggaccagatgcaggtcctcaatccactcttggtccttatattcatcccactgtttgactttgtcatctatagactggtttccaagtgcgggataaacttttcctctctccggaagatggccgtcggtatgatactggcatgtcttgcttttgccgttgctgccgctgttgaaattaagattaacgaaatggctcccgctcaacccggtcctcaagaggtttttctccaggttttaaatttggctgatgatgaggtgaaggtaacagttgtcggaaacgagaataactccctcctgatcgaatcaattaagtccttccagaaaactccgcattactccaaattacatctcaaaacaaagtcacaagattttcacttccacctcaagtaccacaatctgagtttatacacggagcacagtgtgcaggaaaagaattggtattcactggttattcgcgaggacggtaactctatctccagcatgatggtcaaggatactgagagcagaaccaccaatggcatgacaacagtccgcttcgtcaatacactgcacaaggacgtgaacattagtctgtcaaccgatacttccctgaacgtaggagaggactacggggtatctgcctatagaaccgttcagcgaggcgagtacccagcagtgcactgcaggaccgaggataaaaattttagtctaaacctcggcctcctcgacttcggcgcagcttaccttttcgtcatcactaataatactaatcaggggctccaagcctggaagatcgaggatattcctgcgaataaaatgtctatcgcatggcagttaccgcaatacgcactggtgacagcaggtgaagtgatgttctctgtgacaggactcgaattttcatattcccaggccccatcctcaatgaaatctgtgcttcaggcagcatggctgcttacgatcgcggtcggtaacatcatcgtccttgtggttgcacagttcagcggcttggtgcaatgggccgagtttatcctgttcagctgcctgctgcttgtcatttgtttaatctttagcatcatggggtactattacgtgcccgtgaagaccgaggacatgagaggcccagccgataagcacattccacacatccaaggcaacatgatcaaactggagacaaaaaaaactaagctatag

SEQ ID NO: 59390 - DNA, 2076 bp, Artificial Sequence
  derived and/or modified sequence
atgtcgccacgcaagttatttttccctgtgagcattgaggaggtacccccacgccctcctagccctcccaaaaaaccttctcctaccatttgcgggagtaactatcccttatcaatagcgtttatcgtggtaaacgaattttgcgagaggttttcttattacgggatgaaggcggtgctgatcctgtacttcctgtatttcctgcactggaatgaggatacctcaacatctatttaccacgcttttagctccttatgctacttcacacctattctgggcgcagcgattgcagacagctggttggggaaatttaaagtgctgtcactcatcgggctttccttgatagcattgggaacaggcggaatcaagccatgcgtcgcagcgtttggaggcgaccagtttgaggagaaacatgcagaggagagaacccgctatttttcagtcttctacttgtctatcaatgctggaagtctgatctccaccttcatcactcctatgctgcgaggtgatgtgcaatgcttcggggaagattgctacgcattagcttttggagtacctgggctgctgatggtgattgctttagtggtctttgcaatggggtcgaaaatttataataagccccctcctgagggtaatattgttgcccaggtcttcaagtgtatttggtttgccatatctaatagatttaagaaccgctccggcgatatccctaagagacagcactggttagattgggctgccgagaaatatcccaaacagttgatcatggatgtaaaggctctgacgcgggtcctgttcttgtacatccctctgcccatgttttgggctctactggaccaacaaggcagtcggtggactctccaggctatcaggatgaacaggaacctgggattttttgtcctccaaccggaccagatgcaggtgctgaatcccctgctcgttttgatttttattcccctgtttgatttcgtcatctatagactcgtatccaagtgtgggatcaacttctcctcccttagaaagatggccgttggaatgattctggcctgtcttgcatttgccgtggctgccgctgtcgagataaagattaatgagatggcccctgctcaacctggccctcaagaagtgtttctgcaggtcctgaatttagccgatgatgaggtaaaggtgacagtggtgggcaacgaaaacaactccctgttaatcgaatctataaagagttttcagaaaaccccgcactattccaaactgcacctgaaaactaaatctcaggacttccattttcaccttaagtaccacaacctctccctgtataccgaacactcagtccaagaaaaaaattggtattccctcgtgattagagaggacggtaacagtatctcctccatgatggttaaagacacagagagccgaacaacgaatgggatgacaaccgttcgattcgtgaacactttacacaaggatgtcaatattagcctgtctacagacacctccttgaatgtcggggaagactacggtgtgtcagcgtatcggaccgtccagagaggggaatacccggcagtccattgccggacggaagataagaacttttctctcaacttggggcttcttgacttcggcgcagcctatctgtttgtgattaccaacaatacaaatcagggcctgcaggcctggaaaatcgaagatattcctgcaaataagatgagcatcgcttggcagctgccccagtatgcccttgtcactgcgggagaggtgatgtttagcgttaccgggcttgagttctcttattcccaagctccctcctccatgaagtccgtactccaggcagcctggctgctgaccatcgccgttggcaatatcatcgtcttggttgtggctcagtttagtggactagtccagtgggcagagttcattcttttttcatgcctcttgctggtgatttgtctgatcttcagtatcatgggatactattacgtcccagtcaaaacggaggacatgcggggacctgcagacaagcatattcctcacattcaaggaaatatgattaagctggagaccaagaagacgaagctgtag

SEQ ID NO: 59391 - DNA, 2379 bp, Artificial Sequence
  derived and/or modified sequence
aaatgcttgaggagagagagagagtaaggagccagccatgaatcctttccagaaaaatgagtccaaggaaactcttttttcacctgtctccattgaagaggtaccacctcgaccacctagccctccaaagaagccatctccgacaatctgtggctccaactatccactgagcattgccttcattgtggtgaatgaattctgcgagcgcttttcctattatggaatgaaagctgtgctgatcctgtatttcctgtatttcctgcactggaatgaagatacctccacatctatataccatgccttcagcagcctctgttattttactcccatcctgggagcagccattgctgactcgtggttgggaaaattcaaagtcctatcattgatcggcctgagtctaatagctttggggacaggaggcatcaaaccctgtgtggcagcttttggtggagaccagtttgaagaaaaacatgcagaggaacggactagatacttctcagtcttctacctgtccatcaatgcagggagcttgatttctacatttatcacacccatgctgagaggagatgtgcaatgttttggagaagactgctatgcattggcttttggagttccaggactgctcatggtaattgcacttgttgtgtttgcaatgggaagcaaaatatacaataaaccaccccctgaaggaaacatagtggctcaagttttcaaatgtatctggtttgctatttccaatcgtttcaagaaccgttctggagacattccaaagcgacagcactggctagactgggcggctgagaaatatccaaagcagctcattatggatgtaaaggcactgaccagggtactattcctttatatcccattgcccatgttctgggctcttttggatcagcagggttcacgatggactttgcaagccatcaggatgaataggaatttggggttttttgtgcttcagccggaccagatgcaggttctaaatccccttctggttcttatcttcatcccgttgtttgactttgtcatttatcgtctggtctccaagtgtggaattaacttctcatcacttaggaaaatggctgttggtatgatcctagcatgcctggcatttgcagttgcggcagctgtagagataaaaataaatgaaatggccccagcccagccaggtccccaggaggttttcctacaagtcttgaatctggcagatgatgaggtgaaggtgacagtggtgggaaatgaaaacaattctctgttgatagagtccatcaaatcctttcagaaaacaccacactattccaaactgcacctgaaaacaaaaagccaggattttcacttccacctgaaatatcacaatttgtctctctacactgagcattctgtgcaggagaagaactggtacagtcttgtcattcgtgaagatgggaacagtatctccagcatgatggtaaaggatacagaaagcagaacaaccaatgggatgacaaccgtgaggtttgttaacactttgcataaagatgtcaacatctccctgagtacagatacctctctcaatgttggtgaagactatggtgtgtctgcttatagaactgtgcaaagaggagaataccctgcagtgcactgtagaacagaagataagaacttttctctgaatttgggtcttctagactttggtgcagcatatctgtttgttattactaataacaccaatcagggtcttcaggcctggaagattgaagacattccagccaacaaaatgtccattgcgtggcagctaccacaatatgccctggttacagctggggaggtcatgttctctgtcacaggtcttgagttttcttattctcaggctccctctagcatgaaatctgtgctccaggcagcttggctattgacaattgcagttgggaatatcatcgtgcttgttgtggcacagttcagtggcctggtacagtgggccgaattcattttgttttcctgcctcctgctggtgatctgcctgatcttctccatcatgggctactactatgttcctgtaaagacagaggatatgcggggtccagcagataagcacattcctcacatccaggggaacatgatcaaactagagaccaagaagacaaaactctgatgactccctagattctgtcctgaccccaattcctggccctgtcttgaagcattttttttcttctactggattagacaagagagatagcagcatatcagagctgatctcctccacctttctccaatgacagaagttccaggactggttttccagtacatctttaaacaaggccccagagactctatgtctgcccgtccatcagtgaactcattaaaacttgtgcagtgttgctggagctggcctgg

SEQ ID NO: 59392 - DNA, 5428 bp, Artificial Sequence
  derived and/or modified sequence
aagctattgaagctgacacccacagagttaaactgagttgctgaagccaccagctccccctcccagtccttcttttcagagtaggctggcagctgtcctaactgcctactaaagccaaatgcttgaggagagagagagagtaaggagccagccatgaatcctttccagaaaaatgagtccaaggaaactcttttttcctgtctccattgaagaggtaccacctcgaccacctagccctccaaagaagccatctccgacaatctgtggctccaactatccactgagcattgccttcattgtggtgaatgaattctgcgagcgcttttcctattatggaatgaaagctgtgctgatcctgtatttcctgtatttcctgcactggaatgaagatacctccacatctatataccatgccttcagcagcctctgttattttactcccatcctgggagcagccattgctgactcgtggttgggaaaattcaaagtcctatcattgatcggcctgagtctaatagctttggggacaggaggcatcaaaccctgtgtggcagcttttggtggagaccagtttgaagaaaaacatgcagaggaacggactagatacttctcagtcttctacctgtccatcaatgcagggagcttgatttctacatttatcacacccatgctgagaggagatgtgcaatgttttggagaagactgctatgcattggcttttggagttccaggactgctcatggtaattgcacttgttgtgtttgcaatgggaagcaaaatatacaataaaccaccccctgaaggaaacatagtggctcaagttttcaaatgtatctggtttgctatttccaatcgtttcaagaaccgttctggagacattccaaagcgacagcactggctagactgggcggctgagaaatatccaaagcagctcattatggatgtaaaggcactgaccagggtactattcctttatatcccattgcccatgttctgggctcttttggatcagcagggttcacgatggactttgcaagccatcaggatgaataggaatttggggttttttgtgcttcagccggaccagatgcaggttctaaatccccttctggttcttatcttcatcccgttgtttgactttgtcatttatcgtctggtctccaagtgtggaattaacttctcatcacttaggaaaatggctgttggtatgatcctagcatgcctggcatttgcagttgcggcagctgtagagataaaaataaatgaaatggccccagcccagccaggtccccaggaggttttcctacaagtcttgaatctggcagatgatgaggtgaaggtgacagtggtgggaaatgaaaacaattctctgttgatagagtccatcaaatcctttcagaaaacaccacactattccaaactgcacctgaaaacaaaaagccaggattttcacttccacctgaaatatcacaatttgtctctctacactgagcattctgtgcaggagaagaactggtacagtcttgtcattcgtgaagatgggaacagtatctccagcatgatggtaaaggatacagaaagcagaacaaccaatgggatgacaaccgtgaggtttgttaacactttgcataaagatgtcaacatctccctgagtacagatacctctctcaatgttggtgaagactatggtgtgtctgcttatagaactgtgcaaagaggagaataccctgcagtgcactgtagaacagaagataagaacttttctctgaatttgggtcttctagactttggtgcagcatatctgtttgttattactaataacaccaatcagggtcttcaggcctggaagattgaagacattccagccaacaaaatgtccattgcgtggcagctaccacaatatgccctggttacagctggggaggtcatgttctctgtcacaggtcttgagttttcttattctcaggctccctctagcatgaaatctgtgctccaggcagcttggctattgacaattgcagttgggaatatcatcgtgcttgttgtggcacagttcagtggcctggtacagtgggccgaattcattttgttttcctgcctcctgctggtgatctgcctgatcttctccatcatgggctactactatgttcctgtaaagacagaggatatgcggggtccagcagataagcacattcctcacatccaggggaacatgatcaaactagagaccaagaagacaaaactctgatgactccctagattctgtcctgaccccaattcctggccctgtcttgaagcattttttttcttctactggattagacaagagagatagcagcatatcagagctgatctcctccacctttctccaatgacagaagttccaggactggttttccagtacatctttaaacaaggccccagagactctatgtctgcccgtccatcagtgaactcattaaaacttgtgcagtgttgctggagctggcctggtgtctccaaatgaccatgaaaatacacacgtataatggagatcattctctgtgggtatgcaaagttatgggaattcctttataggtaactgccatttaggactgatggccctaatttttgaggtgctgatttagaggcaaaattgcagaataacaaagaaatggtatttcaagtttttttttttataagcaatgtaattatgctattcacaggggcctcaagaattggtatgtatgatgtgatctggtccagccagggcctggcttgtcagctctctaggtttgatatgactttagtaaatttgtcaatatagatggtaggaagcagaatgccattttattaaaacacaggagaagttatatctctctgattatgatagtattttatttacttatccaaaccctcctttctcagtatggatagatcatggaaaccagattagagatagtaagcattagtaaacattgttctggagaacaggaacaggtgtaagttgtagaaatcctgaagagccagtcattcttttacagagtacattcttcttagcctctatggcgctggtctatgcccttcagtgaacagttgtataaacaataattataatttgcaaccttgtcttgtcaaccttgctgatccagctttttcttattattacaccttgtcttgcttattgcagcaaatattcaataacaacaatgtttctataagtccaacttcctttattaatgtttccatttagcctcaaaaatatcaaagtagttcctttttgatgttgttttcctgatttacttttcccataagttttaaataccatttctgccttgaagcctagaaattttctttttattcaaaaaaagttacattaatgctctaggtttgaggttctaaaatggaaatgtcaatagaggagcatggtcctatgtgaggttcctatcaaaatttgtgggagtagggatggtagagcatgagggttttgtttgtgtatgtgtatggtcatgaaaaaaaattgagaaacattacctcatacacaatgaatgaatcagaggacagacacgggaatggcacgactgtgcagtgtgttactaggaaaaaagttcagaatcactgttctagagagcttcatttccattggttttaaaacattattctcatgtagaacagtgttgggtctcatactgttaatgttaatacgtaacaatgttcatgttaacaggcacctgttaatattaacagataatgttactgttaacaggtaagagaaattgctctaagtgcccaaactttatatacttcagttttaatgacaagcatttcagaaatataagagcggcagccagaccaaccagtttttccagatatcttgatgtgaacctgaccctactcctttagaagacagcctgttcatttttaaatagctttaacccaaactgttctatgaccattgtttcaagagacattaacacagttctgtaaatagaagtgtctatggacaaataagtttgggaaatgtggcatactgtatccttttcttaacatttgcatattaaagactctgagatatcctgcagtaaagacacaagataccttgtttaaattaacatgtacgctgcagaacattggtttggaaaaaactgttgagcagttcttccttgtaagtgctgagcttcctctctgaaacctcctaccattgttttttttcccctgtagctaacaagaataagtataacagccggccaggcacagtggctcatgcctgtaatcccagcactttgggaggctgagacaggtggatcacctgaggtcaggagttcgagaccagcctggccaacatggtgaaaccgtgtctctactaaaagtacaaaaattagccaggtgtgatggcaggtgcctgtaatcccagctactcgggaggctgaagcagaagaattgcttgaacccgggaggcagaggttgcaatgagccgagatcacgccatcacactctagcctgggggacaagagtgagacttcatctaaaaaaaaaaagaaaagaatatgtataccccctttttcatgtggcagatgtttagctatttggggagaactttcatggctcttccctaatcatcaagtattcaaggtaaagattctcggttcctgtaatggttcctcaccaggcataatttgtccttttaccatcctactttctgtcttctgaaaaacattctttatctgaaatacagcaattaatattaagatatcttaatatgaagtgcctggagtcaaatataacattccaaagtagtctgactggaagaactagcacctgcctttcttcaaacaatgcacttctgttaatgcagtgtaaggtaacatgagttgtttttggaaactacatcataatgtgggcttacattctagcacttatcacttaatgacagggatacatttgaggaatgcattgttaggcaattttgtcattatgcaaacatcatagagtgtacttacacaaacctatggtatagcctactacacatctaagttatatggtatagactgtttctccagctatatggtgtagactgtttctcctaggctacaaacctgcacagcatgttactgtattaaatgctgtaggcaattgtaacacaatggtatttttatacttaaacatatctaaacatagaaacggtacaaaaaactttacacattatatagatgtatcaaattattcatatgtgctctgaaaatgtctatatctgttatgtatcaattttttaaaaagtgaatgacataattcatttgaaaaaatgtggacacacaaattggaaaagaggtataaatgcagtattataatctaatgggaccaccatcacatatttggtctgtcattgactgaaactgcaatatagagtttttcttaacatttgcatattaaagactctgactatatatgg

SEQ ID NO: 59393 - protein, 599 aa, Artificial Sequence
  derived and/or modified sequence
MLKFQEAAKCVSGSTAISTYPKTLIARRYVLQQKLGSGSFGTVYLVSDKKAKRGEELKVLKEISVGELNPNETVQANLEAQLLSKLDHPAIVKFHASFVEQDNFCIITEYCEGRDLDDKIQEYKQAGKIFPENQIIEWFIQLLLGVDYMHERRILHRDLKSKNVFLKNNLLKIGDFGVSRLLMGSCDLATTLTGTPHYMSPEALKHQGYDTKSDIWSLACILYEMCCMNHAFAGSNFLSIVLKIVEGDTPSLPERYPKELNAIMESMLNKNPSLRPSAIEILKIPYLDEQLQNLMCRYSEMTLEDKNLDCQKEAAHIINAMQKRIHLQTLRALSEVQKMTPRERMRLRKLQAADEKARKLKKIVEEKYEENSKRMQELRSRNFQQLSVDVLHEKTHLKGMEEKEEQPEGRLSCSPQDEDEERWQGREEESDEPTLENLPESQPIPSMDLHELESIVEDATSDLGYHEIPEDPLVAEEYYADAFDSYCEESDEEEEEIALERPEKEIRNEGSQPAYRTNQQDSDIEALARCLENVLGCTSLDQPCRSWGQKYLKRSIITSREQGIRMLAKQRSASVWKKWCLKPATVLKWTSSCTLKSSC

SEQ ID NO: 59394 - DNA, 1800 bp, Artificial Sequence
  derived and/or modified sequence
atgctgaaattccaggaggcagcaaaatgtgtgagcggaagcacggccattagtacctatcctaaaaccctgatcgcaaggcgttatgtgctacaacagaagttagggtcgggatcattcggcacagtttatctggtgagtgataagaaggctaaacgcggggaggagctcaaggtgctgaaagagattagcgtgggcgaactgaacccgaacgagaccgtgcaggcgaacttggaagctcagctgctctcaaaacttgaccaccccgctatcgtgaagttccacgcatcttttgtggagcaggacaatttctgtatcatcaccgagtactgtgagggacgtgatttggatgacaagattcaagaatacaagcaagccgggaagatctttccagaaaatcaaatcatagagtggttcattcaactgctgctcggtgttgactacatgcacgaaagacggatcctgcatcgtgacttaaaaagcaagaatgtgtttctcaagaacaacctgctaaagattggagacttcggagtttccagattgttgatgggatcctgtgatctggccactacactgacgggcactccccactacatgtcaccagaggccctcaagcaccagggctacgacaccaagtcagacatatggtccctggcgtgtatactctacgagatgtgttgcatgaatcatgcgttcgctggcagcaattttctgagcatcgtgctgaaaatcgtggagggtgacaccccttccctcccggaacggtaccctaaggagctgaacgcaattatggaatcgatgctgaataagaacccctctctcagaccctcagctattgagattctcaagattccttaccttgatgagcagttgcagaatctgatgtgtaggtacagcgagatgactctggaggataagaacttggattgccaaaaggaagctgcccatattatcaacgccatgcagaaaaggattcaccttcagacgctccgcgcattaagcgaggtccaaaaaatgactccaagggaacgtatgcggctcagaaagctgcaggctgcggatgagaaagccagaaagctgaagaagatcgtggaagaaaagtacgaggaaaattcaaagcgcatgcaggagcttcggagccgcaatttccagcagctgtcagtggacgtcttgcacgaaaaaacccatctgaaaggtatggaggagaaggaagagcagccagagggaagacttagctgttcgccgcaggacgaggacgaagagcgatggcaggggcgagaagaagagtcagacgaacctaccctcgaaaatctgcctgagtcacagcccattcccagtatggacttgcacgaattggaaagcatcgtggaggatgccacctccgatctcggttatcacgagattccggaggatccattagtggccgaggagtattacgctgacgcctttgattcctattgcgaagaaagtgatgaagaggaagaagaaattgctctggagcggccggagaaagagatcaggaacgaggggtcccagcccgcgtatagaactaatcagcaagactcagatattgaggccctggcgcggtgtctggagaacgtgctaggatgcacaagcctcgaccagccctgccgctcatggggccagaagtacttaaaacggagcatcattaccagccgagaacagggcattcgcatgcttgcaaagcaaagatccgccagcgtatggaaaaaatggtgcttgaaaccagccaccgtgctgaaatggacttcatcctgcacccttaaaagcagttgctag

SEQ ID NO: 59395 - DNA, 1800 bp, Artificial Sequence
  derived and/or modified sequence
atgctgaagttccaggaggccgccaagtgtgtgtctggcagcacagccatcagcacctaccccaagaccctgattgccaggagatatgtgctgcagcagaagctgggcagcggcagctttggcaccgtgtacctggtgtctgacaagaaggccaagagaggagaggagctgaaggtgctgaaggagatctctgtgggggagctgaaccccaatgaaacagtgcaggccaacctggaggcccagctgctgagcaagctggaccacccagccatcgtgaagttccacgccagctttgtggagcaggacaacttctgcatcatcacagagtactgtgagggccgggacctggatgacaagatccaggagtacaagcaggccggcaagatcttccctgagaaccagatcatcgagtggttcatccagctgctgctgggcgtggactacatgcatgagcggcgcatcctgcaccgggacctgaagagcaagaatgtgttcctgaagaacaacctgctgaagattggagactttggagtgtcccggctgctgatgggcagctgtgacctggccaccaccctgaccggcaccccccactacatgagccctgaggccctgaagcaccagggctatgacaccaagagtgacatctggagcctggcctgcatcctgtatgagatgtgctgcatgaaccacgcctttgctggcagcaacttcctgagcatcgtgctgaagatcgtggagggggacacccccagcctgcctgagcgctaccccaaggagctgaatgccatcatggagagcatgctgaacaagaaccccagcctgcggcccagcgccatcgagatcctgaagatcccctacctggatgagcagctgcagaacctgatgtgccgctacagcgagatgaccctggaggacaagaacctggactgccagaaggaggccgcccacatcatcaatgccatgcagaagaggatccacctgcagaccctgcgggccctgtctgaggtgcagaagatgaccccccgggagaggatgaggctgaggaagctgcaggccgcagatgagaaggccaggaagctgaagaagatcgtggaggagaagtatgaggagaacagcaagaggatgcaggagctgcggagcaggaacttccagcagctgtctgtggatgtgctgcacgagaagacccacctgaagggcatggaggagaaggaggagcagcctgagggccgcctgagctgcagcccccaggatgaagatgaggagcgctggcagggccgggaggaggagagtgatgagcccaccctggagaacctgcctgagagccagcccatccccagcatggacctgcacgagctggagagcatcgtggaggatgccaccagtgacctgggctaccacgagatccctgaggaccccctggtggccgaggagtactatgcagatgcctttgacagctactgtgaggagagtgatgaggaggaggaggagatcgccctggagaggcctgagaaggagatcagaaatgaaggcagccagcctgcctaccgcaccaaccagcaggacagcgacatcgaggccctggcccgctgcctggagaatgtgctgggctgcaccagcctggaccagccctgccgctcctggggccagaagtacctgaagaggagcatcatcaccagccgggagcagggcatccgcatgctggccaagcagaggtctgcctctgtgtggaagaagtggtgcctgaagccagccaccgtgctgaagtggaccagcagctgcaccctgaagagcagctgctag

SEQ ID NO: 59396 - DNA, 1800 bp, Artificial Sequence
  derived and/or modified sequence
atgctgaagttccaggaggccgccaagtgcgtgagcggcagcaccgcaatctccacatatccaaaaacccttatcgctcggaggtacgtcctacagcagaaactgggctcggggagcttcggaactgtctatcttgtgtctgacaagaaagctaagcgtggggaggagttaaaggtcctgaaagagatcagtgtgggcgaacttaaccccaacgagaccgtgcaggcaaacctcgaggcccagctgctgtcgaagctggatcaccccgctatcgtgaagttccacgcttctttcgttgagcaggacaacttttgcatcattaccgagtattgcgagggtcgcgacctcgacgacaagatacaggaatacaagcaagcgggcaagatctttccagaaaatcagataattgagtggttcatacagctcctgctcggagtggactacatgcatgagcggcgtatcctgcaccgggatcttaaaagtaaaaatgtgttcctcaaaaataatctgttaaagattggtgattttggggtcagcagactgcttatgggatcctgcgatctggcaacgaccctcactgggaccccccactacatgagtcccgaagctctcaagcaccagggttatgacactaaaagtgatatttggtccctggcctgcatcttgtacgaaatgtgttgcatgaatcacgcgtttgccggatccaactttctctctatcgtactcaaaattgtggagggtgacactcccagcctgcccgagagataccccaaagagttgaacgcaattatggagtccatgttaaacaaaaatccatcactgagaccgagcgccattgaaatactgaaaatcccctacctcgatgagcagcttcagaacctgatgtgtaggtacagtgagatgacactcgaagataagaatcttgattgtcaaaaagaggccgctcatattatcaacgccatgcagaagcgcatccaccttcaaactctcagagccctttccgaggtccagaaaatgacaccgcgggagcggatgcgactccgcaaactccaggccgcagatgagaaggctaggaagctcaaaaagatcgtcgaagagaagtacgaggagaactcaaagcggatgcaggaattacgatccagaaatttccagcaattatcagtggacgtactgcacgaaaaaactcacttgaaaggaatggaagagaaagaagagcagcctgagggccgccttagttgttcaccccaggacgaagatgaggagcgttggcagggccgggaagaagaatccgatgagcctactcttgaaaatctacctgaaagtcagccgataccatcaatggatctgcacgagttggagtccatcgtcgaggacgctacatcggacctcggctatcacgagatccccgaggatccgttggtcgcagaagagtactatgcagatgcttttgattcatattgcgaggagtcagacgaagaggaagaggaaattgccctggaacggcccgagaaagaaatccggaatgaaggttctcagcctgcataccgcaccaaccaacaggactccgatattgaagccctggcccgttgcctcgaaaacgtccttggatgcacatctcttgatcagccttgcagatcctggggacaaaagtatctcaaaaggtcgatcattacctcccgcgagcagggaattaggatgctggcaaaacagcgcagcgcgtctgtctggaagaagtggtgcttgaagccagccactgtgctgaagtggactagttcttgtactttgaaatctagctgttag

SEQ ID NO: 59397 - DNA, 2754 bp, Artificial Sequence
  derived and/or modified sequence
ggttccaaacagccgtggcccgcggtgtctggcgctcggtgggtgtggttgcccctagtttgaggcctgcccgattacccgcaagacttgggcagccccgggcgccgctccgaccacgacagggaaaggaactgaccaacactggatgaatttgaccatttcttaggagactggaatgttaagtttctataaatgaatgaaccagttctctcttgtttggagcaatgctgaaattccaagaggcagctaagtgtgtgagtggatcaacagccatttccacttatccaaagaccttgattgcaagaagatacgtgcttcaacaaaaacttggcagtggaagttttggaactgtctatctggtttcagacaagaaagccaaacgaggagaggaattaaaggtacttaaggaaatatctgttggagaactaaatccaaatgaaactgtacaggccaatttggaagcccaactcctctccaagctggaccacccagccattgtcaagttccatgcaagttttgtggagcaagataatttctgcattatcacggagtactgtgagggccgagatctggacgataaaattcaggaatataaacaagctggaaaaatctttccagaaaatcaaataatagaatggtttatccagctgctgctgggagttgactacatgcatgagaggaggatacttcatcgagacttaaagtcaaagaatgtatttctgaaaaataatctccttaaaattggagattttggagtttctcgacttctaatgggatcctgtgacctggccacaactttaactggaactccccattatatgagtcctgaggctctgaaacaccaaggctatgacacaaagtcggacatctggtcactggcatgcattttgtatgagatgtgctgcatgaatcatgcattcgctggctccaatttcttatccattgttttaaaaattgttgaaggtgacacaccttctctccctgagagatatccaaaagaactaaatgccatcatggaaagcatgttgaacaagaatccttcattaagaccatctgctatcgaaattttaaaaatcccttaccttgatgagcagctacagaacctaatgtgtagatattcagaaatgactctggaagacaaaaatttggattgtcagaaggaggctgctcatataattaatgccatgcaaaaaaggatccacctgcagactctgagggcactgtcagaagtacagaaaatgacgccaagagaaaggatgcggctgaggaagctccaggcggctgatgagaaagccaggaagctgaaaaagattgtggaagaaaaatatgaagaaaatagcaaacgaatgcaagaattgagatctcggaactttcagcagctgagtgttgatgtactccatgaaaaaacacatttaaaaggaatggaagaaaaggaggagcaacctgagggaagactttcttgttcaccccaggacgaggatgaagagaggtggcaaggcagggaagaggaatctgatgaaccaactttagagaacctgcctgagtctcagcctattccttccatggacctccacgaacttgaatcaattgtagaggatgccacatctgaccttggataccatgagatcccagaagacccacttgtggctgaagagtactacgctgatgcatttgattcctattgtgaagagagtgatgaggaggaagaagaaatagcgttagaaagaccagagaaagaaatcaggaatgagggatcccagcctgcttacagaacaaaccaacaggacagtgatatcgaagcgttggccaggtgtttggaaaatgtcctgggttgcacttctctagatcagccatgcagaagctggggacagaagtatttgaagaggtctataattacctcaagagagcaaggcatcagaatgctagcgaagcagagatccgcgagtgtttggaaaaagtggtgcctcaagccagcgactgttttgaagtggaccagctcctgtactttgaagagcagttgctgatcacgatgggaaaagaacctactctccagaaccatctctaggcaactatcaaaaagaagcagaagttcaagtggacaaatttatgtgaaaattcatttaacatataagctgaactctattatggggaatggatacaaaagcagagctcccatcttgactttcaattcctcatcagaagtactggcttctttagagagtagtaagcatggctgcctatgcttggagtcataagtgttatttggactataccctgagataagcttatagatcaagtttggctcccttgaaaagcatttctctcatgtgcgccctcagggcttccagcaggattgagtcaccctgacgatgaccggggagaagccgtgtgctcttcattattttcagctggaggacagagctcagtgcctgactgcctagggtctcatggactgtaggcagcctgccagtgaaggtcactggactctagcctacaacatgctgagctacagcccagaagccagacatgcctgtcttagctgacctgtttttggtccacttttgcccttccatgactaataaggaagatatgtgtgtatttcatacacacacaaggacctggattaaaaatccaaaaagtgattctcttctatgatttatttcaaactcatccatagataattcaagatttgtattcaaaataaacatagttttcacagttacaaaataaatcacctattttatcttttcctta

SEQ ID NO: 59398 - DNA, 1800 bp, Artificial Sequence
  derived and/or modified sequence
atgttgaagttccaggaggctgcaaagtgtgtgtcaggatctaccgccatcagtacatatcccaaaacactgatcgcaaggcgatatgtcctgcagcagaagttaggatctggctcattcggaaccgtttatcttgtttccgacaaaaaagcaaaaaggggagaggagctaaaagtgcttaaagaaatcagtgtgggagagctgaatcccaatgagaccgtgcaggctaatctcgaagcacaactgttgagtaagcttgaccacccggcaatcgttaagtttcacgcgtcatttgtcgaacaagataacttttgcattataaccgagtactgtgagggcagagacctggatgataagatccaggagtataaacaggcgggaaagatcttcccagagaaccagatcatcgaatggttcatccagctgctcctaggagtggactacatgcatgagagacgaattttgcaccgtgacttgaaaagtaaaaacgtgtttctgaagaataaccttttaaagatcggagacttcggcgtctcccggcttttgatgggttcctgcgatctggcaacaaccctgacagggactccccattacatgtcccctgaagcattgaagcaccagggctacgatactaagagtgacatatggtcactggcatgcattctgtatgagatgtgctgtatgaatcacgcatttgccggttccaatttcctgtccattgtgctgaagatcgtggagggagacaccccctctctgcctgaacgctatcccaaggagctgaacgctatcatggagtccatgctcaataagaatccctcgctacgccctagcgcaattgagatactgaaaatcccatacctggacgaacagctccagaacttaatgtgcagatactctgaaatgacactagaggacaagaaccttgactgccagaaggaagctgctcatataatcaatgcaatgcagaagaggattcatcttcagaccctgcgtgccctaagcgaggtgcaaaagatgacccctagggagcggatgagattgcggaaattacaggccgctgatgagaaggctcgcaaactgaaaaaaatagtagaggagaagtacgaagaaaattctaagcgcatgcaggaactgagaagtcggaatttccagcagctctctgttgatgtgttgcacgaaaaaacacacctaaaaggaatggaggagaaagaggaacagccggaaggcagactcagttgcagcccacaagatgaggatgaggagcggtggcagggtagggaagaggaatcagacgaacctaccctggaaaatttacctgagagtcagccaatccctagcatggacctccacgaattggaaagcatcgtcgaggatgccaccagtgatctggggtaccatgagatccccgaggatcccctcgtcgctgaagaatactacgccgacgctttcgattcctactgtgaggagagtgacgaggaggaggaggagattgcgctcgaaaggcccgagaaggaaatccgcaacgagggctctcaaccagcctacagaaccaaccaacaggacagtgatattgaagccttagcaaggtgtctcgaaaacgtgcttggctgcacgagtctagaccaaccttgtcgaagttgggggcagaaatacttgaaaaggagcatcattacaagccgggaacagggaatcaggatgcttgccaaacagcgcagcgctagtgtgtggaagaagtggtgcttaaaaccagcaaccgtcctaaaatggacctcatcttgtaccctgaaatcttcttgctag

SEQ ID NO: 59399 - DNA, 1800 bp, Artificial Sequence
  derived and/or modified sequence
atgctgaagttccaggaggccgccaagtgcgtgagcggcagcaccgccatcagcacctaccccaagaccctgatcgccagaagatacgtgctgcagcagaagctgggcagcggcagcttcggcaccgtgtacctggtgagcgacaagaaggccaagagaggcgaggagctgaaggtgctgaaggagatcagcgtgggcgagctgaaccccaacgagaccgtgcaggccaacctggaggcccagctgctgagcaagctggaccaccccgccatcgtgaagttccacgccagcttcgtggagcaggacaacttctgcatcatcaccgagtactgcgagggcagagacctggacgacaagatccaggagtacaagcaggccggcaagatcttccccgagaaccagatcatcgagtggttcatccagctgctgctgggcgtggactacatgcacgagagaagaatcctgcacagagacctgaagagcaagaacgtgttcctgaagaacaacctgctgaagatcggcgacttcggcgtgagcagactgctgatgggcagctgcgacctggccaccaccctgaccggcaccccccactacatgagccccgaggccctgaagcaccagggctacgacaccaagagcgacatctggagcctggcctgcatcctgtacgagatgtgctgcatgaaccacgccttcgccggcagcaacttcctgagcatcgtgctgaagatcgtggagggcgacacccccagcctgcccgagagataccccaaggagctgaacgccatcatggagagcatgctgaacaagaaccccagcctgagacccagcgccatcgagatcctgaagatcccctacctggacgagcagctgcagaacctgatgtgcagatacagcgagatgaccctggaggacaagaacctggactgccagaaggaggccgcccacatcatcaacgccatgcagaagagaatccacctgcagaccctgagagccctgagcgaggtgcagaagatgacccccagagagagaatgagactgagaaagctgcaggccgccgacgagaaggccagaaagctgaagaagatcgtggaggagaagtacgaggagaacagcaagagaatgcaggagctgagaagcagaaacttccagcagctgagcgtggacgtgctgcacgagaagacccacctgaagggcatggaggagaaggaggagcagcccgagggcagactgagctgcagcccccaggacgaggacgaggagagatggcagggcagagaggaggagagcgacgagcccaccctggagaacctgcccgagagccagcccatccccagcatggacctgcacgagctggagagcatcgtggaggacgccaccagcgacctgggctaccacgagatccccgaggaccccctggtggccgaggagtactacgccgacgccttcgacagctactgcgaggagagcgacgaggaggaggaggagatcgccctggagagacccgagaaggagatcagaaacgagggcagccagcccgcctacagaaccaaccagcaggacagcgacatcgaggccctggccagatgcctggagaacgtgctgggctgcaccagcctggaccagccctgcagaagctggggccagaagtacctgaagagaagcatcatcaccagcagagagcagggcatcagaatgctggccaagcagagaagcgccagcgtgtggaagaagtggtgcctgaagcccgccaccgtgctgaagtggaccagcagctgcaccctgaagagcagctgctag

SEQ ID NO: 59400 - protein, 643 aa, Artificial Sequence
  derived and/or modified sequence
MALRKAGDLEPQFTPERRFRLCWYQAHSGRALLGPPPQASPPAGGLALALLLLSWVALGPRSLEGADPGTPGEAEGPACPAACVCSYDDDADELSVFCSSRNLTRLPDGVPGGTQALWLDGNNLSSVPPAAFQNLSSLGFLNLQGGQLGSLEPQALLGLENLCHLHLERNQLRSLALGTFAHTPALASLGLSNNRLSRLEDGLFEGLGSLWDLNLGWNSLAVLPDAAFRGLGSLRELVLAGNRLAYLQPALFSGLAELRELDLSRNALRAIKANVFVQLPRLQKLYLDRNLIAAVAPGAFLGLKALRWLDLSHNRVAGLLEDTFPGLLGLRVLRLSHNAIASLRPRTFKDLHFLEELQLGHNRIRQLAERSFEGLGQLEVLTLDHNQLQEVKAGAFLGLTNVAVMNLSGNCLRNLPEQVFRGLGKLHSLHLEGSCLGRIRPHTFTGLSGLRRLFLKDNGLVGIEEQSLWGLAELLELDLTSNQLTHLPHRLFQGLGKLEYLLLSRNRLAELPADALGPLQRAFWLDVSHNRLEALPNSLLAPLGRLRYLSLRNNSLRTFTPQPPGLERLWLEGNPWDCGCPLKALRDFALQNPSAVPRFVQAICEGDDCQPPAYTYNNITCASPPEVVGLDLRDLSEAHFAPC

SEQ ID NO: 59401 - DNA, 1932 bp, Artificial Sequence
  derived and/or modified sequence
atggcactccgaaaagctggcgacctggaaccccagttcaccccagagaggaggttccgcctttgttggtatcaggcacacagcggaagggccctgctgggccccccgcctcaggcctcacctcctgccggaggattggcccttgccctgttgctactatcctgggttgctctaggacctagatctctagaaggagccgatccaggtactcctggagaagccgaagggcctgcatgccccgcagcctgtgtctgctcctacgatgacgacgctgatgagctgtcggttttctgtagtagccggaatctgacaaggttaccggacggcgtgcctggcggaactcaggctctgtggctcgacggaaacaacctgagcagcgtgccacccgcggctttccagaacctgagcagcctgggcttccttaacctgcagggtggtcagctcggtagtctggagccccaggcattattgggactcgaaaatctgtgtcacttacatttagaacggaatcagctgcgatcactcgctctgggaacgttcgcccacaccccggcactggcctccctcgggctgtcaaacaacaggctctctcggttggaagacgggctgttcgaaggattaggtagcctctgggatctcaatctgggctggaactcgctggcagttctacctgacgccgcgtttaggggtctgggatctctacgggaacttgtgctggcagggaacagactcgcctatctccagcctgccctcttcagtggactggctgagttaagagaattagacctgtccagaaatgccctccgcgcaattaaggccaacgtgtttgtgcagttgccccggctccagaaactctatctcgataggaacttgattgccgcagtcgcccccggtgcttttctcggcctgaaggccctgcggtggctcgacctgtcccataatcgcgtggctggtctgttggaagatacctttcctgggttgctcggcttacgcgtcctgcggctgtcccacaatgccattgctagtctaagaccgaggacgttcaaggacctgcacttcctggaggagctccagttaggtcacaatcgaatccgacagttagctgaaagatccttcgaggggttgggtcagctggaggtgctgactctagaccacaaccagctgcaggaagttaaggcaggggcctttctcggacttactaatgtggccgtcatgaatttaagcgggaattgcctgaggaatctgcccgaacaagtttttagaggacttggaaagttgcactcacttcaccttgaaggatcttgcctaggccggatccggccccacacgttcacggggctgtcaggattgcggcgcctcttcctgaaagacaatggcctcgtggggatcgaggaacaatctctctggggcttagcagaactgttggagcttgacttgacctctaaccaattgacacatttgccgcacaggctgtttcaaggcctgggtaagctcgaatacctgctccttagcaggaatagactggctgagcttcccgctgacgccctggggcctttgcaaagggctttctggctcgatgtgagtcacaaccggctggaagccctgccaaatagcctactggcacctctgggcaggctgcgctacttgagcctgcggaataattccctgcgaacgtttaccccccagccccctggactggagaggctgtggctggaaggcaacccgtgggactgcggatgcccgctaaaggccctgagagattttgccctgcagaacccatctgcggtcccccggttcgtgcaagctatctgtgagggcgacgattgccaacctcccgcctacacatacaataacatcacatgtgccagtccgccagaggtggtcgggctggacttgcgagacctgtcagaagcccactttgctccctgttag

SEQ ID NO: 59402 - DNA, 1818 bp, Artificial Sequence
  derived and/or modified sequence
atggccctcagaaaagggggtttagcccttgcactcctactgctgtcctgggtggcactgggccctcgtagcctggagggggccgaccccggcacacccggcgaagcagagggccccgcctgtcctgcagcttgtgtatgcagctatgacgatgacgctgatgaactgagtgttttctgtagtagccgaaacttaacccgccttcccgatggagtgccaggagggacacaggcactctggctagacggcaacaatctatcttccgtgccccccgccgcatttcaaaatctttccagcctaggattccttaatttgcagggcggccagttagggtcattagaaccgcaggccctattagggctggaaaacctgtgccacttgcacctggagcgcaaccagctcaggtctctagctcttggaacctttgcgcacactcctgccttagcaagcctgggattgtccaataaccggttgtctaggttagaggatgggctcttcgaggggctgggcagcctgtgggatctgaatctgggctggaattcactggcagtactgcccgacgccgccttcaggggccttggctccttgcgggagctggtgctagccggcaacagactggcctatttgcagcccgccctgttctccggcctggccgagctcagggagttggatctttcccggaacgcactgcgcgcaataaaagccaacgtttttgtgcagctgccccggcttcagaagttatatttggatagaaacctgatcgccgccgtggctccaggggcctttctaggcctgaaggccctgcggtggctcgatctgagtcacaatcgcgtggccgggctccttgaggatacattccctggacttctcggtctgcgggtacttcggctgtcccataatgctatcgcttccctgaggccacgcacattcaaggatctgcactttctagaagagctccagctggggcataaccgcatcagacaactggccgagcggagctttgaaggtttagggcaacttgaggttctgactctggaccacaaccaattgcaggaggtgaaagctggcgccttcctgggtctcaccaatgtggccgtgatgaatctcagtggaaactgcctccgtaatctccccgagcaggtatttcgaggactcggcaagttacatagcctacatttggaaggaagttgcttgggacggattcggccacatacatttaccggactttcaggacttcgcaggctgtttcttaaggataacggtctggtcggcattgaggagcagtcactgtgggggctggccgaactgctagagctggacctgacttctaatcaactgacccacttgccccaccgtctgttccaggggctcggaaagctggagtatctgctgctgtcgcggaatcgcctcgctgaattgcccgcagatgctctcgggcctttacagagggctttttggctcgacgtctcccacaatcggttagaggcacttcctaacagcctcctggcgccgctgggccgccttcgctacctgtccctgcgcaacaatagcctgcggacatttacacctcaaccccccggcctggaacgactatggctggagggtaacccctgggactgtggctgtccgctcaaggcactgcgcgacttcgctttacagaatccttcagcagtgccccgctttgtgcaagctatatgtgaaggtgacgattgccaacctcccgcgtacacctataacaacattacctgtgcatcaccccccgaagtggtgggattagatctccgcgatctctctgaagcccactttgcaccttgttag

SEQ ID NO: 59403 - DNA, 2086 bp, Artificial Sequence
  derived and/or modified sequence
ggaaatccagagggcaggggtggccggcacagcagacgtaccctccctcgctgcctgcctgcagcctgccctgcatgcaggatggccctgaggaaaggaggcctggccctggcgctgctgctgctgtcctgggtggcactgggcccccgcagcctggagggagcagaccccggaacgccgggggaagccgagggcccagcgtgcccggccgcctgtgtctgcagctacgatgacgacgcggatgagctcagcgtcttctgcagctccaggaacctcacgcgcctgcctgatggagtcccgggcggcacccaagccctgtggctggacggcaacaacctctcgtccgtccccccggcagccttccagaacctctccagcctgggcttcctcaacctgcagggcggccagctgggcagcctggagccacaggcgctgctgggcctagagaacctgtgccacctgcacctggagcggaaccagctgcgcagcctggcactcggcacgtttgcacacacgcccgcgctggcctcgctcggcctcagcaacaaccgtctgagcaggctggaggacgggctcttcgagggcctcggcagcctctgggacctcaacctcggctggaatagcctggcggtgctccccgatgcggcgttccgcggcctgggcagcctgcgcgagctggtgctggcgggcaacaggctggcctacctgcagcccgcgctcttcagcggcctggccgagctccgggagctggacctgagcaggaacgcgctgcgggccatcaaggcaaacgtgttcgtgcagctgccccggctccagaaactctacctggaccgcaacctcatcgctgccgtggccccgggcgccttcctgggcctgaaggcgctgcgatggctggacctgtcccacaaccgcgtggctggcctcctggaggacacgttccccggtctgctgggcctgcgtgtgctgcggctgtcccacaacgccatcgccagcctgcggccccgcaccttcaaggacctgcacttcctggaggagctgcagctgggccacaaccgcatccggcagctggctgagcgcagctttgagggcctggggcagcttgaggtgctcacgctagaccacaaccagctccaggaggtcaaggcgggcgctttcctcggcctcaccaacgtggcggtcatgaacctctctgggaactgtctccggaaccttccggagcaggtgttccggggcctgggcaagctgcacagcctgcacctggagggcagctgcctgggacgcatccgcccgcacaccttcaccggcctctcggggctccgccgactcttcctcaaggacaacggcctcgtgggcattgaggagcagagcctgtgggggctggcggagctgctggagctcgacctgacctccaaccagctcacgcacctgccccaccgcctcttccagggcctgggcaagctggagtacctgctgctctcccgcaaccgcctggcagagctgccggcggacgccctgggccccctgcagcgggccttctggctggacgtctcgcacaaccgcctggaggcattgcccaacagcctcttggcaccactggggcggctgcgctacctcagcctcaggaacaactcactgcggaccttcacgccgcagcccccgggcctggagcgcctgtggctggagggtaacccctgggactgtggctgccctctcaaggcgctgcgggacttcgccctgcagaaccccagtgctgtgccccgcttcgtccaggccatctgtgagggggacgattgccagccgcccgcgtacacctacaacaacatcacctgtgccagcccgcccgaggtcgtggggctcgacctgcgggacctcagcgaggcccactttgctccctgctgaccaggtccccggactcaagccccggactcaggcccccacctggctcaccttgtgctggggacaggtcctcagtgtcctcaggggcctgcccagtgcacttgctggaagacgcaagggcctgatggggtggaaggcatggcggcccccccagctgtcatcaattaaaggcaaaggcaatcgaatctaa

SEQ ID NO: 59404 - DNA, 2198 bp, Artificial Sequence
  derived and/or modified sequence
ggaaatccagagggcaggggtggccggcacagcagacgtaccctccctcgctgcctgcctgcagcctgccctgcatgcaggatggccctgaggaaagcgggtgacctcgagcctcagttcacacctgagcgccgcttccggctgtgctggtatcaggctcactcgggcagagccctcctcgggccgcctccccaagcctctccccccgcaggaggcctggccctggcgctgctgctgctgtcctgggtggcactgggcccccgcagcctggagggagcagaccccggaacgccgggggaagccgagggcccagcgtgcccggccgcctgtgtctgcagctacgatgacgacgcggatgagctcagcgtcttctgcagctccaggaacctcacgcgcctgcctgatggagtcccgggcggcacccaagccctgtggctggacggcaacaacctctcgtccgtccccccggcagccttccagaacctctccagcctgggcttcctcaacctgcagggcggccagctgggcagcctggagccacaggcgctgctgggcctagagaacctgtgccacctgcacctggagcggaaccagctgcgcagcctggcactcggcacgtttgcacacacgcccgcgctggcctcgctcggcctcagcaacaaccgtctgagcaggctggaggacgggctcttcgagggcctcggcagcctctgggacctcaacctcggctggaatagcctggcggtgctccccgatgcggcgttccgcggcctgggcagcctgcgcgagctggtgctggcgggcaacaggctggcctacctgcagcccgcgctcttcagcggcctggccgagctccgggagctggacctgagcaggaacgcgctgcgggccatcaaggcaaacgtgttcgtgcagctgccccggctccagaaactctacctggaccgcaacctcatcgctgccgtggccccgggcgccttcctgggcctgaaggcgctgcgatggctggacctgtcccacaaccgcgtggctggcctcctggaggacacgttccccggtctgctgggcctgcgtgtgctgcggctgtcccacaacgccatcgccagcctgcggccccgcaccttcaaggacctgcacttcctggaggagctgcagctgggccacaaccgcatccggcagctggctgagcgcagctttgagggcctggggcagcttgaggtgctcacgctagaccacaaccagctccaggaggtcaaggcgggcgctttcctcggcctcaccaacgtggcggtcatgaacctctctgggaactgtctccggaaccttccggagcaggtgttccggggcctgggcaagctgcacagcctgcacctggagggcagctgcctgggacgcatccgcccgcacaccttcaccggcctctcggggctccgccgactcttcctcaaggacaacggcctcgtgggcattgaggagcagagcctgtgggggctggcggagctgctggagctcgacctgacctccaaccagctcacgcacctgccccaccgcctcttccagggcctgggcaagctggagtacctgctgctctcccgcaaccgcctggcagagctgccggcggacgccctgggccccctgcagcgggccttctggctggacgtctcgcacaaccgcctggaggcattgcccaacagcctcttggcaccactggggcggctgcgctacctcagcctcaggaacaactcactgcggaccttcacgccgcagcccccgggcctggagcgcctgtggctggagggtaacccctgggactgtggctgccctctcaaggcgctgcgggacttcgccctgcagaaccccagtgctgtgccccgcttcgtccaggccatctgtgagggggacgattgccagccgcccgcgtacacctacaacaacatcacctgtgccagcccgcccgaggtcgtggggctcgacctgcgggacctcagcgaggcccactttgctccctgctgaccaggtccccggactcaagccccggactcaggcccccacctggctcaccttgtgctggggacaggtcctcagtgtcctcaggggcctgcccagtgcacttgctggaagacgcaagggcctgatggggtggaaggcatggcggcccccccagctgtcatcaattaaaggcaaaggcaatcgaatct

SEQ ID NO: 59405 - DNA, 1932 bp, Artificial Sequence
  derived and/or modified sequence
atggccctgaggaaggccggggacctggagccccagttcaccccagagcggcgcttccggctgtgctggtaccaggcccacagcggccgggccctgctgggccccccaccccaggccagccccccagctgggggcctggccctggccctgctgctgctgtcctgggtggccctgggccccaggagcctggagggcgctgaccccggcaccccaggagaggccgagggccctgcctgcccagctgcctgtgtgtgcagctatgatgatgatgctgatgagctgtctgtgttctgcagcagcaggaacctgacccggctgcctgatggagtgcctgggggcacccaggccctgtggctggatggcaacaacctgagctctgtgcccccagctgccttccagaacctgagcagcctgggcttcctgaacctgcagggcggccagctgggcagcctggagccccaggccctgctgggcctggagaacctgtgccacctgcacctggagaggaaccagctgcggagcctggccctgggcacctttgcccacaccccagccctggccagcctgggcctgagcaacaaccggctgagccggctggaggatggcctgtttgagggcctgggcagcctgtgggacctgaacctgggctggaacagcctggccgtgctgcctgatgctgccttccggggcctgggcagcctgcgggagctggtgctggccggcaaccggctggcctacctgcagcctgccctcttcagcggcctggccgagctgcgggagctggacctgagcagaaatgccctgcgggccatcaaggccaacgtgtttgtgcagctgccccggctgcagaagctgtacctggacaggaacctgattgctgctgtggcccctggggccttcctgggcctgaaggccctgcgctggctggacctgagccacaacagagtggccggcctgctggaggacaccttccctggcctgctgggcctgcgggtgctgcggctgagccacaatgccatcgccagcctgcggcccaggaccttcaaggacctgcacttcctggaggagctgcagctgggccacaaccgcatccggcagctggccgagaggagctttgagggcctgggccagctggaggtgctgaccctggaccacaaccagctgcaggaggtgaaggccggggccttcctgggcctgaccaacgtggccgtgatgaacctgagcggcaactgcctgaggaacctgcctgagcaggtgttccggggcctgggcaagctgcacagcctgcacctggagggcagctgcctgggccgcatccggccccacaccttcaccggcctgagcggcctgcggcggctcttcctgaaggacaatggcctggtgggcatcgaggagcagagcctgtggggcctggccgagctgctggagctggacctgaccagcaaccagctgacccacctgccccacaggctcttccagggcctgggcaagctggagtacctgctgctgagcaggaaccggctggccgagctgcctgcagatgccctgggccccctgcagagggccttctggctggatgtgagccacaaccggctggaggccctgcccaacagcctgctggcccccctgggccgcctgcgctacctgagcctgaggaacaacagcctgcggaccttcaccccccagcccccaggcctggagcggctgtggctggagggcaacccctgggactgtggctgccccctgaaggccctgcgggactttgccctgcagaaccccagcgctgtgcccaggtttgtgcaggccatctgtgaaggagatgactgccagcccccagcctacacctacaacaacatcacctgtgccagccccccagaggtggtgggcctggacctgcgggacctgtctgaggcccactttgccccctgctag

SEQ ID NO: 59406 - DNA, 1818 bp, Artificial Sequence
  derived and/or modified sequence
atggccctgaggaaaggaggcctggccctggccctgctgctgctgtcctgggtggccctgggccccaggagcctggagggcgctgaccccggcaccccaggagaggccgagggccctgcctgcccagctgcctgtgtgtgcagctatgatgatgatgctgatgagctgtctgtgttctgcagcagcaggaacctgacccggctgcctgatggagtgcctgggggcacccaggccctgtggctggatggcaacaacctgagctctgtgcccccagctgccttccagaacctgagcagcctgggcttcctgaacctgcagggcggccagctgggcagcctggagccccaggccctgctgggcctggagaacctgtgccacctgcacctggagaggaaccagctgcggagcctggccctgggcacctttgcccacaccccagccctggccagcctgggcctgagcaacaaccggctgagccggctggaggatggcctgtttgagggcctgggcagcctgtgggacctgaacctgggctggaacagcctggccgtgctgcctgatgctgccttccggggcctgggcagcctgcgggagctggtgctggccggcaaccggctggcctacctgcagcctgccctcttcagcggcctggccgagctgcgggagctggacctgagcagaaatgccctgcgggccatcaaggccaacgtgtttgtgcagctgccccggctgcagaagctgtacctggacaggaacctgattgctgctgtggcccctggggccttcctgggcctgaaggccctgcgctggctggacctgagccacaacagagtggccggcctgctggaggacaccttccctggcctgctgggcctgcgggtgctgcggctgagccacaatgccatcgccagcctgcggcccaggaccttcaaggacctgcacttcctggaggagctgcagctgggccacaaccgcatccggcagctggccgagaggagctttgagggcctgggccagctggaggtgctgaccctggaccacaaccagctgcaggaggtgaaggccggggccttcctgggcctgaccaacgtggccgtgatgaacctgagcggcaactgcctgaggaacctgcctgagcaggtgttccggggcctgggcaagctgcacagcctgcacctggagggcagctgcctgggccgcatccggccccacaccttcaccggcctgagcggcctgcggcggctcttcctgaaggacaatggcctggtgggcatcgaggagcagagcctgtggggcctggccgagctgctggagctggacctgaccagcaaccagctgacccacctgccccacaggctcttccagggcctgggcaagctggagtacctgctgctgagcaggaaccggctggccgagctgcctgcagatgccctgggccccctgcagagggccttctggctggatgtgagccacaaccggctggaggccctgcccaacagcctgctggcccccctgggccgcctgcgctacctgagcctgaggaacaacagcctgcggaccttcaccccccagcccccaggcctggagcggctgtggctggagggcaacccctgggactgtggctgccccctgaaggccctgcgggactttgccctgcagaaccccagcgctgtgcccaggtttgtgcaggccatctgtgaaggagatgactgccagcccccagcctacacctacaacaacatcacctgtgccagccccccagaggtggtgggcctggacctgcgggacctgtctgaggcccactttgccccctgctag

SEQ ID NO: 59407 - DNA, 1932 bp, Artificial Sequence
  derived and/or modified sequence
atggccctgcggaaggccggcgacctggagccccagttcacccccgaacgccgctttaggctttgttggtaccaagctcattctggtcgcgctctcctgggcccaccaccacaggctagtccgcccgcagggggactagccctcgcacttttgttgctgtcttgggtcgcgctagggccaagaagtcttgagggcgctgacccagggacacccggcgaggcagaggggccagcatgtcctgccgcttgcgtctgcagttatgacgacgacgccgacgagttaagtgtgttctgctcatcaagaaatctcacccgacttccagacggggtaccaggaggcacacaggcgctttggctggacggtaacaacctttccagcgtgccgcccgccgcctttcagaacctatcctccctcggctttctgaacctgcagggcgggcagctggggtcgctggaacctcaggcattattagggttggagaatctgtgccacttgcacttggagcgaaaccagctgaggtctctggccctcgggaccttcgcccatactcctgccctggcgtctctcggccttagtaataatcgactgagtcgtctcgaagacggactcttcgagggcctgggttctttgtgggacctgaacctgggatggaacagcctcgcagttctgcctgacgccgcattcaggggcctaggttccctgcgtgagctagtactggctggtaatcgcttagcctatctgcagccagctctgttttcgggcctcgcagaactacgggaactggatctgtctagaaatgctctcagagccattaaagccaacgtcttcgttcagctgccacgattgcagaaactctacctggaccgcaacctgattgcagcagtcgccccgggcgcatttttaggactcaaagccctcagatggttggatctgtctcacaacagggtcgctgggctgctggaagatacgttccccgggttgttagggctccgggtgttgagactctctcacaatgctatagcgtctctgaggcctaggacctttaaagatctccacttccttgaagaactccagcttggacataacaggataagacaactggccgagcgctcttttgaggggctcgggcaactggaggtgctgacactggaccataatcagctacaggaggtaaaagctggggctttcctgggactaacaaatgttgcggtcatgaacctgtccggcaattgtctgaggaacctgcctgaacaagtgttcaggggccttggaaaactgcactccctccacctcgaaggcagctgcctgggaaggatcaggcctcatacattcacaggactgtcaggccttcgtcgtttgttcctcaaggataacgggctggtcggaatcgaggagcagtctctctggggactggccgagcttttagaactggacctaacttctaatcagctcacccacttaccacacagactgttccaaggcctgggcaaactggagtacctgctcctctctaggaaccgacttgccgagctacccgctgacgcccttggaccattgcagcgagctttctggctcgacgtaagccacaatcgcctggaggcactccccaactccctgctcgcccctctgggtcgtttgaggtacttatctctcagaaataattccctgcgaacatttacaccccagccacccggcctggaaaggttgtggctagaggggaacccatgggattgtggttgccctctcaaggctttacgggactttgccttacaaaacccctctgctgtcccccgctttgtgcaagctatctgcgagggggacgactgccagccacccgcctacacctacaataatatcacgtgtgcatccccccctgaagtcgtcggcctggatctcagggatctgagcgaggcccattttgcaccttgctag

SEQ ID NO: 59408 - DNA, 1818 bp, Artificial Sequence
  derived and/or modified sequence
atggccctgcggaagggcggcctggccctggccctgctgctgctgagctgggtggctcttgggccgaggagcctcgagggcgcggaccccggaactcccggcgaagccgagggccccgcatgccctgccgcttgcgtgtgctcgtatgatgacgacgctgatgaattgagcgtcttttgctcctcaagaaatctcacccggctccctgatggcgtgcctggcggcacacaggctctatggctggacggtaataacctcagctcagtccctcctgccgcgttccagaatctgagcagtcttggcttcctaaatctgcaggggggccagctcggatcgctggaaccccaagctctgctgggtctcgaaaacttatgccacctgcatctggagcggaaccagctgcgtagcttagcgttggggactttcgcgcacacccccgcccttgcatccctgggcctttccaacaacaggctttctagactggaggatggcctttttgaagggttgggatcactctgggacctgaacctggggtggaattcacttgctgttcttcctgacgccgcctttcgcgggctcggatcgttacgggagcttgttctggccggaaatcgactcgcttatctacagccagctctgttttctggcctggctgagctacgtgagctagatctgtcgcgtaatgccctccgagcaatcaaagctaatgtgttcgtgcagttgccgaggcttcagaagctgtacctcgaccgcaacctgatcgctgccgtggcaccgggcgccttcttggggctcaaggctcttcgctggttagatctgtcacataatcgcgtcgcgggtctgctggaggacactttccctggtctgttgggcttacgcgtgctgaggttgtcccataacgctatcgcatccctgaggcccagaacctttaaagatctccattttcttgaggaactccagttgggacataatcgcattagacagctggcagagaggtcatttgaaggcctcggtcaactcgaagtgttgaccttagaccataatcagctccaggaagtgaaggcaggggcttttctcgggcttacaaatgtggccgtgatgaacctctcaggcaactgtcttagaaatctccccgaacaggtgtttcggggccttggtaagctgcactccctgcacctggagggcagctgtctgggtcgtatcaggccgcacaccttcacaggtttatctggcttgcgacgtctgttcctcaaggacaatggcctggtaggaatcgaggagcagagcttgtggggtctcgccgaactgctcgaactggatctcacatcaaaccagctaactcacctgccccacaggttgtttcaaggccttggtaaacttgagtatctgttgctgtccaggaatagactggcagagttgccagcagacgcccttggtcccttgcaaagggcattctggctggacgtgagtcataacaggctggaggctttgccaaattctctgttagcccctcttgggcgcttgcgatacctgtcccttcgtaataactccttacggacgttcaccccccagccacccgggctggagaggctgtggttggaaggaaatccatgggactgtggatgccccctcaaggccttgagggactttgcccttcaaaatccatctgcagtgccccggttcgttcaggccatctgcgagggagatgactgccagccacctgcttacacctataacaatattacttgtgccagtcctcctgaagtggtgggactggatctcagggatctttccgaggctcacttcgcaccttgctag

SEQ ID NO: 59409 - DNA, 1932 bp, Artificial Sequence
  derived and/or modified sequence
atggccctgcgaaaagccggagatctggagcctcaatttactccggagagaagattcagactgtgttggtatcaggcccattcaggaagagctcttttgggcccacccccacaggccagccccccagccggtgggctcgcgctggccctcttgctgctgagctgggtcgccctgggaccacgatcattggaaggagctgatccgggtacccctggggaagctgagggaccagcctgtcccgctgcctgcgtctgtagctacgacgatgacgccgacgagctgagcgttttttgcagcagccgaaatctgacccggcttccagacggtgtgccgggtggaacacaggctctttggttggacgggaataatctctctagcgttcctcccgctgctttccagaatctttcctcactgggttttttgaacctccaggggggtcagctgggctctttggagccccaagcactcttgggtttagagaatctatgccacctccatctagaacgcaatcagctgcgaagccttgcattaggaacctttgcgcacacaccagcccttgctagtctggggctctccaacaaccggctctctcggttagaagacggattgtttgaaggactcggctctctgtgggacctgaatctcggttggaacagccttgcagtgctgccggacgctgcttttaggggactgggctctctcagggagctcgtcctcgccggtaacagactggcttacctccaaccagccctgtttagcggacttgccgagctccgcgaactcgacctctcgaggaatgccctacgtgccataaaagcgaacgtcttcgtgcagctgccaaggctacagaagctctatctggaccgcaacttgatcgctgccgtggcacccggagccttcctgggcctcaaggcactccgctggctagacctcagccacaatcgggtggccggacttttggaggacacattccctggactgctaggtctcagggtgctacggttgtcccacaacgctattgcgtctctgcgcccacggacatttaaagaccttcacttccttgaggagctccaacttggccacaataggatcaggcagctggcagagaggagcttcgagggtctagggcagctcgaagtgctaaccttggaccacaatcagctgcaggaagtcaaagcgggtgccttccttgggctaaccaacgtcgcggtgatgaacctgtccggtaattgtctgagaaacctgcccgagcaggtcttccgtgggctgggaaaattgcatagccttcatctggaaggtagctgcctaggccgaatacgtccccacacattcaccgggttgtctggcctgaggcggctgtttcttaaggataatggcctcgttggaatagaagaacagtctctgtggggtcttgcagaactcctagagctggatctgactagcaatcagttaacccacctgcctcaccgtctctttcaaggcctgggcaagttagaatatttactgctctctcggaatagattggctgagctccccgctgatgccctgggaccactgcagcgcgctttttggctggatgtttcacataataggctcgaagccctcccaaattccttgctggctccgctgggccgactcagatacttgtctctgcggaacaactcgctgcggaccttcaccccccagcctcccggtctggaacgtctgtggctcgagggcaatccctgggattgtggatgtccgctcaaggcccttcgggactttgcccttcagaacccatctgctgtcccgcgtttcgtgcaggctatctgtgaaggagatgattgtcaacccccagcgtacacctataataacatcacttgtgcaagtccacctgaagtcgttggactggatttgagagatttaagtgaggcccatttcgccccatgctag

SEQ ID NO: 59410 - DNA, 1818 bp, Artificial Sequence
  derived and/or modified sequence
atggccctgagaaaaggcggactcgccttagctctgttattattaagctgggtcgccctaggcccacggtcattagagggagctgatcccggaacacctggtgaggccgaggggccagcctgtccggctgcgtgtgtatgcagctacgacgacgacgctgatgaactgagcgttttttgtagtagtagaaacttaaccagactgcctgacggtgtccctggtggtacacaagccctgtggctggatggcaataatctcagttctgtcccacccgctgcctttcagaacctcagcagccttggatttctgaaccttcagggtggacagctaggatctttagaaccgcaggccctcctcgggctggagaatctctgccacctgcatctggagaggaatcaactgcggagcctcgctttaggcacctttgctcacacgcccgctcttgcatcgcttggcctgtccaacaaccggttgtccaggctcgaagatggcctgttcgagggcctcggttcactgtgggatttgaacttggggtggaattcgctggccgttctccccgacgcagcttttcgagggttgggaagtctgagagagctggtgctagccggtaaccgcctcgcgtatttacaacccgctcttttcagcggcctcgccgaactcagagagctggacctatccaggaacgcattaagggcaattaaggcgaacgtgtttgttcagctgcccagactccagaagctgtatctcgataggaacctgattgctgccgtcgcccctggagctttcctgggcctgaaagcgttgcgctggctggatctcagccataatcgggtcgcaggattgctcgaggacacttttcccggtttgctgggtctccgggtcctgcgtctgtcccacaatgccatcgcatcgctgaggcctcggaccttcaaagatctgcatttcctagaagaactacagctggggcataaccggatccgtcagctggccgaacggagcttcgagggcttagggcagctggaggttttgaccttggaccacaatcagctgcaggaagtgaaagcaggcgcatttctaggtcttaccaatgtggctgtgatgaacctgtctggaaattgtctgcgtaatctgcccgagcaggtgtttaggggtctgggtaagctgcacagtctgcacctagagggctcttgcctcggacgcatcagaccacacactttcaccggtctgagcggtctcaggcgcctcttcctaaaggataatgggctcgtgggcatcgaagaacagagcttgtgggggctggcagagttacttgagctggatttgacatcaaatcagctaacacatctccctcatcgtttatttcaggggttgggcaaattagagtacttgctcttgagcaggaacagactggctgaattaccagcggacgcactgggccctctgcagagggccttctggttggatgtttctcataacagactcgaagctctccctaacagcctgctcgcacccctgggacgactgcgatatctgtcactgagaaacaattcattaagaacctttacacctcagccacctggtttggaaaggctctggctggaaggaaacccctgggattgtggatgtcctctcaaagcccttcgagacttcgccctccagaatcctagcgcagtgccacgcttcgtgcaggctatctgtgagggcgatgattgccagcctcccgcatacacctataataatatcacatgcgcttcaccacccgaagtagtcggtctcgacctgagagacctttccgaagctcatttcgcaccatgttag

SEQ ID NO: 59411 - DNA, 1932 bp, Artificial Sequence
  derived and/or modified sequence
atggccctgagaaaggccggcgacctggagccccagttcacccccgagagaagattcagactgtgctggtaccaggcccacagcggcagagccctgctgggcccccccccccaggccagcccccccgccggcggcctggccctggccctgctgctgctgagctgggtggccctgggccccagaagcctggagggcgccgaccccggcacccccggcgaggccgagggccccgcctgccccgccgcctgcgtgtgcagctacgacgacgacgccgacgagctgagcgtgttctgcagcagcagaaacctgaccagactgcccgacggcgtgcccggcggcacccaggccctgtggctggacggcaacaacctgagcagcgtgccccccgccgccttccagaacctgagcagcctgggcttcctgaacctgcagggcggccagctgggcagcctggagccccaggccctgctgggcctggagaacctgtgccacctgcacctggagagaaaccagctgagaagcctggccctgggcaccttcgcccacacccccgccctggccagcctgggcctgagcaacaacagactgagcagactggaggacggcctgttcgagggcctgggcagcctgtgggacctgaacctgggctggaacagcctggccgtgctgcccgacgccgccttcagaggcctgggcagcctgagagagctggtgctggccggcaacagactggcctacctgcagcccgccctgttcagcggcctggccgagctgagagagctggacctgagcagaaacgccctgagagccatcaaggccaacgtgttcgtgcagctgcccagactgcagaagctgtacctggacagaaacctgatcgccgccgtggcccccggcgccttcctgggcctgaaggccctgagatggctggacctgagccacaacagagtggccggcctgctggaggacaccttccccggcctgctgggcctgagagtgctgagactgagccacaacgccatcgccagcctgagacccagaaccttcaaggacctgcacttcctggaggagctgcagctgggccacaacagaatcagacagctggccgagagaagcttcgagggcctgggccagctggaggtgctgaccctggaccacaaccagctgcaggaggtgaaggccggcgccttcctgggcctgaccaacgtggccgtgatgaacctgagcggcaactgcctgagaaacctgcccgagcaggtgttcagaggcctgggcaagctgcacagcctgcacctggagggcagctgcctgggcagaatcagaccccacaccttcaccggcctgagcggcctgagaagactgttcctgaaggacaacggcctggtgggcatcgaggagcagagcctgtggggcctggccgagctgctggagctggacctgaccagcaaccagctgacccacctgccccacagactgttccagggcctgggcaagctggagtacctgctgctgagcagaaacagactggccgagctgcccgccgacgccctgggccccctgcagagagccttctggctggacgtgagccacaacagactggaggccctgcccaacagcctgctggcccccctgggcagactgagatacctgagcctgagaaacaacagcctgagaaccttcaccccccagccccccggcctggagagactgtggctggagggcaacccctgggactgcggctgccccctgaaggccctgagagacttcgccctgcagaaccccagcgccgtgcccagattcgtgcaggccatctgcgagggcgacgactgccagccccccgcctacacctacaacaacatcacctgcgccagcccccccgaggtggtgggcctggacctgagagacctgagcgaggcccacttcgccccctgctag

SEQ ID NO: 59412 - DNA, 1818 bp, Artificial Sequence
  derived and/or modified sequence
atggccctgagaaagggcggcctggccctggccctgctgctgctgagctgggtggccctgggccccagaagcctggagggcgccgaccccggcacccccggcgaggccgagggccccgcctgccccgccgcctgcgtgtgcagctacgacgacgacgccgacgagctgagcgtgttctgcagcagcagaaacctgaccagactgcccgacggcgtgcccggcggcacccaggccctgtggctggacggcaacaacctgagcagcgtgccccccgccgccttccagaacctgagcagcctgggcttcctgaacctgcagggcggccagctgggcagcctggagccccaggccctgctgggcctggagaacctgtgccacctgcacctggagagaaaccagctgagaagcctggccctgggcaccttcgcccacacccccgccctggccagcctgggcctgagcaacaacagactgagcagactggaggacggcctgttcgagggcctgggcagcctgtgggacctgaacctgggctggaacagcctggccgtgctgcccgacgccgccttcagaggcctgggcagcctgagagagctggtgctggccggcaacagactggcctacctgcagcccgccctgttcagcggcctggccgagctgagagagctggacctgagcagaaacgccctgagagccatcaaggccaacgtgttcgtgcagctgcccagactgcagaagctgtacctggacagaaacctgatcgccgccgtggcccccggcgccttcctgggcctgaaggccctgagatggctggacctgagccacaacagagtggccggcctgctggaggacaccttccccggcctgctgggcctgagagtgctgagactgagccacaacgccatcgccagcctgagacccagaaccttcaaggacctgcacttcctggaggagctgcagctgggccacaacagaatcagacagctggccgagagaagcttcgagggcctgggccagctggaggtgctgaccctggaccacaaccagctgcaggaggtgaaggccggcgccttcctgggcctgaccaacgtggccgtgatgaacctgagcggcaactgcctgagaaacctgcccgagcaggtgttcagaggcctgggcaagctgcacagcctgcacctggagggcagctgcctgggcagaatcagaccccacaccttcaccggcctgagcggcctgagaagactgttcctgaaggacaacggcctggtgggcatcgaggagcagagcctgtggggcctggccgagctgctggagctggacctgaccagcaaccagctgacccacctgccccacagactgttccagggcctgggcaagctggagtacctgctgctgagcagaaacagactggccgagctgcccgccgacgccctgggccccctgcagagagccttctggctggacgtgagccacaacagactggaggccctgcccaacagcctgctggcccccctgggcagactgagatacctgagcctgagaaacaacagcctgagaaccttcaccccccagccccccggcctggagagactgtggctggagggcaacccctgggactgcggctgccccctgaaggccctgagagacttcgccctgcagaaccccagcgccgtgcccagattcgtgcaggccatctgcgagggcgacgactgccagccccccgcctacacctacaacaacatcacctgcgccagcccccccgaggtggtgggcctggacctgagagacctgagcgaggcccacttcgccccctgctag

SEQ ID NO: 59413 - protein, 687 aa, Artificial Sequence
  derived and/or modified sequence
MDEGTGLQPGAGEQLEAPATAEAVQERCEPETLRSKSLPVLSSASCRPSLSPTSGDANPAFGCVDSSGHQELKQGPNPLAPSPSAPSTSAGLGDCNHRVDLSKTFSVSSALAMLQERRCLYVVLTDSRCFLVCMCFLTFIQALMVSGYLSSVITTIERRYSLKSSESGLLVSCFDIGNLVVVVFVSYFGGRGRRPLWLAVGGLLIAFGAALFALPHFISPPYQIQELNASAPNDGLCQGGNSTATLEPPACPKDSGGNNHWVYVALFICAQILIGMGSTPIYTLGPTYLDDNVKKENSSLYLAIMYVMGALGPAVGYLLGGLLIGFYVDPRNPVHLDQNDPRFIGNWWSGFLLCAIAMFLVIFPMFTFPKKLPPRHKKKKKKKFSVDAVSDDDVLKEKSNNSEQADKKVSSMGFGKDVRDLPRAAVRILSNMTFLFVSLSYTAESAIVTAFITFIPKFIESQFGIPASNASIYTGVIIVPSAGVGIVLGGYIIKKLKLGARESAKLAMICSGVSLLCFSTLFIVGCESINLGGINIPYTTGPSLTMPHRNLTGSCNVNCGCKIHEYEPVCGSDGITYFNPCLAGCVNSGNLSTGIRNYTECTCVQSRQVITPPTVGQRSQLRVVIVKTYLNENGYAVSGKCKRTCNTLIPFLVFLFIVTFITACAQPSAIIVTLSIHSYSNLLWSSH

SEQ ID NO: 59414 - DNA, 2064 bp, Artificial Sequence
  derived and/or modified sequence
atggacgagggcaccggcctgcagcccggcgccggcgagcagctggaggcccccgccaccgccgaggccgtgcaggagagatgcgagcccgagaccctgagaagcaagagcctgcccgtgctgagcagcgccagctgcagacccagcctgagccccaccagcggcgacgccaaccccgccttcggctgcgtggacagcagcggccaccaggagctgaagcagggccccaaccccctggcccccagccccagcgcccccagcaccagcgccggcctgggcgactgcaaccacagagtggacctgagcaagaccttcagcgtgagcagcgccctggccatgctgcaggagagaagatgcctgtacgtggtgctgaccgacagcagatgcttcctggtgtgcatgtgcttcctgaccttcatccaggccctgatggtgagcggctacctgagcagcgtgatcaccaccatcgagagaagatacagcctgaagagcagcgagagcggcctgctggtgagctgcttcgacatcggcaacctggtggtggtggtgttcgtgagctacttcggcggcagaggcagaagacccctgtggctggccgtgggcggcctgctgatcgccttcggcgccgccctgttcgccctgccccacttcatcagccccccctaccagatccaggagctgaacgccagcgcccccaacgacggcctgtgccagggcggcaacagcaccgccaccctggagccccccgcctgccccaaggacagcggcggcaacaaccactgggtgtacgtggccctgttcatctgcgcccagatcctgatcggcatgggcagcacccccatctacaccctgggccccacctacctggacgacaacgtgaagaaggagaacagcagcctgtacctggccatcatgtacgtgatgggcgccctgggccccgccgtgggctacctgctgggcggcctgctgatcggcttctacgtggaccccagaaaccccgtgcacctggaccagaacgaccccagattcatcggcaactggtggagcggcttcctgctgtgcgccatcgccatgttcctggtgatcttccccatgttcaccttccccaagaagctgccccccagacacaagaagaagaagaagaagaagttcagcgtggacgccgtgagcgacgacgacgtgctgaaggagaagagcaacaacagcgagcaggccgacaagaaggtgagcagcatgggcttcggcaaggacgtgagagacctgcccagagccgccgtgagaatcctgagcaacatgaccttcctgttcgtgagcctgagctacaccgccgagagcgccatcgtgaccgccttcatcaccttcatccccaagttcatcgagagccagttcggcatccccgccagcaacgccagcatctacaccggcgtgatcatcgtgcccagcgccggcgtgggcatcgtgctgggcggctacatcatcaagaagctgaagctgggcgccagagagagcgccaagctggccatgatctgcagcggcgtgagcctgctgtgcttcagcaccctgttcatcgtgggctgcgagagcatcaacctgggcggcatcaacatcccctacaccaccggccccagcctgaccatgccccacagaaacctgaccggcagctgcaacgtgaactgcggctgcaagatccacgagtacgagcccgtgtgcggcagcgacggcatcacctacttcaacccctgcctggccggctgcgtgaacagcggcaacctgagcaccggcatcagaaactacaccgagtgcacctgcgtgcagagcagacaggtgatcaccccccccaccgtgggccagagaagccagctgagagtggtgatcgtgaagacctacctgaacgagaacggctacgccgtgagcggcaagtgcaagagaacctgcaacaccctgatccccttcctggtgttcctgttcatcgtgaccttcatcaccgcctgcgcccagcccagcgccatcatcgtgaccctgagcatccacagctacagcaacctgctgtggagcagccactag

SEQ ID NO: 59415 - DNA, 2064 bp, Artificial Sequence
  derived and/or modified sequence
atggacgaaggaaccgggctgcagccaggcgccggcgagcagctggaggctcctgcaaccgccgaggcagtgcaggaacgctgcgagccagaaacgctgcggagcaagagcttgcctgtcttgtctagcgccagttgcagaccttcgttgtcccctacaagcggcgacgccaatcctgcctttgggtgcgtagactcttcagggcaccaagaactgaagcagggaccaaatccgttggctccctcaccctcggcccccagcacttctgccggtttgggggactgcaaccacagggtagacctatccaaaacctttagtgtgtctagcgcgctcgcaatgctgcaggaacgccggtgtctgtatgtggtgcttacagacagcagatgttttcttgtatgcatgtgtttcctcacattcatccaagcactgatggtgagcggatatctctctagcgtgattactacaatcgagcgccggtatagcctgaagtcgtcagaaagcggcctccttgtgagttgttttgacattggaaacttggtggtcgtggtgttcgtgagttacttcggaggacgcgggagaaggcccctgtggcttgcagtcggcggactcctgattgcttttggcgctgccttatttgctctaccccactttatctcacctccttatcagattcaggaactaaatgcttctgcgcccaacgacgggctgtgccagggcggcaatagtacagccacccttgagcctccggcctgccccaaagactccggcggaaacaatcactgggtgtatgtggccctttttatctgtgctcaaattctgatcggcatgggctctacgccaatttacaccctgggacccacctatctggacgataacgtgaaaaaagagaattccagcttatatctcgcaataatgtacgttatgggtgccttgggacctgccgtggggtatctgctggggggcctgctcatcggattctacgtggacccccgaaacccagttcatctggaccagaatgatcctaggtttataggtaattggtggagcggcttccttctttgcgccatagcgatgttcctggtaatctttcctatgttcacctttccgaaaaagctgcctcctaggcataaaaagaaaaagaaaaagaaattcagcgtggatgcagtgtcagacgatgatgtacttaaggagaagagcaataactcggagcaagctgacaagaaggtctcttcaatgggtttcggaaaggacgtgcgcgatttgccaagggccgcagtgcgcatcctcagcaacatgacttttcttttcgtgtccctgagctacaccgccgaatctgccatcgtaaccgctttcatcaccttcatacccaagttcattgaaagccaattcggcattccggccagcaacgctagcatatacaccggggtaattatcgtcccctcagccggggtaggaatcgtcctgggaggatacatcatcaaaaaattgaagctgggcgcgcgcgagtcagctaagcttgctatgatatgctccggcgtctcactgctgtgtttctctacgctgtttatcgtcggctgtgagtccataaacctgggagggatcaacatcccctacaccacaggcccctctctcactatgcctcatcggaatcttacaggtagttgtaatgttaactgcggttgcaagatccacgaatatgaaccagtttgcgggtccgacggaattacatacttcaacccttgtctggcaggctgcgtgaattctggtaatctgtccaccggcatcaggaattacactgaatgtacatgcgtgcagagcagacaggtgattacgcccccaactgtgggccaaaggagccagctgagggtggtgatcgttaaaacttacctgaacgagaatgggtatgctgtttccggcaagtgcaagaggacatgcaacacattaatcccgttcctcgtgttcttgttcatcgtcaccttcatcacggcctgcgctcagccgtccgccattatagtgaccttgagcatccattcatattctaatttgttgtggagctcacactag

SEQ ID NO: 59416 - DNA, 2064 bp, Artificial Sequence
  derived and/or modified sequence
atggatgagggcaccggcctgcagcctggagctggggagcagctggaggccccagccacagctgaggccgtgcaggagcgctgtgagcctgagaccctgcggagcaagagcctgcctgtgctgagcagcgccagctgccggcccagcctgagccccaccagcggagatgccaacccagccttcggctgtgtggacagcagcggccaccaggagctgaagcagggccccaaccccctggcccccagccccagcgcccccagcaccagcgctggcctgggggactgcaaccaccgggtggacctgagcaagaccttctctgtgtcctctgccctggccatgctgcaggagcggcgctgcctgtatgtggtgctgacagacagccgctgcttcctggtgtgcatgtgcttcctgaccttcatccaggccctgatggtgtctggctacctgagcagcgtcatcaccaccatcgagcggcgctacagcctgaagagcagcgagagcggcctgctggtgtcctgctttgacatcggcaacctggtggtggtggtgtttgtgtcctactttggaggccggggcagaagacccctgtggctggccgtgggcggcctgctgattgcctttggagctgccctgtttgccctgccccacttcatcagccccccctaccagatccaggagctgaatgccagcgccccaaatgatggcctgtgccagggcggcaacagcacagccaccctggagcccccagcctgccccaaggacagcggcggcaacaaccactgggtgtatgtggccctcttcatctgtgcccagatcctgattggcatgggcagcacccccatctacaccctgggccccacctacctggatgacaacgtgaagaaggagaacagcagcctgtacctggccatcatgtatgtgatgggcgccctgggccctgctgtgggctacctgctgggcggcctgctgattggcttctacgtggaccccagaaatcctgtgcacctggaccagaatgacccccgcttcatcggcaactggtggagcggcttcctgctgtgtgccatcgccatgttcctggtgatcttccccatgttcaccttccccaagaagctgcccccaagacacaagaagaagaagaagaagaagttctctgtggatgctgtgtctgatgatgatgtgctgaaggagaagagcaacaacagcgagcaggccgacaagaaggtgtcctccatgggctttgggaaggatgtgcgggacctgcccagggctgctgtgcgcatcctgagcaacatgaccttcctgtttgtgtccctgagctacacagctgagagcgccatcgtgacagccttcatcaccttcatccccaagttcatcgagagccagtttggcatcccagccagcaatgccagcatctacacaggagtcatcatcgtgcccagcgctggggtgggcatcgtgctgggcggctacatcatcaagaagctgaagctgggcgcccgggagagcgccaagctggccatgatctgcagcggcgtgtccctgctgtgcttcagcaccctcttcatcgtgggctgtgagagcatcaacctgggcggcatcaacatcccctacaccaccggccccagcctgaccatgccccacaggaacctgaccggcagctgcaatgtgaactgtggctgcaagatccacgagtatgagcctgtgtgtggcagtgatggcatcacctacttcaacccctgcctggccggctgtgtgaacagcggcaacctgagcacaggcatccggaactacacagagtgcacctgtgtgcagagccggcaggtgatcaccccacccaccgtgggccagaggagccagctgcgggtggtgattgtgaagacctacctgaatgaaaatggctatgctgtgtctgggaagtgcaagaggacctgcaacaccctcatccccttcctggtgttcctgttcatcgtgaccttcatcacagcctgtgcccagcccagcgccatcatcgtgaccctgagcatccacagctacagcaacctgctgtggagcagccactag

SEQ ID NO: 59417 - DNA, 2064 bp, Artificial Sequence
  derived and/or modified sequence
atggacgagggcaccggcctgcagcccggcgccggcgagcagctggaagctccggcgacggctgaagctgtgcaggaacgctgcgagcccgaaaccctgcgatcgaagtctctgccggtactgagttccgcctcttgtcgtccatcactgtcccctacttctggagatgccaaccccgcctttggttgcgtggacagttcaggacaccaagaactgaaacaaggccccaacccactcgctccatccccctcggccccatccacttccgcgggtctcggagattgtaatcacagagtggatctgagtaagacctttagtgtctcatctgcgctcgcaatgcttcaggaaagacgttgcctatacgtggtgctgacggactcaaggtgcttccttgtctgtatgtgtttcctaacgtttatccaagctctgatggtttcaggttacctgtctagtgttattactacaattgaacgcaggtattccctgaagagctccgagagtggattactagttagttgtttcgacatcgggaatcttgtggtcgttgtttttgtgagctactttgggggccggggacggcggccattgtggctggccgtcggcggtctgctcattgcattcggggcagctctctttgcactgccccatttcattagtcctccttatcagatccaggaactcaacgcgtcggctcctaatgatggattgtgccaaggcggaaactccacagctacattggagcctccggcgtgtcctaaggactcgggcggcaataaccactgggtgtatgttgcactttttatatgtgcacagatcttgatcggaatgggctccaccccgatatataccttgggtcccacgtacctggacgacaatgtaaagaaagaaaactcttctttatacctcgcaataatgtacgttatgggcgcccttggccccgccgtcggatacttacttggtggtctactgatagggttttatgtggacccaaggaaccctgtccacctcgaccagaatgacccccgatttatcgggaattggtggtctggatttttgctttgcgccatcgcgatgtttctggtaatattccccatgttcacgttcccgaaaaaactccctccacggcacaaaaagaaaaagaagaagaaattttccgtcgacgctgtgagcgatgacgatgtgctgaaggagaaatctaataactcggagcaggctgacaaaaaggtcagcagcatggggtttggaaaagatgtgcgggacttgccgagagccgctgtcaggatactcagtaatatgacattcctgtttgtatctctatcctacacagccgaatcagcaatcgtgaccgcctttattacttttataccaaagtttatcgaatcccagttcggtatccccgcatctaatgcttctatctataccggggtgattatcgtgccgtctgctggagtcggaatagtgctcggtggctatatcattaaaaagcttaaactgggagccagagaatccgccaaattggcgatgatctgctcaggtgtctcgttactgtgtttttctactctctttatcgtcggatgtgaatcaataaatctcggtggcattaacattccttatacaaccggaccctctcttacaatgcctcacagaaatctaacaggcagttgtaacgtcaattgtggatgtaaaattcacgaatacgaacccgtgtgcggaagtgatggcataacatacttcaatccctgtttagcaggctgtgtaaacagtggcaatctttccacggggatacggaactatactgaatgcacttgtgtacaatcacgccaggtgatcacaccgcccaccgtcgggcagaggtcacagctcagagttgtgatcgtgaagacctatctaaatgaaaatggatacgcagtgagcggtaaatgtaaaagaacttgtaacactttaattccctttctggtcttcctctttatcgtgacctttatcactgcatgtgcccagccgagcgccatcattgtcacactctcgatccattcctattctaatcttctgtggagctcacattag

SEQ ID NO: 59418 - DNA, 2064 bp, Artificial Sequence
  derived and/or modified sequence
atggacgaaggcactggcctgcagccaggggctggagaacagctggaagcccctgccacggcggaagccgtgcaagaaaggtgcgaacctgagacactgaggagcaaatccctgccggtgctctcctcagctagctgcaggccatccttgtctcctacttctggagatgccaatcccgcatttggctgcgtggacagcagtggacatcaggaactgaaacagggcccaaaccccctagcaccgagtcccagtgccccttcgacatcagccggtttaggggactgcaaccatcgggtggatctgagcaaaaccttctcggttagcagtgcactcgccatgctccaggaaagacggtgcctctacgtggtcctgacggatagccggtgtttcttagtgtgcatgtgtttcctgactttcatccaagccctgatggtgtcgggatacttatcgtcagtaatcaccacaattgaacggcgatattctttgaagtcttcagagagtgggctccttgtgagctgttttgatataggcaacctcgtggtcgttgtcttcgtgtcctatttcgggggaagagggcgtagaccgctgtggctggccgtaggtggcctgctgattgcattcggtgcagccctgtttgccctgccacacttcatcagcccgccataccaaattcaggaacttaacgctagcgcacccaacgatggactttgccaagggggaaacagcacagcgacactggagcctccagcctgccccaaggattcaggcggtaataaccactgggtgtatgtggcactcttcatctgcgcacaaatccttattggaatgggtagcacccccatttatacccttggccctacatatctggacgacaatgtgaaaaaggaaaactcctcgttgtatctggctattatgtacgtaatgggcgcactaggcccagcggtgggctatctcctgggaggattacttattggtttttatgtggaccctaggaaccccgtccacttagatcagaatgatccacggttcatagggaactggtggtctggttttctgctctgcgctatcgccatgttccttgtcatcttccccatgttcacctttccaaagaagctgcccccaaggcacaaaaaaaagaaaaaaaaaaagttcagtgtagatgccgtctcagatgatgatgtgctgaaagagaagtcaaacaactcagaacaagccgataaaaaggtctcctcgatggggttcggaaaagatgtcagagatctgcccagggccgctgtgaggattctgtctaatatgactttcttgtttgtttccctgtcttatactgcggaatcggcgatcgtcacagccttcattactttcattccgaaattcatcgagagtcagttcggcatccccgcttctaatgcgagtatttataccggcgtgattatcgtgccttcagccggagtggggattgtgctgggaggatacattatcaagaagctgaaacttggggctagagaaagcgctaagttggcaatgatatgctccggtgtgagcctgctctgcttctcaaccctgtttatcgtcggctgcgaatccataaatctcggtggcatcaacatcccgtacactaccgggccttcccttaccatgcctcatcgcaacctgactggaagttgcaacgtgaattgcggatgcaaaatccacgagtacgagcctgtgtgtgggtccgatggcatcacctactttaacccctgtctggcaggatgtgtgaattctggtaatctgtcaacaggcatccgtaattatacagaatgcacatgcgtgcagagtcggcaagttatcacaccacctactgtagggcagcgcagccaacttcgggtagttatcgtgaagacctatcttaatgagaatggatacgctgtaagtggtaaatgcaaaagaacctgcaacaccctgatcccatttcttgtgttcttgtttatcgtgacttttatcaccgcttgcgcccagccctctgcaattatagtgaccttgtcgattcactcatattctaacctgctctggagttcgcattag

SEQ ID NO: 59419 - DNA, 3725 bp, Artificial Sequence
  derived and/or modified sequence
agacaatgagggagagtctccgccgaccgcctgctgcttattgttccgggactggagactgcagccggctgctgcctagtcctccggggctccgctcctgactagctcctccgtccctctagggacggttcggggtcacctaaccctggtccccggggcgctgggacgctagccccaagccgcagccgctcttcgctgaccgccctctttctgctttgcaggtcggcagcttcactcccgagggtgccgcgagcccaggcggcgaacacccggtacccctggcgcagcgaggtgggatgctgtacggacagcagcgctaagtgcccccccacccccggcgcagggtgcactcgctcctggccgcgggcccagcggcggcggcggcggcggcggcggaggggatgagcccgggacgcgcgaggcgcctgcctcaagctaccgcccggagagggacgccgagtagggctcatcgcagtaccgcgcggacccctgccccctgtggcacgcggctgcggagccttgaagccgtgtctgtgatcaggatgcactgggcgcctcgcagctggtgaggatgccctgctgcgcggccctgcgcccccagccccagtcccaggtgggcaagactgactgggcccggcttcggcccctcgtgccggtggatgaaacgtgccggagtgcttgggtgccatcagctatcaaatctgaattctaagcgccatggacgaaggcactggactgcagcccggggcgggagagcagctggaggcgccggccactgcagaagctgtccaagagaggtgcgagccggagaccctcaggtctaagagtttaccggtcctcagcagcgcctcctgccggccaagcctcagtcccactagtggagacgccaacccggcctttggctgtgtggattcttcgggccaccaggagttgaagcaaggcccgaacccgttggcccccagtccctctgccccgtccacttcggcggggctcggggactgtaaccacagggtggacctcagcaaaaccttctcggtgtcctccgccttggccatgctccaggagagaaggtgcctctacgtggtcctcacggattcccgttgcttcctggtgtgcatgtgctttctgaccttcatccaggcgttaatggtctctgggtacctgagcagcgtaattaccaccattgaaaggcgctacagtctgaagagttccgagtcggggctgctggtcagctgctttgacatcgggaacctggtggtggtggtgttcgtcagctacttcggcggccggggtcggcggcccctgtggctggccgtgggtggactcctcatcgccttcggggcagccctcttcgccttacctcacttcatctcgcccccctaccagatccaagagttgaacgcctcggcccccaacgacggcctgtgtcagggtggcaactccaccgccactttggagcctccggcctgtccgaaggactcgggaggaaataatcactgggtctacgtggctttattcatttgcgcgcagattctcattggaatgggctccacacctatttataccctgggaccaacctacttagatgacaatgtcaagaaagaaaactcctccttgtacctagccatcatgtatgtcatgggagcacttggccctgcagtgggatatttattaggtggacttcttattggtttttatgttgatcccagaaatcctgttcaccttgaccagaatgaccctcgtttcattggaaactggtggagtggattcctcctttgtgccattgcaatgtttcttgtgatattcccaatgtttactttcccaaaaaagcttccacctcgacacaagaaaaagaaaaagaaaaaattttctgttgatgctgttagtgatgacgatgttctgaaggagaaatcaaacaacagtgaacaagcggacaaaaaagtttcttcgatgggatttggaaaggatgtcagagacctaccaagagcagctgtcaggatcttaagcaacatgacattcctttttgtgagtttgtcatacacagctgagagtgccattgtaactgctttcattaccttcattcccaagttcatcgagtcacagtttggtatcccagcctccaatgccagcatctacactggggttattatcgtccccagtgctggtgttggtattgtcctcggaggctacattataaaaaaattgaaacttggtgccagagaatctgcaaaactagcaatgatctgcagtggtgtgtctttactatgtttttcaaccctatttattgttggatgtgaaagcattaatctagggggcataaacatcccttatacaacaggaccttctctcaccatgccccataggaatctgacaggaagctgcaacgttaattgtggttgtaaaatacacgagtatgagccagtctgtggatcagatggaattacatactttaacccttgtctggctggctgtgttaatagtggtaatcttagcactgggatacggaattatacagaatgcacctgtgtccaaagtcgccaagtgatcactccacccaccgtgggacagcgaagtcagctccgtgtggttattgtcaagacttatctcaatgagaacggctatgctgtgtctgggaaatgtaaacggacctgcaatactcttatcccattcttagtttttcttttcatagtcaccttcatcacagcatgtgcccaaccatcagctatcatagtaacactcagcatacattcctactccaatctactttggagcagtcattgacaccacctgcatgctctggcaacaggaatgtggtgtgcagggttcttgctgggagtacaacgtgacgtcgtttcgttttgtgtattttggtttggctgccggcctcaaattcgttgggtttatttttatttttctggcctggtactccataaaatacaaggaggatggactgcagaggcggaggcagagagaatttcccctgagcaccgtgagtgagagagtgggacaccccgacaatgcccggactagatcttgcccagctttcagcacccagggagaattccacgaagagactggcctgcaaaaagggatccagtgcgcagcacagacctacccggggcccttcccagaagcaataagttcctctgcggacccggggctggaagagagccccgctgccttggagccgccctcctgaagcttgaaaatggaagaatttagttttgttggttgaattgaaaatggcgacttgagaaacaactgtgccttcttttctttctttcttttttttaacctctacagacacaatcctcaaaccaacaaaactcagtatacacagccgctattcattgagggctggatacctcaacaagactgagagcctttccccgcttctctccaagaaggagacgttcagctagatttgttcccatttccgttgtgttaattcaaagctcatgctcccctacggtacaggctgaggtacacggttagcaaaaccatgggaaggggaatggcggtgcatatcattaactaacactccaaacaaaggtgagcttgcccaggacttggcatttccaaatcaaagtttttagatatgaacacctactgtgagttctgctacaaagcacaaatgaatttgtctcaactatgcaatttgattggaaaaatgtatgtgcagcatgttacatttactttcacggaataaagcagatatgtttctg

SEQ ID NO: 59420 - protein, 793 aa, Artificial Sequence
  derived and/or modified sequence
MDEGTGLQPGAGEQLEAPATAEAVQERCEPETLRSKSLPVLSSASCRPSLSPTSGDANPAFGCVDSSGHQELKQGPNPLAPSPSAPSTSAGLGDCNHRVDLSKTFSVSSALAMLQERRCLYVVLTDSRCFLVCMCFLTFIQALMVSGYLSSVITTIERRYSLKSSESGLLVSCFDIGNLVVVVFVSYFGGRGRRPLWLAVGGLLIAFGAALFALPHFISPPYQIQELNASAPNDGLCQGGNSTATLEPPACPKDSGGNNHWVYVALFICAQILIGMGSTPIYTLGPTYLDDNVKKENSSLYLAIMYVMGALGPAVGYLLGGLLIGFYVDPRNPVHLDQNDPRFIGNWWSGFLLCAIAMFLVIFPMFTFPKKLPPRHKKKKKKKFSVDAVSDDDVLKEKSNNSEQADKKVSSMGFGKDVRGVIIVPSAGVGIVLGGYIIKKLKLGARESAKLAMICSGVSLLCFSTLFIVGCESINLGGINIPYTTGPSLTMPHRNLTGSCNVNCGCKIHEYEPVCGSDGITYFNPCLAGCVNSGNLSTGIRNYTECTCVQSRQVITPPTVGQRSQLRVVIVKTYLNENGYAVSGKCKRTCNTLIPFLVFLFIVTFITACAQPSAIIVTLRSVEDEERPFALGMQFVLLRTLAYIPTPIYFGAVIDTTCMLWQQECGVQGSCWEYNVTSFRFVYFGLAAGLKFVGFIFIFLAWYSIKYKEDGLQRRRQREFPLSTVSERVGHPDNARTRSCPAFSTQGEFHEETGLQKGIQCAAQTYPGPFPEAISSSADPGLEESPAALEPPS

SEQ ID NO: 59421 - DNA, 2382 bp, Artificial Sequence
  derived and/or modified sequence
atggacgagggcaccggcctgcagcccggcgccggcgagcagctggaggcccccgccaccgccgaggccgtgcaggagagatgcgagcccgagaccctgagaagcaagagcctgcccgtgctgagcagcgccagctgcagacccagcctgagccccaccagcggcgacgccaaccccgccttcggctgcgtggacagcagcggccaccaggagctgaagcagggccccaaccccctggcccccagccccagcgcccccagcaccagcgccggcctgggcgactgcaaccacagagtggacctgagcaagaccttcagcgtgagcagcgccctggccatgctgcaggagagaagatgcctgtacgtggtgctgaccgacagcagatgcttcctggtgtgcatgtgcttcctgaccttcatccaggccctgatggtgagcggctacctgagcagcgtgatcaccaccatcgagagaagatacagcctgaagagcagcgagagcggcctgctggtgagctgcttcgacatcggcaacctggtggtggtggtgttcgtgagctacttcggcggcagaggcagaagacccctgtggctggccgtgggcggcctgctgatcgccttcggcgccgccctgttcgccctgccccacttcatcagccccccctaccagatccaggagctgaacgccagcgcccccaacgacggcctgtgccagggcggcaacagcaccgccaccctggagccccccgcctgccccaaggacagcggcggcaacaaccactgggtgtacgtggccctgttcatctgcgcccagatcctgatcggcatgggcagcacccccatctacaccctgggccccacctacctggacgacaacgtgaagaaggagaacagcagcctgtacctggccatcatgtacgtgatgggcgccctgggccccgccgtgggctacctgctgggcggcctgctgatcggcttctacgtggaccccagaaaccccgtgcacctggaccagaacgaccccagattcatcggcaactggtggagcggcttcctgctgtgcgccatcgccatgttcctggtgatcttccccatgttcaccttccccaagaagctgccccccagacacaagaagaagaagaagaagaagttcagcgtggacgccgtgagcgacgacgacgtgctgaaggagaagagcaacaacagcgagcaggccgacaagaaggtgagcagcatgggcttcggcaaggacgtgagaggcgtgatcatcgtgcccagcgccggcgtgggcatcgtgctgggcggctacatcatcaagaagctgaagctgggcgccagagagagcgccaagctggccatgatctgcagcggcgtgagcctgctgtgcttcagcaccctgttcatcgtgggctgcgagagcatcaacctgggcggcatcaacatcccctacaccaccggccccagcctgaccatgccccacagaaacctgaccggcagctgcaacgtgaactgcggctgcaagatccacgagtacgagcccgtgtgcggcagcgacggcatcacctacttcaacccctgcctggccggctgcgtgaacagcggcaacctgagcaccggcatcagaaactacaccgagtgcacctgcgtgcagagcagacaggtgatcaccccccccaccgtgggccagagaagccagctgagagtggtgatcgtgaagacctacctgaacgagaacggctacgccgtgagcggcaagtgcaagagaacctgcaacaccctgatccccttcctggtgttcctgttcatcgtgaccttcatcaccgcctgcgcccagcccagcgccatcatcgtgaccctgagaagcgtggaggacgaggagagacccttcgccctgggcatgcagttcgtgctgctgagaaccctggcctacatccccacccccatctacttcggcgccgtgatcgacaccacctgcatgctgtggcagcaggagtgcggcgtgcagggcagctgctgggagtacaacgtgaccagcttcagattcgtgtacttcggcctggccgccggcctgaagttcgtgggcttcatcttcatcttcctggcctggtacagcatcaagtacaaggaggacggcctgcagagaagaagacagagagagttccccctgagcaccgtgagcgagagagtgggccaccccgacaacgccagaaccagaagctgccccgccttcagcacccagggcgagttccacgaggagaccggcctgcagaagggcatccagtgcgccgcccagacctaccccggccccttccccgaggccatcagcagcagcgccgaccccggcctggaggagagccccgccgccctggagccccccagctag

SEQ ID NO: 59422 - DNA, 2382 bp, Artificial Sequence
  derived and/or modified sequence
atggatgaggggaccggtctgcagccaggagcaggggaacaacttgaggcccccgcaaccgcggaagcagtccaggagcggtgcgagccagaaacactgaggtccaaaagcctgcccgtcctgtcctccgcaagctgccgtcccagcctgtccccaacaagtggggatgcaaatccggctttcgggtgtgtggatagttcaggccatcaggaactcaagcaggggcctaaccccctggccccttccccatcagctccaagcacctcggctggcctaggggactgtaatcaccgagtggatttgtctaaaactttcagcgtgtcttctgctctagcaatgctccaggaacgacggtgtctttacgttgttctcactgactctcgctgttttctggtgtgtatgtgcttcctgacattcattcaggcactgatggtctcgggctacctaagtagcgtaataaccacgattgagcgacgctacagcctcaagagttccgaaagtgggctgttagtgagctgtttcgatatcggaaaccttgtggtcgttgtcttcgtgtcttatttcgggggaaggggacggagacctttgtggctcgccgttggaggcctgctgatcgcctttggagccgctctctttgcactgcctcacttcatctcaccaccctaccaaatacaggaactcaacgctagcgctccaaatgacgggttgtgtcagggagggaattcaactgctacccttgaaccccctgcttgcccaaaggactccggcggaaacaatcattgggtgtatgtcgcgctcttcatttgcgctcagattttgattggaatgggatcaacaccaatttacaccctgggaccgacgtatcttgacgacaacgtgaagaaagagaatagttcgctgtacttggcaatcatgtacgtgatgggcgctctagggcccgccgtgggttatctgttgggcggcctgctcataggcttctatgtggaccccaggaacccagtccatctggaccaaaatgaccccagattcatcggaaactggtggagtggattcctgttgtgtgcaatcgcaatgttcctggtgatttttccaatgtttacctttcccaaaaaactgccgccccgacataagaagaagaagaagaaaaaattctccgtggatgccgtctccgatgacgacgtgttgaaggaaaagtcaaataacagtgagcaggcagataagaaagtgtcaagcatggggtttgggaaggacgtacggggggttatcatcgtgccctcagctggcgtgggcattgtccttggcggctacattatcaagaagctcaaactgggggcccgcgagtctgctaaactagcgatgatttgtagcggagtttcgctgttgtgctttagcacgctattcatcgtcggctgtgaatcaatcaacctgggcggaatcaacataccatatactacaggcccaagcctcacaatgccgcaccggaatctgactggatcctgcaacgtaaactgtggatgcaaaatccatgagtatgaacctgtctgcggaagtgacgggataacgtactttaacccttgcctggccggttgtgtgaatagtggaaatctctccaccggcatccggaattacaccgagtgtacctgtgttcagtcccgacaggttattactccgccgaccgttggtcaacggagtcagctgagggttgtgatcgtgaagacgtatctgaacgagaatggttatgccgtgtccggtaagtgtaaacggacttgcaacacactgatccctttcctggtgtttttgttcattgttaccttcattacggcttgtgctcagcctagtgccattatcgtgacgctccgctctgtcgaagacgaggagagacctttcgcactagggatgcaatttgtattgctgagaactctggcgtacatccctactccaatctatttcggagctgtgattgacacgacatgtatgctctggcagcaggagtgtggagtgcagggaagctgctgggagtataacgtgacgtcattccgtttcgtgtactttggcctggccgccggtttaaagtttgtaggattcatatttatctttctggcctggtacagcataaagtataaagaagacggcctccagagacgacgccagcgtgagttcccactgagtactgtgtctgaacgtgttgggcaccccgacaatgctaggactagaagctgccccgccttctcgacacagggagaattccatgaggagaccggcctgcaaaaaggaatccagtgtgccgcccagacgtatcccggtccatttcctgaagctatttcaagctcggccgatcctgggctggaagagagccccgccgctttggagcctccaagttag

SEQ ID NO: 59423 - DNA, 2382 bp, Artificial Sequence
  derived and/or modified sequence
atggatgagggcaccggcctgcagcctggagctggggagcagctggaggccccagccacagctgaggccgtgcaggagcgctgtgagcctgagaccctgcggagcaagagcctgcctgtgctgagcagcgccagctgccggcccagcctgagccccaccagcggagatgccaacccagccttcggctgtgtggacagcagcggccaccaggagctgaagcagggccccaaccccctggcccccagccccagcgcccccagcaccagcgctggcctgggggactgcaaccaccgggtggacctgagcaagaccttctctgtgtcctctgccctggccatgctgcaggagcggcgctgcctgtatgtggtgctgacagacagccgctgcttcctggtgtgcatgtgcttcctgaccttcatccaggccctgatggtgtctggctacctgagcagcgtcatcaccaccatcgagcggcgctacagcctgaagagcagcgagagcggcctgctggtgtcctgctttgacatcggcaacctggtggtggtggtgtttgtgtcctactttggaggccggggcagaagacccctgtggctggccgtgggcggcctgctgattgcctttggagctgccctgtttgccctgccccacttcatcagccccccctaccagatccaggagctgaatgccagcgccccaaatgatggcctgtgccagggcggcaacagcacagccaccctggagcccccagcctgccccaaggacagcggcggcaacaaccactgggtgtatgtggccctcttcatctgtgcccagatcctgattggcatgggcagcacccccatctacaccctgggccccacctacctggatgacaacgtgaagaaggagaacagcagcctgtacctggccatcatgtatgtgatgggcgccctgggccctgctgtgggctacctgctgggcggcctgctgattggcttctacgtggaccccagaaatcctgtgcacctggaccagaatgacccccgcttcatcggcaactggtggagcggcttcctgctgtgtgccatcgccatgttcctggtgatcttccccatgttcaccttccccaagaagctgcccccaagacacaagaagaagaagaagaagaagttctctgtggatgctgtgtctgatgatgatgtgctgaaggagaagagcaacaacagcgagcaggccgacaagaaggtgtcctccatgggctttgggaaggatgtgcggggcgtcatcatcgtgcccagcgctggggtgggcatcgtgctgggcggctacatcatcaagaagctgaagctgggcgcccgggagagcgccaagctggccatgatctgcagcggcgtgtccctgctgtgcttcagcaccctcttcatcgtgggctgtgagagcatcaacctgggcggcatcaacatcccctacaccaccggccccagcctgaccatgccccacaggaacctgaccggcagctgcaatgtgaactgtggctgcaagatccatgaatatgagcctgtgtgtggcagtgatggcatcacctacttcaacccctgcctggccggctgtgtgaacagcggcaacctgagcacaggcatccggaactacacagaatgtacctgtgtgcagagccggcaggtgatcaccccacccaccgtgggccagaggagccagctgcgggtggtgattgtgaagacctacctgaatgaaaatggctatgctgtgtctgggaagtgcaagaggacctgcaacaccctcatccccttcctggtgttcctgttcatcgtgaccttcatcacagcctgtgcccagcccagcgccatcatcgtgaccctgcggtctgtggaggatgaggagcggccctttgccctgggcatgcagtttgtgctgctgcggaccctggcctacatccccacccccatctactttggagctgtgattgacaccacctgcatgctgtggcagcaggagtgtggggtgcagggcagctgctgggagtacaacgtgaccagcttccgctttgtgtacttcggcctggccgccggcctgaagtttgtgggcttcatcttcatcttcctggcctggtacagcatcaagtacaaggaggatggcctgcagaggcggcggcagcgggagttccccctgagcacagtgtctgagcgggtgggccacccagacaatgcccggaccaggagctgcccagccttcagcacccagggcgagttccacgaggagaccggcctgcagaagggcatccagtgtgccgcccagacctacccaggccccttccctgaggccatcagcagcagcgctgaccccggcctggaggagagccctgctgccctggagccccccagctag

SEQ ID NO: 59424 - DNA, 2382 bp, Artificial Sequence
  derived and/or modified sequence
atggacgagggcaccggcctgcagcccggcgccggcgagcagctggaggccccggcaaccgccgaagctgtacaggagcgatgcgagcccgaaaccttgcggtctaagagtctgccagtgttgtcttcagcgtcatgccgtcctagcctatcgcctacgtctggcgacgccaatccagccttcgggtgcgtggatagcagtggccaccaggagctcaaacagggcccaaacccattagcacctagcccttccgcaccatctacgtcggcaggtctaggcgactgtaatcacagggtggatctgagcaaaacgttttctgttagctcagccctggccatgttgcaagagaggaggtgcctgtacgtcgtcctgaccgacagccgatgcttcttggtttgtatgtgttttctcaccttcatacaggccctaatggtgtctggttacctaagttcagtaattacaactatagaacgaagatactcacttaaatcgtctgaaagtggactcctcgttagttgcttcgacatcgggaatctcgtggtcgttgtgtttgtgtcttatttcggggggcgcggccggagaccgctgtggttagcagtgggaggcctgcttatcgcattcggcgcagcactcttcgccctgccccacttcatcagtccaccataccagattcaggagttaaatgcctcagctccgaacgacggtttatgtcaaggcggaaactctactgctacattggagcctcccgcctgccccaaggacagtggcggtaataaccattgggtctacgtagctctctttatctgcgcccagattctcattggcatgggctcaacccctatctacacactgggacctacatacctcgatgacaacgtgaagaaggagaacagctctctctacctggccataatgtacgtgatgggggctctcggtcccgccgtcgggtacctgctgggggggctgctgatcgggttctacgtggaccctcggaaccccgtgcacctggatcaaaacgatccgcgatttataggaaattggtggtcaggcttcctcttatgcgcaatcgcaatgtttctcgtgatcttccccatgtttacttttcccaagaaactccctccccggcataagaaaaagaaaaaaaaaaagttttctgtggatgccgtcagtgacgacgacgtgcttaaagaaaagtctaacaactctgaacaggccgacaagaaggtttccagcatgggattcggcaaagacgttcggggagtaatcattgtcccgagcgccggcgtggggatcgtgcttggtggatatatcattaagaaactgaaacttggtgcccgagagtccgcgaagctcgcaatgatctgtagcggggtgagtttgttgtgtttcagcaccctgtttattgtcggctgcgagtccatcaaccttgggggtatcaatatcccctataccacgggcccgtcgctgacgatgccacaccgcaatctgacagggtcctgtaatgtgaactgcggctgtaaaattcatgagtacgaaccggtatgcgggtccgatggaattacctactttaacccatgcctggcgggttgtgtgaacagtgggaacctgtcgaccggaattcggaattacaccgaatgcacgtgcgttcagtctagacaggttatcacgcctcccacagtaggacagagatcccagctccgggtggtgatcgtcaagacctacctgaatgagaacggctacgccgttagtggaaagtgcaaaagaacatgtaacacattaatccctttcttagtgttcctgtttatagtcacctttataaccgcttgcgcccaacctagcgctataatcgtgactctccgttctgtagaagatgaagagcggccgtttgccttaggcatgcagttcgtgctgcttcggacactcgcatatatccccacccccatttacttcggggcagtgatcgacacaacatgcatgctctggcaacaggagtgcggcgtgcagggaagttgctgggaatacaatgtgacttcatttcgctttgtatatttcgggctcgccgccggcctcaagtttgtgggcttcatcttcattttcttggcctggtattccatcaagtacaaggaggacggcctccagcggaggcggcagcgggagttcccactgtcgacagtctccgagcgggtgggccatccagacaatgctcggaccagatcgtgtccagccttttccacccagggtgaattccatgaggagactggcctacagaagggcatccagtgtgcagcacagacatatccaggcccatttcccgaagcaatttcatcaagcgccgatccagggctcgaagagagcccagcagctctagagcccccctcctag

SEQ ID NO: 59425 - DNA, 2382 bp, Artificial Sequence
  derived and/or modified sequence
atggatgagggcaccggcctgcagccaggggcaggggagcagctggaagctcccgctaccgctgaggcagtccaggagagatgtgagccggagaccctgagatccaagtccctgcccgtactatcctcagcctcatgtcggcctagtctctccccaacttcgggcgacgccaacccagcctttggatgtgtcgactcttcggggcatcaggaacttaagcagggacccaatcctctcgcaccttctccaagtgcaccgtctacatcagcgggtctcggtgactgcaatcatcgagtcgacctgagcaagacgttcagcgtcagttcggctctagccatgctgcaggaaagaaggtgtctatacgtagtcctaactgacagccggtgctttctggtgtgcatgtgtttcctcacctttatccaggctctcatggtttctggttacttatctagcgtgattacaaccattgagagaaggtattctcttaagtcaagtgagtcaggactgcttgtttcttgttttgacattggcaatctagtcgtcgtggtgttcgtgtcctatttcggaggaagaggcagaagaccactctggctcgctgtcggaggtctccttattgctttcggagctgctctgttcgctttgccacattttatctcccctccctaccaaattcaggagctaaacgcgagcgccccaaatgacggcctgtgtcagggtgggaattctactgcaaccctcgaaccgccagcttgccctaaagattcaggagggaacaaccactgggtttacgtggctctgttcatatgcgcccagattcttatcggcatgggcagtactcccatatatacgctgggtcccacttatttagacgataacgttaaaaaggagaattctagcctgtatctggcaataatgtatgtcatgggcgcactgggcccagcagtcggatatctgctgggcggacttctgatcggcttttatgttgacccaagaaaccctgtccatctggaccaaaatgaccctagatttatcggcaattggtggagtggcttcctcttatgcgcaattgccatgttcttggtcatttttccaatgttcacgttcccaaaaaagctcccaccacggcacaagaaaaaaaaaaagaaaaaatttagtgttgacgcagttagcgacgatgatgttcttaaggaaaaaagtaacaatagtgagcaggccgacaagaaagtgagtagcatgggattcggcaaagatgtgcgcggagtgataatcgtgccttctgcgggagtgggaatcgtgctgggcggatatattatcaagaagttgaagctcggagctagagaaagcgccaaactggccatgatctgttccggagtgagcctgctgtgtttttctacactattcatcgtgggctgtgagtccatcaacctcgggggtataaacattccttacactacggggccttccctgacaatgccccatcggaatctcactgggtcctgtaatgtcaattgtgggtgcaaaattcacgagtatgagccagtgtgtggatcggatggcattacctactttaacccttgccttgctgggtgtgtgaatagtggcaacctttctacggggatcaggaactataccgaatgcacatgtgtccagagtcggcaggtcattaccccgccaactgtcggccagcggtcccaattgcgtgtcgtgattgtgaagacctacctgaacgaaaatgggtacgcggtcagcggcaagtgcaaaaggacatgcaatacccttatcccattcctcgtcttcctgtttatcgttacttttataactgcctgtgcccaaccatctgccattattgtcaccctccggagcgtcgaggacgaagagcggccatttgcgttaggcatgcagtttgttctcctgagaaccctagcatatatcccaaccccaatttattttggggcagtaattgacaccacctgtatgctgtggcagcaggaatgcggcgtgcaggggtcgtgctgggagtataacgtaacatccttccgcttcgtttactttggcctggcggcaggactaaagtttgttggatttatttttatcttcctggcatggtactcaatcaagtacaaagaagacggcttgcagaggcgtcgacagcgcgaattcccactgtctacagtgagcgagcgggttggacaccctgataatgcaaggactcggagctgtcccgctttctctactcagggcgaattccacgaggagacaggactccagaaagggattcagtgcgccgctcagacatacccaggccctttcccggaggcaatctctagttcagccgaccctggactggaagaaagccccgctgccttggaacctcctagttag

SEQ ID NO: 59426 - DNA, 2630 bp, Artificial Sequence
  derived and/or modified sequence
tgcttgggtgccatcagctatcaaatctgaattctaagcgccatggacgaaggcactggactgcagcccggggcgggagagcagctggaggcgccggccactgcagaagctgtccaagagaggtgcgagccggagaccctcaggtctaagagtttaccggtcctcagcagcgcctcctgccggccaagcctcagtcccactagtggagacgccaacccggcctttggctgtgtggattcttcgggccaccaggagttgaagcaaggcccgaacccgttggcccccagtccctctgccccgtccacttcggcggggctcggggactgtaaccacagggtggacctcagcaaaaccttctcggtgtcctccgccttggccatgctccaggagagaaggtgcctctacgtggtcctcacggattcccgttgcttcctggtgtgcatgtgctttctgaccttcatccaggcgttaatggtctctgggtacctgagcagcgtaattaccaccattgaaaggcgctacagtctgaagagttccgagtcggggctgctggtcagctgctttgacatcgggaacctggtggtggtggtgttcgtcagctacttcggcggccggggtcggcggcccctgtggctggccgtgggtggactcctcatcgccttcggggcagccctcttcgccttacctcacttcatctcgcccccctaccagatccaagagttgaacgcctcggcccccaacgacggcctgtgtcagggtggcaactccaccgccactttggagcctccggcctgtccgaaggactcgggaggaaataatcactgggtctacgtggctttattcatttgcgcgcagattctcattggaatgggctccacacctatttataccctgggaccaacctacttagatgacaatgtcaagaaagaaaactcctccttgtacctagccatcatgtatgtcatgggagcacttggccctgcagtgggatatttattaggtggacttcttattggtttttatgttgatcccagaaatcctgttcaccttgaccagaatgaccctcgtttcattggaaactggtggagtggattcctcctttgtgccattgcaatgtttcttgtgatattcccaatgtttactttcccaaaaaagcttccacctcgacacaagaaaaagaaaaagaaaaaattttctgttgatgctgttagtgatgacgatgttctgaaggagaaatcaaacaacagtgaacaagcggacaaaaaagtttcttcgatgggatttggaaaggatgtcagaggggttattatcgtccccagtgctggtgttggtattgtcctcggaggctacattataaaaaaattgaaacttggtgccagagaatctgcaaaactagcaatgatctgcagtggtgtgtctttactatgtttttcaaccctatttattgttggatgtgaaagcattaatctagggggcataaacatcccttatacaacaggaccttctctcaccatgccccataggaatctgacaggaagctgcaacgttaattgtggttgtaaaatacacgagtatgagccagtctgtggatcagatggaattacatactttaacccttgtctggctggctgtgttaatagtggtaatcttagcactgggatacggaattatacagaatgcacctgtgtccaaagtcgccaagtgatcactccacccaccgtgggacagcgaagtcagctccgtgtggttattgtcaagacttatctcaatgagaacggctatgctgtgtctgggaaatgtaaacggacctgcaatactcttatcccattcttagtttttcttttcatagtcaccttcatcacagcatgtgcccaaccatcagctatcatagtaacactcaggtccgtagaagatgaggagagaccttttgcactgggaatgcagtttgttttgttgcgaacacttgcatacattcctactccaatctactttggagcagtcattgacaccacctgcatgctctggcaacaggaatgtggtgtgcagggttcttgctgggagtacaacgtgacgtcgtttcgttttgtgtattttggtttggctgccggcctcaaattcgttgggtttatttttatttttctggcctggtactccataaaatacaaggaggatggactgcagaggcggaggcagagagaatttcccctgagcaccgtgagtgagagagtgggacaccccgacaatgcccggactagatcttgcccagctttcagcacccagggagaattccacgaagagactggcctgcaaaaagggatccagtgcgcagcacagacctacccggggcccttcccagaagcaataagttcctctgcggacccggggctggaagagagccccgctgccttggagccgccctcctgaagcttgaaaatggaagaatttagttttgttggttgaattgaaaatggcgacttgagaaacaactgtgccttcttttctttctttcttttttttaacctctacagacacaatcctcaaaccaacaaaactcagtatacacagccgctattcattgagggctggatacctcaacaagactgagagcctttccccgcttctctccaaga

SEQ ID NO: 59427 - protein, 842 aa, Artificial Sequence
  derived and/or modified sequence
MSSSHFASRHRKDISTEMIRTKIAHRKSLSQKENRHKEYERNRHFGLKDVNIPTLEGRILVELDETSQGLVPEKTNVKPRAMKTILGDQRKQMLQKYKEEKQLQKLKEQREKAKRGIFKVGRYRPDMPCFLLSNQNAVKAEPKKAIPSSVRITRSKAKDQMEQTKIDNESDVRAIRPGPRQTSEKKVSDKEKKVVQPVMPTSLRMTRSATQAAKQVPRTVSSTTARKPVTRAANENEPEGKVPSKGRPAKNVETKPDKGISCKVDSEENTLNSQTNATSGMNPDGVLSKMENLPEINTAKIKGKNSFAPKDFMFQPLDGLKTYQVTPMTPRSANAFLTPSYTWTPLKTEVDESQATKEILAQKCKTYSTKTIQQDSNKLPCPLGPLTVWHEEHVLNKNEATTKNLNGLPIKEVPSLERNEGRIAQPHHGVPYFRNILQSETEKLTSHCFEWDRKLELDIPDDAKDLIRTAVGQTRLLMKERFKQFEGLVDDCEYKRGIKETTCTDLDGFWDMVSFQIEDVIHKFNNLIKLEESGWQVNNNMNHNMNKNVFRKKVVSGIASKPKQDDAGRIAARNRLAAIKNAMRERIRQEECAETAVSVIPKEVDKIVFDAGFFRVESPVKLFSGLSVSSEGPSQRLGTPKSVNKAVSQSRNEMGIPQQTTSPENAGPQNTKSEHVKKTLFLSIPESRSSIEDAQCPGLPDLIEENHVVNKTDLKVDCLSSERMSLPLLAGGVADDINTNKKEGISDVVEGMELNSSITSQDVLMSSPEKNTASQNSILEEGETKISQSELFDNKSLTTECHLLDSVGSCYVARAGLEVLGSSDPTTSASRVAGTTARSKLQ

SEQ ID NO: 59428 - DNA, 2529 bp, Artificial Sequence
  derived and/or modified sequence
atgagcagcagccacttcgccagcagacacagaaaggacatcagcaccgagatgatcagaaccaagatcgcccacagaaagagcctgagccagaaggagaacagacacaaggagtacgagagaaacagacacttcggcctgaaggacgtgaacatccccaccctggagggcagaatcctggtggagctggacgagaccagccagggcctggtgcccgagaagaccaacgtgaagcccagagccatgaagaccatcctgggcgaccagagaaagcagatgctgcagaagtacaaggaggagaagcagctgcagaagctgaaggagcagagagagaaggccaagagaggcatcttcaaggtgggcagatacagacccgacatgccctgcttcctgctgagcaaccagaacgccgtgaaggccgagcccaagaaggccatccccagcagcgtgagaatcaccagaagcaaggccaaggaccagatggagcagaccaagatcgacaacgagagcgacgtgagagccatcagacccggccccagacagaccagcgagaagaaggtgagcgacaaggagaagaaggtggtgcagcccgtgatgcccaccagcctgagaatgaccagaagcgccacccaggccgccaagcaggtgcccagaaccgtgagcagcaccaccgccagaaagcccgtgaccagagccgccaacgagaacgagcccgagggcaaggtgcccagcaagggcagacccgccaagaacgtggagaccaagcccgacaagggcatcagctgcaaggtggacagcgaggagaacaccctgaacagccagaccaacgccaccagcggcatgaaccccgacggcgtgctgagcaagatggagaacctgcccgagatcaacaccgccaagatcaagggcaagaacagcttcgcccccaaggacttcatgttccagcccctggacggcctgaagacctaccaggtgacccccatgacccccagaagcgccaacgccttcctgacccccagctacacctggacccccctgaagaccgaggtggacgagagccaggccaccaaggagatcctggcccagaagtgcaagacctacagcaccaagaccatccagcaggacagcaacaagctgccctgccccctgggccccctgaccgtgtggcacgaggagcacgtgctgaacaagaacgaggccaccaccaagaacctgaacggcctgcccatcaaggaggtgcccagcctggagagaaacgagggcagaatcgcccagccccaccacggcgtgccctacttcagaaacatcctgcagagcgagaccgagaagctgaccagccactgcttcgagtgggacagaaagctggagctggacatccccgacgacgccaaggacctgatcagaaccgccgtgggccagaccagactgctgatgaaggagagattcaagcagttcgagggcctggtggacgactgcgagtacaagagaggcatcaaggagaccacctgcaccgacctggacggcttctgggacatggtgagcttccagatcgaggacgtgatccacaagttcaacaacctgatcaagctggaggagagcggctggcaggtgaacaacaacatgaaccacaacatgaacaagaacgtgttcagaaagaaggtggtgagcggcatcgccagcaagcccaagcaggacgacgccggcagaatcgccgccagaaacagactggccgccatcaagaacgccatgagagagagaatcagacaggaggagtgcgccgagaccgccgtgagcgtgatccccaaggaggtggacaagatcgtgttcgacgccggcttcttcagagtggagagccccgtgaagctgttcagcggcctgagcgtgagcagcgagggccccagccagagactgggcacccccaagagcgtgaacaaggccgtgagccagagcagaaacgagatgggcatcccccagcagaccaccagccccgagaacgccggcccccagaacaccaagagcgagcacgtgaagaagaccctgttcctgagcatccccgagagcagaagcagcatcgaggacgcccagtgccccggcctgcccgacctgatcgaggagaaccacgtggtgaacaagaccgacctgaaggtggactgcctgagcagcgagagaatgagcctgcccctgctggccggcggcgtggccgacgacatcaacaccaacaagaaggagggcatcagcgacgtggtggagggcatggagctgaacagcagcatcaccagccaggacgtgctgatgagcagccccgagaagaacaccgccagccagaacagcatcctggaggagggcgagaccaagatcagccagagcgagctgttcgacaacaagagcctgaccaccgagtgccacctgctggacagcgtgggcagctgctacgtggccagagccggcctggaggtgctgggcagcagcgaccccaccaccagcgccagcagagtggccggcaccaccgccagaagcaagctgcagtag

SEQ ID NO: 59429 - DNA, 2529 bp, Artificial Sequence
  derived and/or modified sequence
atgtctagtagccattttgcgtctaggcaccgcaaagacattagcactgagatgattaggacaaagatagcacaccgcaagagcttgtcacaaaaagagaaccgccacaaagagtacgaacggaatcgccactttggcctgaaagatgttaacatcccaacacttgaaggaaggatcttggtggagctcgatgagacatctcagggactcgtgcctgagaaaacaaatgttaaacctcgagctatgaagactatcctgggtgaccaacgaaaacagatgctccagaagtacaaagaggaaaagcagctccagaaactgaaagaacagcgggagaaggccaagagaggcattttcaaagtcggacgctaccgccccgatatgccctgtttcctgctctcgaatcaaaacgcagtgaaggccgaacctaagaaagctataccatcatccgtgcgcatcacccgctcaaaggcgaaagaccagatggagcagactaaaattgataacgagagcgatgtgcgggctatccggcccggaccgcggcagacctccgagaaaaaggtctccgataaagaaaagaaggtggtgcagcccgtaatgcccacatcactgaggatgacacgaagtgccacccaggctgctaagcaggtcccccgcaccgtgtcctcaaccacggccaggaagccagtgacgcgcgccgcgaatgaaaacgaacctgaggggaaggtccccagcaagggtagaccagccaaaaatgtagaaacgaagccggataagggcatctcgtgcaaagtggatagcgaagaaaatacactcaatagccagactaacgcgacatcaggtatgaatccggacggtgtgttgtccaagatggagaacctgcccgaaatcaacactgcaaaaatcaaggggaagaacagtttcgcccccaaagactttatgttccagcccttggacggcttaaaaacgtaccaggtaacccctatgactccaaggtcagctaatgccttcctgacaccaagctatacatggacaccattaaagaccgaggtggacgagagccaggctacgaaggaaattttagctcagaagtgtaagacctactctactaagacaattcagcaagattcgaacaaactgccctgtccacttggacccctgaccgtttggcatgaggagcatgtcctcaataagaatgaggccactacaaaaaatctgaatggcctgcccattaaagaagtgccttcactggaacgcaatgaggggagaatcgcacagcctcatcatggcgttccatacttccgcaatatcctgcagtccgagacagagaagttgacaagccactgctttgagtgggatagaaaattagagctggatatccccgacgatgccaaggacttgatcagaaccgccgtagggcagaccaggctgctgatgaaagagcgcttcaagcagtttgagggtctggttgacgactgcgagtacaaacgggggatcaaggagaccacatgcacagatctcgatggcttctgggacatggtgagctttcagatcgaagatgtcatacataagttcaacaacttaatcaagcttgaagaaagtggatggcaggtgaacaacaacatgaatcacaacatgaacaagaacgtgttcaggaaaaaagtggtatctggtatcgcctcaaaacccaagcaggatgacgcagggaggattgccgcccgcaaccgcctggccgctatcaagaacgccatgcgggaacggatcaggcaggaggaatgcgcggaaaccgccgtctccgtgattccaaaggaggtcgacaagatcgtgtttgatgccgggttctttcgggtcgaatcaccagtgaaattgttttccggattgtccgtgagctccgagggcccatcgcagcgccttggaacccctaaatcagtaaacaaagctgtttcccagagccgcaacgaaatggggattcctcagcagaccacctcccctgaaaacgcaggaccgcagaacaccaagtctgaacacgtcaagaagactctattcttgagcatcccagaatcgcgctctagtatagaggacgctcagtgtcctggcttgccagacctaatcgaggagaaccacgttgttaacaaaactgatctgaaggtagattgcctgtcatccgagcgcatgtcactgcccctcttagcaggaggggtggcggatgacatcaatactaacaagaaggagggaatctcagatgtggtcgagggaatggaactgaacagttccattacgagccaagacgtgcttatgagttctcctgagaagaacactgccagccagaactccatccttgaggaaggagaaacaaagatcagccaatctgagctttttgataataagtctctcacaacagagtgtcacctccttgattctgtcgggagctgttacgttgccagagctggactggaagtactggggtcctcagatcccacgacgagtgccagtagagtcgctgggaccacggcccgttcaaaactacagtag

SEQ ID NO: 59430 - DNA, 2529 bp, Artificial Sequence
  derived and/or modified sequence
atgagcagcagccactttgccagccgccacaggaaggacatcagcacagagatgatccgcaccaagatcgcccacaggaagagcctgagccagaaggaaaatagacacaaggagtatgaaagaaacagacacttcggcctgaaggatgtgaacatccccaccctggagggccgcatcctggtggagctggatgagaccagccagggcctggtgcctgagaagaccaacgtgaagccccgggccatgaagaccatcctgggggaccagaggaagcagatgctgcagaagtacaaggaggagaagcagctgcagaagctgaaggagcagcgggagaaggccaagaggggcatcttcaaggtgggccgctacagaccagacatgccctgcttcctgctgagcaaccagaatgctgtgaaggccgagcccaagaaggccatccccagctctgtgcgcatcaccaggagcaaggccaaggaccagatggagcagaccaagattgacaatgaaagtgatgtgcgggccatccggcccggcccccggcagaccagcgagaagaaggtgtctgacaaggagaagaaggtggtgcagcctgtgatgcccaccagcctgaggatgaccaggtctgccacccaggccgccaagcaggtgcccaggacagtgagcagcaccacagccaggaagcctgtgacccgggccgccaatgaaaatgaacctgagggcaaggtgcccagcaagggccggcctgccaagaatgtggagaccaagccagacaagggcatcagctgcaaggtggacagcgaggagaacaccctgaacagccagaccaatgccaccagcggcatgaacccagatggagtgctgagcaagatggagaacctgcctgagatcaacacagccaagatcaagggcaagaacagctttgcccccaaggacttcatgttccagcccctggatggcctgaagacctaccaggtgacccccatgacccccaggtctgccaatgccttcctgacccccagctacacctggacccccctgaagacagaggtggatgagagccaggccaccaaggagatcctggcccagaagtgcaagacctacagcaccaagaccatccagcaggacagcaacaagctgccctgccccctgggccccctgactgtgtggcatgaggagcacgtgctgaacaagaatgaggccaccaccaagaacctgaatggcctgcccatcaaggaggtgcccagcctggagagaaatgaaggaagaattgcccagccccaccacggcgtgccctacttcaggaacatcctgcagagcgagacagagaagctgaccagccactgctttgagtgggacaggaagctggagctggacatcccagatgatgccaaggacctgatcagaacagctgtgggccagacccggctgctgatgaaggagcgcttcaagcagtttgagggcctggtggatgactgtgagtacaagaggggcatcaaggagaccacctgcacagacctggatggcttctgggacatggtgtccttccagattgaagatgtgatccacaagttcaacaacctgatcaagctggaggagagcggctggcaggtgaacaacaacatgaaccacaacatgaacaagaatgtgttcaggaagaaggtggtgtctggcatcgccagcaagcccaagcaggatgatgctggaagaattgctgccaggaaccggctggccgccatcaagaatgccatgagggagcgcatccggcaggaggagtgtgccgagacagctgtgtctgtcatccccaaggaggtggacaagatcgtgtttgatgctggcttcttccgggtggagagccctgtgaagctgttcagcggcctgtctgtgagcagcgagggccccagccagaggctgggcacccccaagtctgtgaacaaggctgtgtcccagagcagaaatgagatgggcatcccccagcagaccaccagcccagaaaatgccggcccccagaacaccaagtcagaacatgtgaagaagaccctcttcctgagcatccctgagagccgcagcagcattgaagatgcccagtgccccggcctgcctgacctgattgaagaaaatcatgtggtgaacaagacagacctgaaggtggactgcctgagcagcgagaggatgagcctgcccctgctggccggcggcgtggctgatgacatcaacaccaacaagaaggagggcatcagtgatgtggtggagggcatggagctgaacagcagcatcaccagccaggatgtgctgatgagcagccctgagaagaacacagccagccagaacagcatcctggaggagggggagaccaagatcagccagagcgagctgtttgacaacaagagcctgaccacagagtgccacctgctggacagcgtgggcagctgctacgtggcccgggccggcctggaggtgctgggcagcagtgaccccaccaccagcgccagccgggtggccggcaccacagcccggagcaagctgcagtag

SEQ ID NO: 59431 - DNA, 2954 bp, Artificial Sequence
  derived and/or modified sequence
cttcggagtcggcggtggtcgtccagaccgagtgttctttactttttgtttggttgaggtttcacgctagaaggtggctcaggatgtcttcatcacattttgccagtcgacacaggaaggatataagtactgaaatgattagaactaaaattgctcataggaaatcactgtctcagaaagaaaatagacataaggaatacgaacgaaatagacactttggtttgaaagatgtaaacattccaaccttggaaggtagaattcttgttgaattagatgagacatctcaagggcttgttccagaaaagaccaatgttaagccaagggcaatgaaaactattctaggtgatcaacgaaaacagatgctccaaaaatacaaagaagaaaagcaacttcaaaaattgaaagagcagagagagaaagctaaacgaggaatatttaaagtgggtcgttatagacctgatatgccttgttttcttttatcaaaccagaatgctgtgaaagctgagccaaaaaaggctattccatcttctgtacggattacaaggtcaaaggccaaagaccaaatggagcagactaagattgataacgagagtgatgttcgagcaatccgacctggtccaagacaaacttctgaaaagaaagtgtcagacaaagagaaaaaagttgtgcagcctgtaatgcccacgtcgttgagaatgactcgatcagctactcaagcagcaaagcaggttcccagaacagtctcatctaccacagcaagaaagccagtcacaagagctgctaatgaaaacgaaccagaaggaaaggtgccaagtaaaggaagacctgccaaaaatgtagaaacaaaacccgacaagggtatttcttgtaaagtcgatagtgaagaaaatactttgaattcacaaactaatgcaacaagtggaatgaatccagatggagtcttatcaaaaatggaaaacttacctgagataaatactgcaaaaataaaagggaagaattcctttgcacctaaggattttatgtttcagccactggatggtctgaagacctatcaagtaacacctatgactcccagaagtgccaatgcttttttgacacccagttacacctggactcctttaaaaacagaagttgatgagtctcaagcaacaaaagaaattttggcacaaaaatgtaaaacttactctaccaagacaatacagcaagattcaaataaattgccatgtcctttgggtcctctaactgtttggcatgaagaacatgttttaaataaaaatgaagctactactaaaaatttaaatggccttccaataaaagaagtcccatcacttgaaagaaatgaaggtcgaattgctcagccccaccatggtgtgccatatttcagaaatatcctccagtcagaaactgagaaattaacttcacattgcttcgagtgggacaggaaacttgaattggacattccagatgatgctaaagatcttattcgcacagcagttggtcaaacaagactccttatgaaggaaaggtttaaacagtttgaaggactggttgatgattgtgaatataaacgaggtataaaggagactacctgtacagatctggatggattttgggatatggttagttttcagatagaagatgtaatccacaaattcaacaatctgatcaaacttgaggaatctgggtggcaagtcaataataatatgaatcataatatgaacaaaaatgtctttaggaaaaaagttgtctcaggtatagcaagtaaaccaaaacaggatgatgctggaagaattgcagcgagaaatcgcctagctgccataaaaaatgcaatgagagagagaattaggcaggaagaatgtgctgaaacagcagtttctgtgataccaaaggaagttgataaaatagtgttcgatgctggatttttcagagttgaaagtcctgttaaattattctcaggactttctgtctcttctgaaggcccttctcaaagacttggaacacctaagtctgtcaacaaagctgtatctcagagtagaaatgagatgggcattccacaacaaactacatcaccagaaaatgccggtcctcagaatacgaaaagtgaacatgtgaagaagactttgtttttgagtattcctgaaagcaggagcagcatagaagatgctcagtgtcctggattaccagatttaattgaagaaaatcatgttgtaaataagacagacttgaaggtggattgtttatccagtgagagaatgagtttgcctcttcttgctggtggagtagcagatgatattaatactaacaaaaaagaaggaatttcagatgttgtggaaggaatggaactgaattcttcaattacatcacaggatgttttgatgagtagccctgaaaaaaatacagcttcacaaaatagcatcttagaagaaggggaaactaaaatttctcagtcagaactatttgataataaaagtctcactactgaatgccaccttcttgattcagtgggatcttgctatgttgctcgggctggtcttgaagtcctgggttcaagtgatcctaccacctcagcctcccgagtagctgggactacagccaggtctaaactgcagtaatccatttactcagctggagaggagacatcaagaacatgccagacacatttcttttggtggtaacctgattactttttcacctctacaaccaggagaattttgaatttaaaaataaatccaaacattttccttcatattatcaatgcttatatattccttagactattgaaattttggagaaaatgtatttgtgttcacttctatagcatataatgttttaatattctgtgttcatcaaagtgtattttagatatactctttctcaagggaagtggggatattttgtacattttcaacacagaataaaaaatgtactgtgccttgcctctcttgtttaaaagg

SEQ ID NO: 59432 - DNA, 2529 bp, Artificial Sequence
  derived and/or modified sequence
atgagcagcagccacttcgccagccggcaccggaaggacatcagcacggagatgattcggaccaaaatcgcccaccggaagagcttaagtcagaaagaaaatagacataaggaatatgagagaaatagacacttcgggcttaaagatgtgaatattccaacactggaaggccggattttagtggaactagacgagacgtcgcagggactggtccccgaaaagacaaatgtcaagcctagagctatgaagacaatcctaggggaccaaaggaaacagatgctgcagaagtataaggaggagaaacagcttcagaaattgaaagaacagcgggagaaagcaaagcgggggattttcaaggtaggtcggtatcgacctgatatgccatgttttctcctgagtaaccagaatgccgtgaaagcagaaccaaagaaggctatcccttccagtgtgcgaatcactcgttcaaaggctaaggaccagatggagcaaactaagatcgacaatgaatccgatgtgagggccattaggcctgggccacggcagactagcgagaagaaagtgtcggacaaggagaagaaggtggttcagcccgtcatgcctacctcgctcagaatgacacgctctgctactcaggccgcgaagcaggtgccgagaaccgtatctagtacaaccgcccgcaagcctgtgaccagagccgccaacgaaaacgaaccagaggggaaggtccctagtaagggaaggcctgccaaaaatgtagagacaaagcccgacaaagggatctcttgcaaggtagattcggaagagaacacgctgaacagccaaacaaatgcaacatccgggatgaaccccgatggtgtgctgtctaaaatggaaaatctccccgagattaacacagcaaagataaaaggaaagaatagttttgcccccaaggactttatgttccaacccctagacggcctgaagacatatcaagtgacacctatgactccccgttccgccaacgctttcctgactcctagttacacctggacaccgttaaagacggaggtggacgagtctcaagcaacgaaagaaatcttggctcagaaatgcaagacctattcaaccaagactatccagcaagactccaataaattaccatgtcccctcggccctctgaccgtgtggcacgaagagcatgtgttgaacaagaatgaagccaccaccaagaacctgaacgggctgcccatcaaggaggtaccaagccttgaacggaatgaggggaggattgcacaaccacaccacggggtgccatacttcaggaatattctgcagtctgaaacagagaaactcacatcacattgcttcgagtgggaccggaagttagaacttgacattcctgacgacgctaaagacctgatccggacagccgtgggccagactcgattgctcatgaaggagcgcttcaagcagtttgagggcctggtggatgactgtgaatacaagcgagggatcaaagagacaacctgcactgacctagacggtttttgggatatggtgtccttccaaatcgaggacgttattcacaaattcaacaacctaatcaaactcgaagaatccggctggcaggtgaacaacaacatgaatcacaatatgaataaaaacgtctttcggaaaaaagtggtaagcgggattgccagtaaacccaagcaagatgatgcagggcggatagccgcgagaaatcgtctggcagcgatcaaaaacgctatgcgggagcgtattcggcaggaggagtgcgcagaaacagccgtctccgtgataccaaaggaagtagataagattgtgttcgacgcagggttcttccgcgtggagtcacccgtcaagctttttagcgggctatcagtctcgtctgaagggcccagtcaaagactggggacgccaaaaagcgtcaacaaagccgtttcccagtctcgtaacgagatgggcattccgcagcagacgacaagtcctgagaacgctggacctcagaatactaaatccgagcatgtgaaaaaaaccttgttcttatcaattcccgagtcgcggagcagcattgaagacgcgcagtgccccggtctgccagacttaattgaagaaaatcatgttgttaataagaccgacctgaaagttgattgcctcagttccgagcgcatgagcttgcctcttctggccggtggtgtcgccgatgacatcaacaccaataaaaaagagggaataagcgatgtagtggagggaatggagctgaactcctccatcacttcacaggacgtgctgatgagctcccctgaaaaaaataccgcaagccagaactccatcttggaggagggcgaaactaagatctcccaaagcgaactgttcgacaataagagtctaactaccgagtgccacctgctggactcagtcggttcttgctacgttgcccgggccgggttggaggttctgggctcatctgatcccaccacaagcgccagcagagttgctggaacgacagcacgttctaagctgcagtag

SEQ ID NO: 59433 - DNA, 2529 bp, Artificial Sequence
  derived and/or modified sequence
atgtcttcatcccactttgcaagcaggcaccgtaaagatatcagcactgaaatgatccggactaagatcgcccacaggaagtcattgtcccaaaaagagaataggcataaggaatacgagaggaatcgccactttggcttaaaggacgtgaatatacctacactggagggcaggattctcgtggagttagatgagaccagccagggcctggtgcctgagaagactaatgtcaagcctagagcgatgaaaacaattctgggagatcagcgcaagcagatgcttcagaagtataaagaggaaaagcagttgcagaagctcaaagagcaaagggagaaggctaaacgcggtatatttaaagtcggcagatacaggcctgacatgccgtgcttcttgctctctaaccagaacgcagtgaaggcggaacctaaaaaagcaattccctccagcgtgcggattacgaggtccaaagccaaggatcagatggagcagacgaagatcgataacgaatcagacgtccgtgcaatcaggcctggcccaagacaaacaagcgagaaaaaagtcagcgataaggagaagaaggtcgtccagccagtgatgcccacttcccttcgaatgaccagatcggccacacaagccgcaaagcaagtaccgaggactgtttcttcaaccacagctcgaaagccggttactagagccgctaacgaaaatgaaccagaagggaaagtgccctccaaaggtcggcctgctaagaatgtagaaacaaagccagataaagggatctcatgcaaagtcgattccgaggagaataccctgaactcccaaaccaacgctacctcaggcatgaatcccgacggggtcctgtcaaaaatggaaaacctccccgaaatcaacaccgctaagatcaaaggcaagaattcatttgcgcctaaggacttcatgttccagcccctggacggtttgaagacctaccaggtgacacctatgaccccaagatctgccaatgctttcttgactcccagctatacatggacgcccctgaagacggaagtcgacgagagccaggctacaaaagagattcttgcccaaaaatgtaagacgtactctactaagaccattcagcaggacagtaacaagctcccttgtcctctgggcccactgactgtgtggcacgaagaacacgtgctcaacaagaacgaggccactacaaagaacctaaatggcctacccatcaaagaggtaccaagtttggagaggaacgaagggcgtatcgcccagcctcaccacggcgtgccgtatttcaggaacatactacagtctgaaacagagaaattaaccagtcactgcttcgaatgggaccggaaattggaattggacatcccggacgacgccaaagacctcattaggacagctgtgggtcagacccggcttctcatgaaagaacgctttaagcagttcgaggggttggtggatgactgcgagtacaaacgtggaattaaggaaacaacatgtaccgacctggatggcttctgggacatggtctccttccagatcgaggatgttatccacaagttcaataatctgatcaaactggaagagtccggatggcaagtgaataataacatgaaccataatatgaataaaaacgtctttagaaagaaagtcgtctccggaatagcttccaaaccaaaacaggacgacgccggacggatcgctgccaggaaccgactggccgcaattaaaaatgcaatgagagagcggattcggcaggaagaatgtgctgaaactgccgtgagtgtaatccctaaagaggtcgacaagatagtgtttgacgctggattttttagagtggaaagcccagtgaaactgttctcaggtctgtctgtgagcagcgaaggcccttctcagaggctgggaaccccaaaatctgtcaacaaagccgtaagtcaatcaaggaacgagatgggaattccgcagcagaccactagtcccgagaacgccggaccacagaacactaagtctgaacacgtgaaaaaaaccctcttcctctccattccggagagtcggagttccattgaggacgcacagtgccccggacttcccgacctgattgaagagaaccacgtggtcaataagacagacctgaaggttgattgtctcagcagcgaaaggatgtctcttccgttgctggcaggtggtgtggcggacgacattaacactaacaaaaaggagggcatcagtgacgtcgtagaaggcatggagcttaactcctctatcacctcccaagatgttcttatgtcctcgcccgagaaaaataccgcgagccagaatagcatcttggaagaaggggagactaagatttcccagagcgaattgttcgacaataaaagtttaacgactgagtgccatctgttggattcggttgggagctgctatgttgcacgggcaggcttggaagtcctgggctcgagtgacccaaccacgagcgcctccagagtggccggaacaacagccagaagtaagctgcagtag

SEQ ID NO: 59434 - protein, 652 aa, Artificial Sequence
  derived and/or modified sequence
MTPPPPGRAAPSAPRARVPGPPARLGLPLRLRLLLLLWAAAASAQGHLRSGPRIFAVWKGHVGQDRVDFGQTEPHTVLFHEPGSSSVWVGGRGKVYLFDFPEGKNASVRTDCENYITLLERRSEGLLACGTNARHPSCWNLVNGTVVPLGEMRGYAPFSPDENSLVLFEGDEVYSTIRKQEYNGKIPRFRRIRGESELYTSDTVMQNPQFIKATIVHQDQAYDDKIYYFFREDNPDKNPEAPLNVSRVAQLCRGDQGGESSLSVSKWNTFLKAMLVCSDAATNKNFNRLQDVFLLPDPSGQWRDTRVYGVFSNPWNYSAVCVYSLGDIDKVFRTSSLKGYHSSLPNPRPGKCLPDQQPIPTETFQVADRHPEVAQRVEPMGPLKTPLFHSKYHYQKVAVHRMQASHGETFHVLYLTTDRGTIHKVVEPGEQEHSFAFNIMEIQPFRRAAAIQTMSLDAERRKLYVSSQWEVSQVPLDLCEVYGGGCHGCLMSRDPYCGWDQGRCISIYSSERSVLQSINPAEPHKECPNPKPDKAPLQKVSLAPNSRYYLSCPMESRHATYSWRHKENVEQSCEPGHQSPNCILFIENLTAQQYGHYFCEAQEGSYFREAQHWQLLPEDGIMAEHLLGHACALAASLWLGVLPTLTLGLLVH

SEQ ID NO: 59435 - DNA, 1959 bp, Artificial Sequence
  derived and/or modified sequence
atgactccaccccctccagggagagccgcgcccagcgccccaagagccagggttccgggacctccagctcgtctgggcctcccacttagactgcggctactcctcctgctgtgggctgccgccgcatcggcccaggggcatcttcggtctgggcctcggattttcgcagtctggaagggacacgtgggccaggaccgagttgattttgggcagactgaacctcacaccgtgttattccacgagcctggttcctcctccgtctgggtggggggacgcggcaaggtgtacctattcgatttcccagaagggaaaaacgccagcgtccgcacggactgcgagaattatattactctcctggaaaggagatcggaaggattactggcttgcggtaccaacgctcgccacccctcctgctggaacttggtcaatggtactgtggtgcctctgggcgaaatgcgggggtacgctccattttcccctgatgaaaatagcctggtgctcttcgaaggagacgaggtgtattccacaattcgcaagcaggagtacaatggtaagattcccagattccggcggatacgcggggagagtgagctttacactagtgataccgtgatgcagaacccgcagttcatcaaggccacaatagtccaccaagatcaggcatatgacgacaagatatactatttctttagagaagacaaccctgataaaaatccagaggcccctctgaatgtgtctcgtgttgcccagctttgcaggggtgaccagggaggtgagtcctccctgtccgttagcaagtggaacacatttctgaaggcgatgcttgtgtgcagtgatgcagctactaataaaaactttaacagactccaagacgtatttcttctaccagatccttctggacaatggagagacactcgggtgtacggggtcttttccaatccatggaattacagcgctgtgtgcgtctattccctcggggatattgataaagtgttcagaacctcttccctaaaggggtaccacagctctctaccgaatccgagacctggcaagtgcttacccgatcagcagcccatcccaaccgagacctttcaggttgcagacaggcacccggaggtggcgcagagagtcgagcccatgggccctttgaagacacctctgtttcacagcaaataccattaccagaaggtagcagtgcatcggatgcaggcctcacatggcgagacgtttcacgttctgtaccttaccaccgaccggggcacaattcacaaagtagtcgaacccggagagcaggaacatagctttgcattcaatatcatggaaatccagcctttcaggcgagctgccgctatacagacgatgtccctggacgctgaacgcagaaagctgtatgtgtcaagccaatgggaggtgagccaggtgccgctcgatctatgcgaagtatatggtggagggtgccacggatgccttatgtcgcgtgacccgtattgcggatgggatcagggaagatgtatatctatttattcttcagagcggtctgtgcttcagtcaatcaaccctgccgagccacacaaagaatgccccaatccaaagcctgataaagctcccttgcagaaggtttctttggcccccaactctcgctactacctcagttgccccatggagtctcgccacgcgacctacagctggcgccacaaagaaaatgtggaacagagttgcgagcccggccaccagtccccaaactgcatcctgtttatcgaaaacctgacagcacagcagtacggccactacttctgtgaggcgcaggaagggtcctattttcgagaagctcagcattggcagttactcccagaggatggcatcatggcagagcatctgctgggtcatgcgtgcgccctggctgcatctctgtggctgggggtcctaccaacactgactttgggcctgttagtgcattag

SEQ ID NO: 59436 - DNA, 1959 bp, Artificial Sequence
  derived and/or modified sequence
atgaccccacctcctcctggccgggccgcccccagcgccccccgggcccgggtgcccggccccccagcccggctgggcctgcccctgcggctgcggctgctgctgctgctgtgggccgctgctgccagcgcccagggccacctgcggagcggcccccgcatctttgctgtgtggaagggccacgtgggccaggacagagtggactttggccagacagagccccacacagtgctcttccacgagcccggcagcagctctgtgtgggtgggcggccggggcaaggtgtacctgtttgacttccctgagggcaagaatgcctctgtgaggacagactgtgagaactacatcaccctgctggagaggagaagtgagggcctgctggcctgtggcaccaatgcccggcaccccagctgctggaacctggtgaatggaacagtggtgcccctgggggagatgaggggctacgcccccttctccccagatgagaacagcctggtgctgtttgaaggagatgaggtgtacagcaccatcaggaagcaggagtacaacgggaagatcccccgcttccgccgcatccggggggagagcgagctgtacaccagtgacacagtgatgcagaacccccagttcatcaaggccaccatcgtgcaccaggaccaggcctatgatgacaagatctactacttcttccgggaggacaacccagacaagaaccctgaggcccccctgaatgtgtcccgggtggcccagctgtgccgcggggaccagggcggggagagcagcctgtctgtgtccaagtggaacaccttcctgaaggccatgctggtgtgcagtgatgctgccaccaacaagaacttcaaccggctgcaggatgtgttcctgctgcctgaccccagcggccagtggagggacaccagggtgtatggagtcttcagcaacccctggaactacagcgctgtgtgtgtgtacagcctgggggacatcgacaaggtgttccgcaccagcagcctgaagggctaccacagcagcctgcccaaccccaggcctgggaagtgcctgcctgaccagcagcccatccccacagagaccttccaggtggccgacagacaccctgaggtggcccagagggtggagcccatgggccccctgaagacccccctcttccacagcaagtaccactaccagaaggtggccgtgcacaggatgcaggccagccacggggagaccttccacgtgctgtacctgaccacagaccggggcaccatccacaaggtggtggagcccggggagcaggagcacagctttgccttcaacatcatggagatccagcccttccggcgggctgctgccatccagaccatgagcctggatgctgagaggaggaagctgtatgtgagcagccagtgggaggtgtcccaggtgcccctggacctgtgtgaggtgtatggaggcggctgccacggctgcctgatgagccgggacccctactgcggctgggaccagggccgctgcatcagcatctacagcagcgagaggtctgtgctgcagagcatcaacccagctgagccccacaaggagtgccccaaccccaagccagacaaggcccccctgcagaaggtgtccctggcccccaacagccgctactacctgagctgccccatggagagcagacatgccacctacagctggaggcacaaggaaaatgtggagcagagctgtgagcccggccaccagagccccaactgcatcctcttcatcgagaacctgacagcccagcagtatggccactacttctgtgaggcccaggagggcagctacttccgggaggcccagcactggcagctgctgcctgaagatggcatcatggccgagcacctgctgggccacgcctgtgccctggccgccagcctgtggctgggcgtgctgcccaccctgaccctgggcctgctggtgcactag

SEQ ID NO: 59437 - DNA, 1959 bp, Artificial Sequence
  derived and/or modified sequence
atgaccccccccccccccggccgggccgcccccagcgccccccgggctcgcgtacccggaccacccgcccggctgggtttgccactccgcctgcgcctattgctcctgctgtgggcagctgccgcctcagctcagggccacttgcggtccggccctcgcatctttgccgtgtggaagggacacgtggggcaggatagagtcgacttcggccagaccgagccccacacagtcttgtttcatgaacctggttcatccagtgtatgggtaggaggccggggcaaagtttatctctttgatttcccagaaggcaaaaacgcctcagtcaggacggactgcgagaattacataacacttcttgaaaggcgctcagagggactcttagcttgcgggaccaacgcccgccatccctcctgttggaatctggtcaacggtaccgtcgtgcccctaggtgagatgcgaggctatgctcccttcagtcctgacgagaattctctagttctgttcgaaggcgacgaagtctattctacaatacggaagcaggaatataacggaaaaatccccaggttccgccgcattcgcggtgaaagcgaactgtacacaagcgacaccgtaatgcagaatccacagtttataaaggccaccatcgtccatcaggaccaagcatatgatgataagatctactacttttttagggaagacaacccagataaaaacccagaagccccactgaacgtgtcgcgtgtggctcagctttgcaggggtgaccagggaggcgaatccagcctctctgtgtctaaatggaatacattcctaaaggcaatgttggtctgttccgacgcagccacgaacaaaaactttaatcgacttcaggatgtgtttctcctgcctgatccttctgggcagtggagggatactagggtctacggagtgttcagcaacccttggaattattccgccgtgtgcgtttacagtttaggagatattgacaaagtgtttcgcactagcagtctcaaggggtatcactcgtccttaccaaacccacgacctggcaaatgtctgcccgatcaacagccgatccctaccgaaacttttcaagtggccgataggcaccccgaggtcgctcaacgagtagaaccaatgggaccactaaaaactcccctttttcactcaaagtatcactatcagaaggtggcagttcatagaatgcaggcatcccacggcgagacatttcacgtgctgtacctgactacagatagagggaccattcacaaagtggtcgagccgggcgaacaggagcattctttcgcgttcaatattatggaaattcaaccattcaggcgtgccgccgccatccagacgatgtccttagacgccgagagacggaagctctacgtaagtagccagtgggaagtgtctcaggtacccttagacttgtgtgaagtgtacggtggagggtgccacggctgtctaatgagccgagacccctactgcggctgggaccaggggagatgtatctccatatattccagtgagaggtctgttctgcaatcgataaaccccgcagagccacacaaggaatgccccaaccctaagcctgacaaggccccactgcagaaagtgtcattggcacccaattcccggtactacttaagctgcccgatggagtctaggcacgccacatatagttggcgccataaagaaaacgtcgagcagagctgcgaaccgggacaccagagccccaattgtatcttgttcattgaaaacctcacggcccaacagtatggacattacttctgtgaagcgcaggagggatcatacttccgggaggcccaacactggcagttactgcccgaagatggcatcatggcggagcatttgctaggtcatgcgtgtgccctggccgcctccctctggctgggagtcctgccaacactgaccctcggcttactggtgcattag

SEQ ID NO: 59438 - DNA, 1959 bp, Artificial Sequence
  derived and/or modified sequence
atgaccccccctccacccggtagagccgcaccaagcgcacctcgtgcaagggtccccggaccacctgcgagattaggcctgcctttacgcctccggctgctgctgctgctgtgggctgccgctgcaagtgctcaggggcatctcagatcagggcctcggatattcgccgtatggaaaggacacgtgggacaggacagagtcgactttggtcagaccgagcctcataccgtgctgttccacgaaccgggatcgagctctgtctgggttgggggacggggaaaggtatacctcttcgacttccctgaggggaagaacgcctccgtgcgcacggattgcgaaaactacataacattgctcgagaggcggagcgagggcctgctagcttgtggaactaatgccaggcatcctagctgttggaatctggtcaatggaactgtggtccctctgggtgagatgcggggttatgctcctttttcacccgacgagaacagtctggtcctgtttgagggggatgaagtctatagcaccatccggaagcaagagtataacggcaagatacccaggttccggcgtatccggggagaaagcgagctgtataccagtgatacagttatgcaaaacccacaattcatcaaggctactatcgtgcaccaagaccaagcttatgatgacaagatctactatttctttagagaggataatcccgacaagaatccggaggcacctctgaatgtgtcgcgcgtggcacagctctgtcgcggagatcaggggggagagagctctttgagtgtttctaaatggaatacttttctgaaagctatgttggtgtgcagtgatgccgctacgaacaaaaacttcaataggctccaggacgtgttcttattgcccgatcccagtgggcaatggagagacaccagggtgtatggtgtgttctctaacccttggaactacagcgctgtctgtgtctattctttgggtgacattgacaaggtattccgaaccagttcccttaagggttaccattccagcctgcccaacccacggccaggtaagtgcttgcctgaccagcaacctatccccacggaaacattccaggttgccgatcgtcacccagaagtcgctcaacgagtcgaacctatgggtcccctgaaaaccccattgtttcacagcaagtatcactatcagaaagtggctgttcacagaatgcaagccagccacggggaaaccttccacgtcctctatctgacgaccgaccggggaacaatccataaagttgtggaacccggtgagcaggagcacagcttcgcatttaacattatggagatccaaccctttcgaagggcggcagccatccaaacaatgtccctcgacgcggaaagaagaaaactatacgtgtctagccagtgggaggtgtctcaagtgcccctggatctatgtgaggtatatggaggaggatgccatggctgtttaatgagcagggacccctactgtggatgggatcagggacgctgcatttccatttatagctccgagaggtcagtgctccagtcaattaatcctgcagagcctcacaaggagtgtccaaaccccaagccagataaagcaccgctccagaaagtctctttggcccctaactctcgctactatcttagttgcccgatggagtcgcggcatgccacttacagctggcggcataaagaaaatgttgagcagtcctgtgaaccgggtcaccagagtcctaactgtatcctcttcattgaaaacctcactgctcagcaatacggccattatttctgtgaggcccaggagggctcctacttcagggaggcacaacattggcagctgctgcctgaggatggtataatggctgagcacctcctggggcatgcctgtgctttagccgcatcgttgtggcttggcgttctcccaaccttgacactgggcctcctggtgcattag

SEQ ID NO: 59439 - DNA, 3333 bp, Artificial Sequence
  derived and/or modified sequence
agtctcggctgattgccgctgtcgctcccggggccacgggatgacgcctcctccgcccggacgtgccgcccccagcgcaccgcgcgcccgcgtccctggcccgccggctcggttggggcttccgctgcggctgcggctgctgctgctgctctgggcggccgccgcctccgcccagggccacctaaggagcggaccccgcatcttcgccgtctggaaaggccatgtagggcaggaccgggtggactttggccagactgagccgcacacggtgcttttccacgagccaggcagctcctctgtgtgggtgggaggacgtggcaaggtctacctctttgacttccccgagggcaagaacgcatctgtgcgcacggactgcgagaactacatcactctcctggagaggcggagtgaggggctgctggcctgtggcaccaacgcccggcaccccagctgctggaacctggtgaatggcactgtggtgccacttggcgagatgagaggctacgcccccttcagcccggacgagaactccctggttctgtttgaaggggacgaggtgtattccaccatccggaagcaggaatacaatgggaagatccctcggttccgccgcatccggggcgagagtgagctgtacaccagtgatactgtcatgcagaacccacagttcatcaaagccaccatcgtgcaccaagaccaggcttacgatgacaagatctactacttcttccgagaggacaatcctgacaagaatcctgaggctcctctcaatgtgtcccgtgtggcccagttgtgcaggggggaccagggtggggaaagttcactgtcagtctccaagtggaacacttttctgaaagccatgctggtatgcagtgatgctgccaccaacaagaacttcaacaggctgcaagacgtcttcctgctccctgaccccagcggccagtggagggacaccagggtctatggtgttttctccaacccctggaactactcagccgtctgtgtgtattccctcggtgacattgacaaggtcttccgtacctcctcactcaagggctaccactcaagccttcccaacccgcggcctggcaagtgcctcccagaccagcagccgatacccacagagaccttccaggtggctgaccgtcacccagaggtggcgcagagggtggagcccatggggcctctgaagacgccattgttccactctaaataccactaccagaaagtggccgtccaccgcatgcaagccagccacggggagacctttcatgtgctttacctaactacagacaggggcactatccacaaggtggtggaaccgggggagcaggagcacagcttcgccttcaacatcatggagatccagcccttccgccgcgcggctgccatccagaccatgtcgctggatgctgagcggaggaagctgtatgtgagctcccagtgggaggtgagccaggtgcccctggacctgtgtgaggtctatggcgggggctgccacggttgcctcatgtcccgagacccctactgcggctgggaccaaggccgctgcatctccatctacagctccgaacggtcagtgctgcaatccattaatccagccgagccacacaaggagtgtcccaaccccaaaccagacaaggccccactgcagaaggtttccctggccccaaactctcgctactacctgagctgccccatggaatcccgccacgccacctactcatggcgccacaaggagaacgtggagcagagctgcgaacctggtcaccagagccccaactgcatcctgttcatcgagaacctcacggcgcagcagtacggccactacttctgcgaggcccaggagggctcctacttccgcgaggctcagcactggcagctgctgcccgaggacggcatcatggccgagcacctgctgggtcatgcctgtgccctggccgcctccctctggctgggggtgctgcccacactcactcttggcttgctggtccactagggcctcccgaggctgggcatgcctcaggcttctgcagcccagggcactagaacgtctcacactcagagccggctggcccgggagctccttgcctgccacttcttccaggggacagaataacccagtggaggatgccaggcctggagacgtccagccgcaggcggctgctgggccccaggtggcgcacggatggtgaggggctgagaatgagggcaccgactgtgaagctggggcatcgatgacccaagactttatcttctggaaaatatttttcagactcctcaaacttgactaaatgcagcgatgctcccagcccaagagcccatgggtcggggagtgggtttggataggagagctgggactccatctcgaccctggggctgaggcctgagtccttctggactcttggtacccacattgcctccttcccctccctctctcatggctgggtggctggtgttcctgaagacccagggctaccctctgtccagccctgtcctctgcagctccctctctggtcctgggtcccacaggacagccgccttgcatgtttattgaaggatgtttgctttccggacggaaggacggaaaaagctctatttttatgttaggcttatttcatgtatagctacttccgactgcatctgtatgaaaataccaaaactacatgcgggggggtgggtgggaaagggaggggctgggaagggatgggttggggagcgggggtgatcccagtctgaggctcccggggatgagataagagtctggagacgggcatgggttcttggagagtggcatgagctggctctgccctgggagcccggtctgagggggacgttgttggagcccctagtgttgggggtggttatgggagggggtggggtgagggaaacgggagaatgaaggagaaaactgagccctagtttcaccgtgttcatttggaaggacgagccgggtcctcagggggaggttccaggactctgcccttggcgttgagggttggggggcggggggcctcctcccttcctctcagcccccttccccaggggctgtgcttccatgctcctagcctcccaccttcgctcaggacatgttataacttaggctaaactgtgaaaattccggtggggatggcctgggccgagctctccaggcaggcggccctgcccccagccctgtccatccatttcaggggggagctgggcccttctccggctgtgtctggccacccagggcagtggctggggccagtggccttccagctttggcccctgcacctcttctcaatgcactttaataatgtaacatattactaataaacaagctatttattt

SEQ ID NO: 59440 - DNA, 1959 bp, Artificial Sequence
  derived and/or modified sequence
atgaccccccccccccccggcagagccgcccccagcgcccccagagccagagtgcccggcccccccgccagactgggcctgcccctgagactgagactgctgctgctgctgtgggccgccgccgccagcgcccagggccacctgagaagcggccccagaatcttcgccgtgtggaagggccacgtgggccaggacagagtggacttcggccagaccgagccccacaccgtgctgttccacgagcccggcagcagcagcgtgtgggtgggcggcagaggcaaggtgtacctgttcgacttccccgagggcaagaacgccagcgtgagaaccgactgcgagaactacatcaccctgctggagagaagaagcgagggcctgctggcctgcggcaccaacgccagacaccccagctgctggaacctggtgaacggcaccgtggtgcccctgggcgagatgagaggctacgcccccttcagccccgacgagaacagcctggtgctgttcgagggcgacgaggtgtacagcaccatcagaaagcaggagtacaacggcaagatccccagattcagaagaatcagaggcgagagcgagctgtacaccagcgacaccgtgatgcagaacccccagttcatcaaggccaccatcgtgcaccaggaccaggcctacgacgacaagatctactacttcttcagagaggacaaccccgacaagaaccccgaggcccccctgaacgtgagcagagtggcccagctgtgcagaggcgaccagggcggcgagagcagcctgagcgtgagcaagtggaacaccttcctgaaggccatgctggtgtgcagcgacgccgccaccaacaagaacttcaacagactgcaggacgtgttcctgctgcccgaccccagcggccagtggagagacaccagagtgtacggcgtgttcagcaacccctggaactacagcgccgtgtgcgtgtacagcctgggcgacatcgacaaggtgttcagaaccagcagcctgaagggctaccacagcagcctgcccaaccccagacccggcaagtgcctgcccgaccagcagcccatccccaccgagaccttccaggtggccgacagacaccccgaggtggcccagagagtggagcccatgggccccctgaagacccccctgttccacagcaagtaccactaccagaaggtggccgtgcacagaatgcaggccagccacggcgagaccttccacgtgctgtacctgaccaccgacagaggcaccatccacaaggtggtggagcccggcgagcaggagcacagcttcgccttcaacatcatggagatccagcccttcagaagagccgccgccatccagaccatgagcctggacgccgagagaagaaagctgtacgtgagcagccagtgggaggtgagccaggtgcccctggacctgtgcgaggtgtacggcggcggctgccacggctgcctgatgagcagagacccctactgcggctgggaccagggcagatgcatcagcatctacagcagcgagagaagcgtgctgcagagcatcaaccccgccgagccccacaaggagtgccccaaccccaagcccgacaaggcccccctgcagaaggtgagcctggcccccaacagcagatactacctgagctgccccatggagagcagacacgccacctacagctggagacacaaggagaacgtggagcagagctgcgagcccggccaccagagccccaactgcatcctgttcatcgagaacctgaccgcccagcagtacggccactacttctgcgaggcccaggagggcagctacttcagagaggcccagcactggcagctgctgcccgaggacggcatcatggccgagcacctgctgggccacgcctgcgccctggccgccagcctgtggctgggcgtgctgcccaccctgaccctgggcctgctggtgcactag

SEQ ID NO: 59441 - protein, 501 aa, Artificial Sequence
  derived and/or modified sequence
MRGYAPFSPDENSLVLFEGDEVYSTIRKQEYNGKIPRFRRIRGESELYTSDTVMQNPQFIKATIVHQDQAYDDKIYYFFREDNPDKNPEAPLNVSRVAQLCRGDQGGESSLSVSKWNTFLKAMLVCSDAATNKNFNRLQDVFLLPDPSGQWRDTRVYGVFSNPWNYSAVCVYSLGDIDKVFRTSSLKGYHSSLPNPRPGKCLPDQQPIPTETFQVADRHPEVAQRVEPMGPLKTPLFHSKYHYQKVAVHRMQASHGETFHVLYLTTDRGTIHKVVEPGEQEHSFAFNIMEIQPFRRAAAIQTMSLDAERRKLYVSSQWEVSQVPLDLCEVYGGGCHGCLMSRDPYCGWDQGRCISIYSSERSVLQSINPAEPHKECPNPKPDKAPLQKVSLAPNSRYYLSCPMESRHATYSWRHKENVEQSCEPGHQSPNCILFIENLTAQQYGHYFCEAQEGSYFREAQHWQLLPEDGIMAEHLLGHACALAASLWLGVLPTLTLGLLVH

SEQ ID NO: 59442 - protein, 777 aa, Artificial Sequence
  derived and/or modified sequence
MVMAYFVENFWGEKNSGFDVLYHNMKHGQISTKELADFVRERATIEEAYSRSMTKLAKSASNYSQLGTFAPVWDVFKTSTEKLANCHLDLVRKLQELIKEVQKYGEEQVKSHKKTKEEVAGTLEAVQTIQSITQALQKSKENYNAKCVEQERLKKEGATQREIEKAAVKSKKATDTYKLYVEKYALAKADFEQKMTETAQVHEEFINNMANTTVESLIQKFAESKGTGKERPGLIEFEECDTASAVEGIKPRKRKTFALPGIIKKEKDAESVECPDADSLNIPDVDEEGYSIKPETNQNDTKENHFYSSSDSDSEDEEPKKYRIEIKPMHPNNSHHTMASLDELKVSIGNITLSPAISRHSPVQMNRNLSNEELTKSKPSAPPNEKGTSDLLAWDPLFGPSLDSSSSSSLTSSSSARPTTPLSVGTIVPPPRPASRPKLTSGKLSGINEIPRPFSPPVTSNTSPPPAAPLARAESSSSISSSASLSAANTPTVGVSRGPSPVSLGNQDTLPVAVALTESVNAYFKGADPTKCIVKITGDMTMSFPSGIIKVFTSNPTPAVLCFRVKNISRLEQILPNAQLVFSDPSQCDSNTKDFWMNMQAVTVYLKKLSEQNPAASYYNVDVLKYQVSSNGIQSTPLNLATYWKCSASTTDLRVDYKYNPEAMVAPSVLSNIQVVVPVDGGVTNMQSLPPAIWNAEQMKAFWKLSSISEKSENGGSGSLRAKFDLSEGPSKPTTLAVQFLSEGSTLSGVDFELVGTGYRLSLIKKRFATGRYLADC

SEQ ID NO: 59443 - DNA, 2700 bp, Artificial Sequence
  derived and/or modified sequence
acgcggaacccggcgcggcggcggcacgatggtcatggcgtatttcgtcgagaatttttggggggaaaaaaatagtggctttgatgtcctctaccataatatgaaacatggacagatatcaacaaaagaactagcagattttgtaagggaacgagctaccatagaggaggcatactccaggtcaatgacaaaactagcaaaatctgcaagcaattattcacaacttggaacatttgcaccagtatgggatgtattcaaaacatctacagagaaattagcaaattgtcacttggatcttgttagaaaattacaagaattaataaaggaagttcagaagtatggagaagaacaagtaaagtctcataaaaagactaaagaagaagttgcaggaactctggaagctgtccaaaccattcagagcataactcaggccctccagaaatccaaggaaaattacaatgccaagtgtgtagaacaggagcgtttgaaaaaggaaggagctacacaaagagaaatagaaaaggcagctgttaaatctaagaaagctacagatacctataaactctatgtggaaaaatatgcattagcaaaagctgatttcgaacagaaaatgacagaaacagctcaggtccatgaagaatttataaataacatggctaatactacagttgaaagtttgatacaaaaatttgctgagtcaaaaggcactgggaaggaaagacctggcctcattgaatttgaagaatgtgacactgctagtgcagttgaaggtataaaaccaaggaaaagaaagacctttgctttgccaggaatcattaaaaaggaaaaagatgcagaatctgtggaatgtcctgatgcagattcattgaacattcctgatgtagatgaagaaggctacagtattaaaccagaaacaaatcagaatgataccaaagagaaccatttctactcatctagtgattctgactccgaagatgaagaaccaaagaagtatcggatagaaattaagcctatgcatccaaataactcacatcacacaatggcttctttggatgaattaaaagtatctatagggaatataacactctccccagcaatatctagacacagtccagtacagatgaatcggaatttgtctaatgaggagttaacaaaatcaaagccatctgctccacccaatgaaaaaggaaccagtgatttacttgcttgggaccccctatttggaccatctcttgattcatcttcttcatcttcactaacttcatcatcatcagccaggcccacaactcctctttctgtaggcaccattgtcccacctccgaggcctgcttccagaccaaagcttacttcaggcaaactcagtgggattaatgaaatacccaggccattcagcccacctgtaacttccaacaccagcccacctcctgctgcaccattagcccgggcagaaagttcttcttctatctcatcatctgcttcattgagtgctgccaatactccaacagtaggtgtgtcacggggtcccagccctgtcagccttggaaatcaggataccttacctgtggcagttgcccttacagaatctgttaatgcctactttaaaggagcagatcccaccaagtgtattgtgaagatcactggtgatatgacaatgtcatttccaagtggaattattaaagtcttcaccagcaatccaactccagctgtgttgtgcttcagggtgaaaaatatcagcagactagagcagattcttccaaatgcacagcttgtgttcagtgatccatcacaatgtgattccaacacaaaagatttttggatgaacatgcaagctgttacagtctacctcaagaagctgtcagagcaaaatccagctgcttcttattataatgtagatgtattaaagtatcaggtatcatcaaatggtattcagtccactcctctgaatcttgcaacatactggaaatgtagtgctagcaccacagatcttagagtggattataaatacaatccagaagctatggtggcacctagtgtgctttccaacatacaggtggtggtaccagtggatggaggagtaacgaacatgcagtcccttccccctgcaatatggaatgcagaacaaatgaaagccttttggaaattgtctagtatttcagaaaaatcagaaaatggaggttctgggtccctccgagcaaaatttgatctttcagaaggacctagtaaacccacgacacttgcagtacaattcctcagcgagggaagtaccctttcaggagtagatttcgaacttgtgggcactggctataggctttccttaataaagaagcggtttgctactggacgatacctggcggattgttgatggacctgggaaagtgatgtggcttcagggattacaaacctgccattctgcattatctgttctttccaaacactattttaacttgtatgatgtctttcaaacttagacatatttgagagctgactacaaacattaaatcgcacttttaaagtgagtcattgaaataaatagtactgaaatgattctctatgttgtaaatgatcaactacaatattcaggaagcacatttattcagattctcagtaaaaatgaagtttttgtaggattaatttttaaattatttccagtgtctatgttgaaaaaaagggttatagtgtaatatcaggcctaaagtttca

SEQ ID NO: 59444 - DNA, 2334 bp, Artificial Sequence
  derived and/or modified sequence
atggtgatggcttacttcgtcgagaatttttggggtgaaaaaaattccggctttgacgtcctctatcataatatgaaacacggtcagatcagtacaaaagaactcgcagacttcgtccgcgagcgggcaactatcgaagaagcctactcgcgcagtatgacgaagctggccaaatcagcctccaactacagtcagttgggcacatttgctcctgtttgggacgtgtttaaaacaagcaccgagaaactggccaactgccaccttgacctggtgagaaaattacaggaacttatcaaggaagtgcagaaatatggggaggagcaggtgaaatcccacaaaaaaacaaaggaggaggttgcaggcacattggaggcagtacagaccattcagagcatcacccaggctttgcagaagtccaaggagaactataatgcaaaatgtgtggagcaggagcgtctaaaaaaggagggggccactcagcgggaaattgaaaaggccgctgtgaagagcaaaaaagccactgacacctacaagttatacgtagaaaagtatgcacttgctaaagccgactttgagcagaagatgacagaaactgcccaggttcatgaggaatttataaacaatatggccaataccacagttgagtctctgatacaaaagtttgcggaatccaaaggaacaggaaaggaacgtccaggcctaattgagtttgaagagtgtgatacagccagcgctgtggagggaattaagcctagaaaaaggaaaacattcgctctgcctggtattattaaaaaagagaaagacgcagagtctgtcgagtgtcctgacgcggattctctcaacatcccggatgtggacgaggaggggtatagcataaagcccgagacgaatcagaacgacaccaaggagaatcatttttactcctctagcgatagtgatagcgaggacgaggaaccgaaaaagtatagaatcgagatcaaaccgatgcatcctaacaacagccaccatacaatggcatctttggacgaattgaaagtgagcattgggaatattaccctcagccctgccatctcaagacattccccggtccaaatgaatagaaatctgagtaacgaagaactgacaaagtcaaagccctcagctcctcccaacgagaaaggcacttcagatctgttggcatgggatccactgttcggccccagccttgattccagcagttcatcctcccttacatcctctagtagcgctcgccctaccacccccttgagcgtgggcacgattgtgccaccccctcgtccagcgtctaggcccaagttgactagcggcaagttgagcggtataaatgagatccctagacccttcagccctcctgtcacgtctaacacctccccccccccagctgccccacttgctcgggcagaaagcagttcttccatcagctcaagcgccagcttgtccgccgcaaacacgccaacagtcggcgtttccagaggcccttcacccgtttcactggggaaccaggacacccttccagtggcagtggctctcactgagagtgtgaatgcctacttcaagggggccgatcctaccaagtgcattgtgaagatcacaggcgacatgacgatgagcttccctagtggcattatcaaagtgttcacaagcaaccccacaccagccgtactatgcttcagggtgaaaaatatctctaggttggagcagatcctgcctaacgcccagctggtattcagcgacccttctcaatgcgacagtaacactaaggatttctggatgaatatgcaggccgtgactgtgtacctgaagaagctgtccgagcaaaacccagctgcctcttattacaacgtggacgtgctcaagtaccaggtgagtagcaacggcatacagagcactcccctgaacctggccacatactggaagtgttcagcaagcacgacagacttacgagtagactacaaatataatcccgaggccatggtggctcccagcgttctgtccaatatccaggttgtcgtgcccgttgacggtggcgtgaccaacatgcaatcgctgcccccagccatctggaatgcagagcaaatgaaggccttctggaaattgtcttctatttcagaaaagtctgaaaatggcggcagcggcagcctccgcgccaagttcgatctcagcgagggaccttcaaaacctacgacgctcgcagtgcagttcctgagtgaggggtccacactttctggtgtagatttcgagctcgtcggtactggttaccggttaagcctgatcaagaaacgcttcgccacgggaaggtacctcgcagactgttag

SEQ ID NO: 59445 - DNA, 2334 bp, Artificial Sequence
  derived and/or modified sequence
atggtgatggcctactttgtggagaacttctggggcgagaagaacagcggctttgatgtgctgtaccacaacatgaagcacggccagatcagcaccaaggagctggccgactttgtgcgggagcgggccaccatcgaggaggcctacagccgctccatgaccaagctggccaagagcgccagcaactacagccagctgggcacctttgcccctgtgtgggatgtgttcaagaccagcacagagaagctggccaactgccacctggacctggtgaggaagctgcaggagctgatcaaggaggtgcagaagtacggggaggagcaggtgaagagccacaagaagaccaaggaggaggtggccggcaccctggaggccgtgcagaccatccagagcatcacccaggccctgcagaagagcaaagaaaactacaatgccaagtgtgtggagcaggagcggctgaagaaggagggcgccacccagcgggagattgagaaggctgctgtgaagagcaagaaggccacagacacctacaagctgtatgtggagaagtatgccctggccaaggctgactttgagcagaagatgacagaaacagcccaggtgcatgaggagttcatcaacaacatggccaacaccaccgtggagagcctcatccagaagtttgctgagagcaaaggaacaggcaaggagcggcccggcctgattgaatttgaagaatgtgacacagccagcgctgtggagggcatcaagcccaggaagaggaagacctttgccctgcccggcatcatcaagaaggagaaggatgctgagagcgtggagtgcccagatgctgacagcctgaacatcccagatgtggatgaggagggctacagcatcaagccagagaccaaccagaatgacaccaaggagaaccacttctacagcagcagtgacagcgacagtgaagatgaggagcccaagaagtaccgcatcgagatcaagcccatgcaccccaacaacagccaccacaccatggccagcctggatgagctgaaggtgtccatcggcaacatcaccctgagccctgccatcagccgccacagccctgtgcagatgaacagaaacctgagcaatgaggagctgaccaagagcaagcccagcgcccccccaaatgagaagggcaccagtgacctgctggcctgggaccccctgtttggccccagcctggacagcagcagcagcagcagcctgaccagcagcagcagcgcccggcccaccacccccctgtctgtgggcaccatcgtgcccccacccaggcctgccagccggcccaagctgaccagcggcaagctgagcggcatcaatgagatcccccggcccttcagcccccctgtgaccagcaacaccagccccccacctgctgcccccctggcccgggcagagagcagcagcagcatcagcagcagcgccagcctgtctgctgccaacacccccaccgtgggcgtgtcccggggccccagccctgtgtccctgggcaaccaggacaccctgcctgtggccgtggccctgacagaatctgtgaatgcctacttcaagggagctgaccccaccaagtgcatcgtgaagatcactggagacatgaccatgtccttccccagcggcatcatcaaggtgttcaccagcaaccccaccccagctgtgctgtgcttccgggtgaagaacatcagccggctggagcagatcctgcccaatgcccagctggtgttcagtgaccccagccagtgtgacagcaacaccaaggacttctggatgaacatgcaggccgtgacagtgtacctgaagaagctgtctgagcagaacccagctgccagctactacaacgtggatgtgctgaagtaccaggtgagcagcaatggcatccagagcacccccctgaacctggccacctactggaagtgcagcgccagcaccacagacctgcgggtggactacaagtacaaccctgaggccatggtggcccccagcgtgctgagcaacatccaggtggtggtgcctgtggatggcggcgtgaccaacatgcagagcctgcccccagccatctggaatgctgagcagatgaaggccttctggaagctgagcagcatcagcgagaagtcagaaaatggaggcagcggcagcctgcgggccaagtttgacctgtctgagggccccagcaagcccaccaccctggccgtgcagttcctgtctgagggcagcaccctgagcggcgtggactttgagctggtgggcaccggctaccgcctgagcctcatcaagaagagatttgccaccggccgctacctggccgactgctag

SEQ ID NO: 59446 - DNA, 2334 bp, Artificial Sequence
  derived and/or modified sequence
atggtgatggcctacttcgtggagaacttctggggcgagaagaactccggattcgatgttctgtaccacaatatgaagcacggtcagatttccacgaaagaactagctgacttcgtgagggaaagggctactatcgaagaggcttatagccggtcaatgacaaagctcgctaaatccgccagcaattacagtcaactcggcacattcgcgcctgtgtgggacgtgttcaagacatccacagagaagctggccaattgccacctggacttagtaaggaagttacaggagttaatcaaggaagtacagaaatacggagaggaacaagtgaaaagccataagaaaacaaaggaagaggtagctgggacattggaagctgttcagactatccaatctatcacccaagctctgcagaaaagcaaggaaaactacaatgcaaagtgtgttgagcaggaaaggctcaaaaaggagggggctacccagagagagatagagaaagctgcggtgaagtccaagaaagcgacggacacttacaagttatacgtggagaagtatgcccttgctaaagccgacttcgagcagaagatgacagagaccgctcaggttcatgaggagttcattaacaatatggctaatactacagtggaatcactgatccagaagttcgctgaatcgaaaggaactgggaaggagcgccctggcctgattgaattcgaggagtgtgacaccgcttctgccgttgagggcatcaaacccagaaagcggaagaccttcgcactgcctgggatcatcaagaaggagaaggatgccgagagcgtcgaatgtccggatgctgattcactgaatatacccgacgttgacgaggaaggttactctattaagccagagacgaaccaaaacgacacgaaggagaaccacttctattcgagctctgattccgacagcgaggatgaggagccaaagaaatatcgcattgaaatcaaaccgatgcatcctaacaactcccatcacacaatggcctccctggatgagctgaaggttagcattggtaacatcaccctgtccccggccatctccagacacagccccgttcagatgaataggaacctttctaacgaggagttgacgaagagtaagccaagcgctccacctaatgagaagggtacctcagacctactggcctgggaccccctgttcgggcctagtctcgacagcagcagcagtagctcactgacaagttccagctctgccagacctaccacacccctatcagttggtacgattgtgcctcctccacggccagctagcagacccaagcttacaagtggaaaactgtctgggattaatgagatacctagacccttctcaccacccgtaacctccaatacatcccccccaccggctgccccgctcgctagggcagaatcatccagcagtatcagcagttcagcctccctttctgctgccaatacacccacagttggcgtctcaagagggcccagcccggtctccctcggtaaccaggatacattgcctgtggctgttgccctaacagaatctgtgaatgcatacttcaaaggagccgaccctaccaagtgtattgttaagatcacaggagatatgaccatgtccttccccagcggaatcattaaagtatttacatctaaccccacacccgccgtactctgtttccgggtcaagaatatttcaagacttgagcagatactgcccaacgcacaactcgtttttagcgacccttcccagtgtgacagtaacacgaaagacttttggatgaacatgcaagcagtcacagtctacctcaaaaagctttctgaacagaacccggccgctagttactataacgtagatgttctcaaatatcaagtgtcctcaaatggcatccaatccacaccccttaatctggctacatattggaaatgtagtgcctctaccacagacttacgagtagattacaagtataaccctgaggcaatggtggccccaagcgtcctctcaaatatccaggtcgtcgttcctgtggacggcggggttaccaacatgcagagtctgccccctgctatttggaatgccgaacagatgaaggcgttttggaaattgtcttcaatctcggaaaagagcgaaaacggcgggagcggcagtttaagagctaagtttgacctctctgagggccccagcaagcccaccacccttgccgtgcagtttctgtcagaaggcagtacactgtcaggtgtcgactttgagctggtgggcactggatatcgcctctctctcatcaaaaaacggttcgccacgggccgctatctagccgactgctag

SEQ ID NO: 59447 - DNA, 2334 bp, Artificial Sequence
  derived and/or modified sequence
atggtgatggcgtattttgtggaaaacttctggggagaaaaaaactcagggttcgatgtcctgtaccacaatatgaagcatggacaaataagtaccaaggagcttgccgattttgtacgagaacgggcaaccattgaggaggcctattccagatcaatgacaaaactcgctaagagcgcaagcaactacagccaactgggaacattcgctccagtgtgggacgtgtttaaaacatctaccgagaagctagctaactgtcatctggacctggtcaggaagctgcaggaactaataaaagaggtgcagaagtacggcgaggaacaggtaaagtcccataaaaaaaccaaggaggaagtggctggcacactggaagctgtgcagacgatccagtctattacccaagcactgcagaagtctaaagaaaattataacgccaagtgcgtcgagcaggagcggctgaaaaaagaaggcgctacacagcgagagattgaaaaggctgcagtgaaatcaaagaaggcaactgatacatacaaattgtatgttgagaagtatgctcttgctaaagctgacttcgaacagaaaatgaccgaaacagctcaggtacacgaagagttcatcaataatatggcaaatacgactgtggagtccctcatccagaagtttgccgaatctaaaggcacagggaaggagaggcctgggctgatcgagttcgaagagtgcgacacggcaagcgctgtggaaggcattaaaccgagaaagaggaagacatttgctctgcctgggattatcaagaaggaaaaagacgctgagtcagttgaatgtcctgacgctgactcactaaacatcccagacgtggacgaagaagggtactctatcaagccagagaccaaccaaaatgataccaaggaaaatcacttctattcctcgtctgacagcgactcagaagacgaagaacctaaaaaatatcgaatagagatcaagccgatgcacccaaataacagtcatcacaccatggcgtctctggacgaactgaaagtcagtataggaaatatcaccctgtctcctgcaatcagccggcacagtccagtgcagatgaacaggaatctttccaacgaggaacttactaaaagcaagccaagcgcccctccaaatgagaagggaaccagcgatctgctcgcatgggatcctctctttggtcccagcttggattcctccagctcttcgtccttgaccagctccagctctgctcggccaacaactcccctctccgtggggacaatcgtgccaccaccacgaccagcatcgcgcccaaagctaacaagcggaaagttgtcaggtattaatgagattccacggccatttagccccccagtgacaagcaatacatcgccaccacccgctgccccactggcacgcgcagaatcaagctccagcattagctcctccgctagcctctcagctgctaataccccgacagtgggagtctcaaggggaccttccccggtgtctctgggaaatcaggacacactgcctgtggcagtagctcttaccgaaagcgtgaatgcttacttcaagggggcagatcccaccaaatgtattgtgaagattacaggagacatgactatgagcttccctagtggcatcatcaaagtatttactagcaatcctacaccagctgtgctttgttttcgtgtcaagaatatcagtcgtctcgagcagatcctgcccaacgcccagctcgtcttttccgacccctcgcagtgcgactcaaataccaaggacttctggatgaatatgcaggcagtcacagtctacctgaagaagttgtctgaacagaatcccgctgcatcatactataacgttgatgtgctcaaatatcaggttagtagcaacgggatccaatctactccattaaacctggccacctactggaaatgtagtgcctcgaccaccgacctgcgggtggactataaatacaaccctgaagctatggtagctcccagcgtcctctctaatatccaggtggtggtcccagtggacggaggcgtgactaatatgcagtctctccctccagctatctggaacgccgagcaaatgaaggccttttggaaattaagctctattagcgagaagagtgagaatggcggatccggaagcctcagggctaagtttgacctgagcgagggcccatccaaacctactacactggccgtgcagttcctcagcgagggttctactctgagcggagttgacttcgagctggtcggtacggggtatcgcctcagcctgataaagaaacgctttgcgacagggaggtacctcgcagactgttag

SEQ ID NO: 59448 - DNA, 2334 bp, Artificial Sequence
  derived and/or modified sequence
atggtgatggcctacttcgtggagaacttctggggcgagaagaacagcggcttcgacgtgctgtaccacaacatgaagcacggccagatcagcaccaaggagctggccgacttcgtgagagagagagccaccatcgaggaggcctacagcagaagcatgaccaagctggccaagagcgccagcaactacagccagctgggcaccttcgcccccgtgtgggacgtgttcaagaccagcaccgagaagctggccaactgccacctggacctggtgagaaagctgcaggagctgatcaaggaggtgcagaagtacggcgaggagcaggtgaagagccacaagaagaccaaggaggaggtggccggcaccctggaggccgtgcagaccatccagagcatcacccaggccctgcagaagagcaaggagaactacaacgccaagtgcgtggagcaggagagactgaagaaggagggcgccacccagagagagatcgagaaggccgccgtgaagagcaagaaggccaccgacacctacaagctgtacgtggagaagtacgccctggccaaggccgacttcgagcagaagatgaccgagaccgcccaggtgcacgaggagttcatcaacaacatggccaacaccaccgtggagagcctgatccagaagttcgccgagagcaagggcaccggcaaggagagacccggcctgatcgagttcgaggagtgcgacaccgccagcgccgtggagggcatcaagcccagaaagagaaagaccttcgccctgcccggcatcatcaagaaggagaaggacgccgagagcgtggagtgccccgacgccgacagcctgaacatccccgacgtggacgaggagggctacagcatcaagcccgagaccaaccagaacgacaccaaggagaaccacttctacagcagcagcgacagcgacagcgaggacgaggagcccaagaagtacagaatcgagatcaagcccatgcaccccaacaacagccaccacaccatggccagcctggacgagctgaaggtgagcatcggcaacatcaccctgagccccgccatcagcagacacagccccgtgcagatgaacagaaacctgagcaacgaggagctgaccaagagcaagcccagcgccccccccaacgagaagggcaccagcgacctgctggcctgggaccccctgttcggccccagcctggacagcagcagcagcagcagcctgaccagcagcagcagcgccagacccaccacccccctgagcgtgggcaccatcgtgcccccccccagacccgccagcagacccaagctgaccagcggcaagctgagcggcatcaacgagatccccagacccttcagcccccccgtgaccagcaacaccagccccccccccgccgcccccctggccagagccgagagcagcagcagcatcagcagcagcgccagcctgagcgccgccaacacccccaccgtgggcgtgagcagaggccccagccccgtgagcctgggcaaccaggacaccctgcccgtggccgtggccctgaccgagagcgtgaacgcctacttcaagggcgccgaccccaccaagtgcatcgtgaagatcaccggcgacatgaccatgagcttccccagcggcatcatcaaggtgttcaccagcaaccccacccccgccgtgctgtgcttcagagtgaagaacatcagcagactggagcagatcctgcccaacgcccagctggtgttcagcgaccccagccagtgcgacagcaacaccaaggacttctggatgaacatgcaggccgtgaccgtgtacctgaagaagctgagcgagcagaaccccgccgccagctactacaacgtggacgtgctgaagtaccaggtgagcagcaacggcatccagagcacccccctgaacctggccacctactggaagtgcagcgccagcaccaccgacctgagagtggactacaagtacaaccccgaggccatggtggcccccagcgtgctgagcaacatccaggtggtggtgcccgtggacggcggcgtgaccaacatgcagagcctgccccccgccatctggaacgccgagcagatgaaggccttctggaagctgagcagcatcagcgagaagagcgagaacggcggcagcggcagcctgagagccaagttcgacctgagcgagggccccagcaagcccaccaccctggccgtgcagttcctgagcgagggcagcaccctgagcggcgtggacttcgagctggtgggcaccggctacagactgagcctgatcaagaagagattcgccaccggcagatacctggccgactgctag

SEQ ID NO: 59449 - DNA, 741 bp, Artificial Sequence
  derived and/or modified sequence
atgtcgtgggccgcggtcctggcagttgcggccgctagattcggccacttttggggctgtcgctggcctggacctatggctcagggatgggctggattctcggaggaggaacttaggcgtctcaagcagaccaaggatccattcgagccccaacgtcgcctgccagctaaaaagtctaggcagcagctgcaaagggagaaggcactggtggagcaaagtcagaaattgggcctgcaagacggaagtacatctctgttgccagaacagcttttgtccgctcctaagcagcgggtcaatgtgcagaaacctcccttttcctctcctaccctcccttcgcacttcacactgacatctcctgttggagacggacagccacaaggaattgagtcccaaccgaaggagctgggactggaaaatagtcatgacggccacaataatgttgagattctgccacccaagccagactgcaaattggaaaaaaagaaggtggaactccaggagaagagccgctgggaagtactgcagcaagagcagagactaatggaagagaaaaacaaaagaaagaaagccctgttagctaaagcaatcgctgagcgatctaagagaacccaagccgaaacgatgaagcttaaacgaatccagaaagaactccaggcccttgacgatatggtcagtgccgatattgggatcttacgaaatcgcatcgaccaagcctcccttgattactcatatgctcgatag

SEQ ID NO: 59450 - DNA, 1699 bp, Artificial Sequence
  derived and/or modified sequence
ggccggggaaaaacccggatgagctgggcagcagtgttggcagtcgcggctgcgagatttgggcacttttgggggtgccggtggcccgggccgatggcgcaaggttgggcaggattctctgaggaggaactgaggagactaaagcagactaaagatccatttgaaccacagcgacgtctccccgcgaagaaaagtcgacaacaacttcagcgagaaaaagcccttgtagagcaaagccaaaaacttgggcttcaagatggatcaacctcattacttccagagcagctgctttcagcaccaaaacagagagttaacgttcaaaaaccacctttttcttcccctactcttccgagtcatttcactctcacctcccccgttggtgatggacaaccacagggcattgaaagtcagccaaaggaactgggacttgagaattcccatgatggtcacaacaatgttgagattctacctccaaagccagattgcaaattggagaaaaagaaagtggaattgcaagaaaaatctcgttgggaagtcctccaacaagaacaacggctaatggaagagaaaaataaacgtaaaaaagctcttttggctaaagctattgcagaaagatccaaaagaactcaggcagagaccatgaaactaaagcggatccagaaggagttgcaggctttagatgacatggtgtcagctgacattggaattctcaggaaccggattgatcaggccagcttagactattcatacgctcggtgagttggggaaattgaatctgaacaaggagtatgatttaattaatgtttattgccagctgttccaggggcttttatgtatatcatcattgaagcctcaaaacaaccccattcagtgctgtatttattcttcttttgtgctaattcaagtgtctcctcttcagtgaagtcttccttaactctgccctactagttaaccttgttcgtgtgccattagagcagttcttgcattatttatttacgttttagtctttgctgcgaaaccctcagctatttaatgtttggaagtgtttttgctcatctttcagcatctagcaaagtaaatatctgagtggtttcgccaaaactgttactctgacaccaagtctgtgttctttccattaaaatttttgatatctgatatagtcctataggattgaagtctagtcctcactttagctttcatcagagtaagaggatctagtttagtttttaaaagcttatgaatattttaagcatatcctctgtcttggaaatttgaaatattttctctttttttttcctttcaattatactctgtatgaaatggtttaatatatgtttccttggtttcaaccattggcattttttaaaagagaaaaaataccatggagtatttttaaaatgaactaacacatgtaatgaattacatggactttgcagacagataaaagggcaaaaaaatatgtccaatttcagggttttcagccctttcaacattgctttaatcatcctggtttgtcttttttcacaagggaatgctgtgttaatgactcagttttctatcttactctgttacactagaaatgaatcagaatgcctcattaggccagggtaaaccacaacatcagaatgtttatataacaatttattaaagcggaaatgcttgattgtggtttttaataaactgttgagtgtttaagaaa

SEQ ID NO: 59451 - DNA, 741 bp, Artificial Sequence
  derived and/or modified sequence
atgtcctgggccgctgtgctggccgtggccgccgcccgcttcggccacttctggggctgccgctggccaggccccatggcccagggctgggccggcttcagcgaggaggagctgcggcggctgaagcagaccaaggacccctttgagccccagaggcggctgcctgccaagaagagccggcagcagctgcagcgggagaaggccctggtggagcagagccagaagctgggcctgcaggacggcagcaccagcctgctgcctgagcagctgctgagcgcccccaagcagagggtgaatgtgcagaagccacccttcagcagccccaccctgcccagccacttcaccctgaccagccctgtgggagatggccagccccagggcatcgagagccagcccaaggagctgggcctggagaacagccatgatggccacaacaacgtggagatcctgccccccaagccagactgcaagctggagaagaagaaggtggagctgcaggagaagagccgctgggaggtgctgcagcaggagcagaggctgatggaggagaagaacaagaggaagaaggccctgctggccaaggccatcgccgagaggagcaagaggacccaggccgagaccatgaagctgaagaggatccagaaggagctgcaggccctggatgacatggtgtctgctgacatcggcatcctgaggaacagaattgaccaggccagcctggactacagctatgccaggtag

SEQ ID NO: 59452 - DNA, 741 bp, Artificial Sequence
  derived and/or modified sequence
atgagctgggccgccgtgctggccgtggccgccgcccggttcggccatttttggggatgccgctggcctggccccatggcccagggctgggccggcttttccgaggaagagctccgtagactgaagcaaacaaaggaccctttcgaaccccagaggagacttccggctaagaaatctcgccagcagttacagcgggaaaaggccctggtggaacagtctcagaaattaggccttcaggacggaagcacaagtctcttacccgaacagctgctgtctgccccaaagcaacgtgttaacgtacagaaacccccattctcctcaccaacactccctagtcactttacactgacttcccccgtcggcgacggccagccacagggcatcgagtcacagcctaaggagctggggctggagaattcgcatgatggccataataatgttgaaatcctccctccaaaacccgactgtaaactggagaagaagaaggtggaactgcaggagaagagtaggtgggaagtgcttcagcaggaacagcggttgatggaggagaaaaacaagcgcaaaaaagctctgctggctaaagcaatcgccgagaggtccaagagaactcaggcagagactatgaaactgaagcgcattcagaaggagctgcaagccctggacgatatggtttctgccgacattggaattctgcggaacaggatagaccaggcctcactggattactcatatgctagatag

SEQ ID NO: 59453 - DNA, 741 bp, Artificial Sequence
  derived and/or modified sequence
atgtcatgggccgctgtcctggctgtcgcagccgctcgctttgggcacttttgggggtgtaggtggcccggacctatggcacaaggatgggcgggattcagcgaagaagagttgcggagactcaagcagacgaaggacccgtttgaaccccaaaggaggttacctgctaagaaatctcgccagcaactgcagagagaaaaggctcttgtggaacaaagccaaaagctggggctgcaagatgggagtacgtctttactgcctgagcagctactcagtgcaccgaaacagcgggtaaacgtgcagaagcctccattctcgtccccgaccttgcctagccatttcaccttaacctctcctgtcggcgacggccagccacaaggcatagaatcccagcccaaggaactgggtctggaaaattcccatgatggacacaataacgtcgaaatactcccacccaaacccgactgcaagttggagaagaaaaaagtagagctacaggagaagagtcgttgggaggtcctccagcaggaacagcgactgatggaagagaaaaataagcggaagaaggcactattagcaaaggccattgctgagcgctcgaagcggacccaggccgagacgatgaagctgaagcggatccagaaggaacttcaggccctagacgatatggtcagcgctgacattggaatacttagaaatagaattgatcaggccagtctcgattattcttacgctcgatag

SEQ ID NO: 59454 - DNA, 741 bp, Artificial Sequence
  derived and/or modified sequence
atgagctgggccgccgtgctggccgtggccgccgccagattcggccacttctggggctgcagatggcccggccccatggcccagggctgggccggcttcagcgaggaggagctgagaagactgaagcagaccaaggaccccttcgagccccagagaagactgcccgccaagaagagcagacagcagctgcagagagagaaggccctggtggagcagagccagaagctgggcctgcaggacggcagcaccagcctgctgcccgagcagctgctgagcgcccccaagcagagagtgaacgtgcagaagccccccttcagcagccccaccctgcccagccacttcaccctgaccagccccgtgggcgacggccagccccagggcatcgagagccagcccaaggagctgggcctggagaacagccacgacggccacaacaacgtggagatcctgccccccaagcccgactgcaagctggagaagaagaaggtggagctgcaggagaagagcagatgggaggtgctgcagcaggagcagagactgatggaggagaagaacaagagaaagaaggccctgctggccaaggccatcgccgagagaagcaagagaacccaggccgagaccatgaagctgaagagaatccagaaggagctgcaggccctggacgacatggtgagcgccgacatcggcatcctgagaaacagaatcgaccaggccagcctggactacagctacgccagatag

SEQ ID NO: 59455 - protein, 457 aa, Artificial Sequence
  derived and/or modified sequence
MYSFNTLRLYLWETIVFFSLAASKEAEAARSAPKPMSPSDFLDKLMGRTSGYDARIRPNFKGPPVNVSCNIFINSFGSIAETTMDYRVNIFLRQQWNDPRLAYNEYPDDSLDLDPSMLDSIWKPDLFFANEKGAHFHEITTDNKLLRISRNGNVLYSIRITLTLACPMDLKNFPMDVQTCIMQLESFGYTMNDLIFEWQEQGAVQVADGLTLPQFILKEEKDLRYCTKHYNTGKFTCIEARFHLERQMGYYLIQMYIPSLLIVILSWISFWINMDAAPARVGLGITTVLTMTTQSSGSRASLPKVSYVKAIDIWMAVCLLFVFSALLEYAAVNFVSRQHKELLRFRRKRRHHKSPMLNLFQEDEAGEGRFNFSAYGMGPACLQAKDGISVKGANNSNTTNPPPAPSKSPEEMRKLFIQRAKKIDKISRIGFPMAFLIFNMFYWIIYKIVRREDVHNQ

SEQ ID NO: 59456 - DNA, 1374 bp, Artificial Sequence
  derived and/or modified sequence
atgtacagttttaacactctgaggttgtacttgtgggagacgatcgtatttttttccctggccgcctccaaagaagctgaagcagcccgctctgcaccaaaacctatgtcgccctcagactttctggataagctgatgggcaggacgagcggttacgatgcgagaattcgccctaattttaaggggcctcccgttaatgtctcatgcaacattttcataaatagtttcggttccattgcagaaactaccatggactaccgcgttaacatctttttgcgccagcaatggaacgatcctagattggcctacaatgagtacccagacgacagcctggacctggacccttctatgctggattccatttggaagcctgaccttttctttgcaaacgagaaaggtgctcactttcacgaaatcacaaccgataacaagctcctgagaattagccggaatggcaacgtgctgtattcaatccggatcacactaaccctggcttgtccaatggatctgaagaattttcccatggacgtacaaacatgcattatgcaacttgaatcgtttggctacactatgaacgatttaatatttgaatggcaggagcagggcgcagtgcaagtcgcagatggcctgacactgccccagttcatacttaaggaggaaaaagatctgcgatactgtaccaaacattacaataccgggaagtttacatgcattgaggcgaggtttcatcttgagaggcagatgggctattacttaattcagatgtatatcccatccttacttattgtcattctctcttggatctcattctggatcaatatggacgccgctcctgcccgagtcggcctcggaatcacaactgtcttaacgatgactacccagtcctccgggagcagggcctctttgccaaaagtgagctacgtgaaagccatcgacatatggatggctgtttgtctgctgtttgtctttagtgcattgctggagtacgctgccgtcaatttcgtgtcaagacagcacaaggagctgttgcgatttaggaggaagcggaggcatcataagagccctatgctaaacctgttccaggaggatgaggcgggagagggccgctttaacttctctgcctacggcatgggtcccgcatgtctgcaggccaaggacggaatttccgtgaagggagccaacaactcgaatacaaccaaccctcccccagcccctagcaaaagccctgaggagatgcgcaagctgtttatccaacgggccaagaagatagacaagataagccggatcggcttccccatggcattcctcatattcaatatgttttactggatcatatacaagatcgtgcggcgggaggatgtgcataatcaatag

SEQ ID NO: 59457 - DNA, 1707 bp, Artificial Sequence
  derived and/or modified sequence
caacagacacgctggagtttaacaaacagcaatactcttcgcgctcctgaaaagcaggtctggacgctctccgtggtgctgaaacgcctcgcagccgccgctgtccgtggtatctacgaccccctcgctccaatttcccctggggctctccctccgcgcccctgttccccgcctccctttaacatctggattattttttgcaatagcgctttctggttttgtaagtgccaatttgaaacatttttgcccccataactcgtggactacaaagcacaaggacctgaaaaatgtacagcttcaatactcttcgactctacctttgggagaccattgtattcttcagccttgctgcttctaaggaggctgaagctgctcgctccgcacccaagcctatgtcaccctcggatttcctggataagctaatggggagaacctccggatatgatgccaggatcaggcccaattttaaaggtcccccagtgaacgtgagctgcaacattttcatcaacagctttggttccattgctgagacaaccatggactatagggtcaacatcttcctgcggcagcaatggaacgacccccgcctggcctataatgaataccctgacgactctctggacctggacccatccatgctggactccatctggaaacctgacctgttctttgccaacgagaagggggcccacttccatgagatcaccacagacaacaaattgctaaggatctcccggaatgggaatgtcctctacagcatcagaatcaccctgacactggcctgccccatggacttgaagaatttccccatggatgtccagacatgtatcatgcaactggaaagctttggatatacgatgaatgacctcatctttgagtggcaggaacagggagccgtgcaggtagcagatggactaactctgccccagtttatcttgaaggaagagaaggacttgagatactgcaccaagcactacaacacaggtaaattcacctgcattgaggcccggttccacctggagcggcagatgggttactacctgattcagatgtatattcccagcctgctcattgtcatcctctcatggatctccttctggatcaacatggatgctgcacctgctcgtgtgggcctaggcatcaccactgtgctcaccatgaccacccagagctccggctctcgagcatctctgcccaaggtgtcctatgtgaaagccattgacatttggatggcagtttgcctgctctttgtgttctcagccctattagaatatgctgccgttaactttgtgtctcggcaacataaggagctgctccgattcaggaggaagcggagacatcacaagagccccatgttgaatctattccaggaggatgaagctggagaaggccgctttaacttctctgcctatgggatgggcccagcctgtctacaggccaaggatggcatctcagtcaagggcgccaacaacagtaacaccaccaacccccctcctgcaccatctaagtccccagaggagatgcgaaaactcttcatccagagggccaagaagatcgacaaaatatcccgcattggcttccccatggccttcctcattttcaacatgttctactggatcatctacaagattgtccgtagagaggacgtccacaaccagtgaagggtctgaaaggttgggggaggctgggagaggggaacgtgggaat

SEQ ID NO: 59458 - DNA, 1374 bp, Artificial Sequence
  derived and/or modified sequence
atgtacagcttcaacaccctgcggctgtacctgtgggagaccatcgtgttcttcagcctggccgccagcaaggaggccgaggccgcccggagcgcccccaagcccatgagccccagcgacttcctggacaagctgatgggccgcaccagcggctatgatgcccgcatccggcccaacttcaagggcccccctgtgaatgtgtcctgcaacatcttcatcaacagctttggcagcattgctgagaccaccatggactacagagtgaacatcttcctgcggcagcagtggaatgacccccggctggcctacaatgagtacccagatgacagcctggacctggaccccagcatgctggacagcatctggaagccagacctcttctttgccaatgagaagggggcccacttccacgagatcaccacagacaacaagctgctgcgcatcagcagaaatggaaatgtgctgtacagcatccgcatcaccctgaccctggcctgccccatggacctgaagaacttccccatggatgtgcagacctgcatcatgcagctggagagctttggctacaccatgaatgacctgatctttgagtggcaggagcagggcgctgtgcaggtggctgatggcctgaccctgccccagttcatcctgaaggaggagaaggacctgcgctactgcaccaagcactacaacacaggcaagttcacctgcatcgaggcccgcttccacctggagcggcagatgggctactacctgatccagatgtacatccccagcctgctgattgtcatcctgtcctggatctccttctggatcaacatggatgctgccccagcccgggtgggcctgggcatcaccaccgtgctgaccatgaccacccagagcagcggcagccgggccagcctgcccaaggtgtcctatgtgaaggccatcgacatctggatggctgtgtgcctgctgtttgtgttcagcgccctgctggagtatgctgctgtgaactttgtgtcccggcagcacaaggagctgctgcgcttccggaggaagagaagacaccacaagagccccatgctgaacctcttccaggaggatgaagctggggagggccgcttcaacttcagcgcctacggcatgggccctgcctgcctgcaggccaaggatggcatctctgtgaagggggccaacaacagcaacaccaccaaccccccaccagcccccagcaagagccctgaggagatgaggaagctgttcatccagagggccaagaagattgacaagatcagcagaattggcttccccatggccttcctgatcttcaacatgttctactggatcatctacaagatcgtgcggcgggaggatgtgcacaaccagtag

SEQ ID NO: 59459 - DNA, 1374 bp, Artificial Sequence
  derived and/or modified sequence
atgtacagcttcaacaccctgcggctgtacctgtgggagaccatcgtcttcttcagcctggccgcctcgaaggaagctgaagccgccagaagcgcccctaaacctatgtccccatcagattttcttgataagttgatgggtcggacctccggttacgatgcacgcattaggcccaacttcaagggcccccccgttaacgtgtcttgcaatattttcatcaactccttcggctcaattgccgagacaactatggactaccgagtcaacattttcctccgtcagcaatggaacgatcctcggcttgcctacaatgaatatcccgatgacagtctggacctcgacccgtcaatgctcgacagcatttggaaacctgacctatttttcgccaacgagaagggggcccacttccatgagataactaccgataacaaactgctgcggatctccaggaatggcaacgtactctattcaattcgcatcactctgactctggcatgccccatggatctgaaaaattttcctatggacgtccagacctgtattatgcaacttgaaagcttcggatacacaatgaacgatctgatttttgaatggcaggaacagggtgcggtgcaggtagctgacgggcttaccctgcctcagtttattctcaaagaggagaaggatctgcgctattgcacgaagcactacaacaccggcaaatttacttgcatagaagcccgcttccacctcgagcgtcagatgggttattatctgatacagatgtatatcccttctctgttgatcgtgattctgagctggattagcttttggatcaacatggatgccgcacctgctagagtgggcctcggcataacaaccgttctgaccatgacgacacagtctagtggaagtcgggcgtcactgcccaaagtgagctacgttaaagccattgatatctggatggctgtatgcctcttgttcgttttctcagcattgttagaatacgccgccgtaaatttcgtttcccggcaacacaaggagctgttgcgattccggcgcaagaggaggcaccataagtcaccaatgctgaacctgttccaggaggacgaggccggggaagggcgatttaatttctctgcatatggcatgggacctgcatgtcttcaagccaaagatggtatatcagttaaaggagccaataattcaaatacgaccaatcctcctcccgccccgtccaaaagtcccgaggaaatgagaaaactgttcatacagcgcgctaagaagattgacaaaatctccagaattgggttcccaatggcttttctgatttttaacatgttctactggatcatctacaagattgtgcgcagggaagatgtacacaaccagtag

SEQ ID NO: 59460 - DNA, 1374 bp, Artificial Sequence
  derived and/or modified sequence
atgtactctttcaacaccttaaggctctacctatgggaaactattgtgttcttttctctcgctgccagtaaggaggccgaggctgctcggtcagcccctaagcctatgagcccctctgacttcctcgacaagctcatgggccgaacgagcggctacgacgcacgcatacgacctaactttaaggggcctcctgtgaatgtgtcttgtaatatcttcatcaacagtttcggcagcattgccgagacaacgatggattatcgagtcaacatcttcctgagacaacagtggaatgacccgcgattggcttacaacgagtatccagacgactcgctcgatttagatccatctatgctggattctatttggaagcctgacctgttctttgccaatgaaaagggggcacacttccatgagatcacaaccgacaataagttattgaggataagcagaaacggtaatgttttgtactccatccgcattaccctcaccttggcgtgcccgatggatcttaagaatttcccaatggacgtgcaaacatgcataatgcagcttgagagctttgggtatacgatgaacgacttgatattcgaatggcaagagcagggtgcggtccaggtggccgacggactgacactgccccaatttattctgaaggaggagaaagacctccggtactgtacaaaacactacaataccggcaaatttacttgcattgaagctcgcttccaccttgagagacaaatgggatactacctgatccaaatgtatataccaagcctgctaattgtaatactaagctggatctctttttggattaatatggacgcagcccctgcgcgtgtaggattgggaatcacgacagtgctgacgatgaccacacagagtagcgggtcacgggcatcccttcccaaggttagttatgtgaaggccatagatatttggatggcagtgtgccttctcttcgtttttagtgcactgctcgagtatgcagcagtgaatttcgtgtcccgccagcacaaggagctgttgcgatttcgacgaaagcggcgacaccataaatctcccatgctgaatctattccaggaagacgaagccggagaagggcgtttcaacttctctgcatacggtatgggaccggcatgtctccaggccaaggatggcatctccgtcaagggagcgaacaactccaacaccacaaatccccctccggctccatccaagtccccagaggagatgcggaaactgttcattcagagggctaagaaaattgacaagattagtcggataggtttcccaatggcgtttctcattttcaacatgttttattggattatctacaagattgtgcgtcgggaagatgtacacaatcagtag

SEQ ID NO: 59461 - DNA, 1374 bp, Artificial Sequence
  derived and/or modified sequence
atgtactctttcaataccctgagactatacctgtgggagactatcgtttttttttccctcgcagccagcaaggaggccgaagctgcgagatcagccccaaagcctatgagtccctcagacttcttggacaagctcatgggacgcacctcaggttatgatgcaaggattcgccctaattttaaaggcccaccggttaatgtctcatgtaatattttcatcaactcattcggatctatcgcagaaacgacaatggattatagagtcaacatcttcttacgccaacagtggaacgatcccaggcttgcttacaatgaatatccagacgactctcttgacctagacccttctatgttagattcaatttggaagcccgacttgttttttgctaatgaaaagggtgctcacttccacgaaatcacaaccgataacaagttgttgcgtatatcccgaaatggcaacgtgctctactccattcggatcacattaactctggcctgtcctatggatttgaagaactttccgatggacgtgcaaacttgcatcatgcagttggagagcttcggctacactatgaacgaccttatctttgagtggcaggagcagggggctgtgcaggttgccgatggtttgaccctaccacaatttatactcaaagaagaaaaagatcttaggtactgtacgaagcattacaacaccggcaagttcacttgtatcgaagctagattccatctcgaacgacaaatgggttactatttgatccaaatgtacatcccttcactccttatcgtgattctgtcctggatctcattttggatcaatatggacgccgcacccgcgcgggtgggactgggtatcaccactgttctcacaatgacgacccagagcagcggctcccgtgcttcccttcctaaagtctcctacgtcaaagctatcgatatttggatggctgtatgccttctgtttgtgttctccgccctcctcgagtacgcagccgtgaacttcgtttctaggcaacacaaagagttgctgcgcttcagacgtaagaggaggcaccacaaatcgccaatgctcaatctctttcaggaagacgaggctggagagggccgctttaatttttcagcatacggcatgggacctgcctgcttgcaggcgaaagatggaattagcgtcaaaggcgcaaataacagcaatacaacaaacccgccccccgccccttctaaaagtcccgaggaaatgaggaagttattcatccagcgggcaaaaaagatagataagatctcaagaattgggttccctatggcgtttctgatcttcaatatgttctattggattatttacaaaattgttagaagagaagacgtccacaaccagtag

SEQ ID NO: 59462 - DNA, 1374 bp, Artificial Sequence
  derived and/or modified sequence
atgtacagcttcaacactcttcgcttatatctatgggagactatagtctttttttctctggctgcaagcaaggaggccgaggccgcaagatcggcacctaaaccaatgtcaccctctgacttcctagacaaacttatggggcgcacatctggctacgatgcccgaattagacccaacttcaagggacctcctgtgaacgtaagctgcaacatctttattaactcctttggtagtattgcagagaccactatggactatcgtgtcaacatttttcttagacagcagtggaatgatcctcgccttgcttacaacgaatatcccgatgattcacttgacctagacccatccatgttagattccatttggaagccggacctcttcttcgctaatgagaaaggcgcacattttcatgaaattactactgataataagcttttgagaatttcgcgaaatgggaacgtactgtattctatcagaattaccttaaccctcgcatgtccaatggatctcaagaacttcccgatggacgttcaaacctgtatcatgcagctagaatcattcggctatactatgaatgatctcattttcgaatggcaggagcaaggcgcagtgcaggtggccgacggacttacattgccccagtttattctgaaggaggagaaggatttgcgttactgtaccaaacattataacaccgggaaattcacatgtatagaagccagattccatctagagcggcaaatgggctattatttgatccagatgtatataccgtcattattgattgtcattctcagctggatttctttctggatcaacatggacgcagcgcctgcccgggtgggtctcggtattacaacagttctgacaatgaccactcagagtagcggttccagggccagcctgcctaaagtctcatatgttaaggcgatagacatctggatggcagtctgtttactgttcgtgttcagcgcattattggaatacgcggcagtcaatttcgtgagcagacaacacaaagaactactacgctttcggcgcaaacgcagacatcacaagagtccaatgctcaacttattccaagaagatgaggccggagagggacggtttaatttttctgcctacggaatgggccccgcttgccttcaagcaaaggacggcattagtgttaaaggtgctaacaacagcaatacaactaaccccccccctgctccttcaaagagccccgaggagatgcgcaaactctttattcagcgtgccaaaaaaatcgacaagatctctagaattggctttccaatggcttttctaatatttaacatgttttattggatcatttacaaaatcgtacgacgcgaagatgtacacaaccaatag

SEQ ID NO: 59463 - DNA, 1374 bp, Artificial Sequence
  derived and/or modified sequence
atgtacagcttcaacaccctgagactgtacctgtgggagaccatcgtgttcttcagcctggccgccagcaaggaggccgaggccgccagaagcgcccccaagcccatgagccccagcgacttcctggacaagctgatgggcagaaccagcggctacgacgccagaatcagacccaacttcaagggcccccccgtgaacgtgagctgcaacatcttcatcaacagcttcggcagcatcgccgagaccaccatggactacagagtgaacatcttcctgagacagcagtggaacgaccccagactggcctacaacgagtaccccgacgacagcctggacctggaccccagcatgctggacagcatctggaagcccgacctgttcttcgccaacgagaagggcgcccacttccacgagatcaccaccgacaacaagctgctgagaatcagcagaaacggcaacgtgctgtacagcatcagaatcaccctgaccctggcctgccccatggacctgaagaacttccccatggacgtgcagacctgcatcatgcagctggagagcttcggctacaccatgaacgacctgatcttcgagtggcaggagcagggcgccgtgcaggtggccgacggcctgaccctgccccagttcatcctgaaggaggagaaggacctgagatactgcaccaagcactacaacaccggcaagttcacctgcatcgaggccagattccacctggagagacagatgggctactacctgatccagatgtacatccccagcctgctgatcgtgatcctgagctggatcagcttctggatcaacatggacgccgcccccgccagagtgggcctgggcatcaccaccgtgctgaccatgaccacccagagcagcggcagcagagccagcctgcccaaggtgagctacgtgaaggccatcgacatctggatggccgtgtgcctgctgttcgtgttcagcgccctgctggagtacgccgccgtgaacttcgtgagcagacagcacaaggagctgctgagattcagaagaaagagaagacaccacaagagccccatgctgaacctgttccaggaggacgaggccggcgagggcagattcaacttcagcgcctacggcatgggccccgcctgcctgcaggccaaggacggcatcagcgtgaagggcgccaacaacagcaacaccaccaaccccccccccgcccccagcaagagccccgaggagatgagaaagctgttcatccagagagccaagaagatcgacaagatcagcagaatcggcttccccatggccttcctgatcttcaacatgttctactggatcatctacaagatcgtgagaagagaggacgtgcacaaccagtag

SEQ ID NO: 59464 - protein, 275 aa, Artificial Sequence
  derived and/or modified sequence
MAAVDSFYLLYREIARSCNCYMEALALVGAWYTARKSITVICDFYSLIRLHFIPRLGSRADLIKQYGRWAVVSGATDGIGKAYAEELASRGLNIILISRNEEKLQYFTQLSEDKLWDIINVNIAAASLMVHVVLPGMVERKKGAIVTISSGSCCKPTPQLAAFSASKAYLDHFSRALQYEYASKGIFVQSLIPFYVATSMTAPSNFLHRCSWLVPSPKVYAHHAVSTLGISKRTTGYWSHSIQFLFAQYMPEWLWVWGANILNRSLRKEALSCTA

SEQ ID NO: 59465 - DNA, 828 bp, Artificial Sequence
  derived and/or modified sequence
atggccgccgtggacagcttctacctgctgtacagagagatcgccagaagctgcaactgctacatggaggccctggccctggtgggcgcctggtacaccgccagaaagagcatcaccgtgatctgcgacttctacagcctgatcagactgcacttcatccccagactgggcagcagagccgacctgatcaagcagtacggcagatgggccgtggtgagcggcgccaccgacggcatcggcaaggcctacgccgaggagctggccagcagaggcctgaacatcatcctgatcagcagaaacgaggagaagctgcagtacttcacccagctgagcgaggacaagctgtgggacatcatcaacgtgaacatcgccgccgccagcctgatggtgcacgtggtgctgcccggcatggtggagagaaagaagggcgccatcgtgaccatcagcagcggcagctgctgcaagcccaccccccagctggccgccttcagcgccagcaaggcctacctggaccacttcagcagagccctgcagtacgagtacgccagcaagggcatcttcgtgcagagcctgatccccttctacgtggccaccagcatgaccgcccccagcaacttcctgcacagatgcagctggctggtgcccagccccaaggtgtacgcccaccacgccgtgagcaccctgggcatcagcaagagaaccaccggctactggagccacagcatccagttcctgttcgcccagtacatgcccgagtggctgtgggtgtggggcgccaacatcctgaacagaagcctgagaaaggaggccctgagctgcaccgcctag

SEQ ID NO: 59466 - DNA, 828 bp, Artificial Sequence
  derived and/or modified sequence
atggctgcagtggattccttctatctcctctatcgagagatagcccgatcttgcaactgctatatggaagctctggcccttgtaggagcatggtacactgcccgcaaatccatcacggtgatctgtgacttctacagtctaattagactgcattttatcccacgcttggggtctcgagcagatttaatcaaacagtatggacggtgggccgtggtgagtggcgcaaccgatggaataggaaaagcctatgccgaggagctggctagtagaggccttaatatcattttgatttccaggaacgaggagaaactgcagtatttcactcaactaagcgaggataaactttgggatatcatcaacgtcaatatcgcagctgcctcacttatggtgcacgtagttttgccgggaatggttgaacgcaagaagggggctatagtgactatatcttctggcagctgctgtaaacccactccccagctcgcagcctttagtgctagcaaagcctatctagaccacttttcccgggccctgcagtatgagtatgcgtcaaaagggatctttgtgcagtccttgatcccattctatgtggccacctctatgacggcacctagcaatttcctgcaccggtgcagctggttagttccctctcctaaagtttacgcacaccatgcagtgtccacactcggtatctcaaaaaggactactggttactggtctcattccattcagtttctgttcgctcaatacatgcccgagtggctgtgggtgtggggggcaaatatcctgaaccggagtctacgcaaagaagctctgtcgtgcacggcctag

SEQ ID NO: 59467 - DNA, 3503 bp, Artificial Sequence
  derived and/or modified sequence
ggcgcgtacgcgggtcacgtgagggcgcggcgcggcagcagctccggcggccgagacgggggcggcggccgcgcgggtctggcgggaccggtttggaagactttgccggcctgcagattggccttaagagaaggacggagccacatactgctgacggcccagaactggcagagagaaggttgccatggctgctgttgacagtttctacctcttgtacagggaaatcgccaggtcttgcaattgctatatggaagctctagctttggttggagcctggtatacggccagaaaaagcatcactgtcatctgtgacttttacagcctgatcaggctgcattttatcccccgcctggggagcagagcagacttgatcaagcagtatggaagatgggccgttgtcagcggtgcaacagatgggattggaaaagcctacgctgaagagttagcaagccgaggtctcaatataatcctgattagtcggaacgaggagaagttgcagtatttcactcagctgtccgaggacaagctctgggacatcataaatgtgaacattgccgccgctagtttgatggtccatgttgtgttaccgggaatggtggagagaaagaaaggtgccatcgtcacgatctcttctggctcctgctgcaaacccactcctcagctggctgcattttctgcttctaaggcttatttagaccacttcagcagagccttgcaatatgaatatgcctctaaaggaatctttgtacagagtctaatccctttctatgtagccaccagcatgacagcacccagcaactttctgcacaggtgctcgtggttggtgccttcgccaaaagtctatgcacatcatgctgtttctactcttgggatttccaaaaggaccacaggatattggtcccattctattcagtttctttttgcacagtatatgcctgaatggctctgggtgtggggagcaaatattctcaaccgttcactacgtaaggaagccttatcctgcacagcctgagtctggatggccacttgagaagttttgccaactcctgggaacctcgatattctgacatttggaaaaacacatttaatttatctcctgtgtttcattgctgattattcagcatactgttgattcgtcatttgcaaaacacacataataccgtcagagtgctgtgaaaaaccttaagggtgtgtggatggcacaggatcaataatgcctgaggctgattgacgacatctacatttcagtgctttttccctaagctgtttgaaagttacgcttttctgttgttctagagccacagcagtctaatattgaaatataatatgatttgtcaggtcttataatttcagatgttgttttttaagggaaattgaccatttcactagaggagttgtgctggtttttaaatgtgcatcaagaaagactactgaaaagtattattttgtaactaagattgctggtactattaggaaaaatctgtgtgtattgtatagctctagctgtttgactatctgtaatgaaaatgctgcacttcaactggtatttcattagagaaccgtgtgtgtgcgtgtgtgtggtgcctttgagcaactttatttatggttaccatatttttaaaaagattttttgtcagggtgacttaacatggactcttatagggtattaaaacaatctagattattccttttcatcctaaataagcctaccaaatttcatgctgttggtttgccatgaatgatattacttcctacattatatttgtgttttttcaaatctgctatggaatgaacttattcctagatttggatatgtaagagaaacctgcagtcatcttttgatttataaggcaattcttgtggataaatagtgatttctcagcctctgacccattttataactgaaatttagccctttagagcttgttatatctggttttcctacgtttttctatgtaatattattccattccagtagcattattgatagaaatagtaagtatttatggaatagtaaaatatggacaaattacgtgtgtgacatatctgtcaatataagttagaagcttattcttggtttgtgtaatgaatttatgtattgtagtgaatacctttactggtgtgaagataattatgcacaaaccctcacaatacgcgttaacattgaaacctgtgaaatgtccttagtttgggtcatataaagccaaccatttttgaggaccatgtacctagtgctttgaaaactctaagtcactatatgaatatgacaatatgtgcacatttaaaattcagagctcggcattgtgatactgatgcagaagctagtagattggttaaaagtctggacttctgtggcatttttttcgtgacgtgataatctatcataagcagacctaagcacagttttatgaacacaattttgcccatgacattgcctacaggatttccagatgtgacttgcactcagaagatcagtggtcaacttcagaagctcttccacgcttagatcatgtcttcagaacttagatgtgaaaatctacacactgggagatgctgtgagccccaaggttttgatggagtttgcttggaatcctcttgacttcatgccacattgacgtgaactttgatgtataataagcagcagcaacttcatgtgaaaatatggtcaggtagttatatgtaaggttacgtggtccagtaatgtcttagattgataaattaggtatggaatccatcagtgttacgtgatgagaataggtgaacacaccttgtcagtgatgatgtaaacttctctccttggcaggacatgggcaaacatgctgattggtgcaaatgtggtgccgagctgtccatagctgcagtgaaagatgaagagcaagaccttctctaggttttctagctttcattaaatgtatttttttccccagagctaatttgaaagttgattggaccactgtggatggggtgtcattaagaatgtgggaaataggggccgagtgcggtggctcacacctgtaatcccagcagtttggaaggccagggcaggtggatcgcttgatcccaggaggtcgagaccagcctggggaacacatcctgtctctacaaaaaatacaaaaattagccaggcagggtggtgcatgcctgtagtcccagctacttgggaggctgaggcaggagaattttttgagcccaggatgcagaggttgaagtgagccaagatcgtgccactgcactccagccttgagacagagcgagaccctgtctcaaaaaaaaaaaaagaacgtgggaaatatgaacctttgaaagttaatctgtgaattgaaagtttaacaataaaagtagttgtttgtttcctttggaagagttttgttccagatgtttgtaatttggttgtttgtaatttggaatgagagaatttttttttcttaggagtgattgcaagaaattaacatgaacaacagtggtcataactgattaaaagctgacacgtcagtaacaaaatt

SEQ ID NO: 59468 - DNA, 828 bp, Artificial Sequence
  derived and/or modified sequence
atggctgctgtggacagcttctacctgctgtaccgggagatcgcccggagctgcaactgctacatggaggccctggccctggtgggcgcctggtacacagccaggaagagcatcaccgtcatctgtgacttctacagcctcatccggctgcacttcatcccccggctgggcagcagagctgacctgatcaagcagtatggccgctgggccgtggtgtctggggccacagatggcatcggcaaggcctatgcagaggagctggccagccggggcctgaacatcatcctgatcagcagaaatgaggagaagctgcagtacttcacccagctgtctgaggacaagctgtgggacatcatcaacgtgaacattgctgctgccagcctgatggtgcacgtggtgctgcccggcatggtggagaggaagaagggggccatcgtgaccatcagcagcggcagctgctgcaagcccaccccccagctggccgccttcagcgccagcaaggcctacctggaccacttcagccgggccctgcagtatgaatatgccagcaagggcatctttgtgcagagcctcatccccttctacgtggccacctccatgacagcccccagcaacttcctgcaccgctgctcctggctggtgcccagccccaaggtgtatgcccaccacgctgtgtccaccctgggcatcagcaagaggaccaccggctactggagccacagcatccagttcctgtttgcccagtacatgcctgagtggctgtgggtgtggggcgccaacatcctgaacagaagcctgaggaaggaggccctgagctgcacagcctag

SEQ ID NO: 59469 - DNA, 828 bp, Artificial Sequence
  derived and/or modified sequence
atggccgccgtggacagcttctacctgctgtaccgggagatcgccaggagttgtaactgttatatggaggccctcgccctggtgggagcttggtacacggcaagaaagtccatcactgttatatgcgatttttatagtctgattcggctccattttatacctcggctcggcagccgggctgatcttatcaaacagtatggcaggtgggccgtagtgtcaggcgctacggacggaataggaaaagcatatgcggaggagctcgcttcccgaggactcaacatcatcctcatcagcagaaatgaggaaaagttacagtatttcacgcagctgtccgaagacaagctctgggatatcattaatgtaaacatcgccgccgcctctttgatggtccatgttgtcctaccgggaatggtagagagaaaaaagggcgccatagtgacaatctcatctggaagctgttgcaagcccacccctcagctggctgcattctcagctagtaaggcctacctcgaccacttcagccgagcacttcaatatgaatacgcttcaaaaggtatcttcgtgcagagcctgatcccgttttacgtcgccacctctatgaccgccccatctaacttcctgcaccgctgcagctggcttgtcccttcccccaaagtgtatgcacaccacgcagtgtctacgctcggcatatccaaaaggaccaccggctattggtcccatagcatccaatttttattcgcccagtatatgccagagtggttgtgggtctggggagcgaacatcctaaacaggtccttgcggaaagaagcactctcttgcacagcctag

SEQ ID NO: 59470 - DNA, 828 bp, Artificial Sequence
  derived and/or modified sequence
atggcagccgtggatagtttttatctgttatacagagagatcgctcgaagttgcaactgctatatggaagccttagctttggtcggagcctggtacactgcaagaaaatccatcaccgtcatatgcgacttttactccctgattcgactccactttattccacgcctgggcagccgagccgacctgataaaacagtacgggaggtgggccgtcgtgtcaggcgctacggacggcatcggaaaggcatacgctgaagaactagcaagtcgcggacttaatattattttgatctctaggaacgaagaaaagctccagtactttactcagctctcagaggataagttatgggacatcattaatgtgaatatagcggctgctagcttgatggtgcacgtggtactgccgggaatggtggaacggaagaagggtgctatagtcaccatctccagtggttcctgctgcaagcccaccccccaactggcagctttcagcgccagtaaggcttacttggatcatttctcccgggctctgcagtacgagtacgcctcgaagggcatcttcgtgcagtccctcatccctttctacgttgcgacctctatgaccgctccatcaaatttccttcatcggtgctcctggcttgtacccagcccgaaagtgtacgcacaccatgctgtgtccaccttgggcatctcaaagcggacaaccgggtactggtcgcacagcatccagtttctcttcgctcaatacatgcctgaatggctttgggtgtggggggctaatatccttaatcggagcctccgcaaggaggccctttcatgtacggcttag

SEQ ID NO: 59471 - protein, 131 aa, Artificial Sequence
  derived and/or modified sequence
MEICADPQFIIGGATRTDICQGALGDCWLLAAIASLTLNEEILARVVPLNQSFQENYAGIFHFQFWQYGEWVEVVVDDRLPTKDGELLFVHSAEGSEFWSALLEKAYAKINGCYEALSGGATTEGFEDFTG

SEQ ID NO: 59472 - DNA, 1869 bp, Artificial Sequence
  derived and/or modified sequence
atggaaatctgcgccgacccccagtttatcatcgggggggccactagaacagacatttgccagggcgccctgggtgactgctggctgcttgcagcgatcgccagcctgaccctgaacgaggagatcctcgcaagagtcgtcccgctaaaccagtctttccaggaaaactatgccgggatcttccatttccagttctggcagtacggcgagtgggttgaggtggtagtggacgaccgactgcccaccaaagacggggaactgctgttcgttcacagcgcggaaggctctgaattctggagcgcgctgctggaaaaagcatatgccaaaatcaatgggtgttatgaggcactgagcgggggcgctacaaccgaaggcttcgaagacttcacggggggcatcgccgaatggtacgaactgaagaagccacctcccaatctcttcaagatcatccagaaggccctgcagaaggggtccctgttaggctgttcaattgatataaccagtgccgcggactcggaggccataacatttcaaaaactggtcaaaggacacgcatattcggtgactggcgctgaggaggtggagtctaacggaagcctccagaagcttattagaatcaggaatccctggggggaagtagagtggaccggccgttggaacgataattgtccatcatggaacaccatagaccccgaggaacgcgaacggctcactcggaggcacgaggacggcgagttttggatgtctttctcggacttcctgcggcattactcaaggctggagatctgtaaccttacccctgacaccctcaccagtgatacctacaagaaatggaaattaacaaagatggacggcaactggaggcggggttcaactgccggagggtgcaggaactacccaaatacattttggatgaatccccagtatctgataaagctcgaggaggaagacgaggatgaagaagacggcgagtccggctgcacatttctggtgggattaatccagaagcatcgaaggcgtcagaggaaaatgggggaggatatgcatactattggcttcggaatttacgaggtcccagaagagctttctggacagaccaatatacatcttagcaaaaactttttcctgaccaaccgagctagggaaaggtcagacacgtttatcaacttgcgcgaagtgttgaatcgtttcaagttgcccccaggggaatatatcctggtccccagcacatttgagcctaacaaggatggcgacttttgcattagagtgttctccgagaaaaaggcggactaccaggcagtggatgatgagatcgaagccaacttggaggaatttgatataagcgaagacgacatagatgatgggttcagacggttgtttgctcagctggcaggagaggacgcagagatctctgccttcgagctgcagacaatcctccgtagagtcttagcgaagagacaggatatcaagagcgatggcttctctatcgaaacctgcaaaataatggtggacatgctagattccgatggtagcgggaaattaggactgaaggaattctacatactgtggaccaagattcagaaataccagaagatctacagagagatcgatgtcgatcggtctgggaccatgaacagctacgagatgcgaaaggccctggaggaggcaggtttcaagatgccttgccagttgcatcaggtgatcgtcgctcgcttcgccgacgatcaactgattatagattttgataatttcgtgaggtgcttggtccgactggagacactcttcaagattttcaagcagctggaccccgagaatactgggacaattgaattagacctcatatcatggctgtgctttagtgtcttgtag

SEQ ID NO: 59473 - DNA, 1869 bp, Artificial Sequence
  derived and/or modified sequence
atggagatctgtgccgacccccagttcatcattggaggagccaccaggacagacatctgccagggcgccctgggggactgctggctgctggccgccatcgccagcctgaccctgaatgaggagatcctggcccgggtggtgcccctgaaccagagcttccaggagaactatgccggcatcttccacttccagttctggcagtacggggagtgggtggaggtggtggtggatgaccggctgcccaccaaggatggagagctgctgtttgtgcacagcgctgagggcagcgagttctggagcgccctgctggagaaggcctatgccaagatcaatggctgctatgaggccctgagcggcggggccaccacagagggctttgaggacttcaccggcggcattgctgagtggtatgagctgaagaagcccccacccaacctcttcaagatcatccagaaggccctgcagaagggcagcctgctgggctgcagcattgacatcaccagcgctgctgacagcgaggccatcaccttccagaagctggtgaagggccacgcctacagcgtgactggagctgaggaggtggagagcaatggcagcctgcagaagctgatccgcatccggaacccctggggcgaggtggagtggacaggccgctggaatgacaactgccccagctggaacaccattgatcctgaggagcgggagcggctgaccaggagacatgaagatggagagttctggatgtccttcagtgacttcctgcggcactacagccggctggagatctgcaacctgaccccagacaccctgaccagtgacacctacaagaagtggaagctgaccaagatggatggcaactggaggcggggcagcacagctgggggctgcaggaactaccccaacaccttctggatgaacccccagtacctgatcaagctggaggaggaggatgaagatgaagaagatggagagagcggctgcaccttcctggtgggcctcatccagaagcacagaagacggcagaggaagatgggagaggacatgcacaccatcggcttcggcatctatgaggtgcctgaggagctgagcggccagaccaacatccacctgagcaagaacttcttcctgaccaacagagcccgggagaggagtgacaccttcatcaacctgcgggaggtgctgaaccgcttcaagctgcccccaggagagtacatcctggtgcccagcacctttgagcccaacaaggatggagacttctgcatccgggtcttcagcgagaagaaggctgactaccaggccgtggatgatgaaattgaggccaacctggaggagtttgacatcagtgaagatgacattgatgatggcttcagaagactctttgcccagctggccggggaggatgctgagatcagcgcctttgagctgcagaccatcctgcggcgggtgctggccaagaggcaggacatcaagagtgatggcttcagcattgagacctgcaagatcatggtggacatgctggacagtgatggcagcggcaagctgggcctgaaggagttctacatcctgtggaccaagatccagaagtaccagaagatctaccgggagattgatgtggacagaagtggcaccatgaacagctatgagatgaggaaggccctggaggaggccggcttcaagatgccctgccagctgcaccaggtgattgtggccaggtttgctgatgaccagctgatcatcgactttgacaactttgtgcgctgcctggtgcggctggagaccctcttcaagatcttcaagcagctggaccctgagaacacaggcaccatcgagctggacctgatctcctggctgtgcttctctgtgctgtag

SEQ ID NO: 59474 - DNA, 1869 bp, Artificial Sequence
  derived and/or modified sequence
atggagatctgcgccgacccccagttcatcatcggcggcgccacccggaccgacatatgtcaaggtgctttgggggattgttggctgctggcagctatcgcttccctgacactgaacgaggaaatcctggctagagtggtgcccctgaatcagagcttccaggaaaattacgctggcatttttcactttcagttttggcaatacggagagtgggttgaggtggtcgtggacgaccgcttgcccacgaaggatggagaattactgttcgttcactcagcggaggggtcggagttctggagtgcgctgcttgaaaaagcctacgcaaagattaatggttgctatgaagccctaagtggaggcgcgaccaccgaaggctttgaagatttcacagggggcatcgcagagtggtacgagctcaagaagccccccccaaaccttttcaaaataatccagaaggcactccagaagggtagcctgctgggatgctccattgatatcacctccgcagcggactccgaagctataaccttccagaaactggtgaaaggacatgcctatagcgttaccggggctgaggaagttgaatcaaacggttcactccaaaagttgatccgtatcagaaacccctggggtgaggtggagtggactgggaggtggaacgataactgcccatcttggaacacaatcgaccccgaggaacgcgagcgactaacgcgccgtcacgaagacggtgaattttggatgtcattttccgattttctgcgacactactcccgcctcgaaatctgcaatctgactcctgacactctcacgagtgatacatacaagaaatggaagttgaccaagatggacggcaactggcgccggggctcgaccgcaggaggctgcagaaattatccaaacaccttttggatgaacccccagtacttaataaaattggaggaggaggatgaagatgaagaggacggggaatctggctgtacattcctcgtgggcctcattcagaaacacaggcggagacaaaggaaaatgggagaggacatgcatacaatcggatttggaatatatgaggtacccgaagaattgtctgggcagactaacatccatctgtcgaaaaacttctttctgacaaatagggctcgagagcggtctgacacgtttattaatttgcgtgaggtgttgaatcgattcaagttgcctccaggcgagtatattctcgttccatctacctttgagcctaacaaagatggcgatttttgcattcgggtgttctccgagaagaaggccgattaccaggcagtagacgacgaaattgaggccaatttagaggagttcgacatttctgaagatgatatcgatgatggatttcggcgcctgtttgctcagttggccggggaggacgctgagatctccgccttcgaattgcagaccattttaagacgtgtcctagcaaaaagacaagatattaagtctgacggattttccatcgagacctgcaaaattatggtggatatgttggacagtgatggaagcggcaagctgggccttaaagagttctacatcctgtggactaaaatacagaaataccagaaaatttacagggaaatagacgtggaccggagcgggacaatgaatagctacgaaatgcgcaaagccttagaggaggccgggttcaagatgccttgccagttacatcaggttattgtggcccggtttgctgatgaccagctgatcattgattttgacaactttgtgagatgccttgttcgcctcgagaccctgttcaagatctttaagcagctggatcccgaaaatacgggtaccatcgaactcgatcttatctcctggttgtgcttcagcgtcctgtag

SEQ ID NO: 59475 - DNA, 1869 bp, Artificial Sequence
  derived and/or modified sequence
atggagatctgcgccgacccgcagttcattattggaggagcaacgaggacggatatttgtcaaggcgcactcggcgattgttggctcctggccgcaatcgcctccctgaccctgaacgaagagattctagctcgcgtagtccccttaaaccagtcttttcaagaaaattacgcagggatcttccacttccagttctggcagtacggggaatgggttgaggtagtcgtggatgatcgactgcctaccaaggacggagagttactattcgtccatagcgctgaaggctctgaattttggtcagctctcttggagaaagcttatgccaagatcaacggctgctacgaggcactctctggaggggctacaaccgaggggtttgaagacttcacaggcggaattgccgaatggtatgaactaaagaagcctccacccaacttattcaaaataatacagaaggccctccaaaaggggtctctgctggggtgttccatagatatcactagcgccgcagatagcgaagcaattactttccagaagttggtcaagggccacgcctacagcgtaactggcgcagaggaggtggaaagtaacgggagtctgcagaagttgattagaatccgaaatccctggggtgaagtcgagtggacaggaagatggaatgataactgtcccagctggaacactattgaccctgaggagcgcgagcggttgacaaggcggcatgaggatggagagttctggatgagtttcagcgactttctgaggcattattcccggcttgaaatctgcaatctgactcccgatacccttacgtccgatacatacaagaagtggaagctgactaagatggacggcaactggcggagaggctccaccgccggtggctgtagaaactaccccaacactttttggatgaaccctcagtacctaatcaagttggaagaagaagatgaggacgaggaggatggcgagagcgggtgtaccttcctggtaggactaatccagaaacacagacggaggcagaggaaaatgggtgaagacatgcatacaatcggattcggcatttatgaagtacctgaagaactcagtggccaaactaacattcatctctccaaaaatttctttctcacaaatcgggctcgagagagatcggacacattcattaacctgcgcgaagttctcaatcggtttaagctaccaccgggtgaatacatcctcgtgccatccacattcgagcccaataaggacggcgacttttgtatccgagttttcagtgaaaagaaggcggactaccaggcagtggacgacgagatcgaggctaatctagaagaattcgacatcagcgaggacgatattgacgatggctttaggaggctgtttgcccagctggccggagaagacgccgaaatcagcgctttcgaattgcaaacaattctgaggcgcgtattggccaaaaggcaagatatcaaaagtgacggattttccattgagacctgcaaaatcatggtagatatgctggactcagacgggagtggcaaactgggactcaaggaattctacatcctttggaccaaaattcaaaagtatcaaaaaatttatcgagaaatcgacgtggacaggtctgggactatgaacagctacgagatgcggaaagctttggaggaggcaggttttaaaatgccctgtcaactccatcaggtgattgtggcgagattcgcagacgaccagctgatcatcgacttcgataacttcgtccgctgcttagtaagactggagacattgtttaaaatatttaagcagctggaccccgagaatacgggaactatagagctggatctaatttcttggctctgtttcagcgtgctttag

SEQ ID NO: 59476 - DNA, 3264 bp, Artificial Sequence
  derived and/or modified sequence
actcagactctgatggctctgtagctaactggcccatcctcagagactaacgcaaaggaacgaatttccaggatgttcgactatgtggagaaaacaaaaaaaaagcaaagaaaaaaatatttttaaagaaagaaagaaggccaggtgcagtggttcacgcctgtaatcccaacactttgggaggccgaggcagacagatcacctgaggtcaggagttcaagaccagcctggccaacatggagatctgcgctgacccccagtttatcattggaggagccacccgcacagacatctgccaaggagccctgggtgactgctggctgctggcagccattgcctccctcaccttgaatgaagaaatcctggctcgagtcgtccccctaaaccagagcttccaggaaaactatgcagggatctttcacttccagttctggcaatacggcgagtgggtggaggtggtggtggatgacaggctgcccaccaaggacggggagctgctctttgtgcattcagccgaagggagcgagttctggagcgccctgctggagaaggcatacgccaagatcaacggatgctatgaagcgctatcagggggtgccaccactgagggcttcgaagacttcaccggaggcattgctgagtggtatgagttgaagaagccccctcccaacctgttcaagatcatccagaaagctctgcaaaaaggctctctccttggctgctccatcgacatcaccagcgccgcggactcggaggccatcacgtttcagaagctggtgaaggggcacgcgtactcggtcaccggagccgaggaggttgaaagtaacggaagcctacagaaactgatccgcatccgaaatccctggggagaagtggagtggacagggcggtggaatgacaactgcccaagctggaacactatagacccagaggagagggaaaggctgaccagacggcatgaagatggagaattctggatgtctttcagtgacttcctgaggcactattcccgcctggagatctgtaacctgaccccagacactctcaccagcgatacctacaagaagtggaaactcaccaaaatggatgggaactggaggcggggctccaccgcgggaggttgcaggaactacccgaacacattctggatgaaccctcagtacctgatcaagctggaggaggaggatgaggacgaggaggatggggagagcggctgcaccttcctggtggggctcattcagaagcaccgacggcggcagaggaagatgggcgaggacatgcacaccatcggctttggcatctatgaggttccagaggagttaagtgggcagaccaacatccacctcagcaaaaacttcttcctgacgaatcgcgccagggagcgctcagacaccttcatcaacctccgggaggtgctcaaccgcttcaagctgccgccaggagagtacattctcgtgccttccaccttcgaacccaacaaggatggggatttctgcatccgggtcttttctgaaaagaaagctgactaccaagctgtcgatgatgaaatcgaggccaatcttgaagagttcgacatcagcgaggatgacattgatgatggattcaggagactgtttgcccagttggcaggagaggatgcggagatctctgcctttgagctgcagaccatcctgagaagggttctagcaaagcgccaagatatcaagtcagatggcttcagcatcgagacatgcaaaattatggttgacatgctagattcggacgggagtggcaagctggggctgaaggagttctacattctctggacgaagattcaaaaataccaaaaaatttaccgagaaatcgacgttgacaggtctggtaccatgaattcctatgaaatgcggaaggcattagaagaagcaggtttcaagatgccctgtcaactccaccaagtcatcgttgctcggtttgcagatgaccagctcatcatcgattttgataattttgttcggtgtttggttcggctggaaacgctattcaagatatttaagcagctggatcccgagaatactggaacaatagagctcgaccttatctcttggctctgtttctcagtactttgaagttataactaatctgcctgaagacttctcatgatggaaaatcagccaaggactaagcttccatagaaatacactttgtatctggacctcaaaattatgggaacatttacttaaacggatgatcatagctgaaaataatgatactgtcaatttgagatagcagaagtttcacacatcaaagtaaaagatttgcatatcattatactaaatgcaaatgagtcgcttaacccttgacaaggtcaaagaaagctttaaatctgtaaatagtatacactttttacttttacacactttcctgttcatagcaatattaaatcaggaaaaaaaaatgcagggaggtatttaacagctgagcaaaaacattgagtcgctctcaaaggacacgaggcccttggcagggaatatttaaagcaacttcaagtttaaaatgcagctgttgattctaccaaacaacagtccaagattaccatttcccatgagccaactgggaaacatggtatatcatgaagtaatcttgtcaaggcatctggagagtccaggagagaagactcacctctgtcgcttgggttaaacaagagacaggttttgtagaatattgattggtaatagtaaatcgttctccttacaatcaagttcttgaccctattcggccttatacatctggtcttacaaagaccaaagggatcctgcgcttgatcaactgaaccagtatgccaaaaccaggcatccaatttgtaaaccaattatgataaaggacaaaataagctgtttgccacctcaaaactttatgaacttcaccaccactagtgtctgtccatggagttagaggggacatcacttagaagttcttatagaaaggacacaagtttgtttcctggctttaccttgggaaaatgctagcaacattatagaaattttgccttgttgccttatcttcttccaaatgtactgttaaataaaaataaagggttaccccatgcaatcacaccatgccatgttttccttcctggagggcagccccacaggacggtttatgagcacacaattatagcttgtttctactttaacaaggtatgctgcctctgtaaattcatgtattcaaaggaaaagacaccttgcctataattaaaatgtggaactataaaattttttaaaatcc

SEQ ID NO: 59477 - DNA, 1869 bp, Artificial Sequence
  derived and/or modified sequence
atggagatctgcgccgacccccagttcatcatcggcggcgccaccagaaccgacatctgccagggcgccctgggcgactgctggctgctggccgccatcgccagcctgaccctgaacgaggagatcctggccagagtggtgcccctgaaccagagcttccaggagaactacgccggcatcttccacttccagttctggcagtacggcgagtgggtggaggtggtggtggacgacagactgcccaccaaggacggcgagctgctgttcgtgcacagcgccgagggcagcgagttctggagcgccctgctggagaaggcctacgccaagatcaacggctgctacgaggccctgagcggcggcgccaccaccgagggcttcgaggacttcaccggcggcatcgccgagtggtacgagctgaagaagcccccccccaacctgttcaagatcatccagaaggccctgcagaagggcagcctgctgggctgcagcatcgacatcaccagcgccgccgacagcgaggccatcaccttccagaagctggtgaagggccacgcctacagcgtgaccggcgccgaggaggtggagagcaacggcagcctgcagaagctgatcagaatcagaaacccctggggcgaggtggagtggaccggcagatggaacgacaactgccccagctggaacaccatcgaccccgaggagagagagagactgaccagaagacacgaggacggcgagttctggatgagcttcagcgacttcctgagacactacagcagactggagatctgcaacctgacccccgacaccctgaccagcgacacctacaagaagtggaagctgaccaagatggacggcaactggagaagaggcagcaccgccggcggctgcagaaactaccccaacaccttctggatgaacccccagtacctgatcaagctggaggaggaggacgaggacgaggaggacggcgagagcggctgcaccttcctggtgggcctgatccagaagcacagaagaagacagagaaagatgggcgaggacatgcacaccatcggcttcggcatctacgaggtgcccgaggagctgagcggccagaccaacatccacctgagcaagaacttcttcctgaccaacagagccagagagagaagcgacaccttcatcaacctgagagaggtgctgaacagattcaagctgccccccggcgagtacatcctggtgcccagcaccttcgagcccaacaaggacggcgacttctgcatcagagtgttcagcgagaagaaggccgactaccaggccgtggacgacgagatcgaggccaacctggaggagttcgacatcagcgaggacgacatcgacgacggcttcagaagactgttcgcccagctggccggcgaggacgccgagatcagcgccttcgagctgcagaccatcctgagaagagtgctggccaagagacaggacatcaagagcgacggcttcagcatcgagacctgcaagatcatggtggacatgctggacagcgacggcagcggcaagctgggcctgaaggagttctacatcctgtggaccaagatccagaagtaccagaagatctacagagagatcgacgtggacagaagcggcaccatgaacagctacgagatgagaaaggccctggaggaggccggcttcaagatgccctgccagctgcaccaggtgatcgtggccagattcgccgacgaccagctgatcatcgacttcgacaacttcgtgagatgcctggtgagactggagaccctgttcaagatcttcaagcagctggaccccgagaacaccggcaccatcgagctggacctgatcagctggctgtgcttcagcgtgctgtag

SEQ ID NO: 59478 - protein, 651 aa, Artificial Sequence
  derived and/or modified sequence
MLRLQMTDGHISCTAVEFSYMSKISLNTPPGTKVKLSGIVDIKNGFLLLNDSNTTVLGGEVEHLIEKWELQRSLSKHNRSNIGTEGGPPPFVPFGQKCVSHVQVDSRELDRRKTLQVTMPVKPTNDNDEFEKQRTAAIAEVAKSKETKTFGGGGGGARSNLNMNAAGNRNREVLQKEKSTKSEGKHEGVYRELVDEKALKHITEMGFSKEASRQALMDNGNNLEAALNVLLTSNKQKPVMGPPLRGRGKGRGRIRSEDEEDLGNARPSAPSTLFDFLESKMGTLNVEEPKSQPQQLHQGQYRSSNTEQNGVKDNNHLRHPPRNDTRQPRNEKPPRFQRDSQNSKSVLEGSGLPRNRGSERPSTSSVSEVWAEDRIKCDRPYSRYDRTKDTSYPLGSQHSDGAFKKRDNSMQSRSGKGPSFAEAKENPLPQGSVDYNNQKRGKRESQTSIPDYFYDRKSQTINNEAFSGIKIEKHFNVNTDYQNPVRSNSFIGVPNGEVEMPLKGRRIGPIKPAGPVTAVPCDDKIFYNSGPKRRSGPIKPEKILESSIPMEYAKMWKPGDECFALYWEDNKFYRAEVEALHSSGMTAVVKFIDYGNYEEVLLSNIKPIQTEAWEEEGTYDQTLEFRRGGDGQPRRSTRPTQQFYQPPRARN

SEQ ID NO: 59479 - protein, 744 aa, Artificial Sequence
  derived and/or modified sequence
MAQVAGAALSQAGWYLSDEGIEACTSSPDKVNVNDIILIALNTDLRTIGKKFLPSDINSGKVEKLEGPCVLQIQKIRNVAAPKDNEESQAAPRMLRLQMTDGHISCTAVEFSYMSKISLNTPPGTKVKLSGIVDIKNGFLLLNDSNTTVLGGEVEHLIEKWELQRSLSKHNRSNIGTEGGPPPFVPFGQKCVSHVQVDSRELDRRKTLQVTMPVKPTNDNDEFEKQRTAAIAEVAKSKETKTFGGGGGGARSNLNMNAAGNRNREVLQKEKSTKSEGKHEGVYRELVDEKALKHITEMGFSKEASRQALMDNGNNLEAALNVLLTSNKQKPVMGPPLRGRGKGRGRIRSEDEEDLGNARPSAPSTLFDFLESKMGTLNVEEPKSQPQQLHQGQYRSSNTEQNGVKDNNHLRHPPRNDTRQPRNEKPPRFQRDSQNSKSVLEGSGLPRNRGSERPSTSSVSEVWAEDRIKCDRPYSRYDRTKDTSYPLGSQHSDGAFKKRDNSMQSRSGKGPSFAEAKENPLPQGSVDYNNQKRGKRESQTSIPDYFYDRKSQTINNEAFSGIKIEKHFNVNTDYQNPVRSNSFIGVPNGEVEMPLKGRRIGPIKPAGPVTAVPCDDKIFYNSGPKRRSGPIKPEKILESSIPMEYAKMWKPGDECFALYWEDNKFYRAEVEALHSSGMTAVVKFIDYGNYEEVLLSNIKPIQTEAWEEEGTYDQTLEFRRGGDGQPRRSTRPTQQFYQPPRARN

SEQ ID NO: 59480 - DNA, 2235 bp, Artificial Sequence
  derived and/or modified sequence
atggcccaggtggccggcgccgccctgagccaggccggctggtacctgagcgacgagggcatcgaggcctgcaccagcagccccgacaaggtgaacgtgaacgacatcatcctgatcgccctgaacaccgacctgagaaccatcggcaagaagttcctgcccagcgacatcaacagcggcaaggtggagaagctggagggcccctgcgtgctgcagatccagaagatcagaaacgtggccgcccccaaggacaacgaggagagccaggccgcccccagaatgctgagactgcagatgaccgacggccacatcagctgcaccgccgtggagttcagctacatgagcaagatcagcctgaacaccccccccggcaccaaggtgaagctgagcggcatcgtggacatcaagaacggcttcctgctgctgaacgacagcaacaccaccgtgctgggcggcgaggtggagcacctgatcgagaagtgggagctgcagagaagcctgagcaagcacaacagaagcaacatcggcaccgagggcggccccccccccttcgtgcccttcggccagaagtgcgtgagccacgtgcaggtggacagcagagagctggacagaagaaagaccctgcaggtgaccatgcccgtgaagcccaccaacgacaacgacgagttcgagaagcagagaaccgccgccatcgccgaggtggccaagagcaaggagaccaagaccttcggcggcggcggcggcggcgccagaagcaacctgaacatgaacgccgccggcaacagaaacagagaggtgctgcagaaggagaagagcaccaagagcgagggcaagcacgagggcgtgtacagagagctggtggacgagaaggccctgaagcacatcaccgagatgggcttcagcaaggaggccagcagacaggccctgatggacaacggcaacaacctggaggccgccctgaacgtgctgctgaccagcaacaagcagaagcccgtgatgggcccccccctgagaggcagaggcaagggcagaggcagaatcagaagcgaggacgaggaggacctgggcaacgccagacccagcgcccccagcaccctgttcgacttcctggagagcaagatgggcaccctgaacgtggaggagcccaagagccagccccagcagctgcaccagggccagtacagaagcagcaacaccgagcagaacggcgtgaaggacaacaaccacctgagacacccccccagaaacgacaccagacagcccagaaacgagaagccccccagattccagagagacagccagaacagcaagagcgtgctggagggcagcggcctgcccagaaacagaggcagcgagagacccagcaccagcagcgtgagcgaggtgtgggccgaggacagaatcaagtgcgacagaccctacagcagatacgacagaaccaaggacaccagctaccccctgggcagccagcacagcgacggcgccttcaagaagagagacaacagcatgcagagcagaagcggcaagggccccagcttcgccgaggccaaggagaaccccctgccccagggcagcgtggactacaacaaccagaagagaggcaagagagagagccagaccagcatccccgactacttctacgacagaaagagccagaccatcaacaacgaggccttcagcggcatcaagatcgagaagcacttcaacgtgaacaccgactaccagaaccccgtgagaagcaacagcttcatcggcgtgcccaacggcgaggtggagatgcccctgaagggcagaagaatcggccccatcaagcccgccggccccgtgaccgccgtgccctgcgacgacaagatcttctacaacagcggccccaagagaagaagcggccccatcaagcccgagaagatcctggagagcagcatccccatggagtacgccaagatgtggaagcccggcgacgagtgcttcgccctgtactgggaggacaacaagttctacagagccgaggtggaggccctgcacagcagcggcatgaccgccgtggtgaagttcatcgactacggcaactacgaggaggtgctgctgagcaacatcaagcccatccagaccgaggcctgggaggaggagggcacctacgaccagaccctggagttcagaagaggcggcgacggccagcccagaagaagcaccagacccacccagcagttctaccagccccccagagccagaaactag

SEQ ID NO: 59481 - DNA, 2235 bp, Artificial Sequence
  derived and/or modified sequence
atggcccaggtggccggtgcagctctttcccaggccgggtggtacctatccgatgagggcatcgaggcctgtacaagcagcccagataaggtgaatgtgaatgacatcatacttatagcgctgaatacagatctgaggaccattggcaagaaatttttgccctctgacattaactctggaaaggtggagaagttagaaggaccctgtgtcctgcagattcagaagatccgcaatgtggccgccccaaaggacaacgaagaatcccaggccgcacctcgcatgttaagattgcagatgactgatggccatatatcctgcactgctgtcgagttcagttacatgagcaagatcagcctgaatacgccgccaggtaccaaagttaaactctcaggcattgtggacattaagaatgggtttctccttttaaatgatagcaatacaaccgttttaggaggtgaagtggagcatctcattgaaaaatgggagctgcaaaggtccttaagcaaacacaatcgcagcaacatcggcactgagggcgggccacctccttttgtgccgttcggacaaaaatgcgtctctcacgttcaagtcgattcccgtgaacttgatagacggaaaactctccaagtaactatgccagtgaaaccaacgaacgacaatgatgagttcgagaagcagcgaacggcagctattgccgaggtggccaaatcaaaggagactaaaacatttggagggggaggagggggcgccaggtcgaacctcaatatgaacgctgcgggaaacaggaatcgagaagtgctgcagaaagagaaatctacaaagagcgaagggaagcacgaaggagtgtacagggagctggtggatgaaaaagccctcaaacatataacagagatggggtttagcaaggaggccagcaggcaggcgctgatggataacggcaacaatttagaagccgctctcaacgtgctcttgacctcaaataagcagaagcccgtgatggggccccctctccgcgggaggggaaagggtcgcggcaggattcggtctgaagacgaggaggatctcggcaatgcaagacccagtgccccttctactctgttcgactttctggagtcgaaaatggggactttaaatgtcgaggagccaaaaagtcagccccagcagctgcatcagggccaatacagaagttctaatacagaacagaatggcgtgaaggacaataaccacctaaggcaccctcctcgaaacgacacacgccaaccgcggaacgaaaaacccccacgcttccagcgagacagccagaactccaagtctgtgctcgaaggatcaggactgcctaggaatcgtggttccgaacgcccctcaacttccagcgtctcagaggtgtgggctgaggatcgcatcaagtgcgatcgcccttatagccgttatgatcgcaccaaggacacatcatatcccctggggagccaacactcagatggagctttcaaaaaaagagacaactcaatgcagtccaggtcaggaaaaggcccatcctttgcggaggcaaaggagaatcctctaccacagggatccgtagactataataatcagaaacgcggcaaaagggaatcgcagacttccattcctgattatttttacgatcggaaaagtcaaacaatcaacaacgaggctttcagcggcatcaaaatagaaaagcactttaacgttaatacggattatcagaacccagttaggagcaattccttcattggagttcctaacggggaagtggaaatgccacttaaaggccgtcgtatcggacctatcaagccagccggccccgtgactgcagtaccttgtgatgacaaaattttctataatagcggacccaagaggcggtccggcccgatcaagcccgagaagatactggagtcaagtatccctatggagtacgcaaaaatgtggaagcctggcgatgagtgctttgcgctgtattgggaggacaacaaattctaccgcgctgaggtcgaggccctgcacagttctggtatgaccgccgttgtaaaatttatagattacggcaactacgaggaagtcctactatccaatattaagcctattcagacagaggcctgggaagaagagggcacatatgatcagactctggagttccggcggggcggtgacggtcaaccccgcaggagcactcggcccacccagcaattttaccagcctccaagagcacggaactag

SEQ ID NO: 59482 - DNA, 2235 bp, Artificial Sequence
  derived and/or modified sequence
atggcccaggtggccggggccgccctgagccaggccggctggtacctgagtgatgagggcatcgaggcctgcaccagcagcccagacaaggtgaatgtgaatgacatcatcctgattgccctgaacacagacctgcggaccatcggcaagaagttcctgcccagcgacatcaacagcggcaaggtggagaagctggagggcccctgtgtgctgcagatccagaagatcagaaatgtggccgcccccaaggacaatgaggagagccaggccgcccccaggatgctgcggctgcagatgacagatggccacatcagctgcacagctgtggagttctcctacatgagcaagatcagcctgaacaccccacctggcaccaaggtgaagctgagcggcatcgtggacatcaagaatggcttcctgctgctgaatgacagcaacaccaccgtgctgggcggggaggtggagcacctgattgagaagtgggagctgcagaggagcctgagcaagcacaacagaagcaacattggaacagaaggaggccccccaccatttgtgcccttcggccagaagtgtgtgagccacgtgcaggtggacagccgggagctggacaggaggaagaccctgcaggtgaccatgcctgtgaagcccaccaatgacaatgatgaatttgagaagcagaggacagctgccatcgccgaggtggccaagagcaaggagaccaagacctttggaggcggcggcggcggggcccggagcaacctgaacatgaatgctgctggcaacagaaaccgggaggtgctgcagaaggagaagagcaccaagtctgagggcaagcatgaaggagtgtaccgggagctggtggatgagaaggccctgaagcacatcacagagatgggcttcagcaaggaggccagccggcaggccctgatggacaatggaaacaacctggaggccgccctgaatgtgctgctgaccagcaacaagcagaagcctgtgatgggcccccccctgcggggccggggcaagggccggggccgcatccgctcagaagatgaggaggacctgggcaatgcccggcccagcgcccccagcaccctgtttgacttcctggagagcaagatgggcaccctgaatgtggaggagcccaagagccagccccagcagctgcaccagggccagtaccgcagcagcaacacagagcagaatggagtgaaggacaacaaccacctgcggcaccccccaagaaatgacacccggcagcccagaaatgagaagccaccccgcttccagagggacagccagaacagcaagtctgtgctggagggcagcggcctgcccaggaacagaggcagcgagcggcccagcaccagctctgtgtctgaggtgtgggccgaggaccgcatcaagtgtgaccggccctacagccgctatgacaggaccaaggacaccagctaccccctgggcagccagcacagtgatggagccttcaagaagagggacaacagcatgcagagccgcagcggcaagggccccagctttgctgaggccaaggagaaccccctgccccagggctctgtggactacaacaaccagaagaggggcaagcgggagagccagaccagcatcccagactacttctatgacaggaagagccagaccatcaacaatgaggccttcagcggcatcaagattgagaagcacttcaacgtgaacacagactaccagaaccctgtgcgcagcaacagcttcatcggcgtgcccaacggggaggtggagatgcccctgaagggccgccgcatcggccccatcaagccagctggccctgtgacagctgtgccctgtgatgacaagatcttctacaacagcggccccaagaggaggagcggccccatcaagccagagaagatcctggagagcagcatccccatggagtatgccaagatgtggaagccaggagatgagtgctttgccctgtactgggaggacaacaagttctacagagctgaggtggaggccctgcacagcagcggcatgacagctgtggtgaagttcattgattatggcaactatgaggaggtgctgctgagcaacatcaagcccatccagacagaggcctgggaggaggagggcacctatgaccagaccctggagttcagaagaggaggagatggccagcccaggaggagcacccggcccacccagcagttctaccagcccccccgggccagaaattag

SEQ ID NO: 59483 - DNA, 2235 bp, Artificial Sequence
  derived and/or modified sequence
atggcccaggtggccggcgccgccctgagccaggccggctggtacctcagcgacgaaggtatcgaagcctgtacctctagtccagataaagtgaacgtcaacgacattatattgatcgccttaaatacagacttgaggactattgggaaaaaattcttgccgagtgatatcaactcgggaaaagtggagaaattggagggtccctgcgtcctccagatccagaagattcgtaacgttgctgctcctaaggataatgaggaaagccaggccgccccacgcatgttgcgcctacagatgacggatggacacataagctgtactgccgtggagttctcttacatgtcgaagatttcattaaacacccctcccggcactaaagttaaactgtccggcatcgtcgatattaaaaacggtttcctgcttctgaacgatagcaacaccaccgtgctgggcggggaggtagaacatctgatcgagaaatgggagctacagcgaagccttagcaagcataatagaagtaatataggcacagagggtggacctcctcctttcgtgcccttcgggcagaagtgcgtttcccacgtgcaggttgactccagggaactggacaggaggaagaccctacaggtgaccatgcccgtgaaacctacgaacgataatgatgagtttgagaagcaacggacagcggcgattgctgaagtggcaaagagcaaggagaccaaaacatttggaggcggcggagggggtgctaggtctaatctcaacatgaacgccgcaggaaatcggaacagagaggtcctccagaaggagaagtctaccaagtctgagggcaagcacgagggcgtctatcgagagctcgttgacgagaaggcccttaagcacatcactgagatggggtttagcaaggaagcgtctaggcaagccctcatggataacggtaacaacctcgaggcagcactgaacgtcctgttgacctccaacaagcagaaacccgtgatgggcccacctctccggggaaggggtaaagggcgtggcagaattcggagtgaggacgaagaggatttaggcaacgcaagaccttctgctccatccaccctctttgattttctcgaaagtaaaatgggtaccctgaatgtcgaggagcccaagtcccagccacagcagctgcaccagggccaataccgatccagcaacacagaacagaatggtgtgaaagataacaaccacctcaggcaccccccccgcaatgacacgagacagcccaggaatgagaagccaccgcgattccagagagatagccaaaattctaaaagcgtgctggaaggtagtggtctcccgcgtaataggggatccgagagaccttctacatcctctgtgtccgaagtgtgggctgaagataggataaaatgcgacaggccttattcccgctatgatcgcaccaaagatacttcataccccctcggttcacagcacagcgatggagcctttaagaagagggacaatagcatgcagtctagatccggtaaaggaccatccttcgccgaagccaaagaaaatcctctccctcaagggagtgtcgactacaacaaccagaaaaggggtaaaagagagagtcagacaagcattccagactacttttatgaccgaaagtctcaaaccattaacaacgaagcattctcggggataaaaatcgagaagcactttaatgtcaataccgactatcagaaccccgtgaggagtaatagctttattggcgtccctaatggtgaagtggagatgccactcaaagggcggcgcatcgggcccataaaaccagccggccctgtgaccgctgtaccatgcgatgataaaattttctacaattccggccctaagcgccggagcgggccaatcaagcctgagaaaattctcgaatcctcaatcccaatggaatatgctaaaatgtggaagccaggggacgagtgcttcgccctgtactgggaggataacaagttttacagggctgaggttgaggctctgcactcctcaggcatgaccgcagtggtcaaattcattgactatggcaattacgaggaggtccttctgagcaatatcaaacccattcagaccgaggcctgggaggaggaaggaacttacgaccagaccctggaattcagacgcgggggagacgggcagcctcggcggtccacaaggccaacgcagcagttctaccaaccgcccagggccagaaattag

SEQ ID NO: 59484 - DNA, 2235 bp, Artificial Sequence
  derived and/or modified sequence
atggcccaggtcgcaggagctgctctctcacaagccggttggtacctgtcagacgagggcatcgaagcatgtacctcgtccccagataaggtgaacgtgaacgacatcatcttgatcgcattgaatacagacctgagaactatcgggaagaagtttctcccaagtgacatcaactccggcaaggtggaaaaactggagggtccctgcgttcttcagattcagaagatccgaaacgttgccgcacccaaagataacgaggaatcccaagctgctcctagaatgctgagactgcagatgactgacggacacatttcgtgcacagcagtggagttcagctacatgagcaaaatctcactcaatactcctcctgggaccaaggtgaaactgtcggggatcgtagatattaaaaatggattcctgctcctgaatgattcaaataccacggtgctcggtggagaggtcgagcatctgattgagaagtgggaattgcaacggtccctgtctaagcataatcggagcaacattggcacggagggtggaccgccaccattcgtgccattcggtcagaagtgcgtatctcatgtccaggtcgacagtcgggaattggacagacggaaaacattgcaggtaaccatgcctgtgaagccaactaatgataacgatgaatttgaaaaacagcgcacagctgcaatcgccgaggtggctaaatctaaggaaacaaaaacctttggcggagggggagggggagcgcgaagcaacctgaacatgaatgccgctggtaatcggaatcgcgaggtactccagaaagagaaatcaacgaagagcgagggaaaacacgagggagtttatagagaacttgtcgatgagaaagcattgaaacacattaccgaaatgggcttctctaaagaagcctccaggcaggcgctcatggacaacggcaataatctcgaggctgccctcaacgtcctattaacctccaataaacagaagccagtaatgggtccacccctccgagggcgaggtaaaggccgaggacgcatacgatccgaggacgaggaagatcttggcaacgccaggccttctgctcccagtacacttttcgacttcctggaaagcaagatgggtaccctgaatgttgaagaaccaaaaagccagccccagcaacttcaccaggggcagtataggtcttcaaatacagagcagaatggggtgaaagataacaatcacctgagacacccgcctcgcaatgatactcggcagccacgcaacgagaagccaccgcgtttccaacgggattctcagaactccaagagtgttctcgagggctcaggattacctcgcaatagaggaagtgaacggccaagcacttcgtccgtcagcgaggtctgggcggaggaccgtattaaatgcgacaggccctactctcgttacgacaggactaaggatacaagctatcctctgggatcccagcattcagatggagctttcaagaagcgagacaatagcatgcagtcgcgaagcggaaaaggaccttcattcgccgaggccaaagagaatccccttccccagggctcagtcgattacaacaaccaaaaacggggaaagagggaatctcagacatcaatccccgattacttctacgaccgaaagagtcaaacgatcaataatgaagcgttttctggaatcaagattgaaaaacattttaatgtcaatactgattaccagaaccccgtgcgcagcaatagctttatcggcgtacccaatggcgaagtggagatgccccttaaaggcaggcgaattggccctatcaagcccgctggtcccgtcacagctgtgccatgcgatgacaaaatcttctacaactccggtcccaagcgtcgtagtggccctatcaagccggagaagattctggaatcctccatcccaatggagtatgccaaaatgtggaagcccggagatgaatgcttcgcactgtattgggaggacaataagttttaccgggctgaggtggaggctctacactcttctgggatgaccgcagtcgtgaagtttatagattacggcaactacgaagaagtgctgctgtccaacattaaacccattcagacggaagcttgggaggaggagggcacatacgatcagacactagagttcaggcgcggtggggatggtcaaccgagacgttctactagacctactcagcagttctatcagccacccagagctagaaactag

SEQ ID NO: 59485 - DNA, 3019 bp, Artificial Sequence
  derived and/or modified sequence
acccaccctgcgccccagccctctacagcgcgggcgaagggcatcggcggggaagcggctgtggttgccagatctggcagtacagagccaaggtggcagggccgcgctaggacacggatggtcccagggggagggcaacaggaaaaacaagcactgacacaactgccccatttccccatgtcccctaaaagcaggttttcttgggctgaccagggcattttcactgtggtgtccgactggggcaactcgatctgcccgcggggactcaaaaaagcttgagctgcattttttctttgcgtccgggcggaccaaaaggcgaggtgaagggaacgagtgtttataagaaagtaaacttttgtgcagaatgggctggggacacctctgagttttgctgcccgcaacgtgacctttttagcgcggtcctggacgcgttccctcgcagccaacccgtcagtctcctcaggccttatcctgccctctctgaggtggccgcctgtgggcgctgcaaacgccacacttttgctctacgaagaacctcctcgcgactttccaaggtatctttcagatgaaggcattgaagcttgcacaagctctccagacaaagtcaatgtaaatgacatcatcctgattgctctcaatatctgagaacaattggcaagaaattcctccccagtgacatcaatagtggaaaggtagaaaagctcgaaggtccatgtgttttgcaaattcaaaaaattcgcaatgttgctgcaccaaaggataatgaagaatctcaggctgcaccaaggatgctgcgattacagatgactgatggtcatataagttgcacagcagtagaatttagttatatgtcaaaaataagcctgaacacaccacctggaactaaagttaagctctcaggcattgttgacataaaaaatggattcctgctcttgaatgactctaacaccacagttcttggtggtgaagtggaacaccttattgagaaatgggagttacagagaagcttatcaaaacacaatagaagcaatattggaactgaaggtggaccaccgccttttgtgccttttggacagaagtgtgtatctcatgtccaagtggatagcagagaacttgatcgaagaaaaacattgcaagttacaatgcctgtcaaacctacaaatgataatgatgaatttgaaaagcaaaggacggctgctattgctgaagttgcaaagagcaaggaaaccaagacatttggaggaggtggtggtggtgctagaagtaatctcaatatgaatgctgctggtaaccgaaatagggaagttttacagaaagaaaagtcaaccaaatcagagggaaaacatgaaggtgtctatagagaactggttgatgagaaagctctgaagcacataacggaaatgggcttcagtaaggaagcatcgaggcaagctcttatggataatggcaacaacttagaagcagcactgaacgtacttcttacaagcaataaacagaaacctgttatgggtcctcctctgagaggtagaggaaaaggcagggggcgaataagatctgaagatgaagaggacctgggaaatgcaaggccatcagcaccaagcacattatttgatttcttggaatctaaaatgggaactttgaatgtggaagaacctaaatcacagccacagcagcttcatcagggacaatacagatcatcaaatactgagcaaaatggagtaaaagataataatcatctgagacatcctcctcgaaatgataccaggcagccaagaaatgaaaaaccgcctcgttttcaaagagactcccaaaattcaaagtcagttttagaaggcagtggattacctagaaatagaggttctgaaagaccaagtacttcttcagtatctgaagtatgggctgaagacagaatcaaatgtgatagaccgtattctagatatgacagaactaaagatacttcatatcctttaggttctcagcatagtgatggtgcttttaaaaaaagagataactctatgcaaagcagatcaggaaaaggtccctcctttgcagaggcaaaagaaaatccacttcctcaaggatctgtagattataataatcaaaaacgtggaaaaagagaaagccaaacatctattcctgattatttttatgacaggaaatcacaaacaataaataatgaagctttcagtggtataaaaattgaaaaacattttaatgtaaatactgattatcagaatccagttcgaagtaatagtttcattggtgttccaaatggagaagtagaaatgccactgaaaggaagacgaataggacctattaagccagcaggacctgtcacagctgtaccctgtgatgataaaatattttacaatagtgggcccaaacgaagatctgggccaattaagccagaaaaaatactagaatcatctattcctatggagtatgcaaaaatgtggaaacctggagatgaatgttttgcactttattgggaagacaacaagttttaccgggcagaagttgaagccctccattcttcgggtatgacagcagttgttaaattcattgactacggaaactatgaagaggtgctactgagcaatatcaagcccattcaaacagaggcatgggaggaagaaggcacctacgatcaaactctggagttccgtaggggaggtgatggccagccaagacgatccactcggccaacccaacagttttaccaaccaccccgggctcggaactaataggaaaagtagactctttgtgaagaaacgagccagtgactgaaacaccctggtggaaacctgttgacagaccttccactttctcttcagaataagtagctgtggtggatattattatttgaagaaagaaaaaacagattttagggtggaaaaaacagtcaactcacacaaagaatggaaaaaaatactgagttaaattaagcaaataccttttacaagtgaaaggaagaatttttcttctgccgtcaataaaaccattgtgctattattgtttt

SEQ ID NO: 59486 - DNA, 2528 bp, Artificial Sequence
  derived and/or modified sequence
gccgcctgtgggcgctgcaaacgccacacttttgctctacgaagaacctcctcgcgactttccaagaggtatctttcagatgaaggcattgaagcttgcacaagctctccagacaaagtcaatgtaaatgacatcatcctgattgctctcaatacagatctgagaacaattggcaagaaattcctccccagtgacatcaatagtggaaaggtagaaaagctcgaaggtccatgtgttttgcaaattcaaaaaattcgcaatgttgctgcaccaaaggataatgaagaatctcaggctgcaccaaggatgctgcgattacagatgactgatggtcatataagttgcacagcagtagaatttagttatatgtcaaaaataagcctgaacacaccacctggaactaaagttaagctctcaggcattgttgacataaaaaatggattcctgctcttgaatgactctaacaccacagttcttggtggtgaagtggaacaccttattgagaaatgggagttacagagaagcttatcaaaacacaatagaagcaatattggaactgaaggtggaccaccgccttttgtgccttttggacagaagtgtgtatctcatgtccaagtggatagcagagaacttgatcgaagaaaaacattgcaagttacaatgcctgtcaaacctacaaatgataatgatgaatttgaaaagcaaaggacggctgctattgctgaagttgcaaagagcaaggaaaccaagacatttggaggaggtggtggtggtgctagaagtaatctcaatatgaatgctgctggtaaccgaaatagggaagttttacagaaagaaaagtcaaccaaatcagagggaaaacatgaaggtgtctatagagaactggttgatgagaaagctctgaagcacataacggaaatgggcttcagtaaggaagcatcgaggcaagctcttatggataatggcaacaacttagaagcagcactgaacgtacttcttacaagcaataaacagaaacctgttatgggtcctcctctgagaggtagaggaaaaggcagggggcgaataagatctgaagatgaagaggacctgggaaatgcaaggccatcagcaccaagcacattatttgatttcttggaatctaaaatgggaactttgaatgtggaagaacctaaatcacagccacagcagcttcatcagggacaatacagatcatcaaatactgagcaaaatggagtaaaagataataatcatctgagacatcctcctcgaaatgataccaggcagccaagaaatgaaaaaccgcctcgttttcaaagagactcccaaaattcaaagtcagttttagaaggcagtggattacctagaaatagaggttctgaaagaccaagtacttcttcagtatctgaagtatgggctgaagacagaatcaaatgtgatagaccgtattctagatatgacagaactaaagatacttcatatcctttaggttctcagcatagtgatggtgcttttaaaaaaagagataactctatgcaaagcagatcaggaaaaggtccctcctttgcagaggcaaaagaaaatccacttcctcaaggatctgtagattataataatcaaaaacgtggaaaaagagaaagccaaacatctattcctgattatttttatgacaggaaatcacaaacaataaataatgaagctttcagtggtataaaaattgaaaaacattttaatgtaaatactgattatcagaatccagttcgaagtaatagtttcattggtgttccaaatggagaagtagaaatgccactgaaaggaagacgaataggacctattaagccagcaggacctgtcacagctgtaccctgtgatgataaaatattttacaatagtgggcccaaacgaagatctgggccaattaagccagaaaaaatactagaatcatctattcctatggagtatgcaaaaatgtggaaacctggagatgaatgttttgcactttattgggaagacaacaagttttaccgggcagaagttgaagccctccattcttcgggtatgacagcagttgttaaattcattgactacggaaactatgaagaggtgctactgagcaatatcaagcccattcaaacagaggcatgggaggaagaaggcacctacgatcaaactctggagttccgtaggggaggtgatggccagccaagacgatccactcggccaacccaacagttttaccaaccaccccgggctcggaactaataggaaaagactctttgtgaagaaacgagccagtgactgaaacaccctggtggaaacctgttgacagaccttccactttctcttcagaataagtagctgtggtggatattattatttgaagaaagaaaaaacagattttagggtggaaaaaacagtcaactcacacaaagaatggaaaaaaatactgagttaaattaagcaaataccttttacaagtgaaaggaagaatttttcttctgccgtcaataaaaccattgtgctattat

SEQ ID NO: 59487 - DNA, 660 bp, Artificial Sequence
  derived and/or modified sequence
tatatgccaagtgacttctgaacacgacgtgaagacagtatctttcagatgaaggcattgaagcttgcacaagctctccagacaaagtcaatgtaaatgacatcatcctgattgctctcaatatctgagaacaattggcaagaaattcctccccagtgacatcaatagtggaaaggtagaaaagctcgaaggtccatgtgttttgcaaattcaaaaaattcgcaatgttgctgcaccaaaggataatgaagaatctcaggctgcaccaaggatgctgcgattacagatgactgatggtcatataagttgcacagcagtagaatttagttatatgtcaaaaataagcctgaacacaccacctggaactaaagttaagctctcaggcattgttgacataaaaaatggattcctgctcttgaatgactctaacaccacagttcttggtggtgaagtggaacaccttattgagaaatgggagttacagagaagcttatcaaaacacaatagaagcaatattggaactgaaggtggaccaccgccttttgtgccttttggacagaagtgtgtatctcatgtccaagtggatagcagagaacttgatcgaagaaaaacattgcaagttacaatgcctgtcaaacctacaaatgataatgatgaatt

SEQ ID NO: 59488 - DNA, 2484 bp, Artificial Sequence
  derived and/or modified sequence
gaacctcctcgcgactttccaaggtatctttcagatgaaggcattgaagcttgcacaagctctccagacaaagtcaatgtaaatgacatcatcctgattgctctcaatatctgagaacaattggcaagaaattcctccccagtgacatcaatagtggaaaggtagaaaagctcgaaggtccatgtgttttgcaaattcaaaaaattcgcaatgttgctgcaccaaaggataatgaagaatctcaggctgcaccaaggatgctgcgattacagatgactgatggtcatataagttgcacagcagtagaatttagttatatgtcaaaaataagcctgaacacaccacctggaactaaagttaagctctcaggcattgttgacataaaaaatggattcctgctcttgaatgactctaacaccacagttcttggtggtgaagtggaacaccttattgagaaatgggagttacagagaagcttatcaaaacacaatagaagcaatattggaactgaaggtggaccaccgccttttgtgccttttggacagaagtgtgtatctcatgtccaagtggatagcagagaacttgatcgaagaaaaacattgcaagttacaatgcctgtcaaacctacaaatgataatgatgaatttgaaaagcaaaggacggctgctattgctgaagttgcaaagagcaaggaaaccaagacatttggaggaggtggtggtggtgctagaagtaatctcaatatgaatgctgctggtaaccgaaatagggaagttttacagaaagaaaagtcaaccaaatcagagggaaaacatgaaggtgtctatagagaactggttgatgagaaagctctgaagcacataacggaaatgggcttcagtaaggaagcatcgaggcaagctcttatggataatggcaacaacttagaagcagcactgaacgtacttcttacaagcaataaacagaaacctgttatgggtcctcctctgagaggtagaggaaaaggcagggggcgaataagatctgaagatgaagaggacctgggaaatgcaaggccatcagcaccaagcacattatttgatttcttggaatctaaaatgggaactttgaatgtggaagaacctaaatcacagccacagcagcttcatcagggacaatacagatcatcaaatactgagcaaaatggagtaaaagataataatcatctgagacatcctcctcgaaatgataccaggcagccaagaaatgaaaaaccgcctcgttttcaaagagactcccaaaattcaaagtcagttttagaaggcagtggattacctagaaatagaggttctgaaagaccaagtacttcttcagtatctgaagtatgggctgaagacagaatcaaatgtgatagaccgtattctagatatgacagaactaaagatacttcatatcctttaggttctcagcatagtgatggtgcttttaaaaaaagagataactctatgcaaagcagatcaggaaaaggtccctcctttgcagaggcaaaagaaaatccacttcctcaaggatctgtagattataataatcaaaaacgtggaaaaagagaaagccaaacatctattcctgattatttttatgacaggaaatcacaaacaataaataatgaagctttcagtggtataaaaattgaaaaacattttaatgtaaatactgattatcagaatccagttcgaagtaatagtttcattggtgttccaaatggagaagtagaaatgccactgaaaggaagacgaataggacctattaagccagcaggacctgtcacagctgtaccctgtgatgataaaatattttacaatagtgggcccaaacgaagatctgggccaattaagccagaaaaaatactagaatcatctattcctatggagtatgcaaaaatgtggaaacctggagatgaatgttttgcactttattgggaagacaacaagttttaccgggcagaagttgaagccctccattcttcgggtatgacagcagttgttaaattcattgactacggaaactatgaagaggtgctactgagcaatatcaagcccattcaaacagaggcatgggaggaagaaggcacctacgatcaaactctggagttccgtaggggaggtgatggccagccaagacgatccactcggccaacccaacagttttaccaaccaccccgggctcggaactaataggaaaagactctttgtgaagaaacgagccagtgactgaaacaccctggtggaaacctgttgacagaccttccactttctcttcagaataagtagctgtggtggatattattatttgaagaaagaaaaaacagattttagggtggaaaaaacagtcaactcacacaaagaatggaaaaaaatactgagttaaattaagcaaataccttttacaagtgaaaggaagaatttttcttctgccgtcaataaaaccattgtgctattattgttt

SEQ ID NO: 59489 - DNA, 2579 bp, Artificial Sequence
  derived and/or modified sequence
ggggtctcaagtaggaggcctccccatcacccccaccccagccccccaccacccccggcctaagcagctaccatggcccaggtggccggcgcggcgttgtcccaggcgggttggtatctttcagatgaaggcattgaagcttgcacaagctctccagacaaagtcaatgtaaatgacatcatcctgattgctctcaatacagatctgagaacaattggcaagaaattcctccccagtgacatcaatagtggaaaggtagaaaagctcgaaggtccatgtgttttgcaaattcaaaaaattcgcaatgttgctgcaccaaaggataatgaagaatctcaggctgcaccaaggatgctgcgattacagatgactgatggtcatataagttgcacagcagtagaatttagttatatgtcaaaaataagcctgaacacaccacctggaactaaagttaagctctcaggcattgttgacataaaaaatggattcctgctcttgaatgactctaacaccacagttcttggtggtgaagtggaacaccttattgagaaatgggagttacagagaagcttatcaaaacacaatagaagcaatattggaactgaaggtggaccaccgccttttgtgccttttggacagaagtgtgtatctcatgtccaagtggatagcagagaacttgatcgaagaaaaacattgcaagttacaatgcctgtcaaacctacaaatgataatgatgaatttgaaaagcaaaggacggctgctattgctgaagttgcaaagagcaaggaaaccaagacatttggaggaggtggtggtggtgctagaagtaatctcaatatgaatgctgctggtaaccgaaatagggaagttttacagaaagaaaagtcaaccaaatcagagggaaaacatgaaggtgtctatagagaactggttgatgagaaagctctgaagcacataacggaaatgggcttcagtaaggaagcatcgaggcaagctcttatggataatggcaacaacttagaagcagcactgaacgtacttcttacaagcaataaacagaaacctgttatgggtcctcctctgagaggtagaggaaaaggcagggggcgaataagatctgaagatgaagaggacctgggaaatgcaaggccatcagcaccaagcacattatttgatttcttggaatctaaaatgggaactttgaatgtggaagaacctaaatcacagccacagcagcttcatcagggacaatacagatcatcaaatactgagcaaaatggagtaaaagataataatcatctgagacatcctcctcgaaatgataccaggcagccaagaaatgaaaaaccgcctcgttttcaaagagactcccaaaattcaaagtcagttttagaaggcagtggattacctagaaatagaggttctgaaagaccaagtacttcttcagtatctgaagtatgggctgaagacagaatcaaatgtgatagaccgtattctagatatgacagaactaaagatacttcatatcctttaggttctcagcatagtgatggtgcttttaaaaaaagagataactctatgcaaagcagatcaggaaaaggtccctcctttgcagaggcaaaagaaaatccacttcctcaaggatctgtagattataataatcaaaaacgtggaaaaagagaaagccaaacatctattcctgattatttttatgacaggaaatcacaaacaataaataatgaagctttcagtggtataaaaattgaaaaacattttaatgtaaatactgattatcagaatccagttcgaagtaatagtttcattggtgttccaaatggagaagtagaaatgccactgaaaggaagacgaataggacctattaagccagcaggacctgtcacagctgtaccctgtgatgataaaatattttacaatagtgggcccaaacgaagatctgggccaattaagccagaaaaaatactagaatcatctattcctatggagtatgcaaaaatgtggaaacctggagatgaatgttttgcactttattgggaagacaacaagttttaccgggcagaagttgaagccctccattcttcgggtatgacagcagttgttaaattcattgactacggaaactatgaagaggtgctactgagcaatatcaagcccattcaaacagaggcatgggaggaagaaggcacctacgatcaaactctggagttccgtaggggaggtgatggccagccaagacgatccactcggccaacccaacagttttaccaaccaccccgggctcggaactaataggaaaagactctttgtgaagaaacgagccagtgactgaaacaccctggtggaaacctgttgacagaccttccactttctcttcagaataagtagctgtggtggatattattatttgaagaaagaaaaaacagattttagggtggaaaaaacagtcaactcacacaaagaatggaaaaaaatactgagttaaattaagcaaataccttttacaagtgaaaggaagaatttttcttctgccgtcaataaaaccattgtgctattattgtttt

SEQ ID NO: 59490 - protein, 533 aa, Artificial Sequence
  derived and/or modified sequence
MMSEGKPPDKKRPRRSLSISKNKKKASNSIISCFNNAPPAKLACPVCSKMVPRYDLNRHLDEMCANNDFVQVDPGQVGLINSNVSMVDLTSVTLEDVTPKKSPPPKTNLTPGQSDSAKREVKQKISPYFKSNDVVCKNQDELRNRSVKVICLGSLASKLSRKYVKAKKSIDKDEEFAGSSPQSSKSTVVKSLIDNSSEIEDEDQILENSSQKENVFKCDSLKEECIPEHMVRGSKIMEAESQKATRECEKSALTPGFSDNAIMLFSPDFTLRNTLKSTSEDSLVKQECIKEVVEKREACHCEEVKMTVASEAKIQLSDSEAKSHSSADDASAWSNIQEAPLQDDSCLNNDIPHSIPLEQGSSCNGPGQTTGHPYYLRSFLVVLKTVLENEDDMLLFDEQEKGIVTKFYQLSATGQKLYVRLFQRKLSWIKMTKLEYEEIALDLTPVIEELTNAGFLQTESELQELSEVLELLSAPELKSLAKTFHLVNPNGQKQQLVDAFLKLAKQRSVCTWGKNKPGIGAVILKRFCWLLLQ

SEQ ID NO: 59491 - DNA, 1602 bp, Artificial Sequence
  derived and/or modified sequence
atgatgagcgagggtaaacccccggacaagaaacgaccaaggaggtccctatctatcagcaaaaacaaaaagaaggcttccaactcaattatttcctgttttaacaatgcccctccagcaaaactggcctgtccagtctgcagcaagatggtaccccgctatgacttgaataggcaccttgatgagatgtgtgcaaataatgacttcgtacaggtggaccccggccaagtggggctgattaatagcaatgtgtctatggtggatctgacctccgttacgcttgaagatgtcacacctaagaagagccctccacctaaaacaaacctgacaccggggcaatcagatagtgccaagcgcgaagtgaagcaaaaaatcagtccttatttcaagtcaaacgatgtcgtgtgcaaaaatcaagacgagctccgaaacagatccgtgaaagtgatctgcctgggcagtctcgcatccaaactatctagaaagtatgtgaaggcaaaaaaatcaatcgacaaggatgaagaatttgctggaagctctccgcaaagttcaaagagtacggtagttaagtctctgatcgacaacagttctgagatcgaggatgaagaccagatcttggaaaattcatcgcagaaggagaacgtgttcaagtgcgattcgcttaaagaggaatgcatccccgagcacatggtaaggggaagtaaaataatggaagccgagtcacagaaggccacccgagaatgcgagaaatctgccctgaccccaggctttagtgataatgcaattatgcttttttcaccagatttcactctgcgcaacacgctgaaatccacctctgaagactctcttgttaaacaagagtgcatcaaagaggtcgtagaaaagagggaggcttgccactgtgaggaggtgaagatgaccgtggccagtgaggcgaaaattcagctgtctgactccgaagcaaagtcacattctagtgccgatgacgcgtccgcatggtccaatattcaggaggctcccctgcaggatgattcttgtctcaacaacgatatcccccattccatcccactggaacagggcagcagctgcaacggacccggacaaaccaccggacacccttactacttacggtctttccttgttgtgttaaagactgtgctggagaacgaggacgacatgctgctttttgatgagcaggaaaagggcatagttacaaagttctatcagctgtcagccacagggcaaaagctctacgtgcgcctcttccagagaaagctgtcatggattaagatgacgaagcttgaatatgaagagatcgcccttgacctgactcccgtcattgaagaattgacaaacgcaggatttctacagacagaaagtgaactgcaggaactgtccgaagtcctggaactgctaagcgctcccgagctgaaatctctggctaagacctttcatctcgtgaatcctaatggtcaaaagcagcagcttgtcgacgcctttcttaagctggccaaacagaggagcgtatgcacctggggaaaaaacaagcccggcataggcgccgtcattctcaagcgcttctgctggctcctccttcaatag

SEQ ID NO: 59492 - DNA, 1602 bp, Artificial Sequence
  derived and/or modified sequence
atgatgtctgagggcaagcccccagacaagaagaggccccggcgcagcctgagcatcagcaagaacaagaagaaggccagcaacagcatcatcagctgcttcaacaatgcccccccagccaagctggcctgccctgtgtgcagcaagatggtgcccaggtatgacctgaacagacacctggatgagatgtgtgccaacaatgactttgtgcaggtggaccccggccaggtgggcctcatcaacagcaatgtgtccatggtggacctgacctctgtgaccctggaggatgtgacccccaagaagagccccccacccaagaccaacctgaccccaggccagagcgacagcgccaagcgggaggtgaagcagaagatcagcccctacttcaagagcaatgatgtggtgtgcaagaaccaggatgagctgaggaacagatctgtgaaggtgatctgcctgggcagcctggccagcaagctgagcaggaaatatgtgaaggccaagaagagcattgacaaggatgaggagtttgctggcagcagcccccagagcagcaagagcacagtggtgaagagcctgattgacaacagcagcgagattgaagatgaggaccagatcctggagaacagcagccagaaggaaaatgtgttcaagtgtgacagcctgaaggaggagtgcatccctgagcacatggtgcggggcagcaagatcatggaggccgagagccagaaggccaccagagaatgtgagaagagcgccctgaccccaggcttcagtgacaatgccatcatgctgttctccccagacttcaccctgaggaacaccctgaagagcaccagcgaggacagcctggtgaagcaggagtgcatcaaggaggtggtggagaagcgggaggcctgccactgtgaggaggtgaagatgacagtggccagcgaggccaagatccagctgagtgacagcgaggccaagagccacagcagcgcagatgatgccagcgcctggagcaacatccaggaggcccccctgcaggatgacagctgcctgaacaatgacatcccccacagcatccccctggagcagggcagcagctgcaatggacctggccagaccaccggccacccctactacctgcggagcttcctggtggtgctgaagacagtgctggagaatgaagatgacatgctgctgtttgatgagcaggagaagggcatcgtgaccaagttctaccagctgagcgccaccggccagaagctgtatgtgcggctcttccagaggaagctgtcctggatcaagatgaccaagctggagtatgaggagatcgccctggacctgacccctgtgattgaggagctgaccaatgccggcttcctgcagacagagagcgagctgcaggagctgtctgaggtgctggagctgctgagcgcccctgagctgaagagcctggccaagaccttccacctggtgaaccccaacggccagaagcagcagctggtggatgccttcctgaagctggccaagcagaggtctgtgtgcacctggggcaagaacaagccaggcattggagctgtgatcctgaagcgcttctgctggctgctgctgcagtag

SEQ ID NO: 59493 - DNA, 1602 bp, Artificial Sequence
  derived and/or modified sequence
atgatgagcgagggcaagccccccgacaagaagcggccccggcggagccttagtatttccaaaaataagaagaaagcctccaattccatcatatcctgtttcaacaacgcaccgccagccaaattggcatgcccagtgtgtagcaaaatggtgcctcggtatgatctgaatcggcacctagacgagatgtgcgctaataacgactttgtgcaagtagaccccggacaagtgggactcatcaattccaacgtctccatggtggatctcacaagtgtgacgctagaagatgtaacgcctaaaaagtccccgccacctaagaccaacttgacaccaggacagagcgactccgccaaacgggaagtaaagcagaaaattagtccttactttaaaagcaatgatgtggtctgtaaaaatcaggacgaattaaggaaccgcagtgtgaaagtcatttgcctgggaagcctggctagcaaactctctcgcaaatatgttaaagcgaagaaatcaatagacaaagatgaggaattcgcagggtcatctccacaatcctcaaagagcacagtcgtcaaaagcttaattgataactcgtcggaaattgaggatgaagatcagattttggagaatagttcacagaaagaaaatgtcttcaaatgcgacagcctgaaagaggaatgcattccagagcatatggtgcggggtagtaaaatcatggaggccgagtcccaaaaagcaacccgggagtgtgagaagtcagccctgacgcctgggttctccgacaatgccattatgttgttctcacctgacttcaccctccgaaataccttgaaatccacgagtgaagattctctcgtcaagcaagaatgtattaaagaggtggtagagaagagagaagcatgtcactgcgaggaagtcaaaatgactgttgcctctgaggccaagatccaactcagcgacagtgaagcaaagtcccactcttccgccgatgacgccagtgcatggtcgaatatacaagaggccccacttcaggatgactcgtgcctgaataatgatattccgcatagtataccactcgaacagggctcgtcctgtaacgggcctggccagacaaccgggcatccctattatctaagatcctttttggtggtcctgaagactgttctcgagaacgaggacgatatgctgctttttgatgaacaggagaaaggcattgtaaccaagttctaccagctctcagcaactggacaaaaactgtacgtgagactctttcaacgcaagctgtcatggattaagatgacaaagctggaatacgaagagatcgcactcgacttgactcccgtcattgaggagctgacaaatgctggctttttacaaacagaatctgaattgcaggagttgtctgaggttttggaattgcttagcgcaccagaactgaaaagcctcgcaaagacatttcatttagtgaatcctaacggccagaagcaacagttggtggatgctttcttaaagctggcaaagcagcgctcagtctgtacatggggtaaaaacaaaccaggaattggcgcagtcattcttaagcgcttctgttggctgcttcttcaatag

SEQ ID NO: 59494 - DNA, 1602 bp, Artificial Sequence
  derived and/or modified sequence
atgatgagcgagggtaagcccccagacaagaaacgcccacgcagaagcttatctattagtaaaaacaagaaaaaggcttctaattcgatcatttcatgctttaataatgctcctccggctaaactggcatgccccgtgtgtagcaaaatggtccctcggtacgatttaaatcgccacttagacgagatgtgcgcgaacaacgattttgtgcaggtggatcctggtcaggttggtctcatcaattccaatgtctcgatggtcgacttgaccagcgtgacgctcgaggatgtcacgcctaagaagtccccgccacccaaaaccaatttgacacctgggcagtctgactcagccaagcgagaggtgaaacagaagatttccccgtactttaagtcgaacgacgtggtctgcaaaaatcaggacgaattgcgaaatagaagcgtcaaggtgatctgcctgggatctttggcgagtaagctttccaggaagtacgtgaaagctaagaagagcatcgacaaagatgaagaattcgcaggcagcagtccacaatcctcaaagtccacggtggtaaagtcgctgatcgataacagtagcgagattgaggacgaagatcagatcctggagaacagctcacagaaggaaaatgtctttaaatgtgactccttgaaggaggagtgcattcctgagcacatggttagaggtagcaagatcatggaggccgagagccagaaggcaacaagggaatgcgagaagtccgcgttgactcctggtttttcagacaatgccatcatgctgttctctcccgactttacattgagaaatactctgaagtcaacctccgaggactcgcttgtaaagcaagaatgcatcaaagaggtggtggaaaagagagaagcatgccactgcgaggaggtgaaaatgacagtagcctccgaagctaagatacaactgtccgatagcgaagccaaatcacactcctccgctgacgacgcaagcgcttggtctaacatacaggaagcgccattgcaggatgactcatgtctgaacaatgatatcccacatagtatccccttggagcagggcagttcctgtaacgggccaggccagactacgggacatccatactacctgcgttcattcctcgttgtactcaagacagtgctggagaatgaggatgatatgctgctgtttgacgagcaggaaaaaggtatcgtgaccaaattttatcagttatccgcaaccgggcagaaattgtacgtgagactgtttcaacgtaagctgagttggataaagatgaccaagctggaatacgaggagattgcccttgatctgaccccagtgattgaagagctaaccaatgctggcttcctgcagaccgagagcgaactccaggagctgagcgaggtgctcgaactgctatctgcgcctgagctgaagtccctggcaaaaacctttcacctggttaacccaaatgggcagaagcaacaactggttgatgcatttctgaaattggccaagcaacgctcagtctgtacttggggcaagaacaagccaggtattggagcggtgatcctgaaaagattctgttggctgcttttgcagtag

SEQ ID NO: 59495 - DNA, 2738 bp, Artificial Sequence
  derived and/or modified sequence
ctgggaatgcctggaagcgccggcgcgcggagccaggaagaagaaattgtcgagacgaataacatgaggtcatatagaatcccacttttggtgatttcaagtcaagaaagtaaaagtaaaccattgctatctttcaccttaaatatcctgtgttttattgctcagaacatccagtttttctaatactcatgatgtcagaagggaaacctcctgacaaaaaaaggcctcgtagaagcttatcaatcagcaagaataagaaaaaagcatctaattctattatttcgtgttttaacaatgcaccacctgctaaacttgcctgccccgtttgcagtaaaatggtgcctagatatgacttaaaccggcaccttgatgaaatgtgtgctaacaatgacttcgttcaagtggatccagggcaggttggcttaataaattcaaatgtgtctatggtagatttaaccagtgttaccttagaagatgtaacacctaagaagtcaccaccaccaaagacaaatttaacccctggccaaagtgattcagcaaaaagggaagtaaagcagaagatcagtccctactttaaaagtaatgatgtggtgtgcaaaaatcaagatgagctgagaaatcgtagtgtgaaagtcatttgtttgggaagcctagcatctaaattgtccagaaaatacgtaaaggctaaaaaatcaatagataaggatgaagaatttgccggttctagtccacagagttccaaatccacagttgttaagagcctgattgataactcttcagaaattgaggacgaggatcaaattttggagaacagttctcaaaaagaaaacgtgtttaaatgtgattctctaaaggaagagtgcattcctgaacatatggtaagaggaagtaaaataatggaagccgaaagccaaaaggctacccgggaatgtgagaaatcagccctcacccctggattctcagataatgcgatcatgttattctcaccagatttcactcttaggaatacattaaagtctacttcagaagacagtcttgtaaagcaagagtgtatcaaagaagtggttgaaaaacgtgaggcatgtcattgtgaagaagtaaaaatgactgttgcttcagaagctaaaatacagctgtcagattcagaggcaaaatctcatagttctgcagatgatgcttctgcatggagtaacatccaagaggctcctctgcaggatgacagttgcttaaacaatgatatccctcacagcattcctttggagcaggggtcaagctgcaatggtcctggtcaaacaaccggtcatccttactaccttcggagtttccttgtggtgctgaaaaccgtacttgagaatgaagatgatatgttgctctttgatgagcaggagaagggaattgtaactaaattttatcagttatcagctactggtcagaagttatatgtaaggctctttcaacgtaaattaagctggattaagatgaccaaattagagtatgaagagattgccttagacttaacacctgtgattgaagaattgacgaatgcaggctttctacagacagaatctgagttgcaagaactctctgaagtgcttgaactcctttctgctcctgaactaaaatccctagccaagaccttccacttggtgaatcccaatggacagaaacagcagctggtggacgcctttctcaaattggccaaacagcgttcagtctgcacttggggcaagaataagcctggaattggtgcagtgattttaaaaaggttttgttggctattgttacagtaaaaacatttaaaatgttgatagcacatattaacttacagtagattgtatacttgattgaactgtaattgtttatttcagttgtagttagattgagaaggctggaaaagccttaattgcaatagcctggattctttcttgggttattattcaaaatttttgtcgtaataccgtactaatttccaggaccaagaaaaatcggaaggcaataggcctttggtaaattgtagtattttattttccgagaaaaatacagttttaagtgattcttatgggattttaaggtaaactatttagtcaaatttttattttagtttttgtttactaaacaaagtataatcaggcagtcttaatgtgcaagttttcctgagtttaaacgtaacaatttaccaaaaactgtgagtggcttcttttgtccttgagaagcccttgacctgtttcagttgaaaattacaaaaacttttagaattgatttcttttgcccatgttatttatataatcaaactatatcaactctagcctgggaattcactactgtggagtcgaggatgaaatgagaggatgcttttgaaaacactttaacatgatgttgttatttattttatatatttgttttgtatatttcagttgttatgagcccatccttgttggggaggtgctataaatactaatctttaatgaaacataggtgtaataaggcagacattaagaaaaatataaataccaacacttgaaaaaagctcgtgttatagatttttaaaaagtacttcaataaattacatacttgtaattaattgacttgagaagtatagaatcctcatctgtgtggtatgttaaatgtcttctaagtcctttctttatctaattgtatttcttaagtatttgatgttaaccttatatgtaacattttataagcaagtaaacattaaatttagccaccctctggctggg

SEQ ID NO: 59496 - DNA, 1602 bp, Artificial Sequence
  derived and/or modified sequence
atgatgagcgagggcaagccccccgacaagaagagacccagaagaagcctgagcatcagcaagaacaagaagaaggccagcaacagcatcatcagctgcttcaacaacgccccccccgccaagctggcctgccccgtgtgcagcaagatggtgcccagatacgacctgaacagacacctggacgagatgtgcgccaacaacgacttcgtgcaggtggaccccggccaggtgggcctgatcaacagcaacgtgagcatggtggacctgaccagcgtgaccctggaggacgtgacccccaagaagagccccccccccaagaccaacctgacccccggccagagcgacagcgccaagagagaggtgaagcagaagatcagcccctacttcaagagcaacgacgtggtgtgcaagaaccaggacgagctgagaaacagaagcgtgaaggtgatctgcctgggcagcctggccagcaagctgagcagaaagtacgtgaaggccaagaagagcatcgacaaggacgaggagttcgccggcagcagcccccagagcagcaagagcaccgtggtgaagagcctgatcgacaacagcagcgagatcgaggacgaggaccagatcctggagaacagcagccagaaggagaacgtgttcaagtgcgacagcctgaaggaggagtgcatccccgagcacatggtgagaggcagcaagatcatggaggccgagagccagaaggccaccagagagtgcgagaagagcgccctgacccccggcttcagcgacaacgccatcatgctgttcagccccgacttcaccctgagaaacaccctgaagagcaccagcgaggacagcctggtgaagcaggagtgcatcaaggaggtggtggagaagagagaggcctgccactgcgaggaggtgaagatgaccgtggccagcgaggccaagatccagctgagcgacagcgaggccaagagccacagcagcgccgacgacgccagcgcctggagcaacatccaggaggcccccctgcaggacgacagctgcctgaacaacgacatcccccacagcatccccctggagcagggcagcagctgcaacggccccggccagaccaccggccacccctactacctgagaagcttcctggtggtgctgaagaccgtgctggagaacgaggacgacatgctgctgttcgacgagcaggagaagggcatcgtgaccaagttctaccagctgagcgccaccggccagaagctgtacgtgagactgttccagagaaagctgagctggatcaagatgaccaagctggagtacgaggagatcgccctggacctgacccccgtgatcgaggagctgaccaacgccggcttcctgcagaccgagagcgagctgcaggagctgagcgaggtgctggagctgctgagcgcccccgagctgaagagcctggccaagaccttccacctggtgaaccccaacggccagaagcagcagctggtggacgccttcctgaagctggccaagcagagaagcgtgtgcacctggggcaagaacaagcccggcatcggcgccgtgatcctgaagagattctgctggctgctgctgcagtag

SEQ ID NO: 59497 - protein, 854 aa, Artificial Sequence
  derived and/or modified sequence
MDFSMVAGAAAYNEKSGRITSLSLLFQKVFAQIFPQWRKGNTEECLPYKCSETGALGENYSWQIPINHNDFKILKNNERQLCEVLQNKFGCISTLVSPVQEGNSKSLQVFRKMLTPRIELSVWKDDLTTHAVDAVVNAANEDLLHGGGLALALVKAGGFEIQEESKQFVARYGKVSAGEIAVTGAGRLPCKQIIHAVGPRWMEWDKQGCTGKLQRAIVSILNYVIYKNTHIKTVAIPALSSGIFQFPLNLCTKTIVETIRVSLQGKPMMSNLKEIHLVSNEDPTVAAFKAASEFILGKSELGQETTPSFNAMVVNNLTLQIVQGHIEWQTADVIVNSVNPHDITVGPVAKSILQQAGVEMKSEFLATKAKQFQRSQLVLVTKGFNLFCKYIYHVLWHSEFPKPQILKHAMKECLEKCIEQNITSISFPALGTGNMEIKKETAAEILFDEVLTFAKDHVKHQLTVKFVIFPTDLEIYKAFSSEMAKRSKMLSLNNYSVPQSTREEKRENGLEARSPAINLMGFNVEEMYEAHAWIQRILSLQNHHIIENNHILYLGRKEHDILSQLQKTSSVSITEIISPGRTELEIEGARADLIEVVMNIEDMLCKVQEEMARKKERGLWRSLGQWTIQQQKTQDEMKENIIFLKCPVPPTQELLDQKKQFEKCGLQVLKVEKIDNEVLMAAFQRKKKMMEEKLHRQPVSHRLFQQVPYQFCNVVCRVGFQRMYSTPCDPKYGAGIYFTKNLKNLAEKAKKISAADKLIYVFEAEVLTGFFCQGHPLNIVPPPLSPGAIDGHDSVVDNVSSPETFVIFSGMQAIPQYLWTCTQEYVQSQDYSSGPMRPFAQHPWRGFASGSPVD

SEQ ID NO: 59498 - DNA, 2565 bp, Artificial Sequence
  derived and/or modified sequence
atggacttttcaatggtggccggggctgccgcctataacgagaaatctggcagaattacctccttgtcactgctgtttcagaaggtgtttgcacagatcttcccccagtggaggaagggaaatacagaggagtgcctgccgtataagtgtagcgagacgggagccctgggcgagaattattcatggcagatcccaattaaccacaacgacttcaagattctaaaaaataacgagaggcagctatgtgaagtactacaaaataagttcggatgcatttccacattagtgtccccagtgcaagaagggaattctaagtctctgcaggttttccggaaaatgctgacgcccagaattgaactctctgtctggaaggacgatcttactacccatgctgtggatgcagtggtcaatgcagctaacgaggatttgctacacggtgggggactcgccctagcactcgtcaaagccggaggctttgaaatccaggaagagagcaagcagttcgtcgctagatacggaaaggtttccgctggcgagattgccgtcactggcgccggaagattgccctgcaaacagatcattcatgcggtgggtcctagatggatggagtgggataagcaagggtgtactgggaagctccagcgggccatcgtgagcatcctaaactatgttatctataagaacacacacattaagaccgtggccattcccgccctgtcttcgggtatctttcagttccccttaaatttgtgcaccaagaccatagtggagaccatcagggttagcctgcagggaaagcctatgatgtccaacctgaaggaaattcacctggtaagcaacgaggacccaacagttgccgccttcaaagcagcctcagaattcatcctgggcaagagtgaactcggccaggagactacgccctcattcaacgctatggttgtcaacaacttaacgctccaaatagtgcagggtcatatcgagtggcagactgccgatgtcatagtgaactctgtaaatccccacgacatcactgtgggtcccgttgccaagtcaatccttcagcaggccggcgtggaaatgaaatccgaattcctggctaccaaagcaaaacaattccagaggtctcagctggtattggtcactaagggctttaacttgttttgcaaatacatataccacgtactctggcacagcgagtttccaaagcctcagatccttaagcacgctatgaaggagtgtctcgagaagtgcattgagcaaaacattaccagtatatcgttccccgcattaggtactggaaacatggagattaagaaggaaaccgccgctgagatcctttttgacgaagtactcacttttgccaaggatcacgttaagcaccagctgacagtcaagtttgttatcttccctactgacctggagatctacaaagcctttagttccgaaatggccaagaggtctaagatgctctccctcaacaactattcagtgccccaatccacacgggaggagaaaagggaaaatggtttggaagccaggtcaccagctataaatctgatgggctttaatgtggaagagatgtatgaggctcatgcatggatacagagaatccttagcctgcaaaaccaccacattatcgaaaataaccacatcctgtacctaggaaggaaggaacatgatatcctgtctcagttgcagaagacatccagcgtctccatcacagagataatatcccctgggcgtaccgagttggaaatagagggagcgcgggctgacctcatcgaagtggtaatgaacatcgaggacatgctttgcaaggtgcaggaggaaatggctcgaaagaaagagcgcggcctctggcggagcctggggcagtggaccattcagcagcaaaaaacacaggacgagatgaaggaaaacatcatttttctcaagtgtcctgtaccacctacgcaggagctgctggatcaaaagaaacagtttgaaaaatgtggactacaggtgttgaaggtggaaaaaattgacaatgaagttcttatggctgcattccagagaaaaaaaaagatgatggaagagaagcttcaccgccagcccgtgtcccaccggctgttccagcaggttccgtatcaattctgtaacgtggtttgtcgggttggcttccagagaatgtacagtaccccatgtgacccgaaatacggagccggaatctacttcacaaaaaatttaaaaaacctcgccgagaaggctaagaaaatatccgccgctgacaagctgatttatgtgtttgaggcagaagtgctgacggggttcttctgccaaggacaccctctgaacatcgtgcctccacctctgagccctggagctattgatggacacgattcggtagtggacaatgtgagtagccccgaaacgtttgtgattttctcagggatgcaggccatcccccagtacttgtggacgtgcacgcaggagtacgtgcagagccaggactactcgagtggtccaatgcgccctttcgctcagcacccttggagaggtttcgctagcggcagccccgtggactag

SEQ ID NO: 59499 - DNA, 2334 bp, Artificial Sequence
  derived and/or modified sequence
atgagtgtgtcctgcgtcaagtcctcaagaatctctcttgccgtcagtctgccatggagccttcagttccggaaggccaccgcaaacctttgcgtgtttagaaaaatgttgacaccacgcatcgagctgtccgtgtggaaagacgacctaacaacccatgccgtggatgccgttgtgaatgctgcgaacgaggatttgcttcacggagggggacttgccttggccctggttaaggcaggggggttcgaaatccaggaagagtctaagcagttcgttgccaggtacggcaaggtgagcgcaggggagatcgcagtcaccggggcaggacgccttccctgcaagcaaattatccatgccgttggacctcgttggatggagtgggataagcagggttgcactggaaaattgcagagagctatcgtatccatccttaactacgtaatttataagaatacccacatcaagacagttgccattccagcgttgtcctcagggatttttcaatttcctttgaacctgtgcaccaaaactattgtggagacaattcgggtgtcgcttcagggtaaaccaatgatgtctaacttgaaggagattcacctcgttagcaacgaggacccgactgtggccgcatttaaggccgcctcagagttcattttaggaaaatctgagctcgggcaggaaaccacaccaagcttcaatgccatggtcgtgaacaaccttacgctgcagatcgtacagggccatatcgaatggcagaccgccgatgtgatcgtgaactccgtgaatccccatgacatcacggtgggacctgtggccaaatccatcttgcagcaagctggcgtggagatgaagtctgagttccttgctacgaaggctaaacagttccagcgtagtcagctggtgttagtgaccaagggcttcaacctattttgtaaatacatttatcatgtgctgtggcatagcgaattccccaagcctcagatccttaaacatgccatgaaggaatgcctcgagaagtgcattgaacagaacataacgtctatttcctttccagccctgggaaccggcaacatggagattaaaaaggagaccgcagccgaaattctgtttgatgaagtgctgacattcgcgaaagatcatgtgaaacatcaacttactgtcaagtttgtaatttttcccacggatcttgagatttacaaggccttcagtagtgaaatggcaaaacgttccaagatgctctctctcaacaactattcagtaccgcaatccactcgggaggagaaacgggaaaacggccttgaggcacggtctccggctatcaacctgatgggcttcaacgttgaagagatgtacgaagctcatgcctggattcaacgtattctgagtcttcagaatcatcacatcattgaaaacaaccatattctgtacctgggaaggaaagaacatgacattctgagtcagctgcagaagaccagttccgtgagcatcaccgagatcatttcccccggacgtacagaactggagatcgagggggctcgcgctgacctgattgaggtggtgatgaacatagaggacatgctctgtaaggtacaggaagaaatggctcgaaagaaggaaagaggcctatggaggagtctgggtcagtggacaatacagcagcaaaagactcaggacgaaatgaaggagaacataatcttcctgaaatgccccgtccctcccacacaggaactgttggaccagaagaagcaatttgagaaatgcggtttacaggtcctgaaagtggaaaagattgacaatgaagtgctgatggctgcttttcagaggaaaaaaaagatgatggaagagaagctccatcgacagccggttagccatagattatttcagcaggtgccgtatcagttttgcaatgtagtctgcagggtgggctttcaacgcatgtactctaccccctgcgatccaaagtatggggccggtatctattttaccaaaaacctcaagaaccttgccgagaaagcgaaaaagatttcggccgctgacaaactgatctacgtcttcgaagctgaggtgctcactgggttcttttgtcaaggccaccctctgaacatcgtccccccacccctgtcaccaggagccattgacggccacgacagtgtcgtcgacaatgtttcctctccagaaacctttgtcatcttttccggcatgcaggccatcccccagtatctctggacctgcacccaggagtatgtccagagccaggattattcttctggaccaatgcgcccattcgcccagcatccctggcgcggtttcgccagcggtagccccgtggattag

SEQ ID NO: 59500 - DNA, 2565 bp, Artificial Sequence
  derived and/or modified sequence
atggacttctccatggtggccggggccgccgcctacaatgagaagagcggccgcatcaccagcctgagcctgctcttccagaaggtgtttgcccagatcttcccccagtggaggaaaggaaacacagaggagtgcctgccctacaagtgcagcgagactggagccctgggggagaactacagctggcagatccccatcaaccacaatgacttcaagatcctgaagaacaatgaaaggcagctgtgtgaggtgctgcagaacaagtttggctgcatcagcaccctggtgtcccctgtgcaggagggcaacagcaagagcctgcaggtgttcaggaagatgctgaccccccgcatcgagctgtctgtgtggaaggatgacctgaccacccatgctgtggatgctgtggtgaatgctgccaatgaagacctgctgcatggaggcggcctggccctggccctggtgaaggccggcggctttgagatccaggaggagagcaagcagtttgtggcccgctatggcaaggtgtctgctggggagattgctgtgactggagctggccgcctgccctgcaagcagatcatccatgctgtgggcccccgctggatggagtgggacaagcagggctgcaccgggaagctgcagagggccatcgtgtccatcctgaactacgtgatctacaagaacacccacatcaagacagtggccatcccagccctgagcagcggcatcttccagttccccctgaacctgtgcaccaagaccatcgtggagaccatccgggtgtccctgcagggcaagcccatgatgagcaacctgaaggagatccacctggtgtccaatgaagaccccaccgtggccgccttcaaggccgccagcgagttcatcctgggcaagtctgagctgggccaggagaccacccccagcttcaatgccatggtggtgaacaacctgaccctgcagatcgtgcagggccacatcgagtggcagacagcagatgtgattgtgaacagcgtgaacccccatgacatcaccgtgggccctgtggccaagagcatcctgcagcaggccggcgtggagatgaagtctgagttcctggccaccaaggccaagcagttccagaggagccagctggtgctggtgaccaagggcttcaacctcttctgcaagtacatctaccacgtgctgtggcacagcgagttccccaagccccagatcctgaagcacgccatgaaggagtgcctggagaagtgcatcgagcagaacatcaccagcatctccttccctgccctgggcaccggcaacatggagatcaagaaggagacagctgctgagatcctgtttgatgaggtgctgacctttgccaaggaccacgtgaagcaccagctgactgtgaagtttgtgatcttccccacagacctggagatctacaaggccttcagcagcgagatggccaagaggagcaagatgctgagcctgaacaactacagcgtgccccagagcacccgggaggagaagagagaaaatggcctggaggcccggagccctgccatcaacctgatgggcttcaacgtggaggagatgtatgaggcccacgcctggatccagaggatcctgagcctgcagaaccaccacatcatcgagaacaaccacatcctgtacctgggcaggaaggagcatgacatcctgagccagctgcagaagaccagctctgtgtccatcacagagatcatcagccctggccgcacagagctggagattgagggcgcccgggctgacctgattgaggtggtgatgaacatcgaggacatgctgtgcaaggtgcaggaggagatggccaggaagaaggagcggggcctgtggaggagcctgggccagtggaccatccagcagcagaagacccaggatgagatgaaggagaacatcatcttcctgaagtgccctgtgccccccacccaggagctgctggaccagaagaagcagtttgagaagtgtggcctgcaggtgctgaaggtggagaagattgacaatgaggtgctgatggccgccttccagaggaagaagaagatgatggaggagaagctgcaccggcagcctgtgagccacaggctcttccagcaggtgccctaccagttctgcaatgtggtgtgccgggtgggcttccagaggatgtacagcaccccctgtgaccccaagtacggggccggcatctacttcaccaagaacctgaagaacctggccgagaaggccaagaagatctctgctgctgacaagctgatctacgtgtttgaggccgaggtgctgaccggcttcttctgccagggccaccccctgaacatcgtgcccccacccctgagccctggggccattgatggccatgacagcgtggtggacaacgtgagcagccctgagacctttgtgatcttcagcggcatgcaggccatcccccagtacctgtggacctgcacccaggagtatgtgcagagccaggactacagcagcggccccatgaggccctttgcccagcacccctggaggggctttgccagcggcagccctgtggactag

SEQ ID NO: 59501 - DNA, 2334 bp, Artificial Sequence
  derived and/or modified sequence
atgtctgtgtcctgtgtgaagagcagccgcatcagcctggccgtgtccctgccctggagcctgcagttcaggaaggccacagccaacctgtgtgtgttcaggaagatgctgaccccaagaattgagctgtctgtgtggaaggatgacctgaccacccatgctgtggatgctgtggtgaatgctgccaatgaagacctgctgcacggcggcggcctggccctggccctggtgaaggccggcggctttgagatccaggaggagagcaagcagtttgtggcccgctatggcaaggtgtctgctggggagattgctgtgactggagctggccgcctgccctgcaagcagatcatccatgctgtgggcccccgctggatggagtgggacaagcagggctgcaccgggaagctgcagagggccatcgtgtccatcctgaactacgtgatctacaagaacacccacatcaagacagtggccatcccagccctgagcagcggcatcttccagttccccctgaacctgtgcaccaagaccatcgtggagaccatccgggtgtccctgcagggcaagcccatgatgagcaacctgaaggagatccacctggtgtccaatgaagaccccaccgtggccgccttcaaggccgccagcgagttcatcctgggcaagtctgagctgggccaggagaccacccccagcttcaatgccatggtggtgaacaacctgaccctgcagatcgtgcagggccacatcgagtggcagacagcagatgtgattgtgaacagcgtgaacccccatgacatcaccgtgggccctgtggccaagagcatcctgcagcaggccggcgtggagatgaagtctgagttcctggccaccaaggccaagcagttccagaggagccagctggtgctggtgaccaagggcttcaacctcttctgcaagtacatctaccacgtgctgtggcacagcgagttccccaagccccagatcctgaagcacgccatgaaggaatgtctggagaagtgcatcgagcagaacatcaccagcatctccttccctgccctgggcactggaaacatggagatcaagaaggagacagctgctgagatcctgtttgatgaggtgctgacctttgccaaggaccacgtgaagcaccagctgactgtgaagtttgtgatcttccccacagacctggagatctacaaggccttcagcagcgagatggccaagaggagcaagatgctgagcctgaacaactacagcgtgccccagagcacccgggaggagaagcgggagaatggcctggaggcccggagccctgccatcaacctgatgggcttcaacgtggaggagatgtatgaggcccacgcctggatccagaggatcctgagcctgcagaaccaccacatcatcgagaacaaccacatcctgtacctgggcaggaaggagcatgacatcctgagccagctgcagaagaccagctctgtgtccatcacagagatcatcagccctggccgcacagagctggagattgaaggagcccgggctgacctgattgaggtggtgatgaacatcgaggacatgctgtgcaaggtgcaggaggagatggccaggaagaaggagcggggcctgtggaggagcctgggccagtggaccatccagcagcagaagacccaggatgagatgaaggagaacatcatcttcctgaagtgccctgtgccccccacccaggagctgctggaccagaagaagcagtttgagaagtgtggcctgcaggtgctgaaggtggagaagattgacaatgaggtgctgatggccgccttccagaggaagaagaagatgatggaggagaagctgcaccggcagcctgtgagccacaggctcttccagcaggtgccctaccagttctgcaatgtggtgtgccgggtgggcttccagaggatgtacagcaccccctgtgaccccaagtatggagctggcatctacttcaccaagaacctgaagaacctggccgagaaggccaagaagatctctgctgctgacaagctgatctacgtgtttgaagctgaggtgctgaccggcttcttctgccagggccaccccctgaacatcgtgcccccacccctgagccctggggccattgatggccatgattctgtggtggacaacgtgagcagccctgagaccttcgtcatcttcagcggcatgcaggccatcccccagtacctgtggacctgcacccaggagtatgtgcagagccaggactacagcagcggccccatgaggccctttgcccagcacccctggaggggctttgccagcggcagccctgtggactag

SEQ ID NO: 59502 - DNA, 2565 bp, Artificial Sequence
  derived and/or modified sequence
atggacttcagcatggtggccggcgccgccgcctacaacgagaagtctggaagaatcacgtcgctgtcgctcctgttccaaaaagtgtttgcccagattttcccacagtggaggaaaggaaacactgaagagtgcctcccttacaagtgttccgagaccggtgctctaggcgagaattactcctggcagatacctattaatcacaacgattttaagatacttaaaaacaacgaaagacaattgtgcgaagttcttcaaaacaaatttggttgtatctctaccttagttagtcccgtgcaagagggtaatagcaaatccttgcaggtcttccggaagatgctgactccacgtattgaactaagcgtctggaaagatgacctcacaacccacgcagtggacgctgtggtgaatgccgcaaacgaggacttgttacacggcggcggactggccttggcactagtcaaagcgggtggctttgagatacaagaagaatcgaagcagtttgtcgcgcgctatggaaaagtatcagccggggaaattgcggttacgggtgcaggaaggttaccttgtaagcagattatacacgccgttggtccgcggtggatggagtgggacaagcagggatgtaccggcaaactgcagagagcgatagtcagcattctcaactacgttatctataagaatacacatatcaaaacagtcgccatacctgctttgagctccggaatcttccaattcccgctgaatctctgcactaagaccattgtagaaaccattcgcgtgtccctgcaggggaagcccatgatgtccaatcttaaggagatccacctcgtgtcaaacgaggacccgactgtagctgcctttaaggccgcatccgagttcatcctcggaaagagcgaattgggacaggaaactaccccatcctttaatgctatggtggtcaacaacttgacactgcaaatcgttcagggccacattgagtggcaaaccgctgatgttatagtgaatagcgtcaatccacacgatatcacagtgggccctgtggctaagtcaattctgcaacaggcaggcgtcgaaatgaaatccgaattcttagccaccaaagccaaacagtttcagcgatctcagctagtgctcgtaacaaaagggttcaatctgttctgcaagtacatttaccatgtgttgtggcactccgagtttccaaaaccacaaattctgaagcacgccatgaaagaatgccttgaaaagtgcatcgaacagaacatcaccagtatttcgtttcccgccttgggcactggaaatatggaaattaagaaggagacagcagctgaaatattgttcgacgaagtcctgaccttcgcaaaggatcacgtgaagcaccaacttactgtcaaattcgtgatcttcccaacagacttggaaatttataaggcattttcttcggaaatggctaaacgtagcaaaatgctgtcactcaataattacagtgtcccacagtcaactagggaggaaaagagagagaatgggttggaagccagaagtccagcgatcaacctaatggggtttaacgtggaggagatgtacgaggcacacgcctggatacaacggattctttcgctgcagaatcaccacattattgagaacaaccacatcctctacttgggccggaaagagcatgatatactgagccagcttcaaaaaaccagtagcgtatcaattactgagataatctctcccggtagaactgaactagagatcgagggagctagagctgacctcatcgaagtggtgatgaatatcgaggacatgctctgtaaggtacaggaggagatggcgcggaagaaggagaggggattgtggagatctctgggacagtggaccatacaacagcagaaaacacaagacgaaatgaaagaaaacatcatctttctcaaatgtcctgtccccccgacgcaagaactgctcgaccagaagaagcagtttgagaagtgcggcctccaggtccttaaggttgagaagattgataatgaggtgctcatggccgcgtttcaacgtaaaaagaagatgatggaagaaaaactgcatagacagccagtgtcgcaccgccttttccagcaggtcccgtatcagttctgtaatgtcgtgtgtcgagtgggattccagagaatgtacagcaccccttgtgaccccaaatatggtgcaggcatttactttactaaaaacctgaagaatctagccgaaaaggccaaaaagatttctgcagcagataagttaatctatgtgttcgaagccgaggtgctgaccggattcttctgtcagggacatccactcaacatcgtgcctccacctctcagccctggagccatcgacggacacgactctgtggtcgataacgtgagttcaccagaaacttttgtgattttctctggaatgcaagccattccacagtacctgtggacctgcacccaggagtatgttcagagccaggattattccagtggtcccatgcgaccatttgctcagcatccttggagaggatttgcctccggctcgcctgtcgactag

SEQ ID NO: 59503 - DNA, 2334 bp, Artificial Sequence
  derived and/or modified sequence
atgagcgtgagctgcgtgaagagcagccggatcagcctggccgtgtctctgccgtggtcgctgcaatttcgcaaagccaccgctaatttatgcgtttttaggaaaatgctgacccctaggattgagctgagtgtgtggaaggatgaccttactacgcacgcagtggatgctgtggtgaacgcagctaacgaagacctcctccatggggggggacttgccttggccttagtaaaagcaggcggctttgagatccaggaggagtccaagcagtttgttgctcgttacggaaaagtttccgccggagagatagccgtgacaggagcaggtcgactcccctgtaaacagatcatacacgcagttggacctagatggatggagtgggataaacagggctgcacaggaaaattgcagcgcgctatcgtgagcatactgaactacgtgatatacaaaaacacgcacatcaaaaccgtcgcaattcctgctctgagcagcggcattttccaatttcccctgaatctgtgtaccaagacaattgtagaaaccatccgggtgagcctgcagggcaaaccaatgatgtccaacttgaaagaaattcaccttgtctccaacgaggacccgacagtggccgcgttcaaggccgcgagcgaatttatcttgggcaaaagtgaactggggcaagagacgactccatcattcaatgccatggtggtgaacaatcttaccttgcaaattgtccagggacacatagagtggcagactgccgacgttatcgtcaattcagttaatccacacgatatcacagtaggaccagtggccaagtctattctgcagcaggccggggttgaaatgaagtcagaatttctggcaacgaaagcaaagcagtttcagagaagccagcttgttctagtcactaagggcttcaatctattttgcaagtacatctaccatgtcttatggcactccgaatttccgaaacctcaaatcctaaaacatgcgatgaaagagtgtctggaaaaatgtattgagcagaatataacctctatttccttccccgctctgggaacaggaaatatggaaattaaaaaagagactgctgcagagattctcttcgacgaagtgcttaccttcgccaaggaccatgtgaagcatcagctgacagtgaagtttgtgatatttcctactgacctagaaatctataaagcttttagcagcgaaatggctaagcgatctaagatgctgtccctcaataactactctgtgccccagtcaacccgcgaagagaagcgagaaaatgggctagaagctaggagccctgcgattaatctgatgggctttaatgtagaggagatgtatgaggctcatgcctggatccaacgaatcctcagtctccaaaatcaccacattatcgagaacaaccatatcttgtatctgggccggaaagaacacgacatcttgtcgcagctccagaaaacctcaagcgtgagcatcactgagattatatctcctggacgcactgagctggagattgagggagctcgagcggatctcattgaggtggtcatgaacatagaggacatgctgtgtaaagtgcaggaggagatggcgagaaaaaaggagcgtggcctgtggcgaagcctaggccagtggacgattcagcaacaaaagactcaggatgaaatgaaagaaaacattatctttcttaaatgtcctgtcccacccacccaggagctgctagatcagaaaaaacaatttgagaaatgtggcctgcaggtgctgaaggtggaaaaaatcgacaatgaagttctcatggccgcttttcagcgcaaaaagaaaatgatggaggaaaagctccacaggcagcctgtttcacaccggctcttccagcaggtgccctaccagttttgtaacgtggtctgccgcgtgggctttcagagaatgtattcaacgccatgcgaccccaagtatggggccggcatctatttcaccaagaatcttaagaatctcgcagaaaaggccaaaaagatttccgctgccgataaattaatttacgtcttcgaagccgaggttctaaccggcttcttttgccaaggacacccccttaacatagtgccacctccactgagccctggggccatcgatgggcacgactccgtcgtggataatgtgtcatctcctgaaacttttgttatcttttcagggatgcaggctatcccccagtacttgtggacttgcacgcaggagtacgtgcagagccaggattattccagcggccccatgcgaccctttgcacaacatccatggcggggttttgcatccggttcacccgtggactag

SEQ ID NO: 59504 - DNA, 3198 bp, Artificial Sequence
  derived and/or modified sequence
gggcttcgtgttcctgggtgctgaccgtgcactccccgccgcccgaggacttagagctctggaagtagctctccagcttccttcgtactcgggggccggacttgtacacccgcacgaggagcggggacggcgggcgcagaagtgggccaccatatctggaaactacagtctatgctttgaagcgcaaaagggaataaacatttaaagactcccccggggacctggaggatggacttttccatggtggccggagcagcagcttacaatgaaaaatcaggtaggattacctcgctctcactcttgtttcagaaagtctttgctcagatctttcctcagtggagaaaggggaatacagaagaatgtctcccctacaagtgctcagagactggtgctcttggagaaaactatagttggcaaattcccattaaccacaatgacttcaaaattttaaaaaataatgagcgtcagctgtgtgaagtcctccagaataagtttggctgtatctctaccctggtctctccagttcaggaaggcaacagcaaatctctgcaagtgttcagaaaaatgctgactcctaggatagagttatcagtctggaaagatgacctcaccacacatgctgttgatgctgtggtgaatgcagccaatgaagatcttctgcatgggggaggcctggccctggccctggtaaaagctggtggatttgaaatccaagaagagagcaaacagtttgttgccagatatggtaaagtgtcagctggtgagatagctgtcacgggagcagggaggcttccctgcaaacagatcatccatgctgttgggcctcggtggatggaatgggataaacagggatgtactggaaagctgcagagggccattgtaagtattctgaattatgtcatctataaaaatactcacattaagacagtagcaattccagccttgagctctgggatttttcagttccctctgaatttgtgtacaaagactattgtagagactatccgggttagtttgcaagggaagccaatgatgagtaatttgaaagaaattcacctggtgagcaatgaggaccctactgttgctgcctttaaagctgcttcagaattcatcctagggaagagtgagctgggacaagaaaccaccccttctttcaatgcaatggtcgtgaacaacctgaccctccagattgtccagggccacattgaatggcagacggcagatgtaattgttaattctgtaaacccacatgatattacagttggacctgtggcaaagtcaattctacaacaagcaggagttgaaatgaaatcggaatttcttgccacaaaggctaaacagtttcaacggtcccagttggtactggtcacaaaaggatttaacttgttctgtaaatatatataccatgtactgtggcattcagaatttcctaaacctcagatattaaaacatgcaatgaaggagtgtttggaaaaatgcattgagcaaaatataacttccatttcctttcctgcccttgggactggaaacatggaaataaagaaggaaacagcagcagagattttgtttgatgaagttttaacatttgccaaagaccatgtaaaacaccagttaactgtaaaatttgtgatctttccaacagatttggagatatataaggctttcagttctgaaatggcaaagaggtccaagatgctgagtttgaacaattacagtgtcccccagtcaaccagagaggagaaaagagaaaatgggcttgaagctagatctcctgccatcaatctgatgggattcaacgtggaagagatgtatgaggcccacgcatggatccaaagaatcctgagtctccagaaccaccacatcattgagaataatcatattctgtaccttgggagaaaggaacatgacattttgtctcagcttcagaaaacttcaagtgtctccatcacagaaattatcagcccaggaaggacagagttagagattgaaggagcccgggctgacctcattgaggtggttatgaacattgaagatatgctttgtaaagtacaggaggaaatggcaaggaaaaaggagcgaggcctttggcgctcgttaggacagtggactattcagcaacaaaaaacccaagacgaaatgaaagaaaatatcatatttctgaaatgtcctgtgcctccaactcaagagcttctagatcaaaagaaacagtttgaaaaatgtggtttgcaggttctaaaggtggagaagatagacaatgaggtccttatggctgcctttcaaagaaagaagaaaatgatggaagaaaaactgcacaggcaacctgtgagccataggctgtttcagcaagtcccataccagttctgcaatgtggtatgcagagttggctttcaaagaatgtactcgacaccttgcgatccaaaatacggagctggcatatacttcaccaagaacctcaaaaacctggcagagaaggccaagaaaatctctgctgcagataagctgatctatgtgtttgaggctgaagtactcacaggcttcttctgccagggacatccgttaaatattgttcccccaccactgagtcctggagctatagatggtcatgacagtgtggttgacaatgtctccagccctgaaacctttgttatttttagtggcatgcaggctatacctcagtatttgtggacatgcacccaggaatatgtacagtcacaagattactcatcaggaccaatgagaccctttgcacagcatccttggaggggattcgcaagtggcagccctgttgattaatctctacatcattttaacagctggtatggccttaccttgggtgaactaaccaaataatgaccatcgatggctcaaagagtggcttgaatatatcccatgggttatctgtatggactgactgggttattgaaaggactagccacatactagcatcttagtgcctttatctgtctttatgtcttggggttggggtaggtagataccaaatgaaacactttcaggaccttccttcctcttgcagttgttctttaatctcctttactagaggagataaatattttgcatataatgaagaaatttttctagtatataacgcaggccttttattttctaaaatgatgatagtataaaaatgttaggataacagaatgattttagattttccagagaatattataaagtgct

SEQ ID NO: 59505 - DNA, 3025 bp, Artificial Sequence
  derived and/or modified sequence
gagtaggtccggtgcctctgggccctcggggtcccctctcctgcaggctcgaggtgggcggggagaagggggacgggcgcggacccgggtcccagggccaggcctcccttgtgagtagactatgcaaagaaaaagtgggccaccatatctggaaactacagtctatgctttgaagcgcaaaagggaataaacatttaaagactcccccggggacctggaggatggacttttccatggtggccggagcagcagcttacaatgaaaaatcagagactggtgctcttggagaaaactatagttggcaaattcccattaaccacaatgacttcaaaattttaaaaaataatgagcgtcagctgtgtgaagtcctccagaataagtttggctgtatctctaccctggtctctccagttcaggaaggcaacagcaaatctctgcgtgttcagaaaaatgctgactcctaggatagagttatcagtctggaaagatgacctcaccacacatgctgttgatgctgtggtgaatgcagccaatgaagatcttctgcatgggggaggcctggccctggccctggtaaaagctggtggatttgaaatccaagaagagagcaaacagtttgttgccagatatggtaaagtgtcagctggtgagatagctgtcacgggagcagggaggcttccctgcaaacagatcatccatgctgttgggcctcggtggatggaatgggataaacagggatgtactggaaagctgcagagggccattgtaagtattctgaattatgtcatctataaaaatactcacattaagacagtagcaattccagccttgagctctgggatttttcagttccctctgaatttgtgtacaaagactattgtagagactatccgggttagtttgcaagggaagccaatgatgagtaatttgaaagaaattcacctggtgagcaatgaggaccctactgttgctgcctttaaagctgcttcagaattcatcctagggaagagtgagctgggacaagaaaccaccccttctttcaatgcaatggtcgtgaacaacctgaccctccagattgtccagggccacattgaatggcagacggcagatgtaattgttaattctgtaaacccacatgatattacagttggacctgtggcaaagtcaattctacaacaagcaggagttgaaatgaaatcggaatttcttgccacaaaggctaaacagtttcaacggtcccagttggtactggtcacaaaaggatttaacttgttctgtaaatatatataccatgtactgtggcattcagaatttcctaaacctcagatattaaaacatgcaatgaaggagtgtttggaaaaatgcattgagcaaaatataacttccatttcctttcctgcccttgggactggaaacatggaaataaagaaggaaacagcagcagagattttgtttgatgaagttttaacatttgccaaagaccatgtaaaacaccagttaactgtaaaatttgtgatctttccaacagatttggagatatataaggctttcagttctgaaatggcaaagaggtccaagatgctgagtttgaacaattacagtgtcccccagtcaaccagagaggagaaaagagaaaatgggcttgaagctagatctcctgccatcaatctgatgggattcaacgtggaagagatgtatgaggcccacgcatggatccaaagaatcctgagtctccagaaccaccacatcattgagaataatcatattctgtaccttgggagaaaggaacatgacattttgtctcagcttcagaaaacttcaagtgtctccatcacagaaattatcagcccaggaaggacagagttagagattgaaggagcccgggctgacctcattgaggtggttatgaacattgaagatatgctttgtaaagtacaggaggaaatggcaaggaaaaaggagcgaggcctttggcgctcgttaggacagtggactattcagcaacaaaaaacccaagacgaaatgaaagaaaatatcatatttctgaaatgtcctgtgcctccaactcaagagcttctagatcaaaagaaacagtttgaaaaatgtggtttgcaggttctaaaggtggagaagatagacaatgaggtccttatggctgcctttcaaagaaagaagaaaatgatggaagaaaaactgcacaggcaacctgtgagccataggctgtttcagcaagtcccataccagttctgcaatgtggtatgcagagttggctttcaaagaatgtactcgacaccttgcgatccaaaatacggagctggcatatacttcaccaagaacctcaaaaacctggcagagaaggccaagaaaatctctgctgcagataagctgatctatgtgtttgaggctgaagtactcacaggcttcttctgccagggacatccgttaaatattgttcccccaccactgagtcctggagctatagatggtcatgacagtgtggttgacaatgtctccagccctgaaacctttgttatttttagtggcatgcaggctatacctcagtatttgtggacatgcacccaggaatatgtacagtcacaagattactcatcaggaccaatgagaccctttgcacagcatccttggaggggattcgcaagtggcagccctgttgattaatctctacatcattttaacagctggtatggccttaccttgggtgaactaaccaaataatgaccatcgatggctcaaagagtggcttgaatatatcccatgggttatctgtatggactgactgggttattgaaaggactagccacatactagcatcttagtgcctttatctgtctttatgtcttggggttggggtaggtagataccaaatgaaacactttcaggaccttccttcctcttgcagttgttctttaatctcctttactagaggagataaatattttgcatataatgaagaaatttttctagtatataacgcaggccttttattttctaaaatgatgatagt

SEQ ID NO: 59506 - DNA, 2565 bp, Artificial Sequence
  derived and/or modified sequence
atggacttttccatggtggccggagccgctgcctataacgaaaaatccggcaggattacatctctttctctactgtttcagaaggtgtttgcccaaatattccctcagtggcgcaagggaaatacggaagaatgtctcccctacaaatgcagcgagaccggagcactaggtgagaactattcctggcagatcccaatcaatcataacgatttcaagattctgaagaacaacgagcggcagctttgtgaagtcctccagaataaatttggctgtatcagtacactggtctcaccagtccaggaagggaactccaaatcacttcaagtgtttcggaagatgctgaccccacggatcgagctgtcagtgtggaaagatgacttgaccacccatgccgtggatgccgtggtcaacgccgcaaacgaggatttacttcacgggggaggactagccttggctctggtcaaagcagggggtttcgagattcaggaagagtccaagcagtttgtcgcgagatacggcaaagtgtcagccggagaaattgcagtgactggggctggcaggctgccctgtaagcagatcatccatgctgtgggcccaaggtggatggagtgggacaagcagggttgcaccggtaaactgcagagagcgattgtgtctatccttaattacgttatctacaaaaacactcacattaaaaccgtcgcaatcccagcactctcaagcggcatttttcagtttcctctgaacctgtgcactaaaaccatagtggaaaccattcgcgtctcccttcaaggtaagcccatgatgagcaatctaaaagaaatccatctcgtgtcaaacgaggatcctacggttgccgcattcaaagcagcttctgaattcattttaggaaagagcgaacttgggcaggaaaccacacccagttttaacgcaatggtggtcaacaacctgacccttcaaattgtccagggccacatcgagtggcagacagccgacgtgatcgtcaatagtgtaaacccacacgatattacggtcggcccagtggctaagtctatcctccagcaggcgggtgttgaaatgaaaagcgagtttctggccacgaaggcgaaacagttccagcgcagccagttagtgttagttaccaagggttttaacttgttctgcaagtacatttaccatgtgctttggcactccgaatttccaaagccgcaaattcttaagcatgcaatgaaagaatgtctggaaaagtgcatcgagcagaatataacatcaataagtttcccggctttaggcaccgggaacatggaaatcaagaaagaaaccgcagcagaaattctgtttgatgaagtactgactttcgcgaaagaccacgtaaaacaccagctaactgtgaaatttgtcattttcccaactgacctcgagatctacaaagctttcagcagcgagatggctaaacggtctaagatgctgtctctgaataattattccgtgcctcagtctactcgcgaggagaaaagggaaaatggactggaggctaggtcccctgctatcaatctcatgggtttcaatgtagaggagatgtatgaagctcacgcttggattcaaaggatcttaagtctgcagaatcaccatatcatcgagaacaaccatatcctataccttggacggaaggaacatgacatactctcacagctccagaaaaccagtagtgttagcattacagaaatcatctccccgggtcgcacagagcttgaaatagaaggggcaagagcagacctgattgaggtggtgatgaacatcgaggatatgctttgcaaagtgcaagaggaaatggctcgcaagaaggagagaggactatggcggtctcttggccaatggaccattcagcagcagaaaacgcaagatgagatgaaagaaaacataatattcctgaagtgtcccgttcctccgacgcaggaactgcttgatcaaaagaaacagttcgagaagtgcggactgcaggtgctcaaggtggaaaagatcgacaatgaggtactgatggctgcgtttcagcgcaagaaaaaaatgatggaggagaaactgcataggcaaccggttagccaccggctgttccagcaggtgccatatcagttctgtaatgtggtgtgtagggtcggcttccagagaatgtattccactccctgcgacccaaaatacggcgctggaatctattttaccaagaacctcaaaaatttagccgagaaagcgaagaagatctccgctgccgacaagttgatttacgtcttcgaggcggaagtgctcaccggtttcttttgtcagggtcacccattaaatatcgtgccaccacccctgtccccaggtgccatcgatggacacgatagtgttgtagacaatgtgagctcccccgaaacctttgtgatcttctcaggaatgcaagccattccacagtatctctggacctgcactcaggagtatgtgcaatcccaggactactccagtggacccatgagacccttcgcccagcacccctggagaggctttgcctctggatcaccagtggactag

SEQ ID NO: 59507 - DNA, 2334 bp, Artificial Sequence
  derived and/or modified sequence
atgtccgtttcctgcgtgaagagctctagaatttccttagcagtgtccctcccctggtctctccaattcaggaaagcaaccgccaatctgtgtgtgtttcggaaaatgctcaccccgcgtatcgaactgagcgtttggaaagatgatctgacaacacatgctgtggatgccgtggtcaatgccgcaaacgaggatctgctgcatggtggcggactcgcgctggctctcgtgaaggctggagggtttgagatccaagaagaaagtaagcaattcgtggctcgctatggcaaagtgtctgccggtgagattgctgttacaggggcaggcagattgccatgtaagcaaatcatccacgccgtcggcccacgatggatggagtgggacaaacagggctgtactgggaagctgcagcgggcaatcgttagcatcctgaattatgttatctataaaaatactcatattaaaaccgtcgccatccccgcactgagctccggtatttttcagttccctctgaacctgtgtacaaagacaattgttgagaccatacgagtgtctctccagggcaagcccatgatgagcaatcttaaggaaattcacttggttagtaatgaagaccccacggtggccgctttcaaagcggcaagcgaatttattctggggaagtcagaactgggccaggaaactacgccttcctttaacgccatggtggtgaacaatctgacacttcagattgtgcagggccacatcgagtggcagaccgcggacgtgatcgtgaactcagtcaacccacatgatattacagtcggacccgtggctaagtctattctacagcaggcaggtgtggagatgaagtcggagttccttgctaccaaggctaaacagttccagagatctcagttggtcttagtaacaaaaggctttaatctgttttgtaagtacatctaccacgttctatggcactctgaattccctaaaccccagatcctgaagcacgccatgaaggagtgtctggaaaaatgtattgagcaaaatatcacttccatttcctttccagctctgggaaccgggaacatggagattaagaaggagacggccgctgaaatcctgtttgacgaagtcttgacctttgcaaaggatcacgttaagcaccagctcacagtcaagtttgtgatattccccactgacctagaaatctacaaggcatttagtagtgagatggccaaaaggagcaagatgctgtctttgaacaattattcagtaccacagtccaccagagaggaaaagcgcgagaacggactggaggcccgatctcctgcgatcaatctaatgggttttaacgtggaagaaatgtacgaggcacacgcgtggattcagcgcatcctatccctccaaaatcaccatattatcgaaaataatcacatcctttacctgggcaggaaagaacacgacatcctgtcccagctgcagaaaacctcttctgtctccatcacggaaatcataagccctgggagaaccgagctcgaaatagagggagcaagggccgatttgatagaggtggtgatgaatatcgaggacatgttgtgtaaagtccaggaagagatggctcgcaagaaggaacgaggcctgtggagatctttaggtcagtggaccatccagcagcaaaagacacaggatgagatgaaggagaacattattttccttaagtgccctgttcctcccactcaagagttgctcgatcagaagaaacagttcgaaaagtgcggtctccaggtgcttaaagtggagaaaattgataacgaggtgctcatggctgcctttcagcgtaagaagaagatgatggaggaaaagctccatcgacagcctgtgagccacaggctgtttcagcaggtaccttatcagttttgtaatgtcgtttgtcgagtgggctttcagagaatgtatagcactccctgcgaccctaagtatggagctggtatctatttcaccaagaacctgaagaacttggctgagaaagccaagaaaatcagcgctgctgacaaattaatctatgtgtttgaggccgaggtactgactgggtttttctgtcaaggccatcctctgaatattgtacctcctccattatctcccggagctatagacggacacgactccgtggttgacaatgtttcctcccccgagacatttgtgatcttttcagggatgcaggctatcccgcaatacttgtggacgtgtactcaggaatacgtccagtcccaggactattcttctgggcctatgcggcctttcgctcagcatccctggagagggttcgcgagtggatcccccgtggattag

SEQ ID NO: 59508 - DNA, 2565 bp, Artificial Sequence
  derived and/or modified sequence
atggacttcagcatggtggccggcgccgccgcctacaacgagaagagcggcagaatcaccagcctgagcctgctgttccagaaggtgttcgcccagatcttcccccagtggagaaagggcaacaccgaggagtgcctgccctacaagtgcagcgagaccggcgccctgggcgagaactacagctggcagatccccatcaaccacaacgacttcaagatcctgaagaacaacgagagacagctgtgcgaggtgctgcagaacaagttcggctgcatcagcaccctggtgagccccgtgcaggagggcaacagcaagagcctgcaggtgttcagaaagatgctgacccccagaatcgagctgagcgtgtggaaggacgacctgaccacccacgccgtggacgccgtggtgaacgccgccaacgaggacctgctgcacggcggcggcctggccctggccctggtgaaggccggcggcttcgagatccaggaggagagcaagcagttcgtggccagatacggcaaggtgagcgccggcgagatcgccgtgaccggcgccggcagactgccctgcaagcagatcatccacgccgtgggccccagatggatggagtgggacaagcagggctgcaccggcaagctgcagagagccatcgtgagcatcctgaactacgtgatctacaagaacacccacatcaagaccgtggccatccccgccctgagcagcggcatcttccagttccccctgaacctgtgcaccaagaccatcgtggagaccatcagagtgagcctgcagggcaagcccatgatgagcaacctgaaggagatccacctggtgagcaacgaggaccccaccgtggccgccttcaaggccgccagcgagttcatcctgggcaagagcgagctgggccaggagaccacccccagcttcaacgccatggtggtgaacaacctgaccctgcagatcgtgcagggccacatcgagtggcagaccgccgacgtgatcgtgaacagcgtgaacccccacgacatcaccgtgggccccgtggccaagagcatcctgcagcaggccggcgtggagatgaagagcgagttcctggccaccaaggccaagcagttccagagaagccagctggtgctggtgaccaagggcttcaacctgttctgcaagtacatctaccacgtgctgtggcacagcgagttccccaagccccagatcctgaagcacgccatgaaggagtgcctggagaagtgcatcgagcagaacatcaccagcatcagcttccccgccctgggcaccggcaacatggagatcaagaaggagaccgccgccgagatcctgttcgacgaggtgctgaccttcgccaaggaccacgtgaagcaccagctgaccgtgaagttcgtgatcttccccaccgacctggagatctacaaggccttcagcagcgagatggccaagagaagcaagatgctgagcctgaacaactacagcgtgccccagagcaccagagaggagaagagagagaacggcctggaggccagaagccccgccatcaacctgatgggcttcaacgtggaggagatgtacgaggcccacgcctggatccagagaatcctgagcctgcagaaccaccacatcatcgagaacaaccacatcctgtacctgggcagaaaggagcacgacatcctgagccagctgcagaagaccagcagcgtgagcatcaccgagatcatcagccccggcagaaccgagctggagatcgagggcgccagagccgacctgatcgaggtggtgatgaacatcgaggacatgctgtgcaaggtgcaggaggagatggccagaaagaaggagagaggcctgtggagaagcctgggccagtggaccatccagcagcagaagacccaggacgagatgaaggagaacatcatcttcctgaagtgccccgtgccccccacccaggagctgctggaccagaagaagcagttcgagaagtgcggcctgcaggtgctgaaggtggagaagatcgacaacgaggtgctgatggccgccttccagagaaagaagaagatgatggaggagaagctgcacagacagcccgtgagccacagactgttccagcaggtgccctaccagttctgcaacgtggtgtgcagagtgggcttccagagaatgtacagcaccccctgcgaccccaagtacggcgccggcatctacttcaccaagaacctgaagaacctggccgagaaggccaagaagatcagcgccgccgacaagctgatctacgtgttcgaggccgaggtgctgaccggcttcttctgccagggccaccccctgaacatcgtgcccccccccctgagccccggcgccatcgacggccacgacagcgtggtggacaacgtgagcagccccgagaccttcgtgatcttcagcggcatgcaggccatcccccagtacctgtggacctgcacccaggagtacgtgcagagccaggactacagcagcggccccatgagacccttcgcccagcacccctggagaggcttcgccagcggcagccccgtggactag

SEQ ID NO: 59509 - DNA, 2334 bp, Artificial Sequence
  derived and/or modified sequence
atgagcgtgagctgcgtgaagagcagcagaatcagcctggccgtgagcctgccctggagcctgcagttcagaaaggccaccgccaacctgtgcgtgttcagaaagatgctgacccccagaatcgagctgagcgtgtggaaggacgacctgaccacccacgccgtggacgccgtggtgaacgccgccaacgaggacctgctgcacggcggcggcctggccctggccctggtgaaggccggcggcttcgagatccaggaggagagcaagcagttcgtggccagatacggcaaggtgagcgccggcgagatcgccgtgaccggcgccggcagactgccctgcaagcagatcatccacgccgtgggccccagatggatggagtgggacaagcagggctgcaccggcaagctgcagagagccatcgtgagcatcctgaactacgtgatctacaagaacacccacatcaagaccgtggccatccccgccctgagcagcggcatcttccagttccccctgaacctgtgcaccaagaccatcgtggagaccatcagagtgagcctgcagggcaagcccatgatgagcaacctgaaggagatccacctggtgagcaacgaggaccccaccgtggccgccttcaaggccgccagcgagttcatcctgggcaagagcgagctgggccaggagaccacccccagcttcaacgccatggtggtgaacaacctgaccctgcagatcgtgcagggccacatcgagtggcagaccgccgacgtgatcgtgaacagcgtgaacccccacgacatcaccgtgggccccgtggccaagagcatcctgcagcaggccggcgtggagatgaagagcgagttcctggccaccaaggccaagcagttccagagaagccagctggtgctggtgaccaagggcttcaacctgttctgcaagtacatctaccacgtgctgtggcacagcgagttccccaagccccagatcctgaagcacgccatgaaggagtgcctggagaagtgcatcgagcagaacatcaccagcatcagcttccccgccctgggcaccggcaacatggagatcaagaaggagaccgccgccgagatcctgttcgacgaggtgctgaccttcgccaaggaccacgtgaagcaccagctgaccgtgaagttcgtgatcttccccaccgacctggagatctacaaggccttcagcagcgagatggccaagagaagcaagatgctgagcctgaacaactacagcgtgccccagagcaccagagaggagaagagagagaacggcctggaggccagaagccccgccatcaacctgatgggcttcaacgtggaggagatgtacgaggcccacgcctggatccagagaatcctgagcctgcagaaccaccacatcatcgagaacaaccacatcctgtacctgggcagaaaggagcacgacatcctgagccagctgcagaagaccagcagcgtgagcatcaccgagatcatcagccccggcagaaccgagctggagatcgagggcgccagagccgacctgatcgaggtggtgatgaacatcgaggacatgctgtgcaaggtgcaggaggagatggccagaaagaaggagagaggcctgtggagaagcctgggccagtggaccatccagcagcagaagacccaggacgagatgaaggagaacatcatcttcctgaagtgccccgtgccccccacccaggagctgctggaccagaagaagcagttcgagaagtgcggcctgcaggtgctgaaggtggagaagatcgacaacgaggtgctgatggccgccttccagagaaagaagaagatgatggaggagaagctgcacagacagcccgtgagccacagactgttccagcaggtgccctaccagttctgcaacgtggtgtgcagagtgggcttccagagaatgtacagcaccccctgcgaccccaagtacggcgccggcatctacttcaccaagaacctgaagaacctggccgagaaggccaagaagatcagcgccgccgacaagctgatctacgtgttcgaggccgaggtgctgaccggcttcttctgccagggccaccccctgaacatcgtgcccccccccctgagccccggcgccatcgacggccacgacagcgtggtggacaacgtgagcagccccgagaccttcgtgatcttcagcggcatgcaggccatcccccagtacctgtggacctgcacccaggagtacgtgcagagccaggactacagcagcggccccatgagacccttcgcccagcacccctggagaggcttcgccagcggcagccccgtggactag

SEQ ID NO: 59510 - protein, 819 aa, Artificial Sequence
  derived and/or modified sequence
MDFSMVAGAAAYNEKSETGALGENYSWQIPINHNDFKILKNNERQLCEVLQNKFGCISTLVSPVQEGNSKSLQVFRKMLTPRIELSVWKDDLTTHAVDAVVNAANEDLLHGGGLALALVKAGGFEIQEESKQFVARYGKVSAGEIAVTGAGRLPCKQIIHAVGPRWMEWDKQGCTGKLQRAIVSILNYVIYKNTHIKTVAIPALSSGIFQFPLNLCTKTIVETIRVSLQGKPMMSNLKEIHLVSNEDPTVAAFKAASEFILGKSELGQETTPSFNAMVVNNLTLQIVQGHIEWQTADVIVNSVNPHDITVGPVAKSILQQAGVEMKSEFLATKAKQFQRSQLVLVTKGFNLFCKYIYHVLWHSEFPKPQILKHAMKECLEKCIEQNITSISFPALGTGNMEIKKETAAEILFDEVLTFAKDHVKHQLTVKFVIFPTDLEIYKAFSSEMAKRSKMLSLNNYSVPQSTREEKRENGLEARSPAINLMGFNVEEMYEAHAWIQRILSLQNHHIIENNHILYLGRKEHDILSQLQKTSSVSITEIISPGRTELEIEGARADLIEVVMNIEDMLCKVQEEMARKKERGLWRSLGQWTIQQQKTQDEMKENIIFLKCPVPPTQELLDQKKQFEKCGLQVLKVEKIDNEVLMAAFQRKKKMMEEKLHRQPVSHRLFQQVPYQFCNVVCRVGFQRMYSTPCDPKYGAGIYFTKNLKNLAEKAKKISAADKLIYVFEAEVLTGFFCQGHPLNIVPPPLSPGAIDGHDSVVDNVSSPETFVIFSGMQAIPQYLWTCTQEYVQSQDYSSGPMRPFAQHPWRGFASGSPVD

SEQ ID NO: 59511 - protein, 777 aa, Artificial Sequence
  derived and/or modified sequence
MSVSCVKSSRISLAVSLPWSLQFRKATANLCVFRKMLTPRIELSVWKDDLTTHAVDAVVNAANEDLLHGGGLALALVKAGGFEIQEESKQFVARYGKVSAGEIAVTGAGRLPCKQIIHAVGPRWMEWDKQGCTGKLQRAIVSILNYVIYKNTHIKTVAIPALSSGIFQFPLNLCTKTIVETIRVSLQGKPMMSNLKEIHLVSNEDPTVAAFKAASEFILGKSELGQETTPSFNAMVVNNLTLQIVQGHIEWQTADVIVNSVNPHDITVGPVAKSILQQAGVEMKSEFLATKAKQFQRSQLVLVTKGFNLFCKYIYHVLWHSEFPKPQILKHAMKECLEKCIEQNITSISFPALGTGNMEIKKETAAEILFDEVLTFAKDHVKHQLTVKFVIFPTDLEIYKAFSSEMAKRSKMLSLNNYSVPQSTREEKRENGLEARSPAINLMGFNVEEMYEAHAWIQRILSLQNHHIIENNHILYLGRKEHDILSQLQKTSSVSITEIISPGRTELEIEGARADLIEVVMNIEDMLCKVQEEMARKKERGLWRSLGQWTIQQQKTQDEMKENIIFLKCPVPPTQELLDQKKQFEKCGLQVLKVEKIDNEVLMAAFQRKKKMMEEKLHRQPVSHRLFQQVPYQFCNVVCRVGFQRMYSTPCDPKYGAGIYFTKNLKNLAEKAKKISAADKLIYVFEAEVLTGFFCQGHPLNIVPPPLSPGAIDGHDSVVDNVSSPETFVIFSGMQAIPQYLWTCTQEYVQSQDYSSGPMRPFAQHPWRGFASGSPVD

SEQ ID NO: 59512 - DNA, 2460 bp, Artificial Sequence
  derived and/or modified sequence
atggattttagcatggtcgccggagcggctgcttataatgaaaaaagtgaaacgggggcactgggtgagaattattcttggcagatccctataaaccataacgacttcaaaatcttgaagaataatgaacgccaactttgcgaggtcttgcagaataaattcggatgcataagcaccctggtgagccctgttcaggaggggaattctaagtctctccaggtgttccgaaagatgctgactccaaggatcgaactttctgtttggaaggatgatctgaccacccatgcagtcgacgccgtggtgaatgccgccaacgaagacctattacacggaggagggttggcgctggccttggtgaaggctggtggcttcgagatccaagaggaaagcaagcagttcgttgcgagatacggaaaggtgtccgcaggggagatagcagtcacaggcgccggtcggttgccctgtaagcagatcattcatgctgttggtccacgttggatggagtgggataagcaggggtgcactggcaaattgcagcgggccatcgtatctatcctgaattacgtaatttataagaatactcacatcaagactgtggccatccccgcattgtcatcagggattttccaatttcctctcaatctgtgcactaagaccattgtggaaaccatcagggtgtctctgcagggcaagcccatgatgagtaatcttaaggagatccacctggtgtcgaatgaagacccaacagtggctgcctttaaagcggctagtgaattcattcttggaaaatctgaactggggcaggagacaactccaagtttcaatgccatggttgtgaacaacttgactctgcagattgtgcaggggcacattgagtggcagacggcagacgtgatagttaactcggttaacccacacgatataactgtgggtccggttgcaaaatcaatactgcaacaggctggcgtggagatgaaatccgaatttctggctacaaaagccaaacagttccagaggtctcaactggtactggtgaccaagggatttaatcttttctgcaaatatatctatcacgtgctttggcattcggagtttcctaagcctcagatactgaagcatgctatgaaagagtgcttggagaagtgtatagagcaaaatatcacaagcataagctttcctgcactgggcaccgggaatatggagattaagaaagagacagcggccgaaatattattcgatgaggtgttgaccttcgccaaagaccatgttaagcaccagctgaccgttaagtttgttattttccctaccgacctcgaaatctacaaagcgttcagcagcgagatggccaagaggagcaaaatgctctcactaaataattactctgtccctcagtcaactagggaggaaaaaagagagaacggtcttgaggctaggtcgcctgccataaatcttatggggtttaatgtcgaggagatgtacgaggcccacgcctggatccagcggatcctgtcgttgcaaaatcaccacattattgagaataatcacatcctgtacctgggtaggaaggagcacgacattttgtcccagctccagaagacctcctctgtgtcaattaccgaaattatcagtcccgggcgcactgagcttgagatagaaggcgctagagccgatctgatcgaagtggtgatgaatattgaagacatgctttgcaaagtgcaagaggagatggcacggaagaaagaaagggggctctggagaagtcttggacagtggactatccagcagcagaaaacccaggacgagatgaaagagaacattatttttttaaaatgccctgtcccgcctactcaggagttgttggaccaaaagaagcagttcgagaagtgtggtctgcaggtgttgaaggtcgagaaaatcgataatgaggtcctgatggcagcttttcagaggaaaaagaagatgatggaagagaaacttcaccggcaacccgtttcccaccggctgttccaacaagttccctaccagttttgtaacgtcgtgtgcagggttgggtttcagcgcatgtacagcaccccctgtgaccccaaatacggcgctggaatctacttcactaaaaacctcaagaatcttgcagagaaggcgaaaaaaatttccgctgccgataagttgatttacgtgttcgaggcagaggtgctgactggctttttctgccagggccaccctctgaatattgtgcctccgcccctgtcccctggtgctatcgatggtcatgactccgtggtggataacgtgtcatctcctgagactttcgtgattttctccggcatgcaggccatcccccagtacctttggacttgtacccaggagtacgtgcaatcccaggactatagctctgggccaatgcggccgttcgctcagcatccatggcgtggctttgcatctggctcaccagtggactag

SEQ ID NO: 59513 - DNA, 2460 bp, Artificial Sequence
  derived and/or modified sequence
atggacttcagcatggtggccggcgctgcggcttataatgaaaaatcggagactggcgcgctgggggaaaactactcctggcaaattcccattaatcacaatgatttcaagattctgaaaaacaatgagcgccagctgtgcgaggtcttgcagaacaagtttgggtgcatttcaaccctcgtctctccagtacaggagggaaactcaaagtcgctgcaagtgtttcgcaaaatgctaactccaaggattgaactgtccgtatggaaggacgacttgacaactcacgcagtggacgctgtcgttaatgccgccaacgaagatctgttgcacggcggaggactggcactggctctggtgaaggccgggggcttcgaaatccaggaggagtccaagcagtttgtagcacggtacggtaaggtcagcgccggcgagattgccgttaccggcgccggaagattaccttgcaaacagataatacacgcagtgggacctcggtggatggagtgggacaagcaaggctgcactggtaagctgcaaagagcaatagtgtctatattaaattacgtgatctacaagaatacacacattaagaccgttgccatccctgccttatcctccgggatttttcaatttcctctgaatttatgcacaaaaacaatcgtggagactatccgggttagtcttcagggaaagccgatgatgtcaaacctgaaggagatccacctggtgagcaatgaagaccctaccgtggcggcttttaaggctgcaagcgagtttatccttggaaagtccgagctgggccaagaaacaacgcccagctttaacgctatggtagtgaataacctgaccttgcagatcgtccaggggcacattgagtggcaaacagccgatgtcattgtgaattcagtcaacccacatgacataacagtgggaccagttgctaagagtattttgcagcaggccggcgtggaaatgaaatcggaatttcttgccaccaaagcgaaacagtttcagaggtcccaactggtcctcgtgacgaagggttttaatctcttttgtaagtacatctaccacgtactctggcattcggaatttcccaaacctcaaatattaaagcacgcaatgaaggagtgcctagaaaagtgcattgagcagaatataacttctatcagctttccggccctcggcactggaaatatggagatcaaaaaagaaacagcagcagagatattgttcgacgaggttctcactttcgctaaggaccacgttaagcaccaactgaccgttaaatttgtgattttccccacggatctggagatttacaaggctttttcatccgaaatggcaaaacgtagcaaaatgctcagtctgaacaactacagcgttcctcagtcgacacgggaggaaaagcgtgaaaacgggctggaggctaggagccccgctatcaacctgatgggcttcaacgtggaagagatgtacgaggcccatgcctggatccagcgaatcttgtcgctccagaaccaccatattattgagaataaccatatcctctatctgggccggaaagagcacgatatcctttcacagctccagaagactagttcagtgtctatcactgagataatctcaccaggtcgtaccgaactggaaatcgagggagccagggcagacctgattgaagtggtcatgaatatcgaggatatgctgtgcaaagtgcaggaagagatggcgagaaagaaagagcgggggctttggaggtctctgggccagtggactattcaacagcagaagactcaggacgaaatgaaggaaaacattattttcctcaagtgccctgtcccgcccactcaggaattgcttgaccagaagaagcaattcgaaaaatgtggcctgcaggtcctcaaggtcgagaaaatcgacaatgaggtgttgatggccgcatttcagcgcaagaaaaaaatgatggaggaaaagctgcaccgtcagccagtgtcccaccgattgtttcagcaagttccctaccagttttgtaacgtggtgtgccgcgtgggatttcagaggatgtactcgacgccatgcgatccaaaatatggcgctggaatctatttcaccaagaatctcaagaacctcgccgagaaggcaaagaaaatcagcgctgccgacaagctgatatacgttttcgaggccgaagttttaacgggatttttttgccagggtcatccacttaacattgtacccccaccactgtccccaggagccattgatggccatgactcagttgttgacaatgtttccagtccagaaacgtttgtgattttttcaggaatgcaggcaattcctcagtacttgtggacttgtacccaggaatatgttcagtctcaggactattcctctggtcccatgcggccttttgctcagcacccatggcgtggctttgccagcgggtctcctgtcgactag

SEQ ID NO: 59514 - DNA, 2460 bp, Artificial Sequence
  derived and/or modified sequence
atggacttctccatggtggccggggccgccgcctacaatgagaagtctgagaccggggccctgggggagaactacagctggcagatccccatcaaccacaatgacttcaagatcctgaagaacaatgaaaggcagctgtgtgaggtgctgcagaacaagtttggctgcatcagcaccctggtgtcccctgtgcaggagggcaacagcaagagcctgcaggtgttcaggaagatgctgaccccaagaattgagctgtctgtgtggaaggatgacctgaccacccatgctgtggatgctgtggtgaatgctgccaatgaagacctgctgcacggcggcggcctggccctggccctggtgaaggccggcggctttgagatccaggaggagagcaagcagtttgtggcccgctatggcaaggtgtctgctggggagattgctgtgactggagctggccgcctgccctgcaagcagatcatccatgctgtgggcccccgctggatggagtgggacaagcagggctgcaccgggaagctgcagagggccatcgtgtccatcctgaactacgtgatctacaagaacacccacatcaagacagtggccatcccagccctgagcagcggcatcttccagttccccctgaacctgtgcaccaagaccatcgtggagaccatccgggtgtccctgcagggcaagcccatgatgagcaacctgaaggagatccacctggtgtccaatgaagaccccaccgtggccgccttcaaggccgccagcgagttcatcctgggcaagtctgagctgggccaggagaccacccccagcttcaatgccatggtggtgaacaacctgaccctgcagatcgtgcagggccacatcgagtggcagacagcagatgtgattgtgaacagcgtgaacccccatgacatcaccgtgggccctgtggccaagagcatcctgcagcaggccggcgtggagatgaagtctgagttcctggccaccaaggccaagcagttccagaggagccagctggtgctggtgaccaagggcttcaacctcttctgcaagtacatctaccacgtgctgtggcacagcgagttccccaagccccagatcctgaagcacgccatgaaggaatgtctggagaagtgcatcgagcagaacatcaccagcatctccttccctgccctgggcactggaaacatggagatcaagaaggagacagctgctgagatcctgtttgatgaggtgctgacctttgccaaggaccacgtgaagcaccagctgactgtgaagtttgtgatcttccccacagacctggagatctacaaggccttcagcagcgagatggccaagaggagcaagatgctgagcctgaacaactacagcgtgccccagagcacccgggaggagaagcgggagaatggcctggaggcccggagccctgccatcaacctgatgggcttcaacgtggaggagatgtatgaggcccacgcctggatccagaggatcctgagcctgcagaaccaccacatcatcgagaacaaccacatcctgtacctgggcaggaaggagcatgacatcctgagccagctgcagaagaccagctctgtgtccatcacagagatcatcagccctggccgcacagagctggagattgaaggagcccgggctgacctgattgaggtggtgatgaacatcgaggacatgctgtgcaaggtgcaggaggagatggccaggaagaaggagcggggcctgtggaggagcctgggccagtggaccatccagcagcagaagacccaggatgagatgaaggagaacatcatcttcctgaagtgccctgtgccccccacccaggagctgctggaccagaagaagcagtttgagaagtgtggcctgcaggtgctgaaggtggagaagattgacaatgaggtgctgatggccgccttccagaggaagaagaagatgatggaggagaagctgcaccggcagcctgtgagccacaggctcttccagcaggtgccctaccagttctgcaatgtggtgtgccgggtgggcttccagaggatgtacagcaccccctgtgaccccaagtatggagctggcatctacttcaccaagaacctgaagaacctggccgagaaggccaagaagatctctgctgctgacaagctgatctacgtgtttgaagctgaggtgctgaccggcttcttctgccagggccaccccctgaacatcgtgcccccacccctgagccctggggccattgatggccatgattctgtggtggacaacgtgagcagccctgagaccttcgtcatcttcagcggcatgcaggccatcccccagtacctgtggacctgcacccaggagtatgtgcagagccaggactacagcagcggccccatgaggccctttgcccagcacccctggaggggctttgccagcggcagccctgtggactag

SEQ ID NO: 59515 - DNA, 2460 bp, Artificial Sequence
  derived and/or modified sequence
atggacttcagcatggtggccggcgccgccgcctacaacgagaagagcgagacaggcgctctcggtgaaaactattcttggcagatccctatcaaccacaatgatttcaagatcctgaaaaataacgaacgacagctgtgtgaagtgctccaaaataagttcgggtgcataagtacgcttgtttctccagtacaggaggggaactcgaaatcgctgcaagtttttcggaagatgctgacccctcggattgagctgtccgtctggaaagatgacctcactacacacgccgttgacgcggtggtcaatgcggctaatgaggacctgctgcacggcgggggtctggcacttgccctcgtcaaagcgggaggattcgagattcaggaggagtccaagcagttcgtagctcgctacggcaaagtttccgccggggaaattgccgtgaccggggcagggcgcttaccttgtaagcaaattatccatgccgtgggtcctcggtggatggagtgggacaaacaagggtgtacgggaaaacttcagagagccattgtgagcatacttaattacgtgatttacaaaaatacgcatatcaaaaccgttgccatcccagcattaagctccggcattttccaattcccactcaacctttgcaccaaaaccatagtggaaacgatccgcgtgagcctccaggggaagccgatgatgtctaatcttaaggaaattcatttggtgtctaacgaagaccctaccgtcgcggcctttaaagccgcatctgaattcatcctgggcaagtccgaactcggacaggagacaacacccagctttaacgccatggtcgtgaataacctgactctgcagatcgtccagggacatattgaatggcagaccgcagacgtgatcgtcaatagtgtcaacccccacgacatcactgttggtcctgtggctaaatccattttgcaacaggcaggggtggaaatgaagtctgagtttctggccaccaaagctaagcagttccagcgttcccagcttgtactggttaccaaaggcttcaatttgttttgtaagtatatataccacgtcctttggcatagtgagttccctaagccccagattctgaagcacgctatgaaagagtgtctggagaaatgtattgagcagaacatcacttcaatcagtttccctgccttaggcacaggcaacatggaaataaagaaagaaacagccgcggagatcctgttcgatgaggtcctcacattcgccaaggatcatgtaaagcaccagctgaccgtcaaattcgttatttttccaaccgatctggagatctataaagccttcagtagtgaaatggcgaagcgcagtaaaatgttgagcttgaataactactctgtcccacagtcaacaagagaagagaaaagggaaaatggtctcgaagctcgttctcctgccatcaatctgatgggcttcaatgtagaagagatgtacgaggcacacgcatggattcaacggatcttgagtctacaaaaccatcacattatcgagaacaaccatatcctgtatctcgggagaaaagaacatgatatcctgtctcaactccaaaagacatcctccgtctctattacggagattattagccccggacggacagagcttgaaatcgaaggtgcgagggcagatctgatcgaggtggtgatgaatatcgaggacatgttatgcaaagtgcaagaggaaatggccagaaaaaaagagcgcgggttatggagaagcctcggccaatggacaatccaacagcaaaagacccaggacgagatgaaagaaaacataattttcctgaaatgtccggtgccacccactcaggaattgctggaccaaaagaagcaatttgaaaagtgcggcttacaggttctgaaagtggaaaaaatcgacaacgaggtattgatggcggccttccagcggaaaaagaaaatgatggaagaaaagctgcataggcaacctgtctctcacagactgtttcaacaagtgccctaccagttctgcaacgtcgtctgtcgtgttggatttcagagaatgtacagcactccctgtgaccccaagtacggcgcaggaatttatttcacgaagaacctgaaaaatctggccgagaaagcaaagaagatttctgcggctgataagctcatatatgtctttgaagccgaagtcctgaccggcttcttttgtcaagggcaccctcttaacatcgtgcccccacctctgtccccaggggctattgatggtcatgatagcgtggtagataacgtctccagtcctgaaacctttgtgatcttctctgggatgcaagccatcccacagtatctctggacgtgcacacaggagtacgtgcagtcccaggactactccagtggaccaatgcgtccctttgcgcagcacccctggagaggatttgccagtgggagcccagtagactag

SEQ ID NO: 59516 - DNA, 2460 bp, Artificial Sequence
  derived and/or modified sequence
atggacttcagcatggtggccggcgccgccgcctacaacgagaagagcgaaaccggggccttgggtgagaactactcttggcaaatccccataaaccataatgactttaagatactgaagaataacgaacggcagctctgtgaagttctgcagaataagtttggctgcatctctactctggtgagtccagtgcaggaaggcaactcaaaatcgctgcaggttttccgcaaaatgctgaccccacggatcgagttgagcgtgtggaaggacgaccttaccactcatgccgtagatgccgtcgtgaacgccgctaacgaagacttacttcatggagggggcctagctcttgcgcttgtgaaagctggcggatttgagatccaggaagagagcaaacaatttgtagcccgctacgggaaggtgagcgctggtgaaatcgccgtcacgggagccggtagactgccgtgcaagcaaattatccatgccgtgggaccacgatggatggagtgggacaagcagggttgtacgggtaagctgcagcgggctatcgtctccatcctaaactacgtaatttacaagaatacgcatataaagacggtggcaattcctgccctcagcagtggcatctttcaattccctttgaacctctgcaccaaaaccatcgtggaaacaatacgagtatcactgcagggaaaacctatgatgtcaaatttgaaggagatccatctagtgtcaaatgaagatccaacagtggcagccttcaaggcagccagcgaattcatcttgggcaaatccgaactaggacaggaaaccacacccagtttcaatgccatggttgtgaacaatctgacgttacagatagtccaaggccatatcgaatggcagacagccgacgttatcgttaattccgtcaatccccacgatattactgtgggtccagtggccaagagtattctgcagcaggccggcgtggagatgaagtcagaattcttagctaccaaggccaagcagtttcagaggtcgcaactggtcctcgttaccaaaggcttcaacctgttttgtaagtatatataccacgttctgtggcattcggagtttcccaagccacagatcctgaagcacgcaatgaaagaatgcttggagaagtgcatagagcagaacatcacctctatctcatttccagcactggggactgggaatatggaaattaaaaaagagaccgctgctgaaatcctgttcgatgaggtgttgactttcgcaaaagaccatgtgaagcaccagctgacagtcaagtttgtgatattcccaacagatcttgagatctacaaagcattctcaagtgagatggccaagcggagtaagatgctctccctgaacaattattcagttccacagtctacaagagaggagaagagggagaacggcctcgaagcccgaagtccagctatcaacctcatgggattcaatgtcgaagagatgtacgaagcccatgcctggattcagcgtatcctctccttacagaatcaccatatcattgaaaacaatcatatcctgtatctgggccgtaaggagcacgacatactttcccagttgcagaaaacctctagtgttagcatcactgaaattatctcccccggacgaaccgaactggagatagaaggagctcgggccgaccttatcgaagtggtcatgaacatcgaggatatgctgtgtaaagttcaggaagaaatggctagaaaaaaagaaagaggtctgtggcgctccctgggccaatggaccatccagcaacagaagacccaggatgagatgaaggagaacattatttttctcaaatgccctgttccaccaacacaagagctgcttgatcagaagaagcagttcgagaaatgtggcctgcaggttctcaaggtagagaagattgacaatgaggtcctcatggccgccttccagcgaaagaagaaaatgatggaggagaaactgcacagacagcctgtgtctcaccgcctctttcaacaagttccgtaccagttttgcaatgttgtgtgtcgagttggctttcagcgcatgtacagcacaccctgcgaccccaaatacggcgccggaatttatttcacaaaaaacttgaagaacctagcagagaaggctaaaaaaatctcagccgcagacaaactcatctatgtgttcgaagctgaggtgttgaccggattcttctgtcagggacacccactgaatatcgtgccacccccactaagccccggagcaatcgacggccacgattcagtggtggacaacgtgtcgagccccgaaactttcgtgatcttctcaggcatgcaagccattccacagtacctctggacctgtacccaggagtatgtgcagtctcaggactacagctccgggccaatgcgtccattcgcccaacacccttggcgaggctttgcatcaggatcgccagtggactag

SEQ ID NO: 59517 - DNA, 3040 bp, Artificial Sequence
  derived and/or modified sequence
gagtaggtccggtgcctctgggccctcggggtcccctctcctgcaggctcgaggtgggcggggagaagggggacgggcgcggacccgggtcccagggccaggcctcccttgtgagtagactatgcaaagaaaaagtgggccaccatatctggaaactacagtctatgctttgaagcgcaaaagggaataaacatttaaagactcccccggggacctggaggatggacttttccatggtggccggagcagcagcttacaatgaaaaatcagagactggtgctcttggagaaaactatagttggcaaattcccattaaccacaatgacttcaaaattttaaaaaataatgagcgtcagctgtgtgaagtcctccagaataagtttggctgtatctctaccctggtctctccagttcaggaaggcaacagcaaatctctgcaagtgttcagaaaaatgctgactcctaggatagagttatcagtctggaaagatgacctcaccacacatgctgttgatgctgtggtgaatgcagccaatgaagatcttctgcatgggggaggcctggccctggccctggtaaaagctggtggatttgaaatccaagaagagagcaaacagtttgttgccagatatggtaaagtgtcagctggtgagatagctgtcacgggagcagggaggcttccctgcaaacagatcatccatgctgttgggcctcggtggatggaatgggataaacagggatgtactggaaagctgcagagggccattgtaagtattctgaattatgtcatctataaaaatactcacattaagacagtagcaattccagccttgagctctgggatttttcagttccctctgaatttgtgtacaaagactattgtagagactatccgggttagtttgcaagggaagccaatgatgagtaatttgaaagaaattcacctggtgagcaatgaggaccctactgttgctgcctttaaagctgcttcagaattcatcctagggaagagtgagctgggacaagaaaccaccccttctttcaatgcaatggtcgtgaacaacctgaccctccagattgtccagggccacattgaatggcagacggcagatgtaattgttaattctgtaaacccacatgatattacagttggacctgtggcaaagtcaattctacaacaagcaggagttgaaatgaaatcggaatttcttgccacaaaggctaaacagtttcaacggtcccagttggtactggtcacaaaaggatttaacttgttctgtaaatatatataccatgtactgtggcattcagaatttcctaaacctcagatattaaaacatgcaatgaaggagtgtttggaaaaatgcattgagcaaaatataacttccatttcctttcctgcccttgggactggaaacatggaaataaagaaggaaacagcagcagagattttgtttgatgaagttttaacatttgccaaagaccatgtaaaacaccagttaactgtaaaatttgtgatctttccaacagatttggagatatataaggctttcagttctgaaatggcaaagaggtccaagatgctgagtttgaacaattacagtgtcccccagtcaaccagagaggagaaaagagaaaatgggcttgaagctagatctcctgccatcaatctgatgggattcaacgtggaagagatgtatgaggcccacgcatggatccaaagaatcctgagtctccagaaccaccacatcattgagaataatcatattctgtaccttgggagaaaggaacatgacattttgtctcagcttcagaaaacttcaagtgtctccatcacagaaattatcagcccaggaaggacagagttagagattgaaggagcccgggctgacctcattgaggtggttatgaacattgaagatatgctttgtaaagtacaggaggaaatggcaaggaaaaaggagcgaggcctttggcgctcgttaggacagtggactattcagcaacaaaaaacccaagacgaaatgaaagaaaatatcatatttctgaaatgtcctgtgcctccaactcaagagcttctagatcaaaagaaacagtttgaaaaatgtggtttgcaggttctaaaggtggagaagatagacaatgaggtccttatggctgcctttcaaagaaagaagaaaatgatggaagaaaaactgcacaggcaacctgtgagccataggctgtttcagcaagtcccataccagttctgcaatgtggtatgcagagttggctttcaaagaatgtactcgacaccttgcgatccaaaatacggagctggcatatacttcaccaagaacctcaaaaacctggcagagaaggccaagaaaatctctgctgcagataagctgatctatgtgtttgaggctgaagtactcacaggcttcttctgccagggacatccgttaaatattgttcccccaccactgagtcctggagctatagatggtcatgacagtgtggttgacaatgtctccagccctgaaacctttgttatttttagtggcatgcaggctatacctcagtatttgtggacatgcacccaggaatatgtacagtcacaagattactcatcaggaccaatgagaccctttgcacagcatccttggaggggattcgcaagtggcagccctgttgattaatctctacatcattttaacagctggtatggccttaccttgggtgaactaaccaaataatgaccatcgatggctcaaagagtggcttgaatatatcccatgggttatctgtatggactgactgggttattgaaaggactagccacatactagcatcttagtgcctttatctgtctttatgtcttggggttggggtaggtagataccaaatgaaacactttcaggaccttccttcctcttgcagttgttctttaatctcctttactagaggagataaatattttgcatataatgaagaaatttttctagtatataacgcaggccttttattttctaaaatgatgatagtataaaaatgttag

SEQ ID NO: 59518 - DNA, 3091 bp, Artificial Sequence
  derived and/or modified sequence
gggcttcgtgttcctgggtgctgaccgtgcactccccgccgcccgaggacttagagctctggaagtagctctccagcttccttcgtactcgggggccggacttgtacacccgcacgaggagcggggacggcgggcgcagaagtgggccaccatatctggaaactacagtctatgctttgaagcgcaaaagggaataaacatttaaagactcccccggggacctggaggatggacttttccatggtggccggagcagcagcttacaatgaaaaatcagagactggtgctcttggagaaaactatagttggcaaattcccattaaccacaatgacttcaaaattttaaaaaataatgagcgtcagctgtgtgaagtcctccagaataagtttggctgtatctctaccctggtctctccagttcaggaaggcaacagcaaatctctgcaagtgttcagaaaaatgctgactcctaggatagagttatcagtctggaaagatgacctcaccacacatgctgttgatgctgtggtgaatgcagccaatgaagatcttctgcatgggggaggcctggccctggccctggtaaaagctggtggatttgaaatccaagaagagagcaaacagtttgttgccagatatggtaaagtgtcagctggtgagatagctgtcacgggagcagggaggcttccctgcaaacagatcatccatgctgttgggcctcggtggatggaatgggataaacagggatgtactggaaagctgcagagggccattgtaagtattctgaattatgtcatctataaaaatactcacattaagacagtagcaattccagccttgagctctgggatttttcagttccctctgaatttgtgtacaaagactattgtagagactatccgggttagtttgcaagggaagccaatgatgagtaatttgaaagaaattcacctggtgagcaatgaggaccctactgttgctgcctttaaagctgcttcagaattcatcctagggaagagtgagctgggacaagaaaccaccccttctttcaatgcaatggtcgtgaacaacctgaccctccagattgtccagggccacattgaatggcagacggcagatgtaattgttaattctgtaaacccacatgatattacagttggacctgtggcaaagtcaattctacaacaagcaggagttgaaatgaaatcggaatttcttgccacaaaggctaaacagtttcaacggtcccagttggtactggtcacaaaaggatttaacttgttctgtaaatatatataccatgtactgtggcattcagaatttcctaaacctcagatattaaaacatgcaatgaaggagtgtttggaaaaatgcattgagcaaaatataacttccatttcctttcctgcccttgggactggaaacatggaaataaagaaggaaacagcagcagagattttgtttgatgaagttttaacatttgccaaagaccatgtaaaacaccagttaactgtaaaatttgtgatctttccaacagatttggagatatataaggctttcagttctgaaatggcaaagaggtccaagatgctgagtttgaacaattacagtgtcccccagtcaaccagagaggagaaaagagaaaatgggcttgaagctagatctcctgccatcaatctgatgggattcaacgtggaagagatgtatgaggcccacgcatggatccaaagaatcctgagtctccagaaccaccacatcattgagaataatcatattctgtaccttgggagaaaggaacatgacattttgtctcagcttcagaaaacttcaagtgtctccatcacagaaattatcagcccaggaaggacagagttagagattgaaggagcccgggctgacctcattgaggtggttatgaacattgaagatatgctttgtaaagtacaggaggaaatggcaaggaaaaaggagcgaggcctttggcgctcgttaggacagtggactattcagcaacaaaaaacccaagacgaaatgaaagaaaatatcatatttctgaaatgtcctgtgcctccaactcaagagcttctagatcaaaagaaacagtttgaaaaatgtggtttgcaggttctaaaggtggagaagatagacaatgaggtccttatggctgcctttcaaagaaagaagaaaatgatggaagaaaaactgcacaggcaacctgtgagccataggctgtttcagcaagtcccataccagttctgcaatgtggtatgcagagttggctttcaaagaatgtactcgacaccttgcgatccaaaatacggagctggcatatacttcaccaagaacctcaaaaacctggcagagaaggccaagaaaatctctgctgcagataagctgatctatgtgtttgaggctgaagtactcacaggcttcttctgccagggacatccgttaaatattgttcccccaccactgagtcctggagctatagatggtcatgacagtgtggttgacaatgtctccagccctgaaacctttgttatttttagtggcatgcaggctatacctcagtatttgtggacatgcacccaggaatatgtacagtcacaagattactcatcaggaccaatgagaccctttgcacagcatccttggaggggattcgcaagtggcagccctgttgattaatctctacatcattttaacagctggtatggccttaccttgggtgaactaaccaaataatgaccatcgatggctcaaagagtggcttgaatatatcccatgggttatctgtatggactgactgggttattgaaaggactagccacatactagcatcttagtgcctttatctgtctttatgtcttggggttggggtaggtagataccaaatgaaacactttcaggaccttccttcctcttgcagttgttctttaatctcctttactagaggagataaatattttgcatataatgaagaaatttttctagtatataacgcaggccttttattttctaaaatgatgatagtataaaaatgttaggataacagaatgattttagattttccagagaatattataaagtg

SEQ ID NO: 59519 - DNA, 2460 bp, Artificial Sequence
  derived and/or modified sequence
atggacttttccatggttgccggtgctgccgcttacaatgaaaagtctgagacgggtgcacttggcgagaactactcttggcagatccccatcaaccacaacgacttcaagatcttgaaaaataacgaaaggcagctctgcgaggtgctgcagaataagttcggctgcatttccacactggtctcccctgtccaggaagggaatagcaaaagccttcaggtctttcgaaagatgctaactcctagaattgaactctccgtctggaaggacgaccttactacgcacgctgtggacgccgtggttaatgcagctaacgaggaccttttgcacggcggtggacttgctctcgctttggtgaaggcaggcggattcgaaattcaggaagaatccaagcagtttgtcgcccgatatgggaaggtgagcgccggtgagatagcagtgaccggcgctggtcggctcccctgcaagcagatcatccatgcagtcggcccaagatggatggagtgggacaaacagggctgtaccgggaagctgcagcgagcaatcgttagcatcctgaactatgtgatttacaagaacacacacattaaaacagtagccatccctgcactgagtagtggcatctttcagtttcccctaaacctctgcactaaaaccatcgtggaaacgatcagggttagtctgcagggcaagcctatgatgagcaacctcaaagagatccaccttgtaagtaatgaggatccgaccgtggcagccttcaaagctgcgtccgagtttattcttggcaaatccgaacttggtcaagaaactactccctcgttcaacgccatggtggtaaataacctgacactgcagatagtccagggccacattgaatggcagaccgcggacgtgattgtaaactctgttaatcctcatgatattacagtggggccagtcgcaaagagcattctacaacaggcaggtgtcgaaatgaagtcagaatttcttgcaacaaaagctaagcagttccagaggtctcagttagtcctggtcacaaagggctttaacttattctgtaagtatatttaccatgtactgtggcattctgaattccccaagccgcagatcctgaagcacgctatgaaagagtgtcttgaaaaatgtatagaacaaaacataacctccattagttttccggcactaggtacaggaaacatggagattaaaaaggaaactgcggcagaaattttgttcgatgaggtcttgacctttgccaaagatcacgtgaaacatcaactgaccgttaagtttgtcatattccctaccgatctagaaatctacaaggcattttcgtctgagatggctaagagaagcaagatgctgtcactgaacaactatagtgtccctcagtctacgagagaggagaagcgagagaacggcctggaggctcgtagccctgccatcaacttaatgggtttcaacgttgaagagatgtatgaggcacatgcttggatccaaaggattctgtctctgcagaatcaccatatcatcgaaaataaccatatactgtacctcgggaggaaagagcatgacattctgagtcagttacaaaaaaccagttctgtctctatcaccgagatcattagccccggaaggaccgagctggagatcgaaggggcaagagccgacctaatagaggtagtgatgaatatcgaggatatgctgtgcaaagtgcaggaggaaatggctcggaaaaaggagcgaggattatggcggtcccttgggcaatggaccatccagcagcagaaaacccaagatgagatgaaggagaatattatattcctcaaatgccccgttccgccaacacaggaactactcgaccagaagaagcaattcgaaaagtgcgggttacaagtgctcaaggtggaaaagatcgataacgaggtgcttatggcggcatttcaacgaaagaagaagatgatggaggaaaagctgcatcggcagcctgtctcccaccgattattccagcaggttccttatcagttctgtaatgtggtgtgtcgggtcggcttccagaggatgtactcaactccctgtgaccccaagtacggcgcaggcatatattttacaaagaacctcaaaaacctggcagaaaaggccaaaaaaatctctgcagccgacaaactaatttacgtctttgaggccgaagttcttacaggtttcttctgccagggacaccctctgaacatcgtgcctccccctctgtctcccggagctatagatggccacgactcagtcgtcgataacgtcagcagccccgagacattcgtgattttctcaggcatgcaggccatacctcagtatctgtggacctgcacacaggaatacgtacagtcccaggactactctagcggccctatgcggccatttgcccaacacccatggagggggttcgcgtctggatctcccgtagattag

SEQ ID NO: 59520 - DNA, 2460 bp, Artificial Sequence
  derived and/or modified sequence
atggacttcagcatggtggctggagccgctgcatataacgagaagtctgagactggggctctgggggagaactacagctggcagatcccaattaaccataacgatttcaagattcttaaaaacaacgagcgccaactgtgtgaggtccttcagaacaaatttggctgtatcagtacacttgtgtccccggtacaggagggcaactccaagagcctccaagtatttcgtaagatgctgacaccacggattgaactgagcgtctggaaggacgatctgactacacatgccgtcgacgctgtagtaaacgcagccaacgaagatttgctccacggcggaggattggccctggcacttgtgaaagccggtgggttcgagatccaggaagagagcaaacagttcgtggccaggtacggaaaagtcagcgccggtgaaattgccgtgactggggctggcaggttaccctgtaagcagatcatacatgcggtgggacccagatggatggaatgggataagcagggctgcaccggaaagcttcagcgtgcaattgtctctatattgaattacgtgatttataagaatactcacattaagacagtcgcaattcccgcactcagtagcggaatattccaatttcccctcaatttatgcacaaagaccattgtcgagacaatcagggtctccctgcaggggaagcctatgatgtctaacctgaaagaaatccatttagtttccaacgaagaccccactgtggccgcattcaaggctgcatccgagttcatcctggggaagtcagagctcggtcaggagaccactccctctttcaacgcaatggtcgtgaataatctgacactacaaatcgtgcagggtcacatcgaatggcagacagctgacgtcattgtaaattccgttaacccccatgacatcaccgtgggacctgtagccaaaagcattctgcagcaggccggagtggagatgaaatcggagttcctggctacaaaagcaaaacagttccagaggtctcaactcgtgcttgtgactaaggggtttaatctgttctgcaaatacatctaccacgtgctatggcactccgagtttcctaaaccacagattcttaagcacgccatgaaagaatgcctcgaaaaatgcatcgagcagaacattacttctattagtttccccgctctaggaaccggaaacatggagattaaaaaagagactgccgctgagatcctgtttgacgaggtgttgacttttgctaaagaccacgtgaagcaccagctaaccgttaagtttgtcattttcccgaccgacctggagatctacaaagcttttagttcagagatggccaaacgcagtaaaatgctcagtttaaacaattattcagtgccacagagtacccgggaggagaagcgagagaacgggctggaggccagatcccctgccatcaacctcatggggttcaatgtagaggagatgtacgaagcgcacgcgtggattcagcggatcctaagtctgcagaaccatcatataattgaaaacaatcatattctctacttaggtcggaaggagcacgacattctgtcgcagctccagaagacgtccagcgtgtccatcacagagatcataagtcctgggagaactgagttggaaattgagggggctagagccgatctcatcgaggtggtcatgaatattgaagatatgctctgcaaagtgcaggaagaaatggctaggaaaaaggagagaggtctctggagaagccttggacagtggactattcagcagcagaagacgcaggacgaaatgaaggaaaacatcatatttctcaagtgccccgtcccacccacccaggaactgctcgaccagaagaaacagtttgaaaaatgtggactacaggtgctgaaggtggaaaaaattgataacgaggtcctgatggcagccttccagcggaagaaaaagatgatggaagagaagctgcacagacagccagtaagccaccggctcttccagcaggttccataccagttttgtaatgtggtttgcagggtcgggtttcagagaatgtatagtactccctgtgatcctaaatacggtgcagggatctacttcacgaaaaacctgaagaatctggcagagaaagcaaaaaagatttccgctgcggacaaattgatttacgtattcgaagccgaagttcttacaggatttttttgccagggccaccccttgaacattgtacctccacctctgagtccaggagccatcgatggacatgattcggttgtggataacgtcagctcgcctgaaacctttgtgattttctccggcatgcaggccatcccacagtatctttggacatgcacacaggaatatgttcaaagccaagattattcctctggccctatgcgtccttttgcacagcacccctggcgaggcttcgcatccgggagcccggtggattag

SEQ ID NO: 59521 - DNA, 2460 bp, Artificial Sequence
  derived and/or modified sequence
atggacttcagcatggtggccggcgccgccgcctacaacgagaagagcgagaccggcgccctgggcgagaactacagctggcagatccccatcaaccacaacgacttcaagatcctgaagaacaacgagagacagctgtgcgaggtgctgcagaacaagttcggctgcatcagcaccctggtgagccccgtgcaggagggcaacagcaagagcctgcaggtgttcagaaagatgctgacccccagaatcgagctgagcgtgtggaaggacgacctgaccacccacgccgtggacgccgtggtgaacgccgccaacgaggacctgctgcacggcggcggcctggccctggccctggtgaaggccggcggcttcgagatccaggaggagagcaagcagttcgtggccagatacggcaaggtgagcgccggcgagatcgccgtgaccggcgccggcagactgccctgcaagcagatcatccacgccgtgggccccagatggatggagtgggacaagcagggctgcaccggcaagctgcagagagccatcgtgagcatcctgaactacgtgatctacaagaacacccacatcaagaccgtggccatccccgccctgagcagcggcatcttccagttccccctgaacctgtgcaccaagaccatcgtggagaccatcagagtgagcctgcagggcaagcccatgatgagcaacctgaaggagatccacctggtgagcaacgaggaccccaccgtggccgccttcaaggccgccagcgagttcatcctgggcaagagcgagctgggccaggagaccacccccagcttcaacgccatggtggtgaacaacctgaccctgcagatcgtgcagggccacatcgagtggcagaccgccgacgtgatcgtgaacagcgtgaacccccacgacatcaccgtgggccccgtggccaagagcatcctgcagcaggccggcgtggagatgaagagcgagttcctggccaccaaggccaagcagttccagagaagccagctggtgctggtgaccaagggcttcaacctgttctgcaagtacatctaccacgtgctgtggcacagcgagttccccaagccccagatcctgaagcacgccatgaaggagtgcctggagaagtgcatcgagcagaacatcaccagcatcagcttccccgccctgggcaccggcaacatggagatcaagaaggagaccgccgccgagatcctgttcgacgaggtgctgaccttcgccaaggaccacgtgaagcaccagctgaccgtgaagttcgtgatcttccccaccgacctggagatctacaaggccttcagcagcgagatggccaagagaagcaagatgctgagcctgaacaactacagcgtgccccagagcaccagagaggagaagagagagaacggcctggaggccagaagccccgccatcaacctgatgggcttcaacgtggaggagatgtacgaggcccacgcctggatccagagaatcctgagcctgcagaaccaccacatcatcgagaacaaccacatcctgtacctgggcagaaaggagcacgacatcctgagccagctgcagaagaccagcagcgtgagcatcaccgagatcatcagccccggcagaaccgagctggagatcgagggcgccagagccgacctgatcgaggtggtgatgaacatcgaggacatgctgtgcaaggtgcaggaggagatggccagaaagaaggagagaggcctgtggagaagcctgggccagtggaccatccagcagcagaagacccaggacgagatgaaggagaacatcatcttcctgaagtgccccgtgccccccacccaggagctgctggaccagaagaagcagttcgagaagtgcggcctgcaggtgctgaaggtggagaagatcgacaacgaggtgctgatggccgccttccagagaaagaagaagatgatggaggagaagctgcacagacagcccgtgagccacagactgttccagcaggtgccctaccagttctgcaacgtggtgtgcagagtgggcttccagagaatgtacagcaccccctgcgaccccaagtacggcgccggcatctacttcaccaagaacctgaagaacctggccgagaaggccaagaagatcagcgccgccgacaagctgatctacgtgttcgaggccgaggtgctgaccggcttcttctgccagggccaccccctgaacatcgtgcccccccccctgagccccggcgccatcgacggccacgacagcgtggtggacaacgtgagcagccccgagaccttcgtgatcttcagcggcatgcaggccatcccccagtacctgtggacctgcacccaggagtacgtgcagagccaggactacagcagcggccccatgagacccttcgcccagcacccctggagaggcttcgccagcggcagccccgtggactag

SEQ ID NO: 59522 - protein, 710 aa, Artificial Sequence
  derived and/or modified sequence
MDFSMVAGAAAYNEKSETGALGENYSWQIPINHNDFKILKNNERQLCEVLQNKFGCISTLVSPVQEGNSKSLQVFRKMLTPRIELSVWKDDLTTHAVDAVVNAANEDLLHGGGLALALVKAGGFEIQEESKQFVARYGKVSAGEIAVTGAGRLPCKQIIHAVGPRWMEWDKQGCTGKLQRAIVSILNYVIYKNTHIKTVAIPALSSGIFQFPLNLCTKTIVETIRVSLQGKPMMSNLKEIHLVSNEDPTVAAFKAASEFILGKSELGQETTPSFNAMVVNNLTLQIVQGHIEWQTADVIVNSVNPHDITVGPVAKSILQQAGVEMKSEFLATKAKQFQRSQLVLVTKGFNLFCKYIYHVLWHSEFPKPQILKHAMKECLEKCIEQNITSISFPALGTGNMEIKKETAAEILFDEVLTFAKDHVKHQLTVKFVIFPTDLEIYKAFSSEMAKRSKMLSLNNYSVPQSTREEKRENGLEARSPAINLMGFNVEEMYEAHAWIQRILSLQNHHIIENNHILYLGRKEHDILSQLQKTSSVSITEIISPGRTELEIEGARADLIEVVMNIEDMLCKVQEEMARKKERGLWRSLGQWTIQQQKTQDEMKENIIFLKCPVPPTQELLDQKKQFEKCGLQVLKVEKIDNEVLMAAFQRKKKMMEEKLHRQPVSHRLFQQVPYQFCNVVCRVGFQRMYSTPCGRCQCLIIGATLWNLVS

SEQ ID NO: 59523 - DNA, 2133 bp, Artificial Sequence
  derived and/or modified sequence
atggatttttccatggtggccggcgccgcagcctataatgaaaaaagtgaaaccggcgcactgggtgagaattactcctggcaaatcccgatcaatcataacgatttcaagatattgaagaacaatgaaagacagctctgcgaggtgctgcagaataaatttggatgtatctcaacattagtgtcacccgtacaggaggggaatagcaagtccctccaggtatttagaaagatgctgacgccacgcatcgagctgtcggtctggaaagacgatcttactacccatgctgtcgatgctgtcgtgaacgctgctaatgaggatttgctccacggcggcggccttgccctggctttagtgaaggccggcggattcgaaatacaggaggagtcaaaacagtttgtggctaggtacggcaaggtttccgcaggtgagattgccgtgacaggcgcgggcaggctgccatgcaagcagatcatccatgcagtgggaccacgctggatggaatgggataaacagggttgtacgggaaaacttcagcgggcgattgtgtccatacttaactacgtaatatacaagaacacgcacatcaagacggtagccatacccgccctttcatcgggaatctttcagttcccgctgaatctgtgtactaagactattgtggagacaattagggtcagcttacagggcaaacccatgatgtctaatctgaaagaaattcatctggtttctaacgaagaccctactgtcgccgcctttaaggctgcaagcgaatttatccttgggaagtccgaacttggtcaggagaccacacccagtttcaacgcgatggtagttaacaacctcactctccagattgtacagggccatatcgagtggcagactgccgacgtcatcgtcaactccgtaaaccctcacgatattacagtgggaccagtggccaagtcaatactgcaacaggctggcgttgaaatgaagagtgaatttctggctaccaaagccaagcagtttcagcgcagtcagctggtcctggttacgaaaggcttcaacctgttctgcaaatacatctatcatgtgctgtggcactcagagtttccgaagccccaaattctgaagcacgctatgaaggaatgtctcgaaaaatgtatcgagcagaatattacctctattagtttccccgccctggggaccgggaatatggagatcaagaaggaaacagccgctgaaattttattcgatgaggtgttaacgttcgccaaggaccacgtcaagcaccaattaacagtgaaatttgtcatcttcccaacagaccttgagatttataaggcattttccagcgagatggctaaaaggagtaagatgttatccctgaataattatagtgtcccccagtcaacacgcgaagagaagagagaaaacggcttagaagccaggtctcctgcaattaacctgatggggttcaacgtggaagagatgtacgaggcccatgcttggattcagcgaattctttcactccagaatcatcacataattgaaaacaaccacattctgtacctagggcgaaaagagcatgatatcctgtcccagcttcaaaagacctcgtcagtatcaatcaccgagatcatttctccaggtcgcaccgaactcgagatagaaggggctagagctgatcttatcgaggtcgttatgaacattgaagacatgctatgtaaggtgcaggaagaaatggcccgtaagaaggagcggggattgtggcggagcttggggcagtggacgattcaacaacagaagacccaggatgagatgaaggagaacataatcttcctcaaatgtccagtcccacctacgcaggagctcctggatcagaaaaaacagtttgaaaagtgcggtttgcaggtgttaaaagtggaaaagattgacaacgaagtactaatggcggcattccagcgcaagaaaaagatgatggaagagaagctgcataggcaacctgtgagccacagacttttccagcaggttccgtaccagttctgtaacgtagtgtgcagggtgggttttcagagaatgtattcaaccccttgtggcaggtgtcaatgtctgatcatcggagcaacactctggaacctggtatcttag

SEQ ID NO: 59524 - DNA, 2133 bp, Artificial Sequence
  derived and/or modified sequence
atggacttctccatggtggccggggccgccgcctacaatgagaagtctgagaccggggccctgggggagaactacagctggcagatccccatcaaccacaatgacttcaagatcctgaagaacaatgaaaggcagctgtgtgaggtgctgcagaacaagtttggctgcatcagcaccctggtgtcccctgtgcaggagggcaacagcaagagcctgcaggtgttcaggaagatgctgaccccaagaattgagctgtctgtgtggaaggatgacctgaccacccatgctgtggatgctgtggtgaatgctgccaatgaagacctgctgcacggcggcggcctggccctggccctggtgaaggccggcggctttgagatccaggaggagagcaagcagtttgtggcccgctatggcaaggtgtctgctggggagattgctgtgactggagctggccgcctgccctgcaagcagatcatccatgctgtgggcccccgctggatggagtgggacaagcagggctgcaccgggaagctgcagagggccatcgtgtccatcctgaactacgtgatctacaagaacacccacatcaagacagtggccatcccagccctgagcagcggcatcttccagttccccctgaacctgtgcaccaagaccatcgtggagaccatccgggtgtccctgcagggcaagcccatgatgagcaacctgaaggagatccacctggtgtccaatgaagaccccaccgtggccgccttcaaggccgccagcgagttcatcctgggcaagtctgagctgggccaggagaccacccccagcttcaatgccatggtggtgaacaacctgaccctgcagatcgtgcagggccacatcgagtggcagacagcagatgtgattgtgaacagcgtgaacccccatgacatcaccgtgggccctgtggccaagagcatcctgcagcaggccggcgtggagatgaagtctgagttcctggccaccaaggccaagcagttccagaggagccagctggtgctggtgaccaagggcttcaacctcttctgcaagtacatctaccacgtgctgtggcacagcgagttccccaagccccagatcctgaagcacgccatgaaggaatgtctggagaagtgcatcgagcagaacatcaccagcatctccttccctgccctgggcactggaaacatggagatcaagaaggagacagctgctgagatcctgtttgatgaggtgctgacctttgccaaggaccacgtgaagcaccagctgactgtgaagtttgtgatcttccccacagacctggagatctacaaggccttcagcagcgagatggccaagaggagcaagatgctgagcctgaacaactacagcgtgccccagagcacccgggaggagaagcgggagaatggcctggaggcccggagccctgccatcaacctgatgggcttcaacgtggaggagatgtatgaggcccacgcctggatccagaggatcctgagcctgcagaaccaccacatcatcgagaacaaccacatcctgtacctgggcaggaaggagcatgacatcctgagccagctgcagaagaccagctctgtgtccatcacagagatcatcagccctggccgcacagagctggagattgaaggagcccgggctgacctgattgaggtggtgatgaacatcgaggacatgctgtgcaaggtgcaggaggagatggccaggaagaaggagcggggcctgtggaggagcctgggccagtggaccatccagcagcagaagacccaggatgagatgaaggagaacatcatcttcctgaagtgccctgtgccccccacccaggagctgctggaccagaagaagcagtttgagaagtgtggcctgcaggtgctgaaggtggagaagattgacaatgaggtgctgatggccgccttccagaggaagaagaagatgatggaggagaagctgcaccggcagcctgtgagccacaggctcttccagcaggtgccctaccagttctgcaatgtggtgtgccgggtgggcttccagaggatgtacagcaccccctgtggccgctgccagtgcctgatcattggagccaccctgtggaacctggtgtcctag

SEQ ID NO: 59525 - DNA, 2133 bp, Artificial Sequence
  derived and/or modified sequence
atggacttcagcatggtggccggcgccgccgcctacaacgagaagagcgagaccggagctctgggagagaactatagttggcaaataccaataaatcataatgatttcaagattcttaagaacaatgaaagacagctatgcgaagtgctccagaacaaattcgggtgtattagcacactggtgagtccagtgcaggagggcaacagcaaaagcctgcaagtgttccgcaaaatgttgactccgcgaatagagctctcggtatggaaggatgatctgaccacccacgccgttgatgccgtggtgaatgccgccaatgaggacttgctgcacgggggtggtctcgccttggctctagttaaggcgggaggtttcgagattcaagaagaaagcaaacagttcgtcgcccggtacggcaaggtttctgcgggcgagattgcagtcactggggccggcaggctgccatgtaaacagatcatccatgccgtgggtccaagatggatggaatgggacaagcagggctgcaccggcaaactccaacgggcaatcgtctcaatcctgaactatgttatttacaagaatacccatatcaagaccgtggcaataccagccctgtcctccgggatcttccagttccccttgaatctttgtaccaagactatagtcgaaacgatccgtgtgtctcttcagggaaagccaatgatgagcaacctaaaagagatccacctagtgagcaacgaggacccgactgtggccgcctttaaagcagcttctgagttcatactggggaagagcgaactaggccaggaaacgacaccgagttttaacgctatggtggttaacaacctgacccttcagatcgttcaggggcatattgagtggcagacagcagatgtcattgtgaactcagtgaatccccacgacattactgtagggcctgtggccaaatccatattgcagcaggctggggttgagatgaaatccgagttccttgcgacaaaagccaaacagttccagagatcgcaactggtgctcgtgactaagggctttaacctgttttgtaagtatatttatcacgtcctgtggcactccgaattccctaaaccccaaatcttgaaacatgccatgaaagagtgtctggagaagtgcatcgagcagaatataaccagcattagtttccctgccttgggaacggggaacatggagatcaaaaaagagacagccgctgagattttattcgacgaggtgcttacatttgcaaaagaccacgtgaaacatcaactcaccgtcaagttcgtaatcttccccacagacctggaaatctataaggctttcagcagcgagatggccaaacgctcaaaaatgctctcactcaacaattactcagtgccgcagtccacgagagaggagaaacgggaaaatggccttgaagcccgcagtcccgcaatcaatctaatgggttttaacgtggaagaaatgtatgaagcacacgcatggattcaacggatcttatcccttcagaaccaccatattattgagaacaatcacattctgtatttaggtcgaaaagaacacgacatcttatcacagctgcagaagacttcatctgtttctatcacagaaatcatctctccaggcagaactgagctggagatcgaaggcgcccgtgcagatctgattgaagtggtgatgaatattgaggacatgttgtgtaaagtgcaagaagaaatggccagaaaaaaggagaggggcttgtggagatccctcggccaatggaccatccaacagcagaagacccaggacgagatgaaggagaacatcatcttcctcaagtgccctgtgccaccaacacaggaactactggaccagaagaagcagttcgaaaaatgtggcctgcaggtcctgaaagttgaaaagatcgataatgaggtactgatggcagcatttcaacggaagaagaaaatgatggaagagaaactccacagacagcctgtgtcacaccgtctgtttcagcaggtaccgtatcagttttgcaatgtcgtttgccgagtcggatttcagcggatgtacagtactccttgtggacgatgtcagtgcctgattatcggcgcgaccctgtggaacctggtgagttag

SEQ ID NO: 59526 - DNA, 6769 bp, Artificial Sequence
  derived and/or modified sequence
ctccctgttcccggcagagccgcttccccctcctccctgtgctgtctgcaccgaggagagcggcctgccgggtgagtaggtccggtgcctctgggccctcggggtcccctctcctgcaggctcgaggtgggcggggagaagggggacgggcgcggacccgggtcccagggccaggcctcccttgtgagtagactatgcaaagaaaaagtgggccaccatatctggaaactacagtctatgctttgaagcgcaaaagggaataaacatttaaagactcccccggggacctggaggatggacttttccatggtggccggagcagcagcttacaatgaaaaatcagagactggtgctcttggagaaaactatagttggcaaattcccattaaccacaatgacttcaaaattttaaaaaataatgagcgtcagctgtgtgaagtcctccagaataagtttggctgtatctctaccctggtctctccagttcaggaaggcaacagcaaatctctgcaagtgttcagaaaaatgctgactcctaggatagagttatcagtctggaaagatgacctcaccacacatgctgttgatgctgtggtgaatgcagccaatgaagatcttctgcatgggggaggcctggccctggccctggtaaaagctggtggatttgaaatccaagaagagagcaaacagtttgttgccagatatggtaaagtgtcagctggtgagatagctgtcacgggagcagggaggcttccctgcaaacagatcatccatgctgttgggcctcggtggatggaatgggataaacagggatgtactggaaagctgcagagggccattgtaagtattctgaattatgtcatctataaaaatactcacattaagacagtagcaattccagccttgagctctgggatttttcagttccctctgaatttgtgtacaaagactattgtagagactatccgggttagtttgcaagggaagccaatgatgagtaatttgaaagaaattcacctggtgagcaatgaggaccctactgttgctgcctttaaagctgcttcagaattcatcctagggaagagtgagctgggacaagaaaccaccccttctttcaatgcaatggtcgtgaacaacctgaccctccagattgtccagggccacattgaatggcagacggcagatgtaattgttaattctgtaaacccacatgatattacagttggacctgtggcaaagtcaattctacaacaagcaggagttgaaatgaaatcggaatttcttgccacaaaggctaaacagtttcaacggtcccagttggtactggtcacaaaaggatttaacttgttctgtaaatatatataccatgtactgtggcattcagaatttcctaaacctcagatattaaaacatgcaatgaaggagtgtttggaaaaatgcattgagcaaaatataacttccatttcctttcctgcccttgggactggaaacatggaaataaagaaggaaacagcagcagagattttgtttgatgaagttttaacatttgccaaagaccatgtaaaacaccagttaactgtaaaatttgtgatctttccaacagatttggagatatataaggctttcagttctgaaatggcaaagaggtccaagatgctgagtttgaacaattacagtgtcccccagtcaaccagagaggagaaaagagaaaatgggcttgaagctagatctcctgccatcaatctgatgggattcaacgtggaagagatgtatgaggcccacgcatggatccaaagaatcctgagtctccagaaccaccacatcattgagaataatcatattctgtaccttgggagaaaggaacatgacattttgtctcagcttcagaaaacttcaagtgtctccatcacagaaattatcagcccaggaaggacagagttagagattgaaggagcccgggctgacctcattgaggtggttatgaacattgaagatatgctttgtaaagtacaggaggaaatggcaaggaaaaaggagcgaggcctttggcgctcgttaggacagtggactattcagcaacaaaaaacccaagacgaaatgaaagaaaatatcatatttctgaaatgtcctgtgcctccaactcaagagcttctagatcaaaagaaacagtttgaaaaatgtggtttgcaggttctaaaggtggagaagatagacaatgaggtccttatggctgcctttcaaagaaagaagaaaatgatggaagaaaaactgcacaggcaacctgtgagccataggctgtttcagcaagtcccataccagttctgcaatgtggtatgcagagttggctttcaaagaatgtactcgacaccttgcggtaggtgtcaatgcctcatcattggggctactctgtggaatttggtgagctgacatcagtagattcttccactgatagcatttgttgttgtggggaagggatcatttgtgactgtgatttagaggtcacaaatgatgacccaggtcacaaagtattttggaaagagtggtattttttacttttccttcgtatcttttgttgctgatgcattttacattgatgaaaagtgtgagcagtaagaactacggttcactgtttttctcctttatgtgtttctgtgtcctatccgcagagaacacgttgaggctttttttttttttttttgccttacttatctcaacaaaattattaccaacagcactgaaccgtcctcatcccttaattaaaagggcattttcccaaatttaagaaagttggtcttttctctttcatccctttgtttcctatagcctgctagtgaatgaattaggtatcatttggcaggtgaagtgcataacatcttaagatcctcttcatccataggagttctatgtgtaactcccatgtctcttttcagatgtacaaaaacattgcatatataattcttatattgccccctctactcctcagtcactaatgaagatttctggctttagttctctccaaaagaggaaaagaaatttagtaaaaattatggagagatacttagcggggtggcttgattttgcttggtctattaaatatgtggctcttgatctttatctttcaacatatgtagcatgatccttgctgaggagtcaattccaatagacttggtttctaggatgcaaaggctctagaaatcatcttttctttgttctggagagaacataggcaaaacttggggtaaatgttgaacatagacaattactggggataaaaatagagaaatgaatccctaccaagaagccttttggggcaatcaggaaagtgatgatcagtatagtcccttcattagcaaagtcttaaaaaatctataatttccatttgctcctaaagctggcttctctgcaatccccacccactacttctacttaaattactttcattaagatcatcgctgtgctcttactttccaaatctagtgagtattctcttttcagtcctgtgacagactctgctacttgcctacccaacatctatacacatctttcttactaaaacatctaagacacccactatcctcccaaggaatatggtcccaaggtcttagccagactcatcatcagctcaagttcaggcagttctctctttatttatttatttatttttctgagacggagtcttgctctgtcactcaggctggagtgcagtggcaccatcttggctcactgcaacctccgcctccgagattcaaacagttctcctgcctcagcctcccaggtagctgggattacaggcatgtgccaccacgtgcagttaatttttgtattttttttagtagagacgaggtttcatcatgttggccaggctgatctccagctactcgtgatccgtccacctcagcctcccaaagtgttgggcttacaggtatgagccaccatgcccagcaggcagttctctcttaaagcttaaaggcaagatactgcccccaacatactcattatatagtgatataaaaaggagcgggaaaactgcaatgaaaactctcatgttgaaaggggagaagcaaaacacacaacagccactggctcacaccacttatctacatgctgccgaacaggtatagagaggactccctattccatgttgtaaaacctttattttgcactctgggaaaatcttccttatatattgtggcccttggctatttccaggttcattgcctatcagggagccatggattttctcacaggctagaatgtgctcaggctgttgcaaccaggcttgtggtttcttcagcaatacagttcctttaaaaattcagtgggcacgaggcctaatttcttctggttaagtttatgtctttataacctaaccacagatcttgtctccatatagtctttcaactcaagattttggtctcttacctgctgtctgtgtgctctgcccttctccctatcccttagcttaacagccactgccttgaggcaattcagacatgactcataatgtgacctgcaccaattgactcatctctgtaggctagagagaactcttaacagaaggtgccagacaagcccaggagacaccaatcttgctaccactgaagctgttgttatttggagtacaaaagctcttagctttttcagccgtgcaatattccaaattataggactctcagtcaatttagatggccacccacaggcaaaggagacagaacttctgttaacaaacctttattttcttttttctatttatgtttgcattccaaccagttctgaataaatctcttgcttgtaggacttggttgagtgcagcaagaaggcatctacacatgcagtttcttactgggttgattcatttgttccacaggtatttattaagcacattctatgaatcaggccctgtgctaggggtactagaaatagagtgtaaataaaaaaccatagagttcttgcccttacaatttataatctcacgagttcacctgttgcccattctttatcttctctcttttttcctctacgatgtcccccttggtgatggcacctgttcccatggcctcaactcctacctcaatgatgacgacttaggaatttctaactcttaactccctacctctctcctgacctgcaggttcatatgtctcactctctttttgacatctttacccagatgtcccataggtaactcaaattgatcccttttcttggtcatgattttccctaagaaatatgccctttgtttgctgattctccctaacctggttagtatcatcaccatctacctaccaggtttcctaaggctgaaacattatcatcctccattcctccttttccctcacccttatacccaggcattcacccagtcctagtgattcactctcatgaagatctcagcccagtttcacctctctattcctactgccttagttaatcttccttcagacctagactattactaggtcctctccttgccacaaaacacacccctacctaatctatcctttaccaccagaattatcacgctaaaaattacattcttgcttaatatctgtattcccagttgcctacgggataaaagcccaaactccttagcagagaatataaggccctagctcccacattatttcagcagtcatcacccactatgttcctcaagactgcagccattaactttttagagttccctaaacatgctgtttactttcatgcctctatcccgttgtctgtggaatgacttccctccttgcccttttcagtgctacaaacccctattctttaagacatagtacaaatggcatctcctggttggcatctttcctgcaggcctacaggcctagtaagtatcttcctcctctgtgctcctgcatacctccattcctttgttatgacatctataactttaataagtactaaaatctgtagtcctacaaaactcaggcatagaactcatttcctttatggctctataatggaactttacccaactctcacgttccccatgaccacagatgtggaaaatttgaatcttgacagttcaaggtgaactcagtcattttcagagttttcatagtcccttcaagattgaaactcagttcctgcaatgtttgccccttttctcctcttttgtctatgctgggagaggcattgtggggagggttgtctggcttatggctcccattgtcctctgcttgataaaccacctgagctttggtcattagcagtctcctgtgcctttcacactcaggtagtgtctgcacaggccactctatgtcttttccatgctgaagaaattcctttccaggccatgtctgtgttcctcctgccacacaggaaatttttgagcatgttcatcctccaagctgaatgcagggtcttgggtagtggtcctcacctgctccagagacttctccagccattgccactctccactcaggtgatgaagctggatgagggactgcacccaccagagtcaggccagggtcctgtctgctctgtgagtccctccaattgttcttattccgagatttccattgttctgccccctcttgactcccagggctctcaagggagtgggggtagtgaagggagccctttcccaagctcccccaagagctctagtcacatcacttctgatacttcttttcccaccagctggaagaaagaactttcatttgtcttgaaatgagaaaaatgttcttagaatattttgtattactctctgctctgtcatttatggtaaacaaaataaaataataaaaaaaaacaaccc

SEQ ID NO: 59527 - DNA, 2133 bp, Artificial Sequence
  derived and/or modified sequence
atggatttctcaatggtggccggagccgcagcatataacgaaaagtccgaaaccggggctctgggggagaactattcctggcagatccccattaaccacaatgatttcaagatcttgaagaataatgagaggcaactatgcgaggtgcttcagaacaagttcggatgtattagtaccctcgtgtctcccgtgcaagagggcaattctaagtctctgcaggtctttcgtaagatgcttacacccagaattgaactgtctgtttggaaggacgacctcaccacccacgcagtcgacgccgtggtaaatgccgcaaacgaggacctgcttcacggtggcggactggccctcgccctggttaaagcaggcggattcgagatccaggaggagtctaagcagttcgtggcacggtatggtaaagtgtctgctggagagatagcggtgaccggagccggaagactgccatgtaaacagatcatccacgctgtgggccctcgttggatggaatgggacaagcagggatgcaccggtaagttgcaacgtgccattgtgtctatattgaactatgttatctacaaaaacactcatattaagactgtagccattcctgccctgagttcaggcattttccaattccctctcaacttgtgcaccaagacgattgtagaaacaatccgggtgtctctgcaaggtaaaccgatgatgtcaaacctaaaagaaatacacttggtctccaatgaggaccctaccgtcgctgcttttaaggcagcctccgagttcattttgggcaaatcagagctgggccaggaaacaactccctctttcaatgctatggtggtgaacaacctcacgctgcaaatagttcagggtcatattgaatggcagactgccgacgtgatcgtgaactcagtcaaccctcatgacatcactgtagggcctgtggctaaatcgatcttgcaacaggctggggtcgagatgaagtccgagtttctggccaccaaagcaaaacagtttcaacgctctcagcttgtccttgtcacaaagggattcaatctcttttgcaaatacatctaccatgtcctatggcatagtgaatttccaaagccccagatcctgaagcacgccatgaaggaatgtcttgagaaatgcattgagcagaatattactagtatttccttccccgctcttggtaccggcaatatggagatcaaaaaagagaccgctgcggagatcctttttgatgaagtgctgacgtttgcgaaagaccacgtaaagcatcagctgaccgttaagttcgtgatttttccaactgatctggaaatttacaaagcgttttcctcagaaatggcaaaaagatctaagatgctgagccttaataactatagcgtccctcagagcactcgcgaagagaagcgggagaacggtcttgaggctagaagccctgcgatcaacctgatggggttcaatgtagaagaaatgtacgaggctcacgcatggattcaaaggattctaagcctccaaaatcaccatattattgaaaacaatcatattctgtacctcggaaggaaggagcacgatatccttagccagctgcaaaaaacatcttccgtttcgattaccgaaatcatctctccgggaaggactgagctcgagatcgaaggagcacgggctgatttaatcgaagtcgtgatgaatatcgaagatatgttatgcaaggtgcaggaggagatggctaggaaaaaagaacggggtttgtggaggtcgttgggccaatggacaattcaacagcagaagacccaggacgagatgaaggagaatataatttttctgaagtgtcctgtgccgccaactcaggagctcctggaccaaaagaaacagttcgagaagtgcggattgcaggtgctgaaggtggaaaagatcgacaatgaggtattgatggctgcattccaacgaaagaagaaaatgatggaggagaagctacatcgtcagcccgtgtcgcaccggctgttccagcaggtcccctatcagttctgcaatgtggtatgcagagtgggatttcaaaggatgtacagcacaccctgtggaagatgccagtgtttgatcattggagccaccctgtggaacctagtgagttag

SEQ ID NO: 59528 - DNA, 2133 bp, Artificial Sequence
  derived and/or modified sequence
atggacttcagcatggtggccggcgccgccgcctacaacgagaagagcgagaccggcgccctgggcgagaactacagctggcagatccccatcaaccacaacgacttcaagatcctgaagaacaacgagagacagctgtgcgaggtgctgcagaacaagttcggctgcatcagcaccctggtgagccccgtgcaggagggcaacagcaagagcctgcaggtgttcagaaagatgctgacccccagaatcgagctgagcgtgtggaaggacgacctgaccacccacgccgtggacgccgtggtgaacgccgccaacgaggacctgctgcacggcggcggcctggccctggccctggtgaaggccggcggcttcgagatccaggaggagagcaagcagttcgtggccagatacggcaaggtgagcgccggcgagatcgccgtgaccggcgccggcagactgccctgcaagcagatcatccacgccgtgggccccagatggatggagtgggacaagcagggctgcaccggcaagctgcagagagccatcgtgagcatcctgaactacgtgatctacaagaacacccacatcaagaccgtggccatccccgccctgagcagcggcatcttccagttccccctgaacctgtgcaccaagaccatcgtggagaccatcagagtgagcctgcagggcaagcccatgatgagcaacctgaaggagatccacctggtgagcaacgaggaccccaccgtggccgccttcaaggccgccagcgagttcatcctgggcaagagcgagctgggccaggagaccacccccagcttcaacgccatggtggtgaacaacctgaccctgcagatcgtgcagggccacatcgagtggcagaccgccgacgtgatcgtgaacagcgtgaacccccacgacatcaccgtgggccccgtggccaagagcatcctgcagcaggccggcgtggagatgaagagcgagttcctggccaccaaggccaagcagttccagagaagccagctggtgctggtgaccaagggcttcaacctgttctgcaagtacatctaccacgtgctgtggcacagcgagttccccaagccccagatcctgaagcacgccatgaaggagtgcctggagaagtgcatcgagcagaacatcaccagcatcagcttccccgccctgggcaccggcaacatggagatcaagaaggagaccgccgccgagatcctgttcgacgaggtgctgaccttcgccaaggaccacgtgaagcaccagctgaccgtgaagttcgtgatcttccccaccgacctggagatctacaaggccttcagcagcgagatggccaagagaagcaagatgctgagcctgaacaactacagcgtgccccagagcaccagagaggagaagagagagaacggcctggaggccagaagccccgccatcaacctgatgggcttcaacgtggaggagatgtacgaggcccacgcctggatccagagaatcctgagcctgcagaaccaccacatcatcgagaacaaccacatcctgtacctgggcagaaaggagcacgacatcctgagccagctgcagaagaccagcagcgtgagcatcaccgagatcatcagccccggcagaaccgagctggagatcgagggcgccagagccgacctgatcgaggtggtgatgaacatcgaggacatgctgtgcaaggtgcaggaggagatggccagaaagaaggagagaggcctgtggagaagcctgggccagtggaccatccagcagcagaagacccaggacgagatgaaggagaacatcatcttcctgaagtgccccgtgccccccacccaggagctgctggaccagaagaagcagttcgagaagtgcggcctgcaggtgctgaaggtggagaagatcgacaacgaggtgctgatggccgccttccagagaaagaagaagatgatggaggagaagctgcacagacagcccgtgagccacagactgttccagcaggtgccctaccagttctgcaacgtggtgtgcagagtgggcttccagagaatgtacagcaccccctgcggcagatgccagtgcctgatcatcggcgccaccctgtggaacctggtgagctag

SEQ ID NO: 59529 - protein, 177 aa, Artificial Sequence
  derived and/or modified sequence
MPGLTAYFGLLEICGVKGGETVMVNAAAGAVGSVVGQIAKLKGCKVVGAVGSDEKVAYLQKLGFDVVFNYKTVESLEETLKKASPDGYDCYFDNVGGEFSNTVIGQMKKFGRIAICGAISTYNRTGPLPPGPPPEIVIYQELRMEAFVVYRWQGDARQKALKDLLKWVLELPYFVID

SEQ ID NO: 59530 - protein, 301 aa, Artificial Sequence
  derived and/or modified sequence
MVRTKTWTLKKHFVGYPTNSDFELKTAELPPLKNGEVLLEALFLTVDPYMRVAAKRLKEGDTMMGQQVAKVVESKNVALPKGTIVLASPGWTTHSISDGKDLEKLLTEWPDTIPLSLALGTVGMPGLTAYFGLLEICGVKGGETVMVNAAAGAVGSVVGQIAKLKGCKVVGAVGSDEKVAYLQKLGFDVVFNYKTVESLEETLKKASPDGYDCYFDNVGGEFSNTVIGQMKKFGRIAICGAISTYNRTGPLPPGPPPEIVIYQELRMEAFVVYRWQGDARQKALKDLLKWVLEIKRENEED

SEQ ID NO: 59531 - DNA, 906 bp, Artificial Sequence
  derived and/or modified sequence
atggtgagaaccaagacctggaccctgaagaagcacttcgtgggctaccccaccaacagcgacttcgagctgaagaccgccgagctgccccccctgaagaacggcgaggtgctgctggaggccctgttcctgaccgtggacccctacatgagagtggccgccaagagactgaaggagggcgacaccatgatgggccagcaggtggccaaggtggtggagagcaagaacgtggccctgcccaagggcaccatcgtgctggccagccccggctggaccacccacagcatcagcgacggcaaggacctggagaagctgctgaccgagtggcccgacaccatccccctgagcctggccctgggcaccgtgggcatgcccggcctgaccgcctacttcggcctgctggagatctgcggcgtgaagggcggcgagaccgtgatggtgaacgccgccgccggcgccgtgggcagcgtggtgggccagatcgccaagctgaagggctgcaaggtggtgggcgccgtgggcagcgacgagaaggtggcctacctgcagaagctgggcttcgacgtggtgttcaactacaagaccgtggagagcctggaggagaccctgaagaaggccagccccgacggctacgactgctacttcgacaacgtgggcggcgagttcagcaacaccgtgatcggccagatgaagaagttcggcagaatcgccatctgcggcgccatcagcacctacaacagaaccggccccctgccccccggccccccccccgagatcgtgatctaccaggagctgagaatggaggccttcgtggtgtacagatggcagggcgacgccagacagaaggccctgaaggacctgctgaagtgggtgctggagatcaagagagagaacgaggaggactag

SEQ ID NO: 59532 - DNA, 906 bp, Artificial Sequence
  derived and/or modified sequence
atggttaggacgaaaacctggactctcaagaagcatttcgtagggtatcccaccaattctgactttgaactgaaaactgccgagcttcctcctctgaagaatggagaggtgctactggaggcattgtttttgaccgtggacccctacatgagggtagcagctaagcggctgaaagagggagacacaatgatgggacagcaggtagcaaaggtggtcgaatctaagaatgttgcactacccaaaggtacgatagtgctggcctcgccaggatggaccacacactcaatctctgacggcaaagaccttgagaaactcctgaccgagtggccagatacgatacctttgtcccttgccttgggtacagtcggaatgcctgggctgacagcctattttggtcttttggaaatatgtggtgtgaaaggaggggagaccgtgatggtcaacgccgccgcaggtgccgtgggctcagtggtgggacagattgctaaacttaagggctgtaaggtggttggggccgtgggcagcgacgaaaaagtggcttacctacagaagttaggcttcgatgtcgtattcaattacaagaccgtggaaagcctggaagaaaccctcaaaaaggcttcccccgacgggtacgattgctacttcgacaatgtgggaggggagttctcgaatactgtcattggtcaaatgaaaaaattcgggcgcatagccatctgtggagccatcagcacctataatcggacgggaccactgccaccaggaccccccccggaaatcgtcatataccaagagctgcgcatggaggctttcgtcgtataccgttggcagggcgatgcccgacagaaagccctcaaggatctgttaaaatgggtgctggagatcaagagggagaatgaagaggattag

SEQ ID NO: 59533 - DNA, 2298 bp, Artificial Sequence
  derived and/or modified sequence
gagcttcaggatggttcgtactaagacatggaccctgaagaagcactttgttggctatcctactaatagtgactttgagttgaagacagctgagctcccacccttaaaaaatggagaggtcctgcttgaagctttgttcctcaccgtggatccctacatgagagtggcagccaaaagattgaaggaaggtgatacaatgatggggcagcaagtggccaaccagttattataataccattggtagaaatcgtctatggatctttactggaatttcagtgaccttacagatttatttagaggaaactgacatctttacaatttctctctccaaacacaagagttgtggaaagtaaaaatgtagccctaccaaaaggaactattgtactggcttctccaggctggacaacgcactccatttctgatgggaaagatctggaaaagctgctgacagagtggccagacacaataccactgtctttggctctggggacagttggcatgccaggcctgactgcctactttggcctacttgaaatctgtggtgtgaagggtggagaaacagtgatggttaatgcagcagctggagctgtgggctcagtcgtggggcagattgcaaagctcaagggctgcaaagttgttggagcagtagggtctgatgaaaaggttgcctaccttcaaaagcttggatttgatgtcgtctttaactacaagacggtagagtctttggaagaaaccttgaagaaagcgtctcctgatggttatgattgttattttgataatgtaggtggagagttttcaaacactgttatcggccagatgaagaaatttggaaggattgccatatgtggagccatctctacatataacagaaccggcccacttcccccaggcccacccccagagattgttatctatcaggagcttcgcatggaagcttttgtcgtctaccgctggcaaggagatgcccgccaaaaagctctgaaggacttgctgaaatgggtcttagagcttccctactttgtaattgactgacttcaagcaaataatcttgtctataaatccatgaagagtgctaagccatcactggaatacattagcgaaaaacttgtatcaggtaactcaggtctctatataagaccccttaaaaaaatctgaaaatgtaaattagttcccattagtaggctgtgccttgtaggagaaagagaaatgaagaccctttctcactaacatgaacccttccttcccacactcccagataaaggttaaacacatgttaaaagaaccttggcttaaaggggagacagattattagactgtcctgccatttatatttcctgaataggacctgcctcttcaggggccagaggtaatgaagggtgctcttttctctgtctatttgtacctcctctgagatcattgtgttattaaactttactatgcatcttatttagaaattgcttaatcgctctgggcacggtggctcacgcctgtaatcccagcactttgggaggccgaggcaggcagatcacgaggtcaggagatcgagaccatcctggctaacacggtgaagccctgtccctactaaaaatacaaaacaattagccgggcatggtggtgagcacctgtagtcccagctagtcgggaggctgaggcaggagaatggcatgaacctgggaggcggagcttgcagtgagccaagatcgcggcactgcactccagcctgggcaacagagcgagactctgtctcaaaaaaaaaaaaaagaaagaaaaagagattgcttaatcactgccttatgacatttcgcactatgatccgacacctattatttcttcttaggtgtactttgtaatcttttttacatgtactgtgtaagtggatcttgccccaccttgacttcaagttcatggaggacaggacttccatctcttattttcaaggtttccaatgatgtacctgataaatttgttgctaggatgagaacagtatatcattgagaatattaaattaagttttaaaatttgttgttgctttgatacagggtaaaatccagtacaaggaatatatcattgaaggatttgaaaacatgccagctgcatttatgggaatgctgaaaggagataatttggggaagacaatagtgaaagcatgaaaaagaggacacatggaatctggaggccatttagatgattagttaatttgtttttcaccatttagcaaaaatgtatactaccttaaatgtcttaagaaatagtactcataatgagtttgagctacttaataaaatacatttaagtggt

SEQ ID NO: 59534 - DNA, 906 bp, Artificial Sequence
  derived and/or modified sequence
atggtgaggaccaagacctggaccctgaagaagcactttgtgggctaccccaccaacagcgactttgagctgaagacagctgagctgccccccctgaagaatggagaggtgctgctggaggccctcttcctgactgtggacccctacatgagggtggccgccaagaggctgaaggagggggacaccatgatgggccagcaggtggccaaggtggtggagagcaagaatgtggccctgcccaagggcaccatcgtgctggccagccctggctggaccacccacagcatcagtgatggcaaggacctggagaagctgctgacagagtggccagacaccatccccctgagcctggccctgggcaccgtgggcatgcctggcctgacagcctacttcggcctgctggagatctgtggggtgaagggcggggagaccgtgatggtgaatgctgctgctggagctgtgggctctgtggtgggccagatcgccaagctgaagggctgcaaggtggtgggcgctgtgggcagtgatgagaaggtggcctacctgcagaagctgggctttgatgtggtgttcaactacaagacagtggagagcctggaggagaccctgaagaaggccagcccagatggctatgactgctactttgacaacgtgggcggggagttcagcaacacagtgattggccagatgaagaagtttggccgcatcgccatctgtggggccatcagcacctacaacagaacaggccccctgcccccaggccccccacctgagatcgtcatctaccaggagctgaggatggaggcctttgtggtgtaccgctggcagggagatgcccggcagaaggccctgaaggacctgctgaagtgggtgctggagatcaagagagaaaatgaggaggactag

SEQ ID NO: 59535 - DNA, 1166 bp, Artificial Sequence
  derived and/or modified sequence
atgcacacatacgcgcgcgcacatgcacataggcacacagagatacgcgcacacacacacacaaacgcactcagatttcccggaccctggttttcctcctgtgaccctttcggggccgggctctcaccctaaagaagcagccccgccctggggtggccccaccctctcttgggacctgtcataagtcggaccccgggcgcccggctgcgcagtcccagccgccttccccaggcagtggaaccttcgggctcctgagcttcaggatggttcgtactaagacatggaccctgaagaagcactttgttggctatcctactaatagtgactttgagttgaagacagctgagctcccacccttaaaaaatggagaggtcctgcttgaagctttgttcctcaccgtggatccctacatgagagtggcagccaaaagattgaaggaaggtgatacaatgatggggcagcaagtggccaaagttgtggaaagtaaaaatgtagccctaccaaaaggaactattgtactggcttctccaggctggacaacgcactccatttctgatgggaaagatctggaaaagctgctgacagagtggccagacacaataccactgtctttggctctggggacagttggcatgccaggcctgactgcctactttggcctacttgaaatctgtggtgtgaagggtggagaaacagtgatggttaatgcagcagctggagctgtgggctcagtcgtggggcagattgcaaagctcaagggctgcaaagttgttggagcagtagggtctgatgaaaaggttgcctaccttcaaaagcttggatttgatgtcgtctttaactacaagacggtagagtctttggaagaaaccttgaagaaagcgtctcctgatggttatgattgttattttgataatgtaggtggagagttttcaaacactgttatcggccagatgaagaaatttggaaggattgccatatgtggagccatctctacatataacagaaccggcccacttcccccaggcccacccccagagattgttatctatcaggagcttcgcatggaagcttttgtcgtctaccgctggcaaggagatgcccgccaaaaagctctgaaggacttgctgaaatgggtcttagagcttccctactttgtaattgactga

SEQ ID NO: 59536 - DNA, 906 bp, Artificial Sequence
  derived and/or modified sequence
atggtgcggaccaagacctggaccctgaagaagcacttcgtgggctaccctacaaactctgatttcgagctgaaaacggccgagttgccgcccctgaaaaatggagaggtgctcctggaagcactttttctgacagtcgatccttatatgcgggtggcggcaaagaggctgaaggaaggcgacacaatgatgggccagcaggtagccaaggtggtggaatctaagaatgttgcgttgcctaagggaacaatcgttctcgccagccctggctggacgacgcactccatctccgatgggaaagacctagagaagctactgacagagtggcctgacaccattcctctgtctttggccctgggaaccgtgggaatgcccggactgactgcctattttggactcttagaaatttgtggagtgaaggggggagaaacggtcatggtcaacgccgcagcaggtgcggtgggctcagtggtcggtcagattgccaagttgaaaggctgcaaggtggtgggtgccgtcgggtcagacgagaaggtggcctacctccagaaattaggctttgatgtcgtgtttaattacaaaacagtggaatccttagaagagaccctcaagaaagcctccccagacggatacgattgctattttgataatgtgggcggcgagttttccaacaccgttatcggacaaatgaaaaagtttggaaggatagccatctgtggggcaataagcacgtacaaccgaacaggtccgcttccccctggtccaccgcccgagattgtgatctaccaggagctgaggatggaggcattcgtggtctatcgatggcagggagacgctaggcaaaaggcgctgaaagacctgctcaagtgggtactggaaattaagcgcgagaatgaggaagattag

SEQ ID NO: 59537 - DNA, 906 bp, Artificial Sequence
  derived and/or modified sequence
atggtcaggaccaagacgtggacgctgaaaaaacatttcgttgggtatcccaccaatagcgacttcgaactgaagactgccgaattaccccctctcaagaatggtgaagtgctcctcgaggcccttttcctgacagtagacccttatatgcgcgtggcagccaagagactgaaggagggcgatacaatgatgggacagcaggtcgcaaaggtcgtggagagcaagaacgtggccttgcccaagggtaccatcgtcctcgcttcccccggatggacaacccacagcatttccgatgggaaggacttagagaaactgctgacagagtggcctgatacaattcccctttccctggctcttggcactgtcggtatgccagggctcaccgcatattttggcttgctggagatatgcggtgtaaaaggaggggaaaccgtgatggtgaacgctgcagcaggcgcagtgggcagcgtagtgggacagattgcaaaattgaagggatgtaaagtggttggggcagtcggatctgacgagaaggtggcttatctccagaagttgggatttgatgtcgtcttcaactataaaacagtggaatcactggaagaaacactcaagaaggcaagcccggatgggtacgattgttacttcgataacgtgggaggcgaattttctaatacagtgattggccagatgaagaaattcggccgtattgccatatgcggcgcaatctcaacttacaaccggactggaccactccctcccggtccaccgcctgagatcgtcatttatcaggagttgcgtatggaggcattcgtggtgtaccggtggcagggcgatgctcgtcaaaaggctttgaaagatttactgaaatgggtgttggaaattaagcgagaaaacgaggaggactag

SEQ ID NO: 59538 - DNA, 1220 bp, Artificial Sequence
  derived and/or modified sequence
atgcacacatacgcgcgcgcacatgcacataggcacacagagatacgcgcacacacacacacaaacgcactcagatttcccggaccctggttttcctcctgtgaccctttcggggccgggctctcaccctaaagaagcagccccgccctggggtggccccaccctctcttgggacctgtcataagtcggaccccgggcgcccggctgcgcagtcccagccgccttccccaggcagtggaaccttcgggctcctgagcttcaggatggttcgtactaagacatggaccctgaagaagcactttgttggctatcctactaatagtgactttgagttgaagacagctgagctcccacccttaaaaaatggagaggtcctgcttgaagctttgttcctcaccgtggatccctacatgagagtggcagccaaaagattgaaggaaggtgatacaatgatggggcagcaagtggccaaagttgtggaaagtaaaaatgtagccctaccaaaaggaactattgtactggcttctccaggctggacaacgcactccatttctgatgggaaagatctggaaaagctgctgacagagtggccagacacaataccactgtctttggctctggggacagttggcatgccaggcctgactgcctactttggcctacttgaaatctgtggtgtgaagggtggagaaacagtgatggttaatgcagcagctggagctgtgggctcagtcgtggggcagattgcaaagctcaagggctgcaaagttgttggagcagtagggtctgatgaaaaggttgcctaccttcaaaagcttggatttgatgtcgtctttaactacaagacggtagagtctttggaagaaaccttgaagaaagcgtctcctgatggttatgattgttattttgataatgtaggtggagagttttcaaacactgttatcggccagatgaagaaatttggaaggattgccatatgtggagccatctctacatataacagaaccggcccacttcccccaggcccacccccagagattgttatctatcaggagcttcgcatggaagcttttgtcgtctaccgctggcaaggagatgcccgccaaaaagctctgaaggacttgctgaaatgggtcttagagatcaaaagagaaaatgaagaagattgaagcttcaaagcagaaaaatgaagggaatatgtatcattcaccattacctta

SEQ ID NO: 59539 - protein, 797 aa, Artificial Sequence
  derived and/or modified sequence
MADRGCPLEAAPLPAEVRESLAELELELSEGDITQKGYEKKRAKLLARYIPLIQGIDPSLQAENRIPGPSQTTAAAPKQQKSRPTASRDERFRSDVHTEAVQAALAKYKERKMPMPSKRRSVLVHSSVETYTPPDTSSASEDEGSLRRPGRLTSTPLQSHSSVEPWLDRVIQGSSTSSSASSTSSHPGGRPTTAPSAAATPGAAATTALAGLEAHTHIGVPVNSRVSSKIQQLLNTLKRPKRPPLKEFFVDDFEELLEVQQPDPNQPKPEGSETSVLRGEPLTAGVPRPPSLLATLQRWGTTQPKSPCLTALDTTGKAVYTLTYGKLWSRSLKLAYTLLNKLTSKNEPLLKPGDRVALVFPNSDPVMFMVAFYGCLLAELVPVPIEVPLTRKDAGSQQVGFLLGSCGVFLALTTDACQKGLPKAQTGEVAAFKGWPPLSWLVIDGKHLAKPPKDWHPLAQDTGTGTAYIEYKTSKEGSTVGVTVSHASLLAQCRALTQACGYSEAETLTNVLDFKRDAGLWHGVLTSVMNRMHVVSVPYALMKANPLSWIQKVCFYKARAALVKSRDMHWSLLAQRGQRDVSLSSLRMLIVADGANPWSISSCDAFLNVFQSRGLRPEVICPCASSPEALTVAIRRPPDLGGPPPRKAVLSMNGLSYGVIRVDTEEKLSVLTVQDVGQVMPGANVCVVKLEGTPYLCKTDEVGEICVSSSATGTAYYGLLGITKNVFEAVPVTTGGAPIFDRPFTRTGLLGFIGPDNLVFIVGKLDGLMVTGVRRHNADDVVATALAVEPMKFVYRG

SEQ ID NO: 59540 - protein, 798 aa, Artificial Sequence
  derived and/or modified sequence
MADRGCPLEAAPLPAEVRESLAELELELSEGDITQKGYEKKRAKLLARYIPLIQGIDPSLQAENRIPGPSQTTAAAPKQQKSRPTASRDERFRSDVHTEAVQAALAKYKERKMPMPSKRRSVLVHSSVETYTPPDTSSASEDEGSLRRPGRLTSTPLQSHSSVEPWLDRVIQGSSTSSSASSTSSHPGGRPTTAPSAAATPGAAATTALAGLEAHTHIGVPVNSRVSSKIQQLLNTLKRPKRPPLKEFFVDDFEELLEVQQPDPNQPKPEGSETSVLRGEPLTAGVPRPPSLLATLQRWGTTQPKSPCLTALDTTGKAVYTLTYGKLWSRSLKLAYTLLNKLTSKNEPLLKPGDRVALVFPNSDPVMFMVAFYGCLLAELVPVPIEVPLTRKDAGSQQVGFLLGSCGVFLALTTDACQKGLPKAQTGEVAAFKGWPPLSWLVIDGKHLAKPPKDWHPLAQDTGTGTAYIEYKTSKEGSTVGVTVSHASLLAQCRALTQACGYSEAETLTNVLDFKRDAGLWHGVLTSVMNRMHVVSVPYALMKANPLSWIQKVCFYKARAALVKSRDMHWSLLAQRGQRDVSLSSLRMLIVADGANPWSISSCDAFLNVFQSRGLRPEVICPCASSPEALTVAIRRPPDLGGPPPRKAVLSMNGLSYGVIRVDTEEKLSVLTVQDVGQVMPGANVCVVKLEGTPYLCKTDEVGEICVSSSATGTAYYGLLGITKNVFEAVPVTTGGAPIFDRPFTRTGLLGFIGPDNLVFIVGKLDGLMVTGVRRHNADDVVATALAVEPMKFVYRGR

SEQ ID NO: 59541 - DNA, 2394 bp, Artificial Sequence
  derived and/or modified sequence
atggcagatcgggggtgtcctctcgaggcagccccactgcccgctgaagtgcgagaaagcttagccgagctggaactggaactgagcgaaggtgatattacccaaaagggctacgagaagaagcgagcaaagctcctggcccgctatataccgctgattcaggggatcgatccttcactgcaagctgaaaatagaatacctggcccctcgcagactacggcagccgcacccaagcagcagaaatctcgaccaaccgcctcgcgcgacgaacgcttccgatctgatgttcacaccgaagctgtgcaggctgctcttgctaaatacaaggaacgcaaaatgcctatgcctagcaagaggaggagtgttctggtgcactcttcagtggaaacctacacccctcctgacacttctagcgcttctgaagacgagggcagcctccgccggccagggcggctcacctccacacctctgcaatcgcactccagcgtcgagccttggctagaccgtgtcatacagggctcttccacctcctcatccgcaagctcaacctcctcacatccgggcggaagacccactacagcaccctccgctgcggctacacctggcgccgctgcgactaccgctctggccggcttggaggcccatacacatattggagtccctgttaatagccgtgtgtccagcaaaatccagcaacttttaaataccttgaaaaggcccaagagaccccccctgaaagagttcttcgttgatgacttcgaggagcttcttgaagttcagcagccagacccaaaccagcccaaaccggagggatccgagacatccgtgctgagaggagaacccctcaccgcaggtgtcccgaggcccccaagcctgctggctaccctgcagagatggggaacaactcagcccaagtcaccatgcctcaccgcactcgatacgacaggcaaggccgtttacacccttacttatggaaagttgtggagtagatctctcaagctcgcctatactttactgaataaactgaccagcaaaaacgaacctctattgaagccgggcgaccgagtggcactggtgtttccaaatagtgatccggttatgtttatggttgccttctacggttgtctgttggctgaacttgtgcccgtgcctatagaagtccctctgaccaggaaggacgctggctcccaacaggtgggattcctgctgggaagctgcggcgtgttccttgcccttacgactgacgcctgccagaaaggactgccgaaagcccaaaccggagaagtggccgcgtttaaaggctggcccccgctgagttggcttgtgatcgacgggaaacaccttgctaagccgcctaaggattggcaccccctcgcccaagacaccggcaccggaacagcctacatcgagtacaagacatcaaaggagggaagcaccgtcggtgtcaccgtgtctcatgcctcccttttagcccagtgcagggccttgacccaggcttgcggatatagcgaggccgagaccctcactaatgtgctcgatttcaagcgcgacgcggggctgtggcatggggtgttgacaagcgtcatgaacaggatgcatgttgtttccgtgccctatgccttgatgaaagcaaatcctctctcctggatccagaaagtttgtttttacaaggctcgcgccgctctggtgaagagtcgcgatatgcactggtcccttttggctcagagagggcagagagacgtgtctctttcgtcactccgcatgctgatcgtggcggacggagcgaatccctggagcatcagcagctgtgacgccttcctgaatgtgttccagtctcggggactcaggcctgaggtgatttgtccatgcgcatcttctcctgaagcattaactgtggccatccgcagaccgccagacctgggcggacccccccctcggaaagctgtgttaagcatgaatggactgtcatatggggtgatcagagtcgacacagaagaaaagctcagcgtgctcactgtgcaagatgtgggacaagtcatgcccggggccaatgtgtgtgtagtgaaattagaaggaaccccctatctgtgcaaaacggatgaagtcggtgaaatctgtgtgtcaagctccgccacaggtacagcctactacggcctgctcggtattaccaagaacgtgtttgaagcagtacccgtgaccaccggcggcgctcctatctttgatcgcccctttacaaggacagggcttctcggctttattgggcccgacaacttggtctttattgtgggaaaattggacggcctcatggtaactggcgtgcgaagacataacgccgacgacgtcgttgcgaccgccctggccgtggagccgatgaaattcgtttaccggggctag

SEQ ID NO: 59542 - DNA, 2397 bp, Artificial Sequence
  derived and/or modified sequence
atggccgaccgaggctgtccgttagaagccgccccacttcccgctgaagtgcgagagagcctagctgagctggaattggaactctccgaaggtgatataacccagaaagggtatgaaaagaagagagcaaagctgttagcaagatatattcctctgatccaggggatcgatcccagtctacaggcggagaatcggatccctggaccctcacagaccacagcggccgccccgaagcagcagaagtctcgccccacagcatccagagatgaacggttccggtccgatgtgcataccgaagcggtccaggccgcgctggccaaatataaggaaagaaagatgcctatgccaagcaagcggaggagtgtgctggtgcacagctctgtcgagacttatacaccaccagatacgtcctctgccagtgaggatgaggggtctctgcgcaggccaggccgtttaacatctactcctctgcagtcccatagctcagtcgaaccctggctggaccgcgtgattcagggttcatccacttctagtagcgcaagctcaacctctagccacccagggggacggcctaccacggccccaagtgcggcagcgacccccggcgccgccgcaactaccgccctggccggattggaagctcatacgcacataggggttccagtaaactcccgtgtgtcctccaagatccagcagctgttaaatacactgaaaaggcctaagcggccgccactgaaggagttctttgtggatgactttgaggaattattggaagtacaacagccagatccgaatcaaccaaagcccgaaggcagcgagactagcgtcttgaggggggagcctctgaccgcaggggttccccgcccccctagcctcctggctaccttgcagagatgggggactacacaaccaaagtccccttgcctaaccgctctggacactacaggcaaggcagtctatacgttaacttatggtaaactgtggtctcggtcacttaagttggcatatacgctgctaaacaagctgacatcaaaaaatgagcctttgctgaaaccgggcgacagggtggctctggtcttccctaattcagaccccgtgatgtttatggttgcattttacgggtgtctgctagccgaactggtgcctgtccctattgaggtgccactgacacggaaggatgccggctcccagcaggtgggattcctgttgggcagttgcggtgtcttcttggctctaacaaccgatgcctgccagaagggtctgcctaaggcacagacaggcgaagtggctgctttcaaggggtggccccccctgagttggttggtcattgatggaaagcacttggctaaaccccccaaggactggcaccctctggctcaggacactggaactggtacggcctacatcgagtacaagactagcaaagaaggctcaactgtgggggtgaccgtgagccatgccagcctcctggcccagtgcagggctttgacacaggcctgcggctattcagaggctgagaccctgaccaacgtgctggatttcaaacgcgacgccggcctgtggcacggagtcctcacaagcgtgatgaaccgcatgcacgtcgtcagcgtaccatacgccctgatgaaggcaaatcctctgtcttggatacagaaggtgtgtttttacaaagcccgagctgcccttgtcaagagccgagacatgcactggagtcttctcgcccagagaggccaacgcgacgtgtctctatcttcgctgcgcatgctgatagtggctgacggagcaaacccatggagcatttccagctgcgacgcttttctgaacgtcttccagtccaggggcctgagacccgaagtgatttgtccctgcgcttcaagcccggaggcactaaccgtggccattaggcgtccccctgacctaggcggcccacctccccgcaaagccgttctgtctatgaacggcttaagctacggagtcatccgggtcgatacagaagagaagctctctgtgttgactgtgcaggacgtgggccaggtgatgcccggggcgaacgtatgcgtggtaaaattggaaggaaccccctatctgtgtaagactgacgaggtgggcgagatatgcgtgagcagctcagccacagggactgcctactatggcctattagggatcaccaagaatgtgtttgaagcagtgccagtgactacaggaggagcgcccattttcgatcgaccctttacccgcaccggcttgctgggcttcatcggacccgataatctggtgtttatcgtggggaagcttgatgggttaatggttaccggcgttcgcagacataacgccgacgacgtggtggcgacggccctagccgtggaaccaatgaaattcgtgtacaggggaaggtag

SEQ ID NO: 59543 - DNA, 2394 bp, Artificial Sequence
  derived and/or modified sequence
atggctgaccggggctgccccctggaggccgcccccctgcctgctgaggtgcgggagagcctggccgagctggagctggagctgtctgagggggacatcacccagaagggctatgagaagaagagggccaagctgctggcccgctacatccccctcatccagggcatcgaccccagcctgcaggctgaaaatcgcatccctggccccagccagaccacagctgctgcccccaagcagcagaagagccggcccacagccagcagagatgagcgcttcagaagtgatgtgcacacagaggccgtgcaggccgccctggccaagtacaaggagaggaagatgcccatgcccagcaagagaagatctgtgctggtgcacagctctgtggagacctacaccccaccagacaccagcagcgcctctgaagatgagggcagcctgcggcggcccggccgcctgaccagcacccccctgcagagccacagctctgtggagccctggctggacagagtcatccagggcagcagcaccagcagcagcgccagcagcaccagcagccaccctgggggccggcccaccacagcccccagcgctgctgccaccccaggagctgctgccaccacagccctggccggcctggaggcccacacccacatcggcgtgcctgtgaacagccgggtgagcagcaagatccagcagctgctgaacaccctgaagaggcccaagaggcctcccctgaaggagttctttgtggatgactttgaggagctgctggaggtgcagcagcctgaccccaaccagcccaagccagagggcagcgagacctctgtgctgcggggggagcccctgacagctggggtgcccaggcctcccagcctgctggccaccctgcagcgctggggcaccacccagcccaagagcccctgcctgacagccctggacaccaccgggaaggctgtgtacaccctgacctacggcaagctgtggagccgcagcctgaagctggcctacaccctgctgaacaagctgaccagcaagaatgagcccctgctgaagccaggggacagagtggccctggtgttccccaacagcgaccctgtgatgttcatggtggccttctacggctgcctgctggccgagctggtgcctgtgcccatcgaggtgcccctgaccaggaaggatgctggcagccagcaggtgggcttcctgctgggcagctgtggggtcttcctggccctgaccacagatgcctgccagaagggcctgcccaaggcccagacaggagaggtggccgccttcaagggctggccacccctgtcctggctggtgattgatggcaagcacctggccaagccacccaaggactggcaccccctggcccaggacaccggcaccggcacagcctacatcgagtacaagaccagcaaggagggcagcacagtgggcgtgacagtgagccacgccagcctgctggcccagtgccgggccctgacccaggcctgtggctacagcgaggccgagaccctgaccaacgtgctggacttcaagagagatgctggcctgtggcacggcgtgctgacctctgtgatgaacaggatgcacgtggtgtctgtgccctatgccctgatgaaggccaaccccctgtcctggatccagaaggtgtgcttctacaaggcccgggccgccctggtgaagagccgggacatgcactggagcctgctggcccagaggggccagagagatgtgtccctgagcagcctgaggatgctgattgtggctgatggagccaacccctggagcatcagcagctgtgatgccttcctgaatgtgttccagagccggggcctgcggcctgaggtgatctgcccctgtgccagcagccctgaggccctgactgtggccatcagaagacctccagacctgggcggccccccacccaggaaggctgtgctgtccatgaatggcctgtcctatggagtcatccgggtggacacagaggagaagctgtctgtgctgactgtgcaggatgtgggccaggtgatgcctggggccaacgtgtgtgtggtgaagctggagggcaccccctacctgtgcaagacagatgaggtgggggagatctgtgtgagcagcagcgccaccggcacagcctactacggcctgctgggcatcaccaagaatgtgtttgaagctgtgcctgtgaccaccggcggggcccccatctttgaccggcccttcaccaggacaggcctgctgggcttcatcggccctgacaacctggtgttcatcgtgggcaagctggatggcctgatggtgactggagtgcggcggcacaatgctgatgatgtggtggccacagccctggccgtggagcccatgaagtttgtgtaccggggctag

SEQ ID NO: 59544 - DNA, 2397 bp, Artificial Sequence
  derived and/or modified sequence
atggctgaccggggctgccccctggaggccgcccccctgcctgctgaggtgcgggagagcctggccgagctggagctggagctgtctgagggggacatcacccagaagggctatgagaagaagagggccaagctgctggcccgctacatccccctcatccagggcatcgaccccagcctgcaggctgaaaatcgcatccctggccccagccagaccacagctgctgcccccaagcagcagaagagccggcccacagccagcagagatgagcgcttcagaagtgatgtgcacacagaggccgtgcaggccgccctggccaagtacaaggagaggaagatgcccatgcccagcaagagaagatctgtgctggtgcacagctctgtggagacctacaccccaccagacaccagcagcgcctctgaagatgagggcagcctgcggcggcccggccgcctgaccagcacccccctgcagagccacagctctgtggagccctggctggacagagtcatccagggcagcagcaccagcagcagcgccagcagcaccagcagccaccctgggggccggcccaccacagcccccagcgctgctgccaccccaggagctgctgccaccacagccctggccggcctggaggcccacacccacatcggcgtgcctgtgaacagccgggtgagcagcaagatccagcagctgctgaacaccctgaagaggcccaagaggcctcccctgaaggagttctttgtggatgactttgaggagctgctggaggtgcagcagcctgaccccaaccagcccaagccagagggcagcgagacctctgtgctgcggggggagcccctgacagctggggtgcccaggcctcccagcctgctggccaccctgcagcgctggggcaccacccagcccaagagcccctgcctgacagccctggacaccaccgggaaggctgtgtacaccctgacctacggcaagctgtggagccgcagcctgaagctggcctacaccctgctgaacaagctgaccagcaagaatgagcccctgctgaagccaggggacagagtggccctggtgttccccaacagcgaccctgtgatgttcatggtggccttctacggctgcctgctggccgagctggtgcctgtgcccatcgaggtgcccctgaccaggaaggatgctggcagccagcaggtgggcttcctgctgggcagctgtggggtcttcctggccctgaccacagatgcctgccagaagggcctgcccaaggcccagacaggagaggtggccgccttcaagggctggccacccctgtcctggctggtgattgatggcaagcacctggccaagccacccaaggactggcaccccctggcccaggacaccggcaccggcacagcctacatcgagtacaagaccagcaaggagggcagcacagtgggcgtgacagtgagccacgccagcctgctggcccagtgccgggccctgacccaggcctgtggctacagcgaggccgagaccctgaccaacgtgctggacttcaagagagatgctggcctgtggcacggcgtgctgacctctgtgatgaacaggatgcacgtggtgtctgtgccctatgccctgatgaaggccaaccccctgtcctggatccagaaggtgtgcttctacaaggcccgggccgccctggtgaagagccgggacatgcactggagcctgctggcccagaggggccagagagatgtgtccctgagcagcctgaggatgctgattgtggctgatggagccaacccctggagcatcagcagctgtgatgccttcctgaatgtgttccagagccggggcctgcggcctgaggtgatctgcccctgtgccagcagccctgaggccctgactgtggccatcagaagacctccagacctgggcggccccccacccaggaaggctgtgctgtccatgaatggcctgtcctatggagtcatccgggtggacacagaggagaagctgtctgtgctgactgtgcaggatgtgggccaggtgatgcctggggccaacgtgtgtgtggtgaagctggagggcaccccctacctgtgcaagacagatgaggtgggggagatctgtgtgagcagcagcgccaccggcacagcctactacggcctgctgggcatcaccaagaatgtgtttgaagctgtgcctgtgaccaccggcggggcccccatctttgaccggcccttcaccaggacaggcctgctgggcttcatcggccctgacaacctggtgttcatcgtgggcaagctggatggcctgatggtgactggagtgcggcggcacaatgctgatgatgtggtggccacagccctggccgtggagcccatgaagtttgtgtaccggggccgctag

SEQ ID NO: 59545 - DNA, 2394 bp, Artificial Sequence
  derived and/or modified sequence
atggccgaccggggctgccccctggaggccgcccccctgcccgccgaggtacgtgaatccttggccgagttggagctcgaactgtcagagggggacataacacagaagggttacgagaagaaacgggccaaattgcttgccaggtacattcccctgatccaaggcatcgaccccagtctccaggcggagaatcgtataccaggcccttcgcagacgaccgcggccgcacctaagcaacagaagtcgcgccccacggctagcagggatgaaaggtttcgctcagacgttcacacagaagctgtacaggcagctcttgcaaagtacaaagagcgaaaaatgccaatgccaagcaaacgacggagcgtactggtacattccagcgtggagacgtacaccccaccagacacttctagtgctagtgaggatgaaggttctctccgacgtcccggccggctgaccagcacgccgctgcagtctcatagtagtgttgaaccatggctggacagagtgatccagggcagctccactagctcctcagcaagctctactagctcccatcctggcgggaggccgactaccgccccaagcgctgccgcaaccccgggcgccgcagccacaaccgctctggctggtctcgaggcccacacccacattggagttcctgtcaactcaagagtgtcatctaaaatccagcagctgctgaatacgctcaagcgacccaagcgacccccccttaaagagtttttcgtggacgacttcgaggagctgctggaggtccagcagcccgaccccaatcagcccaaacctgagggatcggaaaccagcgttttgaggggagaaccactgacggccggcgtgcccagaccaccaagcctcctggccactctgcagaggtggggaaccactcaaccgaagagtccctgtttaaccgcccttgatacaacaggcaaagccgtgtacaccctcacctacgggaaattgtggtctcgctcgcttaaactcgcctataccctcctcaataaattgacaagtaaaaacgagcctctcctgaaacctggcgaccgagtggctctcgtgtttcccaattctgacccagtaatgtttatggtcgccttctacggatgcttattagccgagctagtccccgtcccgattgaagtgcccctgactcggaaggatgctggctctcaacaggtgggtttcctgcttgggtcttgcggcgtgtttctagcactcacaacagatgcatgccaaaagggcctgccgaaagctcagaccggagaagtggctgcctttaaaggatggccgccattaagctggctggtcatcgatgggaaacacctggcgaagcccccaaaggattggcaccctttggctcaggacactggcactgggacagcgtacatcgaatacaagaccagcaaggaaggctcaacagttggtgttaccgttagccacgcttctctgctggcccagtgtagggcattgacccaggcatgcggctactccgaggccgaaactctcacaaatgtcctggattttaaacgggatgctggcctctggcacggagtcctcacatccgtgatgaacagaatgcacgtggtgagcgtcccttacgccctcatgaaggctaatcccctgtcttggatccaaaaggtgtgcttctataaagctcgggcagctctggtaaagtctcgagatatgcattggtccctgcttgcccagagagggcagagagatgtttcattgtcatcactaaggatgctgatcgtggcagatggagcgaatccatggagcattagtagctgcgacgcctttctgaacgtgtttcagtcacggggtctgagaccagaggttatatgtccatgtgcttcttcgcctgaggctctgacagttgccatcagacggcctcccgatctgggagggcccccccctcggaaggctgtgctgtctatgaacggcctatcttatggagttatccgcgtggacacagaggaaaaattgtcggtcctcactgtccaggacgtgggacaggtcatgccgggtgccaatgtttgcgtggtgaagcttgagggtactccctacctgtgcaagactgacgaagtaggggaaatatgtgtatccagcagcgccaccggcacggcttactacgggctgctcgggatcaccaagaatgtgtttgaagccgtgcctgtgacaactgggggcgctcctatcttcgacaggccattcacccggacaggcctgcttggattcatcgggcccgacaatctggtcttcatcgtgggcaaactcgacgggttgatggtaacgggggttcggcgacataacgcagatgacgtggtagctacagccctggctgtggaacctatgaagtttgtctaccgcggatag

SEQ ID NO: 59546 - DNA, 2397 bp, Artificial Sequence
  derived and/or modified sequence
atggccgaccggggctgccccctggaggccgcccccctgcccgccgaggttcgcgaaagcttagccgagctggaactcgaactgagcgagggcgacattactcagaagggctatgagaagaaacgcgcaaaacttctcgccaggtatattccccttatccaagggattgatccctcactacaagccgagaatagaattcccggcccaagtcagactacggccgccgctcctaaacaacagaaatccagacccacagcaagtcgcgacgaacgctttagatccgatgtccataccgaggccgtccaggccgccctcgccaaatacaaagagcgcaaaatgccaatgccttctaaacggcggtctgttctggtgcactcctcagtcgaaacttataccccccccgacaccagttccgcctctgaggatgaggggagtctgcggcggcctgggcgtttgacatcaactccattgcagagtcactctagtgtcgagccctggctggaccgcgtgatccagggctcgtcaacgagttcaagtgcttcatcaacatctagtcaccctggcggaaggcccaccaccgctcccagtgccgccgcgacccccggtgcagccgcaaccactgccctggccgggttggaggcccacacccatatcggagtgcccgtcaactccagagtcagctctaaaatccagcagttactcaacactctcaaacgcccaaagaggccccccttgaaagagttttttgttgatgactttgaggaattgctggaagtgcagcagcctgaccctaatcagccaaaaccggaggggagtgagacctctgtgctccggggcgaaccattgactgcaggggtcccccggccaccaagcctcctggccacgctgcagagatggggaacaactcagcccaagtctccgtgcctgacagccttagatactacagggaaagccgtgtatactcttacatatgggaagctgtggagccgctccctcaagctggcctacactctgctcaacaaactgacaagtaagaacgagccactcctgaagcccggtgacagggttgcgttggtgttccccaattctgacccggtcatgttcatggtggccttctacggttgtctgttggctgaactggttccagtgcctatcgaagtgcctctgacacgcaaggacgcggggtcccagcaggtggggtttctgttgggctcatgtggagtcttcctcgcactgacgaccgacgcatgccagaaagggcttcccaaagcacagacgggggaagtcgcagcctttaagggctggccaccgctctcctggcttgtgatagacggaaagcacctggctaaaccacctaaggactggcatccccttgcccaggacacagggaccggaaccgcctacatcgagtacaagacaagcaaggagggctccacggtcggcgtaaccgtttcccacgctagcttgctcgcccaatgtcgagcccttacccaggcatgtgggtactccgaagccgagacgcttacaaatgtcttggatttcaagagagatgctggcctatggcacggcgttctgacttcagtcatgaataggatgcatgtcgtgtctgtaccatatgccttgatgaaggctaacccactatcttggatacagaaagtctgcttctacaaggccagagccgcccttgttaagtcacgcgacatgcactggtctctgctggcccagagaggacaaagagatgtctcactttccagcctccgaatgctgattgtggcagacggggccaacccctggagtatctctagttgtgacgcctttttaaatgtgtttcagagtcgcggactgcgccctgaagtgatctgcccctgcgccagtagtcccgaggccctgaccgttgctatcaggcgcccgcctgacctcggtggtcccccaccaaggaaggctgttctgtcgatgaacggattatcctacggagtgatccgggtggataccgaagagaagctctcagttctgacagttcaggacgtcggccaagtaatgcctggcgccaacgtctgcgtggtcaagcttgagggtaccccatacctgtgcaaaactgacgaggttggcgagatttgcgtgagcagctccgcgacaggcactgcctactacggactgcttggcatcacgaaaaacgtattcgaagctgtgcctgtaaccacgggaggcgcccccatcttcgatcggccctttactcgcactgggctgttggggttcatcggacctgataacctcgttttcattgtggggaagctcgacggcctgatggtgaccggagtaaggcgacataacgccgatgatgtcgttgcaactgctttagcagtcgagccaatgaagtttgtttataggggtcggtag

SEQ ID NO: 59547 - DNA, 2394 bp, Artificial Sequence
  derived and/or modified sequence
atggcggatagaggctgccctctggaggccgcaccactgcctgccgaagtacgggaaagcttagcagagcttgagctggagctgtctgagggagacatcacccagaaaggctacgagaagaagcgcgctaaactgctggctagatacattcctcttatccaggggatcgatccctctttacaggctgaaaacaggatccccggaccgagtcagactaccgcagccgctcccaagcagcagaagtcaagaccaactgccagtcgcgatgaaaggttcagaagcgacgtccatacagaggccgtgcaggctgctctagcaaaatataaggagagaaagatgcccatgccttccaagagacggagcgtgctcgtacattcttctgtggaaacgtatactcctcctgacaccagcagtgcaagtgaagatgaaggcagcctgaggcgtcccggacgactgacctccactccactccagtcccattcctcagtggaaccctggttagatagggttatccaaggcagttccacatccagttcggccagcagcacaagctctcaccctgggggacgccctacaactgccccttctgccgctgccacccctggcgctgcggcaaccacagctcttgctggcctggaggcgcatactcacatcggagtgcctgtgaattccagagtgagcagtaaaattcagcagctgctcaataccctgaagaggcccaaaagaccgcctctcaaggagttcttcgtggatgactttgaagaactcctggaggtgcaacagcccgatcccaaccaaccaaagcccgaggggtccgaaacgtctgtgctgcggggagaaccgctcaccgcaggcgttccgcgaccacccagtttattagcgaccttacagaggtgggggacaactcagcctaagtctccctgtctcactgctcttgacacaacaggtaaagccgtctacaccctgacctacggaaagctttggtcacgctcattgaagttggcatacaccctcctcaacaagttgacttctaagaacgagcccctgcttaaacctggagacagggtggccctggtgtttcccaattcagatcctgttatgtttatggtcgctttttatgggtgtctgctggccgagctggtccctgtgccaatcgaagtccccttgacgagaaaggatgctggtagtcagcaggtcggatttctgcttggaagttgcggagtattcctggctctgactacagacgcctgtcagaaaggtctccctaaagctcaaactggcgaggtcgcagcattcaaaggttggccccctttatcctggctcgttatcgacggcaagcatcttgctaagccacccaaggattggcatccactggcccaggatacaggcactgggacggcgtacattgagtacaagacctctaaggaggggagcaccgtgggagtcaccgtctcacacgcttccctgctggctcagtgcagggctttgacgcaggcctgtggttactccgaggctgaaaccctgaccaacgtgcttgactttaaacgcgatgccggtctgtggcatggagtactgaccagtgtgatgaatagaatgcatgtcgtgtctgtcccctacgccctcatgaaggccaaccccctgtcctggattcaaaaagtatgcttctacaaggcaagggcggctttggtaaaatcccgggacatgcactggagcctgttggcacagagggggcagcgcgatgtgagcctttcgagtctcaggatgttgatcgtcgctgacggtgcgaatccttggtctatcagtagctgcgatgccttcctcaacgtcttccagagccgcggtttacgtccagaggtcatctgcccctgtgccagctctccagaagcccttacagttgccatccgtcggcctccagatctgggcggaccacccccaagaaaagcggtgttatcaatgaacggcctctcctacggggtcattcgagtggataccgaagagaagctatcagtcttgactgtgcaggatgtcggacaggtcatgcccggagccaacgtgtgcgtggtgaaattagaaggcacaccttatctgtgtaaaaccgacgaagtgggagagatctgcgtgtcctcgtctgccacaggaacagcctactatggacttctggggatcaccaagaacgtcttcgaggccgttccagtgactacaggcggagccccaatattcgaccgtccgttcactaggactggcctcctgggatttattggacccgataaccttgtcttcatcgtgggcaaactggatggtcttatggtaactggagtccggagacataacgctgatgacgtcgttgcaactgctttagctgtggagccgatgaagttcgtatatcgaggctag

SEQ ID NO: 59548 - DNA, 2397 bp, Artificial Sequence
  derived and/or modified sequence
atggcggatcgagggtgtccgctcgaggcagccccacttcctgctgaggtgcgggaatccttagcggagctcgagctcgagctgtccgaaggtgatatcacacagaaaggttacgaaaaaaagagagcaaagctgctcgctcgttatattccactgatccaaggcattgacccctctctgcaggctgaaaaccggattcccggacccagccagaccactgccgctgcccctaagcagcagaagagtagaccaacggccagccgagacgagcgctttaggagtgatgttcataccgaagccgtgcaggcagcactcgctaaatacaaggaacggaaaatgccgatgcctagtaagcggaggtcggtgctcgtgcatagctccgtggaaacctatactccgcctgacactagttctgcctcagaggatgaaggcagtctgaggcgcccaggtaggcttacttcaactcccctacagagccactcctctgtcgaaccttggctggacagagtcattcagggttcgtctacgagctcttcagcttcaagcacatcatcgcaccccggtggaaggccgaccacagccccttccgccgctgctacgcccggagccgctgcaactactgccctggccggattagaggcccacactcacatcggggtcccggttaatagcagggtctcatccaagattcagcagctgcttaatactctgaaacgtcccaaaagaccccctttgaaagaatttttcgtggacgacttcgaagagctccttgaagtgcaacagcccgacccgaaccagcccaaacctgaagggagcgagacaagcgtcctccgtggagagccgctgacagctggcgttccccgacccccttctctgctggcgacattacaaaggtgggggaccacgcaacctaagtccccttgtctaaccgctttggacacaacaggcaaagccgtttacaccttgacttatggaaagctgtggagtcgaagcttgaaattggcgtacaccctgctgaataagctgactagcaagaacgaaccactgctgaaacccggagatagggtcgccctcgtattcccaaattcagatccagtgatgttcatggtggcgttctacgggtgtctcctcgccgagcttgtgccagtacctatcgaagtgcccttaactcgcaaggatgctggcagtcagcaggtggggtttttactcggcagctgcggagtgttcctggctctcacgacagacgcctgtcagaaaggactgccaaaggcacagactggcgaggtggccgcattcaaaggctggccgcctttaagctggctggtgatagatgggaagcatctcgccaagcctcctaaggactggcaccctctagcacaggacacgggaacaggaactgcgtacattgaatacaaaacatccaaagaggggtccactgtgggtgtgacggtatcacatgcgtcactgctggctcagtgccgcgctttgactcaagcatgcgggtattccgaggccgagacgctgaccaatgtgctcgacttcaagagagatgctggcctctggcacggtgttttgacctcagttatgaatcggatgcacgtggtatccgtcccttacgctcttatgaaggcgaatcctttatcgtggattcagaaagtgtgtttctacaaggcgcgtgctgccctggtgaagagtcgggacatgcactggtcactgctggcacagcgcggacagagggacgtgagccttagttcattaagaatgctgatcgttgccgatggagcaaatccttggtcgatctcctcctgcgacgcctttctaaatgtctttcagagtcgcggtctgaggcctgaagtcatttgcccgtgtgccagctcacccgaggctctgactgttgccatcaggcgcccacccgatctcggcggtcctccacctcggaaagcggtcctgtctatgaatgggctgagctatggagtgattcgcgtggacactgaagaaaaactctccgtcctgactgtacaggatgtggggcaggtcatgccaggggcaaacgtctgcgtcgtcaagctggaaggtaccccatatttgtgcaagaccgatgaggtcggcgagatctgtgtgtcctcatcagccacaggtaccgcttattacggactgctgggtattacaaaaaatgtgttcgaggccgtgccagtgactaccggcggagctcccatttttgatcggcctttcactcggaccggcctgctcggctttatcggacctgataatctcgtctttattgtgggcaagctggatggactcatggttaccggagtaagaaggcacaatgcggatgatgtcgttgccaccgctctggccgtggagcctatgaaattcgtttatcgcggtcgctag

SEQ ID NO: 59549 - DNA, 2711 bp, Artificial Sequence
  derived and/or modified sequence
gctgtcctggccgcgcccctgtcccgccgcctcccgctcctcgcctggcggatgtaggttgttggcctgaggggagctacgtagccgaggtttgcgctgccgccgccaggcccggtccggttccagcctctgcccggacgctagccggcctggccatggctgaccgcgggtgcccgctggaggcggcgccgctgcctgccgaggtgcgggagagcctggctgagctggagctggagctgtcggaaggtgacatcactcaaaaaggatatgaaaagaaaagggcaaagctgcttgcacgttatataccgcttattcaaggaatagacccatctctgcaagcagagaatagaattcctgggccctcacaaaccacggccgctgcacccaagcagcagaagtctcggcccaccgcctcgagggatgagcgcttccggtcagatgtccacactgaagccgtgcaagcagctttggccaaatacaaagagaggaagatgcctatgccttcgaagagacgttctgtccttgtgcattcgtctgtggaaacctacacccctccagacacgtcgtctgcctcagaagatgagggctctttacggcgacccgggcgactcacctccactccgctccagagccattccagcgtcgagccctggctcgaccgggtcattcagggctcgtccacctcatcctctgcatcctccacctcatctcacccgggagggagacccaccactgctcccagtgctgcagccacgccgggggccgccgctaccactgcactcgcaggcctcgaggcccacacccacataggtgtccctgtgaacagcagagtgtcctccaaaatccagcagcttctgaacaccctgaagaggccaaagcgccctccactgaaggagttctttgtggatgattttgaggaattgttggaagttcagcaaccagatccaaatcagccaaagcctgagggaagcgagacgagtgtgctgagaggggagcctctcactgcaggtgtcccccgaccgccgtcgctgttggccaccttgcagcgctggggcacaacacagcccaaatccccctgtctgactgccttggatacaactgggaaagccgtctacactctcacctatggtaaactttggagtcggagtttaaaactagcttatactctacttaataaactgacaagtaagaatgaacctctacttaaacctggagacagagtggcgctcgtgtttccgaatagtgaccctgtgatgttcatggttgcattttatgggtgtctcctggcagagctggttcctgtccccatagaagtgccattaacaagaaaggatgcaggcagccagcaggttgggtttctgctgggcagctgtggagtcttcttggccctgaccacagacgcttgtcagaaaggcctccccaaggcacagacaggagaggtggcagctttcaaaggttggcccccgctctcctggctagtgattgatgggaagcatctagccaagcccccaaaggactggcaccctctggcccaggacacagggactgggactgcctacattgagtataaaaccagcaaagaaggcagtacggtgggggtcacagtgtcccacgcatccctgctggcacagtgccgggctctgacccaggcgtgcgggtactcagaagctgaaacattaacaaacgtgctggatttcaaaagggatgctggtctgtggcatggcgtgttaacaagcgtcatgaacaggatgcacgtggtcagcgtcccctacgcgctgatgaaggcgaacccactctcctggatccagaaagtgtgcttctataaagctcgggccgcgctggtgaagtcgcgagacatgcactggtctctcctagctcagcggggccagagggacgtcagcctcagctcactgcgcatgctgattgtggccgatggtgccaacccgtggtcgatctcctcctgtgacgccttcctcaacgtcttccagtccagaggtctgaggccagaggtcatctgtccttgtgcaagttctcctgaggcgctgactgtcgccatccgcaggccacctgatctgggaggaccacctccaagaaaagcagtcctgtcgatgaacggtctaagttatggtgttatcagagtggatactgaagaaaagttgtcagtccttactgttcaggacgttggtcaggtgatgcctggagctaatgtatgtgttgtgaagttagaaggtaccccttatctttgtaaaactgatgaagtgggagaaatatgcgtcagttccagtgcaactggcacagcgtactatggattgcttggaatcacgaagaatgtgtttgaggcagttccggtcaccacaggaggagcacccatctttgacaggccattcaccaggacaggcctgctgggcttcatcgggcctgacaacctggtcttcatcgtgggcaaactggacgggctgatggtcactggagttcgcagacacaatgcagatgacgttgtggccaccgcactggccgtggagcccatgaagtttgtctacagaggcaggtgatgcgctgcggacccccacgccgggagtagattccttcatttgcagctcgggaagtctttgtgcagtagatggaaagcccagcaaacttgaattcacaaagcctaaaaattgttgtacatcagaaaactcctaaagtaaaaggaaaatatttgcagcaat

SEQ ID NO: 59550 - DNA, 2394 bp, Artificial Sequence
  derived and/or modified sequence
atggccgacagaggctgccccctggaggccgcccccctgcccgccgaggtgagagagagcctggccgagctggagctggagctgagcgagggcgacatcacccagaagggctacgagaagaagagagccaagctgctggccagatacatccccctgatccagggcatcgaccccagcctgcaggccgagaacagaatccccggccccagccagaccaccgccgccgcccccaagcagcagaagagcagacccaccgccagcagagacgagagattcagaagcgacgtgcacaccgaggccgtgcaggccgccctggccaagtacaaggagagaaagatgcccatgcccagcaagagaagaagcgtgctggtgcacagcagcgtggagacctacaccccccccgacaccagcagcgccagcgaggacgagggcagcctgagaagacccggcagactgaccagcacccccctgcagagccacagcagcgtggagccctggctggacagagtgatccagggcagcagcaccagcagcagcgccagcagcaccagcagccaccccggcggcagacccaccaccgcccccagcgccgccgccacccccggcgccgccgccaccaccgccctggccggcctggaggcccacacccacatcggcgtgcccgtgaacagcagagtgagcagcaagatccagcagctgctgaacaccctgaagagacccaagagaccccccctgaaggagttcttcgtggacgacttcgaggagctgctggaggtgcagcagcccgaccccaaccagcccaagcccgagggcagcgagaccagcgtgctgagaggcgagcccctgaccgccggcgtgcccagaccccccagcctgctggccaccctgcagagatggggcaccacccagcccaagagcccctgcctgaccgccctggacaccaccggcaaggccgtgtacaccctgacctacggcaagctgtggagcagaagcctgaagctggcctacaccctgctgaacaagctgaccagcaagaacgagcccctgctgaagcccggcgacagagtggccctggtgttccccaacagcgaccccgtgatgttcatggtggccttctacggctgcctgctggccgagctggtgcccgtgcccatcgaggtgcccctgaccagaaaggacgccggcagccagcaggtgggcttcctgctgggcagctgcggcgtgttcctggccctgaccaccgacgcctgccagaagggcctgcccaaggcccagaccggcgaggtggccgccttcaagggctggccccccctgagctggctggtgatcgacggcaagcacctggccaagccccccaaggactggcaccccctggcccaggacaccggcaccggcaccgcctacatcgagtacaagaccagcaaggagggcagcaccgtgggcgtgaccgtgagccacgccagcctgctggcccagtgcagagccctgacccaggcctgcggctacagcgaggccgagaccctgaccaacgtgctggacttcaagagagacgccggcctgtggcacggcgtgctgaccagcgtgatgaacagaatgcacgtggtgagcgtgccctacgccctgatgaaggccaaccccctgagctggatccagaaggtgtgcttctacaaggccagagccgccctggtgaagagcagagacatgcactggagcctgctggcccagagaggccagagagacgtgagcctgagcagcctgagaatgctgatcgtggccgacggcgccaacccctggagcatcagcagctgcgacgccttcctgaacgtgttccagagcagaggcctgagacccgaggtgatctgcccctgcgccagcagccccgaggccctgaccgtggccatcagaagaccccccgacctgggcggccccccccccagaaaggccgtgctgagcatgaacggcctgagctacggcgtgatcagagtggacaccgaggagaagctgagcgtgctgaccgtgcaggacgtgggccaggtgatgcccggcgccaacgtgtgcgtggtgaagctggagggcaccccctacctgtgcaagaccgacgaggtgggcgagatctgcgtgagcagcagcgccaccggcaccgcctactacggcctgctgggcatcaccaagaacgtgttcgaggccgtgcccgtgaccaccggcggcgcccccatcttcgacagacccttcaccagaaccggcctgctgggcttcatcggccccgacaacctggtgttcatcgtgggcaagctggacggcctgatggtgaccggcgtgagaagacacaacgccgacgacgtggtggccaccgccctggccgtggagcccatgaagttcgtgtacagaggctag

SEQ ID NO: 59551 - DNA, 2397 bp, Artificial Sequence
  derived and/or modified sequence
atggccgacagaggctgccccctggaggccgcccccctgcccgccgaggtgagagagagcctggccgagctggagctggagctgagcgagggcgacatcacccagaagggctacgagaagaagagagccaagctgctggccagatacatccccctgatccagggcatcgaccccagcctgcaggccgagaacagaatccccggccccagccagaccaccgccgccgcccccaagcagcagaagagcagacccaccgccagcagagacgagagattcagaagcgacgtgcacaccgaggccgtgcaggccgccctggccaagtacaaggagagaaagatgcccatgcccagcaagagaagaagcgtgctggtgcacagcagcgtggagacctacaccccccccgacaccagcagcgccagcgaggacgagggcagcctgagaagacccggcagactgaccagcacccccctgcagagccacagcagcgtggagccctggctggacagagtgatccagggcagcagcaccagcagcagcgccagcagcaccagcagccaccccggcggcagacccaccaccgcccccagcgccgccgccacccccggcgccgccgccaccaccgccctggccggcctggaggcccacacccacatcggcgtgcccgtgaacagcagagtgagcagcaagatccagcagctgctgaacaccctgaagagacccaagagaccccccctgaaggagttcttcgtggacgacttcgaggagctgctggaggtgcagcagcccgaccccaaccagcccaagcccgagggcagcgagaccagcgtgctgagaggcgagcccctgaccgccggcgtgcccagaccccccagcctgctggccaccctgcagagatggggcaccacccagcccaagagcccctgcctgaccgccctggacaccaccggcaaggccgtgtacaccctgacctacggcaagctgtggagcagaagcctgaagctggcctacaccctgctgaacaagctgaccagcaagaacgagcccctgctgaagcccggcgacagagtggccctggtgttccccaacagcgaccccgtgatgttcatggtggccttctacggctgcctgctggccgagctggtgcccgtgcccatcgaggtgcccctgaccagaaaggacgccggcagccagcaggtgggcttcctgctgggcagctgcggcgtgttcctggccctgaccaccgacgcctgccagaagggcctgcccaaggcccagaccggcgaggtggccgccttcaagggctggccccccctgagctggctggtgatcgacggcaagcacctggccaagccccccaaggactggcaccccctggcccaggacaccggcaccggcaccgcctacatcgagtacaagaccagcaaggagggcagcaccgtgggcgtgaccgtgagccacgccagcctgctggcccagtgcagagccctgacccaggcctgcggctacagcgaggccgagaccctgaccaacgtgctggacttcaagagagacgccggcctgtggcacggcgtgctgaccagcgtgatgaacagaatgcacgtggtgagcgtgccctacgccctgatgaaggccaaccccctgagctggatccagaaggtgtgcttctacaaggccagagccgccctggtgaagagcagagacatgcactggagcctgctggcccagagaggccagagagacgtgagcctgagcagcctgagaatgctgatcgtggccgacggcgccaacccctggagcatcagcagctgcgacgccttcctgaacgtgttccagagcagaggcctgagacccgaggtgatctgcccctgcgccagcagccccgaggccctgaccgtggccatcagaagaccccccgacctgggcggccccccccccagaaaggccgtgctgagcatgaacggcctgagctacggcgtgatcagagtggacaccgaggagaagctgagcgtgctgaccgtgcaggacgtgggccaggtgatgcccggcgccaacgtgtgcgtggtgaagctggagggcaccccctacctgtgcaagaccgacgaggtgggcgagatctgcgtgagcagcagcgccaccggcaccgcctactacggcctgctgggcatcaccaagaacgtgttcgaggccgtgcccgtgaccaccggcggcgcccccatcttcgacagacccttcaccagaaccggcctgctgggcttcatcggccccgacaacctggtgttcatcgtgggcaagctggacggcctgatggtgaccggcgtgagaagacacaacgccgacgacgtggtggccaccgccctggccgtggagcccatgaagttcgtgtacagaggcagatag

SEQ ID NO: 59552 - protein, 1567 aa, Artificial Sequence
  derived and/or modified sequence
MADRGCPLEAAPLPAEVRESLAELELELSEGDITQKGYEKKRAKLLARYIPLIQGIDPSLQAENRIPGPSQTTAAAPKQQKSRPTASRDERFRSDVHTEAVQAALAKYKERKMPMPSKRRSVLVHSSVETYTPPDTSSASEDEGSLRRPGRLTSTPLQSHSSVEPWLDRVIQGSSTSSSASSTSSHPGGRPTTAPSAAATPGAAATTALAGLEAHTHIDLHSAPPDVTTGLVEHSYFERPQVASVRSVPRGCSGSMLETADGVPVNSRVSSKIQQLLNTLKRPKRPPLKEFFVDDFEELLEDPNQPKPEGSETSVLRGEPLTAGVPRPPSLLATLQRWGTTQPKSPCLTALDTTGKAVYTLTYGKLWSRSLKLAYTLLNKLTSKNEPLLKPGDRVALVFPNSDPVMFMVAFYGCLLAELVPVPIEVPLTRKDAGSQQVGFLLGSCGVFLALTTDACQKGLPKAQTGEVAAFKGWPPLSWLVIDGKHLAKPPKDWHPLAQDTGTGTAYIEYKTSKEGSTVGVTVSHASLLAQCRALTQACGYSEAETLTNVLDFKRDAGLWHGVLTSVMNRMHVVSVPYALMKANPLSWIQKVCFYKARAALVKSRDMHWSLLAQRGQRDVSLSSLRMLIVADGANPWSISSCDAFLNVFQSRGLRPEVICPCASSPEALTVAIRRPPDLGGPPPRKAVLSMNGLSYGVIRVDTEEKLSVLTVQDVGQVMPGANVCVVKLEGTPYLCKTDEVGEICVSSSATGTAYYGLLGITKNVFEAVPVTTGGAPIFDRPFTRTGLLGFIGPDNLVFIVGKLDGLMVTGVRRHNADDVVATALAVEPMKFVYRGRIAVFSVTVLHDDRIVLVAEQRPDASEEDSFQWMSRVLQAIDSIHQVGVYCLALVPANTLPKAPLGGIHISETKQRFLEGTLHPCNVLMCPHTCVTNLPKPRQKQPEVGPASMIVGNLVAGKRIAQASGRELAHLEDSDQARKFLFLADVLQWRAHTTPDHPLFLLLNAKGTVTSTATCVQLHKRAERVAAALMEKGRLSVGDHVALVYPPGVDLIAAFYGCLYCGCVPVTVRPPHPQNLGTTLPTVKMIVEVSKSACVLTTQAVTRLLRSKEAAAAVDIRTWPTILDTDDIPKKKIASVFRPPSPDVLAYLDFSVSTTGILAGVKMSHAATSALCRSIKLQCELYPSRQIAICLDPYCGLGFALWCLCSVYSGHQSVLVPPLELESNVSLWLSAVSQYKARVTFCSYSVMEMCTKGLGAQTGVLRMKGVNLSCVRTCMVVAEERPRIALTQSFSKLFKDLGLPARAVSTTFGCRVNVAICLQGTAGPDPTTVYVDMRALRHDRVRLVERGSPHSLPLMESGKILPGVKVIIAHTETKGPLGDSHLGEIWVSSPHNATGYYTVYGEEALHADHFSARLSFGDTQTIWARTGYLGFLRRTELTDASGGRHDALYVVGSLDETLELRGMRYHPIDIETSVIRAHRSIAECAVFTWTNLLVVVVELDGLEQDALDLVALVTNVVLEEHYLVVGVVVIVDPGVIPINSRGEKQRMHLRDGFLADQLDPIYVAYNM

SEQ ID NO: 59553 - DNA, 4704 bp, Artificial Sequence
  derived and/or modified sequence
atggcggaccgcggatgcccgctggaagctgcccccctgcctgccgaagtccgggaatccctggcggagctggagctggaactctctgagggtgatattactcaaaagggctacgagaagaaacgcgctaaactgctggctagatacattcctttaatccaaggaatcgaccccagtctccaggccgaaaatagaatccccggaccaagtcagaccacagccgctgctccaaaacaacagaagtctagacccaccgcctcgcgcgatgagagattcagatccgatgtgcacaccgaagctgtacaagccgccctcgctaagtacaaagagagaaaaatgccaatgccttccaaaagacgctccgtattagtccacagtagcgttgagacttacacaccccccgatacaagcagcgcttcggaggatgaggggagcctacgccggccagggagacttacttcgacccctctccaaagccactcttcggtggaaccctggctggaccgagtaatccagggaagctctacttcgtcttctgccagtagtacatcatcccatccaggcggaagacccactacagcaccctctgccgccgcaacacccggagcagccgcaacaactgccctggcaggactcgaggcgcacacgcatatcgatttacactcagctcctccagacgtcacaacagggcttgtagagcactcctactttgagagaccgcaggtagcctctgtgcggagtgttccacgcggctgctccgggtcaatgctggaaacagcagatggagtcccagtgaattcaagagtctcttcaaagatccagcagctcctgaacaccctcaagagacctaagcgacctcccctgaaggagttctttgtggatgactttgaggagctcctggaggacccaaatcagcccaagcctgaagggagcgaaactagcgtgctcagaggagaaccgcttactgccggtgtgccacggccacctagtctgttagctaccctgcagagatgggggactactcagccgaagtcaccttgtttgaccgccctcgacacaaccggcaaggccgtgtacaccttgacctatggaaaactgtggtctagatctctgaagctggcttatactctgctcaataagctgacctccaagaacgaacccttactcaagccaggcgaccgcgtggctctcgtcttccctaactctgacccagtcatgttcatggtggccttttacggttgcctgctcgccgaactggtgcctgtcccgatcgaagtccccctaacaaggaaggacgcaggcagtcagcaggtgggatttttgctcgggagttgtggagtgtttctcgcactgacaacagatgcctgccaaaaggggctgccaaaggctcaaaccggggaggtagctgcgtttaaaggttggccccctctctcatggctggttattgacggcaaacacttagctaaaccccccaaggattggcatccccttgctcaggacacggggaccggaacagcatatattgagtataagacgtcaaaagaggggtcgactgttggtgtgactgtgtcccacgcatccctgctcgcccagtgtcgggccttgacccaggcctgcgggtactcagaggcagaaacgttgactaacgtcctggacttcaagcgtgatgctggcctttggcatggcgtgttgaccagcgtgatgaacagaatgcacgttgtgagcgtgccatacgccctcatgaaagccaaccccctctcttggattcaaaaagtatgcttttacaaagcccgtgccgccctggtcaagagcagggacatgcattggtccctgctggctcagcgtgggcagcgtgatgtcagccttagctctctgaggatgctcattgtggccgacggggctaacccttggagcatcagctcatgcgacgcattcttaaacgtgttccaatccaggggtcttcgacccgaggttatctgcccctgtgcctcctctccagaggctctgaccgtggccattagaagacccccagacctgggaggaccccctccccgcaaggcagtcctttcaatgaatggcttgagttacggtgtgatccgggtggatactgaggaaaaactgtcagtcttgactgtgcaggacgttggtcaagtcatgccaggcgcgaatgtgtgtgtggtcaagcttgagggcactccctacctttgtaagaccgacgaggtgggtgaaatctgtgtttccagttctgccacaggcacagcctactacggcctcctcggcataactaagaatgtctttgaagctgtgccagtgaccacgggcggcgccccgatcttcgatcgacctttcacccggacaggcttgctggggttcatcggccccgataacctcgtgtttattgtgggaaaactggacggtctgatggtcactggagtacggcggcataacgccgacgacgttgttgcgacggcactagcagtggagcccatgaaatttgtttacagggggcgaatagcggtgttttccgtaactgtgttgcacgatgatcggattgtacttgtggctgagcagcgacctgatgcgtccgaggaggacagttttcagtggatgtcccgcgttctccaggcgatcgactccattcatcaagtcggcgtctattgtctcgctcttgtgccagccaacactcttccaaaggcccccttgggagggatccatatctctgaaaccaagcagcgattcttggagggaaccctgcatccttgtaacgtgctcatgtgcccccatacctgtgtgaccaatcttccaaaaccaagacagaagcaacctgaggtggggccagcaagcatgatcgtgggaaacctggtagcaggaaaacgcatcgcacaagcatcagggagagagctcgcacatcttgaggactccgaccaggctagaaagtttctatttctcgccgacgtcttacaatggagggcccacacaaccccggatcatccactctttttgttgctgaacgcaaaggggaccgtcaccagtactgcaacttgtgtgcagttgcataagcgcgccgagagggtcgccgcagcccttatggagaagggaagactgtcagtgggagatcatgtagcgttagtttatccaccaggcgtggatctaatcgcagccttttacggatgcctctattgcggctgcgtccctgtaactgtgaggcctccccacccacagaacctcggcacaaccctccctactgttaagatgatcgttgaggtgtcaaagtctgcctgtgtcctaacgacccaggcggttacgaggttattgcggtctaaagaagcagccgctgccgtcgatattaggacctggccaaccatccttgatacggatgacattccaaaaaagaagatagcaagcgtcttccgaccaccaagtcctgacgtgctagcttatctggacttcagtgtcagcacgacaggaatcctcgctggagtaaagatgtcacatgcggccactagcgctctttgccgtagcattaagctacaatgcgaattatatccctctagacaaatcgcaatctgcctcgacccttactgtggcttgggcttcgctctctggtgtctttgctctgtgtacagcggccaccagagcgtgctggtcccccctttagaactggagtcaaatgttagcctgtggttgtccgctgtgagtcagtacaaggctagagtaaccttctgttcttattctgtgatggagatgtgcacaaaaggactgggggcccagacgggagtgctgaggatgaaaggagtaaacttaagttgcgttaggacctgcatggtggtggcggaggagcgtcctagaatcgctctcacccagagcttcagcaagctattcaaagacctgggactgcctgcccgcgccgtgagcacaaccttcggctgtagggttaatgtggcaatttgtctgcagggaaccgcagggcccgaccccaccacagtgtacgtggacatgagggcattgagacatgatcgggtcagactcgtagagcgggggagtccgcattcactaccactcatggaatctggaaagattttgcccggagtgaaggttattattgcccacacggagactaaaggccccttgggagattcgcacctgggcgagatctgggttagtagtcctcacaacgctacaggctattatacagtctatggggaagaggccttgcacgctgatcatttctctgctcggttgtcctttggcgatacccagactatatgggccagaaccggttacctcgggtttcttcgtcggactgagcttacggatgcaagtgggggtcgacatgatgcactgtatgtcgtgggctctttagacgagacgctggagctgagagggatgagatatcaccccattgatatcgagacttctgtcatccgggcacaccggagtatcgctgaatgtgccgtgtttacttggaccaatctactggtggtagttgtcgaattagacggcctcgagcaggatgcactcgaccttgttgctctcgttacaaatgtcgttctagaggaacattacctggtggtgggtgtagttgtgatcgtggaccccggagtcattcccatcaattcgcgcggggaaaagcagaggatgcaccttcgcgacggctttctcgctgaccaactggacccaatctatgttgcttacaacatgtag

SEQ ID NO: 59554 - DNA, 4704 bp, Artificial Sequence
  derived and/or modified sequence
atggctgaccggggctgccccctggaggccgcccccctgcctgctgaggtgcgggagagcctggccgagctggagctggagctgtctgagggggacatcacccagaagggctatgagaagaagagggccaagctgctggcccgctacatccccctcatccagggcatcgaccccagcctgcaggctgaaaatcgcatccctggccccagccagaccacagctgctgcccccaagcagcagaagagccggcccacagccagcagagatgagcgcttcagaagtgatgtgcacacagaggccgtgcaggccgccctggccaagtacaaggagaggaagatgcccatgcccagcaagagaagatctgtgctggtgcacagctctgtggagacctacaccccaccagacaccagcagcgcctctgaagatgagggcagcctgcggcggcccggccgcctgaccagcacccccctgcagagccacagctctgtggagccctggctggacagagtcatccagggcagcagcaccagcagcagcgccagcagcaccagcagccaccctgggggccggcccaccacagcccccagcgctgctgccaccccaggagctgctgccaccacagccctggccggcctggaggcccacacccacatcgacctgcacagcgcccccccagatgtgaccaccggcctggtggagcacagctactttgagcggccccaggtggcctctgtgcgctctgtgccccggggctgcagcggctccatgctggagacagcagatggagtgcctgtgaacagccgggtgagcagcaagatccagcagctgctgaacaccctgaagaggcccaagaggcctcccctgaaggagttctttgtggatgactttgaggagctgctggaggaccccaaccagcccaagccagagggcagcgagacctctgtgctgcggggggagcccctgacagctggggtgccccggccccccagcctgctggccaccctgcagcgctggggcaccacccagcccaagagcccctgcctgacagccctggacaccaccgggaaggctgtgtacaccctgacctacggcaagctgtggagccgcagcctgaagctggcctacaccctgctgaacaagctgaccagcaagaatgagcccctgctgaagccaggggacagagtggccctggtgttccccaacagcgaccctgtgatgttcatggtggccttctacggctgcctgctggccgagctggtgcctgtgcccatcgaggtgcccctgaccaggaaggatgctggcagccagcaggtgggcttcctgctgggcagctgtggggtcttcctggccctgaccacagatgcctgccagaagggcctgcccaaggcccagacaggagaggtggccgccttcaagggctggccacccctgtcctggctggtgattgatggcaagcacctggccaagccacccaaggactggcaccccctggcccaggacacaggaactggaacagcctacatcgagtacaagaccagcaaggagggcagcacagtgggcgtgacagtgtcccatgccagcctgctggcccagtgccgggccctgacccaggcctgtggctacagcgaggccgagaccctgaccaacgtgctggacttcaagagagatgctggcctgtggcatggagtgctgacctctgtgatgaacaggatgcacgtggtgtctgtgccctatgccctgatgaaggccaaccccctgtcctggatccagaaggtgtgcttctacaaggcccgggccgccctggtgaagagccgggacatgcactggagcctgctggcccagaggggccagagagatgtgtccctgagcagcctgaggatgctgattgtggctgatggagccaacccctggagcatcagcagctgtgatgccttcctgaatgtgttccagagccggggcctgcggcctgaggtgatctgcccctgtgccagcagccctgaggccctgactgtggccatccggcggcccccagacctgggcggccccccacccaggaaggctgtgctgtccatgaatggcctgtcctatggagtcatccgggtggacacagaggagaagctgtctgtgctgactgtgcaggatgtgggccaggtgatgcctggggccaacgtgtgtgtggtgaagctggagggcaccccctacctgtgcaagacagatgaggtgggggagatctgtgtgagcagcagcgccactggaacagcctactacggcctgctgggcatcaccaagaatgtgtttgaggccgtgcctgtgaccactggaggagcccccatctttgaccggcccttcaccaggacaggcctgctgggcttcatcggccctgacaacctggtgttcatcgtgggcaagctggatggcctgatggtgactggagtgagaagacacaatgctgatgatgtggtggccacagccctggccgtggagcccatgaagtttgtgtaccggggcagaattgctgtgttttctgtgacagtgctgcatgatgacagaattgtgctggtggccgagcagaggccagatgccagcgaggaggacagcttccagtggatgagccgggtgctgcaggccatcgacagcatccaccaggtgggcgtgtactgcctggccctggtgcctgccaacaccctgcccaaggcccccctgggcggcatccacatcagcgagaccaagcagcgcttcctggagggcaccctgcacccctgcaatgtgctgatgtgcccccacacctgtgtgaccaacctgcccaagccccggcagaagcagcctgaggtgggccctgcctccatgattgtgggcaacctggtggccggcaagagaattgcccaggccagcggccgggagctggcccacctggaggacagcgaccaggccaggaagttcctgttcctggctgatgtgctgcagtggagggcccacaccaccccagaccaccccctcttcctgctgctgaatgccaagggcaccgtgaccagcacagccacctgtgtgcagctgcacaagagagctgagcgggtggccgccgccctgatggagaagggccgcctgtctgtgggggaccacgtggccctggtgtacccacctggggtggacctgattgctgccttctacggctgcctgtactgcggctgtgtgcctgtgacagtgcggcccccccacccccagaacctgggcaccaccctgcccaccgtgaagatgattgtggaggtgtccaagagcgcctgtgtgctgaccacccaggccgtgacccggctgctgcggagcaaggaggccgctgctgctgtggacatccgcacctggcccaccatcctggacacagatgacatccccaagaagaagatcgcctctgtgttccggccccccagcccagatgtgctggcctacctggacttctctgtgtccaccaccggcatcctggccggcgtgaagatgagccacgccgccaccagcgccctgtgccgcagcatcaagctgcagtgtgagctgtaccccagccggcagatcgccatctgcctggacccctactgcggcctgggctttgccctgtggtgcctgtgcagcgtgtacagcggccaccagagcgtgctggtgccccccctggagctggagagcaatgtgtccctgtggctgtctgctgtgtcccagtacaaggcccgggtgaccttctgcagctacagcgtgatggagatgtgcaccaagggcctgggcgcccagacaggagtgctgaggatgaagggcgtgaacctgagctgtgtgaggacctgcatggtggtggccgaggagcggccccgcatcgccctgacccagagcttcagcaagctgttcaaggacctgggcctgcctgcccgggctgtgtccaccaccttcggctgccgggtgaatgtggccatctgcctgcagggcacagctggccctgaccccaccaccgtgtatgtggacatgagggccctgcggcatgacagagtgcggctggtggagcggggcagcccccacagcctgcccctgatggagagcggcaagatcctgcccggggtgaaggtgatcatcgcccacacagagaccaagggccccctgggggacagccacctgggggagatctgggtgagcagcccccacaatgccaccggctactacacagtgtatggagaggaggccctgcatgctgaccacttcagcgcccggctgagctttggagacacccagaccatctgggccaggacaggctacctgggcttcctgcggaggacagagctgacagatgccagcggcggcagacatgatgccctgtatgtggtgggcagcctggatgagaccctggagctgcggggcatgagataccaccccatcgacatcgagaccagcgtcatccgggcccacaggagcattgctgaatgtgctgtgttcacctggaccaacctgctggtggtggtggtggagctggatggcctggagcaggatgccctggacctggtggccctggtgaccaacgtggtgctggaggagcactacctggtggtgggcgtggtggtgattgtggaccccggggtcatccccatcaacagcagaggagagaagcagaggatgcacctgagagatggcttcctggccgaccagctggaccccatctacgtggcctacaacatgtag

SEQ ID NO: 59555 - DNA, 4704 bp, Artificial Sequence
  derived and/or modified sequence
atggccgaccggggctgccccctggaggccgcccccctgcccgccgaagtgcgagagtcccttgctgagctggaactcgagctgtcggaaggcgacattacccagaaggggtacgagaagaagagggctaaactgctcgcgcggtatatcccactgatccagggaatagatccctccttacaagcagaaaaccggatcccagggccctcacaaacgacggccgcagctcctaagcagcaaaagtcccgcccgaccgcatcccgagacgaaaggtttcgcagcgacgtgcatactgaagccgtccaggctgcactcgctaagtacaaagagaggaagatgccaatgccaagcaagaggcgttcagtgctggtgcattcatccgtggagacctacacccctcctgacacttcttcagcttcggaagacgagggaagccttaggagaccgggcagactgacctccacccccttgcagtcgcactcatccgtcgagccttggctggatcgggtgattcagggttccagtacaagttctagtgcttctagtacctctagccaccctggagggcggcctaccaccgctccttccgccgccgcaacgcccggtgcagccgccaccactgccctcgcggggctggaggcacatacccatatcgacttgcatagcgcgccacccgacgtgaccacaggactcgttgagcatagctatttcgaaaggccacaggtcgccagtgttcggtctgtcccgcggggatgttccggttccatgttggagacagccgatggagtccctgtcaactcaagagtatcaagcaagatacagcaactgctgaacacactgaagcggcccaagagaccacctctcaaggaattctttgtagatgactttgaggaattactagaagaccccaaccagcccaagcccgagggatccgagacttccgttctgaggggcgagccccttaccgccggcgtccctcgccccccaagccttctggcaaccctgcagcgctggggtaccacacaacctaagtctccatgtctgacggccctcgacacaacaggcaaagcggtgtacaccctgacgtatggaaagttgtggtccagatccttgaagctggcttataccctgttgaataagctgacttctaaaaacgagcccctcttaaagcccggggaccgagtcgcgctggtctttcccaattcggatcccgtgatgttcatggtggccttttatggatgcttgctggctgaactcgttccagtccctattgaagtccccctgaccaggaaagatgctggttcccagcaggttgggttccttttgggaagttgtggcgtctttcttgctttgacgacagacgcatgtcaaaaggggctccccaaggcgcagactggtgaggttgcagcttttaagggatggcctccgctcagctggttagtgatcgacgggaagcaccttgctaaacctcccaaggactggcacccactagcacaggataccggtactggcaccgcttacatcgaatataagacgagtaaagagggctcgacagtgggtgtgaccgtcagccacgcttcgctgctggcccagtgcagagctctgacacaggcctgcggctatagtgaggcggaaacccttaccaatgttctggattttaagagggatgcagggctctggcacggagtcctgacatccgtcatgaacagaatgcacgttgtgagcgtgccgtacgccttgatgaaggctaacccgctgtcttggatacagaaagtatgtttttacaaagctagggctgcattggttaaatcgcgcgacatgcattggtctctgctggctcagaggggacaaagggacgtttcactatcttcactcagaatgcttatagtggcagatggggcgaatccctggtctatcagctcttgcgatgcattcctgaatgttttccagagcagagggctccgccccgaagtgatttgtccatgtgccagtagtcctgaggcacttaccgttgccatccgccgcccaccagatctgggcggaccacctccacgcaaagccgtcctgagtatgaacggactgtcatatggcgtgatccgggttgacacggaggaaaagttatccgtgctcacagtgcaagacgtaggccaggtaatgccgggtgctaacgtgtgcgttgttaagctggagggcaccccctacctctgtaagactgatgaggtgggggagatctgtgtgagctcgagtgccacaggcacagcgtattacgggttactgggcatcaccaagaacgtcttcgaagctgtacccgtgaccacgggcggagcacctatattcgaccgcccatttacccgcacaggtttgctggggtttatcggccctgataatttggtgttcattgtgggtaaactggacggattgatggtcactggagtgcgccgacacaacgcagacgacgtggtcgcaaccgccctggccgttgagcctatgaagttcgtgtaccgcggccggatcgctgtgttttccgtaacagtgctgcacgacgatcgcattgtcttggtcgccgagcagcggcccgacgccagtgaggaagattcattccagtggatgtcaagagttcttcaggctatcgattctatccaccaggtgggggtttactgcctagctctggtacccgccaacaccctgcccaaggcacccttggggggtatccacatcagtgagaccaaacaaaggtttctcgaaggaacactccacccttgtaacgtactgatgtgcccacatacttgtgttactaacctcccgaagccaagacaaaagcagccagaggtgggccctgccagcatgatagtcggaaacttggttgctgggaaacgtatcgcacaagctagtggacgggagcttgcccatctcgaagactcagaccaggctcggaagttcctgtttctcgccgatgttttacagtggagagcccatacaacaccagaccatccgctttttttgcttttgaatgccaaaggaactgtaacgagcactgccacatgcgttcagctgcataaacgcgcggaacgtgtggcagctgctttgatggaaaagggccggctgtcagtcggcgatcacgtcgcacttgtttatcctccgggcgtcgacctgatcgcagcattctatgggtgtctgtattgcggctgtgtgcctgtcacagtaagacctcctcacccacagaatttaggcacaaccctgcccactgttaaaatgatcgtcgaagtgtcaaaaagcgcctgcgtgctcactacccaggctgtgactaggctgctgcggtccaaagaggccgctgccgccgtggatattcgaacctggccgaccatactggataccgacgacatacctaagaaaaagatagcaagcgtgttccggcccccctctcctgacgtcctcgcctacttggatttcagtgtatcgacaacggggatcttagctggagttaaaatgagccacgctgcaacttccgccttgtgtagatccatcaaactccagtgcgaactgtatccgagccgacagattgcaatctgtcttgacccttactgcggcctgggattcgcgttgtggtgcctgtgctccgtttactcaggccaccagtccgtcctcgtaccccctctggagctagagagtaacgtttccctctggctgtcggcagtgtctcaatacaaagcccgcgtcaccttctgctcgtattccgtgatggaaatgtgcaccaagggcctcggcgcccagaccggagtcctccgcatgaaaggtgtgaatctctcttgcgttcgcacctgcatggtggtggctgaggagagacctaggatcgctctgacacagagtttctccaaacttttcaaggacctgggcttgccagcccgagctgtttcaactaccttcggatgtcgcgtgaacgtggccatctgcctacagggaactgctggacccgatcctacaaccgtttacgtggacatgagagccctgaggcatgatcgggttcgtctagttgagagagggagccctcattcgttgcctttgatggagtctggaaagatactgccaggggtaaaggttatcatagcccacacagaaaccaaaggacccctaggtgatagtcacctgggcgagatctgggtgtcatcgccccacaacgccacaggttattatacagtttatggcgaggaagcattgcatgctgaccatttttcggcccgcctgagctttggcgacacccagactatctgggcgagaacggggtacctgggctttcttcgtcgcaccgaattgacagacgcctcaggtggaaggcatgatgccctttacgttgtaggatctcttgatgaaacgctggagcttcgaggaatgaggtaccaccctatcgatattgagacctctgtaatccgagcccacaggtccatcgcagaatgtgccgtttttacttggactaaccttctggtcgtagtagtggagctggatggactggaacaggacgctctcgacctcgtggccctcgtgacaaatgtcgtgctggaagaacactatctagtcgtgggcgttgtggtgatcgtcgacccaggggtgatcccgattaattcgcggggcgaaaagcagcgaatgcatttaagagacgggttccttgcagatcagctagatccaatttatgtggcttataacatgtag

SEQ ID NO: 59556 - DNA, 4704 bp, Artificial Sequence
  derived and/or modified sequence
atggccgacagaggatgtcccctagaagccgcaccacttcccgcagaggttagggagtccctagcggagctggagctggaattatccgaaggggacatcacacagaagggctatgaaaaaaagcgcgctaagctgcttgcaagatatatccccctgatccaaggcattgatccttccctgcaagcagaaaatcgtatcccaggcccttcccaaacgacagcggcagcacctaagcaacagaaatcaagaccaactgctagcagggatgagaggtttcggtctgacgtgcataccgaggcggttcaggcagcccttgccaagtataaagagcggaagatgcctatgccgagtaagaggaggtcagttttggtgcattcgtctgttgagacatacaccccgcctgacacatcctccgccagcgaagatgaaggaagtttgcgacgcccaggtcggttgacttcaactcccctgcaatcccattcgagcgtcgagccatggcttgatcgggtaattcaagggtctagcacatcaagctcagctagttctactagctctcacccgggaggcaggcccactacagcccctagcgcggcagccactccgggtgctgccgcaacgaccgccctggctggcctcgaggcgcacacgcacatcgatcttcactccgcccctcccgatgtgacaaccggtttggtcgagcatagctacttcgagcggcctcaagtggcgagcgttagatctgtgccacggggatgctccggctcaatgctggaaactgcagatggggtgcctgttaactcccgcgtctccagcaaaatccagcagctcctgaacactctcaaacgaccgaagcgaccaccactgaaggagttcttcgtggacgatttcgaagaactgttagaagaccctaatcaacccaagccagagggctcagagacttctgttctgaggggagagccactgacagccggtgtcccaaggccaccaagcttgcttgccaccctccagcgctggggcactacccagcctaagtctccctgtctcacggcccttgacaccacaggcaaggctgtctatacactgacctatggcaagttatggtcacgaagtctgaagcttgcctatactctgctcaacaagctcacgtctaaaaacgagcctctgctcaagcccggtgatagagtcgctttggtcttccccaatagcgatccagtaatgtttatggttgctttttacggatgcttgctggccgaactggtgccagtccctatagaggtccccctgactcgaaaggatgcaggctcgcagcaagtcggcttcctgctggggagttgtggcgtgttcctggctctgacaacagatgcatgtcagaagggcctccctaaggcccagactggcgaggtagccgcatttaaaggctggcccccactgagctggctcgtcatcgatggtaaacatctcgcaaagccccctaaggactggcacccccttgctcaggatacggggacgggcacggcttatatcgaatataagacctccaaagagggatctaccgtgggggtcactgtgtcacacgcctcactgctcgcccagtgcagggccctgacgcaggcctgcggctactctgaggccgagaccctgacaaatgtactggacttcaagcgggacgccggtctgtggcacggtgtgcttacatcagttatgaaccggatgcatgtggtctctgtcccctatgcgctcatgaaagcaaatccactctcatggattcaaaaggtctgtttttacaaggccagggctgcactggtgaagtccagagatatgcactggagcctcctagcacagagaggtcagcgggatgtctcacttagctcattaagaatgctaattgtggcagatggagcaaacccctggagcatctcctcctgcgatgcattccttaacgtatttcagtcaagaggcttgcgcccagaggtgatatgtccgtgtgcttcttcccctgaggccctcaccgtggccattcgtaggccgcctgacctcgggggtccaccacctaggaaagcagtgctgagcatgaacgggctgagttatggagtgatccgggtcgacaccgaggaaaaactgagtgttcttacggtccaggatgtgggccaggtgatgcctggggcaaatgtatgtgtggtcaagttggagggcaccccatacctctgcaagaccgacgaggtcggagagatttgcgtgtccagctctgcaaccggaaccgcttattacggactgctagggattaccaagaatgtgttcgaagctgtccccgtcacaacaggcggtgctccaatctttgataggcctttcaccagaacgggcttgctcggatttatcggcccagataatctggtatttattgttggcaaactagacgggctgatggttacgggcgtgaggcgccacaacgccgacgacgttgtggctacagccctggcggtggaacctatgaaatttgtttatcgtggtcggatcgctgtgttcagtgttacagtcctccatgatgatagaattgtcctggtggcggaacagcggcctgatgcgtctgaggaggattcctttcagtggatgagccgggtgctgcaagcgattgattcaatccaccaggttggggtgtactgcctcgccctggtacccgctaacacccttccgaaagctcctcttggaggaatccatatctcagaaactaaacagagattcttggaggggacccttcatccatgtaacgttctgatgtgcccacacacatgcgtaactaacctgcctaagcccaggcagaaacagcctgaagtgggccctgcctcaatgatagtcggaaacctagtggcaggtaagaggatcgcccaggccagcggacgggagctcgcccacttagaggatagtgatcaggctcggaagttcctgtttctggccgatgttctccagtggcgcgctcacaccactcccgaccaccctttattccttttacttaacgccaagggcactgtgacctcaacagcgacctgcgttcagcttcacaagagagccgagagggtcgcagcagccttgatggagaagggtcgcctgagtgtgggggaccacgtggcacttgtctacccccctggcgtagacttaattgccgctttctatggctgcctatactgtggttgcgtgccggttactgtaaggccgccacaccctcaaaatctgggaacaacgctgcccaccgttaagatgatcgtcgaagtgtcaaaatccgcatgtgtcttaactacccaggcagtgacacggctcctgagaagcaaggaagccgctgccgcagtggatattcgaacctggccaaccattctagataccgatgatattcctaaaaagaaaattgcaagcgtgttccgcccaccatcacctgatgtgctcgcttatttagatttcagcgtgtccacaacaggcatcttggcaggggtgaagatgagtcacgctgccaccagcgctctctgtcgaagcatcaagctgcagtgcgaactgtaccccagtagacagattgcaatctgccttgatccgtattgcgggctaggctttgccctctggtgcttgtgttctgtgtacagcggccaccagtccgtactggttccaccactcgagctggaatccaatgtgagtctctggctgagtgcagtgtcacaatacaaagcccgtgtaacattctgttcgtactcagtgatggagatgtgcacaaagggcctgggggctcaaaccggtgtattgcggatgaagggtgtgaacctgtcttgtgtgagaacttgtatggtggttgctgaagaaagacctaggattgctttaacacagtcctttagcaagctgtttaaagacctaggcctacccgcaagagccgtgagcaccacatttggatgccgcgtcaatgtggccatctgcctccagggtacagctggacctgacccaacaacggtgtacgtggacatgcgggctctgaggcatgaccgcgtgcgcctggtcgagcgcggtagccctcacagcctgcccttaatggagtcgggtaagatactgcccggagtgaaagtgatcatagctcacactgagaccaaggggccactaggcgattcacatcttggggaaatctgggtgtcctccccacacaatgccacaggttattacacggtgtatggggaggaggccctgcatgcagatcatttctcagccaggcttagctttggtgatacacagactatctgggccagaacgggctatttgggcttcctacggaggaccgaactgaccgacgcttccgggggaagacatgacgcgctctacgtggtgggaagtttagatgaaacactagaactgagagggatgcggtatcacccgatcgatatcgagacttcagtcataagggctcacaggtcaattgctgaatgcgctgtctttacgtggactaatttgctggtggtcgttgtagagctggacggtctggaacaggatgctctggatctggttgcacttgtgacgaacgtggtgctggaagagcactacctggtggtgggcgttgtggtgatagtggacccaggggttatcccaatcaatagccgcggtgaaaagcagcggatgcatctcagggacgggttcctagccgatcagcttgatccaatctacgttgcttacaacatgtag

SEQ ID NO: 59557 - DNA, 7023 bp, Artificial Sequence
  derived and/or modified sequence
ccggccgggcgctcaggagcgcgcggggcagcggcggcgcggcggagccatccgcgctcgtgcccgcgcgggtgcgttgctgtcctggccgcgcccctgtcccgccgcctcccgctcctcgcctggcggatgtaggttgttggcctgaggggagctacgtagccgaggtttgcgctgccgccgccaggcccggtccggttccagcctctgcccggacgctagccggcctggccatggctgaccgcgggtgcccgctggaggcggcgccgctgcctgccgaggtgcgggagagcctggctgagctggagctggagctgtcggaaggtgacatcactcaaaaaggatatgaaaagaaaagggcaaagctgcttgcacgttatataccgcttattcaaggaatagacccatctctgcaagcagagaatagaattcctgggccctcacaaaccacggccgctgcacccaagcagcagaagtctcggcccaccgcctcgagggatgagcgcttccggtcagatgtccacactgaagccgtgcaagcagctttggccaaatacaaagagaggaagatgcctatgccttcgaagagacgttctgtccttgtgcattcgtctgtggaaacctacacccctccagacacgtcgtctgcctcagaagatgagggctctttacggcgacccgggcgactcacctccactccgctccagagccattccagcgtcgagccctggctcgaccgggtcattcagggctcgtccacctcatcctctgcatcctccacctcatctcacccgggagggagacccaccactgctcccagtgctgcagccacgccgggggccgccgctaccactgcactcgcaggcctcgaggcccacacccacatagatctgcattctgcccctcctgatgtcaccacgggcctcgtggagcattcgtactttgagcgtccacaggtggcttctgtgagaagtgttcctcgggggtgcagcgggagcatgctggaaacagcagatggtgtccctgtgaacagcagagtgtcctccaaaatccagcagcttctgaacaccctgaagaggccaaagcgccctccactgaaggagttctttgtggatgattttgaggaattgttggaagatccaaatcagccaaagcctgagggaagcgagacgagtgtgctgagaggggagcctctcactgcaggtgtcccccgaccgccgtcgctgttggccaccttgcagcgctggggcacaacacagcccaaatccccctgtctgactgccttggatacaactgggaaagccgtctacactctcacctatggtaaactttggagtcggagtttaaaactagcttatactctacttaataaactgacaagtaagaatgaacctctacttaaacctggagacagagtggcgctcgtgtttccgaatagtgaccctgtgatgttcatggttgcattttatgggtgtctcctggcagagctggttcctgtccccatagaagtgccattaacaagaaaggatgcaggcagccagcaggttgggtttctgctgggcagctgtggagtcttcttggccctgaccacagacgcttgtcagaaaggcctccccaaggcacagacaggagaggtggcagctttcaaaggttggcccccgctctcctggctagtgattgatgggaagcatctagccaagcccccaaaggactggcaccctctggcccaggacacagggactgggactgcctacattgagtataaaaccagcaaagaaggcagtacggtgggggtcacagtgtcccacgcatccctgctggcacagtgccgggctctgacccaggcgtgcgggtactcagaagctgaaacattaacaaacgtgctggatttcaaaagggatgctggtctgtggcatggcgtgttaacaagcgtcatgaacaggatgcacgtggtcagcgtcccctacgcgctgatgaaggcgaacccactctcctggatccagaaagtgtgcttctataaagctcgggccgcgctggtgaagtcgcgagacatgcactggtctctcctagctcagcggggccagagggacgtcagcctcagctcactgcgcatgctgattgtggccgatggtgccaacccgtggtcgatctcctcctgtgacgccttcctcaacgtcttccagtccagaggtctgaggccagaggtcatctgtccttgtgcaagttctcctgaggcgctgactgtcgccatccgcaggccacctgatctgggaggaccacctccaagaaaagcagtcctgtcgatgaacggtctaagttatggtgttatcagagtggatactgaagaaaagttgtcagtccttactgttcaggacgttggtcaggtgatgcctggagctaatgtatgtgttgtgaagttagaaggtaccccttatctttgtaaaactgatgaagtgggagaaatatgcgtcagttccagtgcaactggcacagcgtactatggattgcttggaatcacgaagaatgtgtttgaggcagttccggtcaccacaggaggagcacccatctttgacaggccattcaccaggacaggcctgctgggcttcatcgggcctgacaacctggtcttcatcgtgggcaaactggacgggctgatggtcactggagttcgcagacacaatgcagatgacgttgtggccaccgcactggccgtggagcccatgaagtttgtctacagaggcaggatcgctgtgttctctgtgaccgtgctgcacgacgaccggattgtcctggtggctgagcagcggccggatgcctcggaggaggacagcttccagtggatgagccgtgtgctgcaggccattgatagcatccaccaggtgggcgtgtactgtctggccctggttcctgccaacaccttgcccaaggctcctctcggagggattcacatttctgaaaccaaacagcgctttctggaagggacgctgcacccgtgtaatgtgctgatgtgccctcacacctgtgttaccaacctccccaaacctcgtcagaaacaaccagaggttggaccagcctcaatgatcgtggggaacctggttgctgggaagagaatcgctcaggcttccgggagagagctcgcccacctggaggacagcgaccaggcacggaagttcctgttcctggctgacgtgctgcagtggcgtgcccacaccactcctgaccacccgctgttcttgctgctgaacgccaagggcaccgtcacaagcactgcaacctgtgtccagctgcacaaaagggctgagagagtggccgcggctctgatggagaagggaagactgagtgttggggaccatgtggctctggtctacccaccaggggtggacctcattgccgcgttctatggctgcttgtactgtggctgcgtgcctgtcaccgtgcggcccccgcaccctcagaacctcggcaccacactgcccaccgtcaagatgatcgtggaggtcagcaagtctgcatgcgtcctcaccacgcaggctgtcacacggctgctcaggtccaaggaggctgctgctgccgtggacatcaggacctggcccaccatcctagacacagatgacatcccaaaaaagaagatagcaagcgttttcaggcccccctcccccgatgtcctcgcatacttggacttcagcgtgtcaaccactgggatattagcgggagtgaagatgtcgcacgcggccacaagcgccttatgccgctccataaagctgcagtgtgagctgtacccctcgcggcagatcgccatctgcctcgacccctactgtggccttggttttgccctgtggtgtctgtgcagtgtctactcgggacaccaatcagtgctggtgcccccgctggagctggagagcaacgtgtccctgtggctgtcggccgtcagccagtacaaggcccgcgtcaccttctgctcctactctgtgatggagatgtgcaccaagggcctaggcgcacagacgggtgtcctcaggatgaagggggtgaacctgtcatgtgtgcgcacgtgcatggtggtcgccgaggagcggcccaggattgcgctgacccagtccttctccaagctcttcaaggacctgggcctgccggcccgcgccgtaagcaccacgttcgggtgcagggtcaacgtggccatctgcctccagggcacagctggcccggaccccacaaccgtctacgtggacatgcgggcactgcgccatgacagggttcgtttggtagaacggggttctccgcacagcctgccattgatggagtctggaaagatcctccccggcgtgaaggtcatcatcgcacacaccgagaccaaaggacccttgggagactcacacctgggagagatctgggtaagcagcccccacaatgccaccgggtactacaccgtttacggggaggaggcgcttcatgccgaccacttcagtgcccggctgagttttggagacacacagaccatctgggcaaggaccggctaccttggcttccttcggcgaacagagctcactgatgccagtggagggcggcacgatgcactgtatgtggttgggtctctggatgaaactctggagctcagaggcatgcggtaccaccccatcgacattgagacctctgtcatccgagcacacaggagcatcgctgagtgtgccgtattcacctggaccaacctgctggtggtggtggtggagctggatgggctagagcaggatgccctggacctggtggccctggtgaccaacgtggtgctggaggagcactacctggtcgtgggagtggtggtcatcgtggacccaggggtgatccctatcaactctcggggtgagaagcagcgcatgcacctgcgggacggcttcctggctgaccagctggaccccatctatgtcgcctacaacatgtgagcgcagcacaccggcccaggtgccggagatgaatgagccccagcagtccaaggtgtgatgtgggaagacaccgcagagctcactcaccgggactcgcccttcctgtgctcttacagatccctctcaacaatccccgcatctccttttagaaagcacttcctgaattatttaaagaaatattttgaatctgccaagtacatttacaaaaacacggatgctggtattttaacagatggagagacaaggaaaggaaaggaaaggcctggcatgggcattgtgaggaatcacaggcaccgaggttgttctctgctgtactgcaagtttgcactttctttaggctaaaaatatagttcctgatttttaaaattcagttatttattcccacttcaaatgacaagttcatatatagaatttacgggagaaacttgagaccatttacggggagaaacttgattctgggaagatagcagagtacaaaccagctgcctcacttctgtttcacagggaggctgatggaaaaaggaagcaagctggacccatcctccctgctcacagagggcactgtggtcacacacagtgcctcctctgccagttcctttattgaaagaggtgtgctggctggccacggtggcttacacctgtaatcccagcactttgggaggccgaggcgagcagatcacgaggtcaggagaccgagaccatcctggctaacatggtgaaaccctgtctctactaaaaatacaaaaaattagccgggtgtggtggtgggcgcctgtagtcccagctacttgggaggctgaggcaggagaatggtatgaaccagggaggcggagcttgcagtgagccgagatcacgctactgcactccagcctgggtgacagcacgagatgccgtcttaaaaaaacaaaaaagaggtgtgctgcttgtcagcatgtattgtcacggacactcaataagtgccattttggactgtcaaatttagatgctttgtttcagaaagataagccagcatttagttttaaatcactttcctggtttgtaacttgatgctgtttagttaaattgctagttttcctaacactacaatattaattcttctcgtggaagtgtactgatttattatttttattccaagtcagcagatttggaagcattgtggtaaagtctaaggttttcatatccatagtgctgtttggtgagtaccggcagtacagttgaggggagcagggaacagcattgccccgtattgaaggtggagatggttacattcttcactgctttttgcattttgagttgtgtgcctataaaatttggccaaaccattttattattttgttcaaacttgactaagctgagtgatctaaaattatacagaacctaaatcaaagaagagaatgtaaagtcctttagttacttctaagaatttgaagtcaagcacgaatctaagacatagattatttttatatagctaatgaagagtatgttacgaaattgttgggtttttggggtattgagggtggcaaattttgtgaatcatgcatgcttcacagaaacaaccaggtttttccagaattagtctggatcagtgcctaacaaagctgttattaattctccacacatgagtctggctaactgggccagctctcatgttttactcctgtctggctacaaatagcactgtgcatagtagccctgtttccccatggtgttggactgtggtaaagtatgttgtgacatactggaattctaataatcctgttgtaagtatgtacagaatctatgtaacttattgttgacatacagaggtttgggaagtagtctaatggacattccttacaatagaatggctgggaagggaaagaaaaaaaaaaaaaaactacctaactccaatcttaatgttgtagttttatagcaaacaaaaattgtcagctttttgtattgaaaggtcagtggtggtaagacaaggtgtcttgtaaattaagattttaagaagtgcattaaaatgttttagaattactctgggaattctgtatatcacactaaaatttttatatcattatgttaataaaagttattgactttgtaa

SEQ ID NO: 59558 - DNA, 4704 bp, Artificial Sequence
  derived and/or modified sequence
atggccgacagaggctgccccctggaggccgcccccctgcccgccgaggtgagagagagcctggccgagctggagctggagctgagcgagggcgacatcacccagaagggctacgagaagaagagagccaagctgctggccagatacatccccctgatccagggcatcgaccccagcctgcaggccgagaacagaatccccggccccagccagaccaccgccgccgcccccaagcagcagaagagcagacccaccgccagcagagacgagagattcagaagcgacgtgcacaccgaggccgtgcaggccgccctggccaagtacaaggagagaaagatgcccatgcccagcaagagaagaagcgtgctggtgcacagcagcgtggagacctacaccccccccgacaccagcagcgccagcgaggacgagggcagcctgagaagacccggcagactgaccagcacccccctgcagagccacagcagcgtggagccctggctggacagagtgatccagggcagcagcaccagcagcagcgccagcagcaccagcagccaccccggcggcagacccaccaccgcccccagcgccgccgccacccccggcgccgccgccaccaccgccctggccggcctggaggcccacacccacatcgacctgcacagcgccccccccgacgtgaccaccggcctggtggagcacagctacttcgagagaccccaggtggccagcgtgagaagcgtgcccagaggctgcagcggcagcatgctggagaccgccgacggcgtgcccgtgaacagcagagtgagcagcaagatccagcagctgctgaacaccctgaagagacccaagagaccccccctgaaggagttcttcgtggacgacttcgaggagctgctggaggaccccaaccagcccaagcccgagggcagcgagaccagcgtgctgagaggcgagcccctgaccgccggcgtgcccagaccccccagcctgctggccaccctgcagagatggggcaccacccagcccaagagcccctgcctgaccgccctggacaccaccggcaaggccgtgtacaccctgacctacggcaagctgtggagcagaagcctgaagctggcctacaccctgctgaacaagctgaccagcaagaacgagcccctgctgaagcccggcgacagagtggccctggtgttccccaacagcgaccccgtgatgttcatggtggccttctacggctgcctgctggccgagctggtgcccgtgcccatcgaggtgcccctgaccagaaaggacgccggcagccagcaggtgggcttcctgctgggcagctgcggcgtgttcctggccctgaccaccgacgcctgccagaagggcctgcccaaggcccagaccggcgaggtggccgccttcaagggctggccccccctgagctggctggtgatcgacggcaagcacctggccaagccccccaaggactggcaccccctggcccaggacaccggcaccggcaccgcctacatcgagtacaagaccagcaaggagggcagcaccgtgggcgtgaccgtgagccacgccagcctgctggcccagtgcagagccctgacccaggcctgcggctacagcgaggccgagaccctgaccaacgtgctggacttcaagagagacgccggcctgtggcacggcgtgctgaccagcgtgatgaacagaatgcacgtggtgagcgtgccctacgccctgatgaaggccaaccccctgagctggatccagaaggtgtgcttctacaaggccagagccgccctggtgaagagcagagacatgcactggagcctgctggcccagagaggccagagagacgtgagcctgagcagcctgagaatgctgatcgtggccgacggcgccaacccctggagcatcagcagctgcgacgccttcctgaacgtgttccagagcagaggcctgagacccgaggtgatctgcccctgcgccagcagccccgaggccctgaccgtggccatcagaagaccccccgacctgggcggccccccccccagaaaggccgtgctgagcatgaacggcctgagctacggcgtgatcagagtggacaccgaggagaagctgagcgtgctgaccgtgcaggacgtgggccaggtgatgcccggcgccaacgtgtgcgtggtgaagctggagggcaccccctacctgtgcaagaccgacgaggtgggcgagatctgcgtgagcagcagcgccaccggcaccgcctactacggcctgctgggcatcaccaagaacgtgttcgaggccgtgcccgtgaccaccggcggcgcccccatcttcgacagacccttcaccagaaccggcctgctgggcttcatcggccccgacaacctggtgttcatcgtgggcaagctggacggcctgatggtgaccggcgtgagaagacacaacgccgacgacgtggtggccaccgccctggccgtggagcccatgaagttcgtgtacagaggcagaatcgccgtgttcagcgtgaccgtgctgcacgacgacagaatcgtgctggtggccgagcagagacccgacgccagcgaggaggacagcttccagtggatgagcagagtgctgcaggccatcgacagcatccaccaggtgggcgtgtactgcctggccctggtgcccgccaacaccctgcccaaggcccccctgggcggcatccacatcagcgagaccaagcagagattcctggagggcaccctgcacccctgcaacgtgctgatgtgcccccacacctgcgtgaccaacctgcccaagcccagacagaagcagcccgaggtgggccccgccagcatgatcgtgggcaacctggtggccggcaagagaatcgcccaggccagcggcagagagctggcccacctggaggacagcgaccaggccagaaagttcctgttcctggccgacgtgctgcagtggagagcccacaccacccccgaccaccccctgttcctgctgctgaacgccaagggcaccgtgaccagcaccgccacctgcgtgcagctgcacaagagagccgagagagtggccgccgccctgatggagaagggcagactgagcgtgggcgaccacgtggccctggtgtacccccccggcgtggacctgatcgccgccttctacggctgcctgtactgcggctgcgtgcccgtgaccgtgagacccccccacccccagaacctgggcaccaccctgcccaccgtgaagatgatcgtggaggtgagcaagagcgcctgcgtgctgaccacccaggccgtgaccagactgctgagaagcaaggaggccgccgccgccgtggacatcagaacctggcccaccatcctggacaccgacgacatccccaagaagaagatcgccagcgtgttcagaccccccagccccgacgtgctggcctacctggacttcagcgtgagcaccaccggcatcctggccggcgtgaagatgagccacgccgccaccagcgccctgtgcagaagcatcaagctgcagtgcgagctgtaccccagcagacagatcgccatctgcctggacccctactgcggcctgggcttcgccctgtggtgcctgtgcagcgtgtacagcggccaccagagcgtgctggtgccccccctggagctggagagcaacgtgagcctgtggctgagcgccgtgagccagtacaaggccagagtgaccttctgcagctacagcgtgatggagatgtgcaccaagggcctgggcgcccagaccggcgtgctgagaatgaagggcgtgaacctgagctgcgtgagaacctgcatggtggtggccgaggagagacccagaatcgccctgacccagagcttcagcaagctgttcaaggacctgggcctgcccgccagagccgtgagcaccaccttcggctgcagagtgaacgtggccatctgcctgcagggcaccgccggccccgaccccaccaccgtgtacgtggacatgagagccctgagacacgacagagtgagactggtggagagaggcagcccccacagcctgcccctgatggagagcggcaagatcctgcccggcgtgaaggtgatcatcgcccacaccgagaccaagggccccctgggcgacagccacctgggcgagatctgggtgagcagcccccacaacgccaccggctactacaccgtgtacggcgaggaggccctgcacgccgaccacttcagcgccagactgagcttcggcgacacccagaccatctgggccagaaccggctacctgggcttcctgagaagaaccgagctgaccgacgccagcggcggcagacacgacgccctgtacgtggtgggcagcctggacgagaccctggagctgagaggcatgagataccaccccatcgacatcgagaccagcgtgatcagagcccacagaagcatcgccgagtgcgccgtgttcacctggaccaacctgctggtggtggtggtggagctggacggcctggagcaggacgccctggacctggtggccctggtgaccaacgtggtgctggaggagcactacctggtggtgggcgtggtggtgatcgtggaccccggcgtgatccccatcaacagcagaggcgagaagcagagaatgcacctgagagacggcttcctggccgaccagctggaccccatctacgtggcctacaacatgtag

SEQ ID NO: 59559 - protein, 309 aa, Artificial Sequence
  derived and/or modified sequence
MLMASTTSAVPGHPSLPSLPSNSSQERPLDTRDPLLARAELALLSIVFVAVALSNGLVLAALARRGRRGHWAPIHVFIGHLCLADLAVALFQVLPQLAWKATDRFRGPDALCRAVKYLQMVGMYASSYMILAMTLDRHRAICRPMLAYRHGSGAHWNRPVLVAWAFSLLLSLPQLFIFAQRNVEGGSGVTDCWACFAEPWGRRTYVTWIALMVFVAPTLGIAACQVLIFREIHASLVPGPSERPGGRRRGRRTGSPGEGAHVSAAVAKTVRMTLVIVVVYVLCWAPFFLVQLWAAWDPEAPLEGGCSRG

SEQ ID NO: 59560 - DNA, 930 bp, Artificial Sequence
  derived and/or modified sequence
atgctcatggcatccacaacaagcgctgtgcccggccatccttctttgcccagcctgcccagcaattcaagtcaggaaagacccctggacacgcgggacccccttctggcgagggcagaactcgcattactctctattgtgttcgtcgcggttgcattgtcgaatggtcttgtgctggcagctcttgcgagaagggggcgcagaggtcactgggctccaatccacgtgtttattggccatctttgcctggccgacctggctgtggcgctgttccaagtgctccctcaactggcatggaaagctaccgataggtttagaggaccggacgccctgtgtcgcgctgtcaaatacctccagatggtaggtatgtacgccagctcatacatgatcctggcaatgactctggatcgtcacagagcgatttgcaggccgatgctcgcttaccggcacggtagtggcgctcattggaatcgccctgttctcgtcgcctgggctttctccctactgttatcgctgccccaactctttatttttgcccagcgtaatgtagaaggcggctcaggcgtgactgattgttgggcctgctttgctgagccctgggggcggcggacatatgttacttggattgcactgatggttttcgtggctcccacactcgggatcgccgcctgtcaggtgttgatcttccgcgagattcacgcatctctcgtccctggccccagcgagcggccggggggtagacgtcgggggaggaggaccggatctccaggcgaaggcgctcacgtaagtgccgccgtcgcaaaaactgtgcgaatgaccctggtcatcgtggttgtttacgttctttgttgggcaccattttttctggtccagctatgggcggcctgggacccggaagcacctctggaagggggatgttctaggggatag

SEQ ID NO: 59561 - DNA, 930 bp, Artificial Sequence
  derived and/or modified sequence
atgctgatggccagcaccaccagcgctgtgcccggccaccccagcctgcccagcctgcccagcaacagcagccaggagcggcccctggacacccgggaccccctgctggcccgggcagagctggccctgctgagcatcgtgtttgtggccgtggccctgagcaatggcctggtgctggccgccctggcccggcggggcagaagaggccactgggcccccatccacgtgttcatcggccacctgtgcctggccgacctggccgtggccctcttccaggtgctgccccagctggcctggaaggccacagaccgcttccggggcccagatgccctgtgcagagctgtgaagtacctgcagatggtgggcatgtatgccagcagctacatgatcctggccatgaccctggacagacaccgggccatctgccggcccatgctggcctaccgccacggcagcggggcccactggaacagacctgtgctggtggcctgggccttcagcctgctgctgagcctgccccagctgttcatctttgcccagagaaatgtggagggcggcagcggcgtgacagactgctgggcctgctttgctgagccctggggccgccgcacctacgtgacctggatcgccctgatggtgtttgtggcccccaccctgggcattgctgcctgccaggtgctgatcttccgggagatccacgccagcctggtgcccggccccagcgagaggcctgggggcagaagaagaggaagaagaacaggcagccctggagagggcgcccacgtgtctgctgctgtggccaagacagtgaggatgaccctggtgattgtggtggtgtatgtgctgtgctgggcccccttcttcctggtgcagctgtgggccgcctgggaccctgaggcccccctggagggcggctgcagccggggctag

SEQ ID NO: 59562 - DNA, 930 bp, Artificial Sequence
  derived and/or modified sequence
atgctgatggccagcaccaccagcgccgtgcccggccaccccagcctgccaagtttaccctcaaatagttcccaagaaagacctttggataccagggaccccctccttgcacgcgctgaactcgccctcctgagtatcgtctttgtggcagttgccttaagcaatggtctggtgctagccgctcttgcacgtcgggggcggcggggtcattgggctcccattcatgtttttattgggcacctgtgtcttgcagatctggccgttgctctgttccaggtccttccgcaactcgcttggaaggctaccgatcgctttaggggccccgacgctctttgcagagccgtgaaatacttacagatggtggggatgtatgcctcaagctacatgatactcgcaatgacactggatcggcaccgcgcgatctgccggcccatgctggcgtacaggcacgggagcggcgctcattggaacagacccgtgctggtcgcatgggctttcagcctgctgctcagtctgcctcagctgttcatcttcgcccagcggaacgtggaaggcggttctggggtaaccgattgttgggcctgcttcgcggagccttggggtcggcggacctatgttacgtggattgctctcatggtgttcgtggcaccaaccctgggtatcgccgcgtgtcaggttctgatttttcgcgagattcacgcctctcttgtgcctggcccgtcagagagaccagggggccgccgtcgtggccgcagaaccggtagcccaggagaaggagctcatgtgagtgcagcagtcgccaagacagtaagaatgaccctcgtgattgtagtggtgtacgtgctatgctgggcgccattttttctcgttcaattgtgggccgcctgggaccccgaagcacctctcgagggaggatgtagccgaggctag

SEQ ID NO: 59563 - DNA, 930 bp, Artificial Sequence
  derived and/or modified sequence
atgctgatggcttcgactacaagtgcagtgccaggacaccccagtttgccatctctgccaagtaacagttctcaggagcggcctcttgatacacgagaccctctgctggctcgcgcagaattggccctgctctccattgtgttcgtggctgttgccctgagcaatgggcttgttctggcagccctggcacgcagggggaggcgtggccactgggctccaatacatgtgtttattggacacctgtgcctggctgatctggcagtcgcgctatttcaagtgttgccacagctagcatggaaagccactgatagattcaggggtcccgatgccctgtgtcgcgcagtgaaatacctccagatggtgggcatgtatgcttctagctacatgatcttggccatgaccctggacagacatcgagctatctgcaggccaatgctggcctaccgccatggaagcggtgcgcattggaaccgccctgtgctggtcgcttgggctttttccttgctgctttcccttccacagcttttcatttttgcccagcgtaacgtcgaaggcggtagcggagtgacggattgttgggcgtgttttgccgaaccttggggccgacgcacgtatgtaacctggattgctctgatggtcttcgtggcccctacattgggaatcgccgcatgccaagttctcatatttcgcgagattcatgctagcttagtgcccggaccttctgagcggccaggtggcaggcgcagaggacgtcggacaggctccccaggggagggagcacacgtgtccgccgctgttgccaagactgtgcggatgactctggtcatcgtcgtggtgtacgtgctgtgctgggctcccttctttctcgtgcagctttgggctgcctgggatcctgaggctccgttagaaggagggtgttccagaggctag

SEQ ID NO: 59564 - DNA, 1307 bp, Artificial Sequence
  derived and/or modified sequence
caggccctcagaacacctgccccagccccaccatgctcatggcgtccaccacttccgctgtgcctgggcatccctctctgcccagcctgcccagcaacagcagccaggagaggccactggacacccgggacccgctgctagcccgggcggagctggcgctgctctccatagtctttgtggctgtggccctgagcaatggcctggtgctggcggccctagctcggcggggccggcggggccactgggcacccatacacgtcttcattggccacttgtgcctggccgacctggccgtggctctgttccaagtgctgccccagctggcctggaaggccaccgaccgcttccgtgggccagatgccctgtgtcgggccgtgaagtatctgcagatggtgggcatgtatgcctcctcctacatgatcctggccatgacgctggaccgccaccgtgccatctgccgtcccatgctggcgtaccgccatggaagtggggctcactggaaccggccggtgctagtggcttgggccttctcgctccttctcagcctgccccagctcttcatcttcgcccagcgcaacgtggaaggtggcagcggggtcactgactgctgggcctgctttgcggagccctggggccgtcgcacctatgtcacctggattgccctgatggtgttcgtggcacctaccctgggtatcgccgcctgccaggtgctcatcttccgggagattcatgccagtctggtgccagggccatcagagaggcctggggggcgccgcaggggacgccggacaggcagccccggtgagggagcccacgtgtcagcagctgtggccaagactgtgaggatgacgctagtgattgtggtcgtctatgtgctgtgctgggcacccttcttcctggtgcagctgtgggccgcgtgggacccggaggcacctctggaaggtgggtgtagccgtggctagggctgacggggccacttgggcttggccgcatgcccctgtgccccaccagccatcctgaacccaacctagatcctccacctccacaggggcgccctttgtgctactcatgttgctggccagcctcaacagctgcaccaacccctggatctatgcatctttcagcagcagcgtgtcctcagagctgcgaagcttgctctgctgtgcccggggacgcaccccacccagcctgggtccccaagatgagtcctgcaccaccgccagctcctccctggccaaggacacttcatcgtgaggagctgttgggtgtcttgcctctagaggctttgagaagctcagctgccttcc

SEQ ID NO: 59565 - DNA, 930 bp, Artificial Sequence
  derived and/or modified sequence
atgctgatggccagcaccaccagcgccgtgcccggccaccccagcctgcccagcctgcccagcaacagcagccaggagagacccctggacaccagagaccccctgctggccagagccgagctggccctgctgagcatcgtgttcgtggccgtggccctgagcaacggcctggtgctggccgccctggccagaagaggcagaagaggccactgggcccccatccacgtgttcatcggccacctgtgcctggccgacctggccgtggccctgttccaggtgctgccccagctggcctggaaggccaccgacagattcagaggccccgacgccctgtgcagagccgtgaagtacctgcagatggtgggcatgtacgccagcagctacatgatcctggccatgaccctggacagacacagagccatctgcagacccatgctggcctacagacacggcagcggcgcccactggaacagacccgtgctggtggcctgggccttcagcctgctgctgagcctgccccagctgttcatcttcgcccagagaaacgtggagggcggcagcggcgtgaccgactgctgggcctgcttcgccgagccctggggcagaagaacctacgtgacctggatcgccctgatggtgttcgtggcccccaccctgggcatcgccgcctgccaggtgctgatcttcagagagatccacgccagcctggtgcccggccccagcgagagacccggcggcagaagaagaggcagaagaaccggcagccccggcgagggcgcccacgtgagcgccgccgtggccaagaccgtgagaatgaccctggtgatcgtggtggtgtacgtgctgtgctgggcccccttcttcctggtgcagctgtgggccgcctgggaccccgaggcccccctggagggcggctgcagcagaggctag

SEQ ID NO: 59566 - DNA, 1215 bp, Artificial Sequence
  derived and/or modified sequence
atggtaggcaagacatttacgtatctgctcgggtcggacgcagccgctctgctcttcaatagtaagaacgaggatcttaatgccgaggacgtttactcacgtctcaccacccctgtctttggcaagggcgttgcatacgacgtccctaatcccgtgttcttagaacagaagaagatgctgaaaagtggcctcaatatagcacacttcaagcaacatgtgtccatcatcgaaaaagaaacaaaggaatatttcgaatcttggggtgagtcaggagaaaagaacgtgttcgaggccctaagcgaactgatcattctcacagcctcacattgccttcacggaaaagagattaggagccagctcaatgagaaggttgcgcaactttatgctgacctagatggaggattttctcacgccgcttggctgttacccggatggctgccgctgccaagtttcagacgtagagaccgcgcccaccgagagatcaaggacatcttttacaaagctatccagaagcgaagacagtcccaggaaaaaatagacgatatactgcagacccttctggatgctacttataaggacggacgcccactgacagacgatgaggtagctggtatgctgatcggcctgctgctggctgggcagcatacttcctctacaacctctgcctggatgggattttttctggcgagggataagaccctgcagaagaaatgctacttggaacagaagaccgtgtgtggcgagaatctcccccccctgacctacgaccagttaaaggaccttaatttgctggacaggtgcatcaaagaaacgctacgcctccgacccccaatcatgataatgatgcgcatggcgcgcaccccccagaccgtcgccgggtacactatccccccgggtcatcaggtgtgcgtttctccgactgtgaatcagaggctgaaggacagctgggtcgagaggttggacttcaacccagacaggtatttacaggacaatccagccagtggcgaaaagttcgcatatgtgccgttcggggccggaaggcaccggtgcatcggcgaaaactttgcgtatgtccaaattaaaaccatttggagcactatgctccggctatacgagtttgaccttatcgacggctactttccaactgtgaactacactacgatgattcacacgcctgagaacccagtaattcggtataaacggcgtagtaagtag

SEQ ID NO: 59567 - DNA, 1215 bp, Artificial Sequence
  derived and/or modified sequence
atggtgggcaagaccttcacctacctgctgggcagtgatgctgctgccctgctcttcaacagcaagaatgaagacctgaatgcagaagatgtgtacagccggctgaccacccctgtgtttgggaagggcgtggcctatgatgtgcccaaccctgtgttcctggagcagaagaagatgctgaagagcggcctgaacatcgcccacttcaagcagcacgtgtccatcatcgagaaggagaccaaggagtactttgagagctggggcgagagcggggagaagaatgtgtttgaggccctgtctgagctgatcatcctgacagccagccactgcctgcacggcaaggagatccgcagccagctgaatgagaaggtggcccagctgtatgctgacctggatggcggcttcagccacgccgcctggctgctgcccggctggctgcccctgcccagcttcagaagaagagaccgggcccaccgggagatcaaggacatcttctacaaggccatccagaagaggcggcagagccaggagaagattgatgacatcctgcagaccctgctggatgccacctacaaggatggccggcccctgacagatgatgaggtggccggcatgctgattggcctgctgctggccggccagcacaccagcagcaccaccagcgcctggatgggcttcttcctggcccgggacaagaccctgcagaagaagtgctacctggagcagaagacagtgtgtggggagaacctgccccccctgacctatgaccagctgaaggacctgaacctgctggaccgctgcatcaaggagaccctgcggctgcggccccccatcatgatcatgatgaggatggcccggaccccccagacagtggccggctacaccatccccccaggccaccaggtgtgtgtgagccccaccgtgaaccagaggctgaaggacagctgggtggagcggctggacttcaacccagaccgctacctgcaggacaacccagccagcggggagaagtttgcctacgtgccctttggagctggccgccaccgctgcattggagaaaattttgcctacgtgcagatcaagaccatctggagcaccatgctgcggctgtatgaatttgacctgattgatggctacttccccaccgtgaactacaccaccatgatccacaccccagaaaatcctgtgatccgctacaagagaagaagcaagtag

SEQ ID NO: 59568 - DNA, 1215 bp, Artificial Sequence
  derived and/or modified sequence
atggtgggcaagaccttcacctacctgctgggcagcgacgccgccgcactgctgttcaattctaagaatgaggatctgaatgccgaagatgtgtattccagactgactacacccgtgtttggcaaaggggttgcatacgacgtgcctaacccagtattcctggaacaaaagaagatgctgaagtcgggcctgaatatcgcacatttcaagcagcacgtgtctattatcgaaaaagagacaaaggagtatttcgagtcatggggtgagtctggcgagaaaaacgtctttgaggcactctcggaactgatcattctgaccgctagtcactgtcttcacgggaaggaaatccgttcacagttgaatgaaaaagttgcacaattgtacgcagatctcgacggtggtttcagtcacgctgcttggctgctgcccggctggctcccactcccaagctttcgccgccgggatagagcccaccgagaaattaaagatattttttataaagctatccagaagcgcaggcagtcgcaagagaagatcgacgacattctgcaaacccttcttgacgctacctacaaggacggtaggccccttactgacgacgaggtagccggaatgctgataggtctcttgctggccggccaacacaccagctcgacaaccagtgcttggatgggattctttctggccagagataaaaccctccagaaaaagtgctatctggagcagaagacagtatgcggtgagaatctgccccccttgacttacgatcaactgaaggatttgaatctccttgatagatgtatcaaggagacgctgaggttgcgaccaccaataatgattatgatgaggatggctcgcacccctcagacagtggccgggtacactattccaccaggtcatcaagtgtgcgtctctccaactgtcaatcagcgcctgaaggattcttgggtggagcgcctggatttcaaccccgacagatacctacaagacaaccctgccagcggcgaaaaattcgcgtacgttcctttcggagccggcaggcacaggtgtatcggcgaaaatttcgcttacgtccagattaagactatttggtccacaatgctgcgtttgtacgagttcgatttgatagatggctacttccctacggtgaactataccacaatgatacacaccccagaaaatcccgtgattaggtacaaacgcaggtctaagtag

SEQ ID NO: 59569 - DNA, 1215 bp, Artificial Sequence
  derived and/or modified sequence
atggtggggaaaacgttcacttatctgcttggtagcgatgctgcagcccttcttttcaattccaagaacgaagacttgaacgcagaggacgtttatagccggttgaccacacctgtttttggcaagggagtggcctacgatgtccctaatcccgtgttccttgaacagaagaagatgcttaagtccggccttaacattgctcatttcaagcaacacgtttcgataatcgaaaaagagaccaaggagtatttcgagtcctggggggagagtggggaaaaaaacgtttttgaagctctgagcgagctcattatcctcacagcctcccactgcctacacgggaaggagatacgaagtcagctaaatgaaaaggtggcccagctgtatgctgatttggatgggggattttcacacgcagcctggctactgcccggttggctcccactgcctagctttcggaggcgtgatcgagcacaccgtgaaatcaaggacattttctacaaggccatccagaagagacggcagagccaggaaaagatcgatgacattttgcagactctgctggacgccacctataaagatggaaggcccctcacagacgatgaagtcgccggaatgctgattgggctgctcctcgcaggacagcacactagctcaaccacttctgcttggatgggattctttttggcccgagacaagaccctgcagaagaagtgctatttagagcaaaagacagtgtgcggggagaacctgccgccattgacctatgaccagctcaaggatttaaacctactagataggtgtattaaagaaacactccggctgaggccccctataatgatcatgatgaggatggccaggacaccgcagaccgtggccggatacactattccgcctgggcaccaagtgtgtgtgtcccctaccgtgaatcagcggctgaaggactcttgggtagagaggttggacttcaaccctgacaggtacctgcaggataaccccgcttccggcgagaagttcgcctacgtccctttcggcgcaggcaggcacaggtgcatcggggagaactttgcctacgtgcagattaagactatctggagtaccatgctacgtctatacgaattcgacctgattgacgggtacttccctacagtgaattataccactatgattcacacacctgagaaccccgtaataaggtataagaggaggtcaaaatag

SEQ ID NO: 59570 - DNA, 1215 bp, Artificial Sequence
  derived and/or modified sequence
atggtgggcaagaccttcacctacctgctgggcagcgacgccgccgccctgctgttcaacagcaagaacgaggacctgaacgccgaggacgtgtacagcagactgaccacccccgtgttcggcaagggcgtggcctacgacgtgcccaaccccgtgttcctggagcagaagaagatgctgaagagcggcctgaacatcgcccacttcaagcagcacgtgagcatcatcgagaaggagaccaaggagtacttcgagagctggggcgagagcggcgagaagaacgtgttcgaggccctgagcgagctgatcatcctgaccgccagccactgcctgcacggcaaggagatcagaagccagctgaacgagaaggtggcccagctgtacgccgacctggacggcggcttcagccacgccgcctggctgctgcccggctggctgcccctgcccagcttcagaagaagagacagagcccacagagagatcaaggacatcttctacaaggccatccagaagagaagacagagccaggagaagatcgacgacatcctgcagaccctgctggacgccacctacaaggacggcagacccctgaccgacgacgaggtggccggcatgctgatcggcctgctgctggccggccagcacaccagcagcaccaccagcgcctggatgggcttcttcctggccagagacaagaccctgcagaagaagtgctacctggagcagaagaccgtgtgcggcgagaacctgccccccctgacctacgaccagctgaaggacctgaacctgctggacagatgcatcaaggagaccctgagactgagaccccccatcatgatcatgatgagaatggccagaaccccccagaccgtggccggctacaccatcccccccggccaccaggtgtgcgtgagccccaccgtgaaccagagactgaaggacagctgggtggagagactggacttcaaccccgacagatacctgcaggacaaccccgccagcggcgagaagttcgcctacgtgcccttcggcgccggcagacacagatgcatcggcgagaacttcgcctacgtgcagatcaagaccatctggagcaccatgctgagactgtacgagttcgacctgatcgacggctacttccccaccgtgaactacaccaccatgatccacacccccgagaaccccgtgatcagatacaagagaagaagcaagtag

SEQ ID NO: 59571 - protein, 420 aa, Artificial Sequence
  derived and/or modified sequence
MSGRPRTTSFAESCKPVQQPSAFGSMKVSRDKDGSKVTTVVATPGQGPDRPQEVSYTDTKVIGNGSFGVVYQAKLCDSGELVAIKKVLQDKRFKNRELQIMRKLDHCNIVRLRYFFYSSGEKKDEVYLNLVLDYVPETVYRVARHYSRAKQTLPVIYVKLYMYQLFRSLAYIHSFGICHRDIKPQNLLLDPDTAVLKLCDFGSAKQLVRGEPNVSYICSRYYRAPELIFGATDYTSSIDVWSAGCVLAELLLGQPIFPGDSGVDQLVEIIKVLGTPTREQIREMNPNYTEFKFPQIKAHPWTKVFRPRTPPEAIALCSRLLEYTPTARLTPLEACAHSFFDELRDPNVKLPNGRDTPALFNFTTQELSSNPPLATILIPPHARIQAAASTPTNATAASDANTGDRGQTNNAASASASNST

SEQ ID NO: 59572 - DNA, 1263 bp, Artificial Sequence
  derived and/or modified sequence
atgagcggcagacccagaaccaccagcttcgccgagagctgcaagcccgtgcagcagcccagcgccttcggcagcatgaaggtgagcagagacaaggacggcagcaaggtgaccaccgtggtggccacccccggccagggccccgacagaccccaggaggtgagctacaccgacaccaaggtgatcggcaacggcagcttcggcgtggtgtaccaggccaagctgtgcgacagcggcgagctggtggccatcaagaaggtgctgcaggacaagagattcaagaacagagagctgcagatcatgagaaagctggaccactgcaacatcgtgagactgagatacttcttctacagcagcggcgagaagaaggacgaggtgtacctgaacctggtgctggactacgtgcccgagaccgtgtacagagtggccagacactacagcagagccaagcagaccctgcccgtgatctacgtgaagctgtacatgtaccagctgttcagaagcctggcctacatccacagcttcggcatctgccacagagacatcaagccccagaacctgctgctggaccccgacaccgccgtgctgaagctgtgcgacttcggcagcgccaagcagctggtgagaggcgagcccaacgtgagctacatctgcagcagatactacagagcccccgagctgatcttcggcgccaccgactacaccagcagcatcgacgtgtggagcgccggctgcgtgctggccgagctgctgctgggccagcccatcttccccggcgacagcggcgtggaccagctggtggagatcatcaaggtgctgggcacccccaccagagagcagatcagagagatgaaccccaactacaccgagttcaagttcccccagatcaaggcccacccctggaccaaggtgttcagacccagaaccccccccgaggccatcgccctgtgcagcagactgctggagtacacccccaccgccagactgacccccctggaggcctgcgcccacagcttcttcgacgagctgagagaccccaacgtgaagctgcccaacggcagagacacccccgccctgttcaacttcaccacccaggagctgagcagcaacccccccctggccaccatcctgatccccccccacgccagaatccaggccgccgccagcacccccaccaacgccaccgccgccagcgacgccaacaccggcgacagaggccagaccaacaacgccgccagcgccagcgccagcaacagcacctag

SEQ ID NO: 59573 - DNA, 1263 bp, Artificial Sequence
  derived and/or modified sequence
atgtccggtaggccccgcacgacgtcttttgccgagagctgcaagccagtgcagcagcctagcgcttttggctccatgaaggtgtccagggataaagacggctcaaaagtgacaacagtcgttgccactcccggtcagggccctgaccgcccacaggaagtttcttacacagatactaaagtcattggcaatggctcctttggggtcgtctaccaagctaaactgtgtgattccggggagctggtggctatcaaaaaagtgttgcaggataagaggtttaagaacagagagctgcaaatcatgcggaaattagaccattgcaatatcgtgcgtctgcgttacttcttctactctagcggtgagaagaaggacgaggtgtacctgaatttggtactcgactacgtacctgaaaccgtgtaccgagtggcccggcactatagccgggccaaacagaccctacctgtaatatacgttaagctgtacatgtatcagctgttccgtagtttagcatacattcattcttttgggatttgccatcgcgatattaagccccaaaatctactgctcgaccccgataccgctgtgctcaagctgtgcgattttggctccgctaaacagctggtgcgtggcgagcccaacgtctcatatatatgcagtaggtactatcgggccccagaactcatcttcggcgccaccgactatactagctccattgacgtgtggagtgccgggtgcgttctggccgagctattgctggggcagcctatcttcccgggagactctggggtcgaccaactggtggagatcattaaagtgctgggtacgccaaccagggagcagatcagagagatgaaccctaactatacggaattcaaatttccccaaatcaaggcccacccatggactaaagtgtttcggccaagaactccccctgaggccattgctttgtgcagtcgactgctagaatacaccccaaccgccaggcttacccccctggaggcctgcgcacattcattctttgacgagttgagggaccccaacgtcaagttgccgaacggacgcgatacccccgccctttttaacttcacgacgcaggagctgtcctcgaatccccccctggcgactatcctgatcccaccccacgcacgtattcaagctgccgcctctacacctaccaatgcaacggccgccagcgatgcaaacaccggagaccgaggacagaccaacaacgcagcttcagcaagtgcaagcaactctacctag

SEQ ID NO: 59574 - DNA, 7711 bp, Artificial Sequence
  derived and/or modified sequence
cgggcttgtgccgccgccgccgccgccgccgcccgggccaagtgacaaaggaaggaaggaagcgaggaggagccggccccgcagccgctgacagggctctgggctggggcaaagcgcggacacttcctgagcgggcaccgagcagagccgaggggcgggagggcggccgagctgttgccgcggacgggggagggggccccgagggacggaagcggttgccgggttcccatgtccccggcgaatggggaacagtcgaggagccgctgcctggggtctgaagggagctgcctccgccaccgccatggccgctggatccagccgccgcctgcagctgctcctggcgcaatgaggagaggagccgccgccaccgccaccgcccgcctctgactgactcgcgactccgccgccctctagttcgccgggcccctgccgtcagcccgccggatcccgcggcttgccggagctgcagcgtttcccgtcgcatctccgagccaccccctccctccctctccctccctcctacccatccccctttctcttcaagcgtgagactcgtgatccttccgccgcttcccttcttcattgactcggaaaaaaaatccccgaggaaaatataatattcgaagtactcattttcaatcaagtatttgcccccgtttcacgtgatacatatttttttaggatttgccctctcttttctctcctcccaggaaagggaggggaaagaattgtattttttcccaagtcctaaatcatctatatgttaaatatccgtgccgatctgtcttgaaggagaaatatatcgcttgttttgttttttatagtatacaaaaggagtgaaaagccaagaggacgaagtctttttctttttcttctgtgggagaacttaatgctgcatttatcgttaacctaacaccccaacataaagacaaaaggaagaaaaggaggaaggaaggaaaaggtgattcgcgaagagagtgatcatgtcagggcggcccagaaccacctcctttgcggagagctgcaagccggtgcagcagccttcagcttttggcagcatgaaagttagcagagacaaggacggcagcaaggtgacaacagtggtggcaactcctgggcagggtccagacaggccacaagaagtcagctatacagacactaaagtgattggaaatggatcatttggtgtggtatatcaagccaaactttgtgattcaggagaactggtcgccatcaagaaagtattgcaggacaagagatttaagaatcgagagctccagatcatgagaaagctagatcactgtaacatagtccgattgcgttatttcttctactccagtggtgagaagaaagatgaggtctatcttaatctggtgctggactatgttccggaaacagtatacagagttgccagacactatagtcgagccaaacagacgctccctgtgatttatgtcaagttgtatatgtatcagctgttccgaagtttagcctatatccattcctttggaatctgccatcgggatattaaaccgcagaacctcttgttggatcctgatactgctgtattaaaactctgtgactttggaagtgcaaagcagctggtccgaggagaacccaatgtttcgtatatctgttctcggtactatagggcaccagagttgatctttggagccactgattatacctctagtatagatgtatggtctgctggctgtgtgttggctgagctgttactaggacaaccaatatttccaggggatagtggtgtggatcagttggtagaaataatcaaggtcctgggaactccaacaagggagcaaatcagagaaatgaacccaaactacacagaatttaaattccctcaaattaaggcacatccttggactaaggtcttccgaccccgaactccaccggaggcaattgcactgtgtagccgtctgctggagtatacaccaactgcccgactaacaccactggaagcttgtgcacattcattttttgatgaattacgggacccaaatgtcaaactaccaaatgggcgagacacacctgcactcttcaacttcaccactcaagaactgtcaagtaatccacctctggctaccatccttattcctcctcatgctcggattcaagcagctgcttcaacccccacaaatgccacagcagcgtcagatgctaatactggagaccgtggacagaccaataatgctgcttctgcatcagcttccaactccacctgaacagtcccgagcagccagctgcacaggaaaaaccaccagttacttgagtgtcactcagcaacactggtcacgtttggaaagaatattaaaaagagaaaaaaatcctgttcattttagtgttcaatttttttattattattgttgttcttatttaaccttgtaaaatatctataaatacaaaccaatttcattgtattctcactttgagggagatccagggggtgggaggggttgtggggagggggaaagcggagcactagaacatacaatctctctcccacgacaatctttttttattaaaagtctgctgttgtatactttaaaaacaggactcctgcctcatgccccttccacaaaagaagaaaacctttttctgtgctgatgggtttttttgaactttgttttcttttaaagtctagtgtgagactttggtatagtgcacagcttgaaattggttgggagcttagcaggtataactcaacggggacttaaatgtcacttgtaaaattaatccatatcttcgggtatttatagacttgcctttggcatgttggtggcaggtgtggcagacaaagaaatgtgtatcattcgtaacccagggaggtcaataaagtttggaactctacagggaagattcttagtagatttgttaaggttttgttttgctctcagttagtgctagtgatgtagaggcttgtacaggaggctgccagaggggaagcagcaagcaagactcaggcacacatgctctacaggtggctctttgtttgcctgaccaaagttctttgcaaatcttagcacagtttcaaactagtgacctgggaggagatggaaggggtgttgagcaggctgagctagctgctgaggtcaaaggctgatgagcccagaggaaggggacaggtcagggatacatctcaccactgtgaataagtttgtccagatttttttctaaagttacttcccttggaaagatacacttgagaggacattgtagttaaataatgtgaactgtaacagtcatctactggtttatttttcatattttttaattgaaaattgagcttgcagaaatagccacattctacacatagttctaattttaaatccaaatctagaatctgtatttaatttgttttttaacctcatgctttttacatttatttattgatgcatgtcagatggtagaaatattaaaaactacacatcagaatgatacagtcacttatacctgctgactttataggaaagctgatgatataaatgtgtgtatatatgttatatatacatatattcaatactgcctttttttttgtctacagtatcaaaattgactggttgaagcatgagaagaatgtttcccccacacccagttaagagtttttgtgtctgttttctttgtgtatcagtgaacgatgttaagaatcagtctctctttttgaagaaaaagcaatattccttggaaagcaaggagaattgaaggactatgtttgccgtgaggaaatagattttcatgactagtttgttttatacttttaaggttggcatctatgtgggccttatatactctaaaatgaactttagtcaccttggtgcttatgggccattacttgacctatgaatctttaaggcacaatcagttgtactttacatttaaagatcacttgagtgatggccgcctttccctcctacccgctccttccccacatgccttccaaggttagctggtaactgtagggctgcagagctgagcccatggttgtgtgtaacttgccctcaccctcctcattgccaccttaggtcactttatgggtctcgtcctccagagggttcggaagtggagtctgttggcagccctcctgcaggccctagcaccctgtcctgctccttaactgtgtgtgtgactctccaagagagttgtcctgcctgctgaagtgaaccagtacccagaaagacaactgtgagccatcttggttttcactcgctgtttagctgaggtcttgggccacaaaaggggtttcacaaacctctggatatatcagagtttatgagaaaggaaacatgctcagtcaaaccaaatcaaacaaattgaattttatgttttataaagtgcttctgaaagctaagatttgaaagaagtctgaaatcaaagtatttggcagcataactccttaaaggtagtggcgttgatagaccattttcagacagaatttataaagaatctgaaaaggcaggtctgtgatagagaaatggacctgcattcagatccaactgcccagcaagcgtttggatgcagacactgctctggacgtggtatactccccagagtccataaaaatcagtgcttattttaggaaacaggttgccccccacaactggggtaaaagaagagagaaaagtcacgcttttctctcatttcattgtgtgtgcatgtgtgcgtgtgtgtgtgtgtgtgtgtgtgctgagatgtgtgatttttctttctcaaggatcatggtgggatcacagaactcttttatacaagtgagatccaggtctctgaatatctttttgtatataataataataaaaagctcctcaccaaattcaagcttgtacattatattttctttctgtgtttttaaatttaagttttattgttttgtatgtaaatatgtggacccaggaactgttattaatgagcaaaaagttactgttcagggcagtgattctgtttaataatcagacaaaatgtagacgagctttttaaagccatatagttttaactctgtacagtaggtaccggcctgtattattgtaacaataactctagcaatgtatagtgtatctatatagtttggagtgccttcgcttccatgtgtttttttttttaatttgttcttttttaaattttaattggtttcctttatccatgtctccctgtccaccccctttccctttgaaataataactcactcataacagtatctttgccccttccacagttaagtttcagtgataccatactcaggagtgggaagaggaaatcatattcgtaatttcatttcgttgaagccctgcctttgttttggttctgaatgtctttcctcctcggtagcagtgagaccggtttcatttcatacttagtccattcagggacttagtgtagcaccagggagccctagagctggaggatatcgaatagattaaattttgctcgtctcttccacaagccctaaccatgggtcttaaaaacagcagattctgggagccttccatgctctctctctctcctcttttatctacttccctcccaaatgagagagtgacagagaattgtttttttataaatcgaagtttcttaatagtatcaggttttgatacgtcagtggtctaaaatgctatagtgcaattactagcagttactgcacggagtgccaccgtgccaatagaggactgttgttttaacaagggaactcttagcccatttcctccctcccgccatctctacccttgctcaatgaaatatcattttaatttcttttaaaaaaaatcagtttaattcttactgtgtgcccaacacgaaggccttttttgaaagaaaaatagaatgttttgcctcaaagtagtccatataaaatgtcttgaatagaagaaaaaactaccaaaccaaaggttactatttttgaaacatcgtgtgttcattccagcaaggcagaagactgcaccttctttccagtgacatgctgtgtcattttttttaagtcctcttaatttttagacacatttttggtttatgttttaacaatgtatgcctaaccagtcatcttgtctgcaccaatgcaaaggtttctgagaggagtattctctatccctgtggatatgaagacactggcatttcatctatttttccctttcctttttaaaggatttaactttggaatcttccaaaggaagtttggccaatgccagatccccaggaatttggggggttttctttcttttcaactgaaattgtatctgattcctactgttcatgttagtgatcatctaatcacagagccaaacacttttctcccctgtgtggaaaagtaggtatgctttacaataaaatctgtcttttctggtagaaacctgagccactgaaaataaaagagacaactagaagcacagtagagtcccagactgagatctacctttgagaggctttgaaagtaatccctggggtttggattattttcacaagggttatgccgttttattcaagtttgttgctccgttttgcacctctgcaataaaagcaaaatgacaaccagtacataaggggttagcttgacaaagtagacttccttgtgttaatttttaagtttttttttccttaactatatctgtctacaggcagatacagatagttgtatgaaaatctgcttgcctgtaaaatttgcatttataaatgtgttgccgatggatcacttgggcctgtacacataccaattagcgtgaccacttccatcttaaaaacaaacctaaaaaacaaaatttattatatatatatatatatatatataaaggactgtgggttgtatacaaactattgcaaacacttgtgcaaatctgtcttgatataaaggaaaagcaaaatctgtataacattattactacttgaatgcctctgtgactgatttttttttcattttaaatataaacttttttgtgaaaagtatgctcaatgttttttttccctttccccattcccttgtaaatacattttgttctatgtgacttggtttggaaatagttaactggtactgtaatttgcattaaataaaaagtaggttagcctggaaatgaaattaaaattcacaagtgtgtggtctttatttcagtacccaaccctcttccttcaccctactattttgccgctgcaatatgtagtcacatcaccatttccattcctctaattagggaaacattaatctttgttatacagaacaagatatcaataccacttcttgttctttccaatgattttattccattgtgtagccccaagaggtgcagcttccaccttggaaacctttggatttgatgtagaggaagctttgcagacactgcttagaaaagaaagaaaacaactctgaaagggacagtttttaaatgtgtataagctgctgtctttgattactgtgttcatgatttggtgtggctgtattttcttttaactttcatcctattagtaatggtctttgggggtctctgtaaaatatatggacaccacgaacagtggggctgtacctcccaggtaaccaacacatgttgtgtttgagtctgctcatttccaatactggatgatgtatgtaaacatgttatgtctcttagtgcaaaaagaaacatcatttttttagggctggctcactctgtcaggcctaatctaaaggctagatataaggtcatgtgactgctgcttcaataaaaacaaatttatattc

SEQ ID NO: 59575 - DNA, 1263 bp, Artificial Sequence
  derived and/or modified sequence
atgagcggccggcccaggaccaccagctttgctgagagctgcaagcctgtgcagcagcccagcgccttcggctccatgaaggtgtcccgggacaaggatggcagcaaggtgaccaccgtggtggccaccccaggccagggccctgaccggccccaggaggtgtcctacacagacaccaaggtgattggaaatggcagctttggagtggtgtaccaggccaagctgtgtgacagcggggagctggtggccatcaagaaggtgctgcaggacaagcgcttcaagaaccgggagctgcagatcatgaggaagctggaccactgcaacatcgtgcggctgcgctacttcttctacagcagtggagagaagaaggatgaggtgtacctgaacctggtgctggactatgtgcctgagaccgtgtacagagtggcccggcactacagccgggccaagcagaccctgcccgtcatctacgtgaagctgtacatgtaccagctgttccgcagcctggcctacatccacagctttggcatctgccaccgggacatcaagccccagaacctgctgctggaccctgacacagctgtgctgaagctgtgtgactttggaagtgccaagcagctggtgcggggggagcccaacgtgtcctacatctgcagccgctactaccgggcccctgagctgatctttggagccacagactacaccagcagcattgatgtgtggagcgctggctgtgtgctggccgagctgctgctgggccagcccatcttccctggggacagcggcgtggaccagctggtggagatcatcaaggtgctgggcacccccacccgggagcagatccgggagatgaaccccaactacacagagttcaagttcccccagatcaaggcccacccctggaccaaggtgttccggcccaggaccccacctgaggccatcgccctgtgcagccggctgctggagtacacccccacagcccggctgacccccctggaggcctgtgcccacagcttctttgatgagctgcgggaccccaacgtgaagctgcccaacggccgggacaccccagccctcttcaacttcaccacccaggagctgagcagcaacccccccctggccaccatcctgatcccccctcatgcccgcatccaggccgccgccagcacccccaccaatgccacagctgccagtgatgccaacacaggagaccggggccagaccaacaatgctgccagcgccagcgccagcaacagcacctag

SEQ ID NO: 59576 - DNA, 1263 bp, Artificial Sequence
  derived and/or modified sequence
atgagcggccggccccggaccaccagcttcgccgagagctgcaagcccgtgcagcagcctagcgctttcggaagcatgaaagtgagtcgcgacaaagacgggagtaaggtgaccactgttgtggctaccccgggccagggaccagaccggccccaggaagtctcctatactgacacaaaggttatagggaacggcagcttcggggtagtgtatcaggccaagttatgtgacagcggtgagctggtcgcaataaaaaaggtgctgcaagacaaaagattcaaaaatcgagagctgcagatcatgcggaaattggatcattgcaacatagttaggctccggtacttcttttattcttctggagagaaaaaggacgaggtttatttaaacctagtgctggattatgtcccagagactgtgtacagagtggcgcgacactactcccgggcaaaacagaccctgcctgtgatctacgtcaaactctacatgtatcagcttttcaggtcccttgcatatatccactcttttggcatatgtcacagggacataaagccccagaacctgctactggacccagacacagccgtgctgaagctgtgcgatttcggtagtgctaaacagctggtgagaggcgaacctaacgtcagctatatctgttcgagatattacagggcgcccgagctaatcttcggagccactgactataccagctcaattgatgtctggtcagccgggtgcgtcctggctgagttgctgctaggccagccaattttccccggtgattcaggagtcgaccagctggtggaaattattaaggttctcggcacacccacgcgagaacagatccgggagatgaatcccaactatacagagttcaagttcccccagattaaggcccacccttggacgaaggttttccgtccacgaacccctccagaggcaatagcgttgtgctccagacttcttgagtataccccaactgccaggttaactcctctcgaggcctgcgctcactctttcttcgatgaactgagggacccaaacgtgaaactgccaaacggaagagacacaccagcccttttcaacttcactacccaggagctctcaagtaacccaccacttgcaacaattctaatacctccccacgccaggatacaggccgctgccagcacccctactaatgccacagcagcctccgatgctaacactggagatcggggccaaacgaataacgctgcatctgcctccgccagcaattctacctag

SEQ ID NO: 59577 - DNA, 1263 bp, Artificial Sequence
  derived and/or modified sequence
atgagcggcagacctcggacaacctcattcgcagaaagttgcaaaccagtgcagcagccttccgcctttggatctatgaaggtctctcgggacaaagatgggtctaaggtgactaccgtggtggccacgcccggtcagggtcccgatcggccacaggaagttagttatacagatactaaggtgattgggaacgggagcttcggagttgtgtatcaggctaaactgtgcgactccggtgagctcgtcgctattaaaaaggtgctccaggataagcgatttaagaaccgcgaactgcaaattatgaggaagctcgaccattgcaacatcgtgaggctgcggtactttttttattccagcggcgagaaaaaggatgaggtgtatctgaatctggtgctggattacgttcctgaaaccgtctatcgggtggcgagacattactccagggcaaagcagacactgcccgtcatctacgttaagttgtacatgtaccagctgttcagatcactcgcctacatccactcattcgggatatgtcatagagacattaaaccacagaatttactcctagatccagacacggcggtgttaaaactttgcgacttcggcagtgccaagcagctggtgcggggtgagcctaacgtgagctacatctgctcacgctactacagggcccctgagctgatattcggagctacggattacacctcctccatagacgtctggagcgcaggctgcgttttggctgaactcctgctagggcaacccattttccccggtgactccggcgtagaccaacttgtggagattattaaagttttgggtactcccactagagaacagatcagggagatgaacccaaactatacagagttcaaatttccccagataaaggctcatccttggacaaaggtctttaggccacggactcccccagaggctattgcgctctgcagtagacttctggagtacacccctactgccagactgacaccgcttgaagcctgcgctcactcctttttcgatgagctccgggaccccaacgtcaagctacctaatggtagagacacgccagctttatttaacttcaccacacaggagctgtcttccaatcctcctctagccacaatcctgatcccaccacatgctcgtatccaggctgcagctagtacgccaactaacgccaccgccgcatccgacgcgaataccggcgatagaggtcagactaataacgccgcaagcgcgagcgcctcgaactccacttag

SEQ ID NO: 59578 - DNA, 981 bp, Artificial Sequence
  derived and/or modified sequence
gtcgctaaccggacggtggtcgccagggcgagaggcgggagccggagaggtgaggcaggacccgggctccactgccgcctctccgagctcttgtgacgcggacctcagtgccaggatggctcggggcgagcggcggcgccgcgcagtgccggcagagggagtgcggacagccgagagggcggctcggggaggccccgggcgacgggacggccggggcggcgggccgcgtagcacggctggaggagtggctctggccgtcgtggtcctgtctttggccctgggtatgtcggggcgctgggtgctggcgtggtaccgtgcgcggcgggcggtcacgctgcactccgcgcctcctgtgttgcctgccgactcctccagccccgccgtggccccggacctcttctggggaacctaccgccctcacgtctacttcggcatgaagacccgcagcccgaagcccctcctcaccggactcaggtacttctgccctccctttggtctccctgttcttctatgtggtgacagatggcaaggaagtcctactaccagaggttggggccaaggggcagttgaagtttatcagtgggcacaccagtgaacttggtgacttccgctttacacttttgccaccaaccagtccaggggatacagcccccaagtatggcaggtaactgggggaaaagaatgttgggggatggaaggggtggttattcccattttcaccagtctccatgtcccctgcctgagacctcccaacctgactcctgaacactttgtatttctctttataatgcccactgccttctcttgaataatatttcctatttatcttctccccttcaagctacaatgtcttctggacctccaacccaggactgcccctgctgacagagatggtaaagagtcgcctaaatagctggtttcagcatcggcccccaggggccccccctgaacgctacctcggcttgccaggatccctgaagt

SEQ ID NO: 59579 - DNA, 753 bp, Artificial Sequence
  derived and/or modified sequence
atgatcaccggaggaaatctgcaggacagcaaggatgctctgcatttagcgcagactaacggcatgttcttcagcactgtgggatgccatcccaccagatgtggagagttcgagaaaaacaacccggatctctacttgaaagagcttctgaatctagctgagaataacaaggggaaagttgtcgcaataggtgaatgtggccttgacttcgatcgcctgcagttctgtcccaaggacactcaactgaagtattttgaaaagcagtttgagctatccgagcagaccaagctgcctatgtttttgcattgccgaaatagccacgccgaatttctggacataatgaaacgtaatcgggatcgttgtgtggggggagtggtccactcttttgacggtactaaagaggccgctgcagccttgatcgacctcgacctgtatattgggtttaatggctgtagcctcaagacagaagctaaccttgaagttcttaagtctattcctagcgaaaagttgatgatcgagaccgacgcaccatggtgcggcgtgaaatccacacatgccggaagtaagtatattagaaccgctttccccaccaagaaaaaatgggagtccggccactgtctcaaggatcgcaatgagccctgtcacataatccagattttggagattatgtctgccgtacgggatgaagatcctttagaactcgccaatacactgtacaacaataccatcaaggtattcttccccggcatttag

SEQ ID NO: 59580 - DNA, 333 bp, Artificial Sequence
  derived and/or modified sequence
atgatcacaggcgggaaccttcaggactctaaagacgcattacaccttgcccagaccaacggaatgtttttctccacggtgggttgccacccgacccggtgcggcgaattcgagaaaaacaaccccgatctctacctgaaggagttacttaacttggcggaaaacaacaagggcaaagtcgtcgccattggcgagtgcggcctggacttcgatagattgcagttttgccctaaagacactcaactgaagtattttgagaagcagtttgaactgtcagagcaaacgaagctgccaatgtttttacactgtcgcaattcacatgccgaattctag

SEQ ID NO: 59581 - DNA, 753 bp, Artificial Sequence
  derived and/or modified sequence
atgatcactggaggcaacctgcaggacagcaaggatgccctgcacctggcccagaccaacggcatgttcttcagcacagtgggctgccaccccacccgctgtggggagtttgagaagaacaacccagacctgtacctgaaggagctgctgaacctggccgagaacaacaagggcaaggtggtggccatcggagaatgtggcctggactttgaccggctgcagttctgccccaaggacacccagctgaagtactttgagaagcagtttgagctgtctgagcagaccaagctgcccatgttcctgcactgcaggaacagccacgccgagttcctggacatcatgaagaggaacagagacagatgtgtgggcggcgtggtgcacagctttgatggcaccaaggaggccgctgctgccctgattgacctggacctgtacatcggcttcaacggctgcagcctgaagacagaggccaacctggaggtgctgaagagcatccccagcgagaagctgatgattgaaacagatgccccctggtgtggggtgaagagcacccacgccggcagcaagtacatcagaacagccttccccaccaagaagaagtgggagagcggccactgcctgaaggacagaaatgagccctgccacatcatccagatcctggagatcatgtctgctgtgagagatgaggaccccctggagctggccaacaccctgtacaacaacaccatcaaggtgttcttccctggcatctag

SEQ ID NO: 59582 - DNA, 333 bp, Artificial Sequence
  derived and/or modified sequence
atgatcactggaggcaacctgcaggacagcaaggatgccctgcacctggcccagaccaacggcatgttcttcagcacagtgggctgccaccccacccgctgtggggagtttgagaagaacaacccagacctgtacctgaaggagctgctgaacctggccgagaacaacaagggcaaggtggtggccatcggagaatgtggcctggactttgaccggctgcagttctgccccaaggacacccagctgaagtactttgagaagcagtttgagctgtctgagcagaccaagctgcccatgttcctgcactgcaggaacagccacgccgagttctag

SEQ ID NO: 59583 - DNA, 753 bp, Artificial Sequence
  derived and/or modified sequence
atgatcaccggcggcaacctgcaggacagcaaggacgccctgcacctagcccaaacaaatgggatgttcttctctaccgtgggatgtcaccccactagatgcggggaatttgaaaagaataacccagatctgtacctgaaagagctgctcaacctggctgaaaataataagggcaaagtagtggcaattggcgaatgtggacttgactttgatagacttcagttttgcccaaaagacacccagctgaaatattttgaaaagcaattcgaattgagcgagcaaaccaagctgcctatgtttttgcactgccgcaacagccatgctgagttcttggatatcatgaagcggaatagggaccgatgtgttgggggggttgtacatagcttcgacggaaccaaggaagctgcagccgcccttattgacctggatctgtatattggtttcaacgggtgctccctaaaaaccgaggcaaatctcgaagttttgaagtcaatccctagcgaaaagctgatgatcgagactgacgccccctggtgcggtgttaaaagcacgcacgccgggtctaagtatataaggacagctttcccgacaaaaaagaagtgggagagcggtcactgtctgaaggatcggaacgaaccttgccacataatccagattcttgagataatgagcgccgtcagagatgaggatccactggagctcgcaaacaccctgtataacaacaccatcaaagtgtttttccctggaatttag

SEQ ID NO: 59584 - DNA, 333 bp, Artificial Sequence
  derived and/or modified sequence
atgatcaccggcggcaacctgcaggacagcaaggacgccctgcacctagcacaaaccaatgggatgttttttagcaccgtgggctgccatccgactcgctgcggtgagttcgagaaaaacaatccagacttgtacctcaaggagctgcttaaccttgcggaaaataataagggcaaggtggtcgcgataggagaatgtggtctagatttcgatcggctgcagttctgtccaaaagacacgcagttgaaatactttgaaaagcagttcgaactgtctgagcagaccaagttgcctatgtttctccactgccgaaactcccatgccgagttctag

SEQ ID NO: 59585 - DNA, 753 bp, Artificial Sequence
  derived and/or modified sequence
atgattacaggtggaaacctgcaggattccaaggacgctctgcacctggctcagaccaacggcatgttttttagcaccgtcggatgtcatcccacaaggtgtggcgaattcgaaaaaaacaatccggacctctatcttaaagagctactaaatctggcagaaaataataagggtaaagtggtcgccataggtgaatgcggtttggactttgacaggcttcagttctgccctaaagacacgcagttgaaatattttgagaagcaatttgaactctctgaacagacaaagctcccgatgtttctccactgtcggaactcccatgcagagtttttagacatcatgaagcggaatcgggaccggtgcgttgggggagtggtacattcatttgacgggacaaaagaagcggcagcagctctgatagacctggacctatacattgggtttaatgggtgttccctgaaaaccgaagctaatttggaggtcttgaaatctatcccatccgagaaactaatgatagaaaccgatgccccatggtgcggtgtgaaatctacgcatgcgggatcgaagtatatcaggactgccttccctacgaagaaaaagtgggaaagcgggcactgccttaaggaccgcaatgaaccctgccacattatccaaatcttggagatcatgagcgccgtgcgggatgaggatcctctggaactcgccaacacactgtacaataatacgatcaaggtgttctttccaggaatctag

SEQ ID NO: 59586 - DNA, 333 bp, Artificial Sequence
  derived and/or modified sequence
atgatcaccgggggaaacttgcaggacagtaaggatgcgcttcacctggctcagaccaatgggatgtttttttctactgttggttgccacccgacaagatgtggtgagtttgaaaaaaacaacccagatctctatctgaaagaactgctaaatctggccgaaaataataaaggcaaggtcgtggctattggagagtgcggcctggactttgacagactgcagttctgccccaaagatactcagctgaaatacttcgagaaacagtttgagctgagtgaacaaaccaaactcccgatgtttttgcactgtcgcaactcccacgctgagttctag

SEQ ID NO: 59587 - DNA, 753 bp, Artificial Sequence
  derived and/or modified sequence
atgatcaccggcggcaacctgcaggacagcaaggacgccctgcacctggcccagaccaacggcatgttcttcagcaccgtgggctgccaccccaccagatgcggcgagttcgagaagaacaaccccgacctgtacctgaaggagctgctgaacctggccgagaacaacaagggcaaggtggtggccatcggcgagtgcggcctggacttcgacagactgcagttctgccccaaggacacccagctgaagtacttcgagaagcagttcgagctgagcgagcagaccaagctgcccatgttcctgcactgcagaaacagccacgccgagttcctggacatcatgaagagaaacagagacagatgcgtgggcggcgtggtgcacagcttcgacggcaccaaggaggccgccgccgccctgatcgacctggacctgtacatcggcttcaacggctgcagcctgaagaccgaggccaacctggaggtgctgaagagcatccccagcgagaagctgatgatcgagaccgacgccccctggtgcggcgtgaagagcacccacgccggcagcaagtacatcagaaccgccttccccaccaagaagaagtgggagagcggccactgcctgaaggacagaaacgagccctgccacatcatccagatcctggagatcatgagcgccgtgagagacgaggaccccctggagctggccaacaccctgtacaacaacaccatcaaggtgttcttccccggcatctag

SEQ ID NO: 59588 - DNA, 333 bp, Artificial Sequence
  derived and/or modified sequence
atgatcaccggcggcaacctgcaggacagcaaggacgccctgcacctggcccagaccaacggcatgttcttcagcaccgtgggctgccaccccaccagatgcggcgagttcgagaagaacaaccccgacctgtacctgaaggagctgctgaacctggccgagaacaacaagggcaaggtggtggccatcggcgagtgcggcctggacttcgacagactgcagttctgccccaaggacacccagctgaagtacttcgagaagcagttcgagctgagcgagcagaccaagctgcccatgttcctgcactgcagaaacagccacgccgagttctag

SEQ ID NO: 59589 - protein, 1462 aa, Artificial Sequence
  derived and/or modified sequence
MYQPEDDNNSDVTSDDDMTRNRRESSPPHSVHSFSDRDWDRRGRSRDMEPRDRWSHTRNPRSRMPPRDLSLPVVAKTSFEMDREDDRDSRAYESRSQDAESYQNVVDLAEDRKPHNTIQDNMENYRKLLSLVQLAEDDGHSHMTQGHSSRSKRSAYPSTSRGLKTMPEAKKSTHRRGICEDESSHGVIMEKFIKDVSRSSKSGRARESSDRSQRFPRMSDDNWKDISLNKRESVIQQRVYEGNAFRGGFRFNSTLVSRKRVLERKRRYHFDTDGKGSIHDQKGCPRKKPFECGSEMRKAMSVSSLSSLSSPSFTESQPIDFGAMPYVCDECGRSFSVISEFVEHQIMHTRENLYEYGESFIHSVAVSEVQKSQVGGKRFECKDCGETFNKSAALAEHRKIHARGYLVECKNQECEEAFMPSPTFSELQKIYGKDKFYECRVCKETFLHSSALIEHQKIHFGDDKDNEREHERERERERGETFRPSPALNEFQKMYGKEKMYECKVCGETFLHSSSLKEHQKIHTRGNPFENKGKVCEETFIPGQSLKRRQKTYNKEKLCDFTDGRDAFMQSSELSEHQKIHSRKNLFEGRGYEKSVIHSGPFTESQKSHTITRPLESDEDEKAFTISSNPYENQKIPTKENVYEAKSYERSVIHSLASVEAQKSHSVAGPSKPKVMAESTIQSFDAINHQRVRAGGNTSEGREYSRSVIHSLVASKPPRSHNGNELVESNEKGESSIYISDLNDKRQKIPARENPCEGGSKNRNYEDSVIQSVFRAKPQKSVPGEGSGEFKKDGEFSVPSSNVREYQKARAKKKYIEHRSNETSVIHSLPFGEQTFRPRGMLYECQECGECFAHSSDLTEHQKIHDREKPSGSRNYEWSVIRSLAPTDPQTSYAQEQYAKEQARNKCKDFRQFFATSEDLNTNQKIYDQEKSHGEESQGENTDGEETHSEETHGQETIEDPVIQGSDMEDPQKDDPDDKIYECEDCGLGFVDLTDLTDHQKVHSRKCLVDSREYTHSVIHTHSISEYQRDYTGEQLYECPKCGESFIHSSFLFEHQRIHEQDQLYSMKGCDDGFIALLPMKPRRNRAAERNPALAGSAIRCLLCGQGFIHSSALNEHMRLHREDDLLEQSQMAEEAIIPGLALTEFQRSQTEERLFECAVCGESFVNPAELADHVTVHKNEPYEYGSSYTHTSFLTEPLKGAIPFYECKDCGKSFIHSTVLTKHKELHLEEEEEDEAAAAAAAAAQEVEANVHVPQVVLRIQGLNVEAAEPEVEAAEPEVEAAEPEVEAAEPNGEAEGPDGEAAEPIGEAGQPNGEAEQPNGDADEPDGAGIEDPEERAEEPEGKAEEPEGDADEPDGVGIEDPEEGEDQEIQVEEPYYDCHECTETFTSSTAFSEHLKTHASMIIFEPANAFGECSGYIERASTSTGGANQADEKYFKCDVCGQLFNDRLSLARHQNTHTG

SEQ ID NO: 59590 - protein, 1588 aa, Artificial Sequence
  derived and/or modified sequence
MLPPKHLSATKPKKSWAPNLYELDSDLTKEPDVIIGEGPTDSEFFHQRFRNLIYVEFVGPRKTLIKLRNLCLDWLQPETRTKEEIIELLVLEQYLTIIPEKLKPWVRAKKPENCEKLVTLLENYKEMYQPEDDNNSDVTSDDDMTRNRRESSPPHSVHSFSDRDWDRRGRSRDMEPRDRWSHTRNPRSRMPPRDLSLPVVAKTSFEMDREDDRDSRAYESRSQDAESYQNVVDLAEDRKPHNTIQDNMENYRKLLSLVQLAEDDGHSHMTQGHSSRSKRSAYPSTSRGLKTMPEAKKSTHRRGICEDESSHGVIMEKFIKDVSRSSKSGRARESSDRSQRFPRMSDDNWKDISLNKRESVIQQRVYEGNAFRGGFRFNSTLVSRKRVLERKRRYHFDTDGKGSIHDQKGCPRKKPFECGSEMRKAMSVSSLSSLSSPSFTESQPIDFGAMPYVCDECGRSFSVISEFVEHQIMHTRENLYEYGESFIHSVAVSEVQKSQVGGKRFECKDCGETFNKSAALAEHRKIHARGYLVECKNQECEEAFMPSPTFSELQKIYGKDKFYECRVCKETFLHSSALIEHQKIHFGDDKDNEREHERERERERGETFRPSPALNEFQKMYGKEKMYECKVCGETFLHSSSLKEHQKIHTRGNPFENKGKVCEETFIPGQSLKRRQKTYNKEKLCDFTDGRDAFMQSSELSEHQKIHSRKNLFEGRGYEKSVIHSGPFTESQKSHTITRPLESDEDEKAFTISSNPYENQKIPTKENVYEAKSYERSVIHSLASVEAQKSHSVAGPSKPKVMAESTIQSFDAINHQRVRAGGNTSEGREYSRSVIHSLVASKPPRSHNGNELVESNEKGESSIYISDLNDKRQKIPARENPCEGGSKNRNYEDSVIQSVFRAKPQKSVPGEGSGEFKKDGEFSVPSSNVREYQKARAKKKYIEHRSNETSVIHSLPFGEQTFRPRGMLYECQECGECFAHSSDLTEHQKIHDREKPSGSRNYEWSVIRSLAPTDPQTSYAQEQYAKEQARNKCKDFRQFFATSEDLNTNQKIYDQEKSHGEESQGENTDGEETHSEETHGQETIEDPVIQGSDMEDPQKDDPDDKIYECEDCGLGFVDLTDLTDHQKVHSRKCLVDSREYTHSVIHTHSISEYQRDYTGEQLYECPKCGESFIHSSFLFEHQRIHEQDQLYSMKGCDDGFIALLPMKPRRNRAAERNPALAGSAIRCLLCGQGFIHSSALNEHMRLHREDDLLEQSQMAEEAIIPGLALTEFQRSQTEERLFECAVCGESFVNPAELADHVTVHKNEPYEYGSSYTHTSFLTEPLKGAIPFYECKDCGKSFIHSTVLTKHKELHLEEEEEDEAAAAAAAAAQEVEANVHVPQVVLRIQGLNVEAAEPEVEAAEPEVEAAEPEVEAAEPNGEAEGPDGEAAEPIGEAGQPNGEAEQPNGDADEPDGAGIEDPEERAEEPEGKAEEPEGDADEPDGVGIEDPEEGEDQEIQVEEPYYDCHECTETFTSSTAFSEHLKTHASMIIFEPANAFGECSGYIERASTSTGGANQADEKYFKCDVCGQLFNDRLSLARHQNTHTG

SEQ ID NO: 59591 - protein, 36 aa, Artificial Sequence
  derived and/or modified sequence
MLPPKHLSATKPKKSWAPNLYELDSDLTKEPDVIIG

SEQ ID NO: 59592 - DNA, 4767 bp, Artificial Sequence
  derived and/or modified sequence
atgctgccccccaagcacctgagcgccaccaagcccaagaagagctgggcccccaacctgtacgagctggacagcgacctgaccaaggagcccgacgtgatcatcggcgagggccccaccgacagcgagttcttccaccagagattcagaaacctgatctacgtggagttcgtgggccccagaaagaccctgatcaagctgagaaacctgtgcctggactggctgcagcccgagaccagaaccaaggaggagatcatcgagctgctggtgctggagcagtacctgaccatcatccccgagaagctgaagccctgggtgagagccaagaagcccgagaactgcgagaagctggtgaccctgctggagaactacaaggagatgtaccagcccgaggacgacaacaacagcgacgtgaccagcgacgacgacatgaccagaaacagaagagagagcagccccccccacagcgtgcacagcttcagcgacagagactgggacagaagaggcagaagcagagacatggagcccagagacagatggagccacaccagaaaccccagaagcagaatgccccccagagacctgagcctgcccgtggtggccaagaccagcttcgagatggacagagaggacgacagagacagcagagcctacgagagcagaagccaggacgccgagagctaccagaacgtggtggacctggccgaggacagaaagccccacaacaccatccaggacaacatggagaactacagaaagctgctgagcctggtgcagctggccgaggacgacggccacagccacatgacccagggccacagcagcagaagcaagagaagcgcctaccccagcaccagcagaggcctgaagaccatgcccgaggccaagaagagcacccacagaagaggcatctgcgaggacgagagcagccacggcgtgatcatggagaagttcatcaaggacgtgagcagaagcagcaagagcggcagagccagagagagcagcgacagaagccagagattccccagaatgagcgacgacaactggaaggacatcagcctgaacaagagagagagcgtgatccagcagagagtgtacgagggcaacgccttcagaggcggcttcagattcaacagcaccctggtgagcagaaagagagtgctggagagaaagagaagataccacttcgacaccgacggcaagggcagcatccacgaccagaagggctgccccagaaagaagcccttcgagtgcggcagcgagatgagaaaggccatgagcgtgagcagcctgagcagcctgagcagccccagcttcaccgagagccagcccatcgacttcggcgccatgccctacgtgtgcgacgagtgcggcagaagcttcagcgtgatcagcgagttcgtggagcaccagatcatgcacaccagagagaacctgtacgagtacggcgagagcttcatccacagcgtggccgtgagcgaggtgcagaagagccaggtgggcggcaagagattcgagtgcaaggactgcggcgagaccttcaacaagagcgccgccctggccgagcacagaaagatccacgccagaggctacctggtggagtgcaagaaccaggagtgcgaggaggccttcatgcccagccccaccttcagcgagctgcagaagatctacggcaaggacaagttctacgagtgcagagtgtgcaaggagaccttcctgcacagcagcgccctgatcgagcaccagaagatccacttcggcgacgacaaggacaacgagagagagcacgagagagagagagagagagagagaggcgagaccttcagacccagccccgccctgaacgagttccagaagatgtacggcaaggagaagatgtacgagtgcaaggtgtgcggcgagaccttcctgcacagcagcagcctgaaggagcaccagaagatccacaccagaggcaaccccttcgagaacaagggcaaggtgtgcgaggagaccttcatccccggccagagcctgaagagaagacagaagacctacaacaaggagaagctgtgcgacttcaccgacggcagagacgccttcatgcagagcagcgagctgagcgagcaccagaagatccacagcagaaagaacctgttcgagggcagaggctacgagaagagcgtgatccacagcggccccttcaccgagagccagaagagccacaccatcaccagacccctggagagcgacgaggacgagaaggccttcaccatcagcagcaacccctacgagaaccagaagatccccaccaaggagaacgtgtacgaggccaagagctacgagagaagcgtgatccacagcctggccagcgtggaggcccagaagagccacagcgtggccggccccagcaagcccaaggtgatggccgagagcaccatccagagcttcgacgccatcaaccaccagagagtgagagccggcggcaacaccagcgagggcagagagtacagcagaagcgtgatccacagcctggtggccagcaagccccccagaagccacaacggcaacgagctggtggagagcaacgagaagggcgagagcagcatctacatcagcgacctgaacgacaagagacagaagatccccgccagagagaacccctgcgagggcggcagcaagaacagaaactacgaggacagcgtgatccagagcgtgttcagagccaagccccagaagagcgtgcccggcgagggcagcggcgagttcaagaaggacggcgagttcagcgtgcccagcagcaacgtgagagagtaccagaaggccagagccaagaagaagtacatcgagcacagaagcaacgagaccagcgtgatccacagcctgcccttcggcgagcagaccttcagacccagaggcatgctgtacgagtgccaggagtgcggcgagtgcttcgcccacagcagcgacctgaccgagcaccagaagatccacgacagagagaagcccagcggcagcagaaactacgagtggagcgtgatcagaagcctggcccccaccgacccccagaccagctacgcccaggagcagtacgccaaggagcaggccagaaacaagtgcaaggacttcagacagttcttcgccaccagcgaggacctgaacaccaaccagaagatctacgaccaggagaagagccacggcgaggagagccagggcgagaacaccgacggcgaggagacccacagcgaggagacccacggccaggagaccatcgaggaccccgtgatccagggcagcgacatggaggacccccagaaggacgaccccgacgacaagatctacgagtgcgaggactgcggcctgggcttcgtggacctgaccgacctgaccgaccaccagaaggtgcacagcagaaagtgcctggtggacagcagagagtacacccacagcgtgatccacacccacagcatcagcgagtaccagagagactacaccggcgagcagctgtacgagtgccccaagtgcggcgagagcttcatccacagcagcttcctgttcgagcaccagagaatccacgagcaggaccagctgtacagcatgaagggctgcgacgacggcttcatcgccctgctgcccatgaagcccagaagaaacagagccgccgagagaaaccccgccctggccggcagcgccatcagatgcctgctgtgcggccagggcttcatccacagcagcgccctgaacgagcacatgagactgcacagagaggacgacctgctggagcagagccagatggccgaggaggccatcatccccggcctggccctgaccgagttccagagaagccagaccgaggagagactgttcgagtgcgccgtgtgcggcgagagcttcgtgaaccccgccgagctggccgaccacgtgaccgtgcacaagaacgagccctacgagtacggcagcagctacacccacaccagcttcctgaccgagcccctgaagggcgccatccccttctacgagtgcaaggactgcggcaagagcttcatccacagcaccgtgctgaccaagcacaaggagctgcacctggaggaggaggaggaggacgaggccgccgccgccgccgccgccgccgcccaggaggtggaggccaacgtgcacgtgccccaggtggtgctgagaatccagggcctgaacgtggaggccgccgagcccgaggtggaggccgccgagcccgaggtggaggccgccgagcccgaggtggaggccgccgagcccaacggcgaggccgagggccccgacggcgaggccgccgagcccatcggcgaggccggccagcccaacggcgaggccgagcagcccaacggcgacgccgacgagcccgacggcgccggcatcgaggaccccgaggagagagccgaggagcccgagggcaaggccgaggagcccgagggcgacgccgacgagcccgacggcgtgggcatcgaggaccccgaggagggcgaggaccaggagatccaggtggaggagccctactacgactgccacgagtgcaccgagaccttcaccagcagcaccgccttcagcgagcacctgaagacccacgccagcatgatcatcttcgagcccgccaacgccttcggcgagtgcagcggctacatcgagagagccagcaccagcaccggcggcgccaaccaggccgacgagaagtacttcaagtgcgacgtgtgcggccagctgttcaacgacagactgagcctggccagacaccagaacacccacaccggctag

SEQ ID NO: 59593 - DNA, 111 bp, Artificial Sequence
  derived and/or modified sequence
atgctgccccccaagcacctgagcgccaccaagcccaagaagagctgggcccccaacctgtacgagctggacagcgacctgaccaaggagcccgacgtgatcatcggctag

SEQ ID NO: 59594 - DNA, 4389 bp, Artificial Sequence
  derived and/or modified sequence
atgtaccagcccgaggacgacaacaacagcgacgtgaccagcgacgacgacatgaccagaaacagaagagagagcagccccccccacagcgtgcacagcttcagcgacagagactgggacagaagaggcagaagcagagacatggagcccagagacagatggagccacaccagaaaccccagaagcagaatgccccccagagacctgagcctgcccgtggtggccaagaccagcttcgagatggacagagaggacgacagagacagcagagcctacgagagcagaagccaggacgccgagagctaccagaacgtggtggacctggccgaggacagaaagccccacaacaccatccaggacaacatggagaactacagaaagctgctgagcctggtgcagctggccgaggacgacggccacagccacatgacccagggccacagcagcagaagcaagagaagcgcctaccccagcaccagcagaggcctgaagaccatgcccgaggccaagaagagcacccacagaagaggcatctgcgaggacgagagcagccacggcgtgatcatggagaagttcatcaaggacgtgagcagaagcagcaagagcggcagagccagagagagcagcgacagaagccagagattccccagaatgagcgacgacaactggaaggacatcagcctgaacaagagagagagcgtgatccagcagagagtgtacgagggcaacgccttcagaggcggcttcagattcaacagcaccctggtgagcagaaagagagtgctggagagaaagagaagataccacttcgacaccgacggcaagggcagcatccacgaccagaagggctgccccagaaagaagcccttcgagtgcggcagcgagatgagaaaggccatgagcgtgagcagcctgagcagcctgagcagccccagcttcaccgagagccagcccatcgacttcggcgccatgccctacgtgtgcgacgagtgcggcagaagcttcagcgtgatcagcgagttcgtggagcaccagatcatgcacaccagagagaacctgtacgagtacggcgagagcttcatccacagcgtggccgtgagcgaggtgcagaagagccaggtgggcggcaagagattcgagtgcaaggactgcggcgagaccttcaacaagagcgccgccctggccgagcacagaaagatccacgccagaggctacctggtggagtgcaagaaccaggagtgcgaggaggccttcatgcccagccccaccttcagcgagctgcagaagatctacggcaaggacaagttctacgagtgcagagtgtgcaaggagaccttcctgcacagcagcgccctgatcgagcaccagaagatccacttcggcgacgacaaggacaacgagagagagcacgagagagagagagagagagagagaggcgagaccttcagacccagccccgccctgaacgagttccagaagatgtacggcaaggagaagatgtacgagtgcaaggtgtgcggcgagaccttcctgcacagcagcagcctgaaggagcaccagaagatccacaccagaggcaaccccttcgagaacaagggcaaggtgtgcgaggagaccttcatccccggccagagcctgaagagaagacagaagacctacaacaaggagaagctgtgcgacttcaccgacggcagagacgccttcatgcagagcagcgagctgagcgagcaccagaagatccacagcagaaagaacctgttcgagggcagaggctacgagaagagcgtgatccacagcggccccttcaccgagagccagaagagccacaccatcaccagacccctggagagcgacgaggacgagaaggccttcaccatcagcagcaacccctacgagaaccagaagatccccaccaaggagaacgtgtacgaggccaagagctacgagagaagcgtgatccacagcctggccagcgtggaggcccagaagagccacagcgtggccggccccagcaagcccaaggtgatggccgagagcaccatccagagcttcgacgccatcaaccaccagagagtgagagccggcggcaacaccagcgagggcagagagtacagcagaagcgtgatccacagcctggtggccagcaagccccccagaagccacaacggcaacgagctggtggagagcaacgagaagggcgagagcagcatctacatcagcgacctgaacgacaagagacagaagatccccgccagagagaacccctgcgagggcggcagcaagaacagaaactacgaggacagcgtgatccagagcgtgttcagagccaagccccagaagagcgtgcccggcgagggcagcggcgagttcaagaaggacggcgagttcagcgtgcccagcagcaacgtgagagagtaccagaaggccagagccaagaagaagtacatcgagcacagaagcaacgagaccagcgtgatccacagcctgcccttcggcgagcagaccttcagacccagaggcatgctgtacgagtgccaggagtgcggcgagtgcttcgcccacagcagcgacctgaccgagcaccagaagatccacgacagagagaagcccagcggcagcagaaactacgagtggagcgtgatcagaagcctggcccccaccgacccccagaccagctacgcccaggagcagtacgccaaggagcaggccagaaacaagtgcaaggacttcagacagttcttcgccaccagcgaggacctgaacaccaaccagaagatctacgaccaggagaagagccacggcgaggagagccagggcgagaacaccgacggcgaggagacccacagcgaggagacccacggccaggagaccatcgaggaccccgtgatccagggcagcgacatggaggacccccagaaggacgaccccgacgacaagatctacgagtgcgaggactgcggcctgggcttcgtggacctgaccgacctgaccgaccaccagaaggtgcacagcagaaagtgcctggtggacagcagagagtacacccacagcgtgatccacacccacagcatcagcgagtaccagagagactacaccggcgagcagctgtacgagtgccccaagtgcggcgagagcttcatccacagcagcttcctgttcgagcaccagagaatccacgagcaggaccagctgtacagcatgaagggctgcgacgacggcttcatcgccctgctgcccatgaagcccagaagaaacagagccgccgagagaaaccccgccctggccggcagcgccatcagatgcctgctgtgcggccagggcttcatccacagcagcgccctgaacgagcacatgagactgcacagagaggacgacctgctggagcagagccagatggccgaggaggccatcatccccggcctggccctgaccgagttccagagaagccagaccgaggagagactgttcgagtgcgccgtgtgcggcgagagcttcgtgaaccccgccgagctggccgaccacgtgaccgtgcacaagaacgagccctacgagtacggcagcagctacacccacaccagcttcctgaccgagcccctgaagggcgccatccccttctacgagtgcaaggactgcggcaagagcttcatccacagcaccgtgctgaccaagcacaaggagctgcacctggaggaggaggaggaggacgaggccgccgccgccgccgccgccgccgcccaggaggtggaggccaacgtgcacgtgccccaggtggtgctgagaatccagggcctgaacgtggaggccgccgagcccgaggtggaggccgccgagcccgaggtggaggccgccgagcccgaggtggaggccgccgagcccaacggcgaggccgagggccccgacggcgaggccgccgagcccatcggcgaggccggccagcccaacggcgaggccgagcagcccaacggcgacgccgacgagcccgacggcgccggcatcgaggaccccgaggagagagccgaggagcccgagggcaaggccgaggagcccgagggcgacgccgacgagcccgacggcgtgggcatcgaggaccccgaggagggcgaggaccaggagatccaggtggaggagccctactacgactgccacgagtgcaccgagaccttcaccagcagcaccgccttcagcgagcacctgaagacccacgccagcatgatcatcttcgagcccgccaacgccttcggcgagtgcagcggctacatcgagagagccagcaccagcaccggcggcgccaaccaggccgacgagaagtacttcaagtgcgacgtgtgcggccagctgttcaacgacagactgagcctggccagacaccagaacacccacaccggctag

SEQ ID NO: 59595 - DNA, 4767 bp, Artificial Sequence
  derived and/or modified sequence
atgttgccacctaaacacctgagcgctacaaaaccaaaaaagtcctgggcccctaatctgtatgagctagatagcgatttgaccaaggagcccgacgtgattatcggcgaagggccgactgacagtgagttctttcaccagagattccgcaacctgatatacgttgagttcgtgggaccaaggaaaactttgattaagcttcgcaacttgtgtctcgattggctacagcccgaaacaaggaccaaagaagagatcattgagcttctggtgttggagcagtacttgaccataatccccgagaaactgaagccctgggttcgcgccaagaaacccgaaaattgtgaaaaactggtgaccctcctggaaaattataaagagatgtaccaacccgaggacgacaataactcagatgtgaccagcgacgatgacatgacgcgaaaccgccgcgagtccagtcccccccactctgtccatagtttcagtgaccgcgactgggatcggcgcggacggagccgggatatggagccccgggacagatggagccacactcgtaatccccgatcaagaatgccccccagggacctctccttacccgttgtcgccaaaacatcatttgaaatggacagggaggatgacagagatagccgcgcatatgagagccgatcccaggacgcagagtcttatcaaaatgtggttgacctggccgaagatcgcaagcctcacaacactatccaagacaatatggaaaactatagaaagttgctgagccttgtgcagctagcagaggacgacggacattctcacatgacccagggccactcctcccggagtaagaggtcagcgtatcctagtacatctcgcggcctgaagactatgccagaagcaaagaagtcaacacatcgccgcgggatctgtgaggatgagtccagccatggggtcatcatggaaaagttcatcaaggacgtgagccggagttctaagtctgggagggccagagagtcaagtgaccgatctcagcgatttcctaggatgtctgacgataactggaaggacattagcctgaataagagagagtcagtgattcagcagagagtgtacgaaggcaatgcctttagaggcggctttagatttaactcaaccctcgtgagtagaaagagagttctcgagcgcaagcgaagatatcattttgataccgatgggaaaggtagtattcatgaccagaaaggctgtccaagaaaaaagcctttcgaatgtggctccgagatgcgaaaggctatgtccgtctcctcgctctccagcctgagtagtccttccttcaccgagagtcaacccattgacttcggcgctatgccatatgtctgtgatgagtgcggcagaagctttagcgtaatctccgaatttgtcgaacaccaaatcatgcatacacgcgaaaacctatatgaatacggcgagtcgtttatccacagtgttgcagtctctgaagttcagaaaagccaggttggcggaaaacggttcgaatgtaaagactgtggtgaaactttcaacaagtccgctgccttggccgagcaccgaaaaatacatgcccgcgggtacctcgtggaatgcaaaaaccaggagtgcgaagaagccttcatgccctcccctacatttagtgaactgcagaaaatctacggtaaagataaattctacgagtgccgtgtatgtaaggaaactttcctgcacagttccgcgctgatcgagcatcagaagattcactttggtgacgataaggacaatgaacgagagcatgaaagagagagggagagagaaaggggagagacatttagaccgagcccggctttgaatgagtttcaaaaaatgtacgggaaggagaagatgtacgaatgtaaggtgtgtggggaaacttttctccactccagctcactgaaggaacaccagaagatccatactcgcggaaatccctttgagaacaagggcaaagtgtgtgaagagaccttcattcccggacagtccctaaaacgcagacaaaagacatacaataaagaaaaactctgcgatttcactgacggaagagacgcattcatgcagagctctgagctctccgagcaccaaaagatacatagtagaaaaaatttgtttgagggcaggggatacgaaaagtctgtgattcactcaggcccctttacagaaagccagaagagtcataccatcacacgtccgcttgagtccgatgaggacgaaaaagcattcaccatctcttctaacccatacgagaatcagaagattccaactaaggaaaatgtgtacgaggccaagtcttatgaaagaagtgtgatccactctctggcctccgtggaggcacaaaagtcccatagtgtcgcggggccatcgaagccgaaagtcatggccgagtcgaccatccagtccttcgatgccatcaatcaccagcgagtgcgggccgggggaaacaccagcgagggtcgcgagtacagcagaagcgtcatccattccctggtcgcgtctaaaccacccaggtctcacaacgggaacgaactggtcgaatccaacgaaaagggggagtcctctatatacatctccgaccttaacgataaacgccaaaagataccagcaagagaaaatccttgcgagggggggagcaagaatcgaaactacgaagattctgttatccagagtgtgttccgcgccaagccccagaagagcgtgccaggtgagggcagtggcgagtttaagaaagatggtgaattttccgttccatctagtaatgtgcgggaatatcagaaggccagagctaagaaaaagtatatagagcacaggtcaaatgaaaccagcgtgatacattccctaccttttggagagcaaacatttcgccctagagggatgttgtatgagtgccaagaatgtggggaatgtttcgcccattcttcagacttaaccgagcatcagaaaatccatgatagagaaaaacccagcggttccagaaactatgagtggtcagtcattcgcagcctggccccgactgacccccaaacttcttacgctcaggagcagtacgcaaaagagcaggcgcgaaataaatgcaaagatttcaggcagttcttcgcgacaagcgaggatttgaacaccaaccaaaaaatttatgaccaagagaaaagccatggcgaagaatcacagggcgagaacaccgacggcgaggaaacacattcagaagagacccatggtcaggaaactatcgaggatccggtgattcagggctctgacatggaggacccacagaaagacgatccggatgataagatatatgagtgcgaggactgtggtctcggattcgtggaccttacagacctaactgaccaccagaaggtgcactcaagaaaatgcctagttgattccagagagtacacccattctgttattcacacgcactcaatctcagagtaccagcgggactacaccggcgagcagctgtatgagtgcccgaagtgcggcgagtcatttattcatagtagctttttgtttgagcaccaacggatccatgagcaggaccaattatacagtatgaaagggtgcgacgatggcttcattgcactgctccccatgaagcctcgcagaaaccgtgccgctgagagaaacccagcactggcaggctcggctatccgttgtttattgtgtggccaagggtttattcacagtagcgccctgaatgagcacatgcggttgcaccgtgaggacgatctacttgagcagtctcaaatggcagaggaggcaataatccccggcctcgctttaacggagttccaacgctctcagacagaagagagactgtttgagtgtgcagtctgtggggagagcttcgtgaaccctgccgaattagcggaccatgtcacggtgcacaagaacgaaccttatgaatatggcagctcttatactcacacttctttcctgacagaaccacttaaaggagcaattcccttttacgagtgcaaggactgcggcaaatcctttatacattcaaccgtgctgactaaacacaaggaacttcacctggaagaagaggaagaggatgaagctgctgctgcagccgcggccgcggcgcaagaggtagaagcgaatgtgcacgtgccacaagttgttctcagaatccaaggtctcaacgtcgaggctgccgagcccgaggtggaagccgctgaaccggaggtggaagctgccgagccggaagtggaggccgccgagccgaatggggaggcagagggacccgatggagaagccgccgagcccattggtgaggccggccagccgaatggagaggccgaacagccgaatggagacgctgacgagccagacggcgccggcatcgaggaccctgaggaaagggctgaggagccagaaggaaaagctgaagaaccagaaggggacgctgatgagcctgacggagtggggatcgaggacccagaggagggagaggatcaggagatacaggtggaggaaccatactatgattgccacgaatgcacagagacgtttacctcctccacggctttctctgagcatctcaaaacgcacgcctctatgataatcttcgagcccgcaaacgcttttggggagtgcagtgggtacattgagagggcctctacaagcactgggggagccaatcaggcagacgagaagtatttcaaatgtgatgtttgcggtcaacttttcaatgaccggttgagcctggcgaggcaccagaatacccacaccgggtag

SEQ ID NO: 59596 - DNA, 4767 bp, Artificial Sequence
  derived and/or modified sequence
atgctgcctccaaagcatctaagtgcaaccaagccaaaaaagtcctgggccccgaatctgtacgaactggatagcgaccttaccaaggagccagatgttatcatcggagagggacccacagacagtgagttcttccaccagaggttccgcaacctgatctacgttgaatttgtcggcccacggaagacgctgatcaaacttagaaacctatgcctggactggttgcagccggaaacccgcaccaaggaggaaataattgagctgttagtcttggaacaatatttaaccattatacctgaaaagttgaagccttgggtgcgggccaaaaaacctgagaactgtgaaaagcttgtgacacttctcgagaactataaagaaatgtaccagccagaggatgataataacagcgatgtaacatcagatgacgacatgacacgcaataggagagagtccagtcccccccattccgttcacagtttctccgatagagactgggacagacgtgggagatctcgtgatatggagccaagagatcgatggagccataccagaaatccaaggtcacgaatgcctccacgcgacttgagcctccccgtggttgccaagacctcctttgagatggaccgcgaagacgaccgggattcgcgggcgtatgagagtagaagccaggatgctgagtcgtaccagaacgttgtggatcttgctgaagatagaaagccgcacaacactatacaggataatatggagaactaccgcaaactgctgtccctcgtgcagctggctgaggacgatggccatagccacatgacccagggccactcatctcggtccaagaggtccgcttatccttcaacatcaagaggtctgaagaccatgccggaggcaaagaagtctacgcacagacgtggtatctgcgaggacgagtcatctcacggtgtcattatggagaaattcatcaaggatgtgagccgcagctcaaagagtggcagggcccgtgaatctagcgaccgttcacagaggttcccaagaatgtccgatgataattggaaagacattagcttaaataagagggagtccgttatccaacagcgagtctacgaggggaacgcatttcggggtggctttcgattcaacagtactttagtctctcggaagcgtgtcctggagaggaaacggcggtaccactttgacacggacgggaaaggctcaattcatgaccagaaaggttgtccaaggaagaagcctttcgaatgcggcagcgagatgaggaaggctatgtccgtgagttccttgagttctctatcgtcaccctccttcacagagagccagcctattgattttggcgcaatgccctacgtctgtgatgaatgcgggcggagctttagtgtcatctccgagtttgttgagcatcaaatcatgcatacgagggaaaatttatacgagtatggagaatcatttattcattcagtggctgttagtgaggtccagaaatcccaagttggaggcaagaggttcgaatgcaaggattgcggcgagaccttcaataaaagtgctgcgttggctgagcaccgcaagattcatgcccgcggctacctggtggaatgcaagaatcaagagtgtgaagaggcctttatgccttcccccactttctccgagctgcagaaaatttatggcaaggacaagttctatgaatgtcgtgtgtgcaaagagacatttctgcactcttcagctctcatagagcaccagaaaatccactttggggatgataaggataatgaacgagagcacgagcgagagcgcgagagagaacgcggtgaaacctttaggcccagccctgctctaaacgagttccaaaaaatgtacggcaaggaaaaaatgtatgagtgcaaggtatgcggtgaaaccttcctgcatagcagttcgcttaaggaacaccagaagatccacacacgaggtaatcctttcgagaacaagggtaaagtctgcgaagagactttcattcccggccaaagcttaaaacgcagacagaagacctataataaggagaagctttgtgattttacagatgggcgagacgcctttatgcagtcaagcgaattaagtgaacatcagaagatccatagccgcaagaatctgttcgagggaagaggatacgagaagtctgtgatccacagcggaccttttactgaaagtcagaaatcacacaccatcacgcggcccctcgagagcgacgaggatgagaaggctttcaccatcagtagcaacccatacgaaaaccagaagatcccaacaaaggaaaatgtgtatgaggccaaatcttacgaacgaagtgttattcattctttggcctccgtggaggcccagaaaagccactctgtagcaggtccatccaaaccgaaagtgatggcagaaagcacaatccaatcgtttgacgccatcaaccaccagcgggtccgcgccgggggcaacacaagcgaggggagagagtatagcaggagtgtgatccatagtctggtggcttccaagccgcctcgctcacataacggaaatgaattggtcgaaagcaacgaaaagggcgagagctcaatttacatctccgacctgaacgacaaacgacagaagattcccgcccgagagaacccatgcgagggggggtctaaaaatcgcaattacgaggattccgtcattcagtcagtcttccgggctaaaccacagaagtctgtgcctggggagggctctggggagtttaaaaaggatggtgagtttagtgtgccgtccagtaatgtgcgggagtaccagaaagcccgggctaaaaaaaagtatatcgagcacaggtctaatgagacctctgtgatacactccctgccttttggagagcagacttttcgtcccagaggtatgctctatgagtgccaggagtgtggcgaatgtttcgcccatagttcggatctgacggagcaccagaaaatccatgaccgagaaaagccctccggatcacgaaactatgaatggagcgttattagaagcttggcaccaaccgacccacagacgtcctatgcccaggaacagtacgccaaggagcaagcgcggaacaaatgcaaagacttccgccagttttttgccaccagcgaggacttgaatactaaccagaaaatctacgaccaggagaaatcccatggcgaagaaagccagggagagaatactgatggagaagaaacccactcagaggagacccatggccaggagacaattgaggatcctgtgatacaaggatccgatatggaggatcctcagaaggatgacccagacgacaaaatttacgaatgcgaagattgcggactgggcttcgtggacctcacagatctgaccgaccatcagaaggtgcactcaaggaagtgtctggttgatagtagagaatatactcacagcgtcatccacactcactcgatctccgagtatcaacgtgactataccggtgagcagctctatgaatgtcccaagtgcggcgaaagctttattcactcctcatttctgtttgagcatcagcggatccacgaacaggaccagctctactctatgaaaggctgtgatgacggcttcatcgctctgctgccaatgaaaccacgaagaaatcgggccgccgaacgcaaccctgccttagcaggcagcgcaatcagatgtctactctgtggccaaggcttcattcacagctccgcccttaacgagcacatgagacttcaccgtgaagatgacctcctggaacagtcccagatggccgaggaagcaataattccagggttggctctgactgaatttcaaagatctcagaccgaggagaggttgtttgagtgtgctgtctgcggggagtcctttgttaatccagctgagctggccgatcatgtcacagtccacaaaaacgaaccctatgagtacggctcaagttatactcatacctcttttcttacagagcccctgaagggggctatccccttttacgagtgtaaggactgtggtaagtcatttatccattctacagtgctgacaaagcataaggagctgcatctggaggaagaggaggaagacgaggctgctgccgctgccgcagctgctgcccaggaagtggaagcaaatgtgcacgtgccccaggttgtcttgagaatacaggggctgaatgtggaggcagcagaacccgaggtcgaagccgccgagccagaagtagaagctgccgagcctgaagtcgaagcagccgagccaaacggggaggcagagggcccagatggcgaagccgccgaacccatcggggaggctgggcagccaaacggcgaggccgaacagccaaacggtgacgccgacgagccggatggggccgggattgaggatcccgaagagcgcgccgaggaacccgaaggtaaggctgaagaaccggaaggagacgccgacgaacctgacggggtcggaatcgaggaccctgaggaaggcgaggaccaggagattcaggttgaggagccttactatgattgccacgagtgcaccgagacatttaccagtagcaccgcttttagcgaacaccttaagactcacgctagtatgattatattcgaacctgccaacgcttttggcgaatgtagtgggtatatcgagagggcgtctaccagtactggcggggcaaatcaggcagatgagaagtatttcaagtgtgatgtctgcggtcagctctttaacgatcgcctcagcctagccagacaccagaacacacacaccggctag

SEQ ID NO: 59597 - DNA, 111 bp, Artificial Sequence
  derived and/or modified sequence
atgctcccaccgaaacatctcagcgctacaaagccaaagaagtcctgggcaccaaacctctatgagctggacagtgatctcaccaaggaacccgacgtgattattggctag

SEQ ID NO: 59598 - DNA, 4767 bp, Artificial Sequence
  derived and/or modified sequence
atgctgccaccaaaacacctcagtgccaccaaacccaagaagtcgtgggcaccgaacctatacgaactggattctgaccttacgaaagagccagatgtgatcatcggagagggacctaccgacagcgaatttttccaccagcgatttaggaacctcatctacgtcgaatttgtaggcccccggaaaaccctcatcaagttgcggaatctgtgtcttgattggctgcagcccgagacacggactaaagaagagatcattgaactgctcgtgttagagcagtacctgactataattccagagaaacttaagccctgggttagggccaagaagcccgagaattgtgaaaaactggtcacgctcttggaaaattacaaggagatgtaccagccggaggacgataataatagcgatgtgacaagcgacgatgatatgacacggaatcgccgggagagctcgccaccacattctgtccactcttttagtgatcgggactgggacaggcgcggacgatcccgtgacatggaaccacgggataggtggtcacacactagaaaccctaggagcagaatgcccccccgcgacctgtcacttcctgtggtcgcgaagacttcattcgaaatggatcgtgaagatgatagggactcgcgggcttacgagtccagatcccaggacgctgagagctaccagaacgtcgtcgatttagcggaggatcgaaagccccacaatactatccaggacaatatggaaaactatcggaaactgctgtcattagttcagctcgcggaggacgacgggcactcacacatgacccaaggtcactcttcacgaagcaagcggtccgcctatcccagcacctcacgcggcctgaaaacaatgcccgaagctaagaaatcaacacataggaggggaatttgtgaggatgaatctagtcacggcgtcataatggagaagtttattaaagacgtttctagatcttctaagtctgggagggctcgggagtcatcagataggtcccaacggttccccaggatgtcagatgacaattggaaggacatatcactgaataaacgagaatctgtgatccagcagcgggtctacgagggtaatgctttccgcggtggtttccgttttaattccacccttgtttccagaaagagagtgctagagagaaaaagacggtatcattttgacacagacggtaagggatctattcacgatcagaaaggctgcccacgcaaaaagcctttcgaatgtggcagtgaaatgcgcaaggccatgtcagtaagcagtctttcctccctgtcatccccctcctttacggagtcccaacccattgacttcggagccatgccctacgtatgcgatgaatgcggcaggtctttctctgtgattagtgagtttgtggagcatcagattatgcatacgcgggagaacctttacgagtacggggaaagcttcatacactcagtagcagtttccgaggtgcagaagagccaagtgggaggtaagaggttcgaatgtaaagactgtggcgaaactttcaacaaatccgccgccctcgcggagcaccggaaaattcacgctaggggctaccttgttgaatgtaaaaatcaggagtgcgaggaagcctttatgccctcgcctaccttcagcgaactgcagaagatctacgggaaagacaaattctatgaatgcagggtgtgtaaggaaacatttcttcactcctctgcacttatagaacatcaaaagattcatttcggcgacgacaaagacaacgaaagagagcacgagagagagagagagcgcgaaagaggcgagacctttcgcccttccccagccctgaacgaatttcagaagatgtacggtaaggagaaaatgtacgaatgtaaagtgtgcggcgaaaccttccttcacagcagtagcctgaaagaacatcagaagattcacacccgcggcaaccccttcgaaaacaaaggcaaagtctgcgaggagacattcattccaggtcagagtctgaagcggcgccagaaaacatacaacaaagagaagctctgcgatttcacggacggtcgggacgcctttatgcaaagctcagagctttcagagcatcagaagatacactcaaggaaaaatcttttcgaaggaagagggtacgaaaagtctgtcatccatagtggtcccttcactgagagccaaaagtcccatacaatcaccagaccactggaaagtgatgaagatgaaaaagcatttacaatctcttctaatccctatgaaaaccagaagatcccaactaaggagaatgtgtacgaggccaagtcatatgagcgtagcgttatccactccctcgcttcagtagaagctcagaaatcacactccgttgccgggccctcaaagccgaaggtcatggccgaaagtacgatccagagtttcgacgccatcaatcatcagcgcgtgagagctgggggcaatacatccgagggaagagagtactcccggtcagtgatccattctcttgtggcttcaaaaccacccaggagccataatggcaatgagctcgtggagagtaacgaaaagggagagtcttctatttacatctccgacctcaatgacaaacgacagaagattccggctcgcgagaacccctgcgagggcgggtcaaagaatagaaattatgaggactctgtcatccagtcagtcttcagggcaaaaccacagaaatctgtaccgggcgaagggtctggagagttcaagaaagatggtgaattttccgtacctagtagtaatgtgagggagtaccagaaagctcgagcgaagaagaagtacattgaacacaggtctaacgagacaagtgtgatccactctctcccattcggagagcagacgttcagaccgcggggcatgctctacgaatgccaggaatgtggggagtgtttcgcgcattcctctgacctgactgagcaccaaaagattcacgaccgcgagaagcctagcggttctcgaaactacgaatggtccgtaattcgctcactggctcccactgacccccagacaagctacgctcaagaacagtatgctaaggagcaggcaaggaacaagtgtaaggactttagacaattttttgccactagcgaagacctgaatacaaatcaaaagatatacgaccaggagaaaagtcatggggaggagtctcagggagagaatacggacggtgaggagacacattccgaggaaacgcatggtcaagagacaatagaggacccggtgattcagggcagcgatatggaggacccacagaaggacgaccccgatgataagatctacgagtgtgaggattgtggtctcgggtttgtggacctgacagacctgaccgatcatcagaaggtgcactcccggaaatgcctggttgattcgagagagtacactcactctgtgattcatacacactccatcagtgagtatcagcgtgattacacaggtgaacagttgtacgaatgcccaaaatgtggcgaatcatttatccattcgtcctttcttttcgaacatcagcggattcatgagcaagaccaactgtacagcatgaaaggctgtgacgatggctttatcgctttgctgccaatgaagccaagaaggaaccgcgcggctgaacggaatcccgccttggcaggaagcgcaattcgttgtttgctctgtggacaaggcttcattcactcgtcagcgctcaatgagcacatgagactccatcgcgaagacgatcttcttgaacagagccagatggccgaagaggcgatcattcccggacttgccttaacagagtttcagagatcccagactgaagaacgcctatttgaatgtgccgtgtgcggggagtccttcgtgaaccctgcagagctcgccgaccacgtgactgtacataaaaacgaaccctatgagtatggtagcagttatacacatacctcattcctgaccgagcccttgaagggagctattccattttacgagtgcaaagactgcggaaaaagtttcatccattccactgtgctgacaaaacacaaggaactgcacctggaggaggaagaggaggacgaggcggccgctgcggctgctgcagctgcccaagaggtggaagctaatgtccatgtccctcaggttgtactgcgtattcagggattgaatgtcgaggcagcagaaccggaagtggaggcagctgagccggaggttgaagcggcagaaccagaggtagaagcagcagaacctaatggtgaggcggagggcccagacggtgaggcagcagaacctatcggtgaggccggacaacccaacggggaggccgagcagccaaacggagacgccgatgagcctgacggcgccggcattgaggaccccgaagaacgcgccgaggagcccgaaggcaaagctgaagaacctgaaggggacgctgacgagcctgatggtgtgggaattgaggaccccgaagaaggagaggaccaggaaatacaagtggaggaaccctattacgactgtcatgagtgcaccgaaacttttacctcaagcacggcgttctctgagcatttaaaaactcacgcttcaatgatcattttcgagcccgcaaacgcatttggggagtgctctggatacatagagcgggcatctacctccacggggggcgctaatcaggccgacgagaaatactttaagtgcgacgtgtgcgggcagctgttcaacgaccggttgagcttggcccggcaccagaatactcacacgggctag

SEQ ID NO: 59599 - DNA, 4389 bp, Artificial Sequence
  derived and/or modified sequence
atgtatcagccggaagacgacaacaactccgacgtcacaagcgacgacgacatgaccagaaatcggagagagagctccccgccccattccgtccacagcttcagcgatcgtgattgggaccgtcgcgggagatctcgggatatggaaccccgagatcggtggtcccatacacggaaccccagatctcgaatgcccccaagagatctgtcattgcccgtggtggcaaaaaccagtttcgaaatggatcgggaggatgaccgggactcacgggcatacgagagtaggtcacaggacgcagaatcttatcagaacgtcgtggatttggcggaggatcgaaagccacacaataccattcaggacaacatggaaaactacaggaagttgttatcattggtacagcttgctgaggatgatggtcatagccacatgacccaaggccactcttcacgctctaaacggtccgcgtacccaagcacttcacggggcctaaagactatgcccgaagcaaaaaaaagcacacaccgccgggggatctgtgaggacgagagctcccacggtgtgatcatggagaaattcattaaggacgtgtccaggagctctaagtcagggagggcccgggagtcgtctgaccgctcccagaggtttccacggatgtcagacgacaactggaaagacatatctctcaataaaagagaaagtgtgattcagcaaagagtctacgaggggaatgcattccgagggggcttccgttttaactccactctcgtcagccggaaaagggtcctagaacggaagcgcagataccatttcgacacggatggaaaaggctccattcatgatcagaaagggtgtccccgtaaaaagcctttcgagtgtggttccgaaatgcgaaaggccatgtcagtttcatccctatctagtctgagcagcccgagttttaccgaatcccaacctattgattttggtgcaatgccctatgtgtgcgacgaatgtggccgttctttctctgtgattagtgaatttgttgagcaccaaatcatgcataccagggagaacctgtatgagtatggtgaaagctttatccatagcgtcgccgttagtgaggtacagaaatcccaggtggggggcaaaagattcgagtgcaaagactgtggagaaaccttcaataaatctgctgctctggccgagcaccgaaagatacatgcacggggttatctggtggaatgcaagaatcaggaatgtgaagaagcgttcatgccatctccaaccttctctgagctgcaaaaaatatacggaaaggacaaattttacgagtgcagagtctgtaaggagactttcttacacagcagcgcactgatcgagcaccaaaaaatccactttggcgacgacaaggacaacgaacgcgagcacgagcgggagagagagcgagagcggggggaaacattccggccttctcctgctctcaatgagttccagaagatgtatggaaaggaaaagatgtacgagtgcaaagtgtgcggtgaaaccttccttcattctagcagccttaaggagcatcaaaagatccatacccggggcaatcccttcgagaataaaggcaaagtctgtgaggaaacatttattcctggacaatctctcaaacgcaggcagaaaacttataacaaggagaagctttgtgactttaccgacggccgcgatgcttttatgcagtccagcgaactgagcgagcaccagaagattcacagtagaaagaacttattcgagggacgggggtacgagaagagcgtcatacacagcgggccattcaccgagtcacagaagagtcacactattactagaccactggaaagcgatgaggatgaaaaggcattcacgatttcgtccaatccttatgagaatcagaagatccctaccaaagaaaacgtgtacgaggcaaaatcttacgaaaggagcgtcatccacagtctggcctctgtggaagctcagaaaagtcatagtgttgcaggtccctccaagcccaaagttatggcggagagcaccattcaaagctttgacgctatcaaccatcaacgcgttcgggccgggggcaatacatcggagggcagggaatactcacggtcagttatacactctctggtggcgagcaagcccccacgctctcataatggcaacgagttggtcgaatccaacgaaaaaggggagagttccatctacatttcagatctcaacgacaagagacagaagatcccagctagagaaaatccctgtgagggcgggagcaaaaatcgcaattacgaggactcagtgatccagagtgtcttccgcgctaagcctcagaagtccgttcctggggaaggaagcggtgagttcaagaaggatggcgaattttcggtgcctagtagtaacgtccgggagtaccagaaggcacgcgccaagaagaagtatatcgaacatagatcaaatgagactagcgtgatacactccctcccattcggggaacaaacattccgaccaaggggtatgctgtatgagtgccaggagtgcggcgagtgctttgcccattctagcgatcttactgaacaccagaagattcacgatagagaaaagccgtccgggtccaggaactatgagtggagtgtcattcgctccctggcaccaacagatccacaaactagctacgcccaggagcagtacgccaaggagcaggcgcggaacaaatgtaaagacttccgacaattcttcgccacctccgaggacctgaatactaaccaaaagatctatgatcaagagaagagccacggagaagagagtcagggtgaaaatacagacggggaggagacccattcagaggaaactcatgggcaggaaaccatagaagaccctgtcattcaaggctctgacatggaggacccccaaaaagatgaccccgatgacaaaatatatgagtgtgaggattgcggactggggttcgtggacctgaccgatcttactgatcaccagaaagtgcattctaggaaatgcctcgtggactcaagggaatacactcacagtgtcattcatactcactccatttccgagtaccagcgtgactatacgggcgaacaattgtacgaatgtcctaaatgtggcgagagtttcattcactctagcttccttttcgaacaccagagaattcacgaacaggaccaactgtactctatgaagggttgcgacgatggtttcattgctctcctcccaatgaaaccccggcgcaacagagcggctgaaagaaaccccgctctcgcaggttcggccatcaggtgtcttctgtgcggacaggggtttatccattcttcagccctgaatgaacacatgaggctgcaccgagaggatgacctcctggagcagtcacagatggccgaggaagccattatacccggtctggctctgactgagttccagaggtctcagacggaggaacgactgttcgaatgcgctgtatgcggagagtcctttgtgaacccagctgagctcgctgaccatgtgactgtccataagaacgagccatacgaatacggcagctcatatacccatacttcgttcctgaccgagcccctaaaaggcgcaatccctttttatgaatgtaaagactgtggtaagtcgtttatccacagcacggttcttaccaaacataaagagctccatttggaagaagaggaggaggatgaggccgcggccgccgccgccgccgcagcccaggaggtggaggctaatgtccacgtgccgcaggttgttctgcggatccaggggttaaatgttgaagcagcagaacctgaggttgaagctgcggaaccagaggttgaggccgccgagcccgaggtcgaggctgctgaaccaaatggggaagcagagggcccagatggagaagctgctgagccaatcggcgaggctggacagcctaacggagaggcggagcaaccaaatggggacgcagatgaaccagacggggctgggattgaagaccccgaggaacgagcagaagagcctgagggcaaggcagaagaacctgagggcgatgcggatgagcctgatggggtcggcattgaggatcccgaagaaggcgaggatcaggaaatacaggttgaagagccatattatgattgccacgagtgcacagagacttttacgagctctacggctttttctgagcatctgaaaacgcacgcctctatgatcatttttgaaccagccaacgcctttggcgagtgcagcgggtatatagagcgggctagcacgtccacaggaggagccaatcaagcagatgagaagtatttcaaatgtgacgtgtgtggtcaactattcaatgatcgcttatctctggctcgccatcaaaacacgcacacggggtag

SEQ ID NO: 59600 - DNA, 4767 bp, Artificial Sequence
  derived and/or modified sequence
atgctaccgcccaagcatttgtccgctacaaagcccaagaaaagctgggcacctaacctctacgaactggatagcgacctcactaaggagccagatgtgatcataggcgaaggacctacagatagtgagttttttcatcagcggtttagaaacttgatatacgtcgagttcgtgggtccgcgcaagacgctcattaagctgagaaacctctgcctagactggctgcagcccgagacccgaaccaaagaggagatcatcgagctgttggtattggaacagtacctcaccataatacctgaaaaactgaaaccttgggtgcgtgcaaagaagcccgagaattgcgagaagcttgtcacactgctagagaattataaagaaatgtatcagccggaggatgataataatagtgacgtcacttcggatgatgatatgactcgcaacaggcgcgagtctagtccgccacactccgtccactccttttcagacagagactgggatcggaggggtcggagtagagacatggaaccacgggacagatggagccatactagaaatccacgtagccggatgccaccaagagacctaagcctgcccgtggtggctaagacgtcattcgagatggatcgggaagatgaccgagattctcgggcgtatgaaagcaggagtcaggacgccgagtcctatcagaatgtcgttgacctggccgaggaccgaaaaccacacaatacaattcaggacaatatggagaactacagaaaattgctgtccctcgtgcagcttgccgaggacgatggacattctcatatgactcagggacacagcagtcgctctaaacgctccgcctacccctcgacttccagaggcctgaagaccatgccagaggcaaagaaaagcacgcaccggaggggcatctgtgaagacgagtcaagtcacggggtaatcatggagaagttcataaaagacgttagccggtcaagcaaatcaggacgggcaagggagtcttctgatcggtcccagaggttcccacgcatgtcagatgacaactggaaagacataagcttaaacaagagagaaagtgttatccagcagagggtttacgaagggaatgccttcagagggggattcaggttcaacagtaccctagtaagccgaaagagggtgcttgaacgcaagagaaggtatcattttgacaccgatggcaagggcagtattcatgaccaaaagggctgcccacgtaaaaagccattcgagtgtggatcagagatgcgtaaagccatgtctgtgtcgagtctaagctctctcagtagtccttctttcaccgagagccagcccatcgatttcggggccatgccgtatgtgtgtgacgagtgcggacggagcttcagtgtgattagcgagttcgtggagcatcagatcatgcacaccagagaaaacctttacgagtatggtgagtcattcatccactcagtggccgtgtcggaggtgcagaagtctcaggttggtggcaaacggtttgagtgtaaggattgtggggagacattcaataaaagtgccgccctcgcagagcacagaaagatacatgccagaggctacctcgtcgaatgcaagaaccaggaatgtgaggaggcctttatgcccagtcctacttttagcgagctgcagaagatttatggaaaggacaagttctatgaatgccgcgtctgcaaagaaactttcctccatagcagcgccttaattgaacaccaaaaaatccactttggggacgacaaggataacgagcgggagcacgagcgcgaacgagagagagagcggggggaaacgttccggccttcgccagctcttaacgaatttcagaagatgtacggtaaagagaagatgtacgaatgtaaggtttgcggcgagacatttctacattcctcgagcctgaaggagcatcagaaaatccacacaaggggaaaccctttcgagaacaaggggaaggtttgcgaggagacatttatacccgggcaatctttaaagcgcagacaaaagacgtacaataaagaaaaactctgtgatttcacagatggccgggatgccttcatgcagagctcagaactgtctgagcaccagaaaatccatagtcggaaaaacctattcgaagggcgcggctacgaaaagagcgtgatccacagcggaccttttacagaatctcagaagtcccatacgatcacacggccactggagagcgacgaagacgagaaggccttcactatatcttcaaacccttacgagaaccagaaaataccaactaaagagaatgtgtacgaggctaaatcatacgagcggtctgtgattcacagcctggccagtgtagaggctcagaaaagccattctgtggctggcccttcaaagcctaaagtgatggcagagtcaacaattcagtcctttgacgccattaatcaccagcgcgtcagagcaggtggcaatacctctgaaggacgagaatattcaaggtcagtgatccactcattggtggcatctaagcctccaagatctcacaacggtaatgaacttgtagagtcaaatgagaaaggagagtcaagcatctacatcagcgatctaaatgacaagcgccagaagatcccggcgcgtgaaaatccgtgcgagggcggatctaagaatcgcaactatgaggattccgttattcaaagcgtgtttagagccaagccacaaaaatcagtgcctggagaaggcagcggagaatttaagaaagacggggagtttagcgtgccgtcctccaacgtgcgagagtatcaaaaggctagggcgaagaaaaaatatatagagcatagaagtaacgagaccagcgtcatccacagcctgccttttggcgagcagacttttcgcccaaggggcatgctctatgagtgtcaggagtgtggggagtgttttgcacactcttccgacctcactgaacaccagaagatccatgatcgcgaaaagccctcgggcagcagaaactatgaatggagcgttattaggtcactagctcccactgatccacagacaagctacgctcaagaacaatacgctaaggagcaggcccgtaataagtgtaaagacttcagacagtttttcgctacatctgaggacctgaacaccaatcagaagatttatgatcaagaaaaatcgcacggcgaggaatcacagggggaaaatacggacggcgaggaaacacactctgaggaaacacatggacaggagacaatcgaagatcctgtgatccagggtagcgacatggaagatccacagaaagacgacccggacgataaaatctatgaatgtgaagactgcgggctcgggttcgtggatctaactgacttgactgatcatcagaaggtgcacagtcgtaagtgtctggtggattccagggaatacactcatagcgtcatacacacacactccatctctgagtatcagcgggactatactggtgaacagttatacgaatgtcctaagtgcggagagtcattcatccacagctcctttttgttcgaacaccaacgaatccacgagcaggatcagctatacagtatgaagggctgtgacgatgggtttattgctttgctccctatgaagcccaggcgcaacagggcagcagagagaaatccagcgctggccggctcagccattcgctgcttattatgtggccagggctttatccattctagtgctctgaacgaacacatgagattgcacagggaagacgatctgctggagcagtctcagatggccgaagaagccattattccagggctggcgttaacagagtttcaaaggtcgcaaactgaggagcgtctgtttgagtgtgccgtctgtggtgagtcttttgtaaacccggcagaactggctgaccatgtgacggttcacaagaacgaaccttatgaatatggatcttcttacacccatacatccttcttaacagaaccactgaaaggcgctatccccttttatgaatgcaaggattgcggcaaaagcttcattcactccactgtgctgaccaaacacaaagaactgcacttggaggaggaggaagaagacgaggcagccgccgcggccgctgcagccgcccaggaagttgaggccaacgttcacgttcctcaggtggttttaagaatacagggtttaaacgtggaggctgccgaacccgaggtagaagctgcggagcctgaagttgaggccgctgaacccgaggtcgaagcagccgaacccaacggcgaggctgaagggccggatggggaggccgccgagccaatcggtgaagccggacagcccaatggggaggcagagcagcctaatggcgacgccgatgaaccagacggagcgggaatcgaggacccagaggagcgcgccgaggagcctgaaggcaaggctgaggagcccgagggcgacgctgacgagccggatggggtgggaattgaggacccagaagaaggggaagatcaggagatacaagttgaggaaccgtattacgactgccatgaatgtacagagactttcacctccagcacagccttctccgagcacctgaaaacgcacgcatctatgataatttttgaacccgcaaacgccttcggagagtgttctggatatattgagcgagccagtaccagtaccgggggcgctaaccaggcagacgagaagtactttaagtgtgatgtatgtgggcagctgtttaacgaccgcctgtccctggcaagacaccaaaatacccatacagggtag

SEQ ID NO: 59601 - DNA, 4767 bp, Artificial Sequence
  derived and/or modified sequence
atgctgccccccaagcacctgagcgccaccaagcccaagaagtcctgggcccccaacctgtatgagctggacagcgacctgaccaaggagccagatgtgatcattggagagggccccacagacagcgagttcttccaccagcgcttcaggaacctgatctacgtggagtttgtgggccccaggaagaccctcatcaagctgaggaacctgtgcctggactggctgcagcctgagaccaggaccaaggaggagatcatcgagctgctggtgctggagcagtacctgaccatcatccctgagaagctgaagccctgggtgcgggccaagaagccagagaactgtgagaagctggtgaccctgctggagaactacaaggagatgtaccagccagaagatgacaacaacagtgatgtgaccagtgatgatgacatgaccaggaacagaagagagagcagccccccccacagcgtgcacagcttcagtgaccgggactgggacagaagaggccgcagccgggacatggagccccgggaccgctggagccacaccaggaaccccaggagcaggatgccaccccgggacctgagcctgcctgtggtggccaagaccagctttgagatggaccgggaggatgaccgggacagccgggcctatgagagccgcagccaggatgctgagagctaccagaatgtggtggacctggccgaggacaggaagccccacaacaccatccaggacaacatggagaactacaggaagctgctgagcctggtgcagctggccgaggatgatggccacagccacatgacccagggccacagcagccgcagcaagaggtctgcctaccccagcaccagccggggcctgaagaccatgcctgaggccaagaagagcacccacagaagaggcatctgtgaagatgagagcagccatggagtcatcatggagaagttcatcaaggatgtgagccgcagcagcaagagcggccgggcccgggagagcagtgacaggagccagcgcttccccaggatgtctgatgacaactggaaggacatcagcctgaacaagcgggagagcgtcatccagcagagggtgtatgagggcaatgccttccggggcggcttccgcttcaacagcaccctggtgtccaggaagagggtgctggagaggaagaggcgctaccactttgacacagatggcaagggcagcatccatgaccagaagggctgccccaggaagaagccctttgaatgtggcagcgagatgaggaaggccatgtctgtgagcagcctgagcagcctgagcagccccagcttcacagagagccagcccatcgactttggagccatgccctacgtgtgtgatgaatgtggccgctccttcagcgtcatcagcgagtttgtggagcaccagatcatgcacacccgggagaacctgtatgaatatggagagagcttcatccacagcgtggccgtgtctgaggtgcagaagagccaggtgggcggcaagagatttgagtgcaaggactgtggggagaccttcaacaagtctgctgccctggccgagcacaggaagatccacgcccggggctacctggtggagtgcaagaaccaggagtgtgaggaggccttcatgcccagccccaccttcagcgagctgcagaagatctacggcaaggacaagttctatgagtgccgggtgtgcaaggagaccttcctgcacagcagcgccctgattgagcaccagaagatccactttggagatgacaaggacaatgaaagagagcacgagcgggagcgggagcgggagcggggggagaccttccggcccagccctgccctgaatgagttccagaagatgtatggcaaggagaagatgtatgagtgcaaggtgtgtggggagaccttcctgcacagcagcagcctgaaggagcaccagaagatccacacccggggcaacccctttgagaacaagggcaaggtgtgtgaggagaccttcatccctggccagagcctgaagaggcggcagaagacctacaacaaggagaagctgtgtgacttcacagatggaagagatgccttcatgcagagcagcgagctgtctgagcaccagaagatccacagcaggaagaacctgtttgagggccggggctatgagaagagcgtcatccacagcggccccttcacagagagccagaagagccacaccatcacccggcccctggagagtgatgaagatgagaaggccttcaccatcagcagcaacccctatgagaaccagaagatccccaccaaggaaaatgtgtatgaggccaagagctatgaaagaagtgtcatccacagcctggcctctgtggaggcccagaagagccacagcgtggccggccccagcaagcccaaggtgatggccgagagcaccatccagagctttgatgccatcaaccaccagagggtgcgggccggcggcaacaccagcgagggccgggagtacagccgcagcgtcatccacagcctggtggccagcaagcccccaagaagccacaatggaaatgagctggtggagagcaatgagaagggggagagcagcatctacatcagtgacctgaatgacaagaggcagaagatcccagcccgggagaacccctgtgagggcggcagcaagaacagaaattatgaggacagcgtcatccagagcgtcttccgggccaagccccagaagtctgtgcctggagagggcagcggggagttcaagaaggatggagagttctctgtgcccagcagcaatgtgcgggagtaccagaaggcccgggccaagaagaagtacatcgagcacaggagcaatgagaccagcgtcatccacagcctgccctttggagagcagaccttccggccccggggcatgctgtatgagtgccaggagtgtggggagtgctttgcccacagcagtgacctgacagagcaccagaagatccatgaccgggagaagcccagcggcagcaggaactatgagtggagcgtcatccgcagcctggcccccacagacccccagaccagctatgcccaggagcagtatgccaaggagcaggccaggaacaagtgcaaggacttccggcagttctttgccaccagcgaggacctgaacaccaaccagaagatctatgaccaggagaagagccatggagaggagagccagggcgagaacacagatggagaggagacccacagcgaggagacccacggccaggagaccattgaagatcctgtgatccagggcagtgacatggaggacccccagaaggatgatcctgatgacaagatctatgaatgtgaggactgtggcctgggctttgtggacctgacagacctgacagaccaccagaaggtgcacagcaggaagtgcctggtggacagccgggagtacacccacagcgtcatccacacccacagcatcagcgagtaccagagggactacaccggggagcagctgtatgagtgccccaagtgtggggagagcttcatccacagcagcttcctgtttgagcaccagagaattcatgagcaggaccagctgtacagcatgaagggctgtgatgatggcttcatcgccctgctgcccatgaagcccaggaggaacagagctgctgagaggaacccagccctggccggcagcgccatccgctgcctgctgtgtggccagggcttcatccacagcagcgccctgaatgagcacatgaggctgcacagagaagatgacctgctggagcagagccagatggccgaggaggccatcatccctggcctggccctgacagagttccagaggagccagacagaggagcggctgtttgaatgtgctgtgtgtggggagagctttgtgaacccagctgagctggccgaccacgtgacagtgcacaagaatgagccctatgaatatggcagcagctacacccacaccagcttcctgacagagcccctgaagggggccatccccttctatgagtgcaaggactgtgggaagagcttcatccacagcacagtgctgaccaagcacaaggagctgcacctggaggaggaggaggaggatgaagctgctgctgctgctgctgctgctgcccaggaggtggaggccaacgtgcacgtgccccaggtggtgctgcgcatccagggcctgaatgtggaggccgctgagcctgaggtggaggccgctgagcctgaggtggaggccgctgagcctgaggtggaggccgctgagcccaatggagaggccgagggcccagatggagaggccgctgagcccatcggggaggccggccagcccaacggggaggccgagcagcccaatggagatgctgatgagccagatggagctggcattgaagatcctgaggagagagctgaggagcctgagggcaaggccgaggagccagaaggagatgctgatgagccagatggagtgggcatcgaggaccctgaggagggggaggaccaggagatccaggtggaggagccctactatgactgccatgaatgtacagagaccttcaccagcagcacagccttcagcgagcacctgaagacccacgcctccatgatcatctttgagcccgccaatgcctttggagaatgttctggctacatcgagcgggccagcaccagcactggaggagccaaccaggctgatgagaagtacttcaagtgtgatgtgtgtggccagctgttcaatgaccggctgagcctggcccggcaccagaacacccacactggatag

SEQ ID NO: 59602 - DNA, 111 bp, Artificial Sequence
  derived and/or modified sequence
atgctgccccccaagcacctgagcgccaccaagcccaagaagtcctgggcccccaacctgtatgagctggacagcgacctgaccaaggagccagatgtgatcattggatag

SEQ ID NO: 59603 - DNA, 4389 bp, Artificial Sequence
  derived and/or modified sequence
atgtaccagccagaagatgacaacaacagtgatgtgaccagtgatgatgacatgaccaggaacagaagagagagcagccccccccacagcgtgcacagcttcagtgaccgggactgggacagaagaggccgcagccgggacatggagccccgggaccgctggagccacaccaggaaccccaggagcaggatgccaccccgggacctgagcctgcctgtggtggccaagaccagctttgagatggaccgggaggatgaccgggacagccgggcctatgagagccgcagccaggatgctgagagctaccagaatgtggtggacctggccgaggacaggaagccccacaacaccatccaggacaacatggagaactacaggaagctgctgagcctggtgcagctggccgaggatgatggccacagccacatgacccagggccacagcagccgcagcaagaggtctgcctaccccagcaccagccggggcctgaagaccatgcctgaggccaagaagagcacccacagaagaggcatctgtgaagatgagagcagccatggagtcatcatggagaagttcatcaaggatgtgagccgcagcagcaagagcggccgggcccgggagagcagtgacaggagccagcgcttccccaggatgtctgatgacaactggaaggacatcagcctgaacaagcgggagagcgtcatccagcagagggtgtatgagggcaatgccttccggggcggcttccgcttcaacagcaccctggtgtccaggaagagggtgctggagaggaagaggcgctaccactttgacacagatggcaagggcagcatccatgaccagaagggctgccccaggaagaagccctttgaatgtggcagcgagatgaggaaggccatgtctgtgagcagcctgagcagcctgagcagccccagcttcacagagagccagcccatcgactttggagccatgccctacgtgtgtgatgaatgtggccgctccttcagcgtcatcagcgagtttgtggagcaccagatcatgcacacccgggagaacctgtatgaatatggagagagcttcatccacagcgtggccgtgtctgaggtgcagaagagccaggtgggcggcaagagatttgagtgcaaggactgtggggagaccttcaacaagtctgctgccctggccgagcacaggaagatccacgcccggggctacctggtggagtgcaagaaccaggagtgtgaggaggccttcatgcccagccccaccttcagcgagctgcagaagatctacggcaaggacaagttctatgagtgccgggtgtgcaaggagaccttcctgcacagcagcgccctgattgagcaccagaagatccactttggagatgacaaggacaatgaaagagagcacgagcgggagcgggagcgggagcggggggagaccttccggcccagccctgccctgaatgagttccagaagatgtatggcaaggagaagatgtatgagtgcaaggtgtgtggggagaccttcctgcacagcagcagcctgaaggagcaccagaagatccacacccggggcaacccctttgagaacaagggcaaggtgtgtgaggagaccttcatccctggccagagcctgaagaggcggcagaagacctacaacaaggagaagctgtgtgacttcacagatggaagagatgccttcatgcagagcagcgagctgtctgagcaccagaagatccacagcaggaagaacctgtttgagggccggggctatgagaagagcgtcatccacagcggccccttcacagagagccagaagagccacaccatcacccggcccctggagagtgatgaagatgagaaggccttcaccatcagcagcaacccctatgagaaccagaagatccccaccaaggaaaatgtgtatgaggccaagagctatgaaagaagtgtcatccacagcctggcctctgtggaggcccagaagagccacagcgtggccggccccagcaagcccaaggtgatggccgagagcaccatccagagctttgatgccatcaaccaccagagggtgcgggccggcggcaacaccagcgagggccgggagtacagccgcagcgtcatccacagcctggtggccagcaagcccccaagaagccacaatggaaatgagctggtggagagcaatgagaagggggagagcagcatctacatcagtgacctgaatgacaagaggcagaagatcccagcccgggagaacccctgtgagggcggcagcaagaacagaaattatgaggacagcgtcatccagagcgtcttccgggccaagccccagaagtctgtgcctggagagggcagcggggagttcaagaaggatggagagttctctgtgcccagcagcaatgtgcgggagtaccagaaggcccgggccaagaagaagtacatcgagcacaggagcaatgagaccagcgtcatccacagcctgccctttggagagcagaccttccggccccggggcatgctgtatgagtgccaggagtgtggggagtgctttgcccacagcagtgacctgacagagcaccagaagatccatgaccgggagaagcccagcggcagcaggaactatgagtggagcgtcatccgcagcctggcccccacagacccccagaccagctatgcccaggagcagtatgccaaggagcaggccaggaacaagtgcaaggacttccggcagttctttgccaccagcgaggacctgaacaccaaccagaagatctatgaccaggagaagagccatggagaggagagccagggcgagaacacagatggagaggagacccacagcgaggagacccacggccaggagaccattgaagatcctgtgatccagggcagtgacatggaggacccccagaaggatgatcctgatgacaagatctatgaatgtgaggactgtggcctgggctttgtggacctgacagacctgacagaccaccagaaggtgcacagcaggaagtgcctggtggacagccgggagtacacccacagcgtcatccacacccacagcatcagcgagtaccagagggactacaccggggagcagctgtatgagtgccccaagtgtggggagagcttcatccacagcagcttcctgtttgagcaccagagaattcatgagcaggaccagctgtacagcatgaagggctgtgatgatggcttcatcgccctgctgcccatgaagcccaggaggaacagagctgctgagaggaacccagccctggccggcagcgccatccgctgcctgctgtgtggccagggcttcatccacagcagcgccctgaatgagcacatgaggctgcacagagaagatgacctgctggagcagagccagatggccgaggaggccatcatccctggcctggccctgacagagttccagaggagccagacagaggagcggctgtttgaatgtgctgtgtgtggggagagctttgtgaacccagctgagctggccgaccacgtgacagtgcacaagaatgagccctatgaatatggcagcagctacacccacaccagcttcctgacagagcccctgaagggggccatccccttctatgagtgcaaggactgtgggaagagcttcatccacagcacagtgctgaccaagcacaaggagctgcacctggaggaggaggaggaggatgaagctgctgctgctgctgctgctgctgcccaggaggtggaggccaacgtgcacgtgccccaggtggtgctgcgcatccagggcctgaatgtggaggccgctgagcctgaggtggaggccgctgagcctgaggtggaggccgctgagcctgaggtggaggccgctgagcccaatggagaggccgagggcccagatggagaggccgctgagcccatcggggaggccggccagcccaacggggaggccgagcagcccaatggagatgctgatgagccagatggagctggcattgaagatcctgaggagagagctgaggagcctgagggcaaggccgaggagccagaaggagatgctgatgagccagatggagtgggcatcgaggaccctgaggagggggaggaccaggagatccaggtggaggagccctactatgactgccatgaatgtacagagaccttcaccagcagcacagccttcagcgagcacctgaagacccacgcctccatgatcatctttgagcccgccaatgcctttggagaatgttctggctacatcgagcgggccagcaccagcactggaggagccaaccaggctgatgagaagtacttcaagtgtgatgtgtgtggccagctgttcaatgaccggctgagcctggcccggcaccagaacacccacactggatag

SEQ ID NO: 59604 - DNA, 4767 bp, Artificial Sequence
  derived and/or modified sequence
atgctgccccccaagcacctgagcgccaccaagcccaagaagagctgggcgccaaacctgtacgaacttgactccgatctcaccaaggaaccagacgtgatcatcggcgagggtcctacagactcagagtttttccaccagcgattccgtaacctcatttacgtcgagttcgttggtcccaggaagaccttaatcaagctaagaaacctgtgcctagactggctgcagcccgaaacaaggacaaaggaggaaatcatagagctgctggtgctcgaacagtaccttaccatcatccccgagaaactgaagccttgggtgcgcgccaaaaagccggaaaactgcgagaagctggtgactctcctggaaaattacaaagaaatgtatcaacccgaagacgataacaattcggacgtgaccagcgatgatgacatgaccagaaatcgccgcgagtcttccccccctcattccgttcactcattctctgatagagactgggaccgcagaggtcgttctagggacatggaaccacgcgatcgctggagccacactaggaatccacggagccggatgcctccacgggatctgtctttacctgtggttgccaagacctccttcgagatggatcgcgaagacgacagagattctagggcatatgagtccagatcccaggatgctgagagttatcagaacgtggttgatctggccgaggacagaaaacctcataatactatccaggacaatatggagaattacagaaagttgctcagtctggtccagctggccgaggacgatggccatagtcatatgacccagggccattctagcagatcgaagcgtagcgcgtacccaagcacgtctcgtggactgaagaccatgcccgaggccaaaaagtcaactcatcgtagaggaatctgtgaggatgagtcatcccacggggtaatcatggagaagtttatcaaagacgtctcccgatccagcaagtccggacgcgcgagagaaagctctgaccgttctcagcgattcccgagaatgtctgacgacaattggaaggatatttccctcaataagagggaatccgtgatacagcaacgtgtttatgaaggtaacgcttttaggggcgggtttcggttcaactctacgttagtaagccggaagcgggtcttagaacgcaaacgcaggtatcattttgatactgacggaaaggggagcattcacgatcagaaagggtgtcctaggaaaaagccattcgagtgcgggagcgaaatgcgcaaggccatgtcagtatcctctttgtcaagtctgagctccccaagctttacagaaagtcagcccattgatttcggagcgatgccttacgtgtgtgacgagtgcggcagatctttctctgtcatatcagagtttgttgagcatcagattatgcacacccgagagaacttgtacgagtacggtgaaagctttattcatagcgtggcagtgtccgaagtgcagaagtcccaggtgggcgggaagcgatttgagtgcaaggactgtggagagacttttaataaaagtgccgccctggccgagcatagaaagatccacgcacgtggatatcttgtagagtgtaagaaccaggagtgcgaggaggccttcatgccttcacctacattcagcgagctccagaagatctatggtaaggataaattttatgagtgtagggtctgcaaggagacgtttttgcactcctcagccctgattgaacaccagaagatacacttcggtgatgacaaggacaatgaaagggagcatgaacgggaacgagagcgggagaggggcgagactttcaggccaagtccagcactgaacgagttccagaagatgtatgggaaagagaagatgtatgagtgtaaggtgtgtggggagaccttcctgcatagcagcagcttaaaggagcatcagaaaatacatacacgagggaacccattcgaaaataaagggaaggtctgtgaggagacattcatacctggtcagagcctgaagagaaggcagaagacgtacaacaaggagaagctgtgtgactttacagacgggagggacgcatttatgcagtctagcgagctgtctgaacatcagaagatccactctaggaaaaatctcttcgaggggcgcggatatgagaaaagtgtcattcattcaggaccattcactgaaagtcaaaagagccacaccataacacgccctctggagagcgacgaggacgaaaaagccttcacaatctctagtaacccatacgagaaccagaagatacccacaaaggagaatgtatatgaagcaaaatcctatgagaggtctgtcattcactcactagctagcgtggaggcacagaagtctcactctgtggccggaccctccaaacccaaggttatggctgagagtacgatccagagcttcgatgctattaaccaccaacgggtccgcgccgggggcaacaccagcgaaggtcgcgagtatagcaggtccgtcattcactccctggtggccagtaaaccccccaggagccataacggcaatgagctggtggagtcaaacgaaaagggggaatccagcatctatatatccgatttaaacgacaaaaggcagaaaatccccgctcgggaaaacccctgcgaggggggctcaaaaaacagaaactacgaagacagtgtgatacaatcagtgtttcgggctaaaccccaaaaaagcgttcctggcgaagggagcggggagttcaagaaagacggggaatttagcgtcccctcatccaacgtgagagagtaccagaaagctcgcgctaagaagaaatacatcgagcatcggagtaatgagacttcagtgatccatagcctgccatttggagagcagacatttaggcctaggggcatgttgtatgagtgtcaggaatgtggggagtgttttgctcattcttcagacctgacagagcatcaaaaaatccacgatcgcgagaagccatctggaagcagaaactatgaatggtccgtgatccggtccctggcccctacggatcctcaaaccagctacgctcaggagcaatatgctaaggaacaggctcggaacaagtgcaaggacttccggcagttcttcgctacaagcgaagatctaaacactaaccagaaaatctatgatcaggagaaaagccatggagaagagtcccagggagagaacactgacggggaggagactcacagtgaagaaacgcacggacaggagaccatcgaagacccagtcatccagggcagtgacatggaagatccacagaaagacgatcctgacgacaaaatctatgagtgcgaggattgtggactgggatttgtggacctgaccgacctgaccgatcaccagaaggtgcatagtcgaaagtgcctggtggactcacgggagtacacacattcagttattcacacgcacagcatctcagagtatcagcgtgattatacaggcgaacaattgtacgagtgtcctaagtgcggggagtccttcatccattctagttttttattcgaacaccagcggatccacgaacaggaccagctgtattcgatgaaagggtgcgacgatggctttatcgccctgttgccaatgaagcctcgccgcaaccgcgctgccgagaggaaccccgctctcgccggctctgcaattcgatgcctgttgtgtggccaaggattcattcatagcagtgctttaaatgaacacatgcggctgcaccgggaagacgatttgttggagcagtcacaaatggcggaagaggccatcatcccagggttagcactaaccgagtttcagcgcagccagaccgaggagcgccttttcgaatgtgctgtgtgcggcgagtcgttcgtcaaccccgctgagttagccgatcacgtgacggtacataaaaatgagccctatgaatacggtagcagctacactcacacctcgtttcttacagagccgctcaagggtgctatccccttttacgagtgtaaggactgcggtaaatccttcatccactctacggtgttgacaaaacataaggagctgcacctggaggaggaggaggaggatgaggctgcagctgctgccgctgcagcagctcaagaggtagaagcaaacgtgcacgtccctcaggttgttctgaggatccaggggcttaatgtcgaggctgcggaaccagaagtggaggcagctgagccagaagtcgaagcagcggaaccggaagtggaggccgccgagcccaacggcgaagctgaaggcccagatggagaggccgccgagcctattggcgaagctggccagcctaatggagaagcagagcaacctaacggagatgcggatgaacccgacggcgccgggattgaggatccagaggagagggcagaagagcccgagggcaaggccgaggaaccggagggcgacgcagacgaaccggacggtgtaggaatagaggacccagaagagggcgaagatcaagagatccaggtggaggagccttattacgactgtcacgagtgtaccgaaacttttaccagcagcacagctttttctgaacacctgaagacacatgcttcaatgattattttcgaacctgccaacgcctttggagaatgcagcgggtatatcgagcgggcctccacgtcgactggcggggcaaatcaggctgatgagaagtatttcaaatgtgatgtgtgtggccagctctttaacgacaggctgtccctggctcgccatcagaatacacacactggctag

SEQ ID NO: 59605 - DNA, 4767 bp, Artificial Sequence
  derived and/or modified sequence
atgctgccccccaagcacctgagcgccaccaagcccaagaagagctgggctcctaacctttacgagcttgacagtgacttgacgaaagagccagatgtaattattggtgaaggacccactgacagcgaattctttcatcagcggtttcgtaacctgatttacgtcgagtttgtggggccacgcaaaaccctgatcaagctcaggaacttgtgtcttgactggctccagcctgagacgcggacgaaggaggaaataatcgagctgctcgtgctcgagcagtacctgactatcattcctgagaaactcaagccttgggtcagagcaaaaaaaccagagaactgtgagaagctggtgactcttctggagaattacaaagaaatgtaccagccagaggacgataacaatagcgatgtgacctcagatgatgacatgacgcgcaaccggagagaatcttccccacctcatagcgtgcactcatttagcgaccgcgattgggatcgtcgagggcgatccagggatatggagcctcgggatcgctggtcccatacacgcaatccaagatcccgcatgcctcctcgagacctgtctcttcctgtggtcgccaaaacatcatttgaaatggatcgcgaggacgatagggattcgagggcttacgagtccaggagtcaggatgcagagtcttatcagaacgtcgtcgatctcgcggaagaccggaagccacataacactatccaagacaacatggaaaattatagaaaactgctttctctggttcagctggcggaggatgacggccacagccacatgacccagggacactcctcccgcagcaaacgcagcgcttatccatccacatcgagaggcttaaaaaccatgcctgaggctaaaaagagcacccaccgcagaggtatctgcgaagacgaaagtagtcacggagtcattatggaaaaattcattaaagatgtgtctcgctcatcaaagagtggaagggctagagagtctagcgaccggtctcagcgcttccccaggatgagcgacgacaactggaaagatatttccttaaacaaaagagagtccgtgatacagcagcgggtgtatgaaggaaatgcttttcgaggaggattcagattcaattccacattggtgagtcgcaagcgggtgctggagaggaaacgacgctatcattttgacactgatgggaagggaagcatccacgaccaaaagggctgccctaggaagaagcctttcgagtgtggcagtgagatgagaaaggcgatgagtgtttcttccctcagtagcttgagcagcccctcctttacggaatcacaacctatcgactttggggctatgccatacgtgtgcgacgagtgcggacgcagtttttccgtcatctccgaattcgttgaacatcaaattatgcacacgcgggagaacctctacgagtatggggaaagctttatacactccgtggccgtctctgaagtgcaaaagtcccaggtcggaggcaaacgtttcgaatgcaaagactgcggcgagacattcaataagtcagcagcactggccgaacacaggaaaatacatgctcggggatatctcgtagagtgcaaaaatcaagagtgcgaggaggcgttcatgccttccccaacgttctcggagctccagaagatctatggaaaggacaagttctacgagtgcagagtttgcaaggagaccttcctgcattcttcagcattgatcgagcaccagaagattcactttggagacgacaaagacaacgaaagagaacacgaaagggagcgcgaaagggaaagaggggagacctttcggcctagtcccgctctgaatgaattccagaagatgtacggtaaagagaaaatgtacgaatgcaaggtgtgtggagagacctttctgcatagtagctctctgaaagaacaccaaaagatccacaccagaggaaatcccttcgagaataaaggtaaggtgtgcgaagagaccttcatcccaggacagtccctgaagcgtaggcagaaaacctataataaagagaaactctgtgactttactgacgggagagatgcctttatgcagtctagtgagctaagtgagcaccaaaaaattcactcaaggaagaatctgtttgagggaagggggtacgagaagagcgtcatccactccgggcctttcacagaaagccagaagagtcacaccatcacccgacctctggaatctgacgaagacgagaaggctttcacaatatcaagcaacccctacgaaaatcaaaagatccccacaaaggaaaacgtgtatgaggcaaagtcctatgaaagaagcgtgatacactctctcgccagtgttgaggcccagaagagtcactcagtagccggtcccagtaaaccaaaagtcatggcagagtccaccattcagtctttcgatgccattaaccaccaacgcgtgcgggctggaggcaatactagtgaaggacgggagtatagccggtctgtcattcatagcctggtggcctccaaacctccgagaagccacaacggcaatgaactggtcgaaagcaatgagaagggggaatcaagtatctacatctcagacttgaacgataaaaggcagaagatccccgctcgagaaaacccctgtgagggcggaagcaagaatcgtaactatgaggattcggttatacaatccgtgtttcgagccaaaccacagaaatccgtgccgggggaaggatcaggcgaattcaagaaagacggcgaattctccgtgccttcctcaaatgtgcgggaataccaaaaagcccgcgccaagaagaagtatatagagcatcgttccaatgagacctcagtgatccatagcctcccttttggggaacaaactttccgcccccgggggatgttgtacgaatgtcaggagtgtggtgaatgctttgcccactcaagcgatctcacagaacatcagaagatccatgaccgcgaaaaaccttccggatcccgtaattacgaatggtccgtgatcagatcactggcacctactgatccgcaaaccagctacgcacaggagcaatacgcaaaggagcaagccagaaacaaatgtaaggactttcggcagtttttcgcgactagcgaagacctcaacacgaatcaaaagatctacgatcaggagaagtcacacggcgaagagtcccaaggtgaaaatacagacggagaggaaacacatagcgaagagacccacggccaggaaactattgaagatccggtgatacaggggtccgatatggaggaccctcaaaaggacgatccagatgacaaaatctacgagtgcgaagactgtggcctggggtttgtcgaccttaccgatttaacggatcatcagaaggtgcattctcgaaaatgtctcgttgactcccgtgagtacacccactcagtaattcacacccactcgatatccgagtatcaacgcgactacaccggagagcaactctacgaatgcccaaagtgcggcgagtcctttattcattcatcatttctgttcgagcatcagcggatccacgaacaggaccagctgtattctatgaagggatgtgatgacgggttcatcgcactcttacccatgaagccccgaagaaacagagccgccgaacgtaatcccgcgctcgctggcagcgcaatcagatgcctattgtgtggacagggcttcatacattctagcgccttaaacgaacacatgaggcttcaccgcgaggatgatctcctcgagcagtcccaaatggccgaagaggcaatcattccagggctcgctctgactgaatttcagagaagccagacagaagagcgcctttttgagtgtgcggtgtgcggcgagtctttcgtaaatcccgcggaactggcggatcacgtgactgtgcacaagaacgaaccctacgagtacggctcttcttacacacatacttcgttcctgactgagcccctcaagggcgccattccattttacgaatgtaaggattgtgggaagtcatttattcactccactgtactcacaaagcacaaagagctgcatttggaagaggaagaggaagacgaagccgccgcggccgccgcagccgcagctcaggaagtggaagctaacgttcacgtacctcaggtggtccttaggatccagggtctcaacgtagaagcagcggaaccagaagtggaggccgctgagccagaagtcgaggccgccgagcctgaggtggaagcagcagagccgaacggtgaagccgagggccctgacggtgaggccgccgagcctattggtgaggcaggtcagcctaatggggaagccgaacagcctaatggtgatgccgatgaaccagatggggcaggaatcgaagatcccgaagaaagagccgaggagccagaaggaaaggccgaggaacccgaaggcgatgctgatgagccggatggagtcggcatagaggaccccgaggaaggagaagatcaggaaattcaagtggaggagccctattacgactgccatgagtgtacagagacgttcacttcttccacagcattctctgagcatctgaagacccacgccagtatgataatcttcgaacctgcaaatgccttcggggagtgttcagggtacattgagcgagccagtactagcactggcggagccaaccaggctgatgagaaatatttcaagtgcgacgtgtgtggccagctcttcaacgacagactgtcgcttgctcgtcaccagaacactcacacagggtag

SEQ ID NO: 59606 - DNA, 111 bp, Artificial Sequence
  derived and/or modified sequence
atgctgccccccaagcacctgagcgccaccaagcccaagaagagctgggcaccaaatctttacgagctcgacagtgatctaactaaagagccggacgtgatcattggctag

SEQ ID NO: 59607 - DNA, 4767 bp, Artificial Sequence
  derived and/or modified sequence
atgctgccccccaagcacctgagcgccaccaagcccaagaagagctgggccccgaatctttacgagctggattctgatttgaccaaggaaccggacgtgatcatcggcgaggggcccacggactcagagtttttccatcagcgtttccgcaacctgatctacgtagaattcgtgggcccccgtaaaacattgattaaacttcggaatctgtgcctggattggcttcagcccgagacccgcaccaaagaggagatcattgaactgctggtgctggagcagtatctgacgatcatacccgaaaaattgaagccttgggtgagagctaagaaacccgagaactgtgagaaactggtcactttgctagagaattataaggaaatgtatcaaccagaagatgacaacaacagtgacgttaccagtgatgatgacatgacccgcaacagacgagaatctagtcctcctcactccgtgcattcgttttccgatagggactgggaccggagagggagaagcagagatatggaaccccgcgacaggtggtcccatacaagaaaccctaggagtcggatgccccccagggatctctccctccccgtagtggcaaagacatccttcgagatggacagagaagatgaccgcgattcacgtgcgtacgagtccaggtcgcaggacgctgagtcctatcaaaacgtggtcgacctcgctgaagatagaaaacctcacaataccatccaggataacatggagaactaccggaaactcctgtctttggtgcaactcgcggaagacgacgggcactcccacatgactcagggacacagctcccgttctaaacgcagcgcttatccgagcacctctaggggcctaaaaacaatgccagaggccaagaaatctacgcacagaagaggaatttgcgaagatgagagcagccatggcgtgattatggaaaagtttataaaggacgtgtctaggagctctaaatccggtcgggcccgcgagtcatctgacaggtcccaaaggtttccccggatgtctgacgataattggaaggatatttcccttaacaagagggaatctgtgattcagcagcgagtgtacgaggggaacgcttttcgcgggggctttcggttcaactccacactggtgtctcgcaaaagagtgctagagagaaagaggcggtatcattttgacaccgatggcaaggggagtattcacgatcagaagggttgtcctagaaagaagcccttcgagtgcgggtcggagatgcggaaagccatgagcgtctccagcctaagtagcctgtcaagtccgtctttcactgagtcacagcctattgattttggcgccatgccatacgtttgcgacgaatgtggacgatctttctcagtgataagcgaattcgtcgaacaccagattatgcacacgagagagaacttgtatgagtacggagagtcgttcatacattcagtggccgtgtccgaggtacagaagtcccaagtaggaggcaaacggttcgaatgcaaagactgtggggagacattcaacaagtctgccgcactggccgagcatcggaaaatccatgctcggggttacctcgtggagtgcaagaatcaagagtgtgaggaagcgtttatgccaagccctacattttccgaactgcagaagatatacggcaaggacaagttttacgagtgtagagtctgtaaagagacattcctgcactcatcggctctcattgaacatcaaaaaatccacttcggtgatgacaaggataacgaacgggagcacgagagagagcgggaacgagaacgcggtgaaacatttaggcccagcccagcgctgaacgagttccagaaaatgtatggaaaagagaagatgtatgagtgcaaggtctgtggtgagacattcctgcattcctcatccctgaaggagcaccagaaaattcatacacgaggaaatcccttcgaaaataaagggaaagtgtgtgaggaaacctttattcctggccagagccttaagagaaggcagaagacttacaacaaggagaagctgtgcgactttaccgacggtcgagatgcgttcatgcagtctagcgaactcagtgaacatcagaaaatccatagcaggaaaaacctgttcgaaggcaggggatatgagaagtcagtcatccattccggccctttcacagagtcgcaaaagtcccacaccatcaccaggccactagagtctgacgaggatgagaaagcgttcaccatctccagcaacccctatgaaaaccagaaaatacccaccaaggaaaatgtgtacgaggcaaagagctatgaaaggtccgtgatacattcactggcctcagttgaagcacaaaaaagtcatagcgttgccggaccaagtaaacccaaagtgatggctgaatcgactatccagtcttttgacgcgatcaatcaccagagagtgcgggctggtgggaatacgagcgaaggaagagagtactcccgaagcgttattcactccctcgtggcttcaaaacccccccgcagccataatggaaatgaactagttgagtctaatgagaagggagaaagcagtatatacatcagtgatctgaacgacaagagacagaagatcccagccagggaaaacccctgtgaaggaggttcaaagaaccggaattatgaagattctgtcatccagagcgtttttagggctaaaccgcaaaagagcgttcccggtgagggttctggcgagttcaagaaggacggggaattcagtgtcccttctagcaacgtacgcgaataccagaaggcgcgagctaaaaaaaaatatatcgagcatagatcgaacgaaacttcagttatacacagcctgcctttcggggaacaaaccttccggcctagagggatgctctatgaatgccaggaatgcggagagtgctttgcgcacagcagtgacctgacggagcatcagaagatccatgatcgagaaaagccttcaggaagtcgcaactacgagtggtccgttattagaagtctcgcccctaccgaccctcagaccagctacgcccaggaacaatatgcaaaagagcaggcacgcaacaaatgcaaagactttaggcaatttttcgctacctctgaagatctgaatacaaatcagaagatctacgatcaagagaagtcccatggggaggagtctcagggagagaacaccgacggggaagagactcacagtgaggagacccacggacaggagactattgaggatcctgtcatccagggatcagatatggaggacccccagaaggacgatccagatgacaaaatttacgagtgtgaagactgcggtctgggttttgtggatctgacagacctgacagatcaccagaaggtgcacagtagaaagtgtctggtcgacagccgggagtatacacactccgtcatccacacccactcaatttctgaataccagagagattacaccggggagcagttatacgagtgtcccaagtgtggcgaaagctttattcacagctcatttttatttgagcaccagcgtatacatgaacaggaccagctgtatagtatgaaggggtgtgatgacggattcatcgctctcctgccaatgaaaccacggaggaatagggcggcagaaagaaatccggctttagccggaagcgccattcggtgtctgctttgtggacagggcttcatacattcaagtgcactgaacgagcatatgagactacaccgggaggatgatctcttagagcagagccaaatggcggaggaagccatcatccctgggttggccctgactgagttccagcgttcccagaccgaggaacggctgtttgagtgcgccgtatgtggcgagtctttcgtcaaccctgccgagcttgcggaccatgtcacagttcataaaaatgaaccctatgagtatggctcctcctacacacatactagcttcctgaccgaaccgctgaagggggccataccattttacgaatgcaaagattgcgggaaaagcttcatccattccacggtgctaactaagcataaagaactccaccttgaggaagaggaagaagacgaagcagctgccgctgctgccgcggcagcccaggaggtggaggccaatgttcatgtgccacaggtcgttctcaggatccagggcctgaacgtggaggccgcagagcctgaggtggaggctgccgagcccgaagtagaggctgctgaacctgaggtggaagcagctgaacctaacggcgaagctgaaggcccagacggggaggccgccgagccgattggagaggctggtcagccgaacggtgaggcggagcaacctaatggagacgctgacgagcctgatggcgcgggaatcgaggaccccgaggagcgcgcagaggagcccgaaggcaaagctgaggagccagagggtgacgccgatgagcccgatggtgtaggtattgaggatcccgaggagggggaggatcaagagatccaagtcgaggaaccctactacgactgccacgagtgtaccgaaacatttacatcatcaacagcattttctgaacatctcaagacacacgccagcatgattattttcgagcctgctaacgcattcggggaatgcagtggatacatagagagagcctcaacatctactgggggggcaaaccaagcagacgagaagtacttcaagtgcgacgtgtgtggccagctgttcaatgacaggctctctctcgcccgacaccagaatacccatactggctag

SEQ ID NO: 59608 - DNA, 4389 bp, Artificial Sequence
  derived and/or modified sequence
atgtaccagcccgaggacgacaacaacagcgacgtgaccagcgacgacgatatgacgcgcaacagacgcgagtcatcacctccacacagcgtgcacagtttctctgacagagactgggatcgccgcggtcgatcccgggatatggagccgcgcgaccgttggagccatacgcggaacccgcgctcgcgaatgccacctagggacctgtctttgcccgtggtcgccaaaacctccttcgagatggatagggaggacgatcgagactcccgagcctacgaaagtaggagccaggacgctgaaagttatcagaatgtggtggacctcgcagaagaccgaaagcctcataatacaatccaagataacatggagaactacagaaagctgctcagtctggttcaactggcagaagacgacggacatagccacatgactcaggggcactctagtagaagtaaaaggtccgcatacccatccacctcccgcggcctgaaaacaatgccggaggccaagaagagcactcacaggagaggtatctgtgaggatgaatcaagccatggcgtgataatggaaaaatttataaaagacgtatcccgcagttctaaatccggaagagctcgtgagagttccgatcgcagtcagcggtttccaagaatgtctgacgataattggaaggatatatctttgaataagcgcgaatctgtcatccagcagagggtttatgagggaaatgcattcaggggcggtttccggtttaatagcacattagtgtcacgaaagcgcgtgctggagcgaaagcggcggtaccacttcgacaccgacgggaaaggctccattcacgaccagaaaggttgcccccggaagaagccgttcgagtgcggtagtgaaatgaggaaagctatgagtgtctcatcgctttctagcctgtcgtctccttcattcacggaatcccagcccatcgatttcggggctatgccctacgtgtgcgatgagtgtggcaggtctttttctgtgattagcgaatttgtggaacaccagattatgcacacgcgagaaaacctgtatgaatacggcgaatctttcatacattcagtggcagtttcagaggtccaaaaatctcaggtgggtgggaaaagatttgaatgcaaagattgcggtgagacatttaacaagtccgcagctcttgccgaacacagaaaaattcacgcccgaggctacttagtcgagtgtaaaaaccaggagtgcgaagaagccttcatgccttcacctacattcagcgagcttcagaagatttacggtaaagataagttttacgagtgcagggtgtgcaaagagacgttccttcacagtagcgccctgattgaacatcagaagatccactttggtgacgataaggataatgaacgggaacatgaaagagagcgagagagagagcgcggggaaacctttcggcctagtcctgccttgaatgagtttcaaaaaatgtatggaaaggagaaaatgtacgaatgtaaggtttgcggtgaaaccttcctgcacagttctagcttgaaggagcatcaaaaaatccatacccgcggtaaccccttcgagaataagggaaaggtttgcgaggaaactttcatccccggtcaatcactcaaaaggcgccagaaaacatacaataaagaaaagctctgcgactttactgatggccgagacgcgttcatgcagagttctgagttatccgagcatcagaaaatccattcgaggaaaaatctgttcgaggggaggggctacgagaagagcgttatccactccggtccttttactgagagccagaagagtcatacaatcaccagacctctggaaagcgatgaggatgagaaagcgtttaccatttcttccaacccgtacgagaatcagaagatacccacaaaagaaaatgtgtatgaggccaaatcctatgagcggagcgtgatccatagcctggcatctgtggaagcgcagaaaagccacagtgtggctggtccctctaaacctaaggtcatggcggagtccacaatacagtctttcgatgccattaatcaccagagggtccgggccggaggtaacacctccgagggtcgagagtatagccgctcggtgatccatagcctcgtggcatctaaacctcccagaagccacaacggcaacgaactagtagaaagcaacgagaaaggagaatccagcatctacatctccgatctgaatgataaaaggcagaagatccccgcccgcgagaacccttgtgagggaggttcaaaaaatagaaattatgaggattccgttatccagtcagtatttagggccaagccacagaagagtgtacccggtgagggttccggtgaatttaagaaggatggcgagtttagcgtaccaagttcaaatgtcagggaatatcagaaggcccgtgccaaaaaaaaatatatcgaacacagaagcaacgagacaagcgtgattcacagtctgccattcggcgaacagaccttccgcccccgtggaatgttgtatgagtgtcaagaatgcggcgagtgtttcgctcactctagtgatttaactgaacatcagaagatccacgaccgcgagaaaccttccggcagtagaaattacgaatggagcgtgatacgcagcctggctccaacagatccccagacttcttacgcgcaagagcagtatgcaaaggagcaagcgcggaacaagtgtaaggactttcgccaattttttgcgacatccgaggacctgaatacaaaccagaagatatacgaccaggaaaagagccacggagaggagtcccagggtgaaaatacggatggggaggagacacactccgaagagacccatggccaggaaacaattgaagatccggtgatccaaggatccgacatggaagatccccaaaaggacgatccagatgataaaatttatgaatgcgaagactgcggcctggggtttgtggatctcaccgatctgaccgatcaccagaaggtgcactcaagaaaatgcctggtcgatagccgagaatacacccattcggtcatccatacacactccatcagcgaatatcagcgggattacactggagagcagctctacgagtgccctaagtgtggcgaaagttttatccatagtagtttcctgtttgagcatcaaagaatccatgagcaggaccagctttatagtatgaaaggttgtgacgatgggtttattgccctgctgccgatgaaacctcgcaggaatagggcagccgagcgaaacccagcactggcagggagcgccatcagatgcctcctgtgtggccaagggttcattcacagcagcgcactgaacgaacatatgcggttgcaccgagaggatgacctacttgaacaatcacagatggcagaggaggccataatacctggcctggccctgaccgagttccagaggagccagacagaggagcgcctgtttgagtgcgccgtgtgcggggagtccttcgttaatcctgccgaattagcggaccacgtcaccgtgcataaaaatgaaccttacgaatacggaagctcctatacgcacacaagtttcctcactgagcccctcaagggcgcaattccgttttacgaatgcaaggattgcggtaagtcattcattcacagcaccgtcttaactaagcataaggagttacatctggaagaggaggaggaagatgaagccgcagccgccgctgctgctgccgcccaggaggtcgaagccaacgtccacgtgccccaagtggtgctgcgcatccaaggcctcaatgtcgaggcagccgagccagaagtcgaggcagctgagcccgaagtggaagccgctgagccagaggtggaggccgctgaacccaacggcgaggccgagggccctgatggcgaggctgccgagccgattggcgaagcaggccagccgaatggcgaggccgagcagcccaacggggacgctgacgagccagatggggcgggcatcgaggacccggaggaacgcgccgaggagcctgaaggcaaggcagaagaaccagagggtgatgcagatgaaccggatggcgtaggaatcgaagatcctgaagagggggaggaccaggagatccaggttgaggagccttactacgattgtcatgaatgcaccgaaacgttcacctcctcaaccgcattcagcgagcatttgaaaacgcatgcaagtatgataatattcgagccagcaaatgctttcggcgagtgctccggatacatcgagagagcttccacatccaccggaggggcaaaccaggctgacgaaaaatatttcaaatgcgatgtgtgtgggcagttattcaatgataggctatcattggcgcgccaccaaaacacccacaccggctag

SEQ ID NO: 59609 - DNA, 4767 bp, Artificial Sequence
  derived and/or modified sequence
atgctgccccccaagcacctgagcgccaccaagcccaagaagagctgggctccaaacctatatgagctcgatagcgacctgacgaaggaaccagatgtgatcattggagagggtcccactgatagtgagttttttcaccaaaggtttagaaatctgatctatgtggagttcgtgggaccccgcaaaactctcataaaattgcggaatctgtgtttggattggcttcagcccgagactcgcacaaaggaggaaatcatagagctgctggtgctggagcaatatcttacaattatcccggaaaagttgaaaccttgggtgcgtgcgaaaaagccagaaaactgtgagaaactggtgaccctattggaaaattacaaggagatgtatcagccagaagacgacaataatagcgacgtgacctctgatgatgatatgacccgcaacagacgagagtcttccccaccacatagcgtccactccttttcagatcgggattgggaccggagaggtcggtcgagggatatggagcctcgggatagatggagccatacgaggaatccccgaagcagaatgcctcctagagatctgagcctgccggttgtggcgaagaccagctttgaaatggatcgggaagatgaccgggatagcagggcctacgaatctcgaagtcaggatgctgaatcctaccagaacgtggtcgacctcgctgaggatagaaagccacacaatactattcaggacaatatggaaaattataggaagttgctgtctctagtgcaactcgcagaagatgacgggcactcccacatgacccagggtcattcatccaggtcgaaacgctcagcttacccttcgacaagccgtggccttaagaccatgccagaggctaaaaagtccacccacaggcgaggaatttgcgaggatgaatcgtctcacggcgtgatcatggagaagttcattaaagacgtatctagatccagtaagagcgggcgcgctagggagagcagtgacagatctcaacgctttccccgtatgagcgatgataactggaaagatatcagtttaaataagcgtgagagcgtgattcagcagagagtatatgaaggtaacgcttttcggggcgggtttaggttcaattccaccctggtgagcagaaagagggtcctggaacggaaacggcggtaccatttcgatacagatgggaagggatcaattcatgaccaaaaaggctgcccacggaagaagccctttgagtgtggcagcgaaatgcggaaagctatgagtgtgagctctctctcttctttgagctctccaagtttcacagaatcccagcccatcgactttggcgctatgccgtacgtgtgcgatgagtgcgggcggagcttcagcgttatttctgaattcgtcgagcaccagattatgcatactcgggagaatttgtatgagtacggagaatcattcatccatagcgtggctgtatctgaagtgcaaaagtcccaggttggcgggaaaaggtttgaatgcaaagactgtggcgaaacgttcaacaaaagcgccgccctggctgagcacaggaaaattcacgccagaggatatctggtggagtgcaaaaaccaggagtgtgaggaggccttcatgcccagccctaccttctctgaactgcagaaaatctacggcaaggacaagttttacgagtgcagagtgtgcaaggagacctttcttcatagtagtgccctgattgaacatcaaaagattcacttcggcgacgataaagacaacgagcgggaacatgaacgtgagcgcgagcgtgagagaggtgagaccttccggccgtctcctgcactgaatgaatttcagaagatgtacgggaaggaaaagatgtatgagtgcaaagtgtgtggtgaaactttccttcatagctcctcccttaaggagcaccagaaaatccacacacgaggaaacccctttgagaataagggaaaggtttgcgaggaaacctttatccctggacaatctttgaaacggaggcagaaaacctacaataaggaaaaactttgcgatttcaccgatggcagagatgcattcatgcagtcttctgaactgtctgagcaccagaagatccacagcagaaagaacctcttcgagggccggggatacgagaagagcgttatccactcaggcccctttaccgagtcacagaagtcccatactataacacggcccctagagtctgacgaggacgaaaaagctttcactatttcctccaatccttacgagaatcaaaaaattcctacgaaagagaacgtgtatgaggcaaaatcttacgagcggtcagtaatccactctctggcaagtgtggaggcacagaaatctcacagcgttgccggccccagcaagcccaaggtgatggcggagagtactattcagtcttttgatgccatcaatcaccagcgggtcagagctggaggtaatacatcagaaggtagggaatattctcgaagcgtaatccattccctggtggcctccaaaccgccacgcagtcacaacggaaatgagttagtcgaatctaatgaaaagggagagtcttctatctacatctccgacttgaacgataaacgtcaaaagatccccgctcgtgagaatccttgcgagggaggttctaaaaatagaaactacgaggacagtgtcatccagtcagtgtttcgagccaagccacagaagagcgtgcccggcgaaggcagcggagaatttaaaaaggacggcgagttctccgtacctagcagtaatgtaagagaataccagaaggctcgcgctaagaagaagtatattgagcacaggtctaatgaaacgagcgtcatccatagcctcccttttggggagcagaccttcagaccccgcggcatgctgtacgagtgtcaggagtgtggagaatgctttgcccatagcagtgacctgacagagcaccagaaaattcacgaccgcgaaaaaccttccggctccagaaattatgagtggagcgtgattcgttcactggccccaaccgatccccaaacctcctacgcacaagagcagtacgctaaggagcaggctaggaacaaatgcaaagatttcagacagttcttcgcaacctccgaggacctgaacaccaatcagaaaatttatgaccaggaaaaaagccacggagaggagtctcagggcgaaaatactgacggtgaagaaactcatagtgaagaaactcatgggcaggagaccatcgaagatcctgtcattcaggggagtgacatggaagatccccaaaaggacgaccctgacgacaagatatatgagtgcgaggattgcggacttggatttgtggatctaaccgatctgacagaccatcagaaggtgcatagccgtaagtgcctggtggattcgcgcgaatatacacacagcgtgattcatacgcacagcatcagcgagtatcagcgcgattacactggcgagcagctgtacgaatgtcctaagtgtggtgagtcctttatacattcaagcttccttttcgagcaccagagaattcacgaacaggatcagttatactctatgaagggatgtgacgatggcttcattgctctactccctatgaagcccaggcggaatagagcggccgagaggaatccagccctggcgggaagcgcaatcagatgcctgctgtgtggacaaggcttcatccatagtagtgctctgaatgagcatatgcgactccatcgtgaggacgacctgctggagcaaagtcaaatggcagaagaggccatcattcccggcttggctctcacggaattccagagatctcagaccgaggagcggttgtttgagtgtgccgtctgcggcgagtcattcgttaacccagcagaattggcagaccacgtcaccgtccacaaaaacgagccatatgaatacgggagcagctatacccatacttcgttcttgacggaaccgctgaaaggcgccattcccttttatgagtgcaaggattgcggcaagagctttatccacagcacagtcctcacaaaacataaggaattacatcttgaggaagaggaggaggacgaggctgcggccgcagcagctgcagccgctcaggaagtcgaagcaaatgtccacgttcctcaagtcgtgctgcggatacagggactcaatgtggaggccgcagaacctgaggttgaggccgccgagccggaagtggaagctgctgaacctgaggtcgaagcggcagagcctaatggcgaggctgagggtcccgacggagaggccgctgaacccattggagaagcagggcaacctaatggtgaggctgagcagccaaacggtgacgccgatgagcccgatggcgccggcatcgaggacccagaggagcgcgcagaggagcccgagggcaaggccgaagagccagagggcgacgctgacgaacctgacggcgttgggatagaggatcccgaagaaggagaggaccaagagatccaggtggaggagccatattacgactgtcacgagtgcactgaaaccttcaccagcagtaccgcattcagcgaacacttgaaaacccacgcttccatgattatcttcgaacctgccaatgccttcggcgaatgtagcgggtacatagagagagccagcacttccacaggtggcgccaatcaagcagacgaaaagtatttcaaatgcgacgtctgcggccaactcttcaatgatcggctaagcctggctcgtcatcagaacacacacacggggtag

SEQ ID NO: 59610 - DNA, 4766 bp, Artificial Sequence
  derived and/or modified sequence
atgctaccgccaaagcatctgtccgccaccaaaccaaaaaagagctgggccccaaacctgtatgagctcgattccgacttgaccaaggaaccagacgtgattataggggaaggccctactgactccgagttcttccaccagcggttccgaaacctcatctacgttgagtttgttggcccaagaaagacactcattaagctgcgaaatctctgcctcgactggctgcagccagagacaagaacaaaagaggagatcatcgaactgctagtgctcgagcagtatctgacaatcattccagagaagttgaagccatgggtgagggccaagaaaccagaaaactgcgaaaaactggtcactttgctcgaaaattataaggagatgtaccagcccgaggacgacaataattccgacgttacatccgatgatgatatgactaggaacaggcgagaatctagtcccccacacagcgttcactctttttctgatagggattgggatcgaagaggcaggagtagggatatggaaccacgagatcgctggtctcacacgcggaaccctcggagcagaatgccaccccgagatttgagcctgccggtggttgctaaaacctccttcgagatggaccgggaggacgacagagatagtagagcttacgagtcccgaagccaggacgctgaatcttaccaaaatgtggtcgatctagccgaagaccggaagccccacaatacgatacaagacaacatggagaattatcgaaaactgctcagcctggtgcagttagccgaggatgacggccattcccacatgacacagggccactcatccaggagcaaaagaagtgcttacccctcgacctcgaggggtctgaaaacaatgcctgaggcgaaaaagtcaacacacaggcgcggtatttgcgaggacgagtcgagccacggtgtgatcatggaaaagtttatcaaagacgttagccggtcgtctaagtcagggagggcccgagagtctagcgacagatcacagaggtttcccagaatgtccgacgacaactggaaggatatcagcttgaataagcgagagtctgtcattcagcagcgtgtttacgaaggaaacgcattccgcggtggttttcgttttaattctaccttggtatctcgcaaacgcgtcctggagaggaagagacggtatcacttcgatactgacggaaaaggtagcatccatgaccagaagggctgcccccgaaaaaaaccattcgaatgcgggagcgagatgagaaaggctatgtctgtgtcctccctgtcgtccctctccagtccttcatttaccgagagtcaacccattgattttggggctatgccctatgtttgcgacgaatgcgggagatctttttccgtgatctcagagttcgtggagcaccagatcatgcacacaagagagaatctctatgagtacggagagtcctttatccactccgtggccgtgtctgaggtccaaaagagccaggtgggcggaaaacggttcgaatgtaaggactgcggggaaaccttcaacaagagcgctgccttggctgaacatcgcaaaattcatgctagaggatacttagttgagtgcaagaatcaggaatgcgaagaagctttcatgcccagcccaactttttccgagctgcagaagatctacggcaaggacaagttctatgaatgccgggtctgcaaggaaacctttcttcacagttccgcccttatcgagcatcagaaaatccatttcggggacgacaaggataacgagcgcgagcacgagagggaaagggaaagagagcgaggcgagacttttcggccttcccctgcgctgaacgagttccaaaagatgtacggcaaggagaaaatgtacgaatgcaaggtatgtggggagacatttctgcattcctctagtttaaaagagcatcaaaagatacacaccaggggaaacccctttgagaacaagggaaaagtgtgcgaggaaacttttattcccggacagtccttgaaacgtcgtcagaagacgtacaataaggagaaactttgcgattttacagacggccgtgacgccttcatgcagtccagtgagctgtcagaacatcagaaaattcactcaagaaagaatctgtttgaaggcagaggttatgaaaaaagcgttatccattccgggccattcactgaatctcagaaatcccacacaatcactcgcccattggaaagtgatgaagacgagaaagccttcaccatatcaagtaatccctacgagaatcagaaaattcccactaaagaaaatgtgtatgaggccaaatcctatgagcgaagcgttattcactctctggccagcgttgaagcacagaaatcacacagcgtggccggaccgtccaagccgaaagttatggccgagtctacaattcagagctttgacgccataaatcatcaacgtgttcgggcaggcggaaacacaagcgagggaagggaatattcacgtagcgtcattcatagccttgtagctagcaaacctcccaggagccacaacggaaatgagctggtggaatctaacgagaagggagagagcagcatctatattagtgacctgaatgataaaaggcagaaaattccagcccgtgagaacccttgcgagggaggatcgaaaaacagaaactatgaggattctgtaatacaaagcgtctttagggccaagccacagaagagcgttcccggagaagggagcggtgaatttaaaaaagatggagaatttagtgtgcctagttcaaatgtgcgcgaataccaaaaagcacgggcaaagaagaaatatattgagcaccgaagcaacgagacctccgtgatccatagcctgcctttcggagagcagacctttcgtcccagaggtatgctgtatgagtgccaagaatgcggggaatgctttgctcattcttctgacctgactgagcatcaaaagatacatgatagagagaaacccagcggatcccggaactacgagtggagtgtgatccgctctctggctcctaccgacccccagacatcatatgcgcaggagcagtacgcgaaggaacaggccagaaacaagtgtaaggatttcagacagttttttgctactagtgaggacctgaatacaaatcagaaaatatacgatcaggaaaagagccatggtgaagaaagccaaggtgagaataccgatggcgaagaaactcatagcgaagagactcatgggcaagaaaccattgaggaccctgtcattcagggatccgacatggaggatccgcagaaagatgatcctgacgataagatatacgaatgcgaagactgtggacttggcttcgtggacctgaccgacctcactgatcatcaaaaggtccattcccgtaagtgcctcgtcgacagtagagagtacacccattctgtgatacacacccattcaattagcgaatatcaacgggattatacaggcgagcagctctatgagtgccccaagtgtggcgagtcttttattcactcgagttttctattcgagcatcagcgcatccatgagcaggatcagctgtactcaatgaagggttgtgatgatggctttatagctctgcttcccatgaagccacggcgaaaccgtgcggcagagcgtaatccagccctggcaggctcggccatccggtgcctgctgtgtggccagggttttatccattcttctgcactgaatgagcacatgagactccaccgtgaggacgacctacttgaacagagccagatggccgaagaggccattattccgggactggctctgactgagttccaacgaagccagaccgaagaacgtctcttcgagtgtgctgtctgtggagagagcttcgttaaccccgctgagctggcagatcatgtcaccgtccacaaaaatgagccctacgagtacggcagctcatacactcacacaagttttctgaccgaaccactcaaaggagcaattcccttttacgagtgtaaggactgtggaaagagcttcatacatagcactgtcctgaccaaacacaaggaactccatctcgaggaggaagaggaagacgaggcagctgcggcagccgctgcagctgcccaggaagtcgaagcaaatgtgcatgtgccccaggtggtgttgaggatccagggcttgaacgtcgaagcagccgaaccagaggtagaggccgctgaacccgaagtcgaagcagccgaacccgaggtggaagctgctgagcccaacggggaggctgaaggacctgatggagaggctgcagaacccatcggagaggctggacagccgaacggtgaggcggaacagccgaacggtgatgcggacgaaccagacggtgccggtatcgaagatccggaagagcgtgctgaagagccagaagggaaggcagaagaacctgaaggcgatgctgatgaacctgatggagtgggcattgaagaccccgaagaaggcgaggaccaggagatacaagtggaggagccatactacgattgtcatgagtgtacagagacgtttacctcttcaacagccttttcggagcatctcaaaacccatgcatctatgattatcttcgagccagccaatgccttcggtgagtgttcaggctatattgaacgagctagcacctccacaggcggtgccaaccaggccgacgaaaaatacttcaagtgtgacgtctgcgggcagctctttaacgatcggttatccctcgccagacaccagaatacgcacacaggtta

SEQ ID NO: 59611 - DNA, 8683 bp, Artificial Sequence
  derived and/or modified sequence
gcagaagtctgggcagctgcgggaggagaggtttgggaggcgcgggagatgtccaccctgggctggtggcgccgccgggcgccgggcgccatgagggtgcgctaggcggctgttcgtgcccgaggctgcgcagcactgaggtgagctttgccttcttgatcttccgtccttcttggagacgactggcgagaggaagagggactaggtccaaacgctaggtggctgggtccaggtccctgagtactgacggtcacaggctgccgcgtctttcctgttgactcatgtttggttcctccagtgaaaattttacttagagaaatgctgcctccaaagcacttgtctgccaccaaacctaagaagtcctgggccccaaatctgtatgagctagacagtgacttgactaaggagccggatgtcatcataggagaaggtccaactgactctgagttttttcatcagaggtttcggaacctaatctatgtggaatttgttgggcctcggaagaccctgatcaaactccgaaacctctgcctcgattggttgcagccggagacccgcaccaaggaggagatcatcgagctcttggtccttgagcagtacctgaccatcatccctgaaaagctcaagccttgggtgcgagcaaaaaagccggagaactgtgagaagctcgtcactctgctggagaattacaaggagatgtaccaaccagaagacgacaacaacagtgacgtgaccagcgacgacgacatgacccggaacagaagagagtcctcaccacctcactcagtccattctttcagtgaccgggactgggaccggaggggcagaagcagagacatggagccacgagaccgctggtcccacaccaggaacccaagaagcaggatgcctccgcgggatctttcccttcctgtggtggcgaaaacaagctttgaaatggacagagaggacgacagggactccagggcttatgagtcccgatctcaggatgctgaatcataccaaaatgtggtggacctcgctgaggacaggaaacctcacaacacaatccaggacaacatggaaaactacaggaagctgctctccctcgtgcagcttgctgaagacgatggccactcccacatgacgcagggccactcatcaagatccaagagaagtgcctacccaagcaccagtcgaggtctaaaaactatgcctgaagccaaaaaatcaacccaccggcgggggatttgtgaagatgaatcttcccacggagtgataatggaaaaattcatcaaggatgtgtcacgcagttccaaatcgggaagagcaagggagtcaagcgaccggtcacagagattccccagaatgtcagatgataactggaaggacatttcattgaacaagagggagtcagtgatccagcagcgggtttatgaagggaatgcatttaggggaggctttaggtttaattcaacccttgtttccagaaagagagttcttgaaagaaagaggcgctatcattttgacacagatgggaagggctcgattcacgatcaaaaaggctgtcccaggaagaagccctttgaatgtggtagtgagatgagaaaagccatgagcgtgagcagcctgagcagcctcagctccccctcctttaccgagtcacagccaattgattttggggcaatgccatatgtatgtgatgagtgtgggaggtcgttcagtgtcatctcagaatttgttgagcaccagatcatgcatactagagagaacctctatgagtatggtgagtcctttatccacagtgtggctgtcagtgaagttcagaaaagtcaggttggagggaaacgttttgaatgtaaggactgtggagagaccttcaataagagtgccgccttggctgaacatcggaagattcatgctagaggttatcttgtggaatgtaagaatcaggaatgtgaggaagccttcatgcctagccccacctttagtgagcttcagaaaatatatggcaaagacaaattctacgagtgcagggtgtgtaaggaaaccttccttcatagttctgccctgattgagcaccagaaaatccactttggggatgacaaagataatgagcgtgaacatgaacgtgaacgtgaacgtgagcgcggggaaacctttaggcccagcccagcccttaatgagtttcagaaaatgtatggtaaagagaaaatgtacgaatgtaaggtgtgtggggagactttccttcatagctcatccctgaaagaacatcagaaaatccatactagagggaacccatttgaaaacaagggtaaagtgtgtgaggaaacctttattcctggtcagtcccttaaaaggcgtcagaaaacttacaataaggagaagctctgtgactttacagatggccgggatgccttcatgcaaagctcagagctcagtgagcatcagaaaattcattctcgaaagaacctctttgaaggcagagggtatgagaaatctgtcattcatagtgggccattcactgaatctcagaagagtcatactataacaagacctcttgaaagtgatgaggacgaaaaggcgttcaccattagctctaacccctatgaaaaccagaagattcccactaaggaaaatgtctatgaggcaaaatcatatgagaggtctgttattcatagcttagcctctgtggaagctcagaaaagtcacagtgtagcagggcccagtaaaccaaaagtaatggcagagtctaccattcagagcttcgatgctatcaaccatcagagagttcgtgctggagggaacacctctgaaggaagggaatacagtaggtctgttatccatagcttagtggcttccaaacctccaagaagtcacaatggaaatgaattggtggaatctaatgagaagggagaatcctccatttatatctcagaccttaatgataagcgacagaagattcctgccagagagaacccttgtgaagggggcagtaagaatcgcaactatgaagactctgtcatacagagtgtattccgtgccaaacctcagaaaagtgttcctggagagggatctggtgagtttaagaaggatggcgaattctctgttcccagctcaaatgtccgtgaataccagaaggctcgtgctaaaaagaaatacattgagcataggagcaatgagacctctgtaattcactctctgccttttggtgaacaaacatttcgccctcgagggatgctctatgaatgtcaggagtgtggggagtgctttgctcatagctctgacctcactgagcaccagaagattcatgatagggagaagccctctggaagcagaaactatgaatggtctgtcattcgcagcttggcccctactgaccctcaaacaagttacgcccaagagcagtatgctaaagagcaagcgcggaacaaatgtaaggacttcagacaattttttgctaccagcgaagacctcaacacaaaccagaaaatctatgaccaagagaagtctcatggcgaggagtctcaaggcgagaatactgatggggaggagacccacagcgaggagacccatggtcaggagacaattgaagaccctgtcattcaaggctcagacatggaagaccctcagaaggatgaccctgatgacaaaatctatgaatgtgaggactgtggcctgggctttgtggatctcacagacctcacagaccatcagaaagtccacagcaggaagtgcctggttgacagtcgggagtacacacattctgtaattcacacccattccatcagcgagtatcagagagattacactggagagcagctgtatgaatgtccaaagtgtggggaatcttttattcatagctcattccttttcgagcatcagagaatccatgaacaagaccagttgtattccatgaaggggtgtgatgatggttttattgccctcttgcccatgaagccacggaggaatcgtgctgcagagaggaatcctgctcttgctgggtcggccattcgatgccttttgtgtggacaaggcttcattcatagctctgcccttaatgagcatatgagacttcatagggaagatgatttactggagcagagccagatggctgaggaagctatcattccaggcttagccctcactgagtttcagagaagtcagaccgaagagagactctttgaatgtgcagtctgtggagaatctttcgtcaacccagcagaacttgcagatcacgtaactgttcataagaatgagccctatgagtacgggtcctcctatactcacacctcatttcttactgagcccctcaaaggagctataccattctatgaatgcaaggattgtggtaagtcctttattcatagcacagtcctcactaaacataaggagcttcatctggaagaagaagaagaagatgaagcagcagcagctgcagcagcagcagcccaggaagttgaagccaatgtccatgttccacaagtagttctgaggattcagggcttaaacgtagaggctgctgagccagaagtggaggctgccgagccagaagtggaggctgctgagccagaagtggaggctgctgagccaaacggagaggctgaagggccagatggagaggctgcagagcccattggagaggctggacagccaaatggagaggccgagcagccaaatggggatgctgatgagccagatggtgcaggtattgaagacccagaagaaagagctgaagagccagagggaaaagctgaagagccagagggagatgccgacgagcctgacggtgtgggaattgaagacccagaagaaggtgaagatcaagagattcaggtagaagaaccatactatgactgccatgaatgcacagaaaccttcacttccagcacagcattcagtgaacacctgaaaactcatgccagcatgatcatatttgagcctgcaaatgcctttggggagtgctcaggctacatcgaacgtgccagcaccagcacaggtggtgccaatcaagctgatgagaagtacttcaaatgtgacgtctgtgggcagctcttcaatgaccgcctgtccctcgccagacaccagaatacccacactggctgagggcatggggtaaaggttagaaaaccttcacctaggacttgacccttaccaaaccacagagaatccaaaccaatccatgataatgtcagtaggagacttaaccttagtgtgttacacacctgacttaacatctctaaactcagattgaaaagagaccgaatgtgcagattccacagtcttaagctttccccttcagatgtcagtgtctgcatgtgggaaagccatagcacacatcttacctttccaagtaatcagattgagaaaaccctatgagtattccagactacagagtttgcccaaatcaactgtaaatgacacttgtgtaacgtatatatagtgtttcatgaggtgtatataaaatagcaaattatgacagaacagtgatcacatatatttggatttatatgatatacagttacagtttactctgcagaggtaccttacctggtattctttgaattttttttttttttggaggaggaagagagcaacaaatttgattatatttttaagtgtcttagatcctgagaaagatttattgtgcattatttgaaccctgtcaatatctttttgagtaattgttttgtttcttacccttaaatagtcttgtgaagctgtaggcatgatagataacatggcttttactccttactgtttgaaaagataagtactttagcttctttctgcagccatttcatctgcgccaacactttggaacctaatactgtgtaaggctttacaatatacggattggctttttgtgacccagattgattggttgccacatgttatgtttgttgaagtggttctcatgcaaaaatattacacatttgtgttctgggttttttttttttttaaccaactcaatatgtgtttgatgatagtgaattgataaaacccgaagcttttccctgtaaatcttacatctttgcctttaaagaatgggttacaaccatcactagatcacagtagtgcctaatgaaggttgagaaccgtaggagaggctctcatgctgtaaataatgttgcaggctaataacctttcatcacttcctttgtgcgcttcctgccttaagtgacaagtagcaacatggcttgggtcccctgtgcagcatcagcttatgctgccacaagtcagtttgcaccctaggtgcccaggagctagtatccttagatctttctatcgctaacttaattctcttcgttatttatctgaccctctaactccatgtctaacttgcattaaaaaaaaaaaaattctttacagtcaacccaagcttaacatggactcaggttccccagcagccttaatttgttttgttaacatctgttccttctttttcagctctcctagagtatttctgagtgttgtgttcatctaatcttagtattcttttaattacaaattgacctcacagcttgaggtttcttgtgtcctattctgtggactacctgtgctcctttgcttcccctcccctcgcataataactatattaagaaattttttttggccttgagttggctggaaaaaaaatataaaatttaaaaaatttaaaaaaaaagatttgcaaaatgtaagtgtagatcatttgaacaagcaaaattaaagtacccactgggggaaatgtgtctgaatcttactcttctggatctgcaggattagggcttggaagtatgtcaaagatgcagggagtgtcaaagtttaggaagattgtagagctgagagcaagaagcagaaatgagtgagtcaaagaagggagtcctaatatatcaccagatctaggaggggagaggagacagacagaagaaaacaccagaggcaagaactgtagaaggccaggtttctgagaatgaattgagcggggtgtcctgagcagtttggaaaaggagtttttgatggtatggtgtaggtgagggctggctgcataggaaggactgaggttggaacggacatcgggaaagctgaggggcagtgaggtttactacatgggaaaaggactcttgaaacgagaatcagtgttgatgtcggggtgaactttgtgggtacattacttggtgttaacattgttggcagtggtagccccttttcagaaagcaacttgctgtaagtcagggtgtccgttccaaccttcagctagtgaaaaggtagtaacaaatggtaaacaagagaatgattgtttaaacctatctgtggacacttaatgcaactgtttaaaaatgataatcacgagttatgtagcaacgtggaaatatatttacagaacattaagtggagaaagcaggacacgaaagtatatttatactacagttataactcaacagttcatttatatgctgttcatttaacagttcatttaaacagttcattataactgtttaaaaatatatatgcttatagtcaaaagctgttgtggtgttgttgttgtaggcttatagttgagcattattttcttaaatttcttgaatgttctttatggtagtgttactaaaaagtttatgatcacattttcattgtgaacataatttgaactcattatcacacacttggaaaatacagaaaagtggaggaaaaaaaatcatatccccaccatccaaagacatatactctcctcttatcttgttcattcttgtttctgtgcacaggtttatgattataactgtgtcaaaatgtatattcaaaatagctgttacattacctttgtggaattatggttaaatactttcactttaattttttcaaatgttccctataataatgtcctgataacagtgtattatgtgtgtctccattggtgtgcataatacatacccagaggaaaaattagaaaataaagtaaattattttaaaaaattacctatattcccaacacctaacaactactgctaacatcttgatctgtttcctctatcttgtttcagtgcacacgcttgtgataacagtgttaaatatgtgtgcataaagtcttaaatgaaaagatgtggaaaataactaaaatagtgttgtcattgtgggaatttggttaaatattttgtctcaaattccttaaataatctttggtgttttggtaataaattttatgtatgtattttccattacaaatataatacatactcatacaaaactttggaaattcagtaaagaaaattcacacatattcccaacacccaacaacaattaactgttaacatcttgatctgtgcactagtctgtgattattagggtgttagtgataagtatgcataaatgtcaaagatgggaagaaagatgaaaaacaagaaatagttgtgtggttgttgtgggattatggttattttgtttcggtttccttgaaaggtcatcattctagtgttttggtagtccacctttactacatatatttccattatatatgaaatgtgttcattatagaaactttgaagttacagaaatgtagaagagaaactcacccatgttttcaccatccaaagagtgtggttaacatcttgatatattttcttcatcttgtttctgtgcacaggtttttggtttgttaatatggttgtggtcattctatctgtaatagtgtcaacaataaaaataaagttaaaaataaatattt

SEQ ID NO: 59612 - DNA, 4766 bp, Artificial Sequence
  derived and/or modified sequence
atgttaccccctaagcatctaagcgccaccaaaccaaagaagtcctgggctccaaacctctacgagttagattccgatctgactaaagagccagacgtgattattggggagggccctaccgatagcgagttttttcaccaacgattcaggaacttgatctacgttgaattcgttgggccaagaaagaccctgattaaactgagaaatctgtgcctcgattggcttcagccggagacccgtacaaaggaggagataattgagttgctggtgctggagcaatatctaaccattatcccagagaaactaaaaccctgggtgagggccaagaagcccgaaaactgcgaaaagctggtcactctgcttgagaattacaaagaaatgtaccagcctgaagatgataacaattcagacgtaacttccgatgacgatatgacaaggaaccggagagagagctctccaccacactctgtccacagcttcagtgatcgagactgggataggagggggaggagccgggacatggaacctcgtgacaggtggagccacaccaggaacccccgttcaagaatgcctcccagagacctgtcccttccagttgtcgccaaaacatcctttgaaatggatcgcgaagacgaccgggactctagagcatacgaatccaggagccaggacgctgagagctaccagaacgtggtggacctcgccgaggatcgcaaaccacataatacaattcaagataacatggaaaattataggaaactcttgtcactcgtccaactagccgaggatgatggccactcacacatgacacagggccatagtagcagatccaagcgatccgcgtacccctccacctccagaggtcttaaaacgatgcctgaggcaaaaaagtctacacaccgccgtggcatctgtgaggatgaatcttcccacggcgtgatcatggaaaagttcattaaggacgtctctaggagcagcaagtcaggcagagcaagagaaagcagcgatagatcccagcggttcccccgaatgagcgacgataactggaaagatatttcacttaacaagagggagtctgtgatacaacagagggtctacgaaggcaatgcatttcggggaggttttcgcttcaacagtaccctcgtgtctcggaaacgcgtcctggagagaaaaagaagatatcattttgacacggacggaaaaggcagcattcacgatcagaagggctgtccacgaaaaaagcctttcgaatgcggatcagaaatgcgtaaagctatgtccgtgtcaagtctcagcagcctgtcctctcccagttttacagagtcccagcctatcgatttcggtgctatgccatatgtgtgtgacgaatgtggtcggtccttctctgttatatccgagtttgtagagcatcagattatgcatacccgggagaatctctacgagtacggcgaatcgtttattcactcagtggctgtgagtgaagttcagaaatctcaggtgggaggtaaaagatttgaatgcaaggactgtggagaaaccttcaacaagagcgcagccctggctgagcacaggaaaatacatgcacggggatatctcgtcgagtgtaagaatcaggagtgtgaagaagcctttatgccttcacccacgttttccgaactgcagaaaatttatggcaaagataaattttacgaatgtagagtgtgtaaggagacgtttctgcactcgtccgcccttattgagcatcagaagattcacttcggggatgacaaagacaacgagcgtgagcatgagagggaaagggaacgggaacgcggagaaacatttcggcctagtcccgctctcaatgaattccagaaaatgtacggcaaggagaagatgtatgagtgtaaagtttgcggggaaacatttctgcacagctcttcactcaaggaacaccaaaaaattcatacccgcggaaatcctttcgagaataagggaaaggtctgtgaggagaccttcattccgggtcaaagcctcaagcgcaggcaaaaaacttataacaaggagaagctctgcgactttactgatggcagagatgcattcatgcagtcctcagagttgtccgagcatcaaaagattcacagtaggaagaatctattcgagggtaggggctatgaaaagtcagtgatacacagtggtccatttaccgaatctcagaaatcgcacacgatcacacggcctcttgaaagcgacgaagacgaaaaggccttcactatcagttcaaacccttacgagaaccagaagattcctacaaaagaaaatgtctacgaggccaagagctatgaaaggagtgtgattcattcactcgcctccgtggaagcacagaagtctcactctgtcgcagggccatctaagcctaaggtgatggccgagtccaccattcagtcattcgacgccataaatcatcagagagtaagagcgggtggtaacacctctgaagggagagaatattcccgaagtgttatccactccttagtggcgtcgaaaccacctcgatcacataacggtaacgagctcgttgagtcgaatgagaagggggagtccagcatatacatctctgaccttaatgacaagaggcagaaaatccctgcaagggaaaacccatgcgaggggggatccaaaaaccgcaattacgaggattcagtgattcagtccgtcttccgggcaaagccacagaagagcgtgccgggagagggcagtggggagttcaagaaggacggtgagttttctgtgccatcctctaatgtccgtgaatatcagaaagcaagggcaaagaaaaagtatatcgagcataggagcaacgagacgagtgttatccactccctccctttcggcgagcagacatttaggcctaggggcatgctctacgaatgtcaggaatgtggtgagtgtttcgctcactcatcagatctaacagagcaccagaaaatacatgatcgggaaaagccttcaggtagccgcaactatgagtggtctgtaatccggagcttagcgccaaccgacccacagacctcctatgctcaggaacagtatgccaaggaacaagccaggaacaaatgcaaggattttcgacagttctttgcgacatctgaagaccttaataccaatcagaagatttacgaccaggagaaatcccatggtgaagagtcccagggcgaaaataccgatggcgaggaaacccatagtgaagagacccacggacaggaaacaattgaagatcctgtgatccagggatctgatatggaagaccctcaaaaagatgaccctgacgataagatctatgagtgcgaggactgtgggctcggattcgtggacctcaccgacctgactgatcatcagaaggtccatagcagaaagtgtctagtggatagcagagagtatacacattccgtgatccatactcactccatatctgaatatcagcgagactatactggggaacagctatacgagtgtcctaaatgcggagaatccttcatacactcctctttcctcttcgagcatcagcgaattcacgaacaagaccagctctattctatgaaagggtgcgatgatgggttcattgccctgttgcccatgaaacccaggcgaaatagagcagccgagcggaatccggctctggcgggatcggctatccgttgtctgctgtgcggccagggatttatccactcatctgcattgaatgagcatatgcgtctgcacagagaagacgatctgctggaacagtcccagatggctgaggaagcaataatccccggactggccctaactgaatttcagaggagccaaacggaggaaaggctgttcgaatgtgctgtgtgtggcgaatcatttgtgaatccagccgaactggctgatcacgtcacagtgcataagaacgagccttatgaatatggaagctcctatactcatacatcttttctgactgaaccgctgaaaggcgctatccctttttacgaatgcaaggactgtggcaaaagttttatccattcaacagtacttaccaagcacaaggagttgcatctagaggaggaggaggaagacgaggcggcagcggctgccgctgctgctgcacaagaggtagaagcaaacgtgcacgtgccccaggtcgtgcttaggatccaagggctgaacgtcgaagccgcagaacctgaggtcgaggccgcagaaccagaagtagaggccgctgagccggaggtcgaggcagcagagcccaatggagaggctgaggggcctgacggtgaagccgcagaacctatcggagaagctggacagcccaatggcgaagcagaacaacccaatggggacgcagatgaacccgacggggctggcatagaggatcctgaagaaagggccgaggaacctgagggtaaggccgaagagccagaaggcgatgcagatgagccagatggggtcggaatcgaggatcccgaggaaggggaggatcaagaaatccaggtagaggagccttattacgactgtcatgagtgcaccgaaacatttacttctagcactgcctttagcgagcacctaaaaacccacgcttctatgataattttcgagccagcgaacgcctttggcgagtgtagcggatacatcgaaagagcctcaacttccactgggggtgcaaatcaggcggatgagaaatacttcaagtgcgatgtgtgcgggcagcttttcaacgacagattaagccttgccaggcaccaaaacacccatacaggtta

SEQ ID NO: 59613 - DNA, 111 bp, Artificial Sequence
  derived and/or modified sequence
atgctacctcccaaacacctttccgcaacaaagcccaagaagagttgggctcccaatctttacgagctggattctgaccttactaaagagcctgacgtgatcatcggctag

SEQ ID NO: 59614 - DNA, 4767 bp, Artificial Sequence
  derived and/or modified sequence
atgctaccaccgaagcatttgtcagcgaccaagcccaagaagtcctgggcccctaatctgtacgagctcgattcggatttaacaaaggagccagacgtcatcattggcgaaggacccacagactccgaattttttcaccaacgattccgaaatttaatctacgtagaatttgtcgggcctcgcaagactttgataaagctccgcaacttgtgccttgattggttacagcccgaaacacgtacaaaggaggaaattattgaactcttggtcctggaacagtacctgacgataattccagagaagctcaaaccatgggtgcgggcaaagaagcccgagaattgcgaaaagctcgtcacactgctggaaaactacaaggaaatgtaccagccggaggacgataacaacagcgatgtcacgtccgacgatgacatgacaaggaaccgacgggagtcttccccgccacactcagttcacagcttctcagacagggactgggacaggcgcggtcgctcccgtgatatggagcctcgtgatcgatggtctcacacaagaaaccccagatccaggatgccccctcgcgatctgtcgctgcctgtggtagctaaaacttctttcgaaatggacagagaagacgaccgcgactccagggcatacgaatctaggtcacaagacgccgaatcatatcagaacgtcgtggacttagctgaggatcgcaagcctcataacaccattcaggacaacatggagaactatagaaagttactcagcctggtccagctggcagaggacgacggccacagtcacatgacccagggccatagttcacgctcaaagaggtcggcctatcctagcaccagcagaggccttaagaccatgcccgaggcgaaaaagtctacccatcgaagagggatctgcgaggacgaaagtagtcacggggtcattatggaaaagtttatcaaggatgtgagtcgtagttctaaatcgggtcgagccagggagtctagcgacagatcacagaggttccctagaatgagcgatgataactggaaagatattagcttaaataagcgtgagtcggtaatacaacaaagggtatatgaaggcaatgcttttagaggtggatttcgattcaactccacgttggtgagccgtaagcgggtgctcgaaagaaaaagaaggtatcactttgacacagatggaaaaggctccatccatgatcagaagggatgccctcgaaagaaaccttttgagtgtggctcagagatgcgaaaagctatgagtgtcagttccctctctagcctgagtagcccaagctttacagagtcacagcccattgacttcggggctatgccttatgtttgcgatgaatgcgggcgatccttctcggtgattagcgaatttgtcgaacaccagattatgcacacacgcgagaatctgtatgaatatggtgaaagcttcattcactctgtagccgtgtctgaggtgcagaagtcccaggtgggtggcaagcgtttcgaatgcaaggattgcggagaaacgttcaataagagcgcagcacttgctgaacatcgcaagatacatgccagaggctacctcgtagaatgtaagaatcaagagtgcgaggaggcttttatgccctcacccactttcagcgaacttcagaagatctacggaaaggacaagttctacgaatgtcgggtttgtaaggagacatttttgcactcaagcgccctaatcgagcatcagaagatccattttggagatgacaaggataacgaacgtgaacatgagagagaaagagagagagaaaggggagaaacctttcgtcccagccctgctctcaatgagttccaaaaaatgtacggtaaggagaagatgtacgagtgcaaagtttgcggggagaccttcttacattcttccagcctgaaggagcatcagaagatccacacaaggggtaatccatttgagaataagggtaaagtgtgcgaggaaacatttatccctggtcagtctttaaagaggcgccagaaaacttataataaagagaagttgtgtgactttaccgacggtagagacgctttcatgcaaagtagtgaactgtccgagcatcagaaaatccacagccgaaaaaatctgttcgaaggacgcggatacgagaaaagtgttattcactccggaccctttacagagagccaaaaaagccatacaattacacggcctctggagagcgacgaagacgaaaaagccttcactatctcatctaacccgtatgaaaaccagaagattccgaccaaggaaaacgtgtacgaggcaaagagttacgaaaggtccgtaatccacagccttgcctccgtcgaagcccagaaatcccattccgtggctggtccctctaagcccaaggtgatggccgagagcactattcagtctttcgacgccatcaatcatcagcgtgtaagagccggaggcaataccagcgagggtagagagtactcaaggtccgtaattcactcacttgttgctagcaaacctccacgctcacacaatgggaacgaactcgtggaatcaaacgaaaaaggtgagtcctcaatctacattagtgatctaaatgacaagaggcagaaaatccccgctagagaaaacccttgtgaagggggaagcaagaatcgcaactatgaggactcagtgatccagagcgtctttcgtgcaaagccacagaagtcggtacctggggaggggagtggggaatttaaaaaagatggagaattctcagtgccttcttccaacgtgagggagtaccaaaaggcacgcgcaaaaaaaaagtacattgaacatcgcagtaatgagacgtcggtgatccacagcctgccattcggcgaacagacattccgaccaaggggcatgctgtatgagtgccaggagtgtggagagtgttttgcacattcttcggatctgaccgagcatcagaagatccatgatagggagaaaccctccggtagccgcaactacgagtggagcgtaatcagatcactggctccgacagaccctcaaacatcatacgcccaggaacagtacgcaaaggagcaggctagaaataaatgtaaggacttcagacagttctttgccacatctgaggatctgaataccaatcagaagatctacgatcaggaaaaatcccacggagaagagtctcaaggggaaaatacagacggcgaggaaacccactcggaggaaactcatggccaagagaccattgaggatccagtgatccagggatctgacatggaagatccacagaaggatgaccccgacgacaagatctacgaatgcgaggactgcggactcggcttcgtggatctcaccgacctgactgaccatcaaaaggtacattcccgcaagtgcttggtggactcgcgggagtatacccactcggttatacatacacattctattagcgagtatcaaagagactataccggggagcaactgtatgagtgtccaaagtgcggagagtcctttattcacagcagttttctgtttgagcaccagcgtattcacgaacaagaccagctctattctatgaaaggatgtgatgatggattcatcgctctgctgcccatgaaacccaggaggaacagagcagccgaaagaaaccccgctctggcagggtcagccatcaggtgccttctatgtggacaagggtttatacattcaagcgccttgaatgaacacatgaggctacaccgggaagacgatcttttagaacagtctcagatggctgaagaggccattattccaggcctggccttaaccgagttccagagaagccaaactgaggagcgcctcttcgaatgcgctgtttgtggggaatccttcgtcaatcccgctgagctcgctgaccatgtgactgtgcacaagaacgagccctatgaatatggcagctcatatacacacacctcattccttactgaaccccttaagggagcaataccattttacgaatgtaaggactgtggcaagagctttattcatagtacagtgctgactaaacacaaagagctgcatcttgaggaagaggaagaggacgaggctgccgctgccgcagccgctgcagcccaggaggtggaggccaacgtacacgtcccccaggtggtgctgcggatacagggcctaaacgtggaggccgctgaaccagaggtcgaggccgctgagcccgaagtggaagccgctgagcccgaagttgaggccgctgaacctaatggcgaggccgaaggccctgacggagaagccgctgagcctattggagaagccggacagccgaacggcgaagccgagcagccaaatggcgatgcagatgaaccagacggagcaggaatcgaggacccggaggagcgggcagaggaacctgaagggaaggccgaggagccagagggagatgccgatgagcctgacggtgtgggcatcgaggacccagaggaaggcgaggaccaggagattcaggttgaggagccgtactacgattgccacgaatgcactgagacttttacctccagcaccgccttctccgagcacctgaaaacacacgctagtatgatcatcttcgagcccgctaatgctttcggagagtgcagcggctacatcgagcgagctagcacatccacaggaggcgctaaccaggccgacgagaagtacttcaaatgcgacgtttgcggccagctttttaatgaccgcctgtcactggcgaggcaccaaaatacacataccggctag

SEQ ID NO: 59615 - DNA, 4389 bp, Artificial Sequence
  derived and/or modified sequence
atgtaccagcccgaggacgacaacaactccgacgtcacttctgatgatgatatgacccggaatagacgcgagtcaagtccgcctcattccgtgcacagctttagtgacagagattgggataggagaggaaggagtcgcgatatggagcccagggaccggtggagccatacaagaaatccacggtcacgaatgcctcccagggacctatcactgcccgtcgttgctaagacatcttttgaaatggaccgtgaagacgaccgcgactcacgtgcctacgaatctcggtctcaggacgctgagtcctaccagaatgtcgttgaccttgccgaagacagaaaaccgcataatacgattcaagacaatatggaaaattatagaaagctcctaagtctcgtccaacttgcagaggacgacgggcacagccacatgactcaggggcactcaagccgctccaagaggagcgcatacccttccaccagccggggactgaaaacgatgccggaggccaagaagtctactcacaggcgcggaatctgtgaggatgagtccagtcacggtgtgataatggagaagttcataaaagatgtttcacgaagcagtaagtctggccgtgccagagagagtagtgataggtctcagcgctttcctagaatgagtgacgataactggaaggacattagcctgaataaacgggagagcgtcattcagcagcgtgtttacgaaggaaacgcattcagagggggatttcgattcaattcaacccttgtgagccgaaagagagtgctcgagcggaaacgaaggtaccattttgataccgatgggaagggttctatccatgaccagaagggctgcccaaggaagaaacctttcgagtgcgggagtgaaatgaggaaggctatgtccgtgtctagtttatctagtctttcttcaccatccttcaccgaatctcagcctattgacttcggcgcaatgccatatgtgtgcgatgagtgcggcaggagttttagcgtgataagtgagttcgtggaacatcagatcatgcacacaagggagaacctgtatgagtatggagaatcctttatccactccgtcgccgttagcgaagttcagaagagccaggtgggcggtaagagatttgagtgtaaagactgcggggagaccttcaataagtccgccgcactggcagagcatcggaagatacatgcaagaggatacctggtggaatgcaaaaaccaagagtgtgaagaagccttcatgccctcccccacgttctctgagctgcagaagatttacggaaaggacaaattttatgaatgccgtgtctgtaaagaaacattcctccattcctctgccttaatcgagcatcagaagatacacttcggggacgacaaggacaatgaaagggagcacgagcgggagcgagagcgggagaggggtgagaccttccggcctagtcctgcactgaacgagtttcagaagatgtacggaaaagagaagatgtacgagtgcaaagtttgcggcgagacattcctccacagctcttcccttaaggaacaccaaaaaatacacacgagggggaacccattcgagaataaggggaaagtatgcgaagagaccttcatcccgggtcagtcgttaaagagacgccaaaagacctacaataaagaaaaactgtgtgatttcacagacggacgtgatgcttttatgcagtcaagtgagttaagtgagcatcaaaagattcattcccgcaagaacctctttgaaggaaggggatatgagaagagcgtcatccacagtggaccatttaccgaaagtcagaagtcacacaccattactcggcctctggagagcgacgaagatgaaaaagcctttaccatctcatccaatccttacgaaaatcagaaaatacctactaaggagaacgtttatgaggctaagagctacgagcgctccgtcattcattcactagcctcagttgaggcgcagaaaagtcatagcgtggcaggcccttcaaaaccgaaagtcatggccgaatccacaattcaatccttcgacgccatcaaccaccagcgcgtgcgcgctggcggtaacaccagcgagggcagagaatacagcagaagcgtgattcatagcttggtagccagcaaaccccctcggtcccacaatggtaatgagctagtggagagtaacgagaaaggagaaagcagtatttacatctctgatttgaatgataagaggcagaaaatccccgcacgggagaacccatgcgagggagggagcaaaaacagaaactacgaagattcagtgatccagtcggtgttcagagccaagccccagaagtcagtacccggtgagggctctggagagtttaagaaagatggcgagttctccgtgcccagttctaacgtgagggaataccagaaagctagagccaagaagaagtatatcgagcacaggtctaacgagaccagcgtcatacacagtttgccatttggcgagcaaacattccggcctcggggaatgctatacgaatgccaggagtgtggcgagtgcttcgctcattcctccgatctgacagaacatcagaaaatccacgacagggaaaagccttccggaagcagaaactatgagtggagcgtaatcaggtctttggcgccaacagatccccagacatcttatgcacaggaacagtatgctaaggagcaagctagaaataagtgcaaggatttccgacaatttttcgctacttctgaagacctgaacaccaatcagaagatttatgatcaggaaaagagccacggcgaagagtcgcaaggggagaacacagacggcgaagagacacactcagaggaaacacatgggcaggagactattgaggacccagtgattcagggttctgacatggaggatcctcagaaagatgacccagatgacaaaatctatgaatgcgaggactgtgggctaggctttgttgacctcacagacctgaccgatcatcagaaggtgcatagccgtaagtgcctggtggactcaagggagtacactcacagtgtgattcatacacactctatttccgaataccagcgcgactacacaggcgagcagctttacgagtgcccgaaatgcggtgagtcattcatacacagcagcttcttgttcgagcaccagcgaattcatgagcaggaccagctttactctatgaaaggatgtgatgacggcttcattgccctgttaccgatgaagcctcggagaaatagagccgctgagcgcaacccggcactggccggtagcgccatcagatgccttctctgtggtcagggctttattcattcctccgcactcaatgagcatatgcgactgcatcgcgaggacgatctactcgagcagagccagatggcagaagaggctatcattcctggccttgctttgacagaattccagaggtcacagacagaggagcggttatttgaatgtgccgtgtgtggcgaatcattcgttaaccccgctgagctcgctgaccacgtaacggtgcacaagaatgagccatatgaatacgggtcttcctacacacatactagcttcttaactgaaccgctgaagggcgctattccgttctacgaatgtaaggactgcggtaaatctttcatacattctactgtcctgaccaagcacaaggagctccatcttgaagaggaggaagaagatgaggccgcagcggcagctgctgccgctgcccaggaggttgaggcaaatgtacacgttcctcaggtggtattgaggatccagggactgaatgtcgaggctgctgagcccgaggtggaggccgctgaacccgaagtggaggctgcggaacccgaggtcgaggcggcagagccgaacggcgaggccgaaggccctgatggcgaagccgcagagccgatcggagaagctggacaaccaaatggtgaagctgagcagcctaatggcgatgctgatgagcccgatggggcagggatcgaagaccccgaagaacgggcagaggaacctgagggcaaggcggaggagcctgaaggcgacgctgatgagccagatggtgtgggtattgaggatcctgaggaaggtgaggatcaggagatccaggttgaagaaccctactatgactgccatgaatgcacagaaaccttcaccagcagcactgccttcagcgaacatctcaagactcatgccagcatgatcatcttcgagcctgccaacgcgttcggtgagtgctctgggtacatagagcgagccagcacctccactggcggagccaaccaggcggacgagaagtatttcaagtgtgatgtgtgcggacagctgttcaatgaccgactgtctttggccaggcatcagaacacccacacaggttag

SEQ ID NO: 59616 - DNA, 4767 bp, Artificial Sequence
  derived and/or modified sequence
atgctgccgcctaaacacttgtctgccactaaacctaaaaaaagttgggccccaaatctttacgaacttgacagtgatctgaccaaggaaccggatgtgatcatcggcgaaggtcccactgactccgaattctttcatcaacggtttcgaaacttgatatacgtcgaattcgtgggcccacgcaaaaccctgattaaactgcgcaatctctgtctcgactggctgcagccagagactagaaccaaagaagaaataattgaactgctggtgctggagcagtatctcaccattatacccgaaaagctgaagccctgggtcagagccaaaaagcctgagaattgtgaaaagctggttactctgctggagaattataaagaaatgtaccagcctgaagacgataataacagtgatgtgacctcggatgatgatatgacccggaatcgcagagagtcctcccctccgcactctgtgcacagttttagcgaccgggattgggatagaagaggacggtccagagatatggagccacgtgacagatggagtcacacgaggaatcccaggagcaggatgcctccccgagacctgtctctgcctgtcgtggcaaagacctcatttgagatggacagggaggatgatcgggattcgcgagcatatgagtcgagatctcaagatgctgagtcctaccaaaacgttgtcgatctggcagaggataggaaaccccacaacaccatacaggacaatatggagaactaccggaagctcttgagtctggtgcagctggcggaagacgatgggcacagtcatatgacacagggacacagcagcaggagtaagcggagcgcctatccctcgacatcccggggactcaaaacaatgccagaggccaaaaagtccactcacaggcgcggtatatgcgaggatgaatccagccacggcgtgatcatggagaagttcataaaagacgtgtcacgctccagcaaaagcggacgagcaagggagtcctccgatcgcagtcagagatttcccagaatgagtgatgacaactggaaagacataagcctcaataaaagagagagtgtgatccagcagagggtctacgaaggcaatgcattccgtggtggctttaggttcaactctaccctggtgtctcgtaagagagtcctcgagcgcaagcggcgatatcactttgatacagacggcaaaggctccatccacgatcagaaaggttgccctagaaagaaaccatttgagtgtgggtcagaaatgagaaaggctatgtccgtttcaagcctctcgtccttatcaagccccagctttaccgagtctcagccaatcgacttcggcgcaatgccttatgtctgcgatgagtgtggtcgctccttctctgtcatctccgagttcgtcgaacatcagatcatgcacacaagggagaatctttatgaatacggagagtctttcattcacagtgtcgctgtgtctgaagtgcagaaatcccaggtgggcggtaagcggtttgaatgtaaggattgtggcgagaccttcaacaagagtgcagcattggctgagcacaggaagatccacgctcggggatatctagtcgaatgtaagaatcaggaatgtgaagaggcttttatgcccagcccaacattcagcgagttgcagaaaatctatgggaaggacaaattctatgagtgcagagtgtgtaaggaaacattcttgcacagtagtgctctgattgagcaccaaaagatccacttcggggatgacaaggacaacgaaagagagcacgagcgagagagagaaagagaaagaggggaaacctttcggccatctccagccctaaatgagttccagaaaatgtacgggaaagagaaaatgtacgaatgtaaggtgtgcggcgagacctttctccactcatcttcactcaaggagcaccagaaaatacatacacggggaaatcctttcgagaacaaagggaaggtctgcgaggagacattcatccctggccagagcctcaaacggcgtcagaagacgtacaataaagagaagctctgtgacttcacagacggacgcgatgcattcatgcagagttccgagcttagcgagcatcaaaaaatccacagccgcaagaatctttttgaaggccgtggttatgaaaagagtgtgatccattctggaccctttaccgaaagtcagaagtctcataccattaccaggcccttggagtctgacgaagacgaaaaagcgttcacaataagtagtaatccttatgagaaccaaaaaattccgaccaaggaaaatgtttacgaggccaagtcttatgagcgttccgtgatacattcactggcaagcgtggaggcacagaagtcccacagcgtggcaggaccaagcaagccaaaggtgatggccgaaagcacaattcagtcctttgatgccattaaccaccaacgagtgcgagcaggagggaacacgtctgaaggtcgcgagtactcccgctctgtgatccacagtctggtggccagcaagccccctagaagccacaatggaaatgagttggttgagagcaacgaaaagggagaatccagtatttatataagcgatttaaacgacaaaagacagaagatacctgctcgcgagaacccttgcgagggaggctccaagaatcgcaactatgaagacagtgtgatccagagcgtttttagggccaaacctcagaaatccgtccctggcgaaggtagcggtgagtttaagaaggacggcgaattcagcgttccaagcagcaatgtcagggaataccagaaggcacgggctaagaaaaagtacattgaacaccgcagcaacgagacctcagttattcacagcctcccgtttggcgagcagacgttccgcccacgaggcatgctgtacgagtgtcaggaatgcggcgaatgttttgctcattctagtgacctaaccgaacatcaaaaaattcatgatcgtgagaaaccatccggatcacggaactatgaatggtcagtgatccgctctctcgccccaacggacccgcagacatcttatgcacaggaacagtatgccaaagaacaagccagaaataaatgcaaagacttccgccagttctttgctacatccgaggacctgaacaccaatcaaaagatctacgaccaggagaagtcgcacggagaagagtctcagggagaaaatacagatggtgaagaaacacacagcgaagaaacacatggtcaagagactatcgaggatcctgttatacagggaagcgatatggaggatccccagaaggacgacccggatgacaagatatatgagtgcgaggactgtggcctcggattcgtggatctgaccgatctcacagaccatcagaaggtacatagccggaaatgcctggtcgattcgcgtgaatatactcactcggtgattcatacacatagtataagcgagtaccagagggactatacgggcgagcagctgtacgaatgccccaaatgtggcgaatcctttatccattcctccttcttgttcgagcaccagaggatccatgagcaagatcaattgtattctatgaagggatgtgacgatggctttatcgctttgttgccaatgaagcccaggcgtaatagagcagcggaacgaaatccggctcttgctgggtctgccatccgctgcttgctgtgtggccaagggtttatccacagctccgccctgaacgagcacatgcgtctacatcgcgaggatgacctgctggaacaatctcagatggcagaagaggctattattccgggtcttgccctgacagagttccagcgttctcaaaccgaggaacggctgttcgagtgtgcggtgtgtggagaatcattcgtcaatcccgctgagcttgcagatcacgttactgtccacaaaaatgaaccttatgaatatggcagcagctatacccacacttcatttctaaccgagcccttgaagggagctataccattctatgaatgcaaagactgtggtaagtccttcattcacagcactgtgcttacaaaacacaaggagctgcacctggaagaggaagaggaggatgaggcggctgccgctgcggcagccgctgcccaggaggtggaagctaacgttcatgtgccacaagtagtcctgcgtatacagggattgaatgtggaagcagccgaacctgaagttgaggccgctgagcctgaggtggaggctgcagagcccgaggtagaagctgcagagccaaatggtgaagcggaaggaccagatggagaggctgcagagccaatcggcgaggctggacaaccaaatggcgaggctgagcaacccaacggcgacgctgacgagccagatggtgccggaatagaagaccctgaggagcgcgcagaggagcccgaggggaaggccgaagaacccgaaggcgacgccgacgagccggacggggtgggcatagaggatcccgaggaaggggaagatcaggagatacaggtagaagaaccctattatgactgccacgaatgtactgaaaccttcacctcctcaactgctttctctgagcacctgaagacacacgcctcaatgattatctttgagcccgcaaatgccttcggcgagtgttccggatacattgagcgagcatcaaccagcactggaggcgcaaaccaagccgacgagaagtatttcaaatgtgatgtatgcgggcagttgtttaatgatagactttctcttgctcggcaccagaacactcacacaggctag

SEQ ID NO: 59617 - DNA, 411 bp, Artificial Sequence
  derived and/or modified sequence
tgcgggaggagaggtttgggaggcgcgggagatgtccaccctgggctggtggcgccgccgggcgccgggcgccatgagggtgcgctaggcggctgttcgtgcccgaggctgcgcagcactgaggtgagctttgccttcttgatcttccgtccttcttggagacgactggcgagaggaagagggactaggtccaaacgctaggtggctgggtccaggtccctgagtactgacggtcacaggctgccgcgtctttcctgttgactcatgtttggttcctccagtgaaaattttacttagagaaatgctgcctccaaagcacttgtctgccaccaaacctaagaagtcctgggccccaaatctgtatgagctagacagtgacttgactaaggagccggatgtcatcataggaga

SEQ ID NO: 59618 - DNA, 5115 bp, Artificial Sequence
  derived and/or modified sequence
acttctagggcattagacaagttgcccacagtcccaagttagtagcccaagttagtagccgagctaactcctcgagtaggtctctgtgaagcccagaggtcatgcttgtaactgctgtgctgaggccaactttgtgcggttgtttgcctatttactggggactcccatatcccaaaagcattgtcgatgcctctggtaaggtggcctccactgctgcctggtcttcaacttctgggacatgtgtatatctccttacgatccacaggtccctgagtactgacggtcacaggctgccgcgtctttcctgttgactcatgtttggttcctccagtgaaaattttacttagagaaatgctgcctccaaagcacttgtctgccaccaaacctaagaagtcctgggccccaaatctgtatgagctagacagtgacttgactaaggagccggatgtcatcataggagaaggtccaactgactctgagttttttcatcagaggtttcggaacctaatctatgtggaatttgttgggcctcggaagaccctgatcaaactccgaaacctctgcctcgattggttgcagccggagacccgcaccaaggaggagatcatcgagctcttggtccttgagcagtacctgaccatcatccctgaaaagctcaagccttgggtgcgagcaaaaaagccggagaactgtgagaagctcgtcactctgctggagaattacaaggagatgtaccaaccagaagacgacaacaacagtgacgtgaccagcgacgacgacatgacccggaacagaagagagtcctcaccacctcactcagtccattctttcagtgaccgggactgggaccggaggggcagaagcagagacatggagccacgagaccgctggtcccacaccaggaacccaagaagcaggatgcctccgcgggatctttcccttcctgtggtggcgaaaacaagctttgaaatggacagagaggacgacagggactccagggcttatgagtcccgatctcaggatgctgaatcataccaaaatgtggtggacctcgctgaggacaggaaacctcacaacacaatccaggacaacatggaaaactacaggaagctgctctccctcgtgcagcttgctgaagacgatggccactcccacatgacgcagggccactcatcaagatccaagagaagtgcctacccaagcaccagtcgaggtctaaaaactatgcctgaagccaaaaaatcaacccaccggcgggggatttgtgaagatgaatcttcccacggagtgataatggaaaaattcatcaaggatgtgtcacgcagttccaaatcgggaagagcaagggagtcaagcgaccggtcacagagattccccagaatgtcagatgataactggaaggacatttcattgaacaagagggagtcagtgatccagcagcgggtttatgaagggaatgcatttaggggaggctttaggtttaattcaacccttgtttccagaaagagagttcttgaaagaaagaggcgctatcattttgacacagatgggaagggctcgattcacgatcaaaaaggctgtcccaggaagaagccctttgaatgtggtagtgagatgagaaaagccatgagcgtgagcagcctgagcagcctcagctccccctcctttaccgagtcacagccaattgattttggggcaatgccatatgtatgtgatgagtgtgggaggtcgttcagtgtcatctcagaatttgttgagcaccagatcatgcatactagagagaacctctatgagtatggtgagtcctttatccacagtgtggctgtcagtgaagttcagaaaagtcaggttggagggaaacgttttgaatgtaaggactgtggagagaccttcaataagagtgccgccttggctgaacatcggaagattcatgctagaggttatcttgtggaatgtaagaatcaggaatgtgaggaagccttcatgcctagccccacctttagtgagcttcagaaaatatatggcaaagacaaattctacgagtgcagggtgtgtaaggaaaccttccttcatagttctgccctgattgagcaccagaaaatccactttggggatgacaaagataatgagcgtgaacatgaacgtgaacgtgaacgtgagcgcggggaaacctttaggcccagcccagcccttaatgagtttcagaaaatgtatggtaaagagaaaatgtacgaatgtaaggtgtgtggggagactttccttcatagctcatccctgaaagaacatcagaaaatccatactagagggaacccatttgaaaacaagggtaaagtgtgtgaggaaacctttattcctggtcagtcccttaaaaggcgtcagaaaacttacaataaggagaagctctgtgactttacagatggccgggatgccttcatgcaaagctcagagctcagtgagcatcagaaaattcattctcgaaagaacctctttgaaggcagagggtatgagaaatctgtcattcatagtgggccattcactgaatctcagaagagtcatactataacaagacctcttgaaagtgatgaggacgaaaaggcgttcaccattagctctaacccctatgaaaaccagaagattcccactaaggaaaatgtctatgaggcaaaatcatatgagaggtctgttattcatagcttagcctctgtggaagctcagaaaagtcacagtgtagcagggcccagtaaaccaaaagtaatggcagagtctaccattcagagcttcgatgctatcaaccatcagagagttcgtgctggagggaacacctctgaaggaagggaatacagtaggtctgttatccatagcttagtggcttccaaacctccaagaagtcacaatggaaatgaattggtggaatctaatgagaagggagaatcctccatttatatctcagaccttaatgataagcgacagaagattcctgccagagagaacccttgtgaagggggcagtaagaatcgcaactatgaagactctgtcatacagagtgtattccgtgccaaacctcagaaaagtgttcctggagagggatctggtgagtttaagaaggatggcgaattctctgttcccagctcaaatgtccgtgaataccagaaggctcgtgctaaaaagaaatacattgagcataggagcaatgagacctctgtaattcactctctgccttttggtgaacaaacatttcgccctcgagggatgctctatgaatgtcaggagtgtggggagtgctttgctcatagctctgacctcactgagcaccagaagattcatgatagggagaagccctctggaagcagaaactatgaatggtctgtcattcgcagcttggcccctactgaccctcaaacaagttacgcccaagagcagtatgctaaagagcaagcgcggaacaaatgtaaggacttcagacaattttttgctaccagcgaagacctcaacacaaaccagaaaatctatgaccaagagaagtctcatggcgaggagtctcaaggcgagaatactgatggggaggagacccacagcgaggagacccatggtcaggagacaattgaagaccctgtcattcaaggctcagacatggaagaccctcagaaggatgaccctgatgacaaaatctatgaatgtgaggactgtggcctgggctttgtggatctcacagacctcacagaccatcagaaagtccacagcaggaagtgcctggttgacagtcgggagtacacacattctgtaattcacacccattccatcagcgagtatcagagagattacactggagagcagctgtatgaatgtccaaagtgtggggaatcttttattcatagctcattccttttcgagcatcagagaatccatgaacaagaccagttgtattccatgaaggggtgtgatgatggttttattgccctcttgcccatgaagccacggaggaatcgtgctgcagagaggaatcctgctcttgctgggtcggccattcgatgccttttgtgtggacaaggcttcattcatagctctgcccttaatgagcatatgagacttcatagggaagatgatttactggagcagagccagatggctgaggaagctatcattccaggcttagccctcactgagtttcagagaagtcagaccgaagagagactctttgaatgtgcagtctgtggagaatctttcgtcaacccagcagaacttgcagatcacgtaactgttcataagaatgagccctatgagtacgggtcctcctatactcacacctcatttcttactgagcccctcaaaggagctataccattctatgaatgcaaggattgtggtaagtcctttattcatagcacagtcctcactaaacataaggagcttcatctggaagaagaagaagaagatgaagcagcagcagctgcagcagcagcagcccaggaagttgaagccaatgtccatgttccacaagtagttctgaggattcagggcttaaacgtagaggctgctgagccagaagtggaggctgccgagccagaagtggaggctgctgagccagaagtggaggctgctgagccaaacggagaggctgaagggccagatggagaggctgcagagcccattggagaggctggacagccaaatggagaggccgagcagccaaatggggatgctgatgagccagatggtgcaggtattgaagacccagaagaaagagctgaagagccagagggaaaagctgaagagccagagggagatgccgacgagcctgacggtgtgggaattgaagacccagaagaaggtgaagatcaagagattcaggtagaagaaccatactatgactgccatgaatgcacagaaaccttcacttccagcacagcattcagtgaacacctgaaaactcatgccagcatgatcatatttgagcctgcaaatgcctttggggagtgctcaggctacatcgaacgtgccagcaccagcacaggtggtgccaatcaagctgatgagaagtacttcaaatgtgacgtctgtgggcagctcttcaatgaccgcctgtccctcgccagacaccagaatacccacactggc

SEQ ID NO: 59619 - DNA, 4741 bp, Artificial Sequence
  derived and/or modified sequence
gtttgggaggcgcgggagatgtccaccctgggctggtggcgccgccgggcgccgggcgccatgagggtgcgctaggcggctgttcgtgcccgaggctgcgcagcactgaggtgagctttgccttcttgatcttccgtccttcttggagacgactggcgagaggaagagggactaggtccaaacgctaggtggctgggtccagccggagacccgcaccaaggaggagatcatcgagctcttggtccttgagcagtacctgaccatcatccctgaaaagctcaagccttgggtgcgagcaaaaaagccggagaactgtgagaagctcgtcactctgctggagaattacaaggagatgtaccaaccagaagacgacaacaacagtgacgtgaccagcgacgacgacatgacccggaacagaagagagtcctcaccacctcactcagtccattctttcagtgaccgggactgggaccggaggggcagaagcagagacatggagccacgagaccgctggtcccacaccaggaacccaagaagcaggatgcctccgcgggatctttcccttcctgtggtggcgaaaacaagctttgaaatggacagagaggacgacagggactccagggcttatgagtcccgatctcaggatgctgaatcataccaaaatgtggtggacctcgctgaggacaggaaacctcacaacacaatccaggacaacatggaaaactacaggaagctgctctccctcgtgcagcttgctgaagacgatggccactcccacatgacgcagggccactcatcaagatccaagagaagtgcctacccaagcaccagtcgaggtctaaaaactatgcctgaagccaaaaaatcaacccaccggcgggggatttgtgaagatgaatcttcccacggagtgataatggaaaaattcatcaaggatgtgtcacgcagttccaaatcgggaagagcaagggagtcaagcgaccggtcacagagattccccagaatgtcagatgataactggaaggacatttcattgaacaagagggagtcagtgatccagcagcgggtttatgaagggaatgcatttaggggaggctttaggtttaattcaacccttgtttccagaaagagagttcttgaaagaaagaggcgctatcattttgacacagatgggaagggctcgattcacgatcaaaaaggctgtcccaggaagaagccctttgaatgtggtagtgagatgagaaaagccatgagcgtgagcagcctgagcagcctcagctccccctcctttaccgagtcacagccaattgattttggggcaatgccatatgtatgtgatgagtgtgggaggtcgttcagtgtcatctcagaatttgttgagcaccagatcatgcatactagagagaacctctatgagtatggtgagtcctttatccacagtgtggctgtcagtgaagttcagaaaagtcaggttggagggaaacgttttgaatgtaaggactgtggagagaccttcaataagagtgccgccttggctgaacatcggaagattcatgctagaggttatcttgtggaatgtaagaatcaggaatgtgaggaagccttcatgcctagccccacctttagtgagcttcagaaaatatatggcaaagacaaattctacgagtgcagggtgtgtaaggaaaccttccttcatagttctgccctgattgagcaccagaaaatccactttggggatgacaaagataatgagcgtgaacatgaacgtgaacgtgaacgtgagcgcggggaaacctttaggcccagcccagcccttaatgagtttcagaaaatgtatggtaaagagaaaatgtacgaatgtaaggtgtgtggggagactttccttcatagctcatccctgaaagaacatcagaaaatccatactagagggaacccatttgaaaacaagggtaaagtgtgtgaggaaacctttattcctggtcagtcccttaaaaggcgtcagaaaacttacaataaggagaagctctgtgactttacagatggccgggatgccttcatgcaaagctcagagctcagtgagcatcagaaaattcattctcgaaagaacctctttgaaggcagagggtatgagaaatctgtcattcatagtgggccattcactgaatctcagaagagtcatactataacaagacctcttgaaagtgatgaggacgaaaaggcgttcaccattagctctaacccctatgaaaaccagaagattcccactaaggaaaatgtctatgaggcaaaatcatatgagaggtctgttattcatagcttagcctctgtggaagctcagaaaagtcacagtgtagcagggcccagtaaaccaaaagtaatggcagagtctaccattcagagcttcgatgctatcaaccatcagagagttcgtgctggagggaacacctctgaaggaagggaatacagtaggtctgttatccatagcttagtggcttccaaacctccaagaagtcacaatggaaatgaattggtggaatctaatgagaagggagaatcctccatttatatctcagaccttaatgataagcgacagaagattcctgccagagagaacccttgtgaagggggcagtaagaatcgcaactatgaagactctgtcatacagagtgtattccgtgccaaacctcagaaaagtgttcctggagagggatctggtgagtttaagaaggatggcgaattctctgttcccagctcaaatgtccgtgaataccagaaggctcgtgctaaaaagaaatacattgagcataggagcaatgagacctctgtaattcactctctgccttttggtgaacaaacatttcgccctcgagggatgctctatgaatgtcaggagtgtggggagtgctttgctcatagctctgacctcactgagcaccagaagattcatgatagggagaagccctctggaagcagaaactatgaatggtctgtcattcgcagcttggcccctactgaccctcaaacaagttacgcccaagagcagtatgctaaagagcaagcgcggaacaaatgtaaggacttcagacaattttttgctaccagcgaagacctcaacacaaaccagaaaatctatgaccaagagaagtctcatggcgaggagtctcaaggcgagaatactgatggggaggagacccacagcgaggagacccatggtcaggagacaattgaagaccctgtcattcaaggctcagacatggaagaccctcagaaggatgaccctgatgacaaaatctatgaatgtgaggactgtggcctgggctttgtggatctcacagacctcacagaccatcagaaagtccacagcaggaagtgcctggttgacagtcgggagtacacacattctgtaattcacacccattccatcagcgagtatcagagagattacactggagagcagctgtatgaatgtccaaagtgtggggaatcttttattcatagctcattccttttcgagcatcagagaatccatgaacaagaccagttgtattccatgaaggggtgtgatgatggttttattgccctcttgcccatgaagccacggaggaatcgtgctgcagagaggaatcctgctcttgctgggtcggccattcgatgccttttgtgtggacaaggcttcattcatagctctgcccttaatgagcatatgagacttcatagggaagatgatttactggagcagagccagatggctgaggaagctatcattccaggcttagccctcactgagtttcagagaagtcagaccgaagagagactctttgaatgtgcagtctgtggagaatctttcgtcaacccagcagaacttgcagatcacgtaactgttcataagaatgagccctatgagtacgggtcctcctatactcacacctcatttcttactgagcccctcaaaggagctataccattctatgaatgcaaggattgtggtaagtcctttattcatagcacagtcctcactaaacataaggagcttcatctggaagaagaagaagaagatgaagcagcagcagctgcagcagcagcagcccaggaagttgaagccaatgtccatgttccacaagtagttctgaggattcagggcttaaacgtagaggctgctgagccagaagtggaggctgccgagccagaagtggaggctgctgagccagaagtggaggctgctgagccaaacggagaggctgaagggccagatggagaggctgcagagcccattggagaggctggacagccaaatggagaggccgagcagccaaatggggatgctgatgagccagatggtgcaggtattgaagacccagaagaaagagctgaagagccagagggaaaagctgaagagccagagggagatgccgacgagcctgacggtgtgggaattgaagacccagaagaaggtgaagatcaagagattcaggtagaagaaccatactatgactgccatgaatgcacagaaaccttcacttccagcacagcattcagtgaacacctgaaaactcatgccagcatgatcatatttgagcctgcaaatgcctttggggagtgctcaggctacatcgaacgtgccagcaccagcacaggtggtgccaatcaagctgatgagaagtacttcaaatgtgacgtctgtgggcagctcttcaatgaccgcctgtccctcgccagacaccagaatacccacactggctga

SEQ ID NO: 59620 - DNA, 5052 bp, Artificial Sequence
  derived and/or modified sequence
gtttgggaggcgcgggagatgtccaccctgggctggtggcgccgccgggcgccgggcgccatgagggtgcgctaggcggctgttcgtgcccgaggctgcgcagcactgaggtgagctttgccttcttgatcttccgtccttcttggagacgactggcgagaggaagagggactaggtccaaacgctaggtggctgggtccaggtccctgagtactgacggtcacaggctgccgcgtctttcctgttgactcatgtttggttcctccagtgaaaattttacttagagaaatgctgcctccaaagcacttgtctgccaccaaacctaagaagtcctgggccccaaatctgtatgagctagacagtgacttgactaaggagccggatgtcatcataggagaaggtccaactgactctgagttttttcatcagaggtttcggaacctaatctatgtggaatttgttgggcctcggaagaccctgatcaaactccgaaacctctgcctcgattggttgcagccggagacccgcaccaaggaggagatcatcgagctcttggtccttgagcagtacctgaccatcatccctgaaaagctcaagccttgggtgcgagcaaaaaagccggagaactgtgagaagctcgtcactctgctggagaattacaaggagatgtaccaaccagaagacgacaacaacagtgacgtgaccagcgacgacgacatgacccggaacagaagagagtcctcaccacctcactcagtccattctttcagtgaccgggactgggaccggaggggcagaagcagagacatggagccacgagaccgctggtcccacaccaggaacccaagaagcaggatgcctccgcgggatctttcccttcctgtggtggcgaaaacaagctttgaaatggacagagaggacgacagggactccagggcttatgagtcccgatctcaggatgctgaatcataccaaaatgtggtggacctcgctgaggacaggaaacctcacaacacaatccaggacaacatggaaaactacaggaagctgctctccctcgtgcagcttgctgaagacgatggccactcccacatgacgcagggccactcatcaagatccaagagaagtgcctacccaagcaccagtcgaggtctaaaaactatgcctgaagccaaaaaatcaacccaccggcgggggatttgtgaagatgaatcttcccacggagtgataatggaaaaattcatcaaggatgtgtcacgcagttccaaatcgggaagagcaagggagtcaagcgaccggtcacagagattccccagaatgtcagatgataactggaaggacatttcattgaacaagagggagtcagtgatccagcagcgggtttatgaagggaatgcatttaggggaggctttaggtttaattcaacccttgtttccagaaagagagttcttgaaagaaagaggcgctatcattttgacacagatgggaagggctcgattcacgatcaaaaaggctgtcccaggaagaagccctttgaatgtggtagtgagatgagaaaagccatgagcgtgagcagcctgagcagcctcagctccccctcctttaccgagtcacagccaattgattttggggcaatgccatatgtatgtgatgagtgtgggaggtcgttcagtgtcatctcagaatttgttgagcaccagatcatgcatactagagagaacctctatgagtatggtgagtcctttatccacagtgtggctgtcagtgaagttcagaaaagtcaggttggagggaaacgttttgaatgtaaggactgtggagagaccttcaataagagtgccgccttggctgaacatcggaagattcatgctagaggttatcttgtggaatgtaagaatcaggaatgtgaggaagccttcatgcctagccccacctttagtgagcttcagaaaatatatggcaaagacaaattctacgagtgcagggtgtgtaaggaaaccttccttcatagttctgccctgattgagcaccagaaaatccactttggggatgacaaagataatgagcgtgaacatgaacgtgaacgtgaacgtgagcgcggggaaacctttaggcccagcccagcccttaatgagtttcagaaaatgtatggtaaagagaaaatgtacgaatgtaaggtgtgtggggagactttccttcatagctcatccctgaaagaacatcagaaaatccatactagagggaacccatttgaaaacaagggtaaagtgtgtgaggaaacctttattcctggtcagtcccttaaaaggcgtcagaaaacttacaataaggagaagctctgtgactttacagatggccgggatgccttcatgcaaagctcagagctcagtgagcatcagaaaattcattctcgaaagaacctctttgaaggcagagggtatgagaaatctgtcattcatagtgggccattcactgaatctcagaagagtcatactataacaagacctcttgaaagtgatgaggacgaaaaggcgttcaccattagctctaacccctatgaaaaccagaagattcccactaaggaaaatgtctatgaggcaaaatcatatgagaggtctgttattcatagcttagcctctgtggaagctcagaaaagtcacagtgtagcagggcccagtaaaccaaaagtaatggcagagtctaccattcagagcttcgatgctatcaaccatcagagagttcgtgctggagggaacacctctgaaggaagggaatacagtaggtctgttatccatagcttagtggcttccaaacctccaagaagtcacaatggaaatgaattggtggaatctaatgagaagggagaatcctccatttatatctcagaccttaatgataagcgacagaagattcctgccagagagaacccttgtgaagggggcagtaagaatcgcaactatgaagactctgtcatacagagtgtattccgtgccaaacctcagaaaagtgttcctggagagggatctggtgagtttaagaaggatggcgaattctctgttcccagctcaaatgtccgtgaataccagaaggctcgtgctaaaaagaaatacattgagcataggagcaatgagacctctgtaattcactctctgccttttggtgaacaaacatttcgccctcgagggatgctctatgaatgtcaggagtgtggggagtgctttgctcatagctctgacctcactgagcaccagaagattcatgatagggagaagccctctggaagcagaaactatgaatggtctgtcattcgcagcttggcccctactgaccctcaaacaagttacgcccaagagcagtatgctaaagagcaagcgcggaacaaatgtaaggacttcagacaattttttgctaccagcgaagacctcaacacaaaccagaaaatctatgaccaagagaagtctcatggcgaggagtctcaaggcgagaatactgatggggaggagacccacagcgaggagacccatggtcaggagacaattgaagaccctgtcattcaaggctcagacatggaagaccctcagaaggatgaccctgatgacaaaatctatgaatgtgaggactgtggcctgggctttgtggatctcacagacctcacagaccatcagaaagtccacagcaggaagtgcctggttgacagtcgggagtacacacattctgtaattcacacccattccatcagcgagtatcagagagattacactggagagcagctgtatgaatgtccaaagtgtggggaatcttttattcatagctcattccttttcgagcatcagagaatccatgaacaagaccagttgtattccatgaaggggtgtgatgatggttttattgccctcttgcccatgaagccacggaggaatcgtgctgcagagaggaatcctgctcttgctgggtcggccattcgatgccttttgtgtggacaaggcttcattcatagctctgcccttaatgagcatatgagacttcatagggaagatgatttactggagcagagccagatggctgaggaagctatcattccaggcttagccctcactgagtttcagagaagtcagaccgaagagagactctttgaatgtgcagtctgtggagaatctttcgtcaacccagcagaacttgcagatcacgtaactgttcataagaatgagccctatgagtacgggtcctcctatactcacacctcatttcttactgagcccctcaaaggagctataccattctatgaatgcaaggattgtggtaagtcctttattcatagcacagtcctcactaaacataaggagcttcatctggaagaagaagaagaagatgaagcagcagcagctgcagcagcagcagcccaggaagttgaagccaatgtccatgttccacaagtagttctgaggattcagggcttaaacgtagaggctgctgagccagaagtggaggctgccgagccagaagtggaggctgctgagccagaagtggaggctgctgagccaaacggagaggctgaagggccagatggagaggctgcagagcccattggagaggctggacagccaaatggagaggccgagcagccaaatggggatgctgatgagccagatggtgcaggtattgaagacccagaagaaagagctgaagagccagagggaaaagctgaagagccagagggagatgccgacgagcctgacggtgtgggaattgaagacccagaagaaggtgaagatcaagagattcaggtagaagaaccatactatgactgccatgaatgcacagaaaccttcacttccagcacagcattcagtgaacacctgaaaactcatgccagcatgatcatatttgagcctgcaaatgcctttggggagtgctcaggctacatcgaacgtgccagcaccagcacaggtggtgccaatcaagctgatgagaagtacttcaaatgtgacgtctgtgggcagctcttcaatgaccgcctgtccctcgccagacaccagaatacccacactggc

SEQ ID NO: 59621 - DNA, 5304 bp, Artificial Sequence
  derived and/or modified sequence
gcagaagtctgggcagctgcgggaggagaggtttgggaggcgcgggagatgtccaccctgggctggtggcgccgccgggcgccgggcgccatgagggtgcgctaggcggctgttcgtgcccgaggctgcgcagcactgaggtgagctttgccttcttgatcttccgtccttcttggagacgactggcgagaggaagagggactaggtccaaacgctaggtggctgggtccagccggagacccgcaccaaggaggagatcatcgagctcttggtccttgagcagtacctgaccatcatccctgaaaagctcaagccttgggtgcgagcaaaaaagccggagaactgtgagaagctcgtcactctgctggagaattacaaggagatgtaccaaccagaagacgacaacaacagtgacgtgaccagcgacgacgacatgacccggaacagaagagagtcctcaccacctcactcagtccattctttcagtggtgaccgggactgggaccggaggggcagaagcagagacatggagccacgagaccgctggtcccacaccaggaacccaagaagcaggatgcctccgcgggatctttcccttcctgtggtggcgaaaacaagctttgaaatggacagagaggacgacagggactccagggcttatgagtcccgatctcaggatgctgaatcataccaaaatgtggtggacctcgctgaggacaggaaacctcacaacacaatccaggacaacatggaaaactacaggaagctgctctccctcggagtgcagcttgctgaagacgatggccactcccacatgacgcagggccactcatcaagatccaagagaagtgcctacccaagcaccagtcgaggtctaaaaactatgcctgaagccaaaaaatcaacccaccggcgggggatttgtgaagatgaatcttcccacggagtgataatggaaaaattcatcaaggatgtgtcacgcagttccaaatcgggaagagcaagggagtcaagcgaccggtcacagagattccccagaatgtcagatgataactggaaggacatttcattgaacaagagggagtcagtgatccagcagcgggtttatgaagggaatgcatttaggggaggctttaggtttaattcaacccttgtttccagaaagagagttcttgaaagaaagaggcgctatcattttgacacagatgggaagggctcgattcacgatcaaaaaggctgtcccaggaagaagccctttgaatgtggtagtgagatgagaaaagccatgagcgtgagcagcctgagcagcctcagctccccctcctttaccgagtcacagccaattgattttggggcaatgccatatgtatgtgatgagtgtgggaggtcgttcagtgtcatctcagaatttgttgagcaccagatcatgcatactagagagaacctctatgagtatggtgagtcctttatccacagtgtggctgtcagtgaagttcagaaaagtcaggttggagggaaacgttttgaatgtaaggactgtggagagaccttcaataagagtgccgccttggctgaacatcggaagattcatgctagaggttatcttgtggaatgtaagaatcaggaatgtgaggaagccttcatgcctagccccacctttagtgagcttcagaaaatatatggcaaagacaaattctacgagtgcagggtgtgtaaggaaaccttccttcatagttctgccctgattgagcaccagaaaatccactttggggatgacaaagataatgagcgtgaacatgaacgtgaacgtgaacgtgagcgcggggaaacctttaggcccagcccagcccttaatgagtttcagaaaatgtatggtaaagagaaaatgtacgaatgtaaggtgtgtggggagactttccttcatagctcatccctgaaagaacatcagaaaatccatactagagggaacccatttgaaaacaagggtaaagtgtgtgaggaaacctttattcctggtcagtcccttaaaaggcgtcagaaaacttacaataaggagaagctctgtgactttacagatggccgggatgccttcatgcaaagctcagagctcagtgagcatcagaaaattcattctcgaaagaacctctttgaaggcagagggtatgagaaatctgtcattcatagtgggccattcactgaatctcagaagagtcatactataacaagacctcttgaaagtgatgaggacgaaaaggcgttcaccattagctctaacccctatgaaaaccagaagattcccactaaggaaaatgtctatgaggcaaaatcatatgagaggtctgttattcatagcttagcctctgtggaagctcagaaaagtcacagtgtagcagggcccagtaaaccaaaagtaatggcagagtctaccattcagagcttcgatgctatcaaccatcagagagttcgtgctggagggaacacctctgaaggaagggaatacagtaggtctgttatccatagcttagtggcttccaaacctccaagaagtcacaatggaaatgaattggtggaatctaatgagaagggagaatcctccatttatatctcagaccttaatgataagcgacagaagattcctgccagagagaacccttgtgaagggggcagtaagaatcgcaactatgaagactctgtcatacagagtgtattccgtgccaaacctcagaaaagtgttcctggagagggatctggtgagtttaagaaggatggcgaattctctgttcccagctcaaatgtccgtgaataccagaaggctcgtgctaaaaagaaatacattgagcataggagcaatgagacctctgtaattcactctctgccttttggtgaacaaacatttcgccctcgagggatgctctatgaatgtcaggagtgtggggagtgctttgctcatagctctgacctcactgagcaccagaagattcatgatagggagaagccctctggaagcagaaactatgaatggtctgtcattcgcagcttggcccctactgaccctcaaacaagttacgcccaagagcagtatgctaaagagcaagcgcggaacaaatgtaaggacttcagacaattttttgctaccagcgaagacctcaacacaaaccagaaaatctatgaccaagagaagtctcatggcgaggagtctcaaggcgagaatactgatggggaggagacccacagcgaggagacccatggtcaggagacaattgaagaccctgtcattcaaggctcagacatggaagaccctcagaaggatgaccctgatgacaaaatctatgaatgtgaggactgtggcctgggctttgtggatctcacagacctcacagaccatcagaaagtccacagcaggaagtgcctggttgacagtcgggagtacacacattctgtaattcacacccattccatcagcgagtatcagagagattacactggagagcagctgtatgaatgtccaaagtgtggggaatcttttattcatagctcattccttttcgagcatcagagaatccatgaacaagaccagttgtattccatgaaggggtgtgatgatggttttattgccctcttgcccatgaagccacggaggaatcgtgctgcagagaggaatcctgctcttgctgggtcggccattcgatgccttttgtgtggacaaggcttcattcatagctctgcccttaatgagcatatgagacttcatagggaagatgatttactggagcagagccagatggctgaggaagctatcattccaggcttagccctcactgagtttcagagaagtcagaccgaagagagactctttgaatgtgcagtctgtggagaatctttcgtcaacccagcagaacttgcagatcacgtaactgttcataagaatgagccctatgagtacgggtcctcctatactcacacctcatttcttactgagcccctcaaaggagctataccattctatgaatgcaaggattgtggtaagtcctttattcatagcacagtcctcactaaacataaggagcttcatctggaagaagaagaagaagatgaagcagcagcagctgcagcagcagcagcccaggaagttgaagccaatgtccatgttccacaagtagttctgaggattcagggcttaaacgtagaggctgctgagccagaagtggaggctgccgagccagaagtggaggctgctgagccagaagtggaggctgctgagccaaacggagaggctgaagggccagatggagaggctgcagagcccattggagaggctggacagccaaatggagaggccgagcagccaaatggggatgctgatgagccagatggtgcaggtattgaagacccagaagaaagagctgaagagccagagggaaaagctgaagagccagagggagatgccgacgagcctgacggtgtgggaattgaagacccagaagaaggtgaagatcaagagattcaggtagaagaaccatactatgactgccatgaatgcacagaaaccttcacttccagcacagcattcagtgaacacctgaaaactcatgccagcatgatcatatttgagcctgcaaatgcctttggggagtgctcaggctacatcgaacgtgccagcaccagcacaggtggtgccaatcaagctgatgagaagtacttcaaatgtgacgtctgtgggcagctcttcaatgaccgcctgtccctcgccagacaccagaatacccacactggctgagggcatggggtaaaggttagaaaaccttcacctaggacttgacccttaccaaaccacagagaatccaaaccaatccatgataatgtcagtaggagacttaaccttagtgtgttacacacctgacttaacatctctaaactcagattgaaaagagaccgaatgtgcagattccacagtcttaagctttccccttcagatgtcagtgtctgcatgtgggaaagccatagcacacatcttacctttccaagtaatcagattgagaaaaccctatgagtattccagactacagagtttgcccaaatcaactgtaaatgacacttgtgtaacgtatatatagtgtttcatgaggtgtatataaaatagcaaattatgacagaacagtgatcacatatatttggatttatatgatatacagttacagtttactctgcagaggtaccttacctggtattctttgaattttttttttttttggaggaggaagagagcaacaaatttgattatatttttaagtgtcttagatcctg

SEQ ID NO: 59622 - DNA, 8723 bp, Artificial Sequence
  derived and/or modified sequence
gtttgggaggcgcgggagatgtccaccctgggctggtggcgccgccgggcgccgggcgccatgagggtgcgctaggcggctgttcgtgcccgaggctgcgcagcactgaggtgagctttgccttcttgatcttccgtccttcttggagacgactggcgagaggaagagggactaggtccaaacgctaggtggctgggtccagatacctgtgttttgactctgttcctgtggatagctgcttggtctgaagttccagaaaggatcctgttcccagacaggtccctgagtactgacggtcacaggctgccgcgtctttcctgttgactcatgtttggttcctccagtgaaaattttacttagagaaatgctgcctccaaagcacttgtctgccaccaaacctaagaagtcctgggccccaaatctgtatgagctagacagtgacttgactaaggagccggatgtcatcataggagaaggtccaactgactctgagttttttcatcagaggtttcggaacctaatctatgtggaatttgttgggcctcggaagaccctgatcaaactccgaaacctctgcctcgattggttgcagccggagacccgcaccaaggaggagatcatcgagctcttggtccttgagcagtacctgaccatcatccctgaaaagctcaagccttgggtgcgagcaaaaaagccggagaactgtgagaagctcgtcactctgctggagaattacaaggagatgtaccaaccagaagacgacaacaacagtgacgtgaccagcgacgacgacatgacccggaacagaagagagtcctcaccacctcactcagtccattctttcagtgaccgggactgggaccggaggggcagaagcagagacatggagccacgagaccgctggtcccacaccaggaacccaagaagcaggatgcctccgcgggatctttcccttcctgtggtggcgaaaacaagctttgaaatggacagagaggacgacagggactccagggcttatgagtcccgatctcaggatgctgaatcataccaaaatgtggtggacctcgctgaggacaggaaacctcacaacacaatccaggacaacatggaaaactacaggaagctgctctccctcgtgcagcttgctgaagacgatggccactcccacatgacgcagggccactcatcaagatccaagagaagtgcctacccaagcaccagtcgaggtctaaaaactatgcctgaagccaaaaaatcaacccaccggcgggggatttgtgaagatgaatcttcccacggagtgataatggaaaaattcatcaaggatgtgtcacgcagttccaaatcgggaagagcaagggagtcaagcgaccggtcacagagattccccagaatgtcagatgataactggaaggacatttcattgaacaagagggagtcagtgatccagcagcgggtttatgaagggaatgcatttaggggaggctttaggtttaattcaacccttgtttccagaaagagagttcttgaaagaaagaggcgctatcattttgacacagatgggaagggctcgattcacgatcaaaaaggctgtcccaggaagaagccctttgaatgtggtagtgagatgagaaaagccatgagcgtgagcagcctgagcagcctcagctccccctcctttaccgagtcacagccaattgattttggggcaatgccatatgtatgtgatgagtgtgggaggtcgttcagtgtcatctcagaatttgttgagcaccagatcatgcatactagagagaacctctatgagtatggtgagtcctttatccacagtgtggctgtcagtgaagttcagaaaagtcaggttggagggaaacgttttgaatgtaaggactgtggagagaccttcaataagagtgccgccttggctgaacatcggaagattcatgctagaggttatcttgtggaatgtaagaatcaggaatgtgaggaagccttcatgcctagccccacctttagtgagcttcagaaaatatatggcaaagacaaattctacgagtgcagggtgtgtaaggaaaccttccttcatagttctgccctgattgagcaccagaaaatccactttggggatgacaaagataatgagcgtgaacatgaacgtgaacgtgaacgtgagcgcggggaaacctttaggcccagcccagcccttaatgagtttcagaaaatgtatggtaaagagaaaatgtacgaatgtaaggtgtgtggggagactttccttcatagctcatccctgaaagaacatcagaaaatccatactagagggaacccatttgaaaacaagggtaaagtgtgtgaggaaacctttattcctggtcagtcccttaaaaggcgtcagaaaacttacaataaggagaagctctgtgactttacagatggccgggatgccttcatgcaaagctcagagctcagtgagcatcagaaaattcattctcgaaagaacctctttgaaggcagagggtatgagaaatctgtcattcatagtgggccattcactgaatctcagaagagtcatactataacaagacctcttgaaagtgatgaggacgaaaaggcgttcaccattagctctaacccctatgaaaaccagaagattcccactaaggaaaatgtctatgaggcaaaatcatatgagaggtctgttattcatagcttagcctctgtggaagctcagaaaagtcacagtgtagcagggcccagtaaaccaaaagtaatggcagagtctaccattcagagcttcgatgctatcaaccatcagagagttcgtgctggagggaacacctctgaaggaagggaatacagtaggtctgttatccatagcttagtggcttccaaacctccaagaagtcacaatggaaatgaattggtggaatctaatgagaagggagaatcctccatttatatctcagaccttaatgataagcgacagaagattcctgccagagagaacccttgtgaagggggcagtaagaatcgcaactatgaagactctgtcatacagagtgtattccgtgccaaacctcagaaaagtgttcctggagagggatctggtgagtttaagaaggatggcgaattctctgttcccagctcaaatgtccgtgaataccagaaggctcgtgctaaaaagaaatacattgagcataggagcaatgagacctctgtaattcactctctgccttttggtgaacaaacatttcgccctcgagggatgctctatgaatgtcaggagtgtggggagtgctttgctcatagctctgacctcactgagcaccagaagattcatgatagggagaagccctctggaagcagaaactatgaatggtctgtcattcgcagcttggcccctactgaccctcaaacaagttacgcccaagagcagtatgctaaagagcaagcgcggaacaaatgtaaggacttcagacaattttttgctaccagcgaagacctcaacacaaaccagaaaatctatgaccaagagaagtctcatggcgaggagtctcaaggcgagaatactgatggggaggagacccacagcgaggagacccatggtcaggagacaattgaagaccctgtcattcaaggctcagacatggaagaccctcagaaggatgaccctgatgacaaaatctatgaatgtgaggactgtggcctgggctttgtggatctcacagacctcacagaccatcagaaagtccacagcaggaagtgcctggttgacagtcgggagtacacacattctgtaattcacacccattccatcagcgagtatcagagagattacactggagagcagctgtatgaatgtccaaagtgtggggaatcttttattcatagctcattccttttcgagcatcagagaatccatgaacaagaccagttgtattccatgaaggggtgtgatgatggttttattgccctcttgcccatgaagccacggaggaatcgtgctgcagagaggaatcctgctcttgctgggtcggccattcgatgccttttgtgtggacaaggcttcattcatagctctgcccttaatgagcatatgagacttcatagggaagatgatttactggagcagagccagatggctgaggaagctatcattccaggcttagccctcactgagtttcagagaagtcagaccgaagagagactctttgaatgtgcagtctgtggagaatctttcgtcaacccagcagaacttgcagatcacgtaactgttcataagaatgagccctatgagtacgggtcctcctatactcacacctcatttcttactgagcccctcaaaggagctataccattctatgaatgcaaggattgtggtaagtcctttattcatagcacagtcctcactaaacataaggagcttcatctggaagaagaagaagaagatgaagcagcagcagctgcagcagcagcagcccaggaagttgaagccaatgtccatgttccacaagtagttctgaggattcagggcttaaacgtagaggctgctgagccagaagtggaggctgccgagccagaagtggaggctgctgagccagaagtggaggctgctgagccaaacggagaggctgaagggccagatggagaggctgcagagcccattggagaggctggacagccaaatggagaggccgagcagccaaatggggatgctgatgagccagatggtgcaggtattgaagacccagaagaaagagctgaagagccagagggaaaagctgaagagccagagggagatgccgacgagcctgacggtgtgggaattgaagacccagaagaaggtgaagatcaagagattcaggtagaagaaccatactatgactgccatgaatgcacagaaaccttcacttccagcacagcattcagtgaacacctgaaaactcatgccagcatgatcatatttgagcctgcaaatgcctttggggagtgctcaggctacatcgaacgtgccagcaccagcacaggtggtgccaatcaagctgatgagaagtacttcaaatgtgacgtctgtgggcagctcttcaatgaccgcctgtccctcgccagacaccagaatacccacactggctgagggcatggggtaaaggttagaaaaccttcacctaggacttgacccttaccaaaccacagagaatccaaaccaatccatgataatgtcagtaggagacttaaccttagtgtgttacacacctgacttaacatctctaaactcagattgaaaagagaccgaatgtgcagattccacagtcttaagctttccccttcagatgtcagtgtctgcatgtgggaaagccatagcacacatcttacctttccaagtaatcagattgagaaaaccctatgagtattccagactacagagtttgcccaaatcaactgtaaatgacacttgtgtaacgtatatatagtgtttcatgaggtgtatataaaatagcaaattatgacagaacagtgatcacatatatttggatttatatgatatacagttacagtttactctgcagaggtaccttacctggtattctttgaattttttttttttttggaggaggaagagagcaacaaatttgattatatttttaagtgtcttagatcctgagaaagatttattgtgcattatttgaaccctgtcaatatctttttgagtaattgttttgtttcttacccttaaatagtcttgtgaagctgtaggcatgatagataacatggcttttactccttactgtttgaaaagataagtactttagcttctttctgcagccatttcatctgcgccaacactttggaacctaatactgtgtaaggctttacaatatacggattggctttttgtgacccagattgattggttgccacatgttatgtttgttgaagtggttctcatgcaaaaatattacacatttgtgttctgggttttttttttttttaaccaactcaatatgtgtttgatgatagtgaattgataaaacccgaagcttttccctgtaaatcttacatctttgcctttaaagaatgggttacaaccatcactagatcacagtagtgcctaatgaaggttgagaaccgtaggagaggctctcatgctgtaaataatgttgcaggctaataacctttcatcacttcctttgtgcgcttcctgccttaagtgacaagtagcaacatggcttgggtcccctgtgcagcatcagcttatgctgccacaagtcagtttgcaccctaggtgcccaggagctagtatccttagatctttctatcgctaacttaattctcttcgttatttatctgaccctctaactccatgtctaacttgcattaaaaaaaaaaaaattctttacagtcaacccaagcttaacatggactcaggttccccagcagccttaatttgttttgttaacatctgttccttctttttcagctctcctagagtatttctgagtgttgtgttcatctaatcttagtattcttttaattacaaattgacctcacagcttgaggtttcttgtgtcctattctgtggactacctgtgctcctttgcttcccctcccctcgcataataactatattaagaaattttttttggccttgagttggctggaaaaaaaatataaaatttaaaaaatttaaaaaaaaagatttgcaaaatgtaagtgtagatcatttgaacaagcaaaattaaagtacccactgggggaaatgtgtctgaatcttactcttctggatctgcaggattagggcttggaagtatgtcaaagatgcagggagtgtcaaagtttaggaagattgtagagctgagagcaagaagcagaaatgagtgagtcaaagaagggagtcctaatatatcaccagatctaggaggggagaggagacagacagaagaaaacaccagaggcaagaactgtagaaggccaggtttctgagaatgaattgagcggggtgtcctgagcagtttggaaaaggagtttttgatggtatggtgtaggtgagggctggctgcataggaaggactgaggttggaacggacatcgggaaagctgaggggcagtgaggtttactacatgggaaaaggactcttgaaacgagaatcagtgttgatgtcggggtgaactttgtgggtacattacttggtgttaacattgttggcagtggtagccccttttcagaaagcaacttgctgtaagtcagggtgtccgttccaaccttcagctagtgaaaaggtagtaacaaatggtaaacaagagaatgattgtttaaacctatctgtggacacttaatgcaactgtttaaaaatgataatcacgagttatgtagcaacgtggaaatatatttacagaacattaagtggagaaagcaggacacgaaagtatatttatactacagttataactcaacagttcatttatatgctgttcatttaacagttcatttaaacagttcattataactgtttaaaaatatatatgcttatagtcaaaagctgttgtggtgttgttgttgtaggcttatagttgagcattattttcttaaatttcttgaatgttctttatggtagtgttactaaaaagtttatgatcacattttcattgtgaacataatttgaactcattatcacacacttggaaaatacagaaaagtggaggaaaaaaaatcatatccccaccatccaaagacatatactctcctcttatcttgttcattcttgtttctgtgcacaggtttatgattataactgtgtcaaaatgtatattcaaaatagctgttacattacctttgtggaattatggttaaatactttcactttaattttttcaaatgttccctataataatgtcctgataacagtgtattatgtgtgtctccattggtgtgcataatacatacccagaggaaaaattagaaaataaagtaaattattttaaaaaattacctatattcccaacacctaacaactactgctaacatcttgatctgtttcctctatcttgtttcagtgcacacgcttgtgataacagtgttaaatatgtgtgcataaagtcttaaatgaaaagatgtggaaaataactaaaatagtgttgtcattgtgggaatttggttaaatattttgtctcaaattccttaaataatctttggtgttttggtaataaattttatgtatgtattttccattacaaatataatacatactcatacaaaactttggaaattcagtaaagaaaattcacacatattcccaacacccaacaacaattaactgttaacatcttgatctgtgcactagtctgtgattattagggtgttagtgataagtatgcataaatgtcaaagatgggaagaaagatgaaaaacaagaaatagttgtgtggttgttgtgggattatggttattttgtttcggtttccttgaaaggtcatcattctagtgttttggtagtccacctttactacatatatttccattatatatgaaatgtgttcattatagaaactttgaagttacagaaatgtagaagagaaactcacccatgttttcaccatccaaagagtgtggttaacatcttgatatattttcttcatcttgtttctgtgcacaggtttttggtttgttaatatggttgtggtcattctatctgtaatagtgtcaacaataaaaataaagttaaaaataa

SEQ ID NO: 59623 - protein, 1464 aa, Artificial Sequence
  derived and/or modified sequence
MYQPEDDNNSDVTSDDDMTRNRRESSPPHSVHSFSGDRDWDRRGRSRDMEPRDRWSHTRNPRSRMPPRDLSLPVVAKTSFEMDREDDRDSRAYESRSQDAESYQNVVDLAEDRKPHNTIQDNMENYRKLLSLGVQLAEDDGHSHMTQGHSSRSKRSAYPSTSRGLKTMPEAKKSTHRRGICEDESSHGVIMEKFIKDVSRSSKSGRARESSDRSQRFPRMSDDNWKDISLNKRESVIQQRVYEGNAFRGGFRFNSTLVSRKRVLERKRRYHFDTDGKGSIHDQKGCPRKKPFECGSEMRKAMSVSSLSSLSSPSFTESQPIDFGAMPYVCDECGRSFSVISEFVEHQIMHTRENLYEYGESFIHSVAVSEVQKSQVGGKRFECKDCGETFNKSAALAEHRKIHARGYLVECKNQECEEAFMPSPTFSELQKIYGKDKFYECRVCKETFLHSSALIEHQKIHFGDDKDNEREHERERERERGETFRPSPALNEFQKMYGKEKMYECKVCGETFLHSSSLKEHQKIHTRGNPFENKGKVCEETFIPGQSLKRRQKTYNKEKLCDFTDGRDAFMQSSELSEHQKIHSRKNLFEGRGYEKSVIHSGPFTESQKSHTITRPLESDEDEKAFTISSNPYENQKIPTKENVYEAKSYERSVIHSLASVEAQKSHSVAGPSKPKVMAESTIQSFDAINHQRVRAGGNTSEGREYSRSVIHSLVASKPPRSHNGNELVESNEKGESSIYISDLNDKRQKIPARENPCEGGSKNRNYEDSVIQSVFRAKPQKSVPGEGSGEFKKDGEFSVPSSNVREYQKARAKKKYIEHRSNETSVIHSLPFGEQTFRPRGMLYECQECGECFAHSSDLTEHQKIHDREKPSGSRNYEWSVIRSLAPTDPQTSYAQEQYAKEQARNKCKDFRQFFATSEDLNTNQKIYDQEKSHGEESQGENTDGEETHSEETHGQETIEDPVIQGSDMEDPQKDDPDDKIYECEDCGLGFVDLTDLTDHQKVHSRKCLVDSREYTHSVIHTHSISEYQRDYTGEQLYECPKCGESFIHSSFLFEHQRIHEQDQLYSMKGCDDGFIALLPMKPRRNRAAERNPALAGSAIRCLLCGQGFIHSSALNEHMRLHREDDLLEQSQMAEEAIIPGLALTEFQRSQTEERLFECAVCGESFVNPAELADHVTVHKNEPYEYGSSYTHTSFLTEPLKGAIPFYECKDCGKSFIHSTVLTKHKELHLEEEEEDEAAAAAAAAAQEVEANVHVPQVVLRIQGLNVEAAEPEVEAAEPEVEAAEPEVEAAEPNGEAEGPDGEAAEPIGEAGQPNGEAEQPNGDADEPDGAGIEDPEERAEEPEGKAEEPEGDADEPDGVGIEDPEEGEDQEIQVEEPYYDCHECTETFTSSTAFSEHLKTHASMIIFEPANAFGECSGYIERASTSTGGANQADEKYFKCDVCGQLFNDRLSLARHQNTHTG

SEQ ID NO: 59624 - DNA, 4395 bp, Artificial Sequence
  derived and/or modified sequence
atgtaccagccagaagatgataataacagtgatgtaacgtccgacgatgatatgacaaggaataggagggaatctagtcctccccattccgtccactcattcagtggggaccgtgattgggaccggcgcggccggagccgcgacatggagccccgggacaggtggagccacacacgcaatccaagatccaggatgcccccgcgggatttgtccttgcccgtagtggccaagacctccttcgagatggaccgtgaggatgatagagactcccgcgcatatgaatctcggtcacaggacgccgagagctaccaaaacgtggttgacctggccgaagataggaagccacataatacaatccaagacaatatggaaaattacaggaagctgctgtccttaggagtccaactcgcagaggacgatggccacagtcacatgacacaggggcacagctcacggtcgaagagaagcgcctatccctccacgtcccgtggtctgaaaaccatgccagaggctaaaaagtcaactcataggcggggaatctgtgaagacgagagctcccacggggtcataatggagaaattcatcaaagacgtcagcaggtcatctaaaagcggacgagctagggagagctctgaccgatctcagcgcttccccaggatgagcgatgataactggaaagatattagtctaaacaagcgggaatcagtgatccagcagagggtgtacgaaggtaacgctttcagaggtgggtttcggttcaacagtaccctggtcagcagaaaaagagtgctggaaagaaaacggcggtaccactttgacaccgacggaaaaggatcgattcatgaccaaaagggctgtcctagaaaaaagccgtttgaatgcggttcggaaatgcgtaaagccatgagcgtcagttccctgagttcgctcagtagcccctctttcaccgaaagtcaaccaatcgatttcggggcgatgccatacgtttgcgatgagtgcggccgctcctttagtgtgatatccgagttcgtggagcatcagattatgcataccagagagaacctctacgaatacggcgagtctttcattcactcagtggccgtgtctgaggtacagaaatcccaggtgggcgggaaacgttttgaatgcaaggattgtggagaaaccttcaataagagcgctgctctggctgagcatagaaagattcacgctcgtgggtacctcgtggagtgtaaaaaccaggagtgcgaagaggccttcatgccctctcctacatttagtgagttacagaagatttacggcaaggacaaattctatgagtgcagggtatgtaaggaaaccttcctgcactcaagtgctctcatcgaacaccaaaaaatccacttcggtgacgacaaggataatgagcgggaacatgagcgcgagcgggagcgggagaggggcgagacctttagaccaagccctgcactgaatgaattccagaagatgtacggcaaggaaaaaatgtacgagtgtaaagtctgcggggagacattcttgcattcaagttctctcaaggaacaccagaagatacacacccgtggtaatcccttcgagaacaagggcaaggtttgcgaggagactttcatccccggtcagagccttaaacgtcgtcagaagacatacaataaagagaaactgtgcgattttacggacgggcgtgacgcctttatgcagtcctctgagctgtctgagcaccagaaaattcactcacggaagaacctgttcgagggtcgcggctatgaaaaatcagtgatacactccggacctttcaccgagagccagaagagccacactatcactcggcctctggagagtgatgaggatgagaaagctttcactatctccagtaatccgtatgagaatcaaaaaatcccaacaaaggagaacgtgtacgaagcaaagtcgtacgagcgaagcgtgattcacagtctagcctcggtggaggctcagaaatcacatagtgtggcaggcccgtcaaaacctaaggtgatggctgagtcgaccatccagtcctttgacgcaatcaaccaccagagggtgcgggccggcggcaatacctctgagggccgggagtactcccgaagcgtcatccattctctggtagcttccaagcctccccggtctcacaatgggaacgagcttgttgaatcaaatgaaaaaggcgagtcaagcatttatattagcgacttgaatgacaagcgacagaagatccctgctcgggagaatccctgtgaagggggtagcaaaaatagaaactatgaagattctgtcattcaatctgtgttccgcgcgaagccccaaaagagtgttcctggtgaaggatccggtgaatttaaaaaggatggtgagttctcagttcctagcagtaacgtgcgcgagtaccagaaggcgagggccaagaagaagtatatcgaacatcggagcaatgagacaagcgtaattcactctctgccatttggggagcagacgttccgccctaggggaatgctttatgagtgtcaggagtgtggagaatgttttgctcatagcagcgatttgaccgagcatcagaagatccacgacagggaaaagccaagtggcagtaggaattacgaatggagcgtcatcagatcacttgcgcctaccgatccgcaaacctcttacgcacaggaacagtatgcaaaagagcaggcccgtaacaaatgtaaggacttcagacagtttttcgcaacctcagaggatcttaacacaaatcagaaaatctatgaccaggagaaaagccacggggaggagtcacagggtgaaaacaccgatggcgaagaaacccactcagaggaaactcacggccaggagactatcgaagatcccgtgatccagggatccgatatggaggatccccagaaagatgaccccgacgacaaaatttacgagtgtgaggattgtggacttgggtttgtcgaccttacagacctgacggatcatcagaaagtccattctaggaagtgcctcgtcgatagtcgcgagtacacccactctgttatacatacccattccatatctgagtaccagcgggattatactggcgagcaactgtatgaatgccccaagtgtggagagtcgttcatccattccagcttcctcttcgaacatcagaggatccatgaacaagaccagctgtacagcatgaaaggctgtgacgatggctttattgcactgttacctatgaagccacggagaaatcgtgccgccgaaagaaaccccgccctcgctggaagtgcaattaggtgtctactttgcggacaaggcttcattcactccagcgcgttgaatgagcatatgcgactgcaccgggaagacgatttgttagagcagtctcaaatggccgaggaggcaatcattcctgggctggcactcaccgagtttcagcgcagtcaaaccgaagaaaggttgtttgagtgtgctgtgtgtggagagtccttcgtgaatcccgctgaactggctgaccatgtcaccgttcacaaaaatgagccttacgagtatgggagtagctacactcataccagctttctgacagaacccctgaaaggggccatccccttctatgaatgcaaagattgtggcaagtcgtttattcactccaccgtcctcactaaacataaggagcttcatcttgaggaagaggaagaggatgaggccgcagccgcggctgccgccgccgctcaggaggtggaggctaatgtccacgttccccaggtggtgttgcggatccagggattgaacgtggaggcagccgaaccggaagtggaggctgcagaacctgaggtagaagccgccgaacctgaggttgaagccgcagaaccaaacggcgaggccgaagggcctgacggcgaagccgccgagccaattggggaagccggccaacctaacggtgaagccgagcaacccaatggagacgctgacgagcctgatggagccgggatagaagaccccgaagagcgcgctgaggaaccagagggcaaagcagaggaacccgaaggagacgccgacgagccagacggcgttggtatagaggacccagaggaaggagaggaccaggaaattcaggtggaagagccgtattacgactgccacgaatgcactgagactttcacgtcaagcactgctttctctgaacatctgaagactcacgcgagtatgattattttcgagccggccaatgcctttggtgaatgttccggctacatcgagcgcgcttctacttccaccgggggtgctaaccaagctgatgaaaagtacttcaagtgtgatgtctgcgggcaattgtttaacgaccgtcttagcttggctcgccatcaaaatacccacacagggtag

SEQ ID NO: 59625 - DNA, 4395 bp, Artificial Sequence
  derived and/or modified sequence
atgtaccagccagaagatgacaacaacagtgatgtgaccagtgatgatgacatgaccaggaacagaagagagagcagccccccccacagcgtgcacagcttcagcggggaccgggactgggaccggcggggccgcagccgggacatggagccccgggaccgctggagccacaccaggaaccccaggagcaggatgccaccccgggacctgagcctgcctgtggtggccaagaccagctttgagatggacagagaagatgaccgggacagccgggcctatgagagccgcagccaggatgctgagagctaccagaatgtggtggacctggccgaggacaggaagccccacaacaccatccaggacaacatggagaactacaggaagctgctgagcctgggcgtgcagctggccgaggatgatggccacagccacatgacccagggccacagcagccgcagcaagaggtctgcctaccccagcaccagccggggcctgaagaccatgcctgaggccaagaagagcacccacagaagaggcatctgtgaagatgagagcagccatggagtcatcatggagaagttcatcaaggatgtgagccgcagcagcaagagcggccgggcccgggagagcagtgacaggagccagcgcttccccaggatgtctgatgacaactggaaggacatcagcctgaacaagcgggagagcgtcatccagcagagggtgtatgagggcaatgccttccggggcggcttccgcttcaacagcaccctggtgtccaggaagagggtgctggagaggaagaggcgctaccactttgacacagatggcaagggcagcatccatgaccagaagggctgccccaggaagaagccctttgaatgtggcagcgagatgaggaaggccatgtctgtgagcagcctgagcagcctgagcagccccagcttcacagagagccagcccatcgactttggagccatgccctacgtgtgtgatgaatgtggccgctccttcagcgtcatcagcgagtttgtggagcaccagatcatgcacacccgggagaacctgtatgaatatggagagagcttcatccacagcgtggccgtgtctgaggtgcagaagagccaggtgggcggcaagagatttgagtgcaaggactgtggggagaccttcaacaagtctgctgccctggccgagcacaggaagatccacgcccggggctacctggtggagtgcaagaaccaggagtgtgaggaggccttcatgcccagccccaccttcagcgagctgcagaagatctacggcaaggacaagttctatgagtgccgggtgtgcaaggagaccttcctgcacagcagcgccctgattgagcaccagaagatccactttggagatgacaaggacaatgaaagagagcacgagcgggagcgggagcgggagcggggggagaccttccggcccagccctgccctgaatgagttccagaagatgtatggcaaggagaagatgtatgagtgcaaggtgtgtggggagaccttcctgcacagcagcagcctgaaggagcaccagaagatccacacccggggcaacccctttgagaacaagggcaaggtgtgtgaggagaccttcatccctggccagagcctgaagaggcggcagaagacctacaacaaggagaagctgtgtgacttcacagatggaagagatgccttcatgcagagcagcgagctgtctgagcaccagaagatccacagcaggaagaacctgtttgagggccggggctatgagaagagcgtcatccacagcggccccttcacagagagccagaagagccacaccatcacccggcccctggagagtgatgaagatgagaaggccttcaccatcagcagcaacccctatgagaaccagaagatccccaccaaggaaaatgtgtatgaggccaagagctatgaaagaagtgtcatccacagcctggcctctgtggaggcccagaagagccacagcgtggccggccccagcaagcccaaggtgatggccgagagcaccatccagagctttgatgccatcaaccaccagagggtgcgggccggcggcaacaccagcgagggccgggagtacagccgcagcgtcatccacagcctggtggccagcaagcccccaagaagccacaatggaaatgagctggtggagagcaatgagaagggggagagcagcatctacatcagtgacctgaatgacaagaggcagaagatcccagcccgggagaacccctgtgagggcggcagcaagaacagaaattatgaggacagcgtcatccagagcgtcttccgggccaagccccagaagtctgtgcctggagagggcagcggggagttcaagaaggatggagagttctctgtgcccagcagcaatgtgcgggagtaccagaaggcccgggccaagaagaagtacatcgagcacaggagcaatgagaccagcgtcatccacagcctgccctttggagagcagaccttccggccccggggcatgctgtatgagtgccaggagtgtggggagtgctttgcccacagcagtgacctgacagagcaccagaagatccatgaccgggagaagcccagcggcagcaggaactatgagtggagcgtcatccgcagcctggcccccacagacccccagaccagctatgcccaggagcagtatgccaaggagcaggccaggaacaagtgcaaggacttccggcagttctttgccaccagcgaggacctgaacaccaaccagaagatctatgaccaggagaagagccatggagaggagagccagggcgagaacacagatggagaggagacccacagcgaggagacccacggccaggagaccattgaagatcctgtgatccagggcagtgacatggaggacccccagaaggatgatcctgatgacaagatctatgaatgtgaggactgtggcctgggctttgtggacctgacagacctgacagaccaccagaaggtgcacagcaggaagtgcctggtggacagccgggagtacacccacagcgtcatccacacccacagcatcagcgagtaccagagggactacaccggggagcagctgtatgagtgccccaagtgtggggagagcttcatccacagcagcttcctgtttgagcaccagagaattcatgagcaggaccagctgtacagcatgaagggctgtgatgatggcttcatcgccctgctgcccatgaagcccaggaggaacagagctgctgagaggaacccagccctggccggcagcgccatccgctgcctgctgtgtggccagggcttcatccacagcagcgccctgaatgagcacatgaggctgcacagagaagatgacctgctggagcagagccagatggccgaggaggccatcatccctggcctggccctgacagagttccagaggagccagacagaggagcggctgtttgaatgtgctgtgtgtggggagagctttgtgaacccagctgagctggccgaccacgtgacagtgcacaagaatgagccctatgaatatggcagcagctacacccacaccagcttcctgacagagcccctgaagggggccatccccttctatgagtgcaaggactgtgggaagagcttcatccacagcacagtgctgaccaagcacaaggagctgcacctggaggaggaggaggaggatgaagctgctgctgctgctgctgctgctgcccaggaggtggaggccaacgtgcacgtgccccaggtggtgctgcgcatccagggcctgaatgtggaggccgctgagcctgaggtggaggccgctgagcctgaggtggaggccgctgagcctgaggtggaggccgctgagcccaatggagaggccgagggcccagatggagaggccgctgagcccatcggggaggccggccagcccaacggggaggccgagcagcccaatggagatgctgatgagccagatggagctggcattgaagatcctgaggagagagctgaggagcctgagggcaaggccgaggagccagaaggagatgctgatgagccagatggagtgggcatcgaggaccctgaggagggggaggaccaggagatccaggtggaggagccctactatgactgccatgaatgtacagagaccttcaccagcagcacagccttcagcgagcacctgaagacccacgcctccatgatcatctttgagcccgccaatgcctttggagaatgttctggctacatcgagcgggccagcaccagcactggaggagccaaccaggctgatgagaagtacttcaagtgtgatgtgtgtggccagctgttcaatgaccggctgagcctggcccggcaccagaacacccacactggatag

SEQ ID NO: 59626 - DNA, 4395 bp, Artificial Sequence
  derived and/or modified sequence
atgtaccagcccgaggacgacaacaacagcgacgtgaccagcgacgacgacatgacccgaaatcgaagggagtcttcccctcctcactctgtgcatagcttcagtggggatagagattgggatcgcagaggccgttccagagatatggaacctcgggaccggtggagccacacacggaaccccagaagtcgtatgccacctcgggatctgtcacttccggtggtggccaagaccagcttcgagatggatcgcgaggatgatagggatagtagagcgtatgagtctcgtagtcaagatgccgagtcgtatcagaacgtcgtcgatttggccgaggacaggaagccccacaacaccattcaggacaatatggagaattatagaaaacttctctccctcggcgtgcagctcgccgaggatgatggacactctcacatgactcagggtcattcaagccgttccaagcgaagcgcatatccctctacgtcccggggattgaaaacaatgcccgaggcgaaaaagagtacccaccgcagggggatatgtgaggacgaaagctcccacggagtgattatggagaagttcattaaggatgtctcacgaagttcaaagtcagggcgggcgcgtgagagctctgaccggtctcagcgtttcccaagaatgagcgacgacaactggaaggatattagcttgaataagcgtgagtctgtcatccagcagcgagtttacgagggcaatgccttccggggtggatttcgtttcaacagtacgctggtcagtaggaaaagagttctggaaagaaagcggcgctatcacttcgatacagacggtaaaggtagcattcacgaccagaaagggtgtccgaggaagaaaccgtttgagtgcggatcagagatgcgaaaagcgatgagtgtctcttccttgtcttccctctcatctcctagcttcactgagagtcagcctattgacttcggcgccatgccatacgtctgtgacgagtgcggcagaagcttttccgtgattagcgagtttgtcgagcatcagatcatgcacacccgggagaatttgtacgaatacggagagtcatttattcacagtgtcgccgtgtccgaggtccagaagagtcaggttgggggaaagcggttcgagtgcaaggattgtggtgaaaccttcaacaaaagcgcagccctcgccgaacaccggaaaatacacgccaggggctacctggtcgagtgcaagaaccaagagtgcgaagaggcatttatgccttccccgacattttctgagctgcaaaaaatctacggcaaagataaattttacgagtgcagggtgtgcaaggagactttcctgcacagctctgcactgattgagcaccagaagatccattttggagatgataaggacaatgaaagagaacatgagcgggagcgagaacgtgagagaggagaaacattccggccttctcccgctctgaacgagttccagaagatgtacggcaaggaaaagatgtacgaatgcaaagtgtgtggcgagaccttcctccactccagcagcctaaaggagcatcagaagattcatacaagaggaaatccttttgagaacaaaggtaaggtctgcgaggaaacctttattcctggccaatcgttgaagaggcgccagaaaacatacaataaagaaaagttgtgcgacttcaccgacggaagggacgcctttatgcagagctccgagttaagtgagcaccaaaagatccattcgcgcaaaaacttgtttgagggacggggctacgaaaaaagtgtgatccacagtggaccgtttactgagtcgcagaaatctcataccattacccgccccctggagagcgacgaggacgaaaaagcgtttaccatttccagcaatccatacgagaatcagaagattcccactaaggaaaatgtgtacgaagcaaagtcatatgagcgcagcgtgatccattcgttggcctccgtagaggcccagaagagccacagtgtggcggggccttccaagcccaaagtcatggctgagagcacaatccagtctttcgatgccataaaccatcagcgggtccgtgccggaggtaatacatcagagggcagggaatacagcaggtctgtaattcactccctcgtggcaagcaaaccaccacggtcccataacggcaatgagttagtggaaagcaatgagaagggggagagctcgatatacatctctgacctgaatgacaagagacaaaagattcccgccagagaaaacccctgcgaaggaggttccaagaatcgcaactatgaggacagcgtgatccaatccgtgtttcgagccaaaccccagaagtctgtacctggcgagggtagtggcgaatttaaaaaggatggtgaattcagcgtcccctcatccaacgtcagggagtatcaaaaagcaagggccaaaaaaaagtacatcgaacaccgcagtaatgagaccagtgtcattcacagtctacctttcggggaacagacttttcggcctcgcggcatgctttacgagtgtcaagaatgcggggagtgttttgcccattctagcgatctgactgagcaccagaagatacatgaccgggaaaaaccgtcaggctcacggaattatgagtggagcgttatacgcagtctcgcccccacagatccacagacgagttacgcacaggagcagtacgcgaaggaacaggcccgcaacaagtgtaaggactttcgccagttttttgcaacatctgaagacctcaatactaaccagaaaatttacgaccaagaaaaatctcatggcgaagagtcccagggtgaaaacacagatggggaggaaacgcattccgaggagacacatggacaggagacaatcgaggacccagtgatccagggctccgacatggaggatccacagaaggacgatccagacgacaaaatttacgagtgtgaagactgtgggcttggattcgtggatctaacagatctgaccgaccaccaaaaggtgcactcacgcaagtgcctggtcgatagccgcgagtacacccactcagtgattcatactcacagtattagtgagtatcaacgggactacacaggggagcaactgtacgagtgcccgaagtgcggcgaatcttttatccattcttcattcctctttgagcaccagaggattcacgaacaggaccagttatactcaatgaagggatgcgacgatggtttcattgccctcttaccgatgaagccacggaggaacagagcagccgaacgaaatccagccttagctggctcagctatcaggtgcctgttatgcggccagggttttatccactcctcagctctgaacgagcacatgcggctgcatcgcgaagacgacttgctggaacagagccagatggctgaagaggcgatcattccaggcttggcactcacagaattccagaggtctcagacagaagaaaggttgttcgaatgcgctgtgtgtggggagtctttcgtcaatccggctgaactggccgaccacgtgaccgtccacaagaacgaaccttatgagtacggctcttcttatacccatacgtcatttctgactgagcccctgaagggggcaatcccattttacgaatgcaaggattgcggcaaaagttttattcacagcacggtgttgaccaagcataaggaactccacctggaggaggaggaagaggatgaggccgcagcagcagctgctgccgcagcacaggaagtggaggccaacgtgcatgtcccccaggtggtgttacgaatacagggactgaacgtggaggctgccgagcccgaagtagaagctgccgaacctgaagttgaggccgccgaaccagaagtggaggcggctgagccgaatggggaggcagaggggcctgatggggaggccgccgaacccatcggagaggccgggcaaccaaacggtgaggccgagcaacccaacggtgacgccgacgaacccgatggggccggcatcgaagaccctgaggaacgtgctgaggaaccagagggcaaggcggaggagcctgaaggcgacgctgatgaacctgacggtgttggcatcgaggacccagaggagggggaagatcaagaaatacaggtggaggagccatactatgattgccacgagtgtaccgagactttcacatcctctacagccttctccgagcacctgaaaactcatgcgagtatgataatctttgaacccgctaacgccttcggagagtgtagtgggtacatcgagagagcttctaccagcaccggtggcgctaatcaggccgacgagaagtacttcaaatgcgacgtgtgcggtcaactgttcaacgaccgactgtcacttgcccgtcatcaaaacacccatacaggatag

SEQ ID NO: 59627 - DNA, 4395 bp, Artificial Sequence
  derived and/or modified sequence
atgtatcagcccgaggacgacaataatagtgacgtgacaagtgacgacgacatgactcgcaacaggcgagagagttctcctccccactcagttcactcattctccggggatcgagactgggaccgaagaggcagatcgagagacatggagcctcgggaccggtggtcgcatactcgcaaccctcggagtcgcatgcctcccagagatctgagcctgcccgtcgtagctaaaacttcttttgaaatggaccgggaagatgacagagattctagagcctatgaatcaaggtcccaagacgcagagtcttatcaaaacgtggtggatttagctgaggaccgcaaaccacacaatactattcaggacaacatggaaaactaccgaaagttactcagtctcggtgtgcaactggctgaggacgatggacattcccatatgactcaggggcattccagcagaagtaaacgctcagcctaccctagcacgtcccggggtctgaagaccatgcctgaagctaagaaatctacacatagaaggggcatctgtgaagacgagtcctcccatggggtcatcatggagaaattcattaaggatgtctctcgatcaagcaaaagcgggagggccagggagagctccgaccggtctcagagattcccaaggatgtctgatgataactggaaagacatcagcctcaataaacgggaaagcgtgattcagcagagggtgtacgaggggaatgctttcagagggggtttccgctttaactccaccctggtcagccgcaagcgagtgctggaacgcaagcgccgataccatttcgatacagacggcaaaggtagcattcatgatcagaagggatgcccgcgtaagaagccgttcgagtgcggctccgagatgcggaaagctatgtctgtgtcgtccctaagctcactgagttctccctcattcaccgaatctcaacctatcgactttggagctatgccgtacgtatgcgacgaatgtggcagaagcttctccgtgatatctgaatttgtggaacatcagatcatgcatactcgtgagaatctttacgagtacggagaatcttttatccatagtgttgctgtctccgaggtgcagaagagccaagtgggaggcaaaaggtttgaatgtaaggattgtggcgagacctttaataagtccgctgccttagcagagcacagaaagatccacgctaggggttacctggttgaatgcaagaaccaagaatgcgaggaggccttcatgccatcccccaccttttccgaattgcagaagatttacggtaaggacaagttttatgaatgccgagtatgcaaggagacctttctccatagcagtgcactcatcgaacatcagaagatccactttggcgacgacaaggataacgagagggagcacgaaagagagcgcgaacgtgagagaggagagactttcaggccctcccctgctctgaatgaatttcagaaaatgtacggcaaagaaaagatgtacgaatgcaaggtatgcggggagacgtttctgcactcttcatcccttaaagagcatcagaagattcataccagaggaaacccattcgaaaataaaggaaaggtgtgcgaggagaccttcattcctgggcagtccttaaagagaagacagaagacttataacaaggaaaaactgtgtgattttactgacggccgtgacgccttcatgcagagctctgaactctccgagcatcagaagattcattcacgaaagaaccttttcgaaggccgtgggtatgaaaagagtgtgatccacagtggccctttcacagagtcgcaaaaaagtcacacaattacccgcccattggagtccgatgaagatgagaaggcatttactatcagtagcaacccatacgagaaccagaaaattcccacaaaggagaacgtgtatgaagcaaagagttacgaacgatctgtcattcattccctggcatccgttgaagcacagaagagtcactccgtcgccggacctagcaagccgaaagtgatggctgaaagcaccatccagtcgtttgatgcgataaaccaccagagggtccgggctgggggtaatacctctgagggcagagagtacagccgaagtgtaatacatagcttggttgcttccaaaccgccaaggtcgcataacggtaatgaactggttgagagcaacgagaaaggggagtcatcgatctatatctctgatctcaacgacaagcgtcagaaaattcctgcgagagagaacccctgtgaaggtggaagtaagaatagaaactacgaagacagcgtgatccagtccgtgttccgcgctaagccacagaagagcgtacccggtgaaggctccggcgaattcaaaaaagacggagaattttcagtgccttcctctaatgtgagggagtatcagaaagcacgcgctaaaaaaaaatacattgagcacaggtctaatgagacatctgtgatccactcccttcccttcggggaacagacctttcgtccccgaggaatgctttatgagtgccaggaatgtggggagtgcttcgcccacagctccgacctgacagagcaccagaagatccatgaccgcgagaaacccagcgggagcagaaactatgaatggagcgtgataaggagcctcgcccctacagacccgcagacatcatacgcacaagaacagtacgccaaggagcaagccaggaacaaatgcaaggacttcaggcagttcttcgccacttccgaagacctgaatactaaccaaaagatctatgaccaagagaagtcacacggggaggagtcccagggcgaaaatacagatggcgaggagacccactctgaggaaacacatggacaggagaccattgaggacccagtaatacagggatccgatatggaggacccacagaaagacgatcctgacgacaagatttacgagtgcgaagactgtggcctgggtttcgtggacctaaccgacctgactgatcatcagaaggtgcactcccggaaatgtctggttgatagtcgcgagtatactcactccgttatccacacacattcaatctctgaatatcaaagagactataccggggagcaactgtatgagtgtcccaagtgcggcgagagcttcatccactcttccttcctgttcgagcatcaacgcatacacgagcaggatcagctctactctatgaagggctgtgatgatggctttatcgctttgcttcccatgaaaccacggcgtaaccgcgcagcagaacgcaaccccgcattggccggatctgccataagatgcctgctctgcggtcagggctttattcatagtagtgctctgaatgaacacatgcggctgcatagagaagacgatttgcttgaacagagtcaaatggccgaggaggctattattcctggcttggctctgaccgaattccagcgatcacagacagaagagcgactctttgaatgtgcggtttgcggcgagtcatttgtgaacccagcagaattggctgaccacgtgacagtgcacaaaaacgagccttatgaatatgggtcgagctatacgcacaccagctttttaacagagcctttgaagggggcaatacctttctacgagtgtaaggattgtggtaaatccttcatacatagtaccgtattgactaagcataaggagctacacttagaggaagaagaggaggatgaagcagcggctgctgccgcagctgccgctcaagaagtcgaagccaacgtgcacgtgcctcaggtggtgctccgcatacagggactgaacgtggaggcggcagagcccgaggtggaagctgcagagccagaagtcgaggccgcagagcccgaagtggaagcagcagagccaaatggggaggctgaagggcctgacggggaggccgctgaacctatcggggaggcgggacagcccaatggagaggctgaacagccaaatggcgatgctgatgagccagatggtgcaggcatcgaagacccagaggaaagggccgaggaaccggagggcaaggccgaagagcctgagggggacgcagacgaacccgacggggtgggaattgaagatccagaagagggtgaagaccaggaaatccaggtggaagaaccctactatgactgtcacgagtgcaccgagacattcaccagctccaccgcttttagcgagcacctgaaaactcacgccagtatgatcatctttgaaccggctaatgcgtttggagaatgctctggttatattgagcgcgcttctacctccactggaggcgcaaaccaggcagatgaaaagtattttaaatgtgatgtgtgcggtcagctgttcaacgaccgcctgtccctggcacggcaccagaatacacataccggttag

SEQ ID NO: 59628 - DNA, 4395 bp, Artificial Sequence
  derived and/or modified sequence
atgtaccagcccgaggacgacaacaacagcgacgtgaccagcgacgacgacatgaccagaaacagaagagagagcagccccccccacagcgtgcacagcttcagcggcgacagagactgggacagaagaggcagaagcagagacatggagcccagagacagatggagccacaccagaaaccccagaagcagaatgccccccagagacctgagcctgcccgtggtggccaagaccagcttcgagatggacagagaggacgacagagacagcagagcctacgagagcagaagccaggacgccgagagctaccagaacgtggtggacctggccgaggacagaaagccccacaacaccatccaggacaacatggagaactacagaaagctgctgagcctgggcgtgcagctggccgaggacgacggccacagccacatgacccagggccacagcagcagaagcaagagaagcgcctaccccagcaccagcagaggcctgaagaccatgcccgaggccaagaagagcacccacagaagaggcatctgcgaggacgagagcagccacggcgtgatcatggagaagttcatcaaggacgtgagcagaagcagcaagagcggcagagccagagagagcagcgacagaagccagagattccccagaatgagcgacgacaactggaaggacatcagcctgaacaagagagagagcgtgatccagcagagagtgtacgagggcaacgccttcagaggcggcttcagattcaacagcaccctggtgagcagaaagagagtgctggagagaaagagaagataccacttcgacaccgacggcaagggcagcatccacgaccagaagggctgccccagaaagaagcccttcgagtgcggcagcgagatgagaaaggccatgagcgtgagcagcctgagcagcctgagcagccccagcttcaccgagagccagcccatcgacttcggcgccatgccctacgtgtgcgacgagtgcggcagaagcttcagcgtgatcagcgagttcgtggagcaccagatcatgcacaccagagagaacctgtacgagtacggcgagagcttcatccacagcgtggccgtgagcgaggtgcagaagagccaggtgggcggcaagagattcgagtgcaaggactgcggcgagaccttcaacaagagcgccgccctggccgagcacagaaagatccacgccagaggctacctggtggagtgcaagaaccaggagtgcgaggaggccttcatgcccagccccaccttcagcgagctgcagaagatctacggcaaggacaagttctacgagtgcagagtgtgcaaggagaccttcctgcacagcagcgccctgatcgagcaccagaagatccacttcggcgacgacaaggacaacgagagagagcacgagagagagagagagagagagagaggcgagaccttcagacccagccccgccctgaacgagttccagaagatgtacggcaaggagaagatgtacgagtgcaaggtgtgcggcgagaccttcctgcacagcagcagcctgaaggagcaccagaagatccacaccagaggcaaccccttcgagaacaagggcaaggtgtgcgaggagaccttcatccccggccagagcctgaagagaagacagaagacctacaacaaggagaagctgtgcgacttcaccgacggcagagacgccttcatgcagagcagcgagctgagcgagcaccagaagatccacagcagaaagaacctgttcgagggcagaggctacgagaagagcgtgatccacagcggccccttcaccgagagccagaagagccacaccatcaccagacccctggagagcgacgaggacgagaaggccttcaccatcagcagcaacccctacgagaaccagaagatccccaccaaggagaacgtgtacgaggccaagagctacgagagaagcgtgatccacagcctggccagcgtggaggcccagaagagccacagcgtggccggccccagcaagcccaaggtgatggccgagagcaccatccagagcttcgacgccatcaaccaccagagagtgagagccggcggcaacaccagcgagggcagagagtacagcagaagcgtgatccacagcctggtggccagcaagccccccagaagccacaacggcaacgagctggtggagagcaacgagaagggcgagagcagcatctacatcagcgacctgaacgacaagagacagaagatccccgccagagagaacccctgcgagggcggcagcaagaacagaaactacgaggacagcgtgatccagagcgtgttcagagccaagccccagaagagcgtgcccggcgagggcagcggcgagttcaagaaggacggcgagttcagcgtgcccagcagcaacgtgagagagtaccagaaggccagagccaagaagaagtacatcgagcacagaagcaacgagaccagcgtgatccacagcctgcccttcggcgagcagaccttcagacccagaggcatgctgtacgagtgccaggagtgcggcgagtgcttcgcccacagcagcgacctgaccgagcaccagaagatccacgacagagagaagcccagcggcagcagaaactacgagtggagcgtgatcagaagcctggcccccaccgacccccagaccagctacgcccaggagcagtacgccaaggagcaggccagaaacaagtgcaaggacttcagacagttcttcgccaccagcgaggacctgaacaccaaccagaagatctacgaccaggagaagagccacggcgaggagagccagggcgagaacaccgacggcgaggagacccacagcgaggagacccacggccaggagaccatcgaggaccccgtgatccagggcagcgacatggaggacccccagaaggacgaccccgacgacaagatctacgagtgcgaggactgcggcctgggcttcgtggacctgaccgacctgaccgaccaccagaaggtgcacagcagaaagtgcctggtggacagcagagagtacacccacagcgtgatccacacccacagcatcagcgagtaccagagagactacaccggcgagcagctgtacgagtgccccaagtgcggcgagagcttcatccacagcagcttcctgttcgagcaccagagaatccacgagcaggaccagctgtacagcatgaagggctgcgacgacggcttcatcgccctgctgcccatgaagcccagaagaaacagagccgccgagagaaaccccgccctggccggcagcgccatcagatgcctgctgtgcggccagggcttcatccacagcagcgccctgaacgagcacatgagactgcacagagaggacgacctgctggagcagagccagatggccgaggaggccatcatccccggcctggccctgaccgagttccagagaagccagaccgaggagagactgttcgagtgcgccgtgtgcggcgagagcttcgtgaaccccgccgagctggccgaccacgtgaccgtgcacaagaacgagccctacgagtacggcagcagctacacccacaccagcttcctgaccgagcccctgaagggcgccatccccttctacgagtgcaaggactgcggcaagagcttcatccacagcaccgtgctgaccaagcacaaggagctgcacctggaggaggaggaggaggacgaggccgccgccgccgccgccgccgccgcccaggaggtggaggccaacgtgcacgtgccccaggtggtgctgagaatccagggcctgaacgtggaggccgccgagcccgaggtggaggccgccgagcccgaggtggaggccgccgagcccgaggtggaggccgccgagcccaacggcgaggccgagggccccgacggcgaggccgccgagcccatcggcgaggccggccagcccaacggcgaggccgagcagcccaacggcgacgccgacgagcccgacggcgccggcatcgaggaccccgaggagagagccgaggagcccgagggcaaggccgaggagcccgagggcgacgccgacgagcccgacggcgtgggcatcgaggaccccgaggagggcgaggaccaggagatccaggtggaggagccctactacgactgccacgagtgcaccgagaccttcaccagcagcaccgccttcagcgagcacctgaagacccacgccagcatgatcatcttcgagcccgccaacgccttcggcgagtgcagcggctacatcgagagagccagcaccagcaccggcggcgccaaccaggccgacgagaagtacttcaagtgcgacgtgtgcggccagctgttcaacgacagactgagcctggccagacaccagaacacccacaccggctag

SEQ ID NO: 59629 - protein, 571 aa, Artificial Sequence
  derived and/or modified sequence
MKCQPRSGARRIEERLHYLITTYLKFGNNNNYMNMAEANNAFFAASETFHTPSLGDEEFEIPPITPPPESDPALGMPDVLLPFQALSDPLPSQGSEFTPQFPPQSLDLPSITISRNLVEQDGVLHSSGLHMDQSHTQVSQYRQDPSLIMRSIVHMTDAARSGVMPPAQLTTINQSQLSAQLGLNLGGASMPHTSPSPPASKSATPSPSSSINEEDADEANRAIGEKRAAPDSGKKPKTPKKKKKKDPNEPQKPVSAYALFFRDTQAAIKGQNPNATFGEVSKIVASMWDSLGEEQKQVYKRKTEAAKKEYLKALAAYRASLVSKAAAESAEAQTIRSVQQTLASTNLTSSLLLNTPLSQHGTVSASPQTLQQSLPRSIAPKPLTMRLPMNQIVTSVTIAANMPSNIGAPLISSMGTTMVGSAPSTQVSPSVQTQQHQMQLQQQQQQQQQQMQQMQQQQLQQHQMHQQIQQQMQQQHFQHHMQQHLQQQQQHLQQQINQQQLQQQLQQRLQLQQLQHMQHQSQPSPRQHSPVASQITSPIPAIGSPQPASQQHQSQIQSQTQTQVLSQVSIF

SEQ ID NO: 59630 - DNA, 1716 bp, Artificial Sequence
  derived and/or modified sequence
atgaagtgccagcccagaagcggcgccagaagaatcgaggagagactgcactacctgatcaccacctacctgaagttcggcaacaacaacaactacatgaacatggccgaggccaacaacgccttcttcgccgccagcgagaccttccacacccccagcctgggcgacgaggagttcgagatcccccccatcacccccccccccgagagcgaccccgccctgggcatgcccgacgtgctgctgcccttccaggccctgagcgaccccctgcccagccagggcagcgagttcaccccccagttccccccccagagcctggacctgcccagcatcaccatcagcagaaacctggtggagcaggacggcgtgctgcacagcagcggcctgcacatggaccagagccacacccaggtgagccagtacagacaggaccccagcctgatcatgagaagcatcgtgcacatgaccgacgccgccagaagcggcgtgatgccccccgcccagctgaccaccatcaaccagagccagctgagcgcccagctgggcctgaacctgggcggcgccagcatgccccacaccagccccagcccccccgccagcaagagcgccacccccagccccagcagcagcatcaacgaggaggacgccgacgaggccaacagagccatcggcgagaagagagccgcccccgacagcggcaagaagcccaagacccccaagaagaagaagaagaaggaccccaacgagccccagaagcccgtgagcgcctacgccctgttcttcagagacacccaggccgccatcaagggccagaaccccaacgccaccttcggcgaggtgagcaagatcgtggccagcatgtgggacagcctgggcgaggagcagaagcaggtgtacaagagaaagaccgaggccgccaagaaggagtacctgaaggccctggccgcctacagagccagcctggtgagcaaggccgccgccgagagcgccgaggcccagaccatcagaagcgtgcagcagaccctggccagcaccaacctgaccagcagcctgctgctgaacacccccctgagccagcacggcaccgtgagcgccagcccccagaccctgcagcagagcctgcccagaagcatcgcccccaagcccctgaccatgagactgcccatgaaccagatcgtgaccagcgtgaccatcgccgccaacatgcccagcaacatcggcgcccccctgatcagcagcatgggcaccaccatggtgggcagcgcccccagcacccaggtgagccccagcgtgcagacccagcagcaccagatgcagctgcagcagcagcagcagcagcagcagcagcagatgcagcagatgcagcagcagcagctgcagcagcaccagatgcaccagcagatccagcagcagatgcagcagcagcacttccagcaccacatgcagcagcacctgcagcagcagcagcagcacctgcagcagcagatcaaccagcagcagctgcagcagcagctgcagcagagactgcagctgcagcagctgcagcacatgcagcaccagagccagcccagccccagacagcacagccccgtggccagccagatcaccagccccatccccgccatcggcagcccccagcccgccagccagcagcaccagagccagatccagagccagacccagacccaggtgctgagccaggtgagcatcttctag

SEQ ID NO: 59631 - DNA, 1716 bp, Artificial Sequence
  derived and/or modified sequence
atgaagtgccagccaagatcgggggctcgaagaattgaggaaagacttcattacctgattaccacctacctcaaattcggaaataacaataactacatgaacatggctgaagccaacaacgccttcttcgcagcgtccgaaaccttccacacgccgagtctaggcgacgaggagtttgagatcccacccatcacccctcctcctgagtcggaccctgccctgggaatgcccgatgtgctgctgcccttccaagccctgtctgatcccctgccgtcacaaggaagcgagttcacaccccaattccccccgcagagcctggacctgccgtcaataacaattagccgtaatctggtggagcaggatggtgtactgcactcctccggtttacacatggaccagtcacatacacaggtcagtcagtatcggcaggatcccagtctgattatgcgcagcatcgtgcacatgacagacgcagcccgaagtggcgtgatgcccccagcgcaactgaccaccataaaccagtcgcaattatcagctcaactgggcctcaacctggggggggccagcatgcctcataccagtcccagtccgcccgcatccaagagcgcgaccccttctccttcctctagtataaacgaagaagatgcggatgaggctaacagggcaatcggggaaaagagagctgcaccagatagcgggaagaaaccaaaaacccccaagaagaagaagaaaaaagatccgaatgaaccgcaaaagcctgtttccgcttacgcattgtttttccgcgatacgcaggcagcgataaagggtcagaaccccaatgcgaccttcggggaggttagtaaaattgtggccagcatgtgggactccctcggagaagagcagaaacaggtgtacaaacgaaagactgaggcagcgaaaaaggaatacctgaaagcactggcagcctatcgggcatcactagtgtccaaggccgcggcggagagcgctgaagctcagacaatccggtctgttcagcagacgctggccagtacaaatctgactagctccctgcttctcaacaccccattaagtcagcatggaacagtaagtgcctctccacagacgcttcagcagagcctgccacggagtatcgctcctaagccacttaccatgcgactcccaatgaatcagatcgtgacctccgtcacaattgcagctaatatgccttctaacatcggggctcctctcatttcctctatggggacgacgatggtcgggagcgcccctagcacccaagtatcaccttctgttcaaacccagcaacatcagatgcagcttcaacaacagcaacagcagcaacagcagcaaatgcaacaaatgcaacagcaacagttgcagcagcaccagatgcatcagcagattcagcagcagatgcaacaacagcatttccaacaccacatgcagcagcacctgcagcagcagcaacagcacctgcagcagcagatcaatcagcagcaactgcagcagcagctgcagcagcgtctgcagttgcaacagctacagcacatgcagcaccagtcgcagccttcaccgaggcagcactcgccagtggcatcacaaattaccagccccattcctgctatcggatctcctcaacccgcttcccagcagcatcagagccagattcagagtcagacccagacacaggtgctgtctcaggtttctatcttctag

SEQ ID NO: 59632 - DNA, 1716 bp, Artificial Sequence
  derived and/or modified sequence
atgaagtgccagcccaggtctggggcccggcgcatcgaggagcggctgcactacctgatcaccacctacctgaagtttggaaacaacaacaactacatgaacatggccgaggccaacaatgccttctttgctgccagcgagaccttccacacccccagcctgggagatgaggagtttgagatcccccccatcaccccacctcctgagagtgaccctgccctgggcatgccagatgtgctgctgcccttccaggccctgagtgaccccctgcccagccagggcagcgagttcaccccccagttccccccccagagcctggacctgcccagcatcaccatcagcaggaacctggtggagcaggatggagtgctgcacagcagcggcctgcacatggaccagagccacacccaggtgtcccagtaccggcaggaccccagcctcatcatgaggagcatcgtgcacatgacagatgctgcccggtctggagtgatgcccccagcccagctgaccaccatcaaccagagccagctgagcgcccagctgggcctgaacctgggcggggcctccatgccccacaccagccccagccccccagccagcaagagcgccacccccagccccagcagcagcatcaatgaggaggatgctgatgaggccaacagagccatcggggagaagagagctgccccagacagcggcaagaagcccaagacccccaagaagaagaagaagaaggaccccaatgagccccagaagcctgtgtctgcctatgccctcttcttccgggacacccaggccgccatcaagggccagaaccccaatgccacctttggagaggtgtccaagatcgtggcctccatgtgggacagcctgggggaggagcagaagcaggtgtacaagaggaagacagaagctgccaagaaggagtacctgaaggccctggccgcctaccgggccagcctggtgtccaaggctgctgctgagagcgctgaggcccagaccatccgctctgtgcagcagaccctggccagcaccaacctgaccagcagcctgctgctgaacacccccctgagccagcacggcaccgtgtctgccagcccccagaccctgcagcagagcctgcccaggagcatcgcccccaagcccctgaccatgaggctgcccatgaaccagatcgtgacctctgtgaccatcgccgccaacatgcccagcaacatcggggcccccctcatcagctccatgggcaccaccatggtgggcagcgcccccagcacccaggtgagccccagcgtgcagacccagcagcaccagatgcagctgcagcagcagcagcagcagcagcagcagcagatgcagcagatgcagcagcagcagctgcagcagcaccagatgcaccagcagatccagcagcagatgcagcagcagcacttccagcaccacatgcagcagcacctgcagcagcagcagcagcacctgcagcagcagatcaaccagcagcagctgcagcagcagctgcagcagaggctgcagctgcagcagctgcagcacatgcagcaccagagccagcccagcccccggcagcacagccctgtggccagccagatcaccagccccatcccagccatcggcagcccccagcctgccagccagcagcaccagagccagatccagagccagacccagacccaggtgctgagccaggtgtccatcttctag

SEQ ID NO: 59633 - DNA, 1716 bp, Artificial Sequence
  derived and/or modified sequence
atgaagtgccagccccggagcggcgcccggcggatcgaggagcggctccactacctgataacgacctacctaaagttcgggaataataataactacatgaacatggccgaggcaaataatgcattcttcgctgcctcggagactttccataccccctctctgggcgacgaggagttcgagattccaccaattaccccgccccctgaatctgatccagcattgggcatgccagatgtccttttgcccttccaggcactgtccgaccctctcccgtctcagggcagcgaatttactccgcaattcccaccacagtctctagatctcccatccatcaccatctctaggaacctggtggaacaagatggcgttctccactcaagtggtctgcatatggaccaatctcacacgcaagtctcccagtatagacaggatcctagtcttatcatgaggagcatcgtccacatgacagatgctgcacgctctggggtgatgcccccagcccaactgacaaccataaaccagtcccaactatccgcccagttggggcttaatctgggaggtgcaagcatgccacacacatctccgagcccccccgccagcaagagtgctacgccaagcccatcgtccagtatcaatgaagaagacgcggacgaggccaacagagcaatcggggaaaagagagccgcaccagattcaggtaagaaaccgaaaacacccaagaagaaaaaaaaaaaagatccgaatgagccccagaaaccagtctcagcctatgctctgttttttagggatactcaggcggcaatcaaaggccagaatccgaacgctacgttcggcgaagtgtccaagatagtcgcgagcatgtgggatagtctaggggaggaacagaagcaagtgtacaaaagaaagacagaggcagccaagaaggagtacctgaaggccctggcagcatatagagcgagcctcgtgtcaaaagcagcagccgagagtgctgaggcacagaccatccggtctgtgcagcagaccttggcctctacaaacctgacttcatccctgctcctaaataccccgttatcacagcatgggaccgtgagcgcctcacctcagactctgcagcagtccctaccgcgctccattgcacccaaaccgctgaccatgaggttgccaatgaatcagatagttactagcgtcactatcgccgccaacatgccatcgaacatcggggctccactcatctcatctatggggactactatggtggggtccgcaccgagcacacaggtgtctcctagcgtccagacacaacagcatcagatgcagctgcaacagcagcagcagcagcagcagcagcagatgcagcagatgcagcaacaacagctgcagcagcaccagatgcaccagcaaatacaacaacagatgcagcagcagcactttcagcatcatatgcagcagcacctgcaacagcagcagcagcatctgcagcagcagataaatcaacaacaacttcagcagcagctacagcagcggttgcagctgcagcaactgcaacatatgcagcaccagtcacaaccgtcccccagacaacactctcccgtggcttcccagatcaccagccccatccctgcaatcggctctcctcagcctgcaagccagcagcaccagtcacagattcaatcccaaacacagacacaagtgctgagtcaagtgagtattttttag

SEQ ID NO: 59634 - DNA, 1716 bp, Artificial Sequence
  derived and/or modified sequence
atgaaatgtcaaccacgcagtggagcccgtagaattgaggagcgcctccactacctgataaccacctaccttaagttcggaaacaacaataactatatgaatatggcagaggcgaacaacgcattcttcgcggcatctgaaacatttcacactccatcgctgggggacgaggaatttgagatcccacccattactcccccacccgagagtgaccccgctttaggaatgcccgatgtgctgcttccctttcaggctctttccgaccccctgccgagtcaaggcagcgaatttactccacagtttccgccacagtccttggatctgccctcgatcactattagccgaaacctcgttgagcaagacggcgttctgcattcgagtgggctgcacatggaccagtcccacacacaggttagtcaatacaggcaggacccatcgctaatcatgagatctattgtgcacatgacggacgccgctagaagtggggtgatgccccctgctcagctgacgacgattaaccaatcccagctgtccgcgcagctgggtcttaatctgggcggagccagtatgccacatacttctcctagccctcctgcgtccaaatccgccacgccaagcccgagtagttctattaacgaagaggatgctgatgaggccaatcgtgccattggagaaaaacgtgccgctcctgactcaggcaagaaaccaaagacacctaagaagaagaagaaaaaagacccaaatgaaccacagaagccagtatccgcttatgcgctgtttttcagagacacccaggccgcaataaagggtcagaaccccaatgcgacgttcggcgaagtatccaagatcgtagcttctatgtgggactccctgggcgaggaacaaaagcaggtgtataaacgcaaaacagaagcagccaaaaaagagtaccttaaggctctcgcagcatatcgcgcttctctggtctcgaaggccgcagctgaaagcgcagaagcccagactatacgaagtgtgcagcagacattggcaagtacaaatttaaccagctccctgcttctgaatacccccctaagccagcatggaactgtgtcagcaagtcctcaaaccctacagcaatccctgcctagatcaatcgcaccaaagccattaacaatgaggctacccatgaaccagatcgtaacgagcgttacaatagccgcaaatatgccttccaacataggggctcccctaatcagcagcatgggtaccaccatggtgggatctgcgccatcaacgcaggtgtcccccagtgtgcagactcagcagcatcaaatgcagttgcagcaacagcaacagcagcaacagcagcaaatgcaacaaatgcaacagcaacagctgcaacagcaccaaatgcaccagcagattcaacagcaaatgcagcagcagcacttccagcaccacatgcagcagcacctccagcagcagcagcagcatctccagcagcagatcaaccagcagcaactccagcaacagttgcagcagagactgcagctgcaacagttacagcatatgcagcatcagtcccagccaagcccacggcagcactcccccgtggcctcccaaatcactagcccaatacctgccatcggttctcctcagcccgctagccagcagcaccagtcccagattcagtcacaaactcagacccaagtgctaagtcaggttagcatcttctag

SEQ ID NO: 59635 - DNA, 3123 bp, Artificial Sequence
  derived and/or modified sequence
gaaccgacacgaggcttcacctgggaagcttcaagtctgcctacctgtgaaaggtcaggccccaacaccccttctgggaaatcctacagctaggatgcatttctctcactgaaccccatccagcagaggacagaagagtcagaagagggtagagaggatttagatactcatagaagatgtagtggaggatgaagtgccaacctcgctcgggagccaggcgcattgaggagagacttcattacctgataactacctatctgaaatttggaaataataataactatatgaatatggctgaggcgaacaatgcgttcttcgctgccagtgagacattccacacaccaagccttggggacgaggaattcgaaattccaccaatcacgcctcctccagagtcagaccctgccctaggcatgccggatgtactgctaccctttcaagccctcagcgatccattgccttcccagggaagtgaattcacaccccagtttccccctcaaagcctggacctcccttccattacaatctcaagaaatctcgtggaacaagatggcgtgcttcatagcagtgggttgcatatggatcagagccacacacaagtgtcccagtaccggcaggatccctccctgatcatgcggtccatcgtccacatgaccgatgctgcgcgttctggggtcatgcctcctgcccagctcaccaccatcaaccagtctcagctcagcgcccagttggggttgaatttgggaggtgccagtatgcctcacacatctccttcacctccagcaagcaaatcagccactccctccccttccagctccatcaatgaagaggatgctgatgaagccaacagagccattggagagaaaagagctgctccagactctggcaagaagcccaagactccaaagaaaaagaaaaagaaagatcccaatgagccacagaagccagtgtcagcatatgccctgtttttcagagacacacaggctgcaattaaaggtcaaaaccccaatgcaacctttggagaggtctcaaaaattgtagcatctatgtgggacagccttggagaagaacaaaagcaggtatataaaaggaaaacagaagctgccaaaaaagaatacctgaaggccctggcggcatacagggccagcctcgtttctaaggctgctgctgagtcagcagaagcccagaccatccgttctgttcagcagaccctggcgtcgaccaatctaacatcctctctccttctcaacactccactgtctcaacatggaacagtgtcagcatcacctcagactctccagcaatccctccctaggtcaatcgctcccaaacccttaaccatgagactccccatgaaccagattgtcacatcagtcaccattgcagccaacatgccctcgaacattggggctccactgataagctccatgggaacgaccatggttggctcagcaccctccacccaagtgagtccttcggtgcaaacccagcagcatcagatgcaattgcagcagcagcagcagcagcaacaacaacagatgcaacagatgcagcagcagcaactccagcagcaccaaatgcatcagcaaatccagcagcagatgcagcagcagcatttccagcaccacatgcagcagcacctgcagcagcagcagcagcatctccagcagcaaattaatcaacagcagctgcagcagcagctgcagcagcgcctccagctgcagcagctgcaacacatgcagcaccagtctcagccttctcctcggcagcactcccctgtcgcctctcagataacatcccccatccctgccatcgggagcccccagccagcctctcagcagcaccagtcgcaaatacagtctcagacacagactcaagtattatcgcaggtcagtattttctgaagacgcatatggcagacggatttgcgtataccaaggagagtggcataggagggaaaagcatatgtggctgaaacctgtaagttggtgttggttatgcagaaatgtgtaacagatcaaacggtcctctcaagtgtctattagataggcaataagaactgcagtgtagctgagtaacatcttttagctgactataaatcactttgtttttaaacaagaaaagctgtgctcttttatgtgatgccttttttatttattcaggctatacctacaatatgtgaatcaaactgtttaatgaatcctgggacatactgatgactataaactggcctctctgagtcatagaaaaatggccttatttctccagaagtgagtaaaccacacttccaggctatctgaactcctgaagccctaaaaataaaaagcacagttgtaactacctgaaatatgaagatccagtttcatacaaacatttgtatgacgtgaatagttgatggcatttttttgtcatgaaaaaaataatgtaaatcacagacttttgccaaagctcttattttttttcctaaatctctccagaaaaaaaatgcaagtgactaaattcaattattgactaatttccactttttatccatgacttctccaaatcaaaccacagtatatgttgtaacaatatctatgaccactgttagcccattatattcattccaattagaagaaatgtgaatactatattccgtgttttgagtgacaagtttcgaaaaataaaaacactgtatttttaaaagggaaatgcacttaaatgaaaacagttattacaaaagttaagatttaaaaagaaaaagcaagagtttttattatgatgtaataccagtagaatatttaaaaggcacaccacatctgaataatcaatgtaaatattttctttcaaagttgtaagttttcatatcatgtgctgtaaagttttcctaaatgaggctttaacgtaaacactggtgacataaaccattcattgctacgttgcttattgtgtttttatgctgttttatacttttttatgagttatgatagcagcaattaagttgtttgtattttgcttaactaaaacaaaaatgcttttatcttgctatagaataaacacatttcagtaaaaactgtggactgtattttgatgcaacaacaaagaaactgttcacttttcaaataaaatgatatgtcagatttc

SEQ ID NO: 59636 - DNA, 5448 bp, Artificial Sequence
  derived and/or modified sequence
atgatggacagcgagaacaagcccgagaacgacgaggacgagaagatcaacaaggaggcccaggacctgaccaagctgagcagccacaacgaggacggcggccccgtgagcgacgtgatcgccagcttccccgagaacagcatgggcaagagaggcttcagcgagagcagcaacagcgacagcgtggtgatcggcgaggacagaaacaagcacgccagcaagagaagaaagctggacgaggccgagcccctgaagagcggcaagcagggcatctgcagactggagaccagcgagagcagcgtgaccgagggcggcatcgccctggacgagaccggcaaggagaccttcctgagcgactgcaccgtgggcggcacctgcctgcccaacgccctgagccccagctgcaacttcagcaccatcgacgtggtgagcctgaagaccgacaccgagaagaccagcgcccaggagatggtgagcctggacctggagagagagagccccttcccccccaaggagatcagcgtgagctgcaccatcggcaacgtggacaccgtgctgaagtgcagcatctgcggccacctgttcagcagctgcagcgacctggagaagcacgccgagagccacatgcagcagcccaaggagcacacctgctgccactgcagccacaaggccgagagcagcagcgccctgcacatgcacatcaagcaggcccacggcccccagaaggtgttcagctgcgacctgtgcggcttccagtgcagcgaggagaacctgctgaacgcccactacctgggcaagacccacctgagaagacagaacctggccgccagaggcggcttcgtgcagatcctgaccaagcagcccttccccaagaagagcagaaccatggccaccaagaacgtgcacagcaagcccagaaccagcaagagcatcgccaagaacagcgacagcaagggcctgagaaacgtgggcagcaccttcaaggacttcagaggcagcatcagcaagcagagcggcagcagcagcgagctgctggtggagatgatgcccagcagaaacaccctgagccaggaggtggagatcgtggaggagcacgtgaccagcctgggcctggcccagaaccccgagaaccagagcagaaagctggacaccctggtgaccagcgagggcctgctggagaagctggagagcaccaagaacaccctgcaggccgcccacggcaacagcgtgaccagcagacccagacccgagagaaacatcctggtgctgggcaacagcttcagaagaagaagcagcaccttcaccctgaagggccaggccaagaagagattcaacctgctgggcatcaagagaggcaccagcgagacccagagaatgtacatgaagcacctgagaacccagatgaagacccacgacgccgagagcgtgctgaagcacctggaggcctgcagcagcgtgcagagagtgtgcgtgaccaccagcgagacccaggaggccgagcagggccagggcagcgccagaccccccgacagcggcctgcacagcctgaccgtgaagcccgccagcggcagccagaccctgtgcgcctgcaccgactgcggccaggtggccaccaacagaaccgacctggagatccacgtgaagagatgccacgccagagagatgaagttctactgcagaacctgcgacttcagcagcatgagcagaagagacctggacgagcacctgcacagcaaccagcaccagcagaccgccagcgtgctgagctgccagtgctgcagcttcatcagcctggacgagatcaacctgagagaccacatgaaggagaagcacaacatgcacttcctgtgcaccccctgcaacctgttcttcctgagcgagaaggacgtggaggagcacaaggccaccgagaagcacatcaacagcctggtgcagcccaagaccctgcagagcagcaacagcgacctggtgctgcagaccctgcccctgagcaccctggagagcgagaacgccaaggagagcatggacgacagcggcaaggccagccaggaggagcccctgaagagcagagtgagccacggcaacgaggtgagacacagcagcaagccccagttccagtgcaagaagtgcttctacaagaccagaagcagcaccgtgctgaccagacacatcaagctgagacacggccaggactaccacttcctgtgcaaggcctgcaacctgtacagcctgagcaaggagggcatggagaagcacatcaagagaagcaagcacctggagaacgccaagaagaacaacatcggcctgagcttcgaggagtgcatcgagagagtgtgcatcggcgccaacgacaagaaggaggagttcgacgtgagcggcaacggcagaatcgagggccacatcggcgtgcagctgcaggagcacagctacctggagaagggcatgctggccagcgaggagctgagccagagcggcggcagcaccaaggacgacgagctggccagcaccaccacccccaagagaggcagacccaagggcaacatcagcagaacctgcagccactgcggcctgctggccagcagcatcaccaacctgaccgtgcacatcagaagaaagcacagccaccagtacagctacctgtgcaaggtgtgcaagtactacaccgtgaccaagggcgacatggagagacactgcgccaccaagaagcacaagggcagagtggagatcgaggccagcggcaagcacagcagcgacatcatcgtgggccccgagggcggcagcctggaggccggcaagaagaacgccggcagcgccgtgaccatgagcgacgagcacgccaacaagcccgccgagagccccaccagcgtgctggagaagcccgacagaggcaacagcatcgaggccgaggtggagaacgtgttccacagcctggacggcgaggtgaacagccacctgctggacaagaaggagcagatcagcagcgagcccgaggacttcgcccagcccggcgacgtgtacagccagagagacgtgaccggcaccggcgagaacaagtgcctgcactgcgagttcagcgcccacagcagcgccagcctggagctgcacgtgaagagaaagcacaccaaggagttcgagttctactgcatggcctgcgactactacgccgtgaccagaagagagatgaccagacacgccgccaccgagaagcacaagatgaagagacagagctacctgaacagcgccaacgtggaggccggcagcgccgacatgagcaagaacatcatcatgcccgaggaggagcaccagcagaacagcgaggagttccagatcatcagcggccagcccagcgacaccctgaagagcagaaacgccgccgactgcagcatcctgaacgagaacaccaacctggacatgagcaaggtgctgtgcgccgccgacagcgtggaggtggagaccgaggaggagagcaacttcaacgaggaccacagcttctgcgagaccttccagcaggcccccgtgaaggacaaggtgagaaagcccgaggagatgatgagcctgaccatgagcagcaactacggcagccccagcagattccagaacgagaacagcggcagcagcgccctgaactgcgagaccgccaagaagaaccacgagatcagcaacgacgccggcgagctgagagtgcactgcgagggcgagggcggcaacgccggcgacggcggcggcgtggtgccccacagacacctgtgccccgtgaccctggacggcgagagaagcgccgagagccccgtgctggtggtgaccagaatcaccagagagcagggcaacctggagagcggcggccagaacagagtggccagaggccacggcctggaggacctgaagggcgtgcaggaggaccccgtgctgggcaacaaggagatcctgatgaacagccagcacgagaccgagttcatcctggaggaggacggccccgccagcgacagcaccgtggagagcagcgacgtgtacgagaccatcatcagcatcgacgacaagggccaggccatgtacagcttcggcagattcgacagcagcatcatcagaatcaagaaccccgaggacggcgagctgatcgaccagagcgaggagggcctgatcgccaccggcgtgagaatcagcgagctgcccctgaaggactgcgcccagggcgtgaagaagaagaagagcgagggcagcagcatcggcgagagcaccagaatcagatgcgacgactgcggcttcctggccgacggcctgagcggcctgaacgtgcacatcgccatgaagcaccccaccaaggagaagcacttccactgcctgctgtgcggcaagagcttctacaccgagagcaacctgcaccagcacctggccagcgccggccacatgagaaacgagcaggccagcgtggaggagctgcccgagggcggcgccaccttcaagtgcgtgaagtgcaccgagcccttcgacagcgagcagaacctgttcctgcacatcaagggccagcacgaggagctgctgagagaggtgaacaagtacatcgtggaggacaccgagcagatcaacagagagagagaggagaaccagggcaacgtgtgcaagtactgcggcaagatgtgcagaagcagcaacagcatggccttcctggcccacatcagaacccacaccggcagcaagcccttcaagtgcaagatctgccacttcgccaccgcccagctgggcgacgccagaaaccacgtgaagagacacctgggcatgagagagtacaagtgccacgtgtgcggcgtggccttcgtgatgaagaagcacctgaacacccacctgctgggcaagcacggcgtgggcacccccaaggagagaaagttcacctgccacctgtgcgacagaagcttcaccgagaagtgggccctgaacaaccacatgaagctgcacaccggcgagaagcccttcaagtgcacctggcccacctgccactacagcttcctgaccgccagcgccatgaaggaccactacagaacccacaccggcgagaagagcttcctgtgcgacctgtgcggcttcgccggcggcaccagacacgccctgaccaagcacagaagacagcacaccggcgagaagcccttcaagtgcgacgagtgcaacttcgccagcaccacccagagccacctgaccagacacaagagagtgcacaccggcgagaagccctacagatgcccctggtgcgactacagaagcaactgcgccgagaacatcagaaagcacatcctgcacaccggcaagcacgagggcgtgaagatgtacaactgccccaagtgcgactacggcaccaacgtgcccgtggagttcagaaaccacctgaaggagcagcaccccgacatcgagaaccccgacctggcctacctgcacgccggcaagggccagaagctgtag

SEQ ID NO: 59637 - DNA, 5448 bp, Artificial Sequence
  derived and/or modified sequence
atgatggactctgaaaataagcccgagaacgacgaagacgagaaaatcaacaaggaagcacaggatctgactaaactgagcagccataatgaagatggcggtcccgtgagcgatgtgattgcctcatttcctgagaatagtatgggcaagaggggtttctcagagagcagcaactcggatagtgtggtgatcggggaagatcgcaataaacacgcttccaaaaggcggaagctggacgaggcggagcccctgaaatcaggcaaacagggcatctgccggctggagacatctgagtctagcgtcacagagggaggtattgccttggacgaaacagggaaggaaaccttcctgtccgattgtacagtgggcggtacttgtctccccaacgcactgtctccgagctgcaacttctctacaatagatgtcgtgagcctaaagaccgatacggagaagacatcggcccaggagatggtgagcttggatcttgaacgagagagccctttcccgccgaaggaaatctctgtaagctgtacgatcggaaacgtcgacaccgtactcaagtgtagcatctgcgggcacctgttctcctcttgcagtgatctggagaagcatgccgaatcccacatgcagcaacctaaagagcatacctgttgccactgttctcacaaggcggagtcgagcagtgctctccatatgcatattaagcaggcgcatggccctcagaaagtgtttagttgcgacctctgcggttttcagtgttctgaagagaatctactgaacgcgcactacttgggaaagacacatctccggcggcaaaatttggcagctcgggggggttttgtgcaaatactcacaaagcagccgttccctaagaaatctcgcactatggcgaccaaaaacgtgcattccaagcccagaacatctaagtctatcgctaaaaattcggatagtaaaggcctgagaaatgtgggatcaactttcaaagatttcagaggctctattagtaagcagagcggctcttcaagcgaactgctggttgaaatgatgccctcccgaaatactctctcgcaggaggtcgaaatagtggaggaacacgtgaccagtttagggctcgcgcaaaaccccgaaaaccaatctagaaaactggacactctggtgactagtgagggcctactggagaagctggagtcaactaaaaatacccttcaagcagctcacggaaacagtgtcacctctcgcccccgacccgagcgcaatattttggtgctcggcaacagttttcggcggcggtcctctacttttactttaaagggccaagctaaaaaacgattcaacctcctgggcatcaaacggggaacttctgagacgcagcgaatgtacatgaagcacctgcggacacagatgaagacacatgacgcagaatctgttctcaagcacttggaggcgtgcagtagcgttcagagagtctgcgtaacaacctccgagactcaagaagctgagcaggggcagggctcagctaggccacctgactctggcctccacagccttactgtgaaacctgcatctgggtcacagacattgtgtgcttgcacagactgtggccaggtcgctaccaatcggactgacctggagatccacgtgaagcggtgtcatgctcgcgagatgaagttttattgtcggacctgtgactttagctccatgtctcgccgagatttagatgagcacttacacagcaaccaacatcagcagacagcatccgtcttgtcatgtcaatgctgctcgtttatttctctggatgaaatcaacctgagagatcacatgaaggagaagcacaatatgcacttcctgtgtacaccctgtaacctgttcttccttagtgagaaggatgtggaggagcataaagccaccgagaagcacattaattctcttgtgcagcctaagaccctccaaagtagtaacagtgaccttgttctacaaactctcccactttccaccctagagtctgaaaatgccaaagagagcatggatgattcaggaaaggcaagtcaggaggaaccattgaagtccagggtctcccacggaaatgaggttcggcacagttctaagcctcagtttcagtgcaagaagtgtttttacaagaccaggagctctaccgtgctgactcgccacatcaagctgaggcacggtcaagactatcattttctctgtaaagcttgtaacctgtattctctctctaaagagggcatggagaagcacatcaagcgctcaaagcatcttgagaatgcgaagaaaaacaatattggcctgtctttcgaagagtgtatagaacgcgtttgtatcggtgccaacgataagaaggaagagttcgatgtatccggcaacgggcgcatcgagggccacattggggtgcagctacaggaacacagctatctagagaagggaatgttggcgagtgaggagttatcacaatccggggggtccaccaaggatgatgagctggcatccaccactacccctaagagagggcggcctaagggcaacatcagtcgcacatgttctcactgtgggcttctggcgagctcaatcacaaacctcaccgttcacattagaagaaagcattcacaccagtactcctacctttgtaaagtgtgtaagtactatacggttactaaaggcgacatggagaggcactgcgcaaccaagaaacataagggcagggtggaaatagaggcctctgggaaacattcgagcgacatcatcgtcgggcccgaaggaggttcgctagaggctgggaagaagaacgcaggaagcgcagtgaccatgtcggacgagcacgctaataaacctgccgaatccccaacgtcagtcttggagaaacctgatcgcggtaactcaatagaagccgaagtggagaatgtttttcatagcctggacggagaagtcaattcccacctcctagacaaaaaggaacagatatcaagtgagccagaggacttcgcccagcccggcgatgtgtatagtcaaagagatgtgacaggaaccggcgaaaataaatgtctccactgcgagttctcagcacactcaagcgcctctctggagctgcacgttaaaagaaagcatacaaaggaattcgagttttactgtatggcctgtgattactacgcggtgactaggagagaaatgacaagacacgctgccaccgagaagcacaaaatgaaacggcagagctatctgaactcagccaacgtggaggcgggatctgctgacatgagtaaaaacataattatgcccgaggaggagcatcagcagaattctgaggaatttcagatcatctctggccaacccagtgacactctgaagtctagaaatgccgccgactgctccattctcaacgagaacaccaacctggatatgtcaaaagtgctgtgcgccgcagattctgtggaggtggaaaccgaagaagagagcaatttcaatgaggatcacagtttttgcgagacctttcaacaggctcctgtcaaagacaaggtgcggaaacctgaggaaatgatgtccttgactatgtctagcaattacggatctccgtcccggttccagaacgaaaattctgggtcgtccgctttgaactgtgaaacagctaaaaaaaaccatgaaatttcaaacgatgcgggtgaactgcgagtgcattgtgagggtgagggcggcaacgcaggtgacggaggtggtgtggtgccacatcgacatctctgcccggtgacacttgacggcgaacggtcagcggaaagtccagttttggtggtgacgcggataactagggaacaggggaatcttgagtcaggcggtcaaaaccgggttgccaggggtcacggcctagaagatttgaagggggtacaggaggatcccgtcctaggaaacaaagaaattctgatgaactctcagcacgagaccgagtttatcttagaggaagatggtccagcctccgactcaacggtggagagcagcgacgtgtatgaaaccatcatttccatcgatgacaagggccaggcaatgtactcgttcgggagattcgatagttctattataaggattaaaaaccccgaggatggtgagttgatcgaccagtccgaagaggggctcatcgccaccggtgtgaggattagcgagctgccacttaaagattgcgcacaaggagtaaagaaaaagaaatctgaaggatctagcattggcgaaagcacccggatacgttgtgatgactgtggatttctcgccgatggattgtcaggcctgaatgtgcatattgccatgaaacaccccaccaaggagaagcactttcactgtctgctttgcggaaagtccttttacaccgagtctaatctgcaccagcatctggcatcagctggccatatgagaaatgagcaagcaagtgtagaggaattgcccgagggtggcgccactttcaagtgtgtcaaatgcactgagcctttcgactccgagcagaatctgtttttgcatatcaaggggcagcacgaagaactgctgcgtgaagttaacaaatatatcgtggaggataccgaacagattaaccgcgagcgggaggagaaccagggcaacgtctgtaaatactgcgggaaaatgtgtaggtcttcaaattcaatggcgtttcttgcacatatccgaacccacacagggtcgaaacctttcaagtgtaaaatttgtcacttcgccaccgcacaacttggtgacgctagaaatcacgttaaaagacacctgggcatgagagagtacaaatgtcatgtgtgcggtgttgctttcgtaatgaaaaaacaccttaatacgcacctgctggggaagcatggcgtgggcaccccgaaggagagaaagtttacttgtcacctatgcgaccgctcttttacagaaaaatgggcccttaataatcacatgaagctccataccggagaaaaacccttcaaatgtacttggccaacctgccattacagctttttgactgcttctgctatgaaggatcattatcgcactcatactggggagaagagttttttatgcgacctgtgtggatttgctgggggcactcgtcatgccctgacaaagcaccgccgtcaacacactggcgagaagccatttaagtgtgacgaatgcaatttcgcctcaactacccagtcgcacctgacgcgacataaaagggttcataccggtgagaaaccatatcgctgcccatggtgtgattacagaagtaactgtgcagagaatatacgcaagcacattcttcacacaggcaaacatgaaggtgtcaagatgtacaactgtcctaaatgtgactatggcaccaatgtgcctgtcgagtttcgaaatcatcttaaagaacagcatcctgatatcgaaaatcctgacttagcttatcttcatgccggcaaaggccagaaattgtag

SEQ ID NO: 59638 - DNA, 5448 bp, Artificial Sequence
  derived and/or modified sequence
atgatggacagcgagaacaagccagaaaatgatgaagatgagaagatcaacaaggaggcccaggacctgaccaagctgagcagccacaatgaagatggcggccctgtgtctgatgtgattgccagcttcccagaaaattccatgggcaagaggggcttcagcgagagcagcaacagcgacagcgtggtgattggagaggacaggaacaagcacgccagcaagaggaggaagctggatgaagctgagcccctgaagagcggcaagcagggcatctgccgcctggagaccagcgagagctctgtgacagagggcggcatcgccctggatgaaacaggcaaggagaccttcctgagtgactgcaccgtgggcggcacctgcctgcccaatgccctgagccccagctgcaacttcagcaccattgatgtggtgtccctgaagacagacacagagaagaccagcgcccaggagatggtgtccctggacctggagcgggagagccccttcccccccaaggagatctctgtgtcctgcaccatcggaaatgtggacacagtgctgaagtgcagcatctgtggccacctgttcagcagctgcagcgacctggagaagcatgctgagagccacatgcagcagcccaaggagcacacctgctgccactgcagccacaaggccgagagcagcagcgccctgcacatgcacatcaagcaggcccacggcccccagaaggtgttcagctgtgacctgtgtggcttccagtgcagcgaggagaacctgctgaatgcccactacctgggcaagacccacctgcggcggcagaacctggccgcccggggcggctttgtgcagatcctgaccaagcagcccttccccaagaagagcaggaccatggccaccaagaatgtgcacagcaagcccaggaccagcaagagcatcgccaagaacagcgacagcaagggcctgagaaatgtgggcagcaccttcaaggacttccggggcagcatcagcaagcagagcggcagcagcagcgagctgctggtggagatgatgcccagcaggaacaccctgagccaggaggtggagatcgtggaggagcacgtgaccagcctgggcctggcccagaaccctgagaaccagagcaggaagctggacaccctggtgaccagcgagggcctgctggagaagctggagagcaccaagaacaccctgcaggccgcccacggcaacagcgtgaccagccggcccaggcctgagaggaacatcctggtgctgggcaacagcttcagaagaagaagcagcaccttcaccctgaagggccaggccaagaagcgcttcaacctgctgggcatcaagaggggcaccagcgagacccagaggatgtacatgaagcacctgcggacccagatgaagacccatgatgctgagagcgtgctgaagcacctggaggcctgcagctctgtgcagagggtgtgtgtgaccaccagcgagacccaggaggccgagcagggccagggcagcgcccggcccccagattctggcctgcacagcctgactgtgaagccagccagcggcagccagaccctgtgtgcctgcacagactgtggccaggtggccaccaacagaacagacctggagatccacgtgaagcgctgccacgcccgggagatgaagttctactgcaggacctgtgacttcagctccatgagcagaagagacctggatgagcacctgcacagcaaccagcaccagcagacagcctctgtgctgagctgccagtgctgcagcttcatcagcctggatgagatcaacctgcgggaccacatgaaggagaagcacaacatgcacttcctgtgcaccccctgcaacctcttcttcctgtctgagaaggatgtggaggagcacaaggccacagagaagcacatcaacagcctggtgcagcccaagaccctgcagagcagcaacagcgacctggtgctgcagaccctgcccctgagcaccctggagagtgaaaatgccaaggagagcatggatgacagcggcaaggccagccaggaggagcccctgaagagccgggtgtcccatggaaatgaggtgcgccacagcagcaagccccagttccagtgcaagaagtgcttctacaagaccaggagcagcacagtgctgaccaggcacatcaagctgcggcacggccaggactaccacttcctgtgcaaggcctgcaacctgtacagcctgagcaaggagggcatggagaagcacatcaagaggagcaagcacctggagaatgccaagaagaacaacatcggcctgagctttgaagaatgtattgagcgggtgtgcatcggggccaatgacaagaaggaggagtttgatgtgtctggaaatggaagaattgagggccacatcggcgtgcagctgcaggagcacagctacctggagaagggcatgctggccagcgaggagctgagccagagcggcggcagcaccaaggatgatgagctggccagcaccaccacccccaagaggggccggcccaagggcaacatcagcaggacctgcagccactgcggcctgctggccagcagcatcaccaacctgactgtgcacatccggaggaagcacagccaccagtacagctacctgtgcaaggtgtgcaagtactacacagtgaccaagggggacatggagcggcactgtgccaccaagaagcacaagggccgggtggagattgaggccagcggcaagcacagcagtgacatcatcgtgggccctgagggcggcagcctggaggccggcaagaagaatgccggcagcgctgtgaccatgtctgatgaacatgccaacaagccagctgagagccccacctctgtgctggagaagccagaccggggcaacagcattgaggccgaggtggagaatgtgttccacagcctggatggagaggtgaacagccacctgctggacaagaaggagcagatcagcagcgagccagaagattttgcccagcctggagatgtgtacagccagagagatgtgacaggcaccggggagaacaagtgcctgcactgtgagttcagcgcccacagcagcgccagcctggagctgcacgtgaagaggaagcacaccaaggagtttgagttctactgcatggcctgtgactactatgctgtgacccggcgggagatgaccaggcatgctgccacagagaagcacaagatgaagaggcagagctacctgaacagcgccaacgtggaggccggcagcgctgacatgagcaagaacatcatcatgcctgaggaggagcaccagcagaacagcgaggagttccagatcatcagcggccagcccagcgacaccctgaagagcagaaatgctgctgactgcagcatcctgaatgaaaacaccaacctggacatgagcaaggtgctgtgtgccgctgacagcgtggaggtggagacagaggaggagagcaacttcaatgaagaccacagcttctgtgagaccttccagcaggcccctgtgaaggacaaggtgaggaagccagaggagatgatgagcctgaccatgagcagcaactacggcagccccagccgcttccagaatgaaaattctggcagcagcgccctgaactgtgaaacagccaagaagaaccacgagatcagcaatgatgctggggagctgcgggtgcactgtgagggggagggcggcaatgctggagatggcggcggcgtggtgccccaccgccacctgtgccctgtgaccctggatggagagaggtctgctgagagccctgtgctggtggtgacccgcatcacccgggagcagggcaacctggagagcggcggccagaacagagtggcccggggccacggcctggaggacctgaagggcgtgcaggaggaccctgtgctgggcaacaaggagatcctgatgaacagccagcacgagacagagttcatcctggaggaggatggccctgccagtgacagcacagtggagagcagtgatgtgtatgagaccatcatcagcattgatgacaagggccaggccatgtacagctttggccgctttgacagcagcatcatccgcatcaagaacccagaagatggagagctgattgaccagagcgaggagggcctcatcgccaccggggtgcgcatcagcgagctgcccctgaaggactgtgcccagggcgtgaagaagaagaagtctgagggcagcagcatcggggagagcacccgcatccgctgtgatgactgtggcttcctggctgatggcctgagcggcctgaatgtgcacatcgccatgaagcaccccaccaaggagaagcacttccactgcctgctgtgtgggaagagcttctacacagagagcaacctgcaccagcacctggccagcgctggccacatgagaaatgagcaggcctctgtggaggagctgcctgagggcggggccaccttcaagtgtgtgaagtgcacagagccctttgattctgagcagaacctcttcctgcacatcaagggccagcacgaggagctgctgcgggaggtgaacaagtacatcgtggaggacacagagcagatcaaccgggagcgggaggagaaccagggcaatgtgtgcaagtactgtgggaagatgtgccgcagcagcaacagcatggccttcctggcccacatccgcacccacacaggcagcaagcccttcaagtgcaagatctgccactttgccacagcccagctgggagatgccagaaatcatgtgaagaggcacctgggcatgagggagtacaagtgccacgtgtgtggggtggcctttgtgatgaagaagcacctgaacacccacctgctgggcaagcacggcgtgggcacccccaaggagaggaagttcacctgccacctgtgtgacaggagcttcacagagaagtgggccctgaacaaccacatgaagctgcacactggagagaagcccttcaagtgcacctggcccacctgccactacagcttcctgacagccagcgccatgaaggaccactaccgcacccacactggagagaagagcttcctgtgtgacctgtgtggctttgctgggggcaccaggcatgccctgaccaagcaccggcggcagcacactggagagaagcccttcaagtgtgatgagtgcaactttgccagcaccacccagagccacctgaccaggcacaagagggtgcacactggagagaagccctaccgctgcccctggtgtgactaccgcagcaactgtgccgagaacatcaggaagcacatcctgcacacaggcaagcatgaaggagtgaagatgtacaactgccccaagtgtgactatggcaccaacgtgcctgtggagttcaggaaccacctgaaggagcagcacccagacatcgagaacccagacctggcctacctgcatgctgggaagggccagaagctgtag

SEQ ID NO: 59639 - DNA, 5448 bp, Artificial Sequence
  derived and/or modified sequence
atgatggacagcgagaacaagcccgagaacgacgaggacgagaagatcaataaggaggcgcaggatctcacaaaactgtcatctcacaacgaagatggtgggcctgtttcggacgtgatcgcctccttccccgagaattcaatgggcaaacgtgggtttagtgaaagctctaattctgactcagtggtgataggagaagaccgcaataaacatgccagcaaacgccgaaaactggacgaggcggagcctctgaagtccggaaagcagggcatctgccggctggaaaccagtgagagttctgtgaccgaagggggtatagctctggacgagacaggcaaggagacctttctatcggactgtactgtagggggcacctgcctgccaaatgccctgtccccgagctgtaactttagcacgatcgatgttgtgtcactgaaaactgataccgagaaaacctccgcccaggagatggtcagcctggacctggaacgtgagagcccttttcccccgaaagagatctctgtctcttgcactatcggtaacgtcgatacagtgttaaagtgttccatctgtggacatttgttttcttcgtgcagtgatctggagaagcatgctgagagtcatatgcagcagccgaaagagcacacttgctgccactgctcccacaaagccgagtcatcctccgcactccatatgcacatcaagcaagcccatggaccccagaaggtgttctcgtgtgatctgtgcggctttcagtgtagtgaagagaatcttcttaatgcacattacctgggtaagacccatctccgacggcagaatctggccgcaaggggcggcttcgtgcaaattctgacaaagcagcccttccctaagaaaagcaggacaatggccacgaagaatgtgcatagcaagccaaggacgagtaagtcaatcgccaaaaacagcgactcaaaaggcctgaggaacgtgggttcaacctttaaggattttcgaggtagtatatctaaacagagcggatcctccagtgaactcttagtcgagatgatgccaagccggaatacccttagtcaagaggtggagatcgtcgaagaacacgtgacatccctggggctggctcagaaccccgagaatcagtcacgcaaattggatacactcgtcactagcgaaggactgctggaaaagctcgagagtaccaagaacaccctccaagctgcgcatggcaactcagtaactagtaggcccaggcccgaaagaaacatactggtacttggcaactccttcagacgccgaagctccacatttacactcaagggccaggccaaaaagaggttcaatctcctaggaattaagcgcggtacctcggagacacaaaggatgtacatgaaacatctacggacacaaatgaagactcacgacgccgaatctgtgcttaagcatctggaggcctgctcttctgtgcagcgagtgtgtgtcacaaccagtgagacacaggaagcagaacagggtcagggttccgcacgacctcctgacagcggtctccatagcctgactgtaaaacctgcctcaggaagccaaacactctgtgcttgtaccgactgtgggcaggtggccaccaaccggacagacctcgaaattcacgtcaaacgctgccatgcacgcgaaatgaagttttactgccggacctgtgacttcagttctatgtcacgacgagatctcgatgagcatttgcacagcaaccagcaccagcaaacggctagcgttctgtcttgtcaatgctgttctttcatctccctagatgaaataaatttacgggaccacatgaaggagaagcacaatatgcattttctgtgtactccttgcaatctgttttttctgtcagaaaaggatgttgaggaacataaggctactgagaaacatatcaacagtctcgtacagcctaagacgctgcagtcttcgaattcagatctggtgctgcaaactctgccattgagcaccttagaatccgagaatgccaaggaatcaatggacgattccggaaaggcttctcaggaggaaccattgaaatcgagagtttcacacggcaacgaggtgcggcacagttccaagccccagttccaatgtaaaaagtgcttctataagaccaggagcagcaccgtcctaaccagacatattaagctgaggcatggccaggattaccactttctctgcaaagcttgtaatctgtatagtctcagtaaggagggcatggaaaagcacattaaacggagcaagcatctcgaaaacgctaaaaagaataacatcggactgtcattcgaagagtgtatagagcgggtctgtataggagctaacgacaaaaaggaggaattcgatgtgtccggcaacgggcggattgaagggcacataggagtgcagttgcaggagcatagttatctggaaaagggaatgttggcctctgaggagctgtcacaaagcggtgggagtacgaaggacgacgaattagctagcacgactacccctaagaggggccggcccaagggcaacatcagcaggacttgctcacactgcggtctgctggcgagttcgattacgaacttgaccgtgcatattagaagaaagcactcacaccaatacagctatctctgcaaggtgtgtaagtactacaccgtaaccaaaggagatatggagagacactgcgccaccaaaaagcacaagggacgcgtcgagatcgaggcctccgggaaacattcctcagacatcatcgtcgggcccgaagggggttccctggaggctggaaaaaagaacgctggctccgccgtgaccatgtcagatgagcatgccaataaacccgccgagagccctacctcagtactggaaaaacccgataggggaaactcaatcgaagcagaggtagaaaacgtgtttcactctctcgacggggaggtgaactctcacctcctggacaaaaaggaacaaatttcttcagagcctgaagacttcgctcagccaggtgacgtgtactctcagcgagacgttacaggaaccggcgaaaataagtgtttgcactgtgagttttctgcccattcaagcgctagccttgaactccacgtgaaacgtaagcataccaaagaattcgagttttattgcatggcatgcgattactacgcagtcacccgccgcgaaatgacccgtcacgccgccactgagaagcataagatgaaaaggcaatcttacctgaacagtgcaaacgtggaggcaggatcagccgatatgtcaaaaaacatcatcatgcccgaagaggaacatcagcagaatagtgaagaattccagatcatcagcgggcagcccagtgacaccctaaagtccagaaacgcggccgattgctcaatcctcaacgagaatacaaacctggatatgtccaaggttctgtgcgccgcggactctgtggaagtggagaccgaggaagaaagcaacttcaacgaggatcactctttttgtgaaactttccaacaggcccccgtgaaggacaaagtgcgcaagcctgaagaaatgatgagccttacaatgtcgtcaaactacggtagcccaagtcgcttccagaatgaaaatagcggcagctccgccctgaattgcgaaactgccaaaaaaaatcacgagatctcaaacgacgctggcgaactccgagtccactgcgagggagagggcgggaatgccggggacggtggcggtgttgtcccacaccgccatctctgcccagtgacactggacggagaacgatccgcagaaagtcccgtcttagttgtgaccaggataacgcgcgaacaggggaatctggagtctggtgggcaaaatcgggtcgccaggggccatggcctcgaggacctgaagggtgtgcaggaggacccagtgctgggaaataaagagattctaatgaactcccagcacgagaccgaattcattttagaagaggacgggcctgcatcggacagcacggtggagtccagtgatgtatatgaaacgatcatcagcattgatgataagggtcaggccatgtactctttcggacgattcgactccagcatcataagaattaagaatccagaggatggcgagctgattgaccagtcagaggagggccttatagcaactggcgtacgcatctccgaattgcccctcaaagattgcgctcagggtgtgaaaaaaaagaagtccgagggatcaagtattggtgagtctactcgcatcagatgcgatgattgcggatttctcgctgacggcttatcaggccttaatgtgcatattgccatgaaacaccctactaaagagaaacatttccactgcttactctgcggtaagtccttttacacagagagcaacctgcaccagcacttagcctcggccggccatatgagaaacgagcaggctagcgtggaggagctgcccgaagggggggccacgtttaagtgcgtgaaatgcactgaacctttcgattcagagcagaacctgtttttgcacattaaaggacaacatgaagaattgttaagggaagtgaacaaatatatcgtggaggacacggagcagatcaatcgagaaagggaagagaaccaggggaatgtttgcaagtactgtgggaaaatgtgtcggtccagtaacagcatggcttttctcgctcacatccgcacgcataccggcagcaagccatttaaatgcaagatctgtcatttcgcgacagcacagctcggcgacgcgcggaatcacgttaaacgccacctcggaatgagagagtataaatgccatgtctgtggggtcgcctttgtaatgaagaagcatctcaacacacatctcctggggaaacatggagtgggaactcctaaagagcggaagttcacctgccacttgtgcgatagaagtttcactgagaaatgggcattgaacaaccatatgaagctgcatactggtgagaagccatttaaatgcacatggccgacatgtcactacagttttcttacggcgagtgccatgaaagaccactatcggactcacaccggcgagaaaagcttcctttgtgacttgtgtggctttgcaggcggcacacggcacgccctcaccaagcacagaaggcagcatacaggagagaagcctttcaaatgcgacgaatgcaactttgctagtaccacacaatcccacctcactcgccataagcgagtgcatactggcgagaaaccataccgctgcccctggtgcgactatagatcaaactgcgctgaaaatatcagaaagcacattctacacactgggaaacatgagggggtcaaaatgtataactgccccaaatgtgactacggaaccaacgtgcccgtggagtttaggaaccacctcaaggagcagcacccagatatagaaaatccagatctggcttatctccatgccggcaaaggtcagaagctctag

SEQ ID NO: 59640 - DNA, 5447 bp, Artificial Sequence
  derived and/or modified sequence
atgatggactctgagaataagcccgagaatgatgaagacgaaaagatcaataaagaggctcaggacctaaccaagctgtcttcccacaatgaagatggcggtcccgtttctgatgttatcgcctcatttccagagaactccatgggaaagaggggcttcagcgagagctctaattccgatagtgtggtgatcggagaagaccgaaataaacacgcctctaagagacgcaaactggacgaggccgagccattaaagagcggcaaacagggtatttgtcggctagagactagcgagtcctctgtgacagaggggggaatcgctttggatgagactggtaaggagactttcctttccgattgtaccgtgggtggcacttgcctacccaacgcactcagcccctcttgtaacttctccacaatcgacgtggtgtctctgaaaacggatacagaaaagacgagcgcccaggaaatggtaagcctggaccttgagagggaaagcccattcccacccaaagaaatttcagtctcctgcaccatcggaaatgttgatacagtcctcaagtgctcgatttgcggtcacttgttttctagctgctcagatctggaaaagcacgccgaatcccacatgcaacaaccaaaagagcacacatgctgtcactgctcccataaggctgaatccagcagcgccctccacatgcacattaaacaagctcatggacctcagaaggtgttcagttgtgacctttgcggattccagtgttccgaggagaatctgctgaatgctcattacctcggaaaaactcaccttcggaggcagaacctggccgcacgtggagggttcgtacaaattctgacaaagcagcctttcccaaagaagagtcgtactatggccacaaagaacgtacattctaaacccagaacctcaaagtctattgcaaagaattctgacagtaagggcttaagaaacgtgggcagcacttttaaggactttagaggatccattagtaaacagtcaggtagtagctcagagcttttagttgagatgatgcccagtcggaataccctatcccaggaagttgaaattgtcgaagagcacgttaccagtcttggactcgcacagaatcctgagaatcaaagtaggaagctggataccctggttacctcagaagggcttctggaaaaactggagtccacgaaaaacacgctacaagccgctcacggcaatagtgtcacctcccggcctaggccagaacggaatatcctcgtcctagggaacagctttagacgtcggtcctccactttcaccctgaagggccaggccaagaaacgattcaatctcctaggcataaagagaggcacttctgaaacccagcgaatgtacatgaagcatctgaggactcagatgaagacacatgatgcggagtctgtccttaagcacttggaagcatgttcaagcgtgcaacgcgtctgcgtgacaacgtctgagacccaagaggcagaacagggccagggatccgctagacctccagacagtggattacacagtctgaccgtcaaaccagcatccggcagccagaccctctgtgcttgtaccgattgcggccaagtcgctaccaataggacggacctcgagattcacgtgaagcggtgtcacgcccgagagatgaagttctattgcaggacctgcgacttttccagcatgagtcggagggacttagatgaacatcttcacagcaatcagcatcagcagactgcgtctgtgctgagctgtcagtgttgttcttttatctccctggacgagatcaacctgcgcgaccatatgaaggaaaagcacaatatgcacttcctgtgcacgccgtgcaacctattcttcctgagtgagaaggatgttgaggaacataaagcaactgagaagcacatcaacagtcttgtgcagccaaagaccctacagtccagtaatagtgatttggtgctacagactctgccgctgagtaccctagagtctgaaaatgccaaggagtcaatggatgattcaggcaaggcctcacaagaagagcctttaaaatcccgcgtgagccatggcaacgaagttagacactccagcaaaccacagtttcagtgtaaaaagtgcttttacaagacccggagctctaccgtacttactaggcacatcaagctgcgacacggtcaggactatcattttctctgcaaggcctgcaacctatactccctcagtaaggaaggcatggagaaacatataaagcgtagcaaacatctggaaaatgctaaaaaaaacaatatcggcctcagttttgaggagtgtatcgagcgtgtctgcattggcgcaaatgacaagaaggaagagttcgacgttagtggaaacgggaggatcgaaggccacatcggagtgcaactgcaggaacattcttatctggaaaagggcatgttggcctcagaagaattgtcccaatcagggggatccacaaaggacgatgagctggcttctaccacaacccctaaacgaggtagacccaaggggaatatctctagaacctgtagccattgtggcctcctggcctctagcattaccaatctgacagtccacatacgcaggaagcactcccatcagtacagctacctgtgcaaagtttgtaagtattataccgttaccaaaggtgatatggagagacactgtgcaactaagaaacacaagggtcgagtggaaatcgaagcaagtggtaaacactcttctgatatcatcgtgggacctgaaggcggatctctcgaggctggcaagaaaaacgctggaagcgcagtgacaatgtcggacgaacatgccaacaaacccgctgagtctcctacgagcgtgttagaaaagcctgaccgtggtaacagtattgaagcagaagtggagaacgtgttccactccctggacggggaggttaacagtcatctcctggataagaaggagcagatctcatcagagcctgaggacttcgcccagcctggtgacgtttattctcagcgcgacgtgaccggtaccggcgaaaacaaatgcctgcactgcgaattttctgcccacagtagtgcttcgctggagctgcatgtgaagagaaaacatactaaggaattcgagttctactgtatggcgtgtgattactacgctgtaacgaggcgggaaatgacgaggcacgcggctacagagaagcataagatgaaaagacagtcttatctgaacagtgcaaatgtggaggcagggtcagcagacatgtccaaaaatattattatgcccgaggaggagcaccagcagaactctgaagagtttcagattatcagtgggcagccttcagataccctgaaaagcagaaacgccgctgattgtagcatactgaatgaaaatactaacctagatatgagcaaagtcttgtgcgcagcagattctgtagaagtagaaacagaagaggagtccaatttcaacgaagaccattccttctgtgaaacattccaacaagcaccagttaaagataaggtacggaagcctgaggagatgatgtccttgaccatgtcctccaattatggcagcccgtctaggttccaaaacgaaaactctggatcatcagcattgaactgcgagacagctaaaaaaaaccatgagatttctaacgacgctggggaactcagggtgcactgtgagggagagggaggcaatgccggagatgggggaggagtggtaccccacagacacctctgccccgttacactcgatggggagaggagtgcagagtctccagtcctcgtagtgactcgcatcactcgtgagcagggcaaccttgaaagcgggggacagaaccgagtggcccgtggacacgggcttgaggatttaaaaggtgtccaggaggacccggtgcttggaaataaggaaattctgatgaactctcagcatgagaccgaatttatcctggaagaggacgggccagcctcagacagtacggtggagtccagtgatgtgtacgaaaccattatctcaattgatgataaaggccaggccatgtattcattcgggaggtttgatagctctataattaggattaagaatcccgaagacggggaactgatcgaccaatcagaggaaggcctgatagcaacaggagtgaggattagcgaactcccccttaaggattgtgcccagggagtcaaaaaaaaaaaatcagagggatccagtatcggtgagtccacacgcatccgctgtgacgactgcggcttcctggcagacggtctgtcggggcttaatgtccatattgccatgaagcatccgacaaaagaaaagcacttccattgccttctctgtgggaaaagtttctatactgaaagcaatctgcatcaacacttagcttcagccggtcacatgcgcaatgagcaggcctctgtggaggaactacccgaggggggtgctacgtttaagtgtgtcaaatgcacggaacccttcgactcagagcagaacctcttcctgcatatcaagggccagcacgaagagctgctacgggaagtcaataagtatattgtggaagacaccgagcagattaacagagagcgtgaggagaaccagggaaacgtctgcaagtactgtggcaaaatgtgcaggtcctcaaacagtatggcgttcctggctcacattaggacccatactggaagcaaacctttcaagtgtaaaatatgccactttgcaactgcccagctgggggatgcccgaaatcacgtaaagcgacacctgggtatgcgcgaatataagtgtcatgtttgtggtgtggccttcgtcatgaaaaaacacctcaatactcacctactcggcaaacatggagtcggcacaccaaaagagcgcaagtttacatgtcacctttgtgatagatcatttacagagaagtgggctttgaacaaccacatgaagctgcacacaggggagaagccatttaagtgtacctggcccacgtgccattactcgtttctgactgcttccgctatgaaggatcattatagaacacacaccggtgagaagagtttcctttgtgacctgtgcgggttcgctggaggtactcgccacgctctcactaaacacaggagacaacacacaggggaaaaacctttcaaatgcgatgagtgcaactttgcgtctactacacagtcacatttaactcggcacaagcgggtgcacactggtgagaagccctatagatgtccgtggtgcgattaccgctcaaactgtgctgagaatatcaggaagcacatcctacacacaggtaagcatgaaggcgtcaagatgtacaattgccccaaatgcgattatgggaccaatgtccccgtcgagttcaggaatcatctgaaggagcagcaccccgacattgagaacccggatcttgcttacttacacgccggtaaggggcaaaaactgta

SEQ ID NO: 59641 - DNA, 5794 bp, Artificial Sequence
  derived and/or modified sequence
atgatggatagtgagaataaacccgaaaatgatgaggatgaaaagataaacaaagaagcacaagacttgacaaagctttcatcccataatgaagacggtgggcctgtatctgatgtgatagcaagtttccctgagaattctatgggcaaaagaggtttttcagaatcatcgaactctgatagtgttgttataggagaagacagaaataaacatgcttccaaacgcaggaaattagatgaggcagagccccttaaatctggaaagcaaggtatttgtagattagaaacttctgagagctcagtcacagaagggggtattgcattagatgaaacagggaaggagacctttctgagtgactgcacagttggaggcacatgtctcccaaatgccctctccccttcttgcaattttagcactattgatgttgtttctctgaaaacagacactgaaaaaacatctgctcaggaaatggtttcccttgatctggaaagagaatctcctttccccccgaaagaaattagtgttagttgtaccattgggaatgtagatacagttctcaaatgcagcatctgtgggcatttgttttcttcttgctctgacttggaaaaacatgctgagtctcacatgcagcagcctaaggaacatacctgttgtcactgcagccacaaagcagagagcagctcagcactacatatgcatatcaaacaagcacatgggccacagaaggtcttttcctgtgatctttgtggttttcagtgttcagaagaaaacttgttgaatgcacattatcttggcaaaacacatctccgtcgtcagaatctggctgctcgtggaggatttgtacagatcttaacaaaacaaccttttcctaaaaaatcacgtacaatggcaacaaaaaatgttcactcaaaaccaagaacttctaaatcaatagcaaagaatagtgattcaaaaggattacgaaatgtgggaagcacgtttaaagatttcagaggaagtatttctaaacaaagtggtagtagcagtgagcttcttgttgaaatgatgccttccagaaatactttgtcacaggaagtagagattgttgaagaacatgttacttcccttggtctagctcagaatcctgaaaaccagagtagaaagctagacaccttagtaacctcagagggtctcttagagaaattggaatctacaaaaaatacccttcaggcagcacacggtaacagtgtaacctcgaggccaagacctgagcgaaatattctcgtgttgggtaatagctttcgtcgacgaagcagcactttcaccttgaagggccaggcaaagaaaaggtttaatcttttaggaattaaaagaggtacaagtgaaactcagaggatgtatatgaaacacttgagaacacagatgaaaacacacgatgcagaatcagtgctgaaacacctggaagcgtgcagcagtgtgcagagagtgtgtgtgactacctcagaaacccaggaggcagagcagggccaggggagtgcccgtcctccggactccgggctgcattccctgacagtgaagccagcttctggctctcagacgttgtgtgcttgtacagactgtgggcaagtagctacaaataggacagatttggaaatccatgtgaaaaggtgccatgccagagagatgaaattttactgccgtacttgtgacttctctagtatgtcaagaagggacttagatgaacatttgcacagtaaccagcatcagcaaactgcttctgtcctgagttgtcagtgttgttcatttatatccttggatgaaataaatcttagagaccacatgaaggaaaagcacaatatgcattttctttgcaccccttgtaatctgttctttttgtctgaaaaagatgtggaagaacacaaagccaccgagaagcatattaattcattggttcaaccaaagactttgcaatcatctaacagtgatttggttttacagactttacctttgagtactttagaatcagaaaacgcaaaagagtctatggatgactcaggaaaagcatctcaggaagaacctctgaagtccagggtaagccatggtaatgaagtgaggcattccagtaagcctcagtttcagtgtaagaagtgtttttataaaacaagatcttctactgttctcacgagacatataaagcttcggcatggtcaagactatcattttctttgtaaagcttgtaatctttattcattgagcaaagaaggaatggagaaacacattaaaagaagcaagcatcttgaaaatgctaagaaaaataatattggcttaagctttgaagaatgtattgaaagggtatgtataggtgcaaatgataaaaaagaagagtttgatgtttccggaaatggaaggattgaaggccatataggtgtgcaattacaagagcattcctatcttgagaagggcatgctggcgtctgaggaactgtcacagtctggtggtagcaccaaagatgatgaattagcttcaaccactactccaaagagagggagacctaaaggtaacatctcacggacgtgttcacactgtggccttttggcctctagtattacaaacttgactgttcacattagacgaaaacacagtcaccagtatagttatttatgcaaagtgtgtaagtattacactgtaactaagggagatatggaacgtcattgtgccaccaagaaacataaaggacgggtagaaatagaagcaagtggaaaacacagttcagatatcattgttggccctgaagggggtagccttgaagctggtaaaaagaatgctggctcagcagtgaccatgtcagatgaacatgctaacaaaccagctgagtcacccacctccgttttagagaagccagatcgtggaaactcaattgaagctgaagttgaaaatgtatttcattctctagatggagaagttaacagccatcttcttgataaaaaggagcaaatatcttcagagccagaggacttcgcccagccgggggatgtgtactcccagagagatgttacaggcacaggtgagaataagtgtttgcactgtgagtttagtgctcactcctctgcttctctagagctgcatgtaaaacggaaacatacaaaagagtttgagttttattgcatggcatgcgattactacgcggtgactcgtcgcgagatgaccaggcatgcagcaacagagaagcacaaaatgaaaaggcagtcttatctcaactctgctaatgtagaagctggttctgcagacatgtccaaaaacatcattatgcctgaagaagagcatcaacaaaattctgaggaatttcaaataatttcaggtcaaccatctgatactcttaaatctagaaatgctgcagattgctctattttaaatgagaatactaatttagatatgtctaaagtgctctgcgctgctgactctgtagaagttgagactgaagaagaatctaatttcaatgaagaccattccttttgtgagactttccaacaggctcctgtcaaggataaagttaggaaacctgaggagatgatgtcacttactatgtcctcaaactatggctccccaagcagatttcaaaatgaaaattcaggaagctctgccttaaattgtgagacagcaaagaaaaaccatgagatatcgaatgatgcaggtgagctgcgtgtccattgtgagggtgaaggaggaaacgcaggagacggtggaggtgttgtcccccacagacacctgtgccctgtgacgctcgatggggagcgctcggctgaaagccctgtgctcgttgtgacaagaataaccagagaacagggaaatctggagagcgggggtcagaacagagttgcacgtgggcatggtttggaagacttgaaaggtgtccaagaagatcccgttctggggaataaggaaattctgatgaattcacaacatgaaacagaatttattttggaggaggatggcccagcttctgatagcacagttgaaagtagtgatgtctatgaaactataattagtattgatgataaagggcaggccatgtacagttttggtcgatttgactcctccataataagaataaagaaccctgaagatggtgagttgatagaccagtctgaagagggcttgatagcaacgggagtgagaattagtgagctgcccttgaaagactgtgctcaaggtgtgaaaaagaagaaatctgagggcagttccattggtgagtctacacgaattcgctgtgatgattgtggcttcttagcagatggactgagtggactgaatgttcacatagccatgaagcatcctacaaaagagaagcacttccattgtttactctgtggaaagtcgttctataccgaaagcaaccttcaccagcatctggctagtgccggccacatgagaaatgagcaggccagtgtggaggagcttccggagggaggggccacctttaaatgtgtcaagtgcacagagccctttgattctgaacagaatttatttttacatattaaaggacagcatgaggaattgctgcgggaggtgaataagtatatagtggaagacactgagcaaatcaaccgcgagagggaggaaaaccagggaaacgtctgcaagtattgtgggaagatgtgtcgaagcagcaactcgatggccttcctggcacacattcgcactcacacaggatcaaaaccattcaagtgcaagatatgccattttgcaacagctcagcttggagatgccagaaaccatgtgaaaaggcaccttgggatgagggaatacaagtgtcatgtctgtggggttgcttttgtaatgaagaagcacttaaatactcatctactaggcaagcatggagttggcaccccaaaagaaaggaaatttacatgccacttatgtgatagaagtttcacagagaagtgggccctgaacaaccacatgaaactccacacgggagaaaagccgtttaaatgtacctggcccacgtgccattactcattcctcacagcctccgcaatgaaagaccactacaggacgcacacaggcgagaagtcgtttctgtgtgacctctgcggctttgccggcgggacccgccacgccctcaccaagcatcgcagacagcacacaggagaaaaacctttcaagtgcgatgagtgtaactttgcctccacaactcagtcccatttgactcggcataaacgtgtccacactggagaaaagccctacagatgcccctggtgtgactacaggtcaaactgtgctgaaaatatccgcaaacacattctgcatactggcaaacatgaaggagtcaagatgtacaactgtcccaagtgtgactacgggaccaacgtcccggtggagttccggaaccatttgaaggaacagcatcctgacatcgaaaacccggacctcgcttacctgcatgctggtaagggacagaaactgtgaaaacttgtttctaacaggatttcatgtgatcacagcagttataatgctatttgtacattaccatgatttattgtaatggagtagagtatgtgatagtatctgcttcaagacctatagaaaagtacattccagtttgatcccactcaactatgaaaacaggacttttcaactgtattttatcaaaaaaggaaatctgacagagtaattatttgatgactgtaaagttaataatagtaaatatttaaagcatagttgacctgaaatgagagtagttgttaaatcttcatatgttgactaattgctaaaattttaattttttttcttaaaaaatgcttgtgatttgaaa

SEQ ID NO: 59642 - protein, 1660 aa, Artificial Sequence
  derived and/or modified sequence
MMDSENKPENDEDEKINKEAQDLTKLSSHNEDGGPVSDVIASFPENSMGKRGFSESSNSDSVVIGEDRNKHASKRRKLDEAEPLKSGKQGICRLETSESSVTEGGIALDETGKETFLSDCTVGGTCLPNALSPSCNFSTIDVVSLKTDTEKTSAQEMVSLDLERESPFPPKEISVSCTIGNVDTVLKCSICGHLFSSCSDLEKHAESHMQQPKEHTCCHCSHKAESSSALHMHIKQAHGPQKVFSCDLCGFQCSEENLLNAHYLGKTHLRRQNLAARGGFVQILTKQPFPKKSRTMATKNVHSKPRTSKSIAKNSDSKGLRNVGSTFKDFRGSISKQSGSSSELLVEMMPSRNTLSQEVEIVEEHVTSLGLAQNPENQSRKLDTLVTSEGLLEKLESTKNTLQAAHGNSVTSRPRPERNILVLGNSFRRRSSTFTLKGQAKKRFNLLGIKRGTSETQRMYMKHLRTQMKTHDAESVLKHLEACSSVQRVCVTTSETQEAEQGQGSARPPDSGLHSLTVKPASGSQTLCACTDCGQVATNRTDLEIHVKRCHAREMKFYCRTCDFSSMSRRDLDEHLHSNQHQQTASVLSCQCCSFISLDEINLRDHMKEKHNMHFLCTPCNLFFLSEKDVEEHKATEKHINSLVQPKTLQSSNSDLVLQTLPLSTLESENAKESMDDSGKASQEEPLKSRVSHGNEVRHSSKPQFQCKKCFYKTRSSTVLTRHIKLRHGQDYHFLCKACNLYSLSKEGMEKHIKRSKHLENAKKNNIGLSFEECIERVCIGANDKKEEFDVSGNGRIEGHIGVQLQEHSYLEKGMLASEELSQSGGSTKDDELASTTTPKRGRPKGNISRTCSHCGLLASSITNLTVHIRRKHSHQYSYLCKVCKYYTVTKGDMERHCATKKHKGRVEIEASGKHSSDIIVGPEGGSLEAGKKNAGSAVTMSDEHANKPAESPTSVLEKPDRGNSIEAEVENVFHSLDGEVNSHLLDKKEQISSEPEDFAQPGDVYSQRDVTGTGENKCLHCEFSAHSSASLELHVKRKHTKEFEFYCMACDYYAVTRREMTRHAATEKHKMKRQSYLNSANVEAGSADMSKNIIMPEEEHQQNSEEFQIISGQPSDTLKSRNAADCSILNENTNLDMSKVLCAADSVEVETEEESNFNEDHSFCETFQQAPVKDKVRKPEEMMSLTMSSNYGSPSRFQNENSGSSALNCETAKKNHEISNDAGELRVHCEGEGGNAGDGGGVVPHRHLCPVTLDGERSAESPVLVVTRITREQGNLESGGQNRVARGHGLEDLKGVQEDPVLGNKEILMNSQHETEFILEEDGPASDSTVESSDVYETIISIDDKGQAMYSFGRFDSSIIRIKNPEDGELIDQSEEGLIATGVRISELPLKDCAQGVKKKKSEGSSIGESTRIRCDDCGFLADGLSGLNVHIAMKHPTKEKHFHCLLCGKSFYTESNLHQHLASAGHMRNEQASVEELPEGGATFKCVKCTEPFDSEQNLFLHIKGQHEELLREVNKYIVEDTEQINREREENQGNVCKYCGKMCRSSNSMAFLAHIRTHTGSKPFKCKICHFATAQLGDARNHVKRHLGMREYKCHVCGVAFVMKKHLNTHLLGKHGVGTPKERVKVAYRKIGTLPGIQNNRNASSASEAQSLCEHFS

SEQ ID NO: 59643 - DNA, 4983 bp, Artificial Sequence
  derived and/or modified sequence
atgatggacagcgagaacaagcccgagaacgacgaggacgagaagatcaacaaggaggcccaggacctgaccaagctgagcagccacaacgaggacggcggccccgtgagcgacgtgatcgccagcttccccgagaacagcatgggcaagagaggcttcagcgagagcagcaacagcgacagcgtggtgatcggcgaggacagaaacaagcacgccagcaagagaagaaagctggacgaggccgagcccctgaagagcggcaagcagggcatctgcagactggagaccagcgagagcagcgtgaccgagggcggcatcgccctggacgagaccggcaaggagaccttcctgagcgactgcaccgtgggcggcacctgcctgcccaacgccctgagccccagctgcaacttcagcaccatcgacgtggtgagcctgaagaccgacaccgagaagaccagcgcccaggagatggtgagcctggacctggagagagagagccccttcccccccaaggagatcagcgtgagctgcaccatcggcaacgtggacaccgtgctgaagtgcagcatctgcggccacctgttcagcagctgcagcgacctggagaagcacgccgagagccacatgcagcagcccaaggagcacacctgctgccactgcagccacaaggccgagagcagcagcgccctgcacatgcacatcaagcaggcccacggcccccagaaggtgttcagctgcgacctgtgcggcttccagtgcagcgaggagaacctgctgaacgcccactacctgggcaagacccacctgagaagacagaacctggccgccagaggcggcttcgtgcagatcctgaccaagcagcccttccccaagaagagcagaaccatggccaccaagaacgtgcacagcaagcccagaaccagcaagagcatcgccaagaacagcgacagcaagggcctgagaaacgtgggcagcaccttcaaggacttcagaggcagcatcagcaagcagagcggcagcagcagcgagctgctggtggagatgatgcccagcagaaacaccctgagccaggaggtggagatcgtggaggagcacgtgaccagcctgggcctggcccagaaccccgagaaccagagcagaaagctggacaccctggtgaccagcgagggcctgctggagaagctggagagcaccaagaacaccctgcaggccgcccacggcaacagcgtgaccagcagacccagacccgagagaaacatcctggtgctgggcaacagcttcagaagaagaagcagcaccttcaccctgaagggccaggccaagaagagattcaacctgctgggcatcaagagaggcaccagcgagacccagagaatgtacatgaagcacctgagaacccagatgaagacccacgacgccgagagcgtgctgaagcacctggaggcctgcagcagcgtgcagagagtgtgcgtgaccaccagcgagacccaggaggccgagcagggccagggcagcgccagaccccccgacagcggcctgcacagcctgaccgtgaagcccgccagcggcagccagaccctgtgcgcctgcaccgactgcggccaggtggccaccaacagaaccgacctggagatccacgtgaagagatgccacgccagagagatgaagttctactgcagaacctgcgacttcagcagcatgagcagaagagacctggacgagcacctgcacagcaaccagcaccagcagaccgccagcgtgctgagctgccagtgctgcagcttcatcagcctggacgagatcaacctgagagaccacatgaaggagaagcacaacatgcacttcctgtgcaccccctgcaacctgttcttcctgagcgagaaggacgtggaggagcacaaggccaccgagaagcacatcaacagcctggtgcagcccaagaccctgcagagcagcaacagcgacctggtgctgcagaccctgcccctgagcaccctggagagcgagaacgccaaggagagcatggacgacagcggcaaggccagccaggaggagcccctgaagagcagagtgagccacggcaacgaggtgagacacagcagcaagccccagttccagtgcaagaagtgcttctacaagaccagaagcagcaccgtgctgaccagacacatcaagctgagacacggccaggactaccacttcctgtgcaaggcctgcaacctgtacagcctgagcaaggagggcatggagaagcacatcaagagaagcaagcacctggagaacgccaagaagaacaacatcggcctgagcttcgaggagtgcatcgagagagtgtgcatcggcgccaacgacaagaaggaggagttcgacgtgagcggcaacggcagaatcgagggccacatcggcgtgcagctgcaggagcacagctacctggagaagggcatgctggccagcgaggagctgagccagagcggcggcagcaccaaggacgacgagctggccagcaccaccacccccaagagaggcagacccaagggcaacatcagcagaacctgcagccactgcggcctgctggccagcagcatcaccaacctgaccgtgcacatcagaagaaagcacagccaccagtacagctacctgtgcaaggtgtgcaagtactacaccgtgaccaagggcgacatggagagacactgcgccaccaagaagcacaagggcagagtggagatcgaggccagcggcaagcacagcagcgacatcatcgtgggccccgagggcggcagcctggaggccggcaagaagaacgccggcagcgccgtgaccatgagcgacgagcacgccaacaagcccgccgagagccccaccagcgtgctggagaagcccgacagaggcaacagcatcgaggccgaggtggagaacgtgttccacagcctggacggcgaggtgaacagccacctgctggacaagaaggagcagatcagcagcgagcccgaggacttcgcccagcccggcgacgtgtacagccagagagacgtgaccggcaccggcgagaacaagtgcctgcactgcgagttcagcgcccacagcagcgccagcctggagctgcacgtgaagagaaagcacaccaaggagttcgagttctactgcatggcctgcgactactacgccgtgaccagaagagagatgaccagacacgccgccaccgagaagcacaagatgaagagacagagctacctgaacagcgccaacgtggaggccggcagcgccgacatgagcaagaacatcatcatgcccgaggaggagcaccagcagaacagcgaggagttccagatcatcagcggccagcccagcgacaccctgaagagcagaaacgccgccgactgcagcatcctgaacgagaacaccaacctggacatgagcaaggtgctgtgcgccgccgacagcgtggaggtggagaccgaggaggagagcaacttcaacgaggaccacagcttctgcgagaccttccagcaggcccccgtgaaggacaaggtgagaaagcccgaggagatgatgagcctgaccatgagcagcaactacggcagccccagcagattccagaacgagaacagcggcagcagcgccctgaactgcgagaccgccaagaagaaccacgagatcagcaacgacgccggcgagctgagagtgcactgcgagggcgagggcggcaacgccggcgacggcggcggcgtggtgccccacagacacctgtgccccgtgaccctggacggcgagagaagcgccgagagccccgtgctggtggtgaccagaatcaccagagagcagggcaacctggagagcggcggccagaacagagtggccagaggccacggcctggaggacctgaagggcgtgcaggaggaccccgtgctgggcaacaaggagatcctgatgaacagccagcacgagaccgagttcatcctggaggaggacggccccgccagcgacagcaccgtggagagcagcgacgtgtacgagaccatcatcagcatcgacgacaagggccaggccatgtacagcttcggcagattcgacagcagcatcatcagaatcaagaaccccgaggacggcgagctgatcgaccagagcgaggagggcctgatcgccaccggcgtgagaatcagcgagctgcccctgaaggactgcgcccagggcgtgaagaagaagaagagcgagggcagcagcatcggcgagagcaccagaatcagatgcgacgactgcggcttcctggccgacggcctgagcggcctgaacgtgcacatcgccatgaagcaccccaccaaggagaagcacttccactgcctgctgtgcggcaagagcttctacaccgagagcaacctgcaccagcacctggccagcgccggccacatgagaaacgagcaggccagcgtggaggagctgcccgagggcggcgccaccttcaagtgcgtgaagtgcaccgagcccttcgacagcgagcagaacctgttcctgcacatcaagggccagcacgaggagctgctgagagaggtgaacaagtacatcgtggaggacaccgagcagatcaacagagagagagaggagaaccagggcaacgtgtgcaagtactgcggcaagatgtgcagaagcagcaacagcatggccttcctggcccacatcagaacccacaccggcagcaagcccttcaagtgcaagatctgccacttcgccaccgcccagctgggcgacgccagaaaccacgtgaagagacacctgggcatgagagagtacaagtgccacgtgtgcggcgtggccttcgtgatgaagaagcacctgaacacccacctgctgggcaagcacggcgtgggcacccccaaggagagagtgaaggtggcctacagaaagatcggcaccctgcccggcatccagaacaacagaaacgccagcagcgccagcgaggcccagagcctgtgcgagcacttcagctag

SEQ ID NO: 59644 - DNA, 4983 bp, Artificial Sequence
  derived and/or modified sequence
atgatggattcagagaacaaaccagaaaacgacgaggacgaaaagattaataaggaagcacaagacctgaccaaactgtccagccacaacgaagatggtggtccagtgagcgacgttattgcttcgtttcctgaaaattctatgggaaagcggggtttcagcgagtcttctaactcagactctgtcgtgattggtgaggaccgtaacaagcacgcttcgaagcgcaggaagctggacgaagccgaacccctgaaaagtggcaaacagggaatctgtcggttggagacaagtgagtccagcgtgaccgaaggcgggatcgcactcgacgaaaccggaaaagaaacttttctttctgattgtaccgtgggaggaacctgtttgcctaacgccctgagccccagttgcaacttctcgactatcgatgtagtgagcctgaaaaccgacacagaaaaaaccagcgcccaggagatggtgagtctggatctggaaagagaatctcccttccctccgaaggaaatttctgtgtcttgcaccattggtaacgtggacacggtgttgaagtgttctatctgtgggcatttattctcttcatgctctgacctcgagaagcacgcagaaagccacatgcagcagcctaaggaacacacctgctgtcactgctcccataaagctgagagttcctcagccctgcacatgcacatcaagcaggcacacggtccccagaaagtcttttcctgtgacttgtgcggatttcaatgtagcgaagagaatctgctcaatgcccactatctaggaaagacccacctgaggagacagaacctggccgcccgcggaggtttcgtgcagattctgacaaaacagccattccccaaaaagtccagaaccatggctacaaagaatgtgcattcgaagcctaggactagtaaatccatcgccaaaaatagtgatagcaagggactgaggaatgtcggctccacttttaaagatttccgaggctccattagcaaacagagcggctcatccagcgaattgctggtggagatgatgccaagtaggaatacgcttagtcaagaggtggagatagttgaggaacacgtgactagtttggggctggctcagaaccctgaaaaccagtcacgaaaactggacacgcttgtgacaagcgagggcctcctggagaagctcgaatctactaagaataccctgcaggccgcccacgggaacagcgtcacctctagaccacgccctgaacggaatattctggtgctgggaaatagttttcggagaaggagctcaaccttcacgctgaagggtcaagctaaaaagagatttaacctgttgggaatcaaacgtggcacaagtgagactcaacgcatgtatatgaagcacctcagaacccagatgaagacacatgacgccgagagcgtactcaagcacctcgaagcttgttcaagtgtgcagagagtgtgtgtgactacaagtgaaacccaggaagcagaacaggggcagggaagcgcgcgcccgcccgacagcggcctgcactccttgacagtgaaaccagcctctggatctcagaccctttgtgcatgcaccgattgtggccaggtcgcaactaatagaacggatttagagatacatgtcaaacggtgtcacgccagggagatgaagttttactgcaggacttgcgacttttcttctatgtcgcgccgagatcttgatgagcacctgcacagtaaccaacatcagcagaccgccagcgtgctgagctgccagtgttgtagcttcatctctctagacgagatcaacctcagagaccacatgaaggagaagcacaacatgcacttcttgtgcactccctgcaacctgtttttcctctctgagaaggacgttgaagagcacaaggcaactgagaagcacattaactcactggtgcagcctaaaactttgcagtctagtaatagtgatctggttttacaaaccctacctctctccactttggaaagcgaaaacgctaaggaatcgatggacgactccggcaaggcatcacaggaggaaccgctgaaaagtagagtctcacatgggaatgaagtgcgccatagcagcaaacctcagtttcagtgcaagaagtgtttctacaaaaccagatctagcactgtcctaacacgccatatcaaattgaggcacggacaagattaccattttttgtgcaaggcttgcaatttgtacagcttatctaaggaagggatggaaaagcacatcaagcgctctaaacacctggaaaacgctaagaagaacaacatcgggctcagttttgaagaatgcatcgaacgggtatgcatcggtgccaatgacaaaaaagaggagtttgatgtgagcggaaatggccgcattgagggtcacatcggggtccaactgcaggaacacagttaccttgagaaaggtatgttagcaagcgaggaactgtcccaatctggagggtcgacaaaggacgatgagctagcttccaccaccaccccaaagaggggtaggccaaagggcaatatttctagaacctgcagtcattgcggcctgctggcttcatctataaccaatcttaccgtccatatacgtcggaagcactctcaccagtactcttacctttgcaaggtgtgcaaatactacacagtgacaaaaggggacatggagagacactgcgcaacgaaaaaacacaaaggcagggtggaaatagaagcaagtggcaaacacagctccgatattattgtaggaccagaaggcggctctctggaggcaggcaaaaagaatgccggcagtgcagtcacgatgagtgatgaacacgccaacaaacctgctgaaagccctaccagcgtccttgagaaaccggaccgaggaaactctatagaggcagaagttgagaacgtgtttcacagtctcgatggcgaggtcaacagtcacctactggacaaaaaggagcaaatcagcagcgagcctgaggactttgctcagcctggcgatgtctattcccagcgagatgtaaccgggaccggtgagaacaaatgtctccattgtgagttctcagctcactcctctgctagtttagaacttcacgttaaaagaaagcacacaaaagagttcgagttctattgcatggcatgcgattactacgcagtgacgcggcgcgaaatgactcgccacgccgccactgaaaagcataagatgaagagacagtcctatctgaactcagccaacgtagaggccgggagcgccgacatgtcaaaaaacattatcatgccagaagaggaacaccagcagaattcagaggaattccaaatcatctctggacagcctagtgatactctgaaaagcagaaatgctgccgactgctccattctgaatgaaaataccaatctagacatgagcaaagtgctgtgcgccgccgactccgtggaagtggaaacagaagaagagagtaacttcaatgaggaccactctttttgcgagacatttcagcaggcaccggtgaaggacaaggtgagaaaacctgaagaaatgatgtcactgactatgtcgtccaactacggatcccccagtagatttcagaatgaaaattcggggtcaagcgctctgaactgcgagaccgcaaagaagaaccacgaaatttcgaacgacgccggtgaattgagggttcattgtgagggagaaggcgggaacgcgggcgacggcggcggcgttgtaccccataggcacctgtgccctgtcaccctggatggcgaaagatcagccgaaagcccagtattggtggtcacccgaattaccagggagcaggggaatctcgagagtggcggacagaatagagtagccaggggccacgggttagaggacttgaagggcgtgcaggaggacccagtgttgggaaacaaggagatactgatgaattcccagcatgaaacagagttcatcttagaggaggacggacctgctagcgatagcaccgtggagtcaagcgacgtatatgaaaccatcatcagcatcgacgacaaggggcaagccatgtattcttttgggcgctttgactcatctatcatcaggatcaagaaccccgaggacggcgagctgatcgaccagagtgaggagggactgatcgccacaggggtccgaatcagtgagcttcccctgaaagattgtgcacaaggggtgaagaagaagaaatccgagggcagctccattggtgaatcaacccggatcaggtgtgatgactgtgggtttctggctgacgggctgtcaggcctaaacgtccacattgccatgaagcatcctaccaaagaaaagcactttcactgtctgctatgtggcaaaagcttctatactgagtcaaacctgcaccagcatctcgccagtgccgggcacatgaggaacgaacaggccagtgtggaagaactgcccgagggcggagcaacttttaaatgcgttaaatgtacagaaccattcgacagcgagcagaacctctttttgcacatcaagggacaacatgaggagcttctgagagaagtgaataagtacatcgtcgaggacacagagcagatcaatcgcgagcgtgaggagaaccaagggaatgtctgtaagtactgtgggaaaatgtgccgctcatcaaattcaatggcattcctcgcacatatacgcactcataccggttcgaagccgtttaagtgcaagatctgccacttcgctacggctcagttaggggacgcccggaatcacgtaaaaaggcacctgggaatgcgggagtacaaatgccatgtttgtggggtggctttcgttatgaaaaagcatctgaatacgcatctcctggggaagcatggtgtgggcacgccgaaagaaagggtcaaggtagcttatcggaagatagggacgctgccaggcattcaaaataacaggaatgcctcctcagccagtgaagctcaatcattgtgcgagcacttctcatag

SEQ ID NO: 59645 - DNA, 4983 bp, Artificial Sequence
  derived and/or modified sequence
atgatggactcggagaataagcccgagaacgatgaagatgagaagataaacaaagaggcacaagacctcacaaaacttagctctcacaacgaagatggcgggccagtatctgacgtcattgcatcattcccagagaacagtatggggaagcgggggttctcggagtcgagcaattccgactcagtcgtgatcggcgaagatcgcaataaacacgctagtaaacggaggaagttggacgaagccgagcccctgaagagtgggaagcagggcatctgccgccttgaaacatctgagagcagtgtgaccgaaggaggaatcgctctggatgagaccggcaaggagaccttcctgagcgattgtactgtcggcggcacctgtctgccaaacgctctctctccttcctgtaatttctccactatcgacgtggtcagcttgaaaactgacacagagaagacctctgcacaggaaatggtctccctggacctggaacgggaatccccattccctccgaaggagatctcggttagttgcacaatcgggaatgtcgacactgttctgaaatgctcaatctgtggtcatctgtttagttcctgctccgaccttgagaaacacgcagaaagccatatgcaacaacccaaggagcacacttgctgccactgttcccacaaagctgagtcgtcctcagccctgcatatgcacataaagcaagcccatggacctcaaaaggtgttttcatgcgatctttgtggattccagtgcagcgaagagaacctcctgaacgcccattatctggggaaaactcacctcaggagacagaacctggcagccaggggaggtttcgtgcagatcttaacaaagcagcccttccctaaaaagtcgagaactatggcaaccaagaatgtgcattccaagccccgtactagcaagtcgattgccaagaattcagatagcaaaggacttcgcaacgtaggttctactttcaaagatttccggggatcaatatcaaagcagagcggcagttcatctgagctgctcgtggaaatgatgccttctcggaacacgctgtcacaggaggtcgaaatagtggaagagcatgtaacaagtttaggactggctcagaaccccgagaaccagagcagaaagctggatacactggtgacctcggaaggcttgctggagaagctggagtcgaccaaaaacacgctccaagccgcgcatggaaattccgttaccagccgcccacggccggagcgtaatattttagtcctcggtaattcttttcgcagacgcagctccacgttcaccctgaaaggacaagctaagaagcggttcaatctgcttggtatcaagagaggcaccagcgagacccagcgcatgtacatgaagcatcttaggactcaaatgaaaacgcatgatgctgagtccgtcctgaaacacttggaggcctgcagctcggtacagagggtatgcgtgacgacctctgagactcaagaggctgaacagggccaggggagcgcacgaccacccgacagcggactgcactctttgaccgtgaaacctgccagtggcagccagaccctgtgcgcttgtactgattgcggacaggtggccacgaacagaacagatctggaaatacatgtcaaaaggtgccacgctagagagatgaagttctattgccgcacctgcgatttttctagtatgtctcgtcgagatctagatgagcatttgcatagtaaccagcaccagcagacagcatccgttctttcctgccaatgttgttctttcatctctttggatgagatcaatctgcgggatcatatgaaggagaagcacaatatgcactttttgtgcacgccatgcaacttgttctttttgagcgaaaaagatgtagaggagcataaagctacagagaaacacatcaacagccttgtgcaaccgaagacactccagagctctaactctgatctggtcttacaaaccctgcctctgagtacactggaaagtgagaacgctaaggagtctatggacgacagcggcaaagctagccaggaagagccactgaaaagccgtgtgtcccacggcaacgaggtcaggcacagctcaaagccccaattccaatgcaagaagtgcttctacaagacacggagcagcactgtgctgactcggcacattaagctgcgacatggacaggactaccacttcttatgtaaagcgtgtaatctctacagcttgtctaaagaaggcatggagaagcatattaaaagaagtaaacaccttgagaacgccaaaaaaaacaatataggcctgtcattcgaagaatgcatagaaagggtgtgcattggtgcaaatgataaaaaggaggagttcgacgtcagtggtaacggacggattgagggccatatcggcgtgcagctgcaagagcactcctatctggagaagggcatgctcgcctcagaagagctcagccagtcggggggctccactaaggatgatgaactagcatcaaccacgacacccaaacggggcagaccaaagggcaatatctccaggacttgttcccactgtggccttctcgcctcatccattactaatctcactgtccacattaggcggaagcacagtcatcaatacagctatctttgcaaagtgtgcaaatactacactgtgacaaaaggtgacatggagagacactgcgccacaaaaaagcacaaaggccgggtcgagattgaagcttctgggaagcatagtagtgatatcattgttgggcccgagggagggtccctggaagccgggaagaagaacgccgggtctgcggtcacaatgagcgatgagcatgcgaacaagcctgcggagtccccaacttccgtgttagaaaagcccgaccgcggtaatagcatcgaggctgaggtggaaaatgtgttccattcacttgacggagaggtcaattcccatctgttggacaagaaagagcagatatcaagtgaacctgaggatttcgcacagcctggtgatgtatatagtcagcgggatgtcacaggcaccggcgaaaataagtgtctgcattgcgaattttcagcacattcaagcgcttccctggagttgcatgtgaaacggaaacacactaaggagttcgagttttactgcatggcctgtgattactacgcggtcacgcgccgggagatgactcggcatgccgcaacagaaaagcataaaatgaaaaggcagtcgtacctcaactctgcgaatgtggaagcgggatctgccgatatgagcaagaacatcatcatgccagaggaagagcaccaacaaaactctgaagagtttcagattatcagcggccagccaagcgatacactgaagtctaggaatgcggcagactgctctattcttaatgagaatactaacctagatatgagcaaagtgctgtgcgcggccgactcggtggaggtcgagaccgaagaggagagcaatttcaacgaagatcatagtttttgtgaaactttccaacaggctccggtcaaagataaggtgcgcaaaccggaagagatgatgagcttgacgatgagtagcaattatgggagtcctagccgatttcaaaacgagaactccggcagttccgctctgaactgcgagaccgcaaagaagaaccacgaaattagtaatgatgctggggagttaagagtccactgcgagggagagggcggtaatgccggcgatggcggaggcgtggtaccacaccggcacctgtgccctgtcacactggatggcgaacgttctgcagaatcacccgtcctggtggttacacggattacccgagagcaaggcaacctggagtcaggtggccagaatagggtggcacgagggcacgggctagaggacttgaagggggtgcaggaggacccagtgctgggcaataaggagatccttatgaacagtcaacacgagacagagtttatccttgaagaagacggccctgctagtgacagcaccgtggagtccagtgacgtgtatgagaccataatctccatcgatgataaaggccaagctatgtactcctttggccgattcgacagttctattatcaggattaagaacccagaagacggggaactgattgaccagtcagaggaaggtctgatcgctacaggtgtgcgcattagcgaacttcccctcaaagattgcgcccagggcgtaaaaaaaaaaaagagcgagggaagctctattggggagtcaacccggattaggtgcgatgattgtggatttctcgccgatggcctcagcggtttgaacgtgcatatcgccatgaagcaccccacgaaggagaagcatttccattgcctgttatgcggcaagtctttctatacagagtccaacctgcaccagcacctcgcatctgccggacatatgcggaacgagcaagcttccgtggaagaactgcctgaggggggcgccacttttaagtgtgtgaagtgcacagaacctttcgattcagagcagaatttgttccttcatattaagggccagcatgaagagttactgcgtgaggttaataagtatattgtggaagacacggagcaaatcaatcgagagagggaagaaaatcaggggaatgtgtgcaaatattgcgggaagatgtgcagaagttcaaactccatggcgttcctggcccacatcaggacccacacaggctcaaaaccattcaagtgtaaaatttgtcactttgctacagcccaactgggggatgctaggaaccatgtgaaaagacacctaggcatgcgcgaatacaagtgccacgtgtgcggcgtagctttcgtaatgaagaagcatttaaatacccatctgctgggtaagcatggcgtgggtacaccgaaggaaagagtgaaggtcgcctatcgtaaaatcgggacgctccccggcatccagaacaataggaatgcttcttcagcgagcgaagctcagagcctgtgtgaacatttcagctag

SEQ ID NO: 59646 - DNA, 4983 bp, Artificial Sequence
  derived and/or modified sequence
atgatggacagcgagaacaagccagaaaatgatgaagatgagaagatcaacaaggaggcccaggacctgaccaagctgagcagccacaatgaagatggcggccctgtgtctgatgtgattgccagcttcccagaaaattccatgggcaagaggggcttcagcgagagcagcaacagcgacagcgtggtgattggagaggacaggaacaagcacgccagcaagaggaggaagctggatgaagctgagcccctgaagagcggcaagcagggcatctgccgcctggagaccagcgagagctctgtgacagagggcggcatcgccctggatgaaacaggcaaggagaccttcctgagtgactgcaccgtgggcggcacctgcctgcccaatgccctgagccccagctgcaacttcagcaccattgatgtggtgtccctgaagacagacacagagaagaccagcgcccaggagatggtgtccctggacctggagcgggagagccccttcccccccaaggagatctctgtgtcctgcaccatcggaaatgtggacacagtgctgaagtgcagcatctgtggccacctgttcagcagctgcagcgacctggagaagcatgctgagagccacatgcagcagcccaaggagcacacctgctgccactgcagccacaaggccgagagcagcagcgccctgcacatgcacatcaagcaggcccacggcccccagaaggtgttcagctgtgacctgtgtggcttccagtgcagcgaggagaacctgctgaatgcccactacctgggcaagacccacctgcggcggcagaacctggccgcccggggcggctttgtgcagatcctgaccaagcagcccttccccaagaagagcaggaccatggccaccaagaatgtgcacagcaagcccaggaccagcaagagcatcgccaagaacagcgacagcaagggcctgagaaatgtgggcagcaccttcaaggacttccggggcagcatcagcaagcagagcggcagcagcagcgagctgctggtggagatgatgcccagcaggaacaccctgagccaggaggtggagatcgtggaggagcacgtgaccagcctgggcctggcccagaaccctgagaaccagagcaggaagctggacaccctggtgaccagcgagggcctgctggagaagctggagagcaccaagaacaccctgcaggccgcccacggcaacagcgtgaccagccggcccaggcctgagaggaacatcctggtgctgggcaacagcttcagaagaagaagcagcaccttcaccctgaagggccaggccaagaagcgcttcaacctgctgggcatcaagaggggcaccagcgagacccagaggatgtacatgaagcacctgcggacccagatgaagacccatgatgctgagagcgtgctgaagcacctggaggcctgcagctctgtgcagagggtgtgtgtgaccaccagcgagacccaggaggccgagcagggccagggcagcgcccggcccccagattctggcctgcacagcctgactgtgaagccagccagcggcagccagaccctgtgtgcctgcacagactgtggccaggtggccaccaacagaacagacctggagatccacgtgaagcgctgccacgcccgggagatgaagttctactgcaggacctgtgacttcagctccatgagcagaagagacctggatgagcacctgcacagcaaccagcaccagcagacagcctctgtgctgagctgccagtgctgcagcttcatcagcctggatgagatcaacctgcgggaccacatgaaggagaagcacaacatgcacttcctgtgcaccccctgcaacctcttcttcctgtctgagaaggatgtggaggagcacaaggccacagagaagcacatcaacagcctggtgcagcccaagaccctgcagagcagcaacagcgacctggtgctgcagaccctgcccctgagcaccctggagagtgaaaatgccaaggagagcatggatgacagcggcaaggccagccaggaggagcccctgaagagccgggtgtcccatggaaatgaggtgcgccacagcagcaagccccagttccagtgcaagaagtgcttctacaagaccaggagcagcacagtgctgaccaggcacatcaagctgcggcacggccaggactaccacttcctgtgcaaggcctgcaacctgtacagcctgagcaaggagggcatggagaagcacatcaagaggagcaagcacctggagaatgccaagaagaacaacatcggcctgagctttgaagaatgtattgagcgggtgtgcatcggggccaatgacaagaaggaggagtttgatgtgtctggaaatggaagaattgagggccacatcggcgtgcagctgcaggagcacagctacctggagaagggcatgctggccagcgaggagctgagccagagcggcggcagcaccaaggatgatgagctggccagcaccaccacccccaagaggggccggcccaagggcaacatcagcaggacctgcagccactgcggcctgctggccagcagcatcaccaacctgactgtgcacatccggaggaagcacagccaccagtacagctacctgtgcaaggtgtgcaagtactacacagtgaccaagggggacatggagcggcactgtgccaccaagaagcacaagggccgggtggagattgaggccagcggcaagcacagcagtgacatcatcgtgggccctgagggcggcagcctggaggccggcaagaagaatgccggcagcgctgtgaccatgtctgatgaacatgccaacaagccagctgagagccccacctctgtgctggagaagccagaccggggcaacagcattgaggccgaggtggagaatgtgttccacagcctggatggagaggtgaacagccacctgctggacaagaaggagcagatcagcagcgagccagaagattttgcccagcctggagatgtgtacagccagagagatgtgacaggcaccggggagaacaagtgcctgcactgtgagttcagcgcccacagcagcgccagcctggagctgcacgtgaagaggaagcacaccaaggagtttgagttctactgcatggcctgtgactactatgctgtgacccggcgggagatgaccaggcatgctgccacagagaagcacaagatgaagaggcagagctacctgaacagcgccaacgtggaggccggcagcgctgacatgagcaagaacatcatcatgcctgaggaggagcaccagcagaacagcgaggagttccagatcatcagcggccagcccagcgacaccctgaagagcagaaatgctgctgactgcagcatcctgaatgaaaacaccaacctggacatgagcaaggtgctgtgtgccgctgacagcgtggaggtggagacagaggaggagagcaacttcaatgaagaccacagcttctgtgagaccttccagcaggcccctgtgaaggacaaggtgaggaagccagaggagatgatgagcctgaccatgagcagcaactacggcagccccagccgcttccagaatgaaaattctggcagcagcgccctgaactgtgaaacagccaagaagaaccacgagatcagcaatgatgctggggagctgcgggtgcactgtgagggggagggcggcaatgctggagatggcggcggcgtggtgccccaccgccacctgtgccctgtgaccctggatggagagaggtctgctgagagccctgtgctggtggtgacccgcatcacccgggagcagggcaacctggagagcggcggccagaacagagtggcccggggccacggcctggaggacctgaagggcgtgcaggaggaccctgtgctgggcaacaaggagatcctgatgaacagccagcacgagacagagttcatcctggaggaggatggccctgccagtgacagcacagtggagagcagtgatgtgtatgagaccatcatcagcattgatgacaagggccaggccatgtacagctttggccgctttgacagcagcatcatccgcatcaagaacccagaagatggagagctgattgaccagagcgaggagggcctcatcgccaccggggtgcgcatcagcgagctgcccctgaaggactgtgcccagggcgtgaagaagaagaagtctgagggcagcagcatcggggagagcacccgcatccgctgtgatgactgtggcttcctggctgatggcctgagcggcctgaatgtgcacatcgccatgaagcaccccaccaaggagaagcacttccactgcctgctgtgtgggaagagcttctacacagagagcaacctgcaccagcacctggccagcgctggccacatgagaaatgagcaggcctctgtggaggagctgcctgagggcggggccaccttcaagtgtgtgaagtgcacagagccctttgattctgagcagaacctcttcctgcacatcaagggccagcacgaggagctgctgcgggaggtgaacaagtacatcgtggaggacacagagcagatcaaccgggagcgggaggagaaccagggcaatgtgtgcaagtactgtgggaagatgtgccgcagcagcaacagcatggccttcctggcccacatccgcacccacacaggcagcaagcccttcaagtgcaagatctgccactttgccacagcccagctgggagatgccagaaatcatgtgaagaggcacctgggcatgagggagtacaagtgccacgtgtgtggggtggcctttgtgatgaagaagcacctgaacacccacctgctgggcaagcacggcgtgggcacccccaaggagcgggtgaaggtggcctacaggaagattggcaccctgcccggcatccagaacaacagaaatgccagcagcgccagcgaggcccagagcctgtgtgagcacttctcctag

SEQ ID NO: 59647 - DNA, 4983 bp, Artificial Sequence
  derived and/or modified sequence
atgatggacagcgagaacaagcccgagaacgacgaggacgagaagataaacaaggaggcccaagaccttacgaaactctcgtcacataatgaagacggcggacccgtgtccgacgtaatcgctagcttccctgagaattctatgggtaagagaggtttttcggagagctcaaatagcgactccgtcgtcattggggaggataggaataagcacgcgtctaagcggcggaagttggatgaagcagaaccactaaaatctggcaaacagggaatctgccgactcgagacttctgagtcctctgtgaccgaagggggaatcgccttggacgagaccgggaaggagacatttctcagtgactgtaccgtgggtggtacctgcctcccgaatgccctttcacctagctgcaacttcagtaccatcgacgttgtgtctctgaagactgacaccgagaagacttccgcacaggagatggtcagcctcgacttagaacgcgaatcacccttcccgcccaaagagatttcagtgtcctgtaccattgggaacgtggataccgtgctcaaatgcagtatctgcggccacctgttttcctcttgctccgacctggagaagcatgcagaatctcatatgcaacagcctaaggaacatacttgttgccattgctcccataaggccgaaagcagctctgccctgcacatgcatattaagcaggcgcacggacctcagaaggtgttttcctgcgacctgtgtggtttccagtgctctgaggagaatctcctgaacgcccactatctggggaaaacccatctgaggcgacagaatttggcggccagaggaggctttgtgcagatcctcaccaaacagccctttccaaaaaagtctaggaccatggccactaagaacgtgcattcaaagccacgcacctcaaagtccattgccaagaatagtgattccaaaggtcttagaaatgttggtagtactttcaaagattttaggggcagcatttctaagcagtcaggaagctccagcgagctgctcgtggaaatgatgccctcacggaatacactgagccaagaagtggagattgttgaggagcacgtcacttctctgggtctggcccagaatccagagaatcaatccagaaagctggataccctggtcacctcagagggactgctcgagaaactggaatccactaagaatacattacaggctgctcatgggaacagcgttacttctagaccgagacctgagagaaacatcctggtcctgggtaacagttttcggcgcaggagctctaccttcaccctcaaggggcaggccaaaaagaggtttaaccttttaggcatcaagcgaggaacctctgagactcagcgtatgtatatgaaacatctcaggacacagatgaagactcacgatgctgagtccgttcttaagcaccttgaggcctgtagtagcgttcagcgcgtgtgtgtcactacaagcgaaacacaggaggccgagcagggccagggttccgcaaggccacctgacagcgggctgcactctctgactgtaaagccagcctccggaagccagacactgtgcgcctgtaccgattgtgggcaggtggcgacaaaccgcaccgacctagaaatccacgtcaaacggtgccatgcccgagaaatgaagttctactgtcgcacatgcgacttcagctccatgagcaggagggacctagacgaacatctgcactccaatcaacaccagcagactgcgtcagtgctgagctgccaatgctgcagttttattagccttgacgaaatcaacctgagagatcacatgaaggagaagcataacatgcattttctgtgcacaccatgcaacctgttcttcctctccgagaaggatgtcgaggaacataaggcaactgaaaaacacataaactccttggtgcagcctaagacccttcagtcttccaattccgacttagttttgcagacattacccctgtcgacactcgagagcgaaaacgccaaagagagcatggacgatagcggaaaagcttcccaggaagaaccactgaagtcgagggtctcccatggcaatgaggttagacacagttctaagccacaattccaatgcaagaagtgcttttacaagaccagatcatctaccgtgctgactaggcacatcaagttacggcacggtcaagattaccacttcttgtgcaaggcctgcaacctgtattccttgtctaaggaaggaatggaaaagcatatcaaaagatctaagcacctggagaacgccaagaagaacaacatagggttgagttttgaggagtgtattgagcgagtgtgcatcggtgctaacgacaaaaaggaagaatttgacgtctcgggcaatggccgaattgagggtcatatcggcgtccagctgcaggaacactcatacttagagaagggcatgcttgcttctgaagagctttcccagtcaggtggtagtactaaggatgatgagttggcctccactactacccctaagagaggcagacctaaagggaacatttctagaacctgttctcattgcggcctgctggccagcagtatcactaatcttaccgtgcacataagacgcaagcattcacatcagtacagttatctgtgcaaggtgtgtaagtactatacagtcactaagggcgatatggaaagacactgtgctaccaaaaagcacaaagggcgcgttgaaatagaagcgtcggggaagcacagttccgacattattgttggccccgaaggaggctccctggaagctgggaaaaaaaacgcaggcagtgctgtcactatgtccgatgagcacgccaataaacccgcagagtcccccaccagtgtgctcgagaagcccgatcgtggcaatagtatagaggccgaggtcgagaatgtctttcactctctagatggggaagttaatagccatttgttggataaaaaagagcagatctcctcggaacccgaggacttcgcgcaacccggcgacgtatactcacagcgagatgttaccgggaccggcgagaataagtgcctgcattgcgaattcagtgcgcacagttcagcctcactcgagctgcacgtgaaacggaagcatacgaaggagttcgagttctactgcatggcctgcgactattacgctgtgaccagacgggaaatgacccgccatgccgccactgagaagcacaagatgaagagacagagctacctgaattctgcaaacgtagaggcaggcagtgctgatatgagtaagaatattatcatgcccgaggaagaacaccagcagaatagtgaggaatttcaaataatcagcggacaaccctcagacacgctgaagtcgagaaatgcagcggattgctctatcctaaacgagaacacaaatctagacatgtccaaggtgctgtgtgcggcagacagtgttgaggtggaaaccgaggaggagtctaactttaatgaagaccattccttctgcgagacattccagcaggcccctgtgaaggacaaagtgaggaaacccgaggagatgatgtcactaacaatgtcttcaaattacggctcaccctctcgttttcagaacgaaaactccgggtcttctgcactcaactgtgaaaccgccaagaagaaccacgagatttctaatgacgccggcgagttacgggtgcactgtgagggagaaggaggaaacgcaggtgatggggggggagtggtcccacatagacacctgtgtcccgtcaccctggacggtgagagaagcgcagagtccccagtactcgtcgttacacgcatcactcgggaacaaggaaacttggaaagtgggggacagaaccgcgtcgctcgaggacatggtctggaagatctgaagggggtacaggaagaccctgttttgggtaacaaggagatactcatgaactctcagcatgagaccgaatttatccttgaggaggacgggcctgccagcgactccactgtggagagttccgatgtatacgagacaattatctctattgatgacaaaggccaggccatgtatagctttgggcgcttcgattcctcaattatcaggatcaagaatccagaagacggcgagctcattgaccagtctgaagagggcctgatagctaccggagtgcgtataagcgagctccctctgaaagactgtgcccagggtgtcaagaaaaaaaagagcgaagggagtagcatcggagaatccacccgtataaggtgcgacgactgcggtttcctggctgacggtcttagtgggctaaacgtgcatatagctatgaagcaccccacaaaggagaaacattttcattgccttttgtgcgggaaatctttctataccgaaagcaacttacatcaacacctggccagcgctggacacatgcgaaatgagcaagcctcggttgaagagctgccggaggggggtgctaccttcaaatgcgtgaaatgcactgaaccttttgattccgaacagaatcttttccttcacataaaaggacagcatgaggagctccttcgggaagttaataagtatatcgtggaagatacagaacagataaatcgagagagagaggagaaccagggcaacgtgtgtaagtattgcgggaaaatgtgccgaagcagtaatagcatggccttccttgcacacatcagaactcatacaggaagcaagccgtttaagtgtaagatttgccacttcgcgactgcgcagctgggggacgcccgcaatcatgtcaagcgccacctgggtatgagagagtataaatgccacgtttgtggagtggcttttgtcatgaaaaagcatctgaatactcacctcttgggcaagcacggggtgggaaccccaaaggagcgggtgaaagtcgcatacagaaaaattggaactctgccaggtatacagaataacaggaacgccagcagtgccagtgaggcacaaagtctctgcgagcacttctcttag

SEQ ID NO: 59648 - DNA, 4983 bp, Artificial Sequence
  derived and/or modified sequence
atgatggacagcgagaacaagcccgagaacgacgaggacgagaagataaataaggaagcccaggatctgactaagcttagctcacacaacgaggacggcggcccagtgagcgacgttattgcaagtttccccgaaaactcaatgggtaaacggggcttttctgagagttctaattcagacagcgttgtgattggtgaagaccgtaataagcacgcttctaagcgacggaaattggacgaggctgaacccctgaagtctggcaaacaggggatctgccgcctggagacgagtgagtcttctgttactgaaggcgggattgctctggatgagacaggaaaggagaccttcttgagtgactgtactgtgggaggaacatgtcttccgaatgccctctccccttcctgcaacttcagtaccatagatgtggtctctctgaaaaccgacaccgaaaaaacgtccgcacaggaaatggtatccctggatttggaacgcgagagtccctttcctcccaaggagatcagcgtgagctgtaccatcggaaacgtagatactgtcctcaaatgttctatttgcggccacttattctcttcatgctcagatctggagaagcatgccgagagtcacatgcagcagcctaaggagcacacctgttgccactgcagtcacaaagcagaaagctctagcgcactgcacatgcacatcaagcaagctcacgggccgcagaaggtctttagctgtgatctgtgtggttttcagtgctccgaggaaaatctactaaatgcccattatttgggtaaaactcacttgcgccgccagaaccttgctgcaaggggaggttttgtccagattttgacaaaacagccgtttccgaagaaatctcggactatggccacaaaaaacgtgcacagtaagccccggacttccaagagtatcgcaaagaatagtgattcgaagggactgaggaacgtgggcagcacgtttaaggattttagaggcagcatcagcaagcaatctggctcttcttctgagcttctggttgaaatgatgcctagtcggaataccctttcccaggaggtggagatagttgaagaacatgtcacttccttggggctggcccagaatcctgaaaaccagtccaggaaacttgacactctcgttacctctgagggactcctggagaagcttgagagtactaagaatacccttcaggctgcccatgggaatagcgttacatcccggccaaggccagagcgtaacatcttggttttaggcaattcgtttcggaggcggtctagcacatttacactgaaaggccaggcaaaaaaaaggtttaacctgctgggcatcaagagaggaacgagcgaaacgcaaaggatgtatatgaaacatttgcgcactcagatgaagacccacgacgccgagtctgtgctgaagcatctcgaggcctgctcatccgtccagcgagtatgcgtcactacctcagaaacgcaggaagccgagcagggacaggggagcgcccgccctcctgattccggcctgcactcgttgactgttaagccggcttcaggctcgcagaccctttgcgcatgcactgattgtggacaagtggccacaaacaggactgatctggaaattcacgtgaagagatgccacgcccgcgagatgaaattctattgccgtacttgcgacttctctagtatgtcccgtcgggacctggacgagcatctgcatagcaatcagcaccaacagactgcgagtgtcctgtcatgccagtgttgttccttcattagcctggatgagattaacctgcgggaccacatgaaagaaaagcacaatatgcactttctgtgcaccccctgcaacctctttttcctttcagagaaagacgtggaggagcacaaggccaccgagaaacacataaatagccttgtgcagcccaagaccttacaatctagcaacagcgacctagtgctgcagactctaccactatccactctggaaagtgagaacgccaaggagagcatggacgactctggaaaagcctcacaggaggaaccattgaagagccgggtctctcatggcaacgaagttcgacattcaagtaaacctcaatttcaatgcaagaaatgcttttataagaccagatcgtctacggtcttgactcgccacattaaactaaggcacggacaggattaccacttcctatgtaaggcttgcaacttatactctttgtctaaagaagggatggagaaacacattaagcggagtaaacatctggagaacgcgaaaaagaataatattggcctctcctttgaggaatgtatcgaaagagtgtgtattggtgcaaacgacaagaaggaggaatttgatgtgtcagggaatgggcggattgagggacatatcggggtgcagttgcaggaacactcatatttagagaaggggatgttagcttctgaagagctgagtcagtctggcggctctaccaaggacgacgaactggcttcaacaaccacacccaagcgcgggaggcccaaaggcaatatttcccggacatgtagccactgcggcctcttggccagcagtatcacaaacttgacagtgcacatccggcggaagcactctcatcagtattcttatttgtgtaaggtttgcaaatactacactgttacaaagggagatatggagaggcattgtgccacaaagaaacataaggggcgggttgagattgaagcaagcgggaagcattccagcgatataatcgtgggacccgagggcggatcattggaggccggcaaaaagaatgctggtagcgccgtgacaatgtccgatgagcatgctaataaaccagcagaatcaccaaccagtgtgctcgaaaaaccagatagaggtaactcgattgaagccgaagtcgagaatgtgtttcacagtctcgacggcgaagtaaatagtcaccttctcgataaaaaggaacagatatcctccgagccggaagactttgcccagcctggggacgtctatagccaacgggatgtgaccgggaccggagaaaataagtgcttgcactgcgagttctccgcgcactcatctgcttccctggagctccacgttaagcgcaagcacactaaggagtttgaattctattgtatggcctgtgactactacgccgtcactcgcagagagatgacccggcacgctgctacggagaagcacaagatgaagcggcagtcctatctcaattccgccaacgttgaagccgggagtgccgatatgagcaaaaatatcatcatgccagaagaagaacaccagcagaattctgaggagtttcagataatcagcggccaacccagtgatacccttaagtctagaaacgcggcggattgttccattttaaatgagaacacaaacttagatatgtcaaaagtattgtgcgccgctgactcagtggaagttgagacggaggaggagtccaacttcaatgaggaccactccttttgcgagacattccagcaggctcctgtgaaggacaaggtccgtaagccagaggagatgatgtcgttaaccatgagctcaaattacgggtccccatctcggtttcagaacgaaaacagtggcagctccgccctgaactgcgagactgctaaaaagaaccacgagataagtaacgacgctggcgaacttcgggtgcactgtgaaggcgagggagggaacgctggtgatgggggcggagtagtgcctcaccgtcacctatgtccggttaccctggacggggaacgtagtgctgagtcacctgtgctcgtggtgacaagaataacgagagagcagggaaatctggagtcagggggccagaatagggtggctcggggccatggattggaagacttgaagggggtgcaggaggatccggtcctgggcaacaaagagatcctcatgaactcacagcatgagaccgagttcattcttgaagaagatggccccgcttctgacagcactgtggaaagctccgatgtttatgaaacaattatttctattgacgataagggacaggcgatgtacagcttcggaagattcgactctagcattatccggatcaaaaacccagaggatggggaactgattgaccagagcgaggaaggtttaatagcaacaggggtgagaatctccgagctccccctgaaggattgtgcccagggagtgaaaaagaaaaaaagcgaaggcagtagcatcggagagtcaacaaggatcaggtgtgatgactgtggtttcttagctgatggcttaagcggcctgaatgttcacatcgccatgaagcacccgacgaaagagaaacattttcattgtctgctgtgcggcaagtccttctataccgagagcaacctccaccaacatctagcctccgcaggtcatatgcgcaatgaacaggccagtgtggaagagctgccagaagggggagccacctttaagtgcgtgaaatgtacggagcccttcgattcagaacagaatctgtttctacatataaagggtcaacacgaggagctgcttcgagaagtcaataagtacatagtggaggatacagaacagattaacagggagcgggaggaaaatcaggggaatgtgtgcaaatactgtgggaagatgtgtagatccagcaacagcatggcttttcttgcccacatcagaacacatactggctctaagcctttcaaatgtaaaatctgtcactttgctactgcccagcttggtgatgctcgaaatcatgttaagcggcatctgggtatgagagaatacaaatgccacgtatgcggagttgccttcgtgatgaagaagcacctgaacacgcatctgctaggaaagcacggagtgggcacacctaaggaacgagtgaaggtggcctatcgaaaaattggaaccctccctggcattcagaataatagaaatgccagcagtgcaagcgaagcgcagtccctgtgcgaacattttagctag

SEQ ID NO: 59649 - DNA, 4983 bp, Artificial Sequence
  derived and/or modified sequence
atgatggactctgaaaacaagcccgagaatgatgaggatgagaaaataaataaggaggctcaggatctgactaagctctcatctcacaacgaggatggtggcccagttagcgacgtgatcgcgtctttccccgaaaattctatggggaaaagaggtttctctgagtctagtaactctgacagcgtcgtgatcggcgaggatagaaacaaacatgcatctaagaggaggaaactcgatgaggcagagcctctgaagagcggaaaacagggaatctgtaggttggaaacatcagagagcagcgtcactgagggtggcatcgccctggatgaaactggcaaagagactttcctgagcgactgtacagttggtggtacttgcctgccaaacgccctatcccctagctgtaatttcagcacaattgacgttgtgagcctgaaaaccgataccgagaaaactagtgcccaggagatggtcagtctggacttagaaagggagtccccttttcccccaaaagagatctccgtatcttgcacaatcggcaatgtggacaccgtgctgaagtgctcaatatgtgggcacttattcagcagctgttctgatctcgaaaagcatgctgaatcccacatgcagcagcctaaggaacatacctgttgccactgctcgcataaagcagaatcttccagtgccttgcacatgcacatcaaacaagcccacgggcctcagaaagtgttctcctgcgatctgtgtggatttcaatgctccgaagagaacctcttgaacgcccactacttgggtaaaacgcacctgcgtcgtcagaacctcgcagctagaggaggttttgtgcaaattttgaccaagcagcctttcccaaagaagagcaggaccatggccactaaaaacgtacatagcaaacccaggacttcaaaaagcatcgcgaaaaacagtgactccaaaggtctgaggaacgtggggagcacgtttaaggattttcggggaagcatctccaaacaatccggctctagcagcgagctgctcgtggagatgatgccaagcaggaacacactgtcacaggaagttgaaatcgtggaggaacatgtgacatctctgggtctcgcacagaatccagagaatcagtcaagaaaacttgacactttggttacttccgaaggcctgttggaaaagctcgagtccactaagaacactttgcaggcggcacacggaaacagcgtgacctctcgccctaggcccgagcgcaatattctcgtattgggcaattcatttaggcgtcgcagttctaccttcacactgaagggccaggcgaaaaagcgcttcaatcttctgggaataaagagaggaacgtccgagactcagagaatgtacatgaaacacctccgaacccagatgaagacccacgatgcggagagtgtgctgaagcatctcgaggcttgttcgtcagtacagagggtgtgcgtcactacaagcgagacccaggaggccgagcaagggcagggcagcgccaggcctccagatagcgggttgcattccttaaccgttaaacctgcttccggaagccaaacactctgcgcctgcaccgactgtggacaggtggcaacaaatagaaccgacttagagatccacgtcaagcgatgccatgcaagagaaatgaaattttattgtcgcacctgcgatttttcctctatgtcccgacgtgatttagatgagcacttacacagtaaccaacaccagcagaccgccagcgtgctgagctgccagtgctgcagcttcatctcactcgacgagattaatctgcgcgatcacatgaaagaaaagcacaatatgcacttcctgtgcaccccttgtaacttgtttttcttgagcgaaaaggacgtggaagaacataaggcaaccgagaaacacatcaattcacttgtgcagccaaagactcttcagtcctcaaactctgacctggtgcttcagacactcccgctatcaactctggagtccgaaaatgctaaggagtcaatggatgactctggtaaagcaagccaagaggagccactgaaaagtagagtgtcacacgggaatgaggtgcggcacagcagcaaaccacagtttcagtgcaagaaatgtttttacaaaaccaggtccagtaccgtgctcacacgacacataaaattgcgacacggtcaggactatcacttcctctgcaaggcttgcaacctctattccctgagcaaagagggtatggaaaaacatatcaaacggtccaaacatttagagaatgccaaaaagaataacattggattaagctttgaggaatgtattgagagggtttgcatcggtgcaaacgataagaaggaggaatttgacgtcagcggaaacggccgaattgaaggccatatcggagttcagctgcaggaacacagctacctggaaaagggcatgctcgcttctgaggaactcagccaatccgggggatccacaaaagacgacgaattggctagcacaacgacgccaaaaagggggagacctaaaggaaacataagcagaacctgctctcactgtggcttattggcgagctctataacgaatctcaccgtccacattcggagaaagcacagtcatcaatattcctacttatgcaaggtgtgtaagtactacacagtgacaaagggggatatggagaggcattgtgcgactaaaaagcacaagggtagagtggagatagaggcaagcggtaagcacagctccgacataattgtcggtccagaggggggatcccttgaggcaggcaagaagaatgccggttcagccgttaccatgagcgacgaacatgctaataagcctgctgagagtccaacttccgtcctggagaaaccagaccggggaaattctattgaggctgaggtagagaacgtgtttcatagtctggacggcgaggtcaactcacacctgctggataaaaaagagcagatatcttcggaacccgaggactttgctcaacctggagatgtgtattctcaacgggacgtgacggggaccggggaaaacaagtgcctgcattgtgagttcagcgcccactcttccgcctctttagagttgcacgtgaaaaggaaacataccaaagaatttgagttctactgcatggcatgtgattattatgcagtgacaaggagggagatgacacgacacgctgcgacggagaaacacaagatgaagcgccaatcttacctaaactccgccaacgtcgaggccggttcagctgatatgtccaaaaatatcataatgcctgaggaggagcaccagcagaattcagaagaatttcagatcatcagcggacagccaagcgatacgctaaaatctaggaacgcagccgactgcagcatcttgaacgaaaacacgaatttagacatgtctaaggtgctgtgcgccgctgactctgtggaggtggagaccgaggaggaatcaaactttaacgaggatcactccttctgtgaaacctttcagcaggcccctgtgaaggacaaagtccgaaagccagaagaaatgatgagcctcactatgagctccaactatggttcgccttcccggttccagaacgagaattcaggctcctctgcgttgaattgcgaaaccgcaaagaagaatcacgaaatctctaatgatgccggagaattgagggtccactgcgagggcgagggcggtaatgcgggagatgggggtggtgtcgtgccccaccggcacctgtgccctgtgactcttgacggcgagcgatccgcggaaagccctgtcttggttgtcactaggataacccgggagcaagggaaccttgagtctgggggtcaaaaccgggtggcacgtggacatggactggaggatctgaagggcgtacaggaagaccccgtcctaggaaacaaagagattctgatgaactcacagcatgagactgagtttattctggaagaggacgggccagccagtgattcaactgtcgaatccagcgacgtctatgagactataatctccattgatgataaaggccaggcaatgtatagctttggaaggtttgattcctccatcattcgcataaaaaaccccgaagatggcgagttgatcgaccaatctgaagaaggtttgatcgccactggcgtgcgaatctcggagcttcccctgaaggattgcgctcagggtgttaaaaaaaaaaagtccgaggggagctctattggggagtccacccgcatccggtgcgacgactgcggttttctagcagatggactatcagggctgaatgtccatatcgctatgaagcaccctaccaaagagaaacactttcactgtcttttgtgtgggaagtcgttctacacagaaagtaatctccatcagcatctggctagtgccggacacatgaggaatgagcaggccagcgttgaagagctgccagagggcggagccacattcaagtgcgtgaagtgtacagagccctttgactcagagcaaaatctttttctgcacattaaaggccagcacgaggaattgctcagggaggtgaacaagtacatagtagaggacaccgagcagatcaatcgagagcgggaagaaaatcaaggtaatgtgtgcaaatactgtgggaagatgtgcaggtccagcaacagcatggccttcttggctcacattcgtacacacaccgggagcaagccctttaaatgtaagatttgccacttcgctacagcacaactgggcgatgctcgcaaccacgtcaaaagacacctgggaatgagagagtacaaatgccacgtgtgcggtgtcgcattcgtgatgaagaagcatctgaacacacacctgctaggaaaacacggggtggggacccctaaggagagagtgaaggttgcttacaggaaaataggaacactgcccggaatccagaacaataggaatgcgagtagcgctagcgaggcccagagcctttgtgaacacttttcctag

SEQ ID NO: 59650 - DNA, 4983 bp, Artificial Sequence
  derived and/or modified sequence
atgatggacagtgaaaacaaacctgagaacgacgaagacgaaaagatcaacaaagaggctcaggacctcactaaactgagctcccataacgaggacggtgggccagtctcagacgtgatagcatctttccctgagaactccatgggaaagcgaggattttcagagtcctctaatagcgatagcgtggttataggtgaagataggaacaaacatgcatcaaagcgccgaaagctggatgaagctgaacctctgaaaagtggaaagcaggggatctgtcggctggagaccagtgagagcagcgtgaccgaggggggtatagccttggacgagaccgggaaggagactttcctctcagactgtacggtgggcggaacttgtttgcccaacgctctgtcaccctcctgtaatttttccacgatcgacgtggtatccctcaagactgataccgagaagacatctgcacaagaaatggtgtccctcgatttggagagagaatcacccttccctccgaaagaaatctctgtatcttgcactattggaaacgtggacacggtgcttaagtgctcaatctgcggccacctgttttcaagctgttccgatttggagaaacacgccgagagccatatgcagcagcccaaggaacatacgtgttgccactgtagccacaaagctgagtccagctccgctctccacatgcacataaagcaagctcatggacctcagaaggttttttcctgtgacctgtgcggttttcagtgcagtgaagagaatttgctcaatgcgcactatctcggtaagactcatctgagacggcagaacctggccgctaggggagggttcgtccagatactgactaagcagcctttccccaagaaaagtagaactatggcaacaaaaaatgtccatagcaagccccgaacatcaaaatctatcgccaagaatagtgattctaagggcctgcgaaacgtgggatccactttcaaagattttaggggaagcatctccaagcagagtggaagcagctctgaactactagtagaaatgatgccttctagaaacactctgtctcaggaagttgaaatagtggaagagcacgtcaccagtctgggcctggcccagaacccggaaaatcagagccgaaaactggacacgctggtgacttcagaagggctcctcgaaaagctggaaagtactaagaacactcttcaggcagctcacggcaattccgtgacttcccgtcctcggcctgagagaaatatcctcgtgttagggaacagcttccgcagaagaagcagtacatttacgctcaagggtcaggccaaaaagaggttcaatctgctcggaatcaaacggggaacctctgaaacccagaggatgtatatgaaacatctgaggactcagatgaaaacccacgatgcagagagcgtcttgaaacacttggaggcctgtagctcagtccagcgagtctgtgtaacaacttcggagactcaggaggcggagcaggggcaaggaagtgccaggccacccgacagcggtcttcatagcctgacagtgaaacccgctagtggcagccagacactgtgtgcctgcactgactgtggccaggtcgcaacgaatcggacagaccttgaaatccatgtaaaacgatgtcacgcccgagagatgaagttctattgtcggacctgcgatttttcaagtatgtctcggcgagatctagatgagcatctccactcaaaccagcaccagcagaccgcaagtgtgttatcgtgtcaatgttgctcattcattagtcttgacgagataaacctccgggatcacatgaaagagaaacacaatatgcacttcttgtgtacgccctgtaatctattctttctgtcagagaaggacgtggaggagcataaagctacagaaaagcacattaacagcttagtgcagcctaaaacactgcagagcagcaactccgacctggtcctgcagactctcccgttgtcaaccttagagagcgaaaatgcgaaagaatcgatggatgacagtggtaaggccagccaggaggagcctttaaagtccagagtatctcacggaaatgaagtcaggcatagcagtaagccacagttccaatgtaaaaagtgcttctacaagacccgcagtagcactgtgctgacgcggcatattaaactcaggcacggtcaggattaccactttctgtgcaaggcatgtaacttatatagcctcagcaaggaagggatggagaagcacatcaagcggtccaaacacctggaaaacgcaaagaaaaataacattgggttatcatttgaagagtgtatcgagcgtgtgtgcattggagccaatgataagaaggaggagtttgacgtgagtgggaacggacgcatcgagggccatattggggtgcaactacaggagcatagctacctcgagaagggcatgctggcatcagaggaattgagtcaaagcggcggttcgactaaggacgacgagctcgcgagtacgacgacaccgaaacgaggtcggcctaagggaaatatttctcggacgtgttcccactgcgggctgttagcttcctctattaccaatctcacagtgcacataaggcggaaacattcccatcagtacagttatctctgcaaagtctgtaagtactatacagtcacaaagggtgacatggaaaggcactgtgccaccaagaagcacaagggacgtgttgagatcgaggccagtggcaaacactccagtgacatcatcgtgggccctgaaggtggcagccttgaggccggaaagaagaacgccggtagcgccgtcactatgagtgacgaacatgccaacaagccagccgagagccccactagcgtgctggaaaaacccgataggggcaacagtatcgaagcggaggtggagaacgtcttccactctctggatggcgaggtaaatagccacctgctggacaagaaggaacagatcagttctgaaccagaggactttgcacaaccaggggatgtttactctcagcgtgacgtgactggaactggtgagaataagtgtctgcactgcgaattctcagcccatagcagcgccagtctggagctgcacgtgaagcgaaaacatactaaggagttcgagttttattgcatggcctgtgattattatgcagtcacacggagagagatgacccgacacgccgctaccgagaagcataagatgaagcgccagagttatttgaatagcgccaatgtcgaagccggtagcgcagacatgagtaaaaatatcatcatgcctgaggaagaacaccaacagaactcagaagaatttcagattatttcagggcaaccctctgatacactgaagagcagaaacgctgccgactgcagcatcctcaacgagaatactaacctggacatgagtaaagtcttatgcgcagccgatagcgtggaagttgagacggaggaagagtcaaattttaacgaagatcactccttttgtgagacgttccaacaggcgccagtgaaagacaaagtacggaagcccgaagaaatgatgtctcttacgatgtcatcaaactacggctcccccagcagatttcagaatgaaaacagtgggagttccgcactcaattgtgagaccgctaaaaaaaaccatgagatttcaaatgatgccggagaacttcgcgtgcactgcgagggggagggcggaaatgctggcgatgggggtggagttgtaccacatcggcacctgtgcccggtcaccctggacggtgaaaggtccgccgagagcccagtgttggtcgtaacccggatcaccagagagcaggggaacttggagtccggcggtcaaaatcgcgtggcaaggggccacgggctggaagatctaaagggcgtgcaggaagaccccgtgctgggtaacaaagagatattaatgaactcccagcacgagaccgagttcattcttgaggaagatgggccagcaagtgatagtaccgtggagtcaagcgatgtatacgagacaatcataagcatcgatgataaggggcaggctatgtattcctttggacggtttgacagctccatcattcggatcaagaatcccgaggacggggaattgatcgatcaatcagaagagggtcttatcgccactggcgtgagaatttctgagctgcctctgaaagattgcgctcaaggggtcaaaaaaaagaaaagtgaggggtcctccatcggagagtcgacgaggatcaggtgtgacgactgcggctttctcgcggatggcttaagtggactgaacgtgcacattgcgatgaagcatcccaccaaggagaaacactttcactgcctgctgtgcggcaagtctttctataccgaaagcaacttgcaccagcacctcgcctctgccggacacatgcgcaatgaacaggcaagcgtggaggagcttcctgagggcggagccacctttaagtgtgttaaatgtaccgaacctttcgattctgagcagaatctcttcttacatataaaaggccagcatgaagagttactgcgcgaggtgaataagtatatagtggaggacaccgagcaaatcaaccgggagagggaggagaaccagggaaatgtctgtaaatactgcggcaaaatgtgtcggtctagcaattctatggcatttctggcccatattaggacacatacaggctcaaagccttttaaatgcaaaatatgtcattttgccacagcccagcttggagatgccagaaatcacgtaaaacggcatctgggcatgagggagtacaaatgccacgtttgtggggtggcgttcgtgatgaagaagcacctcaacactcatctgctgggcaaacatggtgtcggtaccccaaaggaacgcgtgaaggtagcatacagaaagatagggacactccccggtatccagaacaaccggaatgcgtcctctgcaagcgaggcacagtctctgtgcgagcacttctcgtag

SEQ ID NO: 59651 - DNA, 5595 bp, Artificial Sequence
  derived and/or modified sequence
acaggttatgagtgccagtgagccgccttagatagaagcatcgtcagcactttattaatgatggatagtgagaataaacccgaaaatgatgaggatgaaaagataaacaaagaagcacaagacttgacaaagctttcatcccataatgaagacggtgggcctgtatctgatgtgatagcaagtttccctgagaattctatgggcaaaagaggtttttcagaatcatcgaactctgatagtgttgttataggagaagacagaaataaacatgcttccaaacgcaggaaattagatgaggcagagccccttaaatctggaaagcaaggtatttgtagattagaaacttctgagagctcagtcacagaagggggtattgcattagatgaaacagggaaggagacctttctgagtgactgcacagttggaggcacatgtctcccaaatgccctctccccttcttgcaattttagcactattgatgttgtttctctgaaaacagacactgaaaaaacatctgctcaggaaatggtttcccttgatctggaaagagaatctcctttccccccgaaagaaattagtgttagttgtaccattgggaatgtagatacagttctcaaatgcagcatctgtgggcatttgttttcttcttgctctgacttggaaaaacatgctgagtctcacatgcagcagcctaaggaacatacctgttgtcactgcagccacaaagcagagagcagctcagcactacatatgcatatcaaacaagcacatgggccacagaaggtcttttcctgtgatctttgtggttttcagtgttcagaagaaaacttgttgaatgcacattatcttggcaaaacacatctccgtcgtcagaatctggctgctcgtggaggatttgtacagatcttaacaaaacaaccttttcctaaaaaatcacgtacaatggcaacaaaaaatgttcactcaaaaccaagaacttctaaatcaatagcaaagaatagtgattcaaaaggattacgaaatgtgggaagcacgtttaaagatttcagaggaagtatttctaaacaaagtggtagtagcagtgagcttcttgttgaaatgatgccttccagaaatactttgtcacaggaagtagagattgttgaagaacatgttacttcccttggtctagctcagaatcctgaaaaccagagtagaaagctagacaccttagtaacctcagagggtctcttagagaaattggaatctacaaaaaatacccttcaggcagcacacggtaacagtgtaacctcgaggccaagacctgagcgaaatattctcgtgttgggtaatagctttcgtcgacgaagcagcactttcaccttgaagggccaggcaaagaaaaggtttaatcttttaggaattaaaagaggtacaagtgaaactcagaggatgtatatgaaacacttgagaacacagatgaaaacacacgatgcagaatcagtgctgaaacacctggaagcgtgcagcagtgtgcagagagtgtgtgtgactacctcagaaacccaggaggcagagcagggccaggggagtgcccgtcctccggactccgggctgcattccctgacagtgaagccagcttctggctctcagacgttgtgtgcttgtacagactgtgggcaagtagctacaaataggacagatttggaaatccatgtgaaaaggtgccatgccagagagatgaaattttactgccgtacttgtgacttctctagtatgtcaagaagggacttagatgaacatttgcacagtaaccagcatcagcaaactgcttctgtcctgagttgtcagtgttgttcatttatatccttggatgaaataaatcttagagaccacatgaaggaaaagcacaatatgcattttctttgcaccccttgtaatctgttctttttgtctgaaaaagatgtggaagaacacaaagccaccgagaagcatattaattcattggttcaaccaaagactttgcaatcatctaacagtgatttggttttacagactttacctttgagtactttagaatcagaaaacgcaaaagagtctatggatgactcaggaaaagcatctcaggaagaacctctgaagtccagggtaagccatggtaatgaagtgaggcattccagtaagcctcagtttcagtgtaagaagtgtttttataaaacaagatcttctactgttctcacgagacatataaagcttcggcatggtcaagactatcattttctttgtaaagcttgtaatctttattcattgagcaaagaaggaatggagaaacacattaaaagaagcaagcatcttgaaaatgctaagaaaaataatattggcttaagctttgaagaatgtattgaaagggtatgtataggtgcaaatgataaaaaagaagagtttgatgtttccggaaatggaaggattgaaggccatataggtgtgcaattacaagagcattcctatcttgagaagggcatgctggcgtctgaggaactgtcacagtctggtggtagcaccaaagatgatgaattagcttcaaccactactccaaagagagggagacctaaaggtaacatctcacggacgtgttcacactgtggccttttggcctctagtattacaaacttgactgttcacattagacgaaaacacagtcaccagtatagttatttatgcaaagtgtgtaagtattacactgtaactaagggagatatggaacgtcattgtgccaccaagaaacataaaggacgggtagaaatagaagcaagtggaaaacacagttcagatatcattgttggccctgaagggggtagccttgaagctggtaaaaagaatgctggctcagcagtgaccatgtcagatgaacatgctaacaaaccagctgagtcacccacctccgttttagagaagccagatcgtggaaactcaattgaagctgaagttgaaaatgtatttcattctctagatggagaagttaacagccatcttcttgataaaaaggagcaaatatcttcagagccagaggacttcgcccagccgggggatgtgtactcccagagagatgttacaggcacaggtgagaataagtgtttgcactgtgagtttagtgctcactcctctgcttctctagagctgcatgtaaaacggaaacatacaaaagagtttgagttttattgcatggcatgcgattactacgcggtgactcgtcgcgagatgaccaggcatgcagcaacagagaagcacaaaatgaaaaggcagtcttatctcaactctgctaatgtagaagctggttctgcagacatgtccaaaaacatcattatgcctgaagaagagcatcaacaaaattctgaggaatttcaaataatttcaggtcaaccatctgatactcttaaatctagaaatgctgcagattgctctattttaaatgagaatactaatttagatatgtctaaagtgctctgcgctgctgactctgtagaagttgagactgaagaagaatctaatttcaatgaagaccattccttttgtgagactttccaacaggctcctgtcaaggataaagttaggaaacctgaggagatgatgtcacttactatgtcctcaaactatggctccccaagcagatttcaaaatgaaaattcaggaagctctgccttaaattgtgagacagcaaagaaaaaccatgagatatcgaatgatgcaggtgagctgcgtgtccattgtgagggtgaaggaggaaacgcaggagacggtggaggtgttgtcccccacagacacctgtgccctgtgacgctcgatggggagcgctcggctgaaagccctgtgctcgttgtgacaagaataaccagagaacagggaaatctggagagcgggggtcagaacagagttgcacgtgggcatggtttggaagacttgaaaggtgtccaagaagatcccgttctggggaataaggaaattctgatgaattcacaacatgaaacagaatttattttggaggaggatggcccagcttctgatagcacagttgaaagtagtgatgtctatgaaactataattagtattgatgataaagggcaggccatgtacagttttggtcgatttgactcctccataataagaataaagaaccctgaagatggtgagttgatagaccagtctgaagagggcttgatagcaacgggagtgagaattagtgagctgcccttgaaagactgtgctcaaggtgtgaaaaagaagaaatctgagggcagttccattggtgagtctacacgaattcgctgtgatgattgtggcttcttagcagatggactgagtggactgaatgttcacatagccatgaagcatcctacaaaagagaagcacttccattgtttactctgtggaaagtcgttctataccgaaagcaaccttcaccagcatctggctagtgccggccacatgagaaatgagcaggccagtgtggaggagcttccggagggaggggccacctttaaatgtgtcaagtgcacagagccctttgattctgaacagaatttatttttacatattaaaggacagcatgaggaattgctgcgggaggtgaataagtatatagtggaagacactgagcaaatcaaccgcgagagggaggaaaaccagggaaacgtctgcaagtattgtgggaagatgtgtcgaagcagcaactcgatggccttcctggcacacattcgcactcacacaggatcaaaaccattcaagtgcaagatatgccattttgcaacagctcagcttggagatgccagaaaccatgtgaaaaggcaccttgggatgagggaatacaagtgtcatgtctgtggggttgcttttgtaatgaagaagcacttaaatactcatctactaggcaagcatggagttggcaccccaaaagaaagagtaaaggttgcatatcgaaagatcgggacgttgccaggaatacagaacaacaggaacgcgtcgagtgcctctgaagcccaaagtctttgtgagcacttttcataactgatgggacctgcagtgggaggattggctgaggacttattttggttgaagttagacatatttcattgtctttttttttttccttttatctgtgtacttctttgcatacttgaattcatttgtgtgatgtaaatcatcacacaaatgtaggctagtctagtgattttctggaaggaactgttattttaaaaattgagtactcagttttataaaattgtcatcatcaatgagttaaaaaaaaaaaaacccttaatgattcagggtttatttaaagctgactgtccaatcaaagtttttgtaagcatgccatgtgacaaatgcctggcatattcagtaaggaacatattaattattctaattaacacatgacttcagagaagtctttcgttaatcagcacatggatcttggttatttgtacccttttgggaaaatttcacactcagatgcaaaaataccaggctaaatacattgctttgtttgtatgtggagaggatattcatcacaatggtactatacatctaagaaaacagaaagtaattaaaatgctgattact

SEQ ID NO: 59652 - DNA, 5662 bp, Artificial Sequence
  derived and/or modified sequence
aaagggaagacggtgagccggaggagtcagtcagaggggcgagcaggagcgattccgtcgccaaacaggttatgagtgccagtgagccgccttagatagaagcatcgtcagcactttattaatgatggatagtgagaataaacccgaaaatgatgaggatgaaaagataaacaaagaagcacaagacttgacaaagctttcatcccataatgaagacggtgggcctgtatctgatgtgatagcaagtttccctgagaattctatgggcaaaagaggtttttcagaatcatcgaactctgatagtgttgttataggagaagacagaaataaacatgcttccaaacgcaggaaattagatgaggcagagccccttaaatctggaaagcaaggtatttgtagattagaaacttctgagagctcagtcacagaagggggtattgcattagatgaaacagggaaggagacctttctgagtgactgcacagttggaggcacatgtctcccaaatgccctctccccttcttgcaattttagcactattgatgttgtttctctgaaaacagacactgaaaaaacatctgctcaggaaatggtttcccttgatctggaaagagaatctcctttccccccgaaagaaattagtgttagttgtaccattgggaatgtagatacagttctcaaatgcagcatctgtgggcatttgttttcttcttgctctgacttggaaaaacatgctgagtctcacatgcagcagcctaaggaacatacctgttgtcactgcagccacaaagcagagagcagctcagcactacatatgcatatcaaacaagcacatgggccacagaaggtcttttcctgtgatctttgtggttttcagtgttcagaagaaaacttgttgaatgcacattatcttggcaaaacacatctccgtcgtcagaatctggctgctcgtggaggatttgtacagatcttaacaaaacaaccttttcctaaaaaatcacgtacaatggcaacaaaaaatgttcactcaaaaccaagaacttctaaatcaatagcaaagaatagtgattcaaaaggattacgaaatgtgggaagcacgtttaaagatttcagaggaagtatttctaaacaaagtggtagtagcagtgagcttcttgttgaaatgatgccttccagaaatactttgtcacaggaagtagagattgttgaagaacatgttacttcccttggtctagctcagaatcctgaaaaccagagtagaaagctagacaccttagtaacctcagagggtctcttagagaaattggaatctacaaaaaatacccttcaggcagcacacggtaacagtgtaacctcgaggccaagacctgagcgaaatattctcgtgttgggtaatagctttcgtcgacgaagcagcactttcaccttgaagggccaggcaaagaaaaggtttaatcttttaggaattaaaagaggtacaagtgaaactcagaggatgtatatgaaacacttgagaacacagatgaaaacacacgatgcagaatcagtgctgaaacacctggaagcgtgcagcagtgtgcagagagtgtgtgtgactacctcagaaacccaggaggcagagcagggccaggggagtgcccgtcctccggactccgggctgcattccctgacagtgaagccagcttctggctctcagacgttgtgtgcttgtacagactgtgggcaagtagctacaaataggacagatttggaaatccatgtgaaaaggtgccatgccagagagatgaaattttactgccgtacttgtgacttctctagtatgtcaagaagggacttagatgaacatttgcacagtaaccagcatcagcaaactgcttctgtcctgagttgtcagtgttgttcatttatatccttggatgaaataaatcttagagaccacatgaaggaaaagcacaatatgcattttctttgcaccccttgtaatctgttctttttgtctgaaaaagatgtggaagaacacaaagccaccgagaagcatattaattcattggttcaaccaaagactttgcaatcatctaacagtgatttggttttacagactttacctttgagtactttagaatcagaaaacgcaaaagagtctatggatgactcaggaaaagcatctcaggaagaacctctgaagtccagggtaagccatggtaatgaagtgaggcattccagtaagcctcagtttcagtgtaagaagtgtttttataaaacaagatcttctactgttctcacgagacatataaagcttcggcatggtcaagactatcattttctttgtaaagcttgtaatctttattcattgagcaaagaaggaatggagaaacacattaaaagaagcaagcatcttgaaaatgctaagaaaaataatattggcttaagctttgaagaatgtattgaaagggtatgtataggtgcaaatgataaaaaagaagagtttgatgtttccggaaatggaaggattgaaggccatataggtgtgcaattacaagagcattcctatcttgagaagggcatgctggcgtctgaggaactgtcacagtctggtggtagcaccaaagatgatgaattagcttcaaccactactccaaagagagggagacctaaaggtaacatctcacggacgtgttcacactgtggccttttggcctctagtattacaaacttgactgttcacattagacgaaaacacagtcaccagtatagttatttatgcaaagtgtgtaagtattacactgtaactaagggagatatggaacgtcattgtgccaccaagaaacataaaggacgggtagaaatagaagcaagtggaaaacacagttcagatatcattgttggccctgaagggggtagccttgaagctggtaaaaagaatgctggctcagcagtgaccatgtcagatgaacatgctaacaaaccagctgagtcacccacctccgttttagagaagccagatcgtggaaactcaattgaagctgaagttgaaaatgtatttcattctctagatggagaagttaacagccatcttcttgataaaaaggagcaaatatcttcagagccagaggacttcgcccagccgggggatgtgtactcccagagagatgttacaggcacaggtgagaataagtgtttgcactgtgagtttagtgctcactcctctgcttctctagagctgcatgtaaaacggaaacatacaaaagagtttgagttttattgcatggcatgcgattactacgcggtgactcgtcgcgagatgaccaggcatgcagcaacagagaagcacaaaatgaaaaggcagtcttatctcaactctgctaatgtagaagctggttctgcagacatgtccaaaaacatcattatgcctgaagaagagcatcaacaaaattctgaggaatttcaaataatttcaggtcaaccatctgatactcttaaatctagaaatgctgcagattgctctattttaaatgagaatactaatttagatatgtctaaagtgctctgcgctgctgactctgtagaagttgagactgaagaagaatctaatttcaatgaagaccattccttttgtgagactttccaacaggctcctgtcaaggataaagttaggaaacctgaggagatgatgtcacttactatgtcctcaaactatggctccccaagcagatttcaaaatgaaaattcaggaagctctgccttaaattgtgagacagcaaagaaaaaccatgagatatcgaatgatgcaggtgagctgcgtgtccattgtgagggtgaaggaggaaacgcaggagacggtggaggtgttgtcccccacagacacctgtgccctgtgacgctcgatggggagcgctcggctgaaagccctgtgctcgttgtgacaagaataaccagagaacagggaaatctggagagcgggggtcagaacagagttgcacgtgggcatggtttggaagacttgaaaggtgtccaagaagatcccgttctggggaataaggaaattctgatgaattcacaacatgaaacagaatttattttggaggaggatggcccagcttctgatagcacagttgaaagtagtgatgtctatgaaactataattagtattgatgataaagggcaggccatgtacagttttggtcgatttgactcctccataataagaataaagaaccctgaagatggtgagttgatagaccagtctgaagagggcttgatagcaacgggagtgagaattagtgagctgcccttgaaagactgtgctcaaggtgtgaaaaagaagaaatctgagggcagttccattggtgagtctacacgaattcgctgtgatgattgtggcttcttagcagatggactgagtggactgaatgttcacatagccatgaagcatcctacaaaagagaagcacttccattgtttactctgtggaaagtcgttctataccgaaagcaaccttcaccagcatctggctagtgccggccacatgagaaatgagcaggccagtgtggaggagcttccggagggaggggccacctttaaatgtgtcaagtgcacagagccctttgattctgaacagaatttatttttacatattaaaggacagcatgaggaattgctgcgggaggtgaataagtatatagtggaagacactgagcaaatcaaccgcgagagggaggaaaaccagggaaacgtctgcaagtattgtgggaagatgtgtcgaagcagcaactcgatggccttcctggcacacattcgcactcacacaggatcaaaaccattcaagtgcaagatatgccattttgcaacagctcagcttggagatgccagaaaccatgtgaaaaggcaccttgggatgagggaatacaagtgtcatgtctgtggggttgcttttgtaatgaagaagcacttaaatactcatctactaggcaagcatggagttggcaccccaaaagaaagagtaaaggttgcatatcgaaagatcgggacgttgccaggaatacagaacaacaggaacgcgtcgagtgcctctgaagcccaaagtctttgtgagcacttttcataactgatgggacctgcagtgggaggattggctgaggacttattttggttgaagttagacatatttcattgtctttttttttttccttttatctgtgtacttctttgcatacttgaattcatttgtgtgatgtaaatcatcacacaaatgtaggctagtctagtgattttctggaaggaactgttattttaaaaattgagtactcagttttataaaattgtcatcatcaatgagttaaaaaaaaaaaaacccttaatgattcagggtttatttaaagctgactgtccaatcaaagtttttgtaagcatgccatgtgacaaatgcctggcatattcagtaaggaacatattaattattctaattaacacatgacttcagagaagtctttcgttaatcagcacatggatcttggttatttgtacccttttgggaaaatttcacactcagatgcaaaaataccaggctaaatacattgctttgtttgtatgtggagaggatattcatcacaatggtactatacatctaagaaaacagaaagtaattaaaatgctgattactata

SEQ ID NO: 59653 - protein, 119 aa, Artificial Sequence
  derived and/or modified sequence
MAASAGAGAVIAAPDSRRWLWSVLAAALGLLTAGVSALEVYTPKEIFVANGTQGKLTCKFKSTSTTGGLTSVSWSFQPEGADTTVSGPVIYAQLDHSGGHHSDKINKSESVVYADIRKN

SEQ ID NO: 59654 - DNA, 360 bp, Artificial Sequence
  derived and/or modified sequence
atggccgccagcgccggcgccggcgccgtgatcgccgcccccgacagcagaagatggctgtggagcgtgctggccgccgccctgggcctgctgaccgccggcgtgagcgccctggaggtgtacacccccaaggagatcttcgtggccaacggcacccagggcaagctgacctgcaagttcaagagcaccagcaccaccggcggcctgaccagcgtgagctggagcttccagcccgagggcgccgacaccaccgtgagcggccccgtgatctacgcccagctggaccacagcggcggccaccacagcgacaagatcaacaagagcgagagcgtggtgtacgccgacatcagaaagaactag

SEQ ID NO: 59655 - DNA, 360 bp, Artificial Sequence
  derived and/or modified sequence
atggccgccagcgcaggagccggcgcagtgatagcggcgccagactccaggcggtggttgtggagtgtgctagctgcggcccttggactattaacggccggagtcagcgcgctagaggtgtacaccccaaaggagattttcgtcgccaatggaacccaggggaagttgacctgtaagtttaaatccaccagcacaactggaggcctcacgagcgttagttggtcgttccagcccgagggcgctgataccactgtctctggacccgtgatctacgctcaactggaccatagcgggggtcaccacagcgataagatcaataagtccgaaagtgtggtctatgctgacattagaaagaactag

SEQ ID NO: 59656 - DNA, 360 bp, Artificial Sequence
  derived and/or modified sequence
atggccgccagcgctggagctggagctgtgattgctgccccagacagccgccgctggctgtggagcgtgctggccgccgccctgggcctgctgacagctggggtgtctgccctggaggtgtacacccccaaggagatctttgtggccaacggcacccagggcaagctgacctgcaagttcaagagcaccagcaccaccggcggcctgacctctgtgtcctggagcttccagcctgagggcgctgacaccaccgtgtctggccctgtgatctatgcccagctggaccacagcggcggccaccacagcgacaagatcaacaagtctgagagcgtggtgtatgctgacatcaggaagaactag

SEQ ID NO: 59657 - DNA, 3421 bp, Artificial Sequence
  derived and/or modified sequence
tggagagccgcggctgggaccggagtggggagcgcggcgtggaggtgccacccggcgcgggtggcggagagatcagaagcctcttccccaagccgagccaacctcagcggggacccgggctcagggacgcggcggcggcggcggcgactgcagtggctggacgatggcagcgtccgccggagccggggcggtgattgcagccccagacagccggcgctggctgtggtcggtgctggcggcggcgcttgggctcttgacagctggagtatcagccttggaagtatatacgccaaaagaaatcttcgtggcaaatggtacacaagggaagctgacctgcaagttcaagtctactagtacgactggcgggttgacctcagtctcctggagcttccagccagagggggccgacactactgtgtcgggcccagtcatatatgcacagttagaccactccggcggacatcacagtgacaagattaacaagtcagagtctgtggtgtatgcggatatccgaaagaattaagagaatacctagaacatatcctcagcaagaaacaaaaccaaactggactctcgtgcagaaaatgtagcccattaccacatgtagccttggagacccaggcaaggacaagtacacgtgtactcacagagggagagaaagatgtgtacaaaggatatgtataaatattctatttagtcatcctgatatgaggagccagtgttgcatgatgaaaagatggtatgattctacatatgtacccattgtcttgctgtttttgtactttcttttcaggtcatttacaattgggagatttcagaaacattcctttcaccatcatttagaaatggtttgccttaatggagacaatagcagatcctgtagtatttccagtagacatggccttttaatctaagggcttaagactgattagtcttagcatttactgtagttggaggatggagatgctatgatggaagcatacccagggtggcctttagcacagtatcagtaccatttatttgtctgccgcttttaaaaaatacccattggctatgccacttgaaaacaatttgagaagtttttttgaagtttttctcactaaaatatggggcaattgttagccttacatgttgtgtagacttactttaagtttgcacccttgaaatgtgtcatatcaatttctggattcataatagcaagattagcaaaggataaatgccgaaggtcacttcattctggacacagttggatcaatactgattaagtagaaaatccaagctttgcttgagaacttttgtaacgtggagagtaaaaagtatcggttttattctttgctgatgtcctttctgcttgaaataacagtcaccatacagctaaaggagaggagtttctttccttctaagtaggcagaaatggtatcattatgttgccgctctccaatctcccagagctcgctctctagagaatcaccttctttcgcttttttttttttttttgaggtagagtctcactatgttgcccagactagccttgaactcttgggctcaagtgattctccctcctcagcctcccgagtagctggaacgaactatagttgcaccactgcagctggcaagaatcaccttctttataaagcgtcagtcatgcttccagcaagaggcagcatcagtcatggctttataacagcttcatggtgcctcaaagactgttgaggttaatgagagcctagattagacagtttggctgtccttccctaaaacttgttttctcctattcactactccccaccgcacttaaaatctatgagtttttactttttactgggaatggaaagtgtggtgaagatcattcaacacttatgttgtcatttctcccattttctgaatttttttttaaatttccccccttttaaaattgttcgaaagcccacagttatggaaagaattactgtctagatggtctgcagaacgtgtttggggtgagtgggagtgaggggcaatgttactttttctccctgtagtttggagtccattatgagctgctgctttttcttctcatcttgtcatcttctggggatgtttgaaggctgagttccaacagaattcacaaagggaataaaacaggattgagattttgaggtgtgcacaaggtggtaagataaagggcatatgagcttcaaaactaatgctgttgcatacatgaagccttttgttttttgaggagctatttttgttattcttgtaacgctccaccttacatgccacatctgtgtgagtcaacagggatcaggtttggtcaccacacatgtctgaagctgggcagcgtctgctctgtgttctgtgtggaatggagaaaaaaacgcctgccctgctgccttccatgttcataggcccagcccaagagagtgacacacagtgctggccctgagacatttccacaaagtggtcaactctgccttgcatcctaaaactttttgggcatctattttgaaaactataggagcctttggaaggcctcttatgtttggaggggaagggtgttgagattgtcaccatccttcaagctgagactcctggtgagcctttgccaccatgaaaaccacatagctgaccagggctgtgcttgaggtacagaggacacacattgtagacaggcctgtgtcatgtttccttacagtcgttttttacagagaaaaggggcattgttttttcactgctttctcaacagttcctgtgaataaatgaaacatttcggagctccctgagagcaagagccttcacttcttcttgcggtgccgggaccatgtgttggtgaagctggtgctgtgggggccactcactcgaatgacacctggaggcctgttcctcccttaccactcccttccccagcccgacttcttggcctcctgcccaaccagacacctcaaactctgtcagtgccctggcattctggcagagaatcctcaccagttctcaccaaccttccccccaggcaagggcagctgccagcatggtgctctgccaggacaggtttccctgaaggaagctgctcacactgagatgagcctctcagggcaggacctcttcccaagccctgcacacccacccctgcagcccttttggctccccttttccctgtgcctcagcactcctttcctggttgcagataacgaactaaggttgcctaaagggcagatctgccctctccatgtcttcgtcctggcaaacagggtcgtcttaaaattatgcgctaattctgtatgggagcactcaaaaggcattacttagagattgaaatttcaaactatctctagtttttcaatggaaatatatcagctagggaaaaaccatcaagctcattattattttttgatcttcagttgtatttttgtgaatattttaatacatctttttcaatttc

SEQ ID NO: 59658 - DNA, 360 bp, Artificial Sequence
  derived and/or modified sequence
atggccgccagcgccggcgccggcgccgtgatcgccgcccccgacagccggaggtggctgtggtccgttttggcagccgcgttgggacttctgacagcaggggtctcagctctggaagtgtacacccctaaggaaatcttcgtggcgaatggcacccaggggaaactcacatgtaagtttaagtccacctccacaactggtggactgacgagtgtgagctggagctttcagccagagggtgctgacaccacagtatccggacctgtaatttatgcacagttagaccactctggtggccaccactcagacaagattaacaagtccgagtcagtggtgtacgctgacattaggaagaattag

SEQ ID NO: 59659 - DNA, 360 bp, Artificial Sequence
  derived and/or modified sequence
atggcagccagtgcaggggctggcgctgtaattgcagccccagactcacgcaggtggttatggagcgtcctggccgctgccctgggactcctgaccgccggtgtttctgcacttgaagtgtacacaccaaaggagatatttgtggcaaacggcacccaggggaaacttacctgcaagttcaagagcacttccacaactgggggtttaacgagcgtatcctggagctttcagcccgaaggtgctgacacaacggtgtcagggcctgttatctacgcccagctggatcactctgggggacatcactccgataagatcaataaaagcgaatccgttgtctacgccgatatccggaaaaattag

SEQ ID NO: 59660 - protein, 659 aa, Artificial Sequence
  derived and/or modified sequence
MNRKDSKRKSHQECTGKIGGRGRPRQVRRHKTCPSPREISKVMASMNLGLLSEGGCSEDELLEKCIQSFDSAGSLCHEDHMLNMVLAMHSWVLPSADLAARLLTSYQKATGDTQELRRLQICHLVRYWLMRHPEVMHQDPQLEEVIGRFWATVAREGNSAQRRLGDSSDLPGLGKKRKVSLLFDHLETGELAQHLTYLEFRSFQAITPQDLRSYVLQGSVRGCPALEGSVGLSNSVSRWVQVMVLSRPGPLQRAQVLDKFIHVAQRLHQLQNFNTLMAVTGGLCHSAISRLKDSHAHLSPDSTKALLELTELLASHNNYARYRRTWAGCAGFRLPVLGVHLKDLVSLHEAQPDRLPDGRLHLPKLNNLYLRLQELVALQGQHPPCSANEDLLHLLTLSLDLFYTEDEIYELSYAREPRCPKSLPPSPFNAPLVVEWAPGVTPKPDRVTLGRHVEQLVESVFKNYDPEGRGTISQEDFERLSGNFPFACHGLHPPPRQGRGSFSREELTGYLLRASAICSKLGLAFLHTFHEVTFRKPTFCDSCSGFLWGVTKQGYRCRECGLCCHKHCRDQVKVECKKRPGAKGDAGPPGAPVPSTPAPHASCGSEENHSYTLSLEPETGCQLRHAWTQTESPHPSWETDTVPCPVMDPPSTASSKLDS

SEQ ID NO: 59661 - DNA, 1980 bp, Artificial Sequence
  derived and/or modified sequence
atgaacaggaaggacagcaagcgtaaatcccaccaggaatgcaccggaaaaatcgggggacggggacggcctagacaagtgagaagacacaagacatgcccctctccacgggagatttcgaaagttatggcatcaatgaacctcggcttgctctccgagggaggctgtagcgaagacgagttactggagaaatgtattcagagtttcgattccgccggatccctgtgccatgaagaccacatgctaaacatggtgctggctatgcattcttgggtacttccttctgcagatttagccgctcgcctgctcacctcttatcagaaagcaaccggggatactcaggaattgaggcgcttacagatctgtcatttggtgcgctattggctgatgcggcacccagaagtcatgcaccaggatccacagctggaagaggtgatcggacggttttgggccacagtcgcgagagaaggtaatagtgctcagcggcggttgggcgactcttccgacctgcctggactcggaaaaaagcgtaaggtgtctttactttttgatcacctcgagaccggtgagctggcgcagcacctaacctatctggagtttcgcagctttcaggctatcacacctcaggatctacggtcgtatgtactgcagggttctgtacggggttgtcccgcactggaaggtagcgtgggtctttccaactctgtgagtcgctgggtgcaggtcatggttctcagtcggcccggccccctccagcgggcacaagtgctggataagtttatccatgtggcccagcgcctccaccaactacagaattttaacacattgatggccgtcactggcggactgtgtcatagcgctatcagtcggctgaaagactcccatgctcaccttagccctgatagtactaaggcccttcttgagctgactgaactattggccagccataacaattacgcccgctaccgaagaacttgggcgggttgtgctggatttcggttgccagtgctgggcgtgcatctgaaagacctcgtgtctttacatgaagctcagcctgatcggcttcccgacggcaggctccatctgcccaagctcaacaatctctatttgcgcttgcaggaactggtagctttgcagggccaacatccgccctgtagcgctaatgaggatctcctacatctgttgacactgtcactggacctcttctacaccgaggacgagatctatgaacttagctacgctcgggagcccagatgcccaaagtctctgcccccttctccattcaacgctcctttagtggtggaatgggcgcccggggtcacacccaaacctgacagagtgacgttgggcaggcacgtggaacagcttgtggagtctgtatttaagaattacgatcctgaggggagggggacgatctctcaagaggatttcgagagactgagtgggaatttccccttcgcttgccatggccttcaccctccccccagacaaggccgtggttcttttagtagggaggagctgacaggctatcttttgcgggcctccgcaatctgctccaagcttggtttggccttcttgcatacattccacgaagtaacatttaggaagcctaccttttgtgatagttgctccggatttctgtggggggtgaccaagcagggctaccgttgcagggagtgtggactctgttgccacaaacactgccgagatcaagtaaaggtcgagtgcaagaaacgcccaggtgctaaaggcgacgctgggccacccggggcaccagtccccagcacacctgctcctcatgcttcttgcggctcagaagaaaatcactcctacaccctttcgttggagccagaaacagggtgtcagcttagacacgcctggacgcagacggagtccccacacccgtcatgggagacagacacagtcccttgccctgtgatggacccaccgtctacagcctcgtcaaaattggatagttag

SEQ ID NO: 59662 - DNA, 1980 bp, Artificial Sequence
  derived and/or modified sequence
atgaacaggaaggacagcaagaggaagagccaccaggagtgcaccgggaagattggaggccggggccggccccggcaggtgcggcggcacaagacctgccccagcccccgggagatcagcaaggtgatggcctccatgaacctgggcctgctgtctgagggcggctgcagtgaagatgagctgctggagaagtgcatccagagctttgattctgctggcagcctgtgccacgaggaccacatgctgaacatggtgctggccatgcacagctgggtgctgcccagcgctgacctggccgcccggctgctgaccagctaccagaaggccaccggggacacccaggagctgcggcggctgcagatctgccacctggtgcgctactggctgatgaggcaccctgaggtgatgcaccaggacccccagctggaggaggtgattggccgcttctgggccaccgtggcccgggagggcaacagcgcccagaggcggctgggggacagcagtgacctgcccggcctgggcaagaagaggaaggtgtccctgctgtttgaccacctggagaccggggagctggcccagcacctgacctacctggagttccgctccttccaggccatcaccccccaggacctgcggagctatgtgctgcagggctctgtgcggggctgcccagccctggagggctctgtgggcctgagcaacagcgtgagccgctgggtgcaggtgatggtgctgagccggcccggccccctgcagagggcccaggtgctggacaagttcatccacgtggcccagaggctgcaccagctgcagaacttcaacaccctgatggctgtgactggaggcctgtgccacagcgccatcagccggctgaaggacagccacgcccacctgagcccagacagcaccaaggccctgctggagctgacagagctgctggccagccacaacaactatgcccgctacagaaggacctgggccggctgtgccggcttccggctgcctgtgctgggcgtgcacctgaaggacctggtgtccctgcacgaggcccagcctgaccggctgcctgatggccgcctgcacctgcccaagctgaacaacctgtacctgcggctgcaggagctggtggccctgcagggccagcaccccccctgcagcgccaatgaagacctgctgcacctgctgaccctgagcctggacctcttctacacagaagatgagatctatgagctgtcctatgcccgggagccccgctgccccaagagcctgccccccagccccttcaatgcccccctggtggtggagtgggcccctggggtgacccccaagccagacagagtgaccctgggccgccacgtggagcagctggtggagagcgtcttcaagaactatgaccctgagggccggggcaccatcagccaggaggactttgagcggctgagcggcaacttcccctttgcctgccacggcctgcaccccccaccccggcagggccggggcagcttcagccgggaggagctgaccggctacctgctgcgggccagcgccatctgcagcaagctgggcctggccttcctgcacaccttccacgaggtgaccttcaggaagcccaccttctgtgacagctgcagcggcttcctgtggggcgtgaccaagcagggctaccgctgcagagaatgtggcctgtgctgccacaagcactgccgggaccaggtgaaggtggagtgcaagaagaggcctggggccaagggagatgctggccccccaggggcccctgtgcccagcaccccagccccccacgccagctgtggcagcgaggagaaccacagctacaccctgagcctggagcctgagaccggctgccagctgcggcatgcctggacccagacagagagcccccaccccagctgggagacagacacagtgccctgccctgtgatggacccccccagcacagccagcagcaagctggacagctag

SEQ ID NO: 59663 - DNA, 1980 bp, Artificial Sequence
  derived and/or modified sequence
atgaaccggaaggacagcaagcggaagagccaccaggagtgcaccgggaagatcggcgggcggggccgtccccggcaggtgcgtaggcataaaacatgtcccagtccaagggaaataagtaaggttatggcctctatgaacctgggcctgctgagtgagggcggatgcagtgaagatgagctgttggagaaatgcatacaatcattcgatagtgctgggtcgctgtgtcacgaagatcacatgctcaatatggtattagccatgcactcttgggttctgccaagtgccgacctggcagcccggttgctaacttcataccagaaagcaacaggggatacacaggagctccggagactccaaatttgccacctcgtacgctactggctcatgaggcatccggaggtgatgcaccaggacccccagcttgaggaggtgatcggccgtttctgggcgaccgtagcaagagaggggaactccgctcagcgccggctcggagacagcagtgacctcccgggcctcggaaagaaacgcaaggtctccctgctttttgaccacttagagacgggcgagctagcccaacaccttacttacctagaatttcggagctttcaagccattactcctcaggatctgaggtcctacgtccttcagggtagtgtccgcggatgccctgcccttgaaggttcggtgggcctgtcaaattctgtcagcaggtgggtacaggtgatggtcctgtctcgcccagggcccttgcagcgtgcccaggtccttgataaattcattcacgttgcacagcgcctgcaccagctacagaactttaataccctgatggcagtgaccggcgggctatgccattccgccatctcacgccttaaggactcacatgcacatctgagtccggactcaaccaaagcgctgctagagttgacagaactcttggcaagtcataataattatgcacgctaccggcgtacttgggctggctgcgcaggtttcaggctgcccgtcctgggggtccacctgaaggatttggtgagcttgcacgaagctcaacccgacaggctgcctgatggtaggttacatctccccaagctgaataacctctacctgagactccaggaattggtagcccttcagggacaacatccaccttgctctgccaacgaagatttactccatctattaacactgagcctcgatttgttctataccgaagatgagatctatgaactgtcctacgcacgagaaccgcgatgcccaaagtccctgcctccttcccccttcaatgctcccctggtggtggagtgggccccaggtgtgacccccaagccagacagagtcacactggggcggcacgtagagcagctagtggagtctgtgtttaagaattatgacccagaaggaagaggcacaattagccaggaggacttcgagcgactctctggcaactttccatttgcctgtcatggtctccatccccctccacggcagggaaggggaagtttctccagggaggaactcaccggctacttgctgcgcgcatcagcaatttgtagtaaactaggactcgcattccttcacaccttccacgaagttacatttcggaaaccaaccttctgtgatagctgtagcgggtttctctggggcgttacaaaacagggctaccgctgccgggaatgcggcctttgctgccataaacattgcagagatcaggtcaaggtggaatgcaaaaaaaggccaggtgcgaagggagacgcagggcctcccggtgctccagttccttccactcctgccccccatgcatcttgcggctcagaagagaatcattcgtacacactttccttagagcccgagacagggtgtcagctcaggcatgcctggactcagacagagtccccacatcccagttgggaaacagatactgttccttgccccgttatggatccccctagcaccgcttcaagtaaactggactcctag

SEQ ID NO: 59664 - DNA, 1980 bp, Artificial Sequence
  derived and/or modified sequence
atgaatcggaaggattccaagagaaaaagtcatcaggaatgcacaggaaaaattggcggacgcggtcggcctcgccaggtgcgtcgccacaagacttgtccgtctcccagggaaatatctaaggtcatggcctctatgaacctgggcctgctctcagaaggaggctgctccgaggacgagcttctggagaaatgtattcaaagttttgacagtgccggtagcctatgccacgaagatcatatgctgaatatggttctggccatgcacagctgggtcctgccatccgcagatctagccgctaggctcttaacatcctatcaaaaggctaccggtgatactcaagagttgaggaggctccagatctgccatctggtgaggtattggttgatgcgacaccctgaggtgatgcaccaggacccccagctggaagaagtgattgggagattttgggctactgtggcccgtgaagggaacagcgcccaacggcgactgggagactcatctgatctgccaggtttgggaaaaaagagaaaagtgagtctgctctttgatcatctggagacaggcgaattggcccagcatctgacatatttagagttccgctcctttcaagccatcaccccccaggatctccgcagctatgtactccagggtagcgtgcgaggctgtccagccctggagggcagtgtggggctctcaaacagcgtctctaggtgggtccaggtgatggttctgtcgagaccaggtcccttacagcgcgctcaggtcctggacaaattcatccacgtggcgcagcgtttgcaccagcttcagaacttcaacaccctgatggctgttacaggaggcctctgtcactcggctatctctcggcttaaggactctcatgctcacctgtcccccgattctaccaaagccctgctggagttaaccgaactgcttgcatcacacaacaactatgcacggtatcgtcgcacctgggccggatgtgccggatttcgacttcctgttttgggggtccaccttaaagacctcgtcagcttgcacgaggcccagccagacagactgccggacgggaggctgcatctgcccaaactgaataatctgtaccttaggcttcaggagctcgtggccctacagggacagcaccccccttgttcggcaaacgaagacctgctgcaccttttgacccttagcctggatctgttctatacagaggatgaaatttatgaactctcctacgccagagagcctcgctgccccaagagtctgccacccagtccatttaacgcgccactggtcgtggaatgggctcccggtgtgactcctaagccagacagggttactctggggcgtcatgtagagcaactggttgagagcgtgtttaagaattatgatcctgaaggtcggggaactatctcccaggaggactttgagagactgtccggcaatttccccttcgcttgccatggattgcacccccctccccgtcaaggaagaggatctttctctcgagaggagctgactgggtatcttctgagagcgagtgcgatatgttccaaattgggactagcatttctgcatacatttcatgaagtcactttcagaaaacccactttctgcgattcctgttcaggtttcctgtggggagttaccaaacagggatacagatgtcgagagtgcggactgtgctgccataaacactgccgcgaccaagtgaaagtggaatgtaagaaaagacccggagccaagggcgatgctggccctcccggtgctccagtcccctctactcccgcaccacatgctagttgcggatctgaagagaatcatagctacacactttctctggaacccgagacggggtgccagctgaggcatgcatggactcagactgaatcccctcaccccagttgggagactgataccgtgccttgcccggtgatggatcccccatctacagcttctagtaagctcgatagctag

SEQ ID NO: 59665 - DNA, 3061 bp, Artificial Sequence
  derived and/or modified sequence
gctccctaggggctgagaagctggagtcctgggcaaggggaggagctgagccctactcttgcaagacccccggcctcctcaccccacgcgggaagcatgaacagaaaagacagtaagaggaagtcccaccaggaatgcaccggaaaaataggagggcgaggccggccccgccaagtgcgccgccacaagacatgccccagccctcgggaaatcagcaaggtcatggcttccatgaacctgggcctgctgagtgagggcggctgcagcgaagatgagctgctggagaaatgcatccagtccttcgattcagctggcagcctgtgccacgaggaccacatgctcaacatggtgctggccatgcacagctgggtgctgccgtccgccgacctggctgcccgcctgctgacctcataccagaaggccacaggggacacccaggagctgagacggctgcagatctgtcacctggtcaggtactggctgatgcgacaccctgaggtgatgcaccaggatccccagctagaagaagtcataggtcgtttctgggccaccgtggcccgggagggcaactcagcccagagaagactgggagactcttctgacctcccaggcctgggcaaaaagcgcaaagtgtccttgcttttcgaccacttggagacgggggagctggctcagcacctcacctacctggagttccggtccttccaggctatcacgccccaggacctgcggagctacgttttgcagggctcagtacgaggctgcccggccctggagggctccgtaggtctcagcaacagcgtgtcccgctgggtgcaggtgatggtgctgagccgtcccgggcccctacagcgtgcacaggtgctggacaagttcattcacgtggcacagaggctccaccagctgcagaatttcaacacgctgatggcagtcacagggggcctgtgtcacagtgccatctccagactcaaggactcccatgcccacctgagccctgacagcaccaaggccctcctggagctcactgagctccttgcctcccacaacaactacgcccgctaccgccgcacctgggctggctgcgcgggtttccggctgcctgtactgggcgtgcacctcaaggacctggtgtccctgcatgaggcacagcccgacaggttgcctgacggccgcctgcacctacccaagctgaacaacctctacctgcggctgcaggagctggtggccctccaagggcagcatccaccctgcagcgccaatgaggatctgctgcacctgctcacgctctccctggacctcttctacacggaagacgagatctatgagctttcttatgcccgggagccgcgttgtcccaagagcctgccaccctcccccttcaatgcacctctggtggtggagtgggcccctggtgtgacacccaagccggacagggtcacactgggtcggcatgtggagcagctggtggagtctgtgttcaagaattatgaccctgaaggccgaggaacaatctctcaggaggactttgagcgactctcgggcaattttcccttcgcctgccatgggcttcacccacccccacgccaggggagaggatccttcagcagagaggagctgacagggtacctgctccgggccagcgccatctgctccaagttgggcctggccttcctgcacaccttccatgaggtcaccttccgaaagcctaccttctgcgacagctgcagtggcttcctctggggtgtcaccaagcaaggctaccgctgtcgggagtgcgggctgtgttgccacaaacactgcagagaccaggtgaaggtagaatgtaagaagaggccaggggccaagggcgatgcaggaccccccggagctcctgtcccatccacaccagctccccatgccagctgtggctccgaggaaaatcactcctacacgctatccctggagcctgagactgggtgccagcttcgccatgcctggacccagactgaatccccacacccttcctgggaaacagatacggtcccctgcccggtgatggacccaccatcaactgcatcctccaagctggattcctagacatctcttggtctcctctcttcctcactcccttcccccagtcagtcctgagtcctgccgtcagactctggcagggctcccagaggtaggcctccagaggcatccgccttcccatccacactgcctttagtggtacgtccgtcatctttttccctggaagtgactttcctcttttgcatcctggtggatgctaatcctgctccctttccctgcacttagtatctgtgcggctgtgtgttggatacatttagactcaggcctcattctaccaactccctacatctccatttctttttttttttgagacagagtcttgctctgtcacccaggctggagtgcaatgatgcaatctcagctcactgcaacttccgcctcctgggttcaagtgattcttctgcctcagcctcccaagtagctgggattacaggcacgcgccaccatgcccggctaatttttgtatttttagtagagacggggtttccccatgttggccaagatggtctcaaactcctgacctcatgatccaccagcctcagcctcccaaagtgctgggaatacaggcgtgagccaccacgcccagctcctgtttttctgcatagaatgtgctccctctgacagcctatactttttccctctttatctcgttgaacgtctgtctttcctcaacaggagcatcaactccaggagaacagggatttctatcaatgtcattcactgctgcatccccagtgcctagaacagggctggcaggtggtaggcgcctgacagatgcttgtctgatgcctgaatgtctccttacccatgcccacggcacaggatagatgtgctatagggcaaagaactttgagggtcgagcagcaggggcccattcagtcccagggagcagagacccccccaaccccttcacaaaccccaacacccctgacttggcccccacagagagaggtcctacagctgtcataaattaaatttattctctggagaa

SEQ ID NO: 59666 - DNA, 1980 bp, Artificial Sequence
  derived and/or modified sequence
atgaacagaaaggacagcaagagaaagagccaccaggagtgcaccggcaagatcggcggcagaggcagacccagacaggtgagaagacacaagacctgccccagccccagagagatcagcaaggtgatggccagcatgaacctgggcctgctgagcgagggcggctgcagcgaggacgagctgctggagaagtgcatccagagcttcgacagcgccggcagcctgtgccacgaggaccacatgctgaacatggtgctggccatgcacagctgggtgctgcccagcgccgacctggccgccagactgctgaccagctaccagaaggccaccggcgacacccaggagctgagaagactgcagatctgccacctggtgagatactggctgatgagacaccccgaggtgatgcaccaggacccccagctggaggaggtgatcggcagattctgggccaccgtggccagagagggcaacagcgcccagagaagactgggcgacagcagcgacctgcccggcctgggcaagaagagaaaggtgagcctgctgttcgaccacctggagaccggcgagctggcccagcacctgacctacctggagttcagaagcttccaggccatcaccccccaggacctgagaagctacgtgctgcagggcagcgtgagaggctgccccgccctggagggcagcgtgggcctgagcaacagcgtgagcagatgggtgcaggtgatggtgctgagcagacccggccccctgcagagagcccaggtgctggacaagttcatccacgtggcccagagactgcaccagctgcagaacttcaacaccctgatggccgtgaccggcggcctgtgccacagcgccatcagcagactgaaggacagccacgcccacctgagccccgacagcaccaaggccctgctggagctgaccgagctgctggccagccacaacaactacgccagatacagaagaacctgggccggctgcgccggcttcagactgcccgtgctgggcgtgcacctgaaggacctggtgagcctgcacgaggcccagcccgacagactgcccgacggcagactgcacctgcccaagctgaacaacctgtacctgagactgcaggagctggtggccctgcagggccagcaccccccctgcagcgccaacgaggacctgctgcacctgctgaccctgagcctggacctgttctacaccgaggacgagatctacgagctgagctacgccagagagcccagatgccccaagagcctgccccccagccccttcaacgcccccctggtggtggagtgggcccccggcgtgacccccaagcccgacagagtgaccctgggcagacacgtggagcagctggtggagagcgtgttcaagaactacgaccccgagggcagaggcaccatcagccaggaggacttcgagagactgagcggcaacttccccttcgcctgccacggcctgcaccccccccccagacagggcagaggcagcttcagcagagaggagctgaccggctacctgctgagagccagcgccatctgcagcaagctgggcctggccttcctgcacaccttccacgaggtgaccttcagaaagcccaccttctgcgacagctgcagcggcttcctgtggggcgtgaccaagcagggctacagatgcagagagtgcggcctgtgctgccacaagcactgcagagaccaggtgaaggtggagtgcaagaagagacccggcgccaagggcgacgccggcccccccggcgcccccgtgcccagcacccccgccccccacgccagctgcggcagcgaggagaaccacagctacaccctgagcctggagcccgagaccggctgccagctgagacacgcctggacccagaccgagagcccccaccccagctgggagaccgacaccgtgccctgccccgtgatggacccccccagcaccgccagcagcaagctggacagctag

SEQ ID NO: 59667 - protein, 581 aa, Artificial Sequence
  derived and/or modified sequence
MNRKDSKRKSHQECTGKIGGRGRPRQVRRHKTCPSPREISKVMASMNLGLLSEGGCSEDELLEKCIQSFDSAGSLCHEDHMLNMVLAMHSWVLPSADLAARLLTSYQKATGDTQELRRLQICHLVRYWLMRHPEVMHQDPQLEEVIGRFWATVAREGNSAQRRLGDSSDLLSPGGPGPPLPMSSPGLGKKRKVSLLFDHLETGELAQHLTYLEFRSFQAITPQDLRSYVLQGSVRGCPALEGSVGLSNSVSRWVQVMVLSRPGPLQRAQVLDKFIHVAQRLHQLQNFNTLMAVTGGLCHSAISRLKDSHAHLSPDSTKLSLDLFYTEDEIYELSYAREPRCPKSLPPSPFNAPLVVEWAPGVTPKPDRVTLGRHVEQLVESVFKNYDPEGRGTISQEDFERLSGNFPFACHGLHPPPRQGRGSFSREELTGYLLRASAICSKLGLAFLHTFHEVTFRKPTFCDSCSGFLWGVTKQGYRCRECGLCCHKHCRDQVKVECKKRPGAKGDAGPPGAPVPSTPAPHASCGSEENHSYTLSLEPETGCQLRHAWTQTESPHPSWETDTVPCPVMDPPSTASSKLDS

SEQ ID NO: 59668 - DNA, 1746 bp, Artificial Sequence
  derived and/or modified sequence
atgaacaggaaagattcaaaacggaagagccaccaagaatgtactggtaagataggaggacgcgggaggccacggcaggtgaggcgtcataagacgtgcccctctcctagggagatttccaaagtaatggcatcaatgaacctcggtttgctatcagaggggggatgttctgaagacgagctgttagagaaatgtatccaaagttttgatagtgctggctccctctgtcacgaggatcacatgctcaatatggttctggcgatgcatagctgggtcttaccctctgcagacttagctgctaggctccttaccagctaccagaaagctacaggcgacacacaggaactcaggcggctgcagatttgccaccttgttcgatactggctgatgaggcatcctgaagttatgcaccaggatccccaactggaagaggtcatcggccgtttctgggcgacagtggccagagaggggaactctgcccagcgacgcctgggggattcatcagatttattatcccccggcggcccaggcccaccactccccatgtccagtccaggcctggggaagaaaaggaaagtttctctgctgtttgaccacctagagacaggggagctggcacagcacttgacatacctcgaattccggtctttccaggccatcaccccacaggatttacgcagttacgtactccagggaagcgttaggggctgccccgccctcgaaggctctgtgggattgtctaattcggtcagccgctgggtgcaggtaatggtgctgtcaagacctggtccactgcagcgggcccaggtgttggataaatttatccacgtggcccaacgcctgcatcagctacagaacttcaataccctgatggcagtgaccggaggactctgccacagtgctatctcacggctgaaagatagtcacgcccacctctctcctgacagcacgaaactgagtctcgacctgttttatacagaggatgagatttacgagctgagctatgctcgcgagcctcggtgccctaagagccttcctcccagcccgttcaacgccccattggtcgtggaatgggcgccaggagttacccctaagccagatcgtgtgacacttgggcggcatgtcgagcagttggtggaaagcgtgttcaagaattatgaccctgagggtcggggaaccattagtcaggaggactttgaaagattgtcgggcaatttcccatttgcctgccacggcttacatcccccacctagacagggcagaggctcattttccagggaggaacttaccgggtacctcttacgcgccagcgcaatttgctccaagttgggcttagccttccttcacacctttcacgaggttactttccgcaagcctacattctgtgactcttgttccggcttcttgtggggcgttacaaagcaaggctaccggtgtcgggaatgtgggctctgctgccataagcactgtagagaccaggtcaaagttgaatgtaaaaaaagacccggcgcgaagggggacgccggaccacctggagcacccgtgccaagtacaccggcccctcatgcctcatgtggcagtgaagagaatcatagttacacactcagcttagaaccagagacgggctgccaattaaggcatgcttggacccaaactgaatctccccacccaagctgggaaaccgatacagtcccctgccccgtaatggacccgcccagtactgcctcctctaagcttgattcctag

SEQ ID NO: 59669 - DNA, 1746 bp, Artificial Sequence
  derived and/or modified sequence
atgaacaggaaggacagcaagaggaagagccaccaggagtgcaccgggaagattggaggccggggccggccccggcaggtgcggcggcacaagacctgccccagcccccgggagatcagcaaggtgatggcctccatgaacctgggcctgctgtctgagggcggctgcagtgaagatgagctgctggagaagtgcatccagagctttgattctgctggcagcctgtgccacgaggaccacatgctgaacatggtgctggccatgcacagctgggtgctgcccagcgctgacctggccgcccggctgctgaccagctaccagaaggccaccggggacacccaggagctgcggcggctgcagatctgccacctggtgcgctactggctgatgaggcaccctgaggtgatgcaccaggacccccagctggaggaggtgattggccgcttctgggccaccgtggcccgggagggcaacagcgcccagaggcggctgggggacagcagtgacctgctgagccctgggggccctggcccccccctgcccatgagcagccctggcctgggcaagaagaggaaggtgtccctgctgtttgaccacctggagaccggggagctggcccagcacctgacctacctggagttccgctccttccaggccatcaccccccaggacctgcggagctatgtgctgcagggctctgtgcggggctgcccagccctggagggctctgtgggcctgagcaacagcgtgagccgctgggtgcaggtgatggtgctgagccggcccggccccctgcagagggcccaggtgctggacaagttcatccacgtggcccagaggctgcaccagctgcagaacttcaacaccctgatggctgtgactggaggcctgtgccacagcgccatcagccggctgaaggacagccacgcccacctgagcccagacagcaccaagctgagcctggacctcttctacacagaagatgagatctatgagctgtcctatgcccgggagccccgctgccccaagagcctgccccccagccccttcaatgcccccctggtggtggagtgggcccctggggtgacccccaagccagacagagtgaccctgggccgccacgtggagcagctggtggagagcgtcttcaagaactatgaccctgagggccggggcaccatcagccaggaggactttgagcggctgagcggcaacttcccctttgcctgccacggcctgcaccccccaccccggcagggccggggcagcttcagccgggaggagctgaccggctacctgctgcgggccagcgccatctgcagcaagctgggcctggccttcctgcacaccttccacgaggtgaccttcaggaagcccaccttctgtgacagctgcagcggcttcctgtggggcgtgaccaagcagggctaccgctgcagagaatgtggcctgtgctgccacaagcactgccgggaccaggtgaaggtggagtgcaagaagaggcctggggccaagggagatgctggccccccaggggcccctgtgcccagcaccccagccccccacgccagctgtggcagcgaggagaaccacagctacaccctgagcctggagcctgagaccggctgccagctgcggcatgcctggacccagacagagagcccccaccccagctgggagacagacacagtgccctgccctgtgatggacccccccagcacagccagcagcaagctggacagctag

SEQ ID NO: 59670 - DNA, 1746 bp, Artificial Sequence
  derived and/or modified sequence
atgaaccggaaggacagcaagcggaagagccaccaggagtgcaccggtaagataggcgggcgaggcagacctcgtcaggttcgtaggcataagacatgtccgtcaccaagagaaatctccaaggtgatggccagcatgaatctgggactgctgagcgagggaggatgcagtgaggacgagcttctggagaagtgcatccagagtttcgactctgctggcagcctctgccacgaggaccatatgctgaacatggtgctcgccatgcactcttgggtgcttcccagcgcggatctggctgctcgcttactgacgtcttatcaaaaagcaaccggggatacccaagagctgaggaggctgcagatttgccacctggtacgctattggctgatgagacaccccgaagtgatgcaccaggatccccagctcgaagaggttattggccggttttgggccacagtggctcgggaaggaaacagcgcgcagcgcagacttggggattctagcgacctcctgtctcctggtggccccgggccccccctaccaatgtcttctcccggcttaggaaaaaagcggaaggtctcactgctgttcgaccatttggaaactggagaactggcacagcaccttacgtatttagagttccggtcttttcaagccatcaccccacaagacctgcgaagctacgtcctgcagggctcagtgagagggtgccctgcactggaagggagtgttgggcttagcaattccgtttcacgctgggtccaagtgatggtactgtcacggccgggccccctgcaacgagcgcaggtactagataagtttatccacgtcgctcaacgcctccatcagctgcagaatttcaatacattaatggccgtgacaggtggcctgtgccattctgcgatcagtaggctgaaagattctcatgctcatctgtctcccgattccactaaactatcgctggaccttttctatacagaggatgagatatatgagctgagctatgcccgcgagccacgatgccctaagagcctgcccccctctccattcaatgctccgctggtggtcgaatgggcccccggcgtgaccccgaagcccgatcgtgtgacattggggcgacacgtggagcagctggtggaatcagtctttaagaactacgatcctgaaggcaggggtactatctcccaggaagatttcgagcggttatccggcaacttccctttcgcatgtcatggcttgcacccacccccgagacagggccggggatcgtttagcagggaagagctcacaggatacttactgagagcatccgccatctgcagtaaacttggactcgcattcctgcacactttccatgaggttacattccgcaagcccacattttgtgacagttgttccggctttctatggggagtcactaagcaaggatatcgctgcagagagtgcgggctgtgctgccataagcattgcagagatcaagtgaaggtggagtgcaaaaaaagacctggcgccaaaggcgatgctggaccaccgggggccccagtgccctccactcctgctcctcatgcaagctgcgggtcggaagagaatcactcctataccttgtccctggaacccgagacaggatgccaactgcggcacgcctggacacagacagaatccccccatccttcttgggagacagatacggtgccctgcccagtgatggacccacctagcacagccagtagcaagttagattcctag

SEQ ID NO: 59671 - DNA, 1746 bp, Artificial Sequence
  derived and/or modified sequence
atgaatcgtaaagattcaaaaagaaagtcgcatcaggagtgcactggcaagatcggaggacgcggtcgccctcgtcaagtgaggcggcataaaacatgcccatcacccagggagatctctaaggtcatggcttccatgaacctgggcctactctctgaggggggatgctccgaggacgagctgttggagaagtgcatccaatcctttgactcagcgggaagtctttgccacgaagaccatatgctcaatatggtgcttgccatgcactcgtgggtgttaccttctgctgacctggccgctagattactgacgagttaccagaaggcaaccggagatacccaagaactacggaggctgcaaatctgtcacctagtccgatactggctgatgagacaccctgaggtaatgcaccaagacccccagttggaggaggtgatcgggcgtttctgggccacggtggctcgggagggaaatagcgctcagaggaggctgggggactctagtgacctgctgagccccggaggacccggtccacccctacccatgtcctctcccggtttagggaagaagcgcaaagtatctctgctctttgatcacttggagacgggcgaactggcccagcatctgacatatctcgagttcaggtcattccaggctataacaccccaggatctaagatcatacgtgctccagggaagcgtgcgcggatgtcctgctttagaaggctcagtaggactctcaaactccgtatccaggtgggtgcaagttatggttctttcccgtcctggtccactccagagagcacaggtgctggacaagttcattcacgtggcacagcggctacaccagctccagaacttcaatacactgatggcagtgaccggcggactgtgtcactctgccattagcaggctgaaagatagccatgcacatttgtcccccgacagcactaagctgtctctggacctgttctacaccgaggatgagatctatgagctgtcttacgcaagagaacccagatgccctaaatcactgccacccagccctttcaacgccccactggtggttgagtgggcccctggggtgacccccaagcccgatagggtcacccttggtcgccacgttgaacagctcgtggagtcagttttcaaaaattacgacccagagggtagaggcacaatcagtcaggaagactttgaacgtctgtccggaaacttcccctttgcctgccatggactgcatcccccaccacgccaggggagaggatctttctctcgagaggagctgacaggatacctgctacgcgcttccgcaatttgttctaagttagggttggcttttctgcatacctttcatgaggtaacatttcggaaaccaactttttgtgactcctgttctggcttcctgtggggagttactaagcagggctatcggtgcagagagtgtggtctttgctgccacaaacactgtcgagaccaggtcaaggtcgaatgtaaaaagcgaccaggggctaagggggacgcaggcccacccggagcccctgtcccttctacacccgctcctcatgcctcatgcgggagtgaggaaaatcactcctacacactttccttagagcctgagacgggctgccagcttcggcatgcatggactcagactgaaagccctcacccgagttgggaaaccgacactgtcccctgtcccgttatggacccccctagcactgcttcaagcaagcttgactcgtag

SEQ ID NO: 59672 - DNA, 2942 bp, Artificial Sequence
  derived and/or modified sequence
atccccgtgtgggggaggggggccttcggtctctccccagcctcttccttccccctggcctgagggtgggtggggaggggcagttcctctttccttcccaagcaccgaggaggccccagctccctaggggctgagaagctggagtcctgggcaaggggaggagctgagccctactcttgcaagacccccggcctcctcaccccacgcgggaagcatgaacagaaaagacagtaagaggaagtcccaccaggaatgcaccggaaaaataggagggcgaggccggccccgccaagtgcgccgccacaagacatgccccagccctcgggaaatcagcaaggtcatggcttccatgaacctgggcctgctgagtgagggcggctgcagcgaagatgagctgctggagaaatgcatccagtccttcgattcagctggcagcctgtgccacgaggaccacatgctcaacatggtgctggccatgcacagctgggtgctgccgtccgccgacctggctgcccgcctgctgacctcataccagaaggccacaggggacacccaggagctgagacggctgcagatctgtcacctggtcaggtactggctgatgcgacaccctgaggtgatgcaccaggatccccagctagaagaagtcataggtcgtttctgggccaccgtggcccgggagggcaactcagcccagagaagactgggagactcttctgacctcctgagccctggtggccctggccccccactcccaatgagcagcccaggcctgggcaaaaagcgcaaagtgtccttgcttttcgaccacttggagacgggggagctggctcagcacctcacctacctggagttccggtccttccaggctatcacgccccaggacctgcggagctacgttttgcagggctcagtacgaggctgcccggccctggagggctccgtaggtctcagcaacagcgtgtcccgctgggtgcaggtgatggtgctgagccgtcccgggcccctacagcgtgcacaggtgctggacaagttcattcacgtggcacagaggctccaccagctgcagaatttcaacacgctgatggcagtcacagggggcctgtgtcacagtgccatctccagactcaaggactcccatgcccacctgagccctgacagcaccaagctctccctggacctcttctacacggaagacgagatctatgagctttcttatgcccgggagccgcgttgtcccaagagcctgccaccctcccccttcaatgcacctctggtggtggagtgggcccctggtgtgacacccaagccggacagggtcacactgggtcggcatgtggagcagctggtggagtctgtgttcaagaattatgaccctgaaggccgaggaacaatctctcaggaggactttgagcgactctcgggcaattttcccttcgcctgccatgggcttcacccacccccacgccaggggagaggatccttcagcagagaggagctgacagggtacctgctccgggccagcgccatctgctccaagttgggcctggccttcctgcacaccttccatgaggtcaccttccgaaagcctaccttctgcgacagctgcagtggcttcctctggggtgtcaccaagcaaggctaccgctgtcgggagtgcgggctgtgttgccacaaacactgcagagaccaggtgaaggtagaatgtaagaagaggccaggggccaagggcgatgcaggaccccccggagctcctgtcccatccacaccagctccccatgccagctgtggctccgaggaaaatcactcctacacgctatccctggagcctgagactgggtgccagcttcgccatgcctggacccagactgaatccccacacccttcctgggaaacagatacggtcccctgcccggtgatggacccaccatcaactgcatcctccaagctggattcctagacatctcttggtctcctctcttcctcactcccttcccccagtcagtcctgagtcctgccgtcagactctggcagggctcccagaggtaggcctccagaggcatccgccttcccatccacactgcctttagtggtacgtccgtcatctttttccctggaagtgactttcctcttttgcatcctggtggatgctaatcctgctccctttccctgcacttagtatctgtgcggctgtgtgttggatacatttagactcaggcctcattctaccaactccctacatctccatttctttttttttttgagacagagtcttgctctgtcacccaggctggagtgcaatgatgcaatctcagctcactgcaacttccgcctcctgggttcaagtgattcttctgcctcagcctcccaagtagctgggattacaggcacgcgccaccatgcccggctaatttttgtatttttagtagagacggggtttccccatgttggccaagatggtctcaaactcctgacctcatgatccaccagcctcagcctcccaaagtgctgggaatacaggcgtgagccaccacgcccagctcctgtttttctgcatagaatgtgctccctctgacagcctatactttttccctctttatctcgttgaacgtctgtctttcctcaacaggagcatcaactccaggagaacagggatttctatcaatgtcattcactgctgcatccccagtgcctagaacagggctggcaggtggtaggcgcctgacagatgcttgtctgatgcctgaatgtctccttacccatgcccacggcacaggatagatgtgctatagggcaaagaactttgagggtcgagcagcaggggcccattcagtcccagggagcagagacccccccaaccccttcacaaaccccaacacccctgacttggcccccacagagagaggtcctacagctgtcataaattaaatttattctctgga

SEQ ID NO: 59673 - DNA, 1746 bp, Artificial Sequence
  derived and/or modified sequence
atgaacagaaaggacagcaagagaaagagccaccaggagtgcaccggcaagatcggcggcagaggcagacccagacaggtgagaagacacaagacctgccccagccccagagagatcagcaaggtgatggccagcatgaacctgggcctgctgagcgagggcggctgcagcgaggacgagctgctggagaagtgcatccagagcttcgacagcgccggcagcctgtgccacgaggaccacatgctgaacatggtgctggccatgcacagctgggtgctgcccagcgccgacctggccgccagactgctgaccagctaccagaaggccaccggcgacacccaggagctgagaagactgcagatctgccacctggtgagatactggctgatgagacaccccgaggtgatgcaccaggacccccagctggaggaggtgatcggcagattctgggccaccgtggccagagagggcaacagcgcccagagaagactgggcgacagcagcgacctgctgagccccggcggccccggcccccccctgcccatgagcagccccggcctgggcaagaagagaaaggtgagcctgctgttcgaccacctggagaccggcgagctggcccagcacctgacctacctggagttcagaagcttccaggccatcaccccccaggacctgagaagctacgtgctgcagggcagcgtgagaggctgccccgccctggagggcagcgtgggcctgagcaacagcgtgagcagatgggtgcaggtgatggtgctgagcagacccggccccctgcagagagcccaggtgctggacaagttcatccacgtggcccagagactgcaccagctgcagaacttcaacaccctgatggccgtgaccggcggcctgtgccacagcgccatcagcagactgaaggacagccacgcccacctgagccccgacagcaccaagctgagcctggacctgttctacaccgaggacgagatctacgagctgagctacgccagagagcccagatgccccaagagcctgccccccagccccttcaacgcccccctggtggtggagtgggcccccggcgtgacccccaagcccgacagagtgaccctgggcagacacgtggagcagctggtggagagcgtgttcaagaactacgaccccgagggcagaggcaccatcagccaggaggacttcgagagactgagcggcaacttccccttcgcctgccacggcctgcaccccccccccagacagggcagaggcagcttcagcagagaggagctgaccggctacctgctgagagccagcgccatctgcagcaagctgggcctggccttcctgcacaccttccacgaggtgaccttcagaaagcccaccttctgcgacagctgcagcggcttcctgtggggcgtgaccaagcagggctacagatgcagagagtgcggcctgtgctgccacaagcactgcagagaccaggtgaaggtggagtgcaagaagagacccggcgccaagggcgacgccggcccccccggcgcccccgtgcccagcacccccgccccccacgccagctgcggcagcgaggagaaccacagctacaccctgagcctggagcccgagaccggctgccagctgagacacgcctggacccagaccgagagcccccaccccagctgggagaccgacaccgtgccctgccccgtgatggacccccccagcaccgccagcagcaagctggacagctag

SEQ ID NO: 59674 - protein, 604 aa, Artificial Sequence
  derived and/or modified sequence
MNRKDSKRKSHQECTGKIGGRGRPRQVRRHKTCPSPREISKVMASMNLGLLSEGGCSEDELLEKCIQSFDSAGSLCHEDHMLNMVLAMHSWVLPSADLAARLLTSYQKATGDTQELRRLQICHLVRYWLMRHPEVMHQDPQLEEVIGRFWATVAREGNSAQRRLGDSSDLLSPGGPGPPLPMSSPGLGKKRKVSLLFDHLETGELAQHLTYLEFRSFQAITPQDLRSYVLQGSVRGCPALEGSVGLSNSVSRWVQVMVLSRPGPLQRAQVLDKFIHVAQRLHQLQNFNTLMAVTGGLCHSAISRLKDSHAHLSPDSTKELVALQGQHPPCSANEDLLHLLTLSLDLFYTEDEIYELSYAREPRCPKSLPPSPFNAPLVVEWAPGVTPKPDRVTLGRHVEQLVESVFKNYDPEGRGTISQEDFERLSGNFPFACHGLHPPPRQGRGSFSREELTGYLLRASAICSKLGLAFLHTFHEVTFRKPTFCDSCSGFLWGVTKQGYRCRECGLCCHKHCRDQVKVECKKRPGAKGDAGPPGAPVPSTPAPHASCGSEENHSYTLSLEPETGCQLRHAWTQTESPHPSWETDTVPCPVMDPPSTASSKLDS

SEQ ID NO: 59675 - DNA, 1815 bp, Artificial Sequence
  derived and/or modified sequence
atgaatcgcaaggattccaagagaaagtcccaccaggaatgcactgggaagatcgggggccgagggagaccaagacaggtgaggaggcataaaacctgcccaagtccccgggaaattagcaaggtgatggcttctatgaatctggggctgctgtctgaaggcggctgttccgaggacgaactactggagaagtgtattcagtctttcgatagcgccgggtccttgtgccatgaagaccatatgttaaatatggtactggcaatgcactcctgggtcctccccagtgccgacctggcagctcggctgctcacgtcatatcagaaagcaacaggggatacccaggagctgcgacgactccagatctgccacttggtgagatactggctcatgaggcacccagaagtcatgcatcaggaccctcaacttgaagaagtgatcggccgattttgggccactgtcgcccgtgaggggaatagcgcacagcgaaggctgggcgattcctcagatctgctgtccccaggtggccctgggccgccactgcccatgtcaagccctggcctgggtaaaaagaggaaggtctcgctcctgttcgatcacctggagacgggagagctggcccagcatttgacttatctggagttccggagctttcaagcgataacaccccaagacctgagaagttatgtgctccagggttcggttagaggttgtcccgcattagagggttcagtaggcctgtctaacagcgtgtctcggtgggtgcaggtcatggtgttgagcagaccgggtccactccagagagcacaggtgctggacaagtttatccacgtggcccagcggcttcatcagctgcagaactttaatactctcatggccgttacaggagggctgtgccattcggccattagcagactgaaagattcccatgctcatttatcacccgattccacaaaagaactcgtcgcattgcagggccagcacccaccatgttcagcgaacgaggacctgctgcatctgctaacacttagtttggatctgttttatacggaagatgagatctacgaactctcctatgcaagagaaccacgatgcccaaaatctttgcctccttccccttttaacgctcctctggtggtcgaatgggctcccggggtgaccccgaaacccgaccgggtgacgctcggtagacatgtcgagcaactcgtcgaaagcgtttttaaaaattatgaccccgaaggccgggggaccatatcccaggaagacttcgagagacttagtggcaattttccattcgcctgccacggactgcaccctcctcctcgtcaaggccggggaagcttctcaagagaagaactaactggctatctgctccgtgccagcgcaatatgcagtaaattagggctcgccttcctgcatacattccacgaggtgacgttcaggaaaccaaccttctgtgactcatgctccgggtttctctggggggtgacaaagcaaggataccgctgtcgggaatgcggcctctgctgccacaaacattgcagagaccaggtcaaagttgagtgcaaaaaaagacccggagccaaaggagatgctggtccacctggcgcacccgttccatctacccctgccccccacgcctcctgcggaagcgaagaaaaccactcatacaccctttccctcgaacccgaaactggctgtcagctgcggcatgcatggacccagacagagagcccacatccttcttgggaaacagacaccgtcccctgccccgtgatggatccccccagcaccgccagtagcaaactcgactcctag

SEQ ID NO: 59676 - DNA, 1815 bp, Artificial Sequence
  derived and/or modified sequence
atgaacaggaaggacagcaagaggaagagccaccaggagtgcaccgggaagattggaggccggggccggccccggcaggtgcggcggcacaagacctgccccagcccccgggagatcagcaaggtgatggcctccatgaacctgggcctgctgtctgagggcggctgcagtgaagatgagctgctggagaagtgcatccagagctttgattctgctggcagcctgtgccacgaggaccacatgctgaacatggtgctggccatgcacagctgggtgctgcccagcgctgacctggccgcccggctgctgaccagctaccagaaggccaccggggacacccaggagctgcggcggctgcagatctgccacctggtgcgctactggctgatgaggcaccctgaggtgatgcaccaggacccccagctggaggaggtgattggccgcttctgggccaccgtggcccgggagggcaacagcgcccagaggcggctgggggacagcagtgacctgctgagccctgggggccctggcccccccctgcccatgagcagccctggcctgggcaagaagaggaaggtgtccctgctgtttgaccacctggagaccggggagctggcccagcacctgacctacctggagttccgctccttccaggccatcaccccccaggacctgcggagctatgtgctgcagggctctgtgcggggctgcccagccctggagggctctgtgggcctgagcaacagcgtgagccgctgggtgcaggtgatggtgctgagccggcccggccccctgcagagggcccaggtgctggacaagttcatccacgtggcccagaggctgcaccagctgcagaacttcaacaccctgatggctgtgactggaggcctgtgccacagcgccatcagccggctgaaggacagccacgcccacctgagcccagacagcaccaaggagctggtggccctgcagggccagcaccccccctgcagcgccaatgaagacctgctgcacctgctgaccctgagcctggacctcttctacacagaagatgagatctatgagctgtcctatgcccgggagccccgctgccccaagagcctgccccccagccccttcaatgcccccctggtggtggagtgggcccctggggtgacccccaagccagacagagtgaccctgggcagacatgtggagcagctggtggagagcgtcttcaagaactatgaccctgagggccggggcaccatcagccaggaggactttgagcggctgagcggcaacttcccctttgcctgccacggcctgcaccccccaccccggcagggccggggcagcttcagccgggaggagctgaccggctacctgctgcgggccagcgccatctgcagcaagctgggcctggccttcctgcacaccttccacgaggtgaccttcaggaagcccaccttctgtgacagctgcagcggcttcctgtggggcgtgaccaagcagggctaccgctgccgggagtgtggcctgtgctgccacaagcactgccgggaccaggtgaaggtggagtgcaagaagaggcctggggccaagggagatgctggccccccaggggcccctgtgcccagcaccccagcccctcatgccagctgtggcagcgaggagaaccacagctacaccctgagcctggagcctgagaccggctgccagctgcggcatgcctggacccagacagagagcccccaccccagctgggagacagacacagtgccctgccctgtgatggacccccccagcacagccagcagcaagctggacagctag

SEQ ID NO: 59677 - DNA, 1815 bp, Artificial Sequence
  derived and/or modified sequence
atgaaccggaaggacagcaagcggaagagccaccaggagtgcaccggtaagatcggcggccgcgggagaccgagacaggtgcgccgacacaaaacctgcccaagtccacgagaaattagcaaagtcatggcttccatgaatttaggcttgctgtcagaggggggctgcagtgaggacgagctgctggaaaaatgtattcagagttttgattcagctgggtccctctgccacgaagatcacatgctcaacatggttcttgctatgcactcatgggtgctccccagcgctgatctcgcagcccgtcttctgacctcataccagaaagccacgggagacacacaggaactacgacgcctgcagatttgccatctggttcggtactggttaatgaggcaccctgaagttatgcaccaagacccgcagcttgaagaagtcatcgggaggttttgggctactgtggcacgagaagggaactctgcacagcgcaggctgggagactcctccgacctgcttagtccagggggaccaggaccacccctgcccatgagtagccctgggctgggcaagaaaaggaaagtgtcacttctgttcgaccacctggaaacaggggagctggcccagcatctgacctatcttgagttccggtcttttcaggcaatcacaccccaagatctgcgctcatacgtgcttcaagggagtgtgagaggttgccccgccctagaggggtccgtgggcctctccaattcagtgtcacggtgggtccaagtgatggtactaagcaggccgggtccactacagcgagcacaggtcctggataagtttatccacgtcgcccagcggctgcatcagctccaaaatttcaacactctgatggccgtcaccgggggactgtgtcactccgctatcagcaggctgaaagactctcacgcgcatttatctccagattcgaccaaggagctggtggcgctgcagggccagcatcctccctgcagtgctaatgaagacctgctgcatctgttgacactatctctggatctgttttatactgaggacgaaatttacgaactgtcgtatgcccgcgagccacgctgccctaagtccctgccaccctcaccattcaacgcacctctcgttgtcgaatgggcccctggcgtgacgccaaagcctgacagagttacgctgggaaggcacgttgagcagctggtggagtccgtgtttaagaattacgaccctgagggccgggggaccatatcacaggaagatttcgagcgattatctgggaactttccattcgcctgtcacggtcttcatccacccccccggcaggggagggggtctttttcgagagaagaacttacgggatatctgctgcgggcctccgcgatttgctccaaattgggcctggcattcctccataccttccacgaggttacattcagaaagccgaccttctgtgatagctgctccggctttctgtggggtgtgacaaaacagggttatcgctgtcgcgagtgcggactctgctgtcataagcactgcagagaccaagtgaaagtcgaatgcaagaaacggcccggcgccaagggggacgcgggacctccgggagccccagtgcccagcactcccgccccgcatgcgagctgtgggagcgaagaaaaccacagttacacgctatccctggagcctgagactggctgccagttgcggcacgcatggacgcagaccgaatctccccatccaagctgggaaactgataccgtgccctgccccgttatggatccgccatctactgcttcctcaaaactcgactcatag

SEQ ID NO: 59678 - DNA, 1815 bp, Artificial Sequence
  derived and/or modified sequence
atgaatcgaaaggactccaagcgaaagagccaccaggaatgtactggcaaaatcggtgggaggggtcggcctagacaggttcgtagacacaagacttgtccctcaccgagggaaattagtaaggtcatggccagtatgaaccttgggctcctatccgagggaggctgcagtgaagatgagctgctggagaaatgtatccaatcctttgacagtgccggaagcctatgtcatgaagaccacatgctgaatatggtgctggccatgcactcttgggttctgccttctgccgatctggcagcacgtctgttaacgtcttaccagaaagctacaggcgatacccaagagctgcgccgtcttcagatctgtcacctggtgcggtattggcttatgcgacatcctgaggtaatgcaccaggacccccaacttgaggaggtcattggcagattttgggcgaccgtcgccagggagggcaacagtgcccaacggcgattaggcgacagcagcgacctattgtcaccgggagggcctggtcccccactgcccatgtcctcacccggattggggaagaaaagaaaagtcagcctacttttcgaccacctagagaccggcgagctggcccagcatctcacgtacttagaatttcggagcttccaggccatcacccctcaagacctccgatcctacgtcctgcagggctccgtgcgagggtgcccagccttggaaggttcagtggggctgtctaatagtgttagcaggtgggtccaggtgatggttttgtccaggccaggaccgctgcagcgcgcacaggtgctggataaattcatccacgtcgcccagcgcttacaccagttgcagaacttcaatacattgatggccgtgactggcggtctctgtcactccgctatatcacggctgaaggactcccacgcacatttgtcgcctgactcaacgaaggaactggtggctttgcaaggccaacaccccccatgcagcgctaatgaagatctgctccatctgttaacactctcgctagatctgttttacactgaggatgaaatctacgaattgtcctatgctcgggaaccgaggtgtcctaagagcctccctccaagtcctttcaatgcacctttggtggtggagtgggcccctggcgttacacccaagcccgaccgcgtgacactcggcaggcatgtagagcagttggtcgaaagtgtgtttaagaactacgatcccgagggaagaggcactatatcccaggaagacttcgagcgactttccgggaattttcccttcgcctgtcatgggttacaccccccaccccgacagggcagagggagctttagccgtgaggagctcactgggtatcttttgcgggctagcgctatctgttccaaactcggcctggctttcttacatactttccatgaagttacgtttcgaaagcccaccttctgtgattcctgcagcggtttcctgtggggagtgaccaagcaggggtatagatgtcgcgagtgtggactttgttgtcacaaacactgtcgcgaccaagttaaggtggaatgcaagaaacgccctggggctaagggcgacgctgggcctccgggtgctccagtgccaagcacgcctgcccctcacgcctcttgcggatccgaagaaaaccactcgtataccctcagtctggagcctgaaaccggatgccagttacggcatgcatggactcagacagagtccccccatcctagctgggaaacggataccgtgccttgccctgtcatggacccacctagcactgcatcttctaaactggattcttag

SEQ ID NO: 59679 - DNA, 3011 bp, Artificial Sequence
  derived and/or modified sequence
atccccgtgtgggggaggggggccttcggtctctccccagcctcttccttccccctggcctgagggtgggtggggaggggcagttcctctttccttcccaagcaccgaggaggccccagctccctaggggctgagaagctggagtcctgggcaaggggaggagctgagccctactcttgcaagacccccggcctcctcaccccacgcgggaagcatgaacagaaaagacagtaagaggaagtcccaccaggaatgcaccggaaaaataggagggcgaggccggccccgccaagtgcgccgccacaagacatgccccagccctcgggaaatcagcaaggtcatggcttccatgaacctgggcctgctgagtgagggcggctgcagcgaagatgagctgctggagaaatgcatccagtccttcgattcagctggcagcctgtgccacgaggaccacatgctcaacatggtgctggccatgcacagctgggtgctgccgtccgccgacctggctgcccgcctgctgacctcataccagaaggccacaggggacacccaggagctgagacggctgcagatctgtcacctggtcaggtactggctgatgcgacaccctgaggtgatgcaccaggatccccagctagaagaagtcataggtcgtttctgggccaccgtggcccgggagggcaactcagcccagagaagactgggagactcttctgacctcctgagccctggtggccctggccccccactcccaatgagcagcccaggcctgggcaaaaagcgcaaagtgtccttgcttttcgaccacttggagacgggggagctggctcagcacctcacctacctggagttccggtccttccaggctatcacgccccaggacctgcggagctacgttttgcagggctcagtacgaggctgcccggccctggagggctccgtaggtctcagcaacagcgtgtcccgctgggtgcaggtgatggtgctgagccgtcccgggcccctacagcgtgcacaggtgctggacaagttcattcacgtggcacagaggctccaccagctgcagaatttcaacacgctgatggcagtcacagggggcctgtgtcacagtgccatctccagactcaaggactcccatgcccacctgagccctgacagcaccaaggagctggtggccctccaagggcagcatccaccctgcagcgccaatgaggatctgctgcacctgctcacgctctccctggacctcttctacacggaagacgagatctatgagctttcttatgcccgggagccgcgttgtcccaagagcctgccaccctcccccttcaatgcacctctggtggtggagtgggcccctggtgtgacacccaagccggacagggtcacactgggtcggcatgtggagcagctggtggagtctgtgttcaagaattatgaccctgaaggccgaggaacaatctctcaggaggactttgagcgactctcgggcaattttcccttcgcctgccatgggcttcacccacccccacgccaggggagaggatccttcagcagagaggagctgacagggtacctgctccgggccagcgccatctgctccaagttgggcctggccttcctgcacaccttccatgaggtcaccttccgaaagcctaccttctgcgacagctgcagtggcttcctctggggtgtcaccaagcaaggctaccgctgtcgggagtgcgggctgtgttgccacaaacactgcagagaccaggtgaaggtagaatgtaagaagaggccaggggccaagggcgatgcaggaccccccggagctcctgtcccatccacaccagctccccatgccagctgtggctccgaggaaaatcactcctacacgctatccctggagcctgagactgggtgccagcttcgccatgcctggacccagactgaatccccacacccttcctgggaaacagatacggtcccctgcccggtgatggacccaccatcaactgcatcctccaagctggattcctagacatctcttggtctcctctcttcctcactcccttcccccagtcagtcctgagtcctgccgtcagactctggcagggctcccagaggtaggcctccagaggcatccgccttcccatccacactgcctttagtggtacgtccgtcatctttttccctggaagtgactttcctcttttgcatcctggtggatgctaatcctgctccctttccctgcacttagtatctgtgcggctgtgtgttggatacatttagactcaggcctcattctaccaactccctacatctccatttctttttttttttgagacagagtcttgctctgtcacccaggctggagtgcaatgatgcaatctcagctcactgcaacttccgcctcctgggttcaagtgattcttctgcctcagcctcccaagtagctgggattacaggcacgcgccaccatgcccggctaatttttgtatttttagtagagacggggtttccccatgttggccaagatggtctcaaactcctgacctcatgatccaccagcctcagcctcccaaagtgctgggaatacaggcgtgagccaccacgcccagctcctgtttttctgcatagaatgtgctccctctgacagcctatactttttccctctttatctcgttgaacgtctgtctttcctcaacaggagcatcaactccaggagaacagggatttctatcaatgtcattcactgctgcatccccagtgcctagaacagggctggcaggtggtaggcgcctgacagatgcttgtctgatgcctgaatgtctccttacccatgcccacggcacaggatagatgtgctatagggcaaagaactttgagggtcgagcagcaggggcccattcagtcccagggagcagagacccccccaaccccttcacaaaccccaacacccctgacttggcccccacagagagaggtcctacagctgtcataaattaaatttattctctgga

SEQ ID NO: 59680 - DNA, 1815 bp, Artificial Sequence
  derived and/or modified sequence
atgaacagaaaggacagcaagagaaagagccaccaggagtgcaccggcaagatcggcggcagaggcagacccagacaggtgagaagacacaagacctgccccagccccagagagatcagcaaggtgatggccagcatgaacctgggcctgctgagcgagggcggctgcagcgaggacgagctgctggagaagtgcatccagagcttcgacagcgccggcagcctgtgccacgaggaccacatgctgaacatggtgctggccatgcacagctgggtgctgcccagcgccgacctggccgccagactgctgaccagctaccagaaggccaccggcgacacccaggagctgagaagactgcagatctgccacctggtgagatactggctgatgagacaccccgaggtgatgcaccaggacccccagctggaggaggtgatcggcagattctgggccaccgtggccagagagggcaacagcgcccagagaagactgggcgacagcagcgacctgctgagccccggcggccccggcccccccctgcccatgagcagccccggcctgggcaagaagagaaaggtgagcctgctgttcgaccacctggagaccggcgagctggcccagcacctgacctacctggagttcagaagcttccaggccatcaccccccaggacctgagaagctacgtgctgcagggcagcgtgagaggctgccccgccctggagggcagcgtgggcctgagcaacagcgtgagcagatgggtgcaggtgatggtgctgagcagacccggccccctgcagagagcccaggtgctggacaagttcatccacgtggcccagagactgcaccagctgcagaacttcaacaccctgatggccgtgaccggcggcctgtgccacagcgccatcagcagactgaaggacagccacgcccacctgagccccgacagcaccaaggagctggtggccctgcagggccagcaccccccctgcagcgccaacgaggacctgctgcacctgctgaccctgagcctggacctgttctacaccgaggacgagatctacgagctgagctacgccagagagcccagatgccccaagagcctgccccccagccccttcaacgcccccctggtggtggagtgggcccccggcgtgacccccaagcccgacagagtgaccctgggcagacacgtggagcagctggtggagagcgtgttcaagaactacgaccccgagggcagaggcaccatcagccaggaggacttcgagagactgagcggcaacttccccttcgcctgccacggcctgcaccccccccccagacagggcagaggcagcttcagcagagaggagctgaccggctacctgctgagagccagcgccatctgcagcaagctgggcctggccttcctgcacaccttccacgaggtgaccttcagaaagcccaccttctgcgacagctgcagcggcttcctgtggggcgtgaccaagcagggctacagatgcagagagtgcggcctgtgctgccacaagcactgcagagaccaggtgaaggtggagtgcaagaagagacccggcgccaagggcgacgccggcccccccggcgcccccgtgcccagcacccccgccccccacgccagctgcggcagcgaggagaaccacagctacaccctgagcctggagcccgagaccggctgccagctgagacacgcctggacccagaccgagagcccccaccccagctgggagaccgacaccgtgccctgccccgtgatggacccccccagcaccgccagcagcaagctggacagctag

SEQ ID NO: 59681 - protein, 484 aa, Artificial Sequence
  derived and/or modified sequence
MNRKDSKRKSHQECTGKIGGRGRPRQVRRHKTCPSPREISKVMASMNLGLLSEGGCSEDELLEKCIQSFDSAGSLCHEDHMLNMVLAMHSWVLPSADLAARLLTSYQKATGDTQELRRLQICHLVRYWLMRHPEVMHQDPQLEEVIGRFWATVAREGNSAQRRLGDSSDLLSPGGPGPPLPMSSPGLGKKRKVSLLFDHLETGELAQHLTYLEFRSFQAITLSLDLFYTEDEIYELSYAREPRCPKSLPPSPFNAPLVVEWAPGVTPKPDRVTLGRHVEQLVESVFKNYDPEGRGTISQEDFERLSGNFPFACHGLHPPPRQGRGSFSREELTGYLLRASAICSKLGLAFLHTFHEVTFRKPTFCDSCSGFLWGVTKQGYRCRECGLCCHKHCRDQVKVECKKRPGAKGDAGPPGAPVPSTPAPHASCGSEENHSYTLSLEPETGCQLRHAWTQTESPHPSWETDTVPCPVMDPPSTASSKLDS

SEQ ID NO: 59682 - DNA, 1455 bp, Artificial Sequence
  derived and/or modified sequence
atgaaccgaaaagatagcaaacggaagtctcatcaggagtgtactggtaagatcggcggtcgcgggcgtccccggcaggtgcgacggcataaaacttgtccaagcccccgtgagatctccaaagtgatggcgagtatgaacttaggactcctgtctgaagggggctgttctgaggatgagctgctcgagaaatgcatacagtccttcgacagcgctgggtctctttgtcacgaggaccacatgctgaacatggtcctggcaatgcactcttgggttttaccgagtgctgacttagccgctcgcctacttaccagttaccaaaaagcaacaggggatacccaagagttgagaaggcttcagatctgtcacctagtcaggtactggttgatgaggcacccagaagtcatgcatcaagatccacaactggaagaagtgattggcaggttctgggcgacagtcgcccgcgaggggaacagtgcccagcgtagactgggcgattcttctgatctcctgtcccctggtgggccagggccccccctacccatgagctctcctgggctgggtaaaaaacgcaaggtctcattgctgtttgaccacctagaaacaggggaactcgctcagcacctcacttatttagaatttcgctctttccaggccatcactctaagtctggacctgttttatacagaagacgaaatctacgaattatcttacgcccgagaaccaagatgtccaaagtctttgcctccgtcaccatttaatgcaccgctggtcgtggagtgggctcctggagtgacaccaaaaccagatcgagttacgctggggcggcatgttgaacagctagtggagagtgtctttaagaactacgatcccgagggcaggggcaccatctcccaggaagactttgagcgcctgtctggcaactttccctttgcctgccacgggcttcatccccccccaaggcaaggtaggggctccttctctcgggaggaattaaccggatatctacttcgtgcatccgccatatgctccaaactgggactggcattcctccacaccttccacgaggttacctttcggaaacctacattctgtgatagctgcagtgggttcttgtggggtgtcacaaaacagggctaccgctgcagggagtgtggcctttgctgccataaacactgtcgggatcaagtgaaggttgagtgcaagaaacgcccaggtgcaaagggggatgccgggccacctggcgctcctgttccctcaactcctgcccctcacgcctcatgcggcagcgaggaaaaccactcttacacgctttccctcgagcctgaaacgggatgtcagctccggcacgcctggacgcagaccgagagtccccatccttcttgggagacagacactgtgccttgccctgtaatggatccacccagtacagccagctcaaagctcgatagctag

SEQ ID NO: 59683 - DNA, 1455 bp, Artificial Sequence
  derived and/or modified sequence
atgaacaggaaggacagcaagaggaagagccaccaggagtgcaccgggaagattggaggccggggccggccccggcaggtgcggcggcacaagacctgccccagcccccgggagatcagcaaggtgatggcctccatgaacctgggcctgctgtctgagggcggctgcagtgaagatgagctgctggagaagtgcatccagagctttgattctgctggcagcctgtgccacgaggaccacatgctgaacatggtgctggccatgcacagctgggtgctgcccagcgctgacctggccgcccggctgctgaccagctaccagaaggccaccggggacacccaggagctgcggcggctgcagatctgccacctggtgcgctactggctgatgaggcaccctgaggtgatgcaccaggacccccagctggaggaggtgattggccgcttctgggccaccgtggcccgggagggcaacagcgcccagaggcggctgggggacagcagtgacctgctgagccctgggggccctggcccccccctgcccatgagcagccctggcctgggcaagaagaggaaggtgtccctgctgtttgaccacctggagaccggggagctggcccagcacctgacctacctggagttccgctccttccaggccatcaccctgagcctggacctcttctacacagaagatgagatctatgagctgtcctatgcccgggagccccgctgccccaagagcctgccccccagccccttcaatgcccccctggtggtggagtgggcccctggggtgacccccaagccagacagagtgaccctgggcagacatgtggagcagctggtggagagcgtcttcaagaactatgaccctgagggccggggcaccatcagccaggaggactttgagcggctgagcggcaacttcccctttgcctgccacggcctgcaccccccaccccggcagggccggggcagcttcagccgggaggagctgaccggctacctgctgcgggccagcgccatctgcagcaagctgggcctggccttcctgcacaccttccacgaggtgaccttcaggaagcccaccttctgtgacagctgcagcggcttcctgtggggcgtgaccaagcagggctaccgctgccgggagtgtggcctgtgctgccacaagcactgccgggaccaggtgaaggtggagtgcaagaagaggcctggggccaagggagatgctggccccccaggggcccctgtgcccagcaccccagcccctcatgccagctgtggcagcgaggagaaccacagctacaccctgagcctggagcctgagaccggctgccagctgcggcatgcctggacccagacagagagcccccaccccagctgggagacagacacagtgccctgccctgtgatggacccccccagcacagccagcagcaagctggacagctag

SEQ ID NO: 59684 - DNA, 1455 bp, Artificial Sequence
  derived and/or modified sequence
atgaaccggaaggacagcaagcggaagagccaccaggagtgcaccgggaagattggtggtcgaggcaggccaaggcaggtgagacggcacaagacctgtcctagtccacgcgaaatatccaaggtaatggcttcaatgaatttgggccttctttcagagggcggctgtagtgaagatgagctactggagaagtgcattcagtcgttcgacagcgccggatctttgtgccacgaagaccacatgcttaatatggtcctcgccatgcatagctgggtgctcccttcagcggatctggctgctcggctgctgacaagctaccagaaggccaccggcgacactcaagaattgcgccgccttcagatatgccatctggtccgttactggctgatgcggcaccccgaagtgatgcaccaggacccccagctggaggaagtgattggccggttctgggccactgttgccagggaggggaacagcgcccagagaagactgggagatagttctgatttgctaagccctgggggtcccgggccccccctgccaatgtcatccccgggactcggtaagaagcgaaaggtgtctctgctgttcgaccatctcgagacaggggagttagcccagcacctgacgtatctcgaattcaggagcttccaggccattaccctgtccctggacctgttttatactgaagacgagatctatgagctgtcctatgctcgggagcccaggtgcccaaagtctttgccaccctcgcccttcaacgccccgctagttgtggagtgggctcccggcgtaacacccaagcctgatagggtgacactgggtaggcatgtggagcagcttgtggaatccgttttcaagaattacgaccctgagggacggggtaccatatctcaagaagatttcgaaagactgtctggcaatttcccatttgcgtgtcacggcctgcacccgcctccacgacaaggacgtggttctttttctcgggaggaactgaccggctatttattacgggcaagcgctatatgctcaaagttaggcttggcttttctccacacttttcacgaagtaacatttcgaaaaccaaccttctgtgacagctgttccgggttcttatggggggttaccaagcagggctatcgatgcagggagtgtggcctgtgctgccataaacattgtcgggaccaggtcaaagttgaatgtaagaagcggcccggtgccaaaggcgatgccgggccccccggcgccccagttccaagtacacccgcaccccatgccagctgtggcagcgaggaaaatcactcctatacgttatctttggagccagagaccggatgtcaattgcggcacgcttggacacagacagaatctccacaccctagctgggaaaccgacactgttccctgtcctgttatggaccccccatctaccgccagtagtaaattagactcatag

SEQ ID NO: 59685 - DNA, 1455 bp, Artificial Sequence
  derived and/or modified sequence
atgaatcgcaaggatagcaagcggaagagtcatcaggaatgtaccggcaaaattgggggacggggacgaccgagacaggtgaggagacataaaacctgcccaagcccccgagagatatctaaggtgatggcttcaatgaatctgggccttttgagcgaggggggatgctcggaagatgaactgttggaaaaatgtatacaatcctttgattccgctggatctctgtgccacgaggaccacatgttgaacatggtgctggccatgcacagctgggttctacccagtgctgacctggcagcgcgtctgctgaccagttaccagaaggcaaccggcgatacgcaggaactccggagactccagatatgccacttagtccgctattggctcatgcgccatccggaggtgatgcaccaggatccccagttagaagaggtgataggaaggttttgggcgaccgtggctcgcgaggggaacagcgctcaacgcaggctaggagactcatccgatctcctgtcacccggaggccctggtcctccgctgccgatgagctccccaggcctcggtaagaaacgaaaggtgagccttctgttcgaccatcttgaaactggggagctcgcacagcacctgacttatctggagtttagaagcttccaggcaattactctgagccttgacttgttctacacagaggatgaaatttacgaattgtcctacgcgcgagaacctagatgtcctaagtccttgccccctagtcctttcaacgccccactcgtggtggaatgggctcctggagttacccccaaacctgatcgcgtgacgcttggacgtcatgttgagcaactggtggagagcgtcttcaagaactacgatcctgagggcaggggcaccatatcccaagaagacttcgagagactgtcaggaaattttccctttgcgtgccatgggcttcatcccccaccacggcagggcagaggctcttttagccgggaagaactgaccgggtatctgctgcgcgcttcagctatatgtagcaaactcgggctggctttcttgcatacattccatgaagtaacgtttcggaaacctacgttttgtgattcttgttctggctttttgtggggggtgaccaaacaggggtataggtgtagagagtgcgggctatgctgccacaagcactgcagagatcaagtgaaggttgaatgcaagaaaaggccaggggctaagggcgatgccggtcccccaggcgcaccggtgccttctactccagcgccacacgccagctgtggttcagaggaaaatcactcttacaccctctccctggagccagagactggttgtcagctgaggcatgcatggacacagacagaaagtccccatccctcttgggagaccgataccgtcccttgcccagtgatggatcctcctagcaccgcttcgtctaaactcgactcatag

SEQ ID NO: 59686 - DNA, 2651 bp, Artificial Sequence
  derived and/or modified sequence
atccccgtgtgggggaggggggccttcggtctctccccagcctcttccttccccctggcctgagggtgggtggggaggggcagttcctctttccttcccaagcaccgaggaggccccagctccctaggggctgagaagctggagtcctgggcaaggggaggagctgagccctactcttgcaagacccccggcctcctcaccccacgcgggaagcatgaacagaaaagacagtaagaggaagtcccaccaggaatgcaccggaaaaataggagggcgaggccggccccgccaagtgcgccgccacaagacatgccccagccctcgggaaatcagcaaggtcatggcttccatgaacctgggcctgctgagtgagggcggctgcagcgaagatgagctgctggagaaatgcatccagtccttcgattcagctggcagcctgtgccacgaggaccacatgctcaacatggtgctggccatgcacagctgggtgctgccgtccgccgacctggctgcccgcctgctgacctcataccagaaggccacaggggacacccaggagctgagacggctgcagatctgtcacctggtcaggtactggctgatgcgacaccctgaggtgatgcaccaggatccccagctagaagaagtcataggtcgtttctgggccaccgtggcccgggagggcaactcagcccagagaagactgggagactcttctgacctcctgagccctggtggccctggccccccactcccaatgagcagcccaggcctgggcaaaaagcgcaaagtgtccttgcttttcgaccacttggagacgggggagctggctcagcacctcacctacctggagttccggtccttccaggctatcacgctctccctggacctcttctacacggaagacgagatctatgagctttcttatgcccgggagccgcgttgtcccaagagcctgccaccctcccccttcaatgcacctctggtggtggagtgggcccctggtgtgacacccaagccggacagggtcacactgggtcggcatgtggagcagctggtggagtctgtgttcaagaattatgaccctgaaggccgaggaacaatctctcaggaggactttgagcgactctcgggcaattttcccttcgcctgccatgggcttcacccacccccacgccaggggagaggatccttcagcagagaggagctgacagggtacctgctccgggccagcgccatctgctccaagttgggcctggccttcctgcacaccttccatgaggtcaccttccgaaagcctaccttctgcgacagctgcagtggcttcctctggggtgtcaccaagcaaggctaccgctgtcgggagtgcgggctgtgttgccacaaacactgcagagaccaggtgaaggtagaatgtaagaagaggccaggggccaagggcgatgcaggaccccccggagctcctgtcccatccacaccagctccccatgccagctgtggctccgaggaaaatcactcctacacgctatccctggagcctgagactgggtgccagcttcgccatgcctggacccagactgaatccccacacccttcctgggaaacagatacggtcccctgcccggtgatggacccaccatcaactgcatcctccaagctggattcctagacatctcttggtctcctctcttcctcactcccttcccccagtcagtcctgagtcctgccgtcagactctggcagggctcccagaggtaggcctccagaggcatccgccttcccatccacactgcctttagtggtacgtccgtcatctttttccctggaagtgactttcctcttttgcatcctggtggatgctaatcctgctccctttccctgcacttagtatctgtgcggctgtgtgttggatacatttagactcaggcctcattctaccaactccctacatctccatttctttttttttttgagacagagtcttgctctgtcacccaggctggagtgcaatgatgcaatctcagctcactgcaacttccgcctcctgggttcaagtgattcttctgcctcagcctcccaagtagctgggattacaggcacgcgccaccatgcccggctaatttttgtatttttagtagagacggggtttccccatgttggccaagatggtctcaaactcctgacctcatgatccaccagcctcagcctcccaaagtgctgggaatacaggcgtgagccaccacgcccagctcctgtttttctgcatagaatgtgctccctctgacagcctatactttttccctctttatctcgttgaacgtctgtctttcctcaacaggagcatcaactccaggagaacagggatttctatcaatgtcattcactgctgcatccccagtgcctagaacagggctggcaggtggtaggcgcctgacagatgcttgtctgatgcctgaatgtctccttacccatgcccacggcacaggatagatgtgctatagggcaaagaactttgagggtcgagcagcaggggcccattcagtcccagggagcagagacccccccaaccccttcacaaaccccaacacccctgacttggcccccacagagagaggtcctacagctgtcataaattaaatttattctctgga

SEQ ID NO: 59687 - DNA, 1455 bp, Artificial Sequence
  derived and/or modified sequence
atgaacagaaaggacagcaagagaaagagccaccaggagtgcaccggcaagatcggcggcagaggcagacccagacaggtgagaagacacaagacctgccccagccccagagagatcagcaaggtgatggccagcatgaacctgggcctgctgagcgagggcggctgcagcgaggacgagctgctggagaagtgcatccagagcttcgacagcgccggcagcctgtgccacgaggaccacatgctgaacatggtgctggccatgcacagctgggtgctgcccagcgccgacctggccgccagactgctgaccagctaccagaaggccaccggcgacacccaggagctgagaagactgcagatctgccacctggtgagatactggctgatgagacaccccgaggtgatgcaccaggacccccagctggaggaggtgatcggcagattctgggccaccgtggccagagagggcaacagcgcccagagaagactgggcgacagcagcgacctgctgagccccggcggccccggcccccccctgcccatgagcagccccggcctgggcaagaagagaaaggtgagcctgctgttcgaccacctggagaccggcgagctggcccagcacctgacctacctggagttcagaagcttccaggccatcaccctgagcctggacctgttctacaccgaggacgagatctacgagctgagctacgccagagagcccagatgccccaagagcctgccccccagccccttcaacgcccccctggtggtggagtgggcccccggcgtgacccccaagcccgacagagtgaccctgggcagacacgtggagcagctggtggagagcgtgttcaagaactacgaccccgagggcagaggcaccatcagccaggaggacttcgagagactgagcggcaacttccccttcgcctgccacggcctgcaccccccccccagacagggcagaggcagcttcagcagagaggagctgaccggctacctgctgagagccagcgccatctgcagcaagctgggcctggccttcctgcacaccttccacgaggtgaccttcagaaagcccaccttctgcgacagctgcagcggcttcctgtggggcgtgaccaagcagggctacagatgcagagagtgcggcctgtgctgccacaagcactgcagagaccaggtgaaggtggagtgcaagaagagacccggcgccaagggcgacgccggcccccccggcgcccccgtgcccagcacccccgccccccacgccagctgcggcagcgaggagaaccacagctacaccctgagcctggagcccgagaccggctgccagctgagacacgcctggacccagaccgagagcccccaccccagctgggagaccgacaccgtgccctgccccgtgatggacccccccagcaccgccagcagcaagctggacagctag

SEQ ID NO: 59688 - protein, 576 aa, Artificial Sequence
  derived and/or modified sequence
MNRKDSKRKSHQECTGKIGGRGRPRQVRRHKTCPSPREISKVMASMNLGLLSEGGCSEDELLEKCIQSFDSAGSLCHEDHMLNMVLAMHSWVLPSADLAARLLTSYQKATGDTQELRRLQICHLVRYWLMRHPEVMHQDPQLEEVIGRFWATVAREGNSAQRRLGDSSDLLSPGGPGPPLPMSSPGLGKKRKVSLLFDHLETGELAQHLTYLEFRSFQAITALLELTELLASHNNYARYRRTWAGCAGFRLPVLGVHLKDLVSLHEAQPDRLPDGRLHLPKLNNLYLRLQELVALQGQHPPCSANEDLLHLLTLSLDLFYTEDEIYELSYAREPRCPKSLPPSPFNAPLVVEWAPGVTPKPDRVTLGRHVEQLVESVFKNYDPEGRGTISQEDFERLSGNFPFACHGLHPPPRQGRGSFSREELTGYLLRASAICSKLGLAFLHTFHEVTFRKPTFCDSCSGFLWGVTKQGYRCRECGLCCHKHCRDQVKVECKKRPGAKGDAGPPGAPVPSTPAPHASCGSEENHSYTLSLEPETGCQLRHAWTQTESPHPSWETDTVPCPVMDPPSTASSKLDS

SEQ ID NO: 59689 - DNA, 1731 bp, Artificial Sequence
  derived and/or modified sequence
atgaaccgcaaggattcaaaaagaaagagccaccaggaatgtaccggcaagatagggggtcgcgggcgaccaagacaggttcgcaggcataagacctgtccgtcacctagggagatatctaaagttatggctagcatgaatctgggcttactctctgagggcggatgtagcgaagacgagctgctggaaaaatgtatccagtcttttgattcagccgggtctctgtgccacgaagaccacatgctcaacatggtcctcgctatgcattcttgggtgcttccatcggctgacctggccgcgaggctgctcacttcctaccagaaagcaacaggcgacacccaggagcttagacggcttcaaatatgccacctcgtgagatactggctgatgcggcacccagaagtcatgcaccaggaccctcagttagaggaggtgatcgggcgcttttgggcaacggttgctcgcgaaggtaacagtgcgcagcgcaggctgggcgattcatctgatctccttagtcccggggggccaggaccacccctacccatgtctagccccggcttggggaagaagcggaaagtctccctgctttttgatcacttggagaccggcgagttagcacagcacctaacgtatctggaattccgatcctttcaggccatcaccgcacttttggaactaacagaattgttggcttcacataacaactatgcacgttaccggcgcacgtgggcaggatgtgccggtttcagattaccagtgttgggcgtgcacttaaaagacctggtcagcctgcacgaggcacagccagatcgcttgcctgatgggcgcctccacctccctaagctgaataacctctacctacgtcttcaggaactggttgcccttcagggccagcaccccccatgctccgcaaacgaggacctattgcacctgctgactctgtctttggacctattctataccgaggacgagatttatgaactgtcctatgctcgcgagccccggtgcccaaagagtcttccaccctccccatttaatgcccctctggtcgtagaatgggcccccggtgtgacccctaagccagacagggttacactggggcgccatgtcgaacaactcgtggagtcagtgtttaagaactacgatccggaaggcaggggcacaataagccaagaggatttcgaacgtctgagcggaaattttccatttgcctgccatggcttacacccgccgccacgacagggtcggggctccttcagtcgcgaggaacttaccggctacttgctcagggcctccgcaatttgctccaagctcggcctggcatttttacatactttccacgaggtcacatttaggaaacctacattttgcgatagttgtagtggatttctgtggggggtcacaaagcaaggctatagatgcagagaatgcggactgtgctgtcacaagcattgccgggaccaagtgaaggtggaatgtaaaaaacgtccaggggccaaaggcgatgctggccccccaggagctcccgtgccctccacccccgcaccccatgctagttgcggtagtgaggagaaccactcatatacacttagtcttgaaccagaaacaggctgccaacttcgccatgcctggacacaaacagaatctccccacccctcttgggagacagacaccgttccctgcccagtcatggatccgccaagcaccgcgagcagcaaacttgacagctag

SEQ ID NO: 59690 - DNA, 1731 bp, Artificial Sequence
  derived and/or modified sequence
atgaacaggaaggacagcaagaggaagagccaccaggagtgcaccgggaagattggaggccggggccggccccggcaggtgcggcggcacaagacctgccccagcccccgggagatcagcaaggtgatggcctccatgaacctgggcctgctgtctgagggcggctgcagtgaagatgagctgctggagaagtgcatccagagctttgattctgctggcagcctgtgccacgaggaccacatgctgaacatggtgctggccatgcacagctgggtgctgcccagcgctgacctggccgcccggctgctgaccagctaccagaaggccaccggggacacccaggagctgcggcggctgcagatctgccacctggtgcgctactggctgatgaggcaccctgaggtgatgcaccaggacccccagctggaggaggtgattggccgcttctgggccaccgtggcccgggagggcaacagcgcccagaggcggctgggggacagcagtgacctgctgagccctgggggccctggcccccccctgcccatgagcagccctggcctgggcaagaagaggaaggtgtccctgctgtttgaccacctggagaccggggagctggcccagcacctgacctacctggagttccgctccttccaggccatcacagccctgctggagctgacagagctgctggccagccacaacaactatgcccgctacagaaggacctgggccggctgtgccggcttccggctgcctgtgctgggcgtgcacctgaaggacctggtgtccctgcacgaggcccagcctgaccggctgcctgatggccgcctgcacctgcccaagctgaacaacctgtacctgcggctgcaggagctggtggccctgcagggccagcaccccccctgcagcgccaatgaagacctgctgcacctgctgaccctgagcctggacctcttctacacagaagatgagatctatgagctgtcctatgcccgggagccccgctgccccaagagcctgccccccagccccttcaatgcccccctggtggtggagtgggcccctggggtgacccccaagccagacagagtgaccctgggcagacatgtggagcagctggtggagagcgtcttcaagaactatgaccctgagggccggggcaccatcagccaggaggactttgagcggctgagcggcaacttcccctttgcctgccacggcctgcaccccccaccccggcagggccggggcagcttcagccgggaggagctgaccggctacctgctgcgggccagcgccatctgcagcaagctgggcctggccttcctgcacaccttccacgaggtgaccttcaggaagcccaccttctgtgacagctgcagcggcttcctgtggggcgtgaccaagcagggctaccgctgccgggagtgtggcctgtgctgccacaagcactgccgggaccaggtgaaggtggagtgcaagaagaggcctggggccaagggagatgctggccccccaggggcccctgtgcccagcaccccagcccctcatgccagctgtggcagcgaggagaaccacagctacaccctgagcctggagcctgagaccggctgccagctgcggcatgcctggacccagacagagagcccccaccccagctgggagacagacacagtgccctgccctgtgatggacccccccagcacagccagcagcaagctggacagctag

SEQ ID NO: 59691 - DNA, 1731 bp, Artificial Sequence
  derived and/or modified sequence
atgaaccggaaggacagcaagcggaagagccaccaggagtgcaccggcaaaattggtggacgaggcagaccccggcaggtgcggaggcataagacctgtccatccccacgtgaaattagcaaagtaatggcaagtatgaatctggggctactgtcagagggagggtgtagtgaagacgagctgctggaaaagtgtattcagagctttgacagcgccggctcattatgtcacgaggaccatatgctcaatatggtcctcgcgatgcattcatgggttttaccaagcgccgatctcgccgcccgactgctgaccagttaccagaaggcgacaggggatactcaggaactgcgaaggctgcagatttgccacttagtccgttactggctcatgaggcatcccgaagtgatgcaccaggaccctcagctcgaggaagtgattggcagattctgggccacagtcgctcgcgaggggaactccgcgcagcggaggcttggcgacagcagcgacctcctctcccccggcgggccggggcccccattaccgatgtctagccccggcctgggaaagaagcgcaaagtgagcctgctgtttgatcatctggagaccggggagctagcacagcatctgacctacttagaattcagaagtttccaggccattacggcactcttagaactgaccgaactcttggcaagccacaacaactatgcgcggtacaggaggacctgggcggggtgtgctggctttaggttgcctgtgcttggagtgcatttgaaagacctggtctcgctccatgaagcacaaccagatcggcttcctgacggacggttacacttaccaaagcttaataatctctacctccgcctgcaggagttagtggctctccaaggccagcatcccccttgctccgcaaacgaggacctgctgcatctgctcaccctttctctggatctgttttacacagaggatgagatctatgaactgagctacgcgcgagaaccccgatgtccaaaaagcctgcccccgagccccttcaacgcccctctagtggtggaatgggctcctggcgtgacaccgaaaccagacagggttaccctcgggcggcacgtggagcagctcgtggagtctgtattcaagaattatgacccggaaggacgcggcactatctctcaggaggacttcgagcgactgagtgggaactttcctttcgcatgccatggcctgcacccgccacctagacagggtcggggctctttctcacgggaggagcttactgggtacctgctccgcgcttcagctatctgcagtaaactgggtctggcttttttgcatacttttcatgaggtcacattccgaaaacccaccttctgcgacagctgtagcggtttcctttggggagtgacaaaacaggggtaccggtgtcgggaatgcggcctgtgttgccataagcactgtagagatcaggtcaaagtggagtgtaaaaagcgtccgggcgccaaaggcgatgccggacccccgggcgccccagttcccagtactccagctccacacgcctcatgtggctctgaggagaatcactcttataccttgtccctggagcctgaaaccggctgccagctcaggcatgcatggacacaaactgagtcccctcatccaagctgggaaaccgacactgttccctgtcccgtaatggacccgccatccacggcttctagcaaactggattcttag

SEQ ID NO: 59692 - DNA, 1731 bp, Artificial Sequence
  derived and/or modified sequence
atgaaccgcaaggacagtaagaggaagtcacaccaggaatgtactggcaagattggcggacgtggacgcccacgccaggttcgacgacacaaaacgtgtccctcccccagagaaatatcaaaagtcatggcctctatgaatttgggcttactgagcgaggggggttgcagtgaggacgaactgctggaaaagtgcatccagtcctttgacagtgcgggttctctatgtcacgaagatcacatgctaaacatggtgctcgctatgcactcctgggtactccccagcgcggacctggcggcaaggcttttgaccagctaccagaaggccacaggcgacacccaggaactcaggcgactgcagatttgccatctcgttagatactggttaatgcgacatccagaagtgatgcaccaggatccacagctcgaggaggtgatcgggaggttctgggcgacagtggcgcgagagggcaattcggcgcaacggcgtctcggcgactccagcgacctcctttcaccgggtggtcctggtccaccactgcctatgtccagtcccggactggggaaaaaacggaaggtatctctcttgtttgatcatctcgagaccggagaactagcacagcacctcacgtacctcgagtttaggtcattccaggccatcacagccctgctggaactgacagagctactggcatctcacaacaactacgctaggtacaggcggacctgggcaggctgcgccggattcaggttaccagttcttggggttcatttgaaagacttagtgagtctccacgaagcccaacctgatcggctccccgatgggaggctgcacctgccgaaactcaataatctgtacctgcgtctgcaggagcttgtcgccctgcaaggacagcaccctccatgctcagcaaatgaggatcttctgcacctgctcactttgagcctggatctgttttacactgaggatgagatttacgaactcagctacgctcgcgagccccgatgccccaaatcattgcccccttctccatttaatgcacccctcgttgtggagtgggcgccaggagtgacaccaaagcccgatcgcgtaactttgggcaggcatgtggagcagctggttgaatcagtattcaagaactacgacccagaggggcgaggtaccatttctcaggaggacttcgagcggttgtctggtaatttcccctttgcctgtcatgggctacatcctccaccgcgtcaaggacgagggagtttcagtagagaggagcttactggctatttgctacgcgcttccgccatatgttcaaaattgggcctggcatttttgcacaccttccacgaggttacattccggaaacccacattctgcgactcttgctcggggttcttatggggggtgaccaaacagggttacagatgccgggagtgtggactttgttgccacaaacactgtcgcgaccaggtgaaggtggagtgcaaaaaaagacctggagccaagggtgatgctgggcctccaggcgctcctgtgccatccacccctgcccctcatgccagctgcggatccgaagagaaccattcatacacactgagcctcgaacccgagaccggatgccaattgcgtcacgcctggacccagaccgagtccccccatccctcctgggagactgatacggttccatgtcctgtcatggaccctccatcaacggcctcctctaagctcgatagctag

SEQ ID NO: 59693 - DNA, 2927 bp, Artificial Sequence
  derived and/or modified sequence
atccccgtgtgggggaggggggccttcggtctctccccagcctcttccttccccctggcctgagggtgggtggggaggggcagttcctctttccttcccaagcaccgaggaggccccagctccctaggggctgagaagctggagtcctgggcaaggggaggagctgagccctactcttgcaagacccccggcctcctcaccccacgcgggaagcatgaacagaaaagacagtaagaggaagtcccaccaggaatgcaccggaaaaataggagggcgaggccggccccgccaagtgcgccgccacaagacatgccccagccctcgggaaatcagcaaggtcatggcttccatgaacctgggcctgctgagtgagggcggctgcagcgaagatgagctgctggagaaatgcatccagtccttcgattcagctggcagcctgtgccacgaggaccacatgctcaacatggtgctggccatgcacagctgggtgctgccgtccgccgacctggctgcccgcctgctgacctcataccagaaggccacaggggacacccaggagctgagacggctgcagatctgtcacctggtcaggtactggctgatgcgacaccctgaggtgatgcaccaggatccccagctagaagaagtcataggtcgtttctgggccaccgtggcccgggagggcaactcagcccagagaagactgggagactcttctgacctcctgagccctggtggccctggccccccactcccaatgagcagcccaggcctgggcaaaaagcgcaaagtgtccttgcttttcgaccacttggagacgggggagctggctcagcacctcacctacctggagttccggtccttccaggctatcacggccctcctggagctcactgagctccttgcctcccacaacaactacgcccgctaccgccgcacctgggctggctgcgcgggtttccggctgcctgtactgggcgtgcacctcaaggacctggtgtccctgcatgaggcacagcccgacaggttgcctgacggccgcctgcacctacccaagctgaacaacctctacctgcggctgcaggagctggtggccctccaagggcagcatccaccctgcagcgccaatgaggatctgctgcacctgctcacgctctccctggacctcttctacacggaagacgagatctatgagctttcttatgcccgggagccgcgttgtcccaagagcctgccaccctcccccttcaatgcacctctggtggtggagtgggcccctggtgtgacacccaagccggacagggtcacactgggtcggcatgtggagcagctggtggagtctgtgttcaagaattatgaccctgaaggccgaggaacaatctctcaggaggactttgagcgactctcgggcaattttcccttcgcctgccatgggcttcacccacccccacgccaggggagaggatccttcagcagagaggagctgacagggtacctgctccgggccagcgccatctgctccaagttgggcctggccttcctgcacaccttccatgaggtcaccttccgaaagcctaccttctgcgacagctgcagtggcttcctctggggtgtcaccaagcaaggctaccgctgtcgggagtgcgggctgtgttgccacaaacactgcagagaccaggtgaaggtagaatgtaagaagaggccaggggccaagggcgatgcaggaccccccggagctcctgtcccatccacaccagctccccatgccagctgtggctccgaggaaaatcactcctacacgctatccctggagcctgagactgggtgccagcttcgccatgcctggacccagactgaatccccacacccttcctgggaaacagatacggtcccctgcccggtgatggacccaccatcaactgcatcctccaagctggattcctagacatctcttggtctcctctcttcctcactcccttcccccagtcagtcctgagtcctgccgtcagactctggcagggctcccagaggtaggcctccagaggcatccgccttcccatccacactgcctttagtggtacgtccgtcatctttttccctggaagtgactttcctcttttgcatcctggtggatgctaatcctgctccctttccctgcacttagtatctgtgcggctgtgtgttggatacatttagactcaggcctcattctaccaactccctacatctccatttctttttttttttgagacagagtcttgctctgtcacccaggctggagtgcaatgatgcaatctcagctcactgcaacttccgcctcctgggttcaagtgattcttctgcctcagcctcccaagtagctgggattacaggcacgcgccaccatgcccggctaatttttgtatttttagtagagacggggtttccccatgttggccaagatggtctcaaactcctgacctcatgatccaccagcctcagcctcccaaagtgctgggaatacaggcgtgagccaccacgcccagctcctgtttttctgcatagaatgtgctccctctgacagcctatactttttccctctttatctcgttgaacgtctgtctttcctcaacaggagcatcaactccaggagaacagggatttctatcaatgtcattcactgctgcatccccagtgcctagaacagggctggcaggtggtaggcgcctgacagatgcttgtctgatgcctgaatgtctccttacccatgcccacggcacaggatagatgtgctatagggcaaagaactttgagggtcgagcagcaggggcccattcagtcccagggagcagagacccccccaaccccttcacaaaccccaacacccctgacttggcccccacagagagaggtcctacagctgtcataaattaaatttattctctgga

SEQ ID NO: 59694 - DNA, 1731 bp, Artificial Sequence
  derived and/or modified sequence
atgaacagaaaggacagcaagagaaagagccaccaggagtgcaccggcaagatcggcggcagaggcagacccagacaggtgagaagacacaagacctgccccagccccagagagatcagcaaggtgatggccagcatgaacctgggcctgctgagcgagggcggctgcagcgaggacgagctgctggagaagtgcatccagagcttcgacagcgccggcagcctgtgccacgaggaccacatgctgaacatggtgctggccatgcacagctgggtgctgcccagcgccgacctggccgccagactgctgaccagctaccagaaggccaccggcgacacccaggagctgagaagactgcagatctgccacctggtgagatactggctgatgagacaccccgaggtgatgcaccaggacccccagctggaggaggtgatcggcagattctgggccaccgtggccagagagggcaacagcgcccagagaagactgggcgacagcagcgacctgctgagccccggcggccccggcccccccctgcccatgagcagccccggcctgggcaagaagagaaaggtgagcctgctgttcgaccacctggagaccggcgagctggcccagcacctgacctacctggagttcagaagcttccaggccatcaccgccctgctggagctgaccgagctgctggccagccacaacaactacgccagatacagaagaacctgggccggctgcgccggcttcagactgcccgtgctgggcgtgcacctgaaggacctggtgagcctgcacgaggcccagcccgacagactgcccgacggcagactgcacctgcccaagctgaacaacctgtacctgagactgcaggagctggtggccctgcagggccagcaccccccctgcagcgccaacgaggacctgctgcacctgctgaccctgagcctggacctgttctacaccgaggacgagatctacgagctgagctacgccagagagcccagatgccccaagagcctgccccccagccccttcaacgcccccctggtggtggagtgggcccccggcgtgacccccaagcccgacagagtgaccctgggcagacacgtggagcagctggtggagagcgtgttcaagaactacgaccccgagggcagaggcaccatcagccaggaggacttcgagagactgagcggcaacttccccttcgcctgccacggcctgcaccccccccccagacagggcagaggcagcttcagcagagaggagctgaccggctacctgctgagagccagcgccatctgcagcaagctgggcctggccttcctgcacaccttccacgaggtgaccttcagaaagcccaccttctgcgacagctgcagcggcttcctgtggggcgtgaccaagcagggctacagatgcagagagtgcggcctgtgctgccacaagcactgcagagaccaggtgaaggtggagtgcaagaagagacccggcgccaagggcgacgccggcccccccggcgcccccgtgcccagcacccccgccccccacgccagctgcggcagcgaggagaaccacagctacaccctgagcctggagcccgagaccggctgccagctgagacacgcctggacccagaccgagagcccccaccccagctgggagaccgacaccgtgccctgccccgtgatggacccccccagcaccgccagcagcaagctggacagctag

SEQ ID NO: 59695 - protein, 950 aa, Artificial Sequence
  derived and/or modified sequence
MSYILKMPGTCLPGEGTTYELPPSSLHPSSAPVTSGGTCPALLTEAGWEAPIMAFTEAASAVGPSWTHSRASVSSTVKTERRRRVLQACGMVRRGQQVFLKPDEPPPPPQPCADSLQDALLSLGSVIDISGLQRAVKEALSAVLPRVETVYTYLLDGESQLVCEDPPHELPQEGKVREAIISQKRLGCNGLGFSDLPGKPLARLVAPLAPDTQVLVMPLADKEAGAVAAVILVHCGQLSDNEEWSLQAVEKHTLVALRRVQVLQQRGPREAPRAVQNPPEGTAEDQKGGAAYTDRDRKILQLCGELYDLDASSLQLKVLQYLQQETRASRCCLLLVSEDNLQLSCKVIGDKVLGEEVSFPLTGCLGQVVEDKKSIQLKDLTSEDVQQLQSMLGCELQAMLCVPVISRATDQVVALACAFNKLEGDLFTDEDEHVIQHCFHYTSTVLTSTLAFQKEQKLKCECQALLQVAKNLFTHLDDVSVLLQEIITEARNLSNAEICSVFLLDQNELVAKVFDGGVVDDESYEIRIPADQGIAGHVATTGQILNIPDAYAHPLFYRGVDDSTGFRTRNILCFPIKNENQEVIGVAELVNKINGPWFSKFDEDLATAFSIYCGISIAHSLLYKKVNEAQYRSHLANEMMMYHMKVSDDEYTKLLHDGIQPVAAIDSNFASFTYTPRSLPEDDTSMAILSMLQDMNFINNYKIDCPTLARFCLMVKKGYRDPPYHNWMHAFSVSHFCYLLYKNLELTNYLEDIEIFALFISCMCHDLDHRGTNNSFQVASKSVLAALYSSEGSVMERHHFAQAIAILNTHGCNIFDHFSRKDYQRMLDLMRDIILATDLAHHLRIFKDLQKMAEVGYDRNNKQHHRLLLCLLMTSCDLSDQTKGWKTTRKIAELIYKEFFSQGDLEKAMGNRPMEMMDREKAYIPELQISFMEHIAMPIYKLLQDLFPKA

SEQ ID NO: 59696 - protein, 932 aa, Artificial Sequence
  derived and/or modified sequence
MKKQRIQEGKSLAHRRGQQVFLKPDEPPPPPQPCADSLQDALLSLGSVIDISGLQRAVKEALSAVLPRVETVYTYLLDGESQLVCEDPPHELPQEGKVREAIISQKRLGCNGLGFSDLPGKPLARLVAPLAPDTQVLVMPLADKEAGAVAAVILVHCGQLSDNEEWSLQAVEKHTLVALRRVQVLQQRGPREAPRAVQNPPEGTAEDQKGGAAYTDRDRKILQLCGELYDLDASSLQLKVLQYLQQETRASRCCLLLVSEDNLQLSCKVIGDKVLGEEVSFPLTGCLGQVVEDKKSIQLKDLTSEDVQQLQSMLGCELQAMLCVPVISRATDQVVALACAFNKLEGDLFTDEDEHVIQHCFHYTSTVLTSTLAFQKEQKLKCECQALLQVAKNLFTHLDDVSVLLQEIITEARNLSNAEICSVFLLDQNELVAKVFDGGVVDDESYEIRIPADQGIAGHVATTGQILNIPDAYAHPLFYRGVDDSTGFRTRNILCFPIKNENQEVIGVAELVNKINGPWFSKFDEDLATAFSIYCGISIAHSLLYKKVNEAQYRSHLANEMMMYHMKVSDDEYTKLLHDGIQPVAAIDSNFASFTYTPRSLPEDDTSMAILSMLQDMNFINNYKIDCPTLARFCLMVKKGYRDPPYHNWMHAFSVSHFCYLLYKNLELTNYLEDIEIFALFISCMCHDLDHRGTNNSFQVASKSVLAALYSSEGSVMERHHFAQAIAILNTHGCNIFDHFSRKDYQRMLDLMRDIILATDLAHHLRIFKDLQKMAEVGYDRNNKQHHRLLLCLLMTSCDLSDQTKGWKTTRKIAELIYKEFFSQGDLEKAMGNRPMEMMDREKAYIPELQISFMEHIAMPIYKLLQDLFPKAAELYERVASNREHWTKVSHKFTIRGLPSNNSLDFLDEEYEVPDLDGTRAPINGCCSLDAE

SEQ ID NO: 59697 - DNA, 2799 bp, Artificial Sequence
  derived and/or modified sequence
atgaagaagcagagaatccaggagggcaagagcctggcccacagaagaggccagcaggtgttcctgaagcccgacgagccccccccccccccccagccctgcgccgacagcctgcaggacgccctgctgagcctgggcagcgtgatcgacatcagcggcctgcagagagccgtgaaggaggccctgagcgccgtgctgcccagagtggagaccgtgtacacctacctgctggacggcgagagccagctggtgtgcgaggaccccccccacgagctgccccaggagggcaaggtgagagaggccatcatcagccagaagagactgggctgcaacggcctgggcttcagcgacctgcccggcaagcccctggccagactggtggcccccctggcccccgacacccaggtgctggtgatgcccctggccgacaaggaggccggcgccgtggccgccgtgatcctggtgcactgcggccagctgagcgacaacgaggagtggagcctgcaggccgtggagaagcacaccctggtggccctgagaagagtgcaggtgctgcagcagagaggccccagagaggcccccagagccgtgcagaacccccccgagggcaccgccgaggaccagaagggcggcgccgcctacaccgacagagacagaaagatcctgcagctgtgcggcgagctgtacgacctggacgccagcagcctgcagctgaaggtgctgcagtacctgcagcaggagaccagagccagcagatgctgcctgctgctggtgagcgaggacaacctgcagctgagctgcaaggtgatcggcgacaaggtgctgggcgaggaggtgagcttccccctgaccggctgcctgggccaggtggtggaggacaagaagagcatccagctgaaggacctgaccagcgaggacgtgcagcagctgcagagcatgctgggctgcgagctgcaggccatgctgtgcgtgcccgtgatcagcagagccaccgaccaggtggtggccctggcctgcgccttcaacaagctggagggcgacctgttcaccgacgaggacgagcacgtgatccagcactgcttccactacaccagcaccgtgctgaccagcaccctggccttccagaaggagcagaagctgaagtgcgagtgccaggccctgctgcaggtggccaagaacctgttcacccacctggacgacgtgagcgtgctgctgcaggagatcatcaccgaggccagaaacctgagcaacgccgagatctgcagcgtgttcctgctggaccagaacgagctggtggccaaggtgttcgacggcggcgtggtggacgacgagagctacgagatcagaatccccgccgaccagggcatcgccggccacgtggccaccaccggccagatcctgaacatccccgacgcctacgcccaccccctgttctacagaggcgtggacgacagcaccggcttcagaaccagaaacatcctgtgcttccccatcaagaacgagaaccaggaggtgatcggcgtggccgagctggtgaacaagatcaacggcccctggttcagcaagttcgacgaggacctggccaccgccttcagcatctactgcggcatcagcatcgcccacagcctgctgtacaagaaggtgaacgaggcccagtacagaagccacctggccaacgagatgatgatgtaccacatgaaggtgagcgacgacgagtacaccaagctgctgcacgacggcatccagcccgtggccgccatcgacagcaacttcgccagcttcacctacacccccagaagcctgcccgaggacgacaccagcatggccatcctgagcatgctgcaggacatgaacttcatcaacaactacaagatcgactgccccaccctggccagattctgcctgatggtgaagaagggctacagagaccccccctaccacaactggatgcacgccttcagcgtgagccacttctgctacctgctgtacaagaacctggagctgaccaactacctggaggacatcgagatcttcgccctgttcatcagctgcatgtgccacgacctggaccacagaggcaccaacaacagcttccaggtggccagcaagagcgtgctggccgccctgtacagcagcgagggcagcgtgatggagagacaccacttcgcccaggccatcgccatcctgaacacccacggctgcaacatcttcgaccacttcagcagaaaggactaccagagaatgctggacctgatgagagacatcatcctggccaccgacctggcccaccacctgagaatcttcaaggacctgcagaagatggccgaggtgggctacgacagaaacaacaagcagcaccacagactgctgctgtgcctgctgatgaccagctgcgacctgagcgaccagaccaagggctggaagaccaccagaaagatcgccgagctgatctacaaggagttcttcagccagggcgacctggagaaggccatgggcaacagacccatggagatgatggacagagagaaggcctacatccccgagctgcagatcagcttcatggagcacatcgccatgcccatctacaagctgctgcaggacctgttccccaaggccgccgagctgtacgagagagtggccagcaacagagagcactggaccaaggtgagccacaagttcaccatcagaggcctgcccagcaacaacagcctggacttcctggacgaggagtacgaggtgcccgacctggacggcaccagagcccccatcaacggctgctgcagcctggacgccgagtag

SEQ ID NO: 59698 - DNA, 2799 bp, Artificial Sequence
  derived and/or modified sequence
atgaaaaagcagagaattcaggagggcaaatcccttgctcatcgcaggggacagcaggtgttcctgaaacccgatgagccccctccacccccccaaccctgcgccgatagtctgcaggatgcactgctgtccttagggtccgttatcgatatttctggcctgcaacgggcagtgaaggaggcactctctgctgtgttgccccgagtcgagaccgtgtatacatacctgttagacggcgagagtcaactcgtgtgtgaggaccctccacatgaactaccacaggagggtaaggttcgggaagccataatatcccagaagagactgggatgtaacgggctgggcttctctgacttgccaggcaagccattggccaggctggtggcacctctggcccccgatactcaggtgctggtgatgccactggccgacaaagaagcaggggctgtggccgcggttattctagtgcactgcggccaattgtctgacaatgaggaatggagcttgcaggcggtggagaagcatacgttggtcgccttaaggagggtgcaggtgctacagcaacgcgggcccagagaagctcctagggccgtacagaaccccccggagggaacggctgaggatcaaaagggcggtgccgcatatactgaccgtgaccgaaaaattcttcagctttgtggggagctgtatgacctggacgcctcctctctacagcttaaagtgctgcagtacctccaacaagaaacaagggcatctaggtgttgtctgttactggtgtctgaggataatctacaactgagctgcaaggtgatcggcgacaaggtgttgggcgaggaggtctcatttcccctcacagggtgtttggggcaggtcgtggaggacaagaagtccatacagctgaaagatcttacgtccgaagatgtacagcaactgcagagtatgctggggtgcgaactccaagctatgttatgcgtccctgtgataagccgggctactgatcaggtggtggccctcgcctgtgcttttaacaagctagaaggcgatcttttcaccgacgaagacgagcacgtgatccagcattgtttccactacacttccacagtcttgacctccacgcttgcgtttcagaaagagcaaaagctgaagtgcgaatgtcaggctctgttacaggtggccaagaatctattcacccatctcgacgacgtgtcagtacttcttcaggagattatcacagaagctaggaacttgagcaacgcggaaatctgctccgtttttctgctggatcaaaatgagctggtagcgaaggtgtttgatggtggggttgtcgacgatgaatcttacgagatccggatcccagctgaccaaggaatcgccggtcatgtcgccacaaccggccagatactgaacatccccgatgcctatgcccatcccctcttctaccggggagtggacgattctacaggttttaggacaaggaatattctttgttttccaattaaaaatgagaaccaagaggtcattggagttgcagagctcgtaaacaaaatcaacggcccatggttcagcaagtttgacgaggatttagccacagccttttctatctactgcggcatctcgatcgcacactcacttttgtacaagaaggttaatgaagcccaatataggtcacacttagcaaacgaaatgatgatgtatcacatgaaggtgtcagacgacgagtacaccaaactactacacgatggaatccagccagtcgcagctattgattctaactttgcttcatttacttacacccccaggtcactgcccgaggacgacacttcgatggccatactgagtatgttgcaggatatgaactttattaataattataagatcgattgccccactctggccaggttctgcctcatggttaaaaaggggtaccgggatcctccttatcacaattggatgcatgccttttcagtctctcacttttgctatttgctgtataaaaaccttgagttgactaactatttagaagacatcgagatctttgctctgtttataagttgtatgtgtcatgacctcgaccacagaggcactaataacagctttcaggttgcctccaagtccgtccttgcggctctgtactcatccgaaggctccgtcatggagaggcaccatttcgcacaggctattgcaattctcaatactcacgggtgtaatatattcgaccacttctctcgcaaagactaccaaagaatgctggacctgatgcgtgacattatcttagcgactgaccttgcccatcacctgcggatattcaaagatttacaaaaaatggcggaggtgggatatgaccgcaataataaacagcatcatcgtctactgctctgtcttctgatgacatcttgcgacttatctgaccagactaaggggtggaagacaacacggaaaatcgctgagctcatctacaaggagttcttctcacagggagaccttgagaaggccatgggcaatcgccccatggagatgatggatagggagaaagcctacatcccagagctgcagatctctttcatggagcatattgcaatgcccatttacaagctactgcaagatctgtttcctaaggctgctgaactttacgagagggtcgcctctaatagagagcattggaccaaagtgtctcataaatttactataagaggcctgccgtcaaataatagcttagacttcttggatgaagagtacgaggtaccagacttagatggaactagagcacccattaacggatgttgctcgctggacgccgaatag

SEQ ID NO: 59699 - DNA, 2799 bp, Artificial Sequence
  derived and/or modified sequence
atgaagaagcagaggatccaggagggcaagagcctggcccacagaagaggccagcaggtgttcctgaagccagatgagcccccacctccaccccagccctgtgccgacagcctgcaggatgccctgctgagcctgggctctgtgattgacatcagcggcctgcagagagctgtgaaggaggccctgtctgctgtgctgccccgggtggagaccgtgtacacctacctgctggatggagagagccagctggtgtgtgaggacccccctcatgagctgccccaggagggcaaggtgcgggaggccatcatcagccagaagaggctgggctgcaatggcctgggcttcagtgacctgcccgggaagcccctggcccggctggtggcccccctggccccagacacccaggtgctggtgatgcccctggccgacaaggaggccggggctgtggccgctgtgatcctggtgcactgcggccagctgagtgacaatgaggagtggagcctgcaggccgtggagaagcacaccctggtggccctgcggcgggtgcaggtgctgcagcagaggggcccccgggaggcccccagggctgtgcagaaccccccagagggcacagctgaggaccagaagggcggggccgcctacacagaccgggacaggaagatcctgcagctgtgtggggagctgtatgacctggatgccagcagcctgcagctgaaggtgctgcagtacctgcagcaggagacccgggccagccgctgctgcctgctgctggtgtctgaggacaacctgcagctgagctgcaaggtgattggagacaaggtgctgggggaggaggtgtccttccccctgaccggctgcctgggccaggtggtggaggacaagaagagcatccagctgaaggacctgaccagtgaagatgtgcagcagctgcagagcatgctgggctgtgagctgcaggccatgctgtgtgtgcctgtgatcagccgggccacagaccaggtggtggccctggcctgtgccttcaacaagctggagggggacctcttcacagatgaagatgaacatgtgatccagcactgcttccactacaccagcacagtgctgaccagcaccctggccttccagaaggagcagaagctgaagtgtgagtgccaggccctgctgcaggtggccaagaacctcttcacccacctggatgatgtgtctgtgctgctgcaggagatcatcacagaggccaggaacctgagcaatgctgagatctgcagcgtcttcctgctggaccagaatgagctggtggccaaggtgtttgatggaggagtggtggatgatgagagctatgagatccgcatcccagctgaccagggcattgctggccacgtggccaccaccggccagatcctgaacatcccagatgcctatgcccaccccctcttctacagaggagtggatgacagcacaggcttccgcaccaggaacatcctgtgcttccccatcaagaatgaaaaccaggaggtgattggagtggccgagctggtgaacaagatcaatggcccctggttcagcaagtttgatgaggacctggccacagccttcagcatctactgcggcatcagcatcgcccacagcctgctgtacaagaaggtgaatgaggcccagtaccgcagccacctggccaatgagatgatgatgtaccacatgaaggtgtctgatgatgagtacaccaagctgctgcatgatggcatccagcctgtggccgccatcgacagcaactttgccagcttcacctacacccccaggagcctgcctgaagatgacacctccatggccatcctgtccatgctgcaggacatgaacttcatcaacaactacaagattgactgccccaccctggcccgcttctgcctgatggtgaagaagggctacagagaccccccctaccacaactggatgcacgccttctctgtgagccacttctgctacctgctgtacaagaacctggagctgaccaactacctggaggacatcgagatctttgccctcttcatcagctgcatgtgccacgacctggaccaccggggcaccaacaacagcttccaggtggccagcaagtctgtgctggccgccctgtacagcagcgagggctctgtgatggagcggcaccactttgcccaggccatcgccatcctgaacacccacggctgcaacatctttgaccacttcagcaggaaggactaccagaggatgctggacctgatgagggacatcatcctggccacagacctggcccaccacctgcgcatcttcaaggacctgcagaagatggccgaggtgggctatgacaggaacaacaagcagcaccaccggctgctgctgtgcctgctgatgaccagctgtgacctgagtgaccagaccaagggctggaagaccaccaggaagattgctgagctgatctacaaggagttcttcagccagggcgacctggagaaggccatgggcaaccggcccatggagatgatggaccgggagaaggcctacatccctgagctgcagatctccttcatggagcacatcgccatgcccatctacaagctgctgcaggacctcttccccaaggctgctgagctgtatgaaagagtggccagcaaccgggagcactggaccaaggtgagccacaagttcaccatccggggcctgcccagcaacaacagcctggacttcctggatgaggagtatgaggtgcctgacctggatggcacccgggcccccatcaatggctgctgcagcctggatgctgagtag

SEQ ID NO: 59700 - DNA, 2799 bp, Artificial Sequence
  derived and/or modified sequence
atgaagaagcagcggatccaggagggcaagagcctggcccaccggcggggacagcaagtgttcttgaaaccagatgagcccccgcccccaccccagccctgtgccgactccctgcaggatgccttgttgtccctggggtccgtcattgacatctccggcctccaacgcgctgtgaaagaggccctttcagcagtgctgcctcgagtcgagaccgtctacacatatctattagacggggagagccagttagtgtgtgaggaccctccccatgagcttcctcaggaaggcaaggtgcgtgaggccatcattagtcaaaagcgacttggctgtaacgggctgggtttttcggacctcccgggcaaaccattggctcgactggtagccccgctcgcccccgacacgcaagtgctggtcatgcctctggccgataaggaggccggggccgtcgcagccgttatactggtccactgtggtcagttgagtgacaatgaggagtggtccctgcaggctgtggagaagcacacccttgtggcgctgagaagagttcaagtgctccagcagcggggtcccagagaagccccacgggccgtgcagaatccccctgaggggactgctgaagatcagaaaggcggcgcagcatatacagacagggatcgaaaaattctgcaactgtgtggggagctctatgatctcgacgcatccagtctgcagttgaaggttctgcagtacctccagcaagagactcgcgcctcccgttgctgcttattgctggtttctgaggacaacctacagctctcttgcaaggtaattggtgataaagtgctaggggaggaggtgagttttccactgacagggtgtctgggacaggtggtggaggataagaaaagtatccagctcaaggatctgacctccgaggacgtgcagcagctgcagagtatgctaggttgcgagctgcaggctatgctttgcgtcccagtgatatcacgagcaaccgatcaagtggtggctctcgcctgtgcctttaacaagctggagggcgatctctttacagatgaggatgaacatgtgatccagcactgcttccactacacctcaacagtgctcaccagcacacttgcattccagaaggaacagaagctcaagtgtgaatgccaggcactgctgcaggtcgcaaaaaacctgttcacccatctcgacgacgtgtccgttttacttcaagagattattacagaggcacgcaacctaagcaatgcggaaatttgcagcgtcttcttgctcgaccaaaacgaactcgtggccaaggtcttcgacggcggcgtcgtcgatgatgaatcttatgagatcaggatcccagcagatcagggcatcgccgggcacgttgccacaacaggccagatcctcaacatacccgatgcatatgcccaccctctgttctaccgaggtgttgatgactcaactgggttcaggacacgcaatatattgtgttttcctatcaaaaatgagaaccaagaagttatcggggttgctgagttagtgaataagattaacggtccatggttctccaaatttgacgaagatctcgcgaccgcgttcagtatttattgcggcattagtatcgctcattcgttactctataagaaagtgaatgaagcccaatatagatcccacctggcaaacgagatgatgatgtatcacatgaaggtctccgacgatgagtacaccaaactgctgcacgacggaattcaacctgtggccgccatcgatagcaatttcgcttcgtttacgtacacaccgagatcccttccagaggatgatacctcaatggccattctgtctatgttgcaggatatgaacttcatcaataactacaagattgattgccctaccctggcacggttttgcttgatggttaaaaaaggatatcgagatccgccgtaccacaattggatgcatgctttcagcgtttcccacttttgctacctgctgtataagaatctcgagcttacaaactatctggaagacatcgagatatttgctttgtttatctcctgtatgtgccatgacctggatcaccgcggcactaacaactcatttcaggtcgcctcaaaatctgttttggcggccctgtattctagcgaggggtcggtaatggagagacatcattttgctcaggcaattgcaatcctgaatactcacgggtgtaacatctttgatcacttctcacgcaaggattatcagcgcatgttggatctgatgagggacatcattttggcaacagatctcgctcaccatttgagaattttcaaagacctgcaaaaaatggccgaggtgggatatgaccgaaacaacaaacagcaccaccgtcttcttttgtgcttattgatgacttcatgtgatttaagcgatcagaccaaagggtggaaaacgactaggaagatcgccgagctcatttacaaggaatttttcagtcagggagacctggaaaaggcgatgggtaacagacccatggagatgatggacagggaaaaagcttacatacccgagctgcagatttctttcatggaacatatcgctatgccgatctacaaactcctccaagacctctttcccaaggctgcagagctctacgagcgggtggctagtaaccgggaacattggactaaagtatcccacaagtttaccattcggggcctcccatcaaacaattctcttgattttctggacgaggaatatgaggttccagacctggatggaacacgcgcacccattaacggatgttgttcgctagacgcagagtag

SEQ ID NO: 59701 - DNA, 4041 bp, Artificial Sequence
  derived and/or modified sequence
atgaagaaacagaggatccaggaggggaaatcgcttgcccacaggcggggccagcaggtcttcctcaagccggacgagccgccgccgccgccgcagccatgcgccgacagcctgcaggacgccttgctgagtctgggctctgtcatcgacatttcaggcctgcaacgtgctgtcaaggaggccctgtcagctgtgctcccccgagtggaaactgtctacacctacctactggatggtgagtcccagctggtgtgtgaggaccccccacatgagctgccccaggaggggaaagtccgggaggctatcatctcccagaagcggctgggctgcaatgggctgggcttctcagacctgccagggaagcccttggccaggctggtggctccactggctcctgatacccaagtgctggtcatgccgctagcggacaaggaggctggggccgtggcagctgtcatcttggtgcactgtggccagctgagtgataatgaggaatggagcctgcaggcggtggagaagcataccctggtcgccctgcggagggtgcaggtcctgcagcagcgcgggcccagggaggctccccgagccgtccagaaccccccggaggggacggcggaagaccagaagggcggggcggcgtacaccgaccgcgaccgcaagatcctccaactgtgcggggaactctacgacctggatgcctcttccctgcagctcaaagtgctccaatacctgcagcaggagacccgggcatcccgctgctgcctcctgctggtgtcggaggacaatctccagctttcttgcaaggtcatcggagacaaagtgctcggggaagaggtcagctttcccttgacaggatgcctgggccaggtggtggaagacaagaagtccatccagctgaaggacctcacctccgaggatgtacaacagctgcagagcatgttgggctgtgagctgcaggccatgctctgtgtccctgtcatcagccgggccactgaccaggtggtggccttggcctgcgccttcaacaagctagaaggagacttgttcaccgacgaggacgagcatgtgatccagcactgcttccactacaccagcaccgtgctcaccagcaccctggccttccagaaggaacagaaactcaagtgtgagtgccaggctcttctccaagtggcaaagaacctcttcacccacctggatgacgtctctgtcctgctccaggagatcatcacggaggccagaaacctcagcaacgcagagatctgctctgtgttcctgctggatcagaatgagctggtggccaaggtgttcgacgggggcgtggtggatgatgagagctatgagatccgcatcccggccgatcagggcatcgcgggacacgtggcgaccacgggccagatcctgaacatccctgacgcatatgcccatccgcttttctaccgcggcgtggacgacagcaccggcttccgcacgcgcaacatcctctgcttccccatcaagaacgagaaccaggaggtcatcggtgtggccgagctggtgaacaagatcaatgggccatggttcagcaagttcgacgaggacctggcgacggccttctccatctactgcggcatcagcatcgcccattctctcctatacaaaaaagtgaatgaggctcagtatcgcagccacctggccaatgagatgatgatgtaccacatgaaggtctccgatgatgagtataccaaacttctccatgatgggatccagcctgtggctgccattgactccaattttgcaagtttcacctatacccctcgttccctgcccgaggatgacacgtccatggccatcctgagcatgctgcaggacatgaatttcatcaacaactacaaaattgactgcccgaccctggcccggttctgtttgatggtgaagaagggctaccgggatcccccctaccacaactggatgcacgccttttctgtctcccacttctgctacctgctctacaagaacctggagctcaccaactacctcgaggacatcgagatctttgccttgtttatttcctgcatgtgtcatgacctggaccacagaggcacaaacaactctttccaggtggcctcgaaatctgtgctggctgcgctctacagctctgagggctccgtcatggagaggcaccactttgctcaggccatcgccatcctcaacacccacggctgcaacatctttgatcatttctcccggaaggactatcagcgcatgctggatctgatgcgggacatcatcttggccacagacctggcccaccatctccgcatcttcaaggacctccagaagatggctgaggtgggctacgaccgaaacaacaagcagcaccacagacttctcctctgcctcctcatgacctcctgtgacctctctgaccagaccaagggctggaagactacgagaaagatcgcggagctgatctacaaagaattcttctcccagggagacctggagaaggccatgggcaacaggccgatggagatgatggaccgggagaaggcctatatccctgagctgcaaatcagcttcatggagcacattgcaatgcccatctacaagctgttgcaggacctgttccccaaagcggcagagctgtacgagcgcgtggcctccaaccgtgagcactggaccaaggtgtcccacaagttcaccatccgcggcctcccaagtaacaactcgctggacttcctggatgaggagtacgaggtgcctgatctggatggcactagggcccccatcaatggctgctgcagccttgatgctgagtgatcccctccagggacacttccctgcccaggccacctcccacagccctccactggtctggccagatgcactgggaacagagccacgggtcctgggtcctagaccaggacttcctgtgtgaccctggacaagtactaccttcctgggcctcagctttctcgtctgtataatggaagcaagacttccaacctcacggagactttgtaatttgttttctgagagcacaggggtgaccaatgagcagtgggccctactctgcacctctgaccacaccttggcaagtctttcccaagccattctttgtctgagcagcttgatggtttctccttgccccatttctgccccaccagatctttgctcctttccctttgaggactcccaccctttggggtctccaggatcctcatggaaggggaaggtgagacatctgagtgagcagagtgtggcatcttggaaacagtccttagttctgtgggaggactagaaacagccgcggggcgaaggccccctgaggaccactactatactgatggtgggattgggacctgggggatacaggggccccaggaagaagctgccagaggggcagctcagtgctctgcagagaggggccctggggagaagcaggatgggattgatgggcaggagggatccccgcactgggagacaggcccaggtatgaatgagccagccatgcttcctcctgcctgtgtgacgctgggcgagtctcttcccctgtctgggccaaacagggagcgggtaagacaatccatgctctaagatccattttagatcaatgtctaaaatagctctatcgctctgcggagtcccagcagaggctatggaatgtttctgcaaccctaaggcacagagagcccaaccctgagtgtctcagaggccccctgagtgttccccttggcctgagccccttacccattcctgcagccagtgagagacctggcctcagccctggcagggctctctcttcaaggccatatccacctgtgccctggggcttgggagaccccatagggccgggactcttgggtcagcccggccactggcttctctctttttctctgtttcattctgtgtgcgttgtggggtgggggagggggtccacctgccttacctttctgagttgcctttagagagatgcgtttttctaggactctgtgcaactgtcgtatatggtcccgtgggctgaccgctttgtacatgagaataaatctatttctttctacc

SEQ ID NO: 59702 - DNA, 2799 bp, Artificial Sequence
  derived and/or modified sequence
atgaagaaacaaaggatccaggaaggaaagtctctggctcatcgaagaggtcagcaggtgttcttgaagcctgacgaacctccacctccgccacagccctgcgccgacagcctgcaggacgctctgttgtccttaggatccgtaatcgacatcagcggactgcaaagagccgtaaaagaagcattaagtgccgtgctgccacgcgtagagaccgtctacacatatttactggatggcgagagccagctcgtgtgcgaagacccaccccatgagctgccccaggaaggcaaggtccgtgaagctatcatttcccagaagagactaggatgtaacggactgggcttttccgatctgccgggtaaacccctagcccgattggttgccccactcgcccctgatacccaagtgttggtgatgcccttggccgataaggaggctggcgctgtagctgctgtgattctggtgcactgcggacagctgtctgataatgaagagtggtcactgcaggccgttgagaaacacacactcgtggccttacgcagagtgcaggtgctgcagcagcgcggacccagagaggcaccgcgagccgttcagaatcctcccgaggggaccgctgaggatcagaagggaggcgctgcctacacagatagagatcggaaaatcctgcagttatgcggtgagttgtatgatctcgacgccagcagcctccagttaaaggtgctgcagtatttacagcaggaaacacgcgcatctcgctgctgcttactactggtgtccgaagacaacctgcagctgagctgtaaggtgattggggacaaggtgcttggcgaggaagtcagctttccgcttacgggctgcttgggacaagtcgtggaagacaagaagagtatccagttaaaagatctgacaagtgaggatgtgcagcagttacaatcaatgctcggatgcgaactccaagctatgctctgcgtgccagttatcagccgtgccaccgaccaggtggtagccctggcctgcgcattcaacaagctcgagggagatctgtttactgatgaggatgaacatgtcatccagcactgcttccactatacatcaacagtgcttaccagcaccttagcattccagaaggagcagaagctgaaatgtgagtgtcaggctttgcttcaggtagcaaagaatctgttcacgcatttagatgacgtcagcgtgttgctgcaggaaattatcacagaggctagaaatctgagcaatgcggagatatgctcagtgtttcttcttgatcagaatgagctggtagccaaagtgtttgacgggggtgtagtggacgacgaaagctacgagatcagaatcccggcagatcagggcattgccggacatgtagccacaaccggacagatcctcaacatccctgacgcctatgctcatccactgttctataggggtgttgatgattccacgggatttcgaactcgcaacatactgtgtttcccgataaagaacgaaaatcaggaagttattggagttgcagaattggtgaacaaaatcaacggaccctggttctccaagttcgatgaagacctggcaaccgcattcagcatctattgcgggatttccatcgcccacagcttgctgtacaaaaaagtgaatgaggcacagtacagatcacacttggcaaatgagatgatgatgtatcatatgaaggtgtctgatgatgagtatacaaaattacttcacgacggcatccagccagtagctgcaattgactccaactttgcatccttcacatatacacctcgaagtcttcccgaagatgacacgagcatggccatcttatctatgctgcaggacatgaactttatcaacaactacaaaatagattgtcctacactggcccgtttttgcttaatggtgaagaaaggatatcgggacccgccttaccacaactggatgcatgcattcagcgtgtcacatttctgctatctgctgtataagaatctggagctcaccaattatttggaagatattgaaatctttgccctgttcatttcttgtatgtgtcatgatttggaccatcgcggtaccaacaatagctttcaggtagcaagcaagtctgttctggccgctctgtacagctctgagggatctgtgatggaacgccatcacttcgctcaagcgattgcgattctcaatacacatggttgtaatatattcgaccatttttctcgcaaggactaccagagaatgcttgacttgatgcgggatattatattggcaactgatttggcacatcacttacggatctttaaggacttacagaagatggcggaggtgggctacgatcgtaacaataagcagcaccatcgcctcctcctttgtctacttatgaccagctgcgacctgtcagatcaaacaaaagggtggaaaacaacccgaaaaatcgccgagttgatctacaaggagttcttctcgcagggggacttagaaaaggccatggggaatcgacccatggaaatgatggatagggagaaagcttatatccccgagctccagatcagctttatggaacacatcgccatgcctatctacaaactattgcaggacttgttcccaaaagccgctgaactgtacgagagggtggccagcaaccgggaacattggaccaaagttagtcacaagttcaccatacgcggactacccagcaataatagcctggatttcttggacgaagagtacgaggttcccgatttagatggcactcgggctcccataaatggatgctgctctcttgacgccgagtag

SEQ ID NO: 59703 - protein, 445 aa, Artificial Sequence
  derived and/or modified sequence
MIGFSKVTNYIFDSLRGSDPSTHQRPPSEMADFLSDAIPGLKINQQEEPGFEVITRIDLGERPVVQRREPVSLEEWTKNIDSEGRILNVDNMKQMIFRGGLSHALRKQAWKFLLGYFPWDSTKEERTQLQKQKTDEYFRMKLQWKSISQEQEKRNSRLRDYRSLIEKDVNRTDRTNKFYEGQDNPGLILLHDILMTYCMYDFDLGYVQGMSDLLSPLLYVMENEVDAFWCFASYMDQMHQNFEEQMQGMKTQLIQLSTLLRLLDSGFCSYLESQDSGYLYFCFRWLLIRFKREFSFLDILRLWEVMWTELPCTNFHLLLCCAILESEKQQIMEKHYGFNEILKHINELSMKIDVEDILCKAEAISLQMVKCKELPQAVCEILGLQGSEVTTPDSDVGEDENVVMTPCPTSAFQSNALPTLSASGARNDSPTQIPVSSDVCRLTPA

SEQ ID NO: 59704 - protein, 674 aa, Artificial Sequence
  derived and/or modified sequence
MAAAGVVSGKIIYEQEGVYIHSSCGKTNDQDGLISGILRVLEKDAEVIVDWRPLDDALDSSSILYARKDSSSVVEWTQAPKERGHRGSEHLNSYEAEWDMVNTVSFKRKPHTNGDAPSHRNGKSKWSFLFSLTDLKSIKQNKEGMGWSYLVFCLKDDVVLPALHFHQGDSKLLIESLEKYVVLCESPQDKRTLLVNCQNKSLSQSFENLLDEPAYGLIQKIKKDPYTATMIGFSKVTNYIFDSLRGSDPSTHQRPPSEMADFLSDAIPGLKINQQEEPGFEVITRIDLGERPVVQRREPVSLEEWTKNIDSEGRILNVDNMKQMIFRGGLSHALRKQAWKFLLGYFPWDSTKEERTQLQKQKTDEYFRMKLQWKSISQEQEKRNSRLRDYRSLIEKDVNRTDRTNKFYEGQDNPGLILLHDILMTYCMYDFDLGYVQGMSDLLSPLLYVMENEVDAFWCFASYMDQMHQNFEEQMQGMKTQLIQLSTLLRLLDSGFCSYLESQDSGYLYFCFRWLLIRFKREFSFLDILRLWEVMWTELPCTNFHLLLCCAILESEKQQIMEKHYGFNEILKHINELSMKIDVEDILCKAEAISLQMVKCKELPQAVCEILGLQGSEVTTPDSDVGEDENVVMTPCPTSAFQSNALPTLSASGARNDSPTQIPVSSDVCRLTPA

SEQ ID NO: 59705 - DNA, 2025 bp, Artificial Sequence
  derived and/or modified sequence
atggccgccgccggcgtggtgagcggcaagatcatctacgagcaggagggcgtgtacatccacagcagctgcggcaagaccaacgaccaggacggcctgatcagcggcatcctgagagtgctggagaaggacgccgaggtgatcgtggactggagacccctggacgacgccctggacagcagcagcatcctgtacgccagaaaggacagcagcagcgtggtggagtggacccaggcccccaaggagagaggccacagaggcagcgagcacctgaacagctacgaggccgagtgggacatggtgaacaccgtgagcttcaagagaaagccccacaccaacggcgacgcccccagccacagaaacggcaagagcaagtggagcttcctgttcagcctgaccgacctgaagagcatcaagcagaacaaggagggcatgggctggagctacctggtgttctgcctgaaggacgacgtggtgctgcccgccctgcacttccaccagggcgacagcaagctgctgatcgagagcctggagaagtacgtggtgctgtgcgagagcccccaggacaagagaaccctgctggtgaactgccagaacaagagcctgagccagagcttcgagaacctgctggacgagcccgcctacggcctgatccagaagatcaagaaggacccctacaccgccaccatgatcggcttcagcaaggtgaccaactacatcttcgacagcctgagaggcagcgaccccagcacccaccagagaccccccagcgagatggccgacttcctgagcgacgccatccccggcctgaagatcaaccagcaggaggagcccggcttcgaggtgatcaccagaatcgacctgggcgagagacccgtggtgcagagaagagagcccgtgagcctggaggagtggaccaagaacatcgacagcgagggcagaatcctgaacgtggacaacatgaagcagatgatcttcagaggcggcctgagccacgccctgagaaagcaggcctggaagttcctgctgggctacttcccctgggacagcaccaaggaggagagaacccagctgcagaagcagaagaccgacgagtacttcagaatgaagctgcagtggaagagcatcagccaggagcaggagaagagaaacagcagactgagagactacagaagcctgatcgagaaggacgtgaacagaaccgacagaaccaacaagttctacgagggccaggacaaccccggcctgatcctgctgcacgacatcctgatgacctactgcatgtacgacttcgacctgggctacgtgcagggcatgagcgacctgctgagccccctgctgtacgtgatggagaacgaggtggacgccttctggtgcttcgccagctacatggaccagatgcaccagaacttcgaggagcagatgcagggcatgaagacccagctgatccagctgagcaccctgctgagactgctggacagcggcttctgcagctacctggagagccaggacagcggctacctgtacttctgcttcagatggctgctgatcagattcaagagagagttcagcttcctggacatcctgagactgtgggaggtgatgtggaccgagctgccctgcaccaacttccacctgctgctgtgctgcgccatcctggagagcgagaagcagcagatcatggagaagcactacggcttcaacgagatcctgaagcacatcaacgagctgagcatgaagatcgacgtggaggacatcctgtgcaaggccgaggccatcagcctgcagatggtgaagtgcaaggagctgccccaggccgtgtgcgagatcctgggcctgcagggcagcgaggtgaccacccccgacagcgacgtgggcgaggacgagaacgtggtgatgaccccctgccccaccagcgccttccagagcaacgccctgcccaccctgagcgccagcggcgccagaaacgacagccccacccagatccccgtgagcagcgacgtgtgcagactgacccccgcctag

SEQ ID NO: 59706 - DNA, 2025 bp, Artificial Sequence
  derived and/or modified sequence
atggctgccgctggagtagtgtcaggtaagatcatctatgagcaggaaggagtctatatccactcaagttgcggcaagaccaacgatcaggatggcctgatttctggtatccttagggttctggagaaggatgctgaggtcatcgtcgattggcgccctcttgatgatgctcttgacagtagttcaattttgtacgctcggaaggactctagctctgtcgtggagtggacacaagcccccaaggaacggggccatagaggctcggagcacttaaatagctatgaggccgaatgggacatggtgaacaccgtctcattcaagcggaagccacacactaacggtgatgcgccttctcacagaaacggtaagagtaagtggtcatttctcttctcccttacagacttaaagtccattaagcagaacaaggagggaatgggctggtcatacctcgtcttctgtctcaaggacgacgtcgtactgcccgccctgcactttcaccagggcgattcaaagcttctcatcgagtctcttgagaagtacgtggtgctgtgtgaatctccacaggataaacgaactctgttggtcaattgtcagaacaagagcctgtcccaatcattcgaaaacctcttggatgagccagcttatgggctcattcagaagatcaagaaggatccatacaccgccaccatgataggcttcagcaaggtcaccaattatatttttgactccctgcgcgggagcgacccttctactcatcaaaggcccccgagcgagatggcagactttctaagcgatgccatccccggtctgaagatcaaccaacaggaggagcctggttttgaagttatcactaggatcgacttaggagagaggccagtagtgcagagacgcgagcctgtgagcctggaagagtggaccaaaaacatcgacagcgaaggccgaattttgaacgtagataatatgaaacagatgatttttagaggaggtctctcccatgccctccggaagcaagcgtggaagttcctgctgggatattttccctgggacagcaccaaagaagaaagaactcagctgcaaaaacagaagaccgacgaatatttccgtatgaagctgcagtggaagagtatatcccaggagcaggaaaaaaggaactcaagactgcgtgattaccgttcattaattgaaaaggacgtgaatcgtactgaccgaactaacaagttctacgaggggcaggataatccgggactaatccttttgcacgatatcttaatgacctactgcatgtatgatttcgacctcggctacgtacagggaatgtctgacctgctgtcccccttactgtatgtcatggaaaatgaggttgatgccttttggtgtttcgcttcctatatggatcagatgcaccaaaacttcgaagagcagatgcagggcatgaagactcagctcatccagctaagcacgcttctccgtctactggattccggattttgttcatacctggagagtcaggactctggctatctgtacttctgcttcagatggcttttaatacggtttaagagagaattcagctttttggacatcttgagactgtgggaggtgatgtggacagagctgccctgtacaaactttcatctccttctctgctgtgccattttggagtcggaaaagcaacaaatcatggagaagcactacggtttcaacgaaattctgaaacacataaacgagcttagtatgaaaatcgatgtggaggatattttgtgcaaagccgaagcgatatccctgcaaatggtgaagtgcaaggaactcccgcaggccgtatgcgagattttgggactgcaggggagtgaggtgactacacccgacagtgatgttggagaggatgaaaatgtcgtgatgactccatgccctacctcagccttccaaagtaacgcgctaccaactcttagtgcctcaggagctcggaatgactcacccacacagatccctgtgtcttcagacgtgtgtaggctaactcctgcctag

SEQ ID NO: 59707 - DNA, 2025 bp, Artificial Sequence
  derived and/or modified sequence
atggctgctgctggggtggtgtctgggaagatcatctatgagcaggagggcgtgtacatccacagcagctgtgggaagaccaatgaccaggacggcctcatcagcggcatcctgcgggtgctggagaaggatgctgaggtgattgtggactggaggcccctggatgatgccctggacagcagcagcatcctgtatgccaggaaggacagcagctctgtggtggagtggacccaggcccccaaggagcggggccaccggggcagcgagcacctgaacagctatgaggccgagtgggacatggtgaacacagtgtccttcaagaggaagccccacaccaatggagatgcccccagccacagaaatggcaagagcaagtggagcttcctgttcagcctgacagacctgaagagcatcaagcagaacaaggagggcatgggctggagctacctggtgttctgcctgaaggatgatgtggtgctgcctgccctgcacttccaccagggcgacagcaagctgctgattgagagcctggagaagtatgtggtgctgtgtgagagcccccaggacaagaggaccctgctggtgaactgccagaacaagagcctgagccagagctttgagaacctgctggatgagcccgcctacggcctcatccagaagatcaagaaggacccctacacagccaccatgattggcttcagcaaggtgaccaactacatctttgacagcctgcggggcagtgaccccagcacccaccagaggcctccttctgagatggctgacttcctgagtgatgccatccctggcctgaagatcaaccagcaggaggagcccggctttgaggtgatcaccagaattgacctgggggagaggcctgtggtgcagaggcgggagcctgtgtccctggaggagtggaccaagaacattgattctgagggccgcatcctgaatgtggacaacatgaagcagatgatcttccggggcggcctgagccacgccctgaggaagcaggcctggaagttcctgctgggctacttcccctgggacagcaccaaggaggagaggacccagctgcagaagcagaagacagatgagtacttcaggatgaagctgcagtggaagagcatcagccaggagcaggagaagaggaacagccggctgcgggactaccgcagcctcatcgagaaggatgtgaacagaacagacaggaccaacaagttctatgagggccaggacaaccctggcctcatcctgctgcatgacatcctgatgacctactgcatgtatgactttgacctgggctacgtgcagggcatgtctgacctgctgagccccctgctgtatgtgatggagaatgaggtggatgccttctggtgctttgccagctacatggaccagatgcaccagaactttgaggagcagatgcagggcatgaagacccagctgatccagctgagcaccctgctgcggctgctggacagcggcttctgcagctacctggagagccaggacagcggctacctgtacttctgcttccgctggctgctgatccgcttcaagcgggagttctccttcctggacatcctgcggctgtgggaggtgatgtggacagagctgccctgcaccaacttccacctgctgctgtgctgtgccatcctggagagcgagaagcagcagatcatggagaagcactacggcttcaatgagatcctgaagcacatcaatgagctgtccatgaagattgatgtggaggacatcctgtgcaaggccgaggccatcagcctgcagatggtgaagtgcaaggagctgccccaggccgtgtgtgagatcctgggcctgcagggcagcgaggtgaccaccccagacagtgatgtgggagaagatgaaaatgtggtgatgaccccctgccccaccagcgccttccagagcaatgccctgcccaccctgagcgccagcggggccagaaatgacagccccacccagatccctgtgtccagtgatgtgtgccgcctgaccccagcctag

SEQ ID NO: 59708 - DNA, 2025 bp, Artificial Sequence
  derived and/or modified sequence
atggccgccgccggcgtggtgagcggcaagatcatctacgagcaggagggagtgtacattcacagctcttgcggaaagaccaacgaccaagacggactgattagcggtatactccgggttctggagaaggacgccgaagtgatagttgactggcgtccattggatgatgcattggacagttcaagcatattatacgcgcgaaaagattccagtagcgtggtcgagtggactcaggcccctaaggagaggggtcaccgcgggagcgagcacctcaattcgtacgaagccgaatgggatatggtaaacacagtgagctttaaaagaaaacctcataccaatggtgacgcaccgagtcaccgaaatgggaagtctaagtggtcattcctgttttctttgaccgacctcaagtctatcaagcagaacaaggaaggcatgggttggagctatcttgttttctgtctgaaggacgacgttgtcttgcctgctttgcatttccaccagggagactcgaagttgctaatcgaatctctggagaaatacgtcgtgctctgtgaaagccctcaagataaaagaacactgctggtgaactgccagaacaagtcactgtcgcagtcgttcgaaaatcttctggacgaacctgcttacggcttaatccagaagatcaagaaagacccttatacagccacgatgatcggcttctcaaaggtcacaaactatatttttgatagcctgagggggtctgacccaagcacccatcagcggcctcccagtgaaatggctgacttcttgtctgatgcaattcccggcctcaaaattaatcaacaagaggaaccaggcttcgaagttatcacccgtatagatctcggggagcggcctgtggtccaacgccgtgaacctgtgagccttgaggagtggaccaagaatatcgactctgagggcaggatcctgaatgttgacaatatgaaacagatgatattccgtggtggtctcagtcatgctctgcgcaaacaggcgtggaaatttctcttaggctactttccctgggactccacaaaggaagaaaggacgcagctgcagaagcagaaaacagatgagtactttcgcatgaagctgcaatggaaatcgattagccaggagcaggaaaagaggaactcacggttgcgcgattatcgctcactgatcgagaaagacgtaaacaggactgatcgtacaaataagttttacgagggtcaggacaatcctggtctcatcttgttacacgacattcttatgacttattgcatgtatgactttgacctaggctatgtccaggggatgagcgacctgctttcccctctactttatgtcatggaaaacgaggtggacgctttctggtgttttgctagctatatggaccagatgcatcagaactttgaagaacagatgcagggtatgaaaacccagttaattcagctctctacattgctgcggctcctggactcaggtttttgttcttacctggaaagccaagacagcggttacctatatttttgctttaggtggttgctcattagattcaagagggagtttagcttcctcgacattctgcggctgtgggaggtcatgtggacagagctgccatgcactaacttccatctgctgctatgctgtgctatcttggagtctgagaagcagcaaattatggaaaagcattatgggtttaacgaaatcctgaagcatatcaatgagttgagcatgaagatagacgtggaggatatcctatgcaaagcggaggcaatttcccttcagatggtgaagtgtaaagaattaccccaggccgtgtgtgaaatcttggggcttcagggatctgaagttacaacaccagactccgatgtcggtgaggacgaaaacgtcgtcatgacgccctgtccaacctccgcctttcagtctaacgccctgccaactctctctgccagcggcgccagaaatgattcacctacgcagattccggttagcagtgacgtgtgccggctgacacctgcatag

SEQ ID NO: 59709 - DNA, 2025 bp, Artificial Sequence
  derived and/or modified sequence
atggccgctgcaggcgttgtgtccggcaagatcatttacgagcaagagggggtctacatccattcctcttgcgggaaaactaacgatcaagatggcctaattagcgggatactgcgagtgctggagaaagacgcagaagtgattgtggactggcgaccattggatgatgccttggattcctcatcaatcctttatgctcggaaggattcttcttcagtggtagagtggacccaagcccctaaggaaagaggccaccgagggagtgaacacctgaattcctatgaagctgagtgggacatggtgaacaccgtgtcatttaagcgtaaacctcacaccaatggagacgcaccgagtcacagaaacggcaaaagtaaatggagcttcttgttctcactgaccgacctcaaaagcatcaagcagaataaagagggcatggggtggtcctatctagtattttgtttaaaagatgacgtagtgttgccggctctgcattttcaccagggtgacagcaagcttttgatcgagtccctcgaaaaatatgtggtattatgcgagagcccccaggataagcgcaccctcttggtgaattgccaaaataagtcactgagtcaaagctttgagaacctgctggacgagccagcgtatggtttgatccaaaagattaagaaagacccatacacagccactatgattggcttttccaaggttaccaattatatcttcgactcacttagagggtctgacccaagcacacatcagagaccccctagcgaaatggccgatttcttgagtgacgcaattcctgggttgaaaatcaatcagcaagaggaacctggattcgaagtgattacccgaattgatctgggggagcgccctgtcgtgcagcgcagagagccggtcagcctggaggagtggaccaaaaatatcgactctgaaggacgaattctcaacgttgataacatgaagcaaatgatatttagaggcggactgtcccacgcactccgaaagcaagcctggaagtttcttctgggatactttccttgggactcaaccaaggaggagcgaactcaactccagaaacagaagacagatgaatacttcagaatgaagctgcagtggaagagcatatctcaggaacaggagaagcgcaacagccgactcagggattatagaagtctcattgagaaagacgtgaacagaacagaccgcactaacaaattctacgagggacaggacaaccccggacttattctgctgcatgatatccttatgacttattgcatgtatgacttcgacctggggtacgtacagggtatgtccgacttattatctcctttgctctatgtcatggagaatgaagtggacgctttctggtgtttcgccagctacatggatcagatgcatcagaatttcgaagaacagatgcaggggatgaagacccagttgatccaactcagcacacttctgagattgctggactctggcttctgctcctacctagaaagccaggactcaggatacctgtacttctgtttccggtggttgcttatcagattcaagcgcgagttttcttttctggacattttgcggctgtgggaggtcatgtggacagagctgccttgcaccaatttccacttactcctctgttgtgcgatcctggagtccgaaaagcagcagatcatggagaagcattatggattcaatgagatcctgaaacacatcaatgagctgtcaatgaaaattgatgtggaagatatattgtgtaaggcagaggcgattagtctgcaaatggtaaaatgcaaggagctgccgcaagcggtctgtgaaatcctgggactgcaagggagtgaagtcaccactcccgactcagatgtgggtgaagatgagaatgtcgtgatgactccatgtccaaccagtgcttttcagtccaacgctctccccaccttatctgcctcaggtgccaggaacgactccccaacacaaattccagtgagtagcgacgtatgccgccttacgcctgcttag

SEQ ID NO: 59710 - DNA, 2025 bp, Artificial Sequence
  derived and/or modified sequence
atggcagctgcaggcgtggtttcaggtaagatcatctacgagcaggaaggcgtgtacatccatagctcatgcggaaaaaccaatgatcaagacggcctcatatctggaatcctgcgagtgttagagaaggacgcagaggttatcgtggactggcggcccctggacgacgcgctggactcatcatcaattctctatgcccgtaaagacagttcctccgtggtagagtggactcaggcgcccaaggagagaggtcatagaggctcagaacaccttaacagttatgaggctgagtgggatatggtaaacacagtgtccttcaagcgaaagccccacaccaacggagatgcgccatcacacagaaatggcaagagcaagtggagcttcctgttttctttgacagatctgaagagcattaagcagaacaaggaagggatgggatggtcttatttggtgttttgcttaaaagatgatgtggtcctgcccgccctgcattttcatcagggcgattctaaactcctcatcgaaagcctggaaaagtacgttgtactgtgtgaatccccacaagacaagagaacactgctggtaaattgtcagaataaatctctgagccaatcatttgagaacctgcttgacgagcctgcatatggccttattcaaaagattaaaaaagatccttataccgcaacaatgataggcttctcaaaagtgaccaactatatttttgacagtctaagaggatccgacccatccacccatcagcgcccaccgtctgagatggccgacttcctgagtgatgccattcccggccttaagattaaccaacaagaagaaccaggatttgaagtgataacgaggattgatctcggagaaaggccggtcgtccagcgcagggaaccagtgtcgctggaagagtggacaaagaacattgactcagaggggcgcatcctgaacgtggataacatgaagcaaatgatttttagagggggccttagccacgccctaagaaaacaagcctggaagttcctgctggggtactttccatgggatagtaccaaggaagagcgcactcagctgcaaaaacagaaaaccgacgagtactttaggatgaagttgcagtggaaaagtatctcgcaagagcaggaaaaacggaattcaaggttaagggattatcgatctctcatagaaaaagacgtaaaccgcactgacagaaccaataagttctacgaaggtcaggacaatcctggcttaattcttctccacgacattctgatgacttactgcatgtacgattttgatctgggatacgtccaaggaatgagcgatttgttatcccctctattgtatgttatggagaatgaggtggacgccttttggtgcttcgcctcctatatggatcagatgcaccagaactttgaggagcagatgcagggcatgaaaacccaattaatccagctcagtacccttctgcgacttctggatagtgggttttgttcatatctcgagtctcaagatagcggttacctctacttctgcttccggtggttgcttatcaggttcaaaagagaattttcatttctggatatcctaaggctgtgggaggtcatgtggacagaacttccctgcaccaactttcatctgctgctctgctgtgcaatccttgagagcgaaaaacaacagataatggagaagcactacggttttaacgagattctgaagcacatcaatgaactgtcaatgaagatcgatgttgaagacatcctgtgtaaggccgaggctatttccctccaaatggtaaaatgtaaagaactgccccaggcagtgtgtgagatcttagggctgcagggttcagaagtaaccacacctgactccgatgtgggagaagatgaaaatgtcgttatgacaccctgcccaacgagcgcctttcagtccaatgcgctccccactctctccgccagtggggccaggaacgattcaccaacacagataccagtctcttccgatgtgtgtaggctgaccccagcatag

SEQ ID NO: 59711 - DNA, 2025 bp, Artificial Sequence
  derived and/or modified sequence
atggcggcagcgggggtggtctcaggcaagataatctatgaacaggaaggagtatacatccatagttcttgtggcaagaccaacgaccaggatggcctaatttctggaatccttagagtactcgagaaagatgcggaagtcattgtggattggcgtcccttggatgacgcccttgattcaagtagcattctctacgcacgcaaagacagctctagtgtcgtcgagtggactcaagcgcctaaagagaggggccacaggggcagcgaacatctgaactcatacgaagcggaatgggacatggttaatactgtgtcctttaaaagaaagcctcataccaacggagatgcaccttctcatagaaatggaaaatccaagtggagtttcctgttttcattaaccgacctgaaaagcatcaaacagaataaggagggaatggggtggagctacctagtcttctgtctcaaggatgatgtggtgttacctgcgctgcacttccaccagggcgactcaaaacttttaatagagagcctggaaaaatacgtcgtcctgtgcgagtcacctcaggataagcggaccttacttgtcaattgtcaaaacaaatctttgtcccagtcctttgagaatctgctcgacgaacccgcctatggtctgatccagaagattaaaaaagacccctacaccgcgactatgattggtttctcaaaagtgacaaattatattttcgatagcctgcgtggctcggaccctagcactcaccagagacctccatctgaaatggcagacttcctctcagacgccatccctggactgaagattaatcaacaagaggagcccgggttcgaagttatcactaggattgaccttggagaacgacctgtagtacagagacgggaaccggtcagcctcgaggagtggactaagaacattgactcggaaggtagaatacttaacgtggacaatatgaaacaaatgatattccggggcggactaagccacgcacttcgtaaacaggcctggaagttcctcctaggttactttccatgggatagcactaaagaagagcgaactcaactgcagaaacagaagacggatgagtacttccggatgaagttacagtggaaatcgattagtcaggagcaagaaaaaaggaacagtagactccgcgattaccgcagcttaattgaaaaggatgtgaacagaaccgatcgtactaacaagttctacgagggacaggacaatcctggactgattcttctgcacgacatcttgatgacctattgtatgtacgactttgacctgggctacgtgcagggtatgtccgatcttctttcgccactcctgtacgtcatggagaatgaagtggatgctttttggtgttttgccagctatatggatcagatgcatcaaaattttgaggaacaaatgcagggcatgaaaacacagttgatacaattgtccactcttctgcgcttactggactctgggttttgctcatatttggaaagccaagactccgggtatctctacttttgtttccggtggctcctaatccgatttaaacgtgagttttcctttcttgatatcttacggctatgggaagtgatgtggaccgagctcccatgcaccaatttccaccttctactgtgctgcgctatccttgagtcagagaaacaacagatcatggagaagcattatgggttcaatgaaattttaaaacatattaacgaacttagtatgaaaattgatgtggaggacatcttgtgtaaagccgaggcgatttcacttcagatggtcaagtgcaaggaactaccacaggccgtctgtgagatcctcggcctgcaaggcagcgaggtgactaccccagacagtgacgttggcgaagatgagaatgtagtgatgaccccatgccctacctccgcgttccagagcaatgctctgcccacattgtccgcgtccggtgcaagaaacgattccccaacacagatacccgtgagctcagacgtttgtcgtcttaccccagcttag

SEQ ID NO: 59712 - DNA, 2489 bp, Artificial Sequence
  derived and/or modified sequence
attaccaggcacgcgcaggaaacatggcggcggcgggtgttgtgagcgggaagattatatatgaacaagaaggagtatatattcactcatcttgtggaaagaccaatgaccaagacggcttgatttcaggaatattacgtgttttagaaaaggatgccgaagtaatagtggactggagaccattggatgatgcattagattcctctagtattctctatgctagaaaggactccagttcagttgtagaatggactcaggccccaaaagaaagaggtcatcgaggatcagaacatctgaacagttacgaagcagaatgggacatggttaatacagtttcatttaaaaggaaaccacataccaatggagatgctccaagtcatagaaatgggaaaagcaaatggtcattcctgttcagtttgacagacctgaaatcaatcaagcaaaacaaagagggtatgggctggtcctatttggtattctgtctaaaggatgacgtcgttctccctgctctacactttcatcaaggagatagcaaactactgattgaatctcttgaaaaatatgtggtattgtgtgaatctccacaggataaaagaacacttcttgtgaattgtcagaataagagtctttcacagtcttttgaaaatcttcttgatgagccagcatatggtttaatacaaaaaattaaaaaggacccttatacggcaactatgataggattttccaaagtcacaaactacatttttgacagtttgagaggcagcgatccctctacacatcaacgaccaccttcagaaatggcagattttcttagtgatgctattccaggtctaaagataaatcaacaagaagaaccaggatttgaagtcatcacaagaattgatttgggggaacgccctgttgttcaaaggagagaaccggtatcactggaagaatggactaagaacattgattctgaaggaagaattttaaatgtagataatatgaagcagatgatatttagagggggacttagtcatgcattgagaaagcaagcatggaaatttcttctgggttattttccctgggacagtaccaaggaggaaagaacccaattacaaaagcaaaaaactgatgaatacttcagaatgaaactgcagtggaaatccatcagccaggaacaagagaaaagaaattcgaggttaagagattatagaagtcttatcgaaaaagatgttaacagaacagatcgaacaaacaagttttatgaaggccaagataatccagggttgattttacttcatgacattttgatgacctactgtatgtatgattttgatttaggatatgttcaaggaatgagtgatttactttcccctcttttatatgtgatggaaaatgaagtggatgccttttggtgctttgcctcttacatggaccaaatgcatcagaattttgaagaacaaatgcaaggcatgaagacccagctaattcagctgagtaccttacttcgattgttagacagtggattttgcagttacttagaatctcaggactctggatacctttatttttgcttcaggtggcttttaatcagattcaaaagggaatttagttttctagatattcttcgattatgggaggtaatgtggaccgaactaccatgtacaaatttccatcttcttctctgttgtgctattctggaatcagaaaagcagcaaataatggaaaagcattatggcttcaatgaaatacttaagcatatcaatgaattgtccatgaaaattgatgtggaagatatactctgcaaggcagaagcaatttctctacagatggtaaaatgcaaggaattgccacaagcagtctgtgagatccttgggcttcaaggcagtgaagttacaacaccagattcagacgttggtgaagacgaaaatgttgtcatgactccttgtcctacatctgcatttcaaagtaatgccttgcctacactctctgccagtggagccagaaatgacagcccaacacagataccagtgtcctcagatgtctgcagattaacacctgcatgatcactgttcttgcttttttgggaagagacactttgttgcaaccctttttcaagtacttgaaagttgaaaatttgaaatcttggtattgatcatgctttaaggtttatgtaaagaaagtgtactgatgttcttacattaaagctttacaaagatttaaactaattatttttgtagttacttctaccaaatagcctttccttttcgataacattcctcagtatttttatagccaagtacattttattttcttgctgatgaactggaattggataaatattgcaagtggatgagttggaaattatgcactttgaaaaacattcactttgtttaagcttattgggtttcagatttgattaaattaaatgtggaggctttctatagcattctaagctgagaagtagattgttacccagtaatgaaataaaaaataaaaataaaagg

SEQ ID NO: 59713 - protein, 682 aa, Artificial Sequence
  derived and/or modified sequence
MCPGLYPYSSLLEYGRSMIIYEQEGVYIHSSCGKTNDQDGLISGILRVLEKDAEVIVDWRPLDDALDSSSILYARKDSSSVVEWTQAPKERGHRGSEHLNSYEAEWDMVNTVSFKRKPHTNGDAPSHRNGKSKWSFLFSLTDLKSIKQNKEGMGWSYLVFCLKDDVVLPALHFHQGDSKLLIESLEKYVVLCESPQDKRTLLVNCQNKSLSQSFENLLDEPAYGLIQKIKKDPYTATMIGFSKVTNYIFDSLRGSDPSTHQRPPSEMADFLSDAIPGLKINQQEEPGFEVITRIDLGERPVVQRREPVSLEEWTKNIDSEGRILNVDNMKQMIFRGGLSHALRKQAWKFLLGYFPWDSTKEERTQLQKQKTDEYFRMKLQWKSISQEQEKRNSRLRDYRSLIEKDVNRTDRTNKFYEGQDNPGLILLHDILMTYCMYDFDLGYVQGMSDLLSPLLYVMENEVDAFWCFASYMDQMHQNFEEQMQGMKTQLIQLSTLLRLLDSGFCSYLESQDSGYLYFCFRWLLIRFKREFSFLDILRLWEVMWTELPCTNFHLLLCCAILESEKQQIMEKHYGFNEILKHINELSMKIDVEDILCKAEAISLQMVKCKELPQAVCEILGLQGSEVTTPDSDVGEDENVVMTPCPTSAFQSNALPTLSASGARNDSPTQIPVSSDVCRLTPA

SEQ ID NO: 59714 - DNA, 2049 bp, Artificial Sequence
  derived and/or modified sequence
atgtgccccggcctgtacccctacagcagcctgctggagtacggcagaagcatgatcatctacgagcaggagggcgtgtacatccacagcagctgcggcaagaccaacgaccaggacggcctgatcagcggcatcctgagagtgctggagaaggacgccgaggtgatcgtggactggagacccctggacgacgccctggacagcagcagcatcctgtacgccagaaaggacagcagcagcgtggtggagtggacccaggcccccaaggagagaggccacagaggcagcgagcacctgaacagctacgaggccgagtgggacatggtgaacaccgtgagcttcaagagaaagccccacaccaacggcgacgcccccagccacagaaacggcaagagcaagtggagcttcctgttcagcctgaccgacctgaagagcatcaagcagaacaaggagggcatgggctggagctacctggtgttctgcctgaaggacgacgtggtgctgcccgccctgcacttccaccagggcgacagcaagctgctgatcgagagcctggagaagtacgtggtgctgtgcgagagcccccaggacaagagaaccctgctggtgaactgccagaacaagagcctgagccagagcttcgagaacctgctggacgagcccgcctacggcctgatccagaagatcaagaaggacccctacaccgccaccatgatcggcttcagcaaggtgaccaactacatcttcgacagcctgagaggcagcgaccccagcacccaccagagaccccccagcgagatggccgacttcctgagcgacgccatccccggcctgaagatcaaccagcaggaggagcccggcttcgaggtgatcaccagaatcgacctgggcgagagacccgtggtgcagagaagagagcccgtgagcctggaggagtggaccaagaacatcgacagcgagggcagaatcctgaacgtggacaacatgaagcagatgatcttcagaggcggcctgagccacgccctgagaaagcaggcctggaagttcctgctgggctacttcccctgggacagcaccaaggaggagagaacccagctgcagaagcagaagaccgacgagtacttcagaatgaagctgcagtggaagagcatcagccaggagcaggagaagagaaacagcagactgagagactacagaagcctgatcgagaaggacgtgaacagaaccgacagaaccaacaagttctacgagggccaggacaaccccggcctgatcctgctgcacgacatcctgatgacctactgcatgtacgacttcgacctgggctacgtgcagggcatgagcgacctgctgagccccctgctgtacgtgatggagaacgaggtggacgccttctggtgcttcgccagctacatggaccagatgcaccagaacttcgaggagcagatgcagggcatgaagacccagctgatccagctgagcaccctgctgagactgctggacagcggcttctgcagctacctggagagccaggacagcggctacctgtacttctgcttcagatggctgctgatcagattcaagagagagttcagcttcctggacatcctgagactgtgggaggtgatgtggaccgagctgccctgcaccaacttccacctgctgctgtgctgcgccatcctggagagcgagaagcagcagatcatggagaagcactacggcttcaacgagatcctgaagcacatcaacgagctgagcatgaagatcgacgtggaggacatcctgtgcaaggccgaggccatcagcctgcagatggtgaagtgcaaggagctgccccaggccgtgtgcgagatcctgggcctgcagggcagcgaggtgaccacccccgacagcgacgtgggcgaggacgagaacgtggtgatgaccccctgccccaccagcgccttccagagcaacgccctgcccaccctgagcgccagcggcgccagaaacgacagccccacccagatccccgtgagcagcgacgtgtgcagactgacccccgcctag

SEQ ID NO: 59715 - DNA, 2049 bp, Artificial Sequence
  derived and/or modified sequence
atgtgtccaggactctacccatatagctctttgcttgaatacggacgttccatgatcatttatgaacaggaaggcgtgtatatccacagctcctgcggcaagactaacgaccaagatggcctgatatcaggcatactccgggtgctcgaaaaggacgccgaagtaattgttgactggcggccactagacgacgcgctggacagttcatcaatcctctacgccagaaaggactcaagtagcgtggtcgagtggactcaggcaccaaaagaacgcggacatcgaggatcagaacatttgaattcttatgaagccgagtgggacatggtgaacaccgtgagctttaagcgcaagccacacactaatggggatgcaccatcccatcgcaatgggaagtccaagtggtctttccttttttcactgacagatttaaagagtattaagcagaataaggaagggatgggctggtcctacttggttttctgtctgaaagacgacgtggtgctgcccgcactccacttccaccaaggtgattcaaaactcctcattgagtctctggaaaaatacgtggtgctgtgtgaatcccctcaggacaaacgcaccttgctggtcaactgccaaaataaatcactaagccagtcttttgaaaatctgctggacgagcccgcctacgggcttatacaaaaaattaaaaaggatccttatacggcgacaatgattggcttcagcaaagtgacaaactacatttttgatagcctgcgtgggtcagatccttccacccatcagcgaccccctagtgagatggccgatttcttgtcagatgcgatccctgggctcaagattaaccaacaggaagagcccggcttcgaggtgattacgaggatagacctaggcgagcgtcccgtggtgcaacgccgggaacctgtatctcttgaggagtggacaaagaacatcgatagcgaaggtcgaatcctaaatgtagacaatatgaaacaaatgatcttcaggggcgggctgagccacgccttgagaaagcaggcatggaagtttcttctcggctactttccctgggattccacaaaagaggaaagaacgcagctgcagaaacaaaagaccgatgagtacttcagaatgaaactgcagtggaaatccattagccaagagcaagaaaagcggaattcacgtctgagagactatcgttctttgatcgaaaaggacgtgaatcggaccgaccgcaccaacaaattctatgaagggcaggacaatccaggcctgattctgcttcatgatatcttaatgacatactgtatgtatgattttgacctagggtacgtccaaggcatgtccgacttgctgtcgcccctgttgtatgtaatggagaatgaggtggatgctttctggtgcttcgcatcctatatggatcagatgcaccagaactttgaagaacagatgcagggaatgaaaacgcagctaatccagttgtctactctcctccggctgctcgacagcggattctgctcatacctcgagagccaagacagtggctatctgtacttttgcttccggtggctgctgatccggtttaaacgggaattctccttcctggatattctaagactgtgggaggtgatgtggacagaactcccctgcacaaattttcacttgttattgtgttgtgctatactcgaaagtgaaaaacagcaaattatggagaagcattacggcttcaacgaaatccttaagcacattaacgagctctctatgaaaattgatgtcgaagacatcctttgtaaggcagaagcaattagtctgcaaatggttaaatgtaaggagctcccccaagcagtatgtgaaatcctgggactgcagggctcagaggtgactacaccggactctgacgttggagaggacgaaaacgtggttatgaccccttgtcctaccagcgctttccaatccaacgctttacccacactgagcgcgtctggcgctagaaatgattcccccactcaaatcccggtgtcctccgatgtgtgccggctgacaccagcctag

SEQ ID NO: 59716 - DNA, 2049 bp, Artificial Sequence
  derived and/or modified sequence
atgtgccccggcctgtacccctacagcagcctgctggagtatggccgctccatgatcatctatgagcaggagggcgtgtacatccacagcagctgtgggaagaccaatgaccaggacggcctcatcagcggcatcctgcgggtgctggagaaggatgctgaggtgattgtggactggaggcccctggatgatgccctggacagcagcagcatcctgtatgccaggaaggacagcagctctgtggtggagtggacccaggcccccaaggagcggggccaccggggcagcgagcacctgaacagctatgaggccgagtgggacatggtgaacacagtgtccttcaagaggaagccccacaccaatggagatgcccccagccacagaaatggcaagagcaagtggagcttcctgttcagcctgacagacctgaagagcatcaagcagaacaaggagggcatgggctggagctacctggtgttctgcctgaaggatgatgtggtgctgcctgccctgcacttccaccagggcgacagcaagctgctgattgagagcctggagaagtatgtggtgctgtgtgagagcccccaggacaagaggaccctgctggtgaactgccagaacaagagcctgagccagagctttgagaacctgctggatgagcccgcctacggcctcatccagaagatcaagaaggacccctacacagccaccatgattggcttcagcaaggtgaccaactacatctttgacagcctgcggggcagtgaccccagcacccaccagaggcctccttctgagatggctgacttcctgagtgatgccatccctggcctgaagatcaaccagcaggaggagcccggctttgaggtgatcaccagaattgacctgggggagaggcctgtggtgcagaggcgggagcctgtgtccctggaggagtggaccaagaacattgattctgagggccgcatcctgaatgtggacaacatgaagcagatgatcttccggggcggcctgagccacgccctgaggaagcaggcctggaagttcctgctgggctacttcccctgggacagcaccaaggaggagaggacccagctgcagaagcagaagacagatgagtacttcaggatgaagctgcagtggaagagcatcagccaggagcaggagaagaggaacagccggctgcgggactaccgcagcctcatcgagaaggatgtgaacagaacagacaggaccaacaagttctatgagggccaggacaaccctggcctcatcctgctgcatgacatcctgatgacctactgcatgtatgactttgacctgggctacgtgcagggcatgtctgacctgctgagccccctgctgtatgtgatggagaatgaggtggatgccttctggtgctttgccagctacatggaccagatgcaccagaactttgaggagcagatgcagggcatgaagacccagctgatccagctgagcaccctgctgcggctgctggacagcggcttctgcagctacctggagagccaggacagcggctacctgtacttctgcttccgctggctgctgatccgcttcaagcgggagttctccttcctggacatcctgcggctgtgggaggtgatgtggacagagctgccctgcaccaacttccacctgctgctgtgctgtgccatcctggagagcgagaagcagcagatcatggagaagcactacggcttcaatgagatcctgaagcacatcaatgagctgtccatgaagattgatgtggaggacatcctgtgcaaggccgaggccatcagcctgcagatggtgaagtgcaaggagctgccccaggccgtgtgtgagatcctgggcctgcagggcagcgaggtgaccaccccagacagtgatgtgggagaagatgaaaatgtggtgatgaccccctgccccaccagcgccttccagagcaatgccctgcccaccctgagcgccagcggggccagaaatgacagccccacccagatccctgtgtccagtgatgtgtgccgcctgaccccagcctag

SEQ ID NO: 59717 - DNA, 2049 bp, Artificial Sequence
  derived and/or modified sequence
atgtgccccggcctgtacccctacagcagcctgctggagtacggccgaagtatgatcatctatgagcaggagggcgtgtacattcattcttcgtgtgggaaaactaacgatcaggatggcctgattagtggaattttgagggtactggagaaagacgccgaagtcatcgtggattggaggcctttggacgacgctttagactcgagtagtattctgtatgctaggaaggacagctcaagtgtagtggaatggacccaagcacccaaggaaaggggccaccggggttccgagcacctgaacagctacgaagctgaatgggatatggtgaatacagtctcctttaaacgaaaaccccacactaatggtgatgccccgtcccaccgtaatggcaaaagtaagtggtcgttcctcttcagcctgacagatttaaaaagtataaagcagaacaaggagggtatgggttggagctatttagttttctgcctcaaagacgatgtagtgctgccggccttacacttccaccagggggacagcaaactactgatcgaatccttggagaagtacgttgtcctgtgcgagtccccccaggataagcgcactctgctcgtgaactgtcagaacaaatcattgtcacagtcgtttgagaacttgctcgatgagccagcctacgggcttatccagaagattaaaaaagacccctacaccgcaaccatgatcggctttagtaaggtaaccaattacatatttgatagtctgaggggctcagacccaagtacccaccagcggcctcctagcgagatggcagacttcttgtctgatgctattccaggattgaaaattaatcagcaagaggagccgggttttgaggtgataacgagaatcgatctaggtgagagaccagtggtgcagcggcgcgaacctgtatctctggaggaatggaccaaaaacatcgattccgagggtagaatcctaaatgtcgataacatgaagcagatgatatttagaggcggcctgagtcacgccctgagaaagcaggcttggaaattcttgctgggctattttccctgggacagcaccaaggaagaaagaactcagctgcagaaacagaagacagatgaatacttccgaatgaagctccagtggaaatcaattagccaagaacaggagaaaagaaactcacgtttgcgcgattaccgaagccttattgaaaaggacgtgaatcgtaccgaccgaacaaacaagttttatgaggggcaggataacccggggttgatcctgttgcacgacatcctgatgacttattgtatgtatgacttcgacctcggatatgtccaagggatgagcgaccttctctctccccttctatacgtgatggaaaatgaagtcgatgccttctggtgcttcgcctcctacatggatcagatgcaccagaactttgaggagcagatgcaaggaatgaagacccaattaattcagctctcgacgctgctgaggctcctcgatagtggcttctgttcttacctcgagagccaggatagtggatatctgtacttctgcttccgatggttgctgatcagatttaagagggagtttagcttcctggacatcttgcgtctctgggaggtgatgtggactgagttgccttgcacaaattttcatctcctactgtgttgcgcaattctggaatccgaaaaacagcagatcatggagaaacattatggctttaatgagatcctgaagcacattaatgagctgtctatgaagatcgatgtggaggacatcttgtgcaaagccgaagccatctcgctgcagatggtcaagtgtaaggagctgccccaggccgtgtgtgaaatccttggcttacagggctccgaagtgaccacgccggatagtgacgtgggagaggacgaaaatgtcgtcatgacaccatgccctacaagtgcattccagtcaaatgcccttcccactcttagcgcatccggggcgaggaatgacagtccgacccagattcctgtttcgagcgatgtgtgccgtctgacaccagcctag

SEQ ID NO: 59718 - DNA, 2049 bp, Artificial Sequence
  derived and/or modified sequence
atgtgcccgggtctatacccatactcatccctgctcgagtatggcaggtctatgattatctatgagcaggagggggtgtacattcattcttcttgtggcaagaccaatgatcaggatggcctcatcagcggaatccttagagtgctcgaaaaagatgccgaagtcattgtggactggagacccctcgatgatgccctggacagctcctcaattctgtacgctcgaaaggactctagttctgtcgtggaatggacacaggcgcctaaggaacgagggcataggggaagcgaacacttaaatagctatgaagcggaatgggacatggttaacacagttagctttaagagaaagccccacacaaacggagacgctccttctcatagaaacggtaaatccaagtggtccttcctgtttagcctgacagacctgaagtctatcaagcaaaataaggaaggaatgggctggtcttacctggttttctgccttaaggacgacgtagttctgccggctctgcatttccaccagggagacagcaagcttctgatagagtcactcgaaaaatacgtcgtcctttgcgaatcacctcaggacaagcgaacactgttagtgaactgtcaaaataagagtctaagtcagtcttttgagaacctcctggatgaaccagcttacggattgatccaaaagattaagaaggatccatacacggcaacgatgatagggttttcgaaggtgactaattacatcttcgactccctccggggtagcgacccttctacccaccagcgtcccccatccgagatggccgactttctgagcgacgccatcccgggactgaaaatcaatcagcaggaggagcccggattcgaggtcattactagaattgacctgggcgagcgaccggtcgtgcagcgcagggaacccgtctcccttgaagaatggacgaagaacattgatagtgaaggcaggatcttgaatgtggacaatatgaagcagatgatatttcgcggaggcttatcgcatgcgttgagaaaacaggcatggaaatttcttctggggtacttcccatgggacagcacgaaggaggagaggacccaactccaaaaacagaagacggacgagtattttcgaatgaaactgcagtggaagagcatttctcaggaacaggaaaaacggaattcaaggctccgcgattatagatccctgatagaaaaggatgtcaaccgcactgatcgaacaaacaagttttatgaaggacaagacaacccgggtctgatcctgctccacgacattctgatgacttattgtatgtatgattttgatctcggctacgtccaaggtatgagcgacctactaagccccctgctatatgtgatggagaacgaggtggacgccttctggtgttttgcatcttatatggatcagatgcatcagaacttcgaggagcagatgcaaggcatgaagacccagttaatacagctgtctacactgctccggctgttagattccggattttgctcttatctagagtcccaggactctggttacctatacttctgctttcggtggctcctgatacggtttaagagggagttctctttcttagatattctccgcctttgggaggtcatgtggacagagttgccatgtaccaattttcacttgctgctctgttgcgcgatcttggagtccgaaaaacaacaaataatggagaagcattatgggttcaatgagatactgaaacacattaacgaactctccatgaagatcgacgtcgaggacattctgtgcaaagcagaagcaatttccctccagatggtgaagtgcaaagagctgccccaggctgtctgcgagatactgggccttcagggctcggaggttactacacctgacagcgacgttggcgaggacgagaatgttgttatgacaccatgccccacctccgcctttcaatccaatgccctgcccactcttagcgcatctggtgcgagaaatgacagccccacccagatccccgtttcctcggatgtttgtaggctcaccccagcctag

SEQ ID NO: 59719 - DNA, 2049 bp, Artificial Sequence
  derived and/or modified sequence
atgtgccccgggctatacccgtactccagtctacttgaatatgggcggtccatgatcatttacgaacaggaaggcgtctacatccatagtagttgtggtaagactaacgaccaagacggacttatctccgggatcctgagagtgctggagaaagatgcggaagtgatcgtagactggaggccgcttgacgatgctcttgactcttccagcattttatatgccagaaaggacagctcctccgtcgtagaatggactcaggcccccaaagagcgaggacaccgaggttctgaacacctaaactcatatgaagcggaatgggacatggtgaatactgtatcattcaagcgaaagcctcatacaaacggggatgcgcctagtcaccgcaacggtaagtccaagtggagctttctgttttctttgactgacctgaaaagtatcaaacaaaacaaggagggcatgggatggtcttacctcgttttctgtctgaaggacgacgtggtgctgcccgccttgcacttccaccaaggtgactctaagttgctgatcgaatccctcgaaaagtatgtcgtcctgtgtgagtcaccccaggacaagagaacattgctggtcaattgccagaacaaaagcctgagtcagagttttgaaaatctgctggacgaacctgcctatgggctgattcaaaagatcaagaaggatccctacactgcaaccatgatcggtttctctaaggtcacaaactacattttcgattctttaagaggctccgatccttctacccatcagagaccacccagtgaaatggctgacttcctttcagatgctatacccggcctgaagataaaccagcaggaagaacccggattcgaggtcattactcgcatagacttgggcgagcgtcctgtggtgcagagaagggaacctgtatccttggaagaatggacaaaaaatatcgactcagagggtagaattttaaacgttgataacatgaaacaaatgatcttccgcggcggcctgtctcatgcgctgcgcaaacaggcttggaaattcctgttgggctacttcccttgggattcaaccaaagaggagcgcacacaactgcagaaacagaagacagacgaatacttccgtatgaagctgcagtggaagagcatctcacaggaacaagagaaaagaaatagcaggctgagagattacagaagcttgatcgagaaggacgtaaataggaccgatagaaccaataaattctatgaggggcaggacaaccctgggctgattttactccatgatatcctgatgacatactgtatgtatgacttcgatcttggctatgtgcaggggatgtcagatctcctttctcctctgctgtacgtaatggagaacgaggtggacgccttttggtgctttgcctcatatatggatcagatgcatcaaaattttgaggaacagatgcagggaatgaagactcagctgatccagctatcaacactgcttcgcttactagacagtggattctgctcttacctcgagtctcaagatagtgggtacctctacttttgctttaggtggctcctcatacgcttcaagcgtgagttctccttccttgacatacttaggctctgggaggtgatgtggaccgagcttccttgcactaattttcacttgctgctctgttgcgccattctggaatctgagaaacagcaaattatggaaaaacactacgggttcaatgagatactcaaacatatcaacgaactgagcatgaagatcgatgtcgaggacatcctatgcaaggctgaggctatctcccttcagatggtgaaatgcaaagaactgccccaagccgtgtgtgaaattctcggactgcaggggagcgaagtgactactcccgactcagatgtgggcgaggatgaaaacgttgttatgaccccatgcccaacgtctgctttccagtccaatgcccttccgacactgtccgcctctggggcccgaaatgactcaccaacacagattcccgtgtcttctgatgtgtgtagactgactcccgcctag

SEQ ID NO: 59720 - DNA, 2049 bp, Artificial Sequence
  derived and/or modified sequence
atgtgccccgggctatacccgtactccagtctacttgaatatgggcggtccatgatcatttacgaacaggaaggcgtctacatccatagtagttgtggtaagactaacgaccaagacggacttatctccgggatcctgagagtgctggagaaagatgcggaagtgatcgtagactggaggccgcttgacgatgctcttgactcttccagcattttatatgccagaaaggacagctcctccgtcgtagaatggactcaggcccccaaagagcgaggacaccgaggttctgaacacctaaactcctatgaggcagaatgggatatggtgaacacggtcagttttaaaagaaaaccacatactaacggtgatgccccaagccatagaaacggcaaaagtaaatggtccttcctgtttagtctaacggatctgaagagcatcaaacagaataaagaaggaatgggttggagctaccttgttttttgtcttaaggatgacgtggtattgcctgccttacatttccatcagggggatagcaagttgctgattgagagtctggagaaatatgtggtgctttgtgaatccccgcaagacaagcgtacgctcttggtaaactgtcagaacaaaagcctctcccaatccttcgaaaatctcctggacgaaccagcctacggactgatccaaaaaattaaaaaagatccatataccgccacaatgatcgggttctctaaggtcacaaattacatctttgacagcttgaggggctccgatccttcgacacatcagagaccaccttctgagatggccgactttctttccgatgcaatccccggtttgaagattaaccagcaggaagagcctggcttcgaggtgatcacacgaattgacttaggggagcgacctgtggtccagcggagggagccagttagccttgaggaatggaccaagaacatagatagtgagggacggattcttaatgtggataacatgaaacaaatgatctttaggggcggactatcgcatgcgttgaggaaacaggcatggaagttccttctagggtattttccctgggacagtaccaaggaggaacggacacaattacagaagcagaagacggacgaatatttccggatgaaattacagtggaagagtatcagtcaagagcaggaaaaaaggaatagtagactaagggattaccggagcctgatagaaaaggacgtaaacaggactgatcgaaccaataaattctacgaaggtcaggataaccccggcctcattctgctgcacgatattcttatgacctactgtatgtatgacttcgatttagggtatgtccagggcatgtcagatctactctccccattgttatacgtcatggagaacgaggtggatgccttttggtgctttgcgtcttatatggatcaaatgcatcagaacttcgaggaacagatgcaaggtatgaagactcagctcattcagctctcgacattgttacggctccttgatagtggattttgtagttacttggagtctcaggattctggatatctatacttctgttttcgctggctgcttatacgtttcaaacgcgaattctcttttctcgacatcttgcgcttgtgggaagtaatgtggaccgagctaccctgcacgaattttcatcttctattgtgctgcgccatcttagaatccgagaagcagcagataatggaaaagcactacggtttcaacgagatcctgaaacacattaacgaattgtccatgaaaatcgacgtggaggacattctctgcaaagccgaggccatttctctgcaaatggtgaagtgtaaagaacttcctcaagccgtctgcgaaatccttggactccagggctcggaagtgactacacctgattctgatgtaggagaagatgagaacgtcgtcatgaccccttgtcctacctccgcctttcaatcaaatgctttgcctacccttagtgcttcaggcgccagaaatgactcacccacgcagatccctgtctcatcagacgtgtgtcgtctcaccccggcgtag

SEQ ID NO: 59721 - DNA, 2159 bp, Artificial Sequence
  derived and/or modified sequence
attaccaggcacgcgcaggaaacatggcggcggcgggtgttgtgagcgggaaggtttttggtttcttcttgattcaatcttgataagtagtatgtgtccaggactttatccatactccagtttgttggagtatggtaggagtatgattatatatgaacaagaaggagtatatattcactcatcttgtggaaagaccaatgaccaagacggcttgatttcaggaatattacgtgttttagaaaaggatgccgaagtaatagtggactggagaccattggatgatgcattagattcctctagtattctctatgctagaaaggactccagttcagttgtagaatggactcaggccccaaaagaaagaggtcatcgaggatcagaacatctgaacagttacgaagcagaatgggacatggttaatacagtttcatttaaaaggaaaccacataccaatggagatgctccaagtcatagaaatgggaaaagcaaatggtcattcctgttcagtttgacagacctgaaatcaatcaagcaaaacaaagagggtatgggctggtcctatttggtattctgtctaaaggatgacgtcgttctccctgctctacactttcatcaaggagatagcaaactactgattgaatctcttgaaaaatatgtggtattgtgtgaatctccacaggataaaagaacacttcttgtgaattgtcagaataagagtctttcacagtcttttgaaaatcttcttgatgagccagcatatggtttaatacaaaaaattaaaaaggacccttatacggcaactatgataggattttccaaagtcacaaactacatttttgacagtttgagaggcagcgatccctctacacatcaacgaccaccttcagaaatggcagattttcttagtgatgctattccaggtctaaagataaatcaacaagaagaaccaggatttgaagtcatcacaagaattgatttgggggaacgccctgttgttcaaaggagagaaccggtatcactggaagaatggactaagaacattgattctgaaggaagaattttaaatgtagataatatgaagcagatgatatttagagggggacttagtcatgcattgagaaagcaagcatggaaatttcttctgggttattttccctgggacagtaccaaggaggaaagaacccaattacaaaagcaaaaaactgatgaatacttcagaatgaaactgcagtggaaatccatcagccaggaacaagagaaaagaaattcgaggttaagagattatagaagtcttatcgaaaaagatgttaacagaacagatcgaacaaacaagttttatgaaggccaagataatccagggttgattttacttcatgacattttgatgacctactgtatgtatgattttgatttaggatatgttcaaggaatgagtgatttactttcccctcttttatatgtgatggaaaatgaagtggatgccttttggtgctttgcctcttacatggaccaaatgcatcagaattttgaagaacaaatgcaaggcatgaagacccagctaattcagctgagtaccttacttcgattgttagacagtggattttgcagttacttagaatctcaggactctggatacctttatttttgcttcaggtggcttttaatcagattcaaaagggaatttagttttctagatattcttcgattatgggaggtaatgtggaccgaactaccatgtacaaatttccatcttcttctctgttgtgctattctggaatcagaaaagcagcaaataatggaaaagcattatggcttcaatgaaatacttaagcatatcaatgaattgtccatgaaaattgatgtggaagatatactctgcaaggcagaagcaatttctctacagatggtaaaatgcaaggaattgccacaagcagtctgtgagatccttgggcttcaaggcagtgaagttacaacaccagattcagacgttggtgaagacgaaaatgttgtcatgactccttgtcctacatctgcatttcaaagtaatgccttgcctacactctctgccagtggagccagaaatgacagcccaacacagataccagtgtcctcagatgtctgcagattaacacctgcatgatcactgttcttgctttttt

SEQ ID NO: 59722 - DNA, 1908 bp, Artificial Sequence
  derived and/or modified sequence
aaacatggcggcggcgggtgttgtgagcgggaagattatatatgaacaagaaggagtatatattcactcatcttgtggaaagaccaatgaccaagacggcttgatttcaggaatattacgtgttttagaaaaggatgccgaagtaatagtggactggagaccattggatgatgcattagattcctctagtattctctatgctagaaaggactccagttcagttgtagaatggactcaggccccaaaagaaagaggtcatcgaggatcagaacatctgaacagttacgaagcagaatgggacatggttaatacagtttcatttaaaaggaaaccacataccaatggagatctccacaggataaaagaacacttcttgtgaattgtcagaataagagtctttcacagtcttttgaaaatcttcttgatgagccagcatatggtttaatacaaaaaattaaaaaggacccttatacggcaactatgataggattttccaaagtcacaaactacatttttgacagtttgagaggcagcgatccctctacacatcaacgaccaccttcagaaatggcagattttcttagtgatgctattccaggtctaaagataaatcaacaagaagaaccaggatttgaagtcatcacaagaattgatttgggggaacgccctgttgttcaaaggagagaaccggtatcactggaagaatggactaagaacattgattctgaaggaagaattttaaatgtagataatatgaagcagatgatatttagagggggacttagtcatgcattgagaaagcaagcatggaaatttcttctgggttattttccctgggacagtaccaaggaggaaagaacccaattacaaaagcaaaaaactgatgaatacttcagaatgaaactgcagtggaaatccatcagccaggaacaagagaaaagaaattcgaggttaagagattatagaagtcttatcgaaaaagatgttaacagaacagatcgaacaaacaagttttatgaaggccaagataatccagggttgattttacttcatgacattttgatgacctactgtatgtatgattttgatttaggatatgttcaaggaatgagtgatttactttcccctcttttatatgtgatggaaaatgaagtggatgccttttggtgctttgcctcttacatggaccaaatgcatcagaattttgaagaacaaatgcaaggcatgaagacccagctaattcagctgagtaccttacttcgattgttagacagtggattttgcagttacttagaatctcaggactctggatacctttatttttgcttcaggtggcttttaatcagattcaaaagggaatttagttttctagatattcttcgattatgggaggtaatgtggaccgaactaccatgtacaaatttccatcttcttctctgttgtgctattctggaatcagaaaagcagcaaataatggaaaagcattatggcttcaatgaaatacttaagcatatcaatgaattgtccatgaaaattgatgtggaagatatactctgcaaggcagaagcaatttctctacagatggtaaaatgcaaggaattgccacaagcagtctgtgagatccttgggcttcaaggcagtgaagttacaacaccagattcagacgttggtgaagacgaaaatgttgtcatgactccttgtcctacatctgcatttcaaagtaatgccttgcctacactctctgccagtggagccagaaatgacagcccaacacagataccagtgtcctcagatgtctgcagattaacacctgcatgatcactgttcttgcttttttgggaagagacactttgttgcaaccctttttcaagtacttgaaagttgaaaatttgaaatcttggtattgat

SEQ ID NO: 59723 - protein, 476 aa, Artificial Sequence
  derived and/or modified sequence
MTEGSMGVTLEASAEADLKAGNSCPELVPSRRSKLRKPKPVPLRKKAIGGEFSDTNAAVEGTPLPKASYHFSPEELDENTSPLLGDARFQKSPPDLKETPGTLSSDTNDSGVELGEESRSSPLKLEFDFTEDTGNIEARKALPRKLGRKLGSTLTPKIQKDGISKSAGLEQPTDPVARDGPLSQTSSKPDPSQWESPSFNPFGSHSVLQNSPPLSSEGSYHFDPDNFDESMDPFKPTTTLTSSDFCSPTGNHVNEILESPKKAKSRLITSGCKVKKHETQSLALDACSRDEGAVISQISDISNRDGHATDEEKLASTSCGQKSAGAEVKGEPEEDLEYFECSNVPVSTINHAFSSSEAGIEKETCQKMEEDGSTVLGLLESSAEKAPVSVSCGGESPLDGICLSESDKTAVLTLIREEIITKEIEANEWKKKYFNKEVFRGDICPKRFGLQIPVIFKKQLTTKSLSLHRVTVKKLM

SEQ ID NO: 59724 - protein, 610 aa, Artificial Sequence
  derived and/or modified sequence
MTEGSMGVTLEASAEADLKAGNSCPELVPSRRSKLRKPKPVPLRKKAIGGEFSDTNAAVEGTPLPKASYHFSPEELDENTSPLLGDARFQKSPPDLKETPGTLSSDTNDSGVELGEESRSSPLKLEFDFTEDTGNIEARKALPRKLGRKLGSTLTPKIQKDGISKSAGLEQPTDPVARDGPLSQTSSKPDPSQWESPSFNPFGSHSVLQNSPPLSSEGSYHFDPDNFDESMDPFKPTTTLTSSDFCSPTGNHVNEILESPKKAKSRLITSGCKVKKHETQSLALDACSRDEGAVISQISDISNRDGHATDEEKLASTSCGQKSAGAEVKGEPEEDLEYFECSNVPVSTINHAFSSSEAGIEKETCQKMEEDGSTVLGLLESSAEKAPVSVSCGGESPLDGICLSESDKTAVLTLIREEIITKEIEANEWKKKYEETRQEVLEMRKIVAEYEKTIAQMIEDEQRTSMTSQKSFQQLTMEKEQALADLNSVERSLSDLFRRYENLKGVLEGFKKNEEALKKCAQDYLARVKQEEQRYQALKIHAEEKLDKANEEIAQVRTKAKAESAALHAGLRKEQMKVESLERALQQKNQEIEELTKICDELIAKLGKTD

SEQ ID NO: 59725 - protein, 30 aa, Artificial Sequence
  derived and/or modified sequence
MTEGSMGVTLEASAEADLKAGNSCPELVPS

SEQ ID NO: 59726 - protein, 138 aa, Artificial Sequence
  derived and/or modified sequence
MTEGSMGVTLEASAEADLKAGNSCPELVPSRRSKLRKPKPVPLRKKAIGGEFSDTNAAVEGTPLPKASYHFSPEELDENTSPLLGDARFQKSPPDLKETPGTLSSDTNDSGVELGEESRSSPLKLEFDFTEDTGNIEA

SEQ ID NO: 59727 - protein, 61 aa, Artificial Sequence
  derived and/or modified sequence
MTEGSMGVTLEASAEADLKAGNSCPELVPSRRSKLRKPKPVPLRKKAIGGEFSDTNAAVEG

SEQ ID NO: 59728 - DNA, 1431 bp, Artificial Sequence
  derived and/or modified sequence
atgaccgagggcagcatgggcgtgaccctggaggccagcgccgaggccgacctgaaggccggcaacagctgccccgagctggtgcccagcagaagaagcaagctgagaaagcccaagcccgtgcccctgagaaagaaggccatcggcggcgagttcagcgacaccaacgccgccgtggagggcacccccctgcccaaggccagctaccacttcagccccgaggagctggacgagaacaccagccccctgctgggcgacgccagattccagaagagcccccccgacctgaaggagacccccggcaccctgagcagcgacaccaacgacagcggcgtggagctgggcgaggagagcagaagcagccccctgaagctggagttcgacttcaccgaggacaccggcaacatcgaggccagaaaggccctgcccagaaagctgggcagaaagctgggcagcaccctgacccccaagatccagaaggacggcatcagcaagagcgccggcctggagcagcccaccgaccccgtggccagagacggccccctgagccagaccagcagcaagcccgaccccagccagtgggagagccccagcttcaaccccttcggcagccacagcgtgctgcagaacagcccccccctgagcagcgagggcagctaccacttcgaccccgacaacttcgacgagagcatggaccccttcaagcccaccaccaccctgaccagcagcgacttctgcagccccaccggcaaccacgtgaacgagatcctggagagccccaagaaggccaagagcagactgatcaccagcggctgcaaggtgaagaagcacgagacccagagcctggccctggacgcctgcagcagagacgagggcgccgtgatcagccagatcagcgacatcagcaacagagacggccacgccaccgacgaggagaagctggccagcaccagctgcggccagaagagcgccggcgccgaggtgaagggcgagcccgaggaggacctggagtacttcgagtgcagcaacgtgcccgtgagcaccatcaaccacgccttcagcagcagcgaggccggcatcgagaaggagacctgccagaagatggaggaggacggcagcaccgtgctgggcctgctggagagcagcgccgagaaggcccccgtgagcgtgagctgcggcggcgagagccccctggacggcatctgcctgagcgagagcgacaagaccgccgtgctgaccctgatcagagaggagatcatcaccaaggagatcgaggccaacgagtggaagaagaagtacttcaacaaggaggtgttcagaggcgacatctgccccaagagattcggcctgcagatccccgtgatcttcaagaagcagctgaccaccaagagcctgagcctgcacagagtgaccgtgaagaagctgatgtag

SEQ ID NO: 59729 - DNA, 417 bp, Artificial Sequence
  derived and/or modified sequence
atgaccgagggcagcatgggcgtgaccctggaggccagcgccgaggccgacctgaaggccggcaacagctgccccgagctggtgcccagcagaagaagcaagctgagaaagcccaagcccgtgcccctgagaaagaaggccatcggcggcgagttcagcgacaccaacgccgccgtggagggcacccccctgcccaaggccagctaccacttcagccccgaggagctggacgagaacaccagccccctgctgggcgacgccagattccagaagagcccccccgacctgaaggagacccccggcaccctgagcagcgacaccaacgacagcggcgtggagctgggcgaggagagcagaagcagccccctgaagctggagttcgacttcaccgaggacaccggcaacatcgaggcctag

SEQ ID NO: 59730 - DNA, 186 bp, Artificial Sequence
  derived and/or modified sequence
atgaccgagggcagcatgggcgtgaccctggaggccagcgccgaggccgacctgaaggccggcaacagctgccccgagctggtgcccagcagaagaagcaagctgagaaagcccaagcccgtgcccctgagaaagaaggccatcggcggcgagttcagcgacaccaacgccgccgtggagggctag

SEQ ID NO: 59731 - DNA, 1431 bp, Artificial Sequence
  derived and/or modified sequence
atgaccgaaggctccatgggggtgaccctggaagcttcagctgaggccgacttgaaagcgggcaactcatgcccagaactggtgcccagcaggcgtagcaagttgaggaagcctaaacctgtccctctacggaagaaagccattggaggggagttctctgatactaacgctgcggtagaaggcacacctttaccaaaggcctcatatcatttttcccctgaggaacttgacgagaatacatcccccctgctgggtgatgctaggttccagaagagtccgcctgatctgaaagaaacccctggcacactgagctcggatacaaatgactctggtgtggaattgggagaagagtcgagaagctctcccctcaaattggaattcgactttacggaggatacgggaaatatcgaggcgcgaaaagcgctgccccggaagctaggccggaagctcggaagtactctgacacccaaaatacagaaagatggtatcagcaagtccgctggcctggaacaacccaccgacccagtggcccgggatggtccactatcacagacgtcgagcaagcctgacccaagccagtgggaatccccttccttcaatccttttggctcacattctgtgctccagaattcacctcccctctcctctgaggggtcatatcacttcgatccagataacttcgacgaaagcatggacccttttaaaccaaccactacgttaaccagtagtgatttctgttcccctaccggcaatcatgtcaacgagatcctcgagagcccaaagaaagcaaaaagccggctgataacttccggctgcaaggtgaagaaacatgagacacaaagtctggccttggatgcgtgttcccgcgatgagggtgccgtaatctcacagattagcgacatttccaaccgcgatggacacgcaaccgacgaagaaaagctcgcatccactagctgtggccagaagagcgccggcgcggaagtgaagggagaacccgaagaggacttggaatactttgagtgttcaaatgtgcccgtctcgaccattaatcacgctttttcaagcagcgaggctggcattgagaaagaaacctgccaaaagatggaggaagatggttccacagtcctgggtctcttagaatcaagcgcggaaaaggcgccagtcagcgtgagctgtggcggcgaatcccctcttgacgggatttgccttagcgagtccgataagacagctgttctaacactaatacgcgaggagatcatcacgaaggaaatcgaggccaatgaatggaagaagaagtattttaacaaggaggtgttcagaggtgacatttgccccaaaaggttcggcctacagattcccgtgatcttcaagaaacagcttaccacaaagagcctcagcctccatcgggtaacagtgaaaaagctcatgtag

SEQ ID NO: 59732 - DNA, 417 bp, Artificial Sequence
  derived and/or modified sequence
atgactgaaggcagtatgggggtcaccctggaagcgagcgctgaagcagacctgaaggcaggaaacagctgtcctgagctggtcccatctagacgaagcaaactacggaagccgaaacccgtgccgcttcggaaaaaagccatcgggggcgagtttagcgatacgaacgccgccgtcgagggcacgccccttcctaaagcttcctaccattttagccccgaagaacttgacgagaacacctctcctctcctaggcgatgctcgattccagaaatctccacctgatctgaaagagacacctggtactttgtcatcagacacaaatgattctggagtcgagctgggtgaagaatcgaggtcatctcctctaaaactggaattcgactttactgaggacaccgggaacatcgaagcatag

SEQ ID NO: 59733 - DNA, 186 bp, Artificial Sequence
  derived and/or modified sequence
atgacagaggggtctatgggcgtgacattggaggcgtctgctgaagccgatctgaaggctggcaatagctgccctgaactcgtcccatcccggcgcagcaagttacgtaaacctaagccggttccgctaaggaagaaagccatcgggggcgagttttccgatactaacgcagcagtagagggctag

SEQ ID NO: 59734 - DNA, 1431 bp, Artificial Sequence
  derived and/or modified sequence
atgacagagggctccatgggcgtgaccctggaggccagcgctgaggccgacctgaaggccggcaacagctgcccagagctggtgcccagcagaagaagcaagctgaggaagcccaagcctgtgcccctgaggaagaaggccatcggcggggagttcagtgacaccaatgctgctgtggagggcacccccctgcccaaggccagctaccacttcagccctgaggagctggatgagaacaccagccccctgctgggagatgcccgcttccagaagagccccccagacctgaaggagaccccaggcaccctgagcagtgacaccaatgacagcggcgtggagctgggggaggagagccgcagcagccccctgaagctggagtttgacttcacagaagatactggaaacatcgaggccaggaaggccctgcccaggaagctgggcaggaagctgggcagcaccctgacccccaagatccagaaggatggcatcagcaagtctgctggcctggagcagcccacagatcctgtggccagagatggccccctgagccagaccagcagcaagccagaccccagccagtgggagagccccagcttcaaccccttcggcagccacagcgtgctgcagaacagcccccccctgagcagcgagggcagctaccactttgatcctgacaactttgatgagagcatggaccccttcaagcccaccaccaccctgaccagcagtgacttctgcagccccactggaaaccacgtgaatgagatcctggagagccccaagaaggccaagagccgcctcatcaccagcggctgcaaggtgaagaagcatgagacccagagcctggccctggatgcctgcagcagagatgagggcgctgtgatcagccagatcagtgacatcagcaacagagatggccacgccacagatgaggagaagctggccagcaccagctgtggccagaagtctgctggagctgaggtgaagggggagcctgaggaggacctggagtactttgagtgcagcaatgtgcctgtgtccaccatcaaccacgccttcagcagcagcgaggccggcatcgagaaggagacctgccagaagatggaggaggatggcagcacagtgctgggcctgctggagagcagcgctgagaaggcccctgtgtctgtgtcctgtggcggggagagccccctggatggcatctgcctgtctgagagtgacaagacagctgtgctgaccctcatccgggaggagatcatcaccaaggagattgaggccaatgagtggaagaagaagtacttcaacaaggaggtgttccggggggacatctgccccaagcgcttcggcctgcagatccctgtgatcttcaagaagcagctgaccaccaagagcctgagcctgcaccgggtgacagtgaagaagctgatgtag

SEQ ID NO: 59735 - DNA, 417 bp, Artificial Sequence
  derived and/or modified sequence
atgacagagggctccatgggcgtgaccctggaggccagcgctgaggccgacctgaaggccggcaacagctgcccagagctggtgcccagcagaagaagcaagctgaggaagcccaagcctgtgcccctgaggaagaaggccatcggcggggagttcagtgacaccaatgctgctgtggagggcacccccctgcccaaggccagctaccacttcagccctgaggagctggatgagaacaccagccccctgctgggagatgcccgcttccagaagagccccccagacctgaaggagaccccaggcaccctgagcagtgacaccaatgacagcggcgtggagctgggggaggagagccgcagcagccccctgaagctggagtttgacttcacagaagatactggaaacatcgaggcctag

SEQ ID NO: 59736 - DNA, 186 bp, Artificial Sequence
  derived and/or modified sequence
atgacagagggctccatgggcgtgaccctggaggccagcgctgaggccgacctgaaggccggcaacagctgcccagagctggtgcccagcagaagaagcaagctgaggaagcccaagcctgtgcccctgaggaagaaggccatcggcggggagttcagtgacaccaatgctgctgtggagggctag

SEQ ID NO: 59737 - DNA, 1431 bp, Artificial Sequence
  derived and/or modified sequence
atgaccgagggcagcatgggcgtgaccctggaggccagcgccgaggcggacttaaaggccggcaatagctgccccgaactcgtacccagccgacgatccaagttacgtaagcccaagcccgttcccttgagaaagaaggccattggtggcgaattttcggacaccaatgctgcagttgaaggcactcctctgcctaaggccagctatcatttctccccagaagaactcgacgagaatacgagccccctgctgggcgatgcccgatttcagaaaagcccccctgacttgaaggaaacccctggtactctgagcagcgacactaacgattccggagtggagctcggagaagagtctaggagcagcccgttgaagttagaattcgattttaccgaagacaccgggaatatcgaagccagaaaagcgttgccaagaaaacttggtcgtaaactcggaagtactctgaccccaaagattcagaaagacggaataagcaaaagtgctggcctggagcaaccaacggacccagtagctcgggatggacccctgagccagacgagcagtaagcctgatccatctcaatgggaatcacccagctttaacccttttggctctcacagtgtcctccagaactctccacccctttcctcagaggggtcttaccatttcgacccagataacttcgacgagtctatggacccatttaaacccactaccaccctcactagctccgatttttgctcgcccactgggaaccacgtaaatgagattctcgaatcgccgaagaaggccaaatcccggctgatcaccagcggttgcaaggtgaaaaaacatgagacacagtcgctggccttggacgcctgcagtcgcgacgaaggcgctgtgataagccagatttcggatataagtaatcgagacgggcacgccaccgatgaggagaagctggcctccacctcttgtggccagaaatctgccggggccgaagtcaagggtgagcccgaagaggatttggagtacttcgaatgctctaacgtcccagtgtcaaccatcaatcacgcttttagtagcagcgaggccggtattgagaaagagacatgccaaaagatggaggaagacggaagtaccgtgcttggcctccttgagtcctccgctgagaaagcaccagtcagtgtgtcctgcggtggagagagccccctggatggcatttgcctcagcgagtccgacaaaaccgccgttctgacattgattcgggaggaaatcatcaccaaggagatcgaagcaaacgagtggaagaaaaagtattttaataaggaggtttttaggggcgatatatgccccaaacggttcggcctgcagatccccgtgatctttaaaaaacagctaacaactaaatctctctccctacatagagtgacagtaaaaaagttgatgtag

SEQ ID NO: 59738 - DNA, 417 bp, Artificial Sequence
  derived and/or modified sequence
atgaccgagggcagcatgggcgtgaccctggaggccagcgccgaggccgacttgaaggctggtaattcctgccccgagctggtcccctctagaaggtctaagctgcgaaagcccaaaccagtccctctaagaaagaaggcaatcggaggggagttcagtgatactaacgccgccgtggaaggtacaccgctgcctaaagccagttaccacttctcgccagaggaactagatgagaatacctctccactgttgggtgatgcacgtttccagaaatctcctcctgacctgaaagagacacccggcacactgagcagtgacaccaatgattccggagtggagcttggagaggagtcccgctcgtctcccctcaagctggagttcgactttacggaagacacggggaatatcgaagcatag

SEQ ID NO: 59739 - DNA, 186 bp, Artificial Sequence
  derived and/or modified sequence
atgaccgagggcagcatgggcgtgaccctggaggccagcgccgaggccgacctgaaagccggcaattcctgcccggaacttgtccccagccggcgatccaaactacgcaagccaaaaccagttcctctgagaaagaaggcaataggcggcgagttctcagacacaaatgctgccgttgaaggctag

SEQ ID NO: 59740 - DNA, 1431 bp, Artificial Sequence
  derived and/or modified sequence
atgaccgagggttcgatgggcgtgaccttggaggccagcgccgaagctgacctgaaagcaggcaactcatgcccagaattggtaccttcccgaaggtcaaagctcagaaagcctaagccagtgccactgcgaaagaaggccatcggaggggagttcagcgatacaaacgccgcagtggaaggcacaccccttcctaaggcatcctaccacttcagccctgaagagcttgatgagaatacaagcccactgctgggagacgcacgcttccagaaatctcccccagacttgaaggagacaccagggacccttagcagcgacacaaatgacagcggggttgagctgggcgaggagagtcgcagctctccactgaaattagagttcgactttactgaggacaccggtaacatcgaagccagaaaggccttgcctaggaaattagggagaaaactgggttctacactgacacctaaaatccagaaggatggcatctccaagtctgccggactcgagcaacccaccgatccagtcgcgcgtgatgggccactgagccagacctcttctaagcctgatcccagtcagtgggaaagccccagtttcaatccttttggatctcattctgtgctacagaattcccccccactctctagcgaaggtagctaccactttgacccggacaacttcgacgaatcgatggatccgtttaagcccacgacaacattaactagctccgatttttgtagcccaaccggaaatcacgtgaacgaaatcctggaatcccctaagaaggccaaatcccggctgattacttctggatgtaaggtgaagaagcatgaaacacaatctctggccttggacgcatgttctcgcgatgaaggggcagtgatttctcagatctcagatattagcaacagagatgggcacgccactgacgaggaaaagttagcttctacctcttgtggccagaagagtgccggtgccgaagtgaagggagagccagaggaggacctcgagtatttcgagtgtagcaacgtccctgtgtctacaataaaccatgccttctcctcatcggaggccggaatcgagaaggagacttgccagaaaatggaggaagatggatcaactgttcttgggctgctagaatcctcggccgaaaaggctcctgtttccgtctcttgcggcggtgaatctccacttgacggcatttgtctaagtgagtccgacaaaacggccgttctgactttaatccgggaggagattatcacaaaagaaatcgaggcaaatgagtggaaaaagaaatacttcaataaagaggtgttccggggagacatctgtcccaagcggtttggactgcagattcccgtaatattcaagaagcagctcaccacaaagtcactcagccttcatagggtgacagtcaaaaaattgatgtag

SEQ ID NO: 59741 - DNA, 417 bp, Artificial Sequence
  derived and/or modified sequence
atgactgaaggatccatgggagtgacactggaagcctccgccgaggcggacctaaaagccggaaactcctgccctgaattggtaccatctcgccgttccaagctcagaaagccaaaacctgttccattgcgaaagaaggccattggcggagagttcagcgacacaaacgcagccgtcgagggcacccccctgcccaaggccagctaccacttcagccctgaagagctggacgaaaatacgtcccccttacttggcgatgcgcgttttcagaaaagccctccagatctgaaagagactcctgggacactgagtagtgatacgaacgatagcggcgtggaacttggcgaggagagtcgatccagcccgcttaaactggagtttgacttcactgaagatactgggaatatcgaagcttag

SEQ ID NO: 59742 - DNA, 186 bp, Artificial Sequence
  derived and/or modified sequence
atgaccgagggaagcatgggggtgaccctggaggccagcgccgaggccgacctcaaagccggaaactcctgccctgaattggtcccttccaggcgcagtaagcttcggaagccgaagcctgtgcccctccggaaaaaagctattggaggagaatttagcgacactaatgcagcagtcgaggggtag

SEQ ID NO: 59743 - protein, 140 aa, Artificial Sequence
  derived and/or modified sequence
MSRVLQKDAEQESQMRAEIQDMKQELSTVNMMDEFARYARLERKINKMTDKLKTHVKARTAQLAKIKWVISVAFYVLQAALMISLIWKYYSVPVAVVPSKWITPLDRLVAFPTRVAGGVGITCWILVCNKVVAIVLHPFS

SEQ ID NO: 59744 - DNA, 423 bp, Artificial Sequence
  derived and/or modified sequence
atgagcagagtgctgcagaaggacgccgagcaggagagccagatgagagccgagatccaggacatgaagcaggagctgagcaccgtgaacatgatggacgagttcgccagatacgccagactggagagaaagatcaacaagatgaccgacaagctgaagacccacgtgaaggccagaaccgcccagctggccaagatcaagtgggtgatcagcgtggccttctacgtgctgcaggccgccctgatgatcagcctgatctggaagtactacagcgtgcccgtggccgtggtgcccagcaagtggatcacccccctggacagactggtggccttccccaccagagtggccggcggcgtgggcatcacctgctggatcctggtgtgcaacaaggtggtggccatcgtgctgcaccccttcagctag

SEQ ID NO: 59745 - DNA, 423 bp, Artificial Sequence
  derived and/or modified sequence
atgtcacgagtactgcagaaggacgcggagcaagagtctcagatgagggccgagatccaggacatgaagcaggaactgtctacggtgaatatgatggacgaattcgctagatacgcccgccttgagagaaagatcaataagatgactgataaacttaaaacgcatgtgaaagccagaactgcccagctggcgaaaatcaagtgggttatctcagtggcgttttacgtattgcaggctgccctgatgatctctctgatctggaaatactattccgtgcctgttgctgtcgttcctagcaagtggatcacacccctggaccggctggttgcattccctactcgcgtggctggcggagtcggtattacctgctggatcctcgtatgcaacaaggtcgttgctatcgtgctgcatccgtttagctag

SEQ ID NO: 59746 - DNA, 423 bp, Artificial Sequence
  derived and/or modified sequence
atgagcagagtgctgcaaaaagacgctgagcaagagtcgcaaatgagggcagagattcaggacatgaagcaagagcttagtaccgtgaacatgatggatgagttcgccagatacgctaggctggaaaggaaaatcaataagatgaccgacaagctgaaaacacacgtcaaagctagaaccgcccaactcgccaagataaaatgggtgatctccgtggcattctacgtcctgcaggctgcacttatgatcagcctcatctggaaatactactctgtgccagtagctgtggtaccttcaaagtggattacccctctcgacagactggtggcattcccaacacgcgtggcaggaggtgtgggtatcacctgctggattctcgtctgtaacaaggtggtagcgatcgtcttgcaccccttctcctag

SEQ ID NO: 59747 - DNA, 423 bp, Artificial Sequence
  derived and/or modified sequence
atgagccgggtgctgcagaaggatgctgagcaggagagccagatgagagctgagatccaggacatgaagcaggagctgagcacagtgaacatgatggatgaatttgcccgctatgcccggctggagaggaagatcaacaagatgacagacaagctgaagacccacgtgaaggccaggacagcccagctggccaagatcaagtgggtgatctctgtggccttctacgtgctgcaggccgccctgatgatcagcctcatctggaagtactacagcgtgcctgtggccgtggtgcccagcaagtggatcacccccctggaccggctggtggccttccccaccagggtggccggcggcgtgggcatcacctgctggatcctggtgtgcaacaaggtggtggccatcgtgctgcaccccttctcctag

SEQ ID NO: 59748 - DNA, 423 bp, Artificial Sequence
  derived and/or modified sequence
atgagccgggtgctgcagaaggacgccgagcaggagagccagatgcgtgcagagatccaggacatgaagcaggagttgtctacagtaaatatgatggatgaattcgcacgttatgcaagactagaaagaaaaatcaacaagatgaccgataaactgaagactcacgtcaaagctcggacagcacagttagctaaaatcaaatgggtgatttccgtggccttctatgtgttacaggctgccttgatgatctctcttatctggaagtattactcagtgcccgttgcagttgtccctagcaaatggatcaccccactggatagactcgtagccttccctacgcgggtggccggcggcgtgggtatcacatgttggatactcgtttgtaacaaagtggtagccatcgtgctgcatcccttcagttag

SEQ ID NO: 59749 - DNA, 423 bp, Artificial Sequence
  derived and/or modified sequence
atgagccgggtgctgcagaaggacgccgagcaggagagccagatgcgggccgagatccaggacatgaagcaggagttaagtactgttaacatgatggacgagttcgctcggtacgctcggctggagagaaagatcaataagatgaccgacaaactgaaaacccatgtcaaggcccgcactgcacaattggctaagataaaatgggtgataagtgtggcattttacgtacttcaggctgcactcatgattagcctcatctggaagtactatagcgtccctgtggccgtcgtgcctagcaaatggatcacgcctttggacagactcgtagcatttcccacccgggtggcaggcggagtaggtatcacgtgttggattctggtttgcaataaggtagtagctatagtgctgcatcctttttcctag

SEQ ID NO: 59750 - DNA, 423 bp, Artificial Sequence
  derived and/or modified sequence
atgtcacgcgtgctgcagaaggacgctgagcaagagtcacagatgcgcgctgagatccaagacatgaagcaggaactgagcacagttaatatgatggatgagtttgcaaggtatgcacgtctggagaggaagataaataagatgactgacaaactgaagacccatgtcaaggccagaaccgcccagctggctaagatcaagtgggttatatctgtggccttctatgtgctgcaagcagccctgatgatctccttgatttggaagtactatagtgtgccagttgccgtggtcccaagcaagtggattacccctcttgacaggcttgtggcattccccacccgtgtggccggaggtgttggaataacttgctggatccttgtctgcaacaaggtggtcgctatcgtgctccaccctttcagctag

SEQ ID NO: 59751 - DNA, 423 bp, Artificial Sequence
  derived and/or modified sequence
atgagcagagtgcttcagaaggacgctgagcaagaatcccagatgagagccgagatacaggacatgaaacaggagctctccacagtgaatatgatggacgaattcgctagatacgccagactcgagcgtaaaatcaataagatgacagacaagctcaaaactcatgtgaaggcccgtaccgcacaactcgctaagattaaatgggttatcagtgtggccttctacgtgctccaggccgcacttatgattagccttatttggaaatactattctgtgcccgtagccgtcgttcccagcaagtggatcacacctctcgataggctagtggcgttccccacccgggtggcaggcggtgtcggcattacttgctggattctggtatgtaacaaagtggtcgccatcgtgctgcatccattttcatag

SEQ ID NO: 59752 - DNA, 1464 bp, Artificial Sequence
  derived and/or modified sequence
atgcgcagacaccctcaggcgactggcgggtcgcggcttccaagctctaaatggagagttgtccctactgtgcggcaggcggaggagacctatgtccagggtgctgcagaaggacgcggagcaggagtcacagatgagagcggagatccaggacatgaagcaggagctctccacagtcaacatgatggacgagtttgccagatatgccaggctggaaagaaagatcaacaagatgacggataagctcaaaacccatgtgaaagctcggacagctcaattagccaagataaaatgggtgataagtgtcgctttctacgtattgcaggctgccctgatgatctcactcatttggaagtattattctgtccctgtggctgtcgtgccgagtaaatggataacccctctagaccgcctggtagcctttcctactagagtagcaggtggtgttggaattacctgttggattttagtctgtaacaaagttgtcgctattgtgcttcatccgttcagctgaacaggaggatggatacagccgcgaggctaaaaaacggatttcctcttcctagcttaaaatctgatttacactgttttgttttttaagaaacaaaagtgcatagtttagattttttttttgttgaatatgtttgttcttggactttatgagagagtcttataagaatcacgattttctacacctgtcattgagccaagaaagtccagtttatgacacgtatgtactagtgaacaccgtcctcgatctgtacgaaatgtgaaatgtttagggacatctccatgctgtcacttgtgatttgccctcttatgtattttggtcatattgccaactggaaagtcaaaattttctaacaactttaagtaagttctttgaagacttagtgctgtttttaatccagtttagaaagtaacttaattttaataccactactaaaaattcgaaaatttcttctttaatcacattcaatatggttaaaagaacaacactaattgacattgcgtgggctttttctccctttgtttaaaatgtcatttgttgagcaagagttgtatagtattatctacttacttgaggctgttaatttttcattacagtgttttgtaaatgtatccacgagaccatgatgcattgttttgtgctcaacttgtgttttgtatttaaagcattttgaatgaagtgtattttataagcatttaatatttatgctctttagaatggaacacagaaaacaaaccttataagtcctgattaatctgaaccaataacctgtgtggcctacaaagtataattctattaaatgttccttaaaacacttttttctaattaaaatctttgcaaatgcttgtgtaacttcctgccttacagctacttgtttgctgtgagccacccgcaactgacaagtggctgttaactgagtcaccatatcccagtaaagctgaattttctcacta

SEQ ID NO: 59753 - protein, 469 aa, Artificial Sequence
  derived and/or modified sequence
MSRQLTHFPRGERLGFSGCSAVLSGGIGSSSASFRARVKGSASFGSKSLSCLGGSRSLALSAAARRGGGRLGGFVGTAFGSAGLGPKCPSVCPPGGIPQVTVNKSLLAPLNVEMDPEIQRVRAQEREQIKALNNKFASFIDKVRFLEQQNQVLETKWNLLQQLDLNNCRKNLEPIYEGYISNLQKQLEMLSGDGVRLDSELRNMQDLVEDYKKRYEVEINRRTAAENEFVVLKKDVDAAYMNKVELQAKVDSLTDEIKFFKCLYEGEITQIQSHISDTSIVLSMDNNRDLDLDSIIAEVRAQYEEIALKSKAEAETLYQTKCADLETAIADAEQRGDCALKDARAKLDELEGALHQAKEELARMLREYQELVSLKLALDMEIATYRKLLESEECRMSGEYPNSVSISVISSTNAGAGGAGFSMGFGASSSYSYKTAAADVKTKGSCGSELKDPLAKTSGSSCATKKASR

SEQ ID NO: 59754 - DNA, 1410 bp, Artificial Sequence
  derived and/or modified sequence
atgtcccgtcagttgacgcactttccacgcggtgagcgcctcggtttctccgggtgtagcgctgtcctgtctggaggcattggttcttccagcgcttcattcagagcacgggtcaagggctctgcgtctttcggatccaaaagtctctcatgcctcggtggcagtcggtctttggccctaagcgccgctgctcgaaggggcgggggccgccttggaggatttgtgggaaccgcatttggctctgcaggcctgggccctaaatgcccgtctgtatgcccaccgggagggattcctcaagtgactgtgaacaagtccctcctggcccccctcaacgtcgaaatggacccagagatccagagagtgcgcgcccaagagcgtgaacagattaaagcattgaacaataaatttgcctccttcatcgataaagtgcgcttcctggagcaacagaaccaagttttagaaacaaagtggaatctcctacaacagctggatctcaacaattgtcgtaagaacctggaaccaatctatgaagggtacatcagtaatcttcaaaaacagctggaaatgctgtctggtgacggtgttcggctggactctgaactcagaaacatgcaggacctggtcgaagactataaaaagaggtacgaggtggagatcaatcgacggaccgccgccgagaacgagtttgttgtgctcaagaaagacgttgacgccgcttacatgaacaaggtggagctgcaggccaaggtagactccttgaccgatgagatcaaatttttcaagtgcttgtacgagggagagattactcagatccagtctcacataagcgatacttccatcgtactttctatggacaataatagggatctagacttggatagcatcatagctgaagtcagagcacaatatgaagagatcgctttgaagagtaaggctgaagcggagaccctctatcagacaaaatgcgcagacctggaaactgctattgctgatgcggaacagcgcggcgactgtgcactcaaggacgctcgggcaaagctcgatgagctggaaggagccctgcatcaggccaaggaggagctggcaaggatgctccgggagtatcaggaattggtctctttaaaactcgcactagatatggaaatcgctacatataggaaactgttggagtccgaagaatgccgtatgtctggagagtatccaaattccgtctctatttctgttatctcatccacaaacgctggtgctggtggggcaggcttttctatgggcttcggagcttctagcagctactcctacaaaaccgccgccgcagacgtaaaaactaaagggagctgcggctccgagctgaaggatcccctcgccaaaacgtccggtagcagctgtgccacgaaaaaggcttctcgctag

SEQ ID NO: 59755 - DNA, 1764 bp, Artificial Sequence
  derived and/or modified sequence
atttaaggggcgagctgggccgagaacgcagcggctgtttgcgccccttctgcctcccgcgcggccagcaccggtacttgcgagccatgagccgccaactgacccatttcccccgcggggagcgcctgggcttcagcggttgctccgcggtcctctctggcgggatcggcagcagctccgcctcattccgggcccgggtcaagggctcggcctcctttggcagcaagagcctctcctgccttgggggcagccgaagcctggcgctcagcgctgctgcacggcggggcggcggccgcctgggcggcttcgtgggcaccgccttcggcagcgccgggctggggcccaagtgtccctccgtgtgcccacccgggggcatccctcaggtcaccgtcaacaagagcctcctggccccgctcaacgtggagatggaccccgagatccagagggtgcgcgcccaggagcgggagcagatcaaggcgctaaacaacaagttcgcctccttcatcgacaaggtgcggttcctggagcagcagaatcaggtgctagagaccaagtggaacctcctacagcagctggacttgaacaactgcaggaagaacctggagcccatttatgagggctacatcagcaacctgcagaagcagctggagatgctgtctggggacggggtgaggctggattcggagctgaggaacatgcaggatttggtggaggactacaagaagaggtatgaggtggagattaacagacgcacagctgctgagaatgagtttgtggtgctcaagaaggacgtggatgctgcttacatgaataaggttgagctccaggccaaggtggactccttgacagatgagattaaattcttcaagtgcctttatgaaggggagatcactcagatccagtcccacatcagcgacacgtccatcgtcctgtcaatggacaacaaccgggatctggacctggacagcatcattgccgaggtccgtgcccagtacgaggagattgccctaaagagcaaggccgaggctgagaccctgtaccagaccaagtgtgccgatctggagacggccatcgccgacgctgaacagcggggggactgcgccctgaaagatgcccgggccaagctggatgagctggagggcgccctgcaccaggccaaggaggagctggcacggatgctgcgtgagtaccaggagctcgtgagcctgaagctggccctggatatggagatcgccacctaccgcaagctgctggagagcgaggagtgcaggatgtctggcgaatatccaaattctgtgagcatctccgtcatcagcagcaccaatgctggggcaggaggggctggcttcagcatgggctttggcgcctcaagcagttatagctacaaaactgcagctgcagacgtcaagaccaaaggcagctgtggcagtgagctcaaggatccccttgccaaaacctcggggagcagctgtgccaccaaaaaggcctccagatgatggacaagtggttggctctgtgagcagaaggcttcccaactcacccgtctcctccctctccttccctgggctccctttccaagtcaagaaatgctttgtctgtcactacagtcccaaccccatttcctctccctgttgtcctcaaggtgtgatgcttcgatgcaaggagtccagtcaggagctctctcagtggcctccttcttggtcccgtttcgttgggtcattgcctgaaatgcaaagacaacacttacccaggatgtttccccaa

SEQ ID NO: 59756 - DNA, 1410 bp, Artificial Sequence
  derived and/or modified sequence
atgagccggcagctgacccacttccccagaggagagcggctgggcttcagcggctgcagcgctgtgctgagcggcggcatcggcagcagcagcgccagcttccgggcccgggtgaagggcagcgccagctttggcagcaagagcctgagctgcctgggcggcagccgcagcctggccctgtctgctgctgccaggagaggaggcggccgcctgggcggctttgtgggcacagcctttggatctgctggcctgggccccaagtgccccagcgtgtgccccccaggcggcatcccccaggtgacagtgaacaagagcctgctggcccccctgaatgtggagatggaccctgagatccagagggtgcgggcccaggagcgggagcagatcaaggccctgaacaacaagtttgccagcttcatcgacaaggtgcgcttcctggagcagcagaaccaggtgctggagaccaagtggaacctgctgcagcagctggacctgaacaactgcaggaagaacctggagcccatctatgagggctacatcagcaacctgcagaagcagctggagatgctgtctggagatggagtgcggctggacagcgagctgaggaacatgcaggacctggtggaggactacaagaagagatatgaggtggagatcaacagaagaacagctgctgaaaatgaatttgtggtgctgaagaaggatgtggatgctgcctacatgaacaaggtggagctgcaggccaaggtggacagcctgacagatgagatcaagttcttcaagtgcctgtatgaaggagagatcacccagatccagagccacatcagtgacaccagcatcgtgctgtccatggacaacaacagagacctggacctggacagcatcatcgccgaggtgcgggcccagtatgaggagatcgccctgaagagcaaggccgaggccgagaccctgtaccagaccaagtgtgccgacctggagacagccatcgcagatgctgagcagagaggagactgtgccctgaaggatgcccgggccaagctggatgagctggagggcgccctgcaccaggccaaggaggagctggccaggatgctgcgggagtaccaggagctggtgtccctgaagctggccctggacatggagatcgccacctacaggaagctgctggagagtgaagaatgtaggatgtctggagagtaccccaacagcgtgtccatcagcgtcatcagcagcaccaatgctggggccggcggggccggcttctccatgggctttggagccagcagcagctacagctacaagacagctgctgctgatgtgaagaccaagggcagctgtggcagcgagctgaaggaccccctggccaagaccagcggcagcagctgtgccaccaagaaggccagcaggtag

SEQ ID NO: 59757 - DNA, 1410 bp, Artificial Sequence
  derived and/or modified sequence
atgagccggcagctgacccacttcccccggggcgagcggctgggcttctcaggctgctctgctgtgctgtccgggggtatcggcagtagttcagcaagcttccgggcacgcgttaaggggtcggcatcttttggttcaaaaagtctctcctgcctgggaggctcaagaagccttgccctgtctgccgcagctcggagggggggaggacgacttggtgggtttgtaggaactgccttcgggagcgctgggcttgggcccaagtgtccaagcgtctgccctccaggaggaataccccaggtaactgttaataagtccctacttgcccccctgaatgttgagatggaccctgagatccagcgcgtgagagctcaggagcgggaacagattaaagcgcttaacaataagtttgcttcgtttatcgataaggtgcgcttcctggaacaacagaatcaggtcctcgaaactaagtggaatttattgcagcagcttgatctcaacaattgtcgcaagaatttagaacccatctatgagggatatatttcgaatttacagaagcagctggagatgctcagcggagatggagttcggctggactcagagctacggaacatgcaggatcttgtcgaagattacaaaaagcggtacgaggttgaaattaaccgcaggaccgcagcagagaatgagtttgtggtcctgaagaaagacgtggatgctgcctatatgaataaagttgagctccaggcaaaggtggactcattgactgatgagatcaagttcttcaagtgcctgtacgaaggcgaaatcacccagatacaaagccacatctctgacacatccatcgtactatccatggacaataacagggatctcgacctcgactccattatagctgaagttcgggcacagtacgaggaaatcgccctgaaatccaaagccgaagccgaaacgctctaccagacgaaatgcgctgacttagagaccgccatcgccgatgctgaacagaggggcgactgcgcattaaaggacgcgcgggctaagctggatgagctggagggcgcccttcatcaggcaaaagaagagctggccagaatgttgagagagtaccaggagctcgtgagtctcaagctggccctggatatggagatcgcgacctatcggaagctgctcgagagcgaagagtgccggatgagcggagagtatccaaactctgtctctatcagtgttatatcctcaaccaacgcaggtgcaggcggtgcaggattttcaatgggctttggagcttccagctcctactcatacaagacggcggccgcagatgttaagacaaaggggagctgcggcagcgaattgaaggatcccctcgctaaaacatctgggagttcatgcgctacgaagaaggcctcccggtag

SEQ ID NO: 59758 - DNA, 1410 bp, Artificial Sequence
  derived and/or modified sequence
atgtccaggcagcttacccactttcccagaggcgagagactgggatttagcggctgcagtgccgtgttgtctggcggaattggcagtagctcagccagcttccgcgctcgcgtcaaaggcagcgcttccttcggtagcaaatctttgtcatgcctgggcggtagtcgttctcttgccctgagtgccgcagcacggagggggggaggcaggttgggaggatttgttggaaccgccttcgggtcggccggattagggcctaaatgtccttcagtttgcccccctggcggtattcctcaagttacagttaataaaagtcttctggccccactgaacgttgaaatggaccccgagatccagcgcgttcgtgcacaggagagagaacagattaaagcgctcaacaataaattcgcgtcctttatcgacaaggttaggttcctcgaacagcagaatcaggtgcttgagacgaagtggaatctgttacaacagttggatttaaataactgtaggaagaacctcgaacccatctacgaagggtacatctcaaatctgcagaagcagctggaaatgctgtccggagacggcgtgcggctggactcagaattgaggaacatgcaggatctggtggaagactacaaaaagcgatacgaagtggaaattaaccgcaggacagccgcagaaaacgaattcgtggtcctgaaaaaggatgtggacgccgcttatatgaataaggttgagctgcaggctaaggtggactctctcacggatgagattaagtttttcaagtgcctttacgagggggagataacacagatacaaagccatattagtgatacgtcaatcgtgctcagcatggataacaatcgggatttggatttagacagtatcattgctgaggtgagggctcagtatgaggagatagcactcaaatccaaggccgaggcagagaccctctatcaaactaagtgcgcagacctggaaacggccatagctgatgccgaacagcggggagactgcgcactcaaagatgctagagccaagctagacgagctcgagggggctttgcatcaggccaaggaggaactggctcgtatgttacgggagtatcaggagctagtgagcctgaaactcgctttagatatggagatcgctacctaccggaagctcctggagtccgaagaatgtcggatgagcggagagtatccaaactccgtctccattagtgtcattagctcgacgaacgcgggtgcagggggagccggttttagtatgggattcggggcttcctccagctatagctacaagacggctgctgcagatgtgaaaactaagggatcctgtgggagcgaactaaaggatcctctcgcgaaaactagcggctcttcctgcgcgacgaagaaggccagcaggtag

SEQ ID NO: 59759 - DNA, 1410 bp, Artificial Sequence
  derived and/or modified sequence
atgagcagacagctgacccacttccccagaggcgagagactgggcttcagcggctgcagcgccgtgctgagcggcggcatcggcagcagcagcgccagcttcagagccagagtgaagggcagcgccagcttcggcagcaagagcctgagctgcctgggcggcagcagaagcctggccctgagcgccgccgccagaagaggcggcggcagactgggcggcttcgtgggcaccgccttcggcagcgccggcctgggccccaagtgccccagcgtgtgcccccccggcggcatcccccaggtgaccgtgaacaagagcctgctggcccccctgaacgtggagatggaccccgagatccagagagtgagagcccaggagagagagcagatcaaggccctgaacaacaagttcgccagcttcatcgacaaggtgagattcctggagcagcagaaccaggtgctggagaccaagtggaacctgctgcagcagctggacctgaacaactgcagaaagaacctggagcccatctacgagggctacatcagcaacctgcagaagcagctggagatgctgagcggcgacggcgtgagactggacagcgagctgagaaacatgcaggacctggtggaggactacaagaagagatacgaggtggagatcaacagaagaaccgccgccgagaacgagttcgtggtgctgaagaaggacgtggacgccgcctacatgaacaaggtggagctgcaggccaaggtggacagcctgaccgacgagatcaagttcttcaagtgcctgtacgagggcgagatcacccagatccagagccacatcagcgacaccagcatcgtgctgagcatggacaacaacagagacctggacctggacagcatcatcgccgaggtgagagcccagtacgaggagatcgccctgaagagcaaggccgaggccgagaccctgtaccagaccaagtgcgccgacctggagaccgccatcgccgacgccgagcagagaggcgactgcgccctgaaggacgccagagccaagctggacgagctggagggcgccctgcaccaggccaaggaggagctggccagaatgctgagagagtaccaggagctggtgagcctgaagctggccctggacatggagatcgccacctacagaaagctgctggagagcgaggagtgcagaatgagcggcgagtaccccaacagcgtgagcatcagcgtgatcagcagcaccaacgccggcgccggcggcgccggcttcagcatgggcttcggcgccagcagcagctacagctacaagaccgccgccgccgacgtgaagaccaagggcagctgcggcagcgagctgaaggaccccctggccaagaccagcggcagcagctgcgccaccaagaaggccagcagatag

SEQ ID NO: 59760 - protein, 91 aa, Artificial Sequence
  derived and/or modified sequence
MQKARIKLSSTKHEELDSVCNQIKAIAEKTGVDMAGPIPLPTKSLKITTRKSTDGEGSSSFDRWTMRVHKRVIDIEADERTMKHIMKVKNS

SEQ ID NO: 59761 - protein, 142 aa, Artificial Sequence
  derived and/or modified sequence
MAFKDTGKTPVEPEVAIHRIRITLTSRNVKSLEKVCADLIRGAKEKNLKVKGPVRMPTKTLRITTRKTPCGEGSKTWDRFQMRIHKRLIDLHSPSEIVKQITSISIEPGVELIESTDAEPMDTEGQQYTLRSVFESPGTCPF

SEQ ID NO: 59762 - DNA, 429 bp, Artificial Sequence
  derived and/or modified sequence
atggcctttaaggataccggtaagacaccggtggagccagaggtggctatacaccggatacgaatcaccctgaccagtaggaatgtaaagtcgttggagaaggtgtgtgccgacctgatccgcggcgcaaaagagaagaacctgaaagtcaagggacccgtgcgaatgcccacgaagaccctgcggattaccaccaggaagaccccctgcggtgagggaagcaaaacctgggatagatttcaaatgcgtatccataagcggctgatcgacttgcattcaccaagcgaaatagtgaaacagatcacctcaatttctatcgagcctggcgtagagctgatagagtcaacagatgcagagccgatggatactgagggccaacagtatacactgaggtccgtgtttgagtccccagggacctgcccgttttag

SEQ ID NO: 59763 - DNA, 429 bp, Artificial Sequence
  derived and/or modified sequence
atggccttcaaggacaccgggaagacccctgtggagcctgaggtggccatccaccgcatccgcatcaccctgaccagcagaaatgtgaagagcctggagaaggtgtgtgccgacctgatccggggggccaaggagaagaacctgaaggtgaagggccctgtgaggatgcccaccaagaccctgcgcatcaccaccaggaagaccccctgtggggagggcagcaagacctgggaccgcttccagatgaggatccacaagaggctgattgacctgcacagccccagcgagatcgtgaagcagatcaccagcatcagcattgagcccggggtggagctgattgagagcacagatgctgagcccatggacacagagggccagcagtacaccctgcggtctgtgtttgagagccctggcacctgccccttctag

SEQ ID NO: 59764 - DNA, 429 bp, Artificial Sequence
  derived and/or modified sequence
atggccttcaaggacaccggcaagacccccgtggagcccgaggtggcaatccataggatccgtattacacttaccagtcgcaacgtgaagtctctggagaaagtttgcgccgacttgatcaggggcgctaaagaaaagaacctgaaggtcaaaggacctgtgagaatgccaaccaaaactctgaggattaccaccaggaaaaccccatgtggggagggatctaaaacttgggatcgatttcagatgagaatccataaacgccttatcgacttacatagtcctagcgagatcgttaagcaaataacctcaatctccatcgaacctggcgttgaactcatcgaaagtactgacgcagagcctatggacactgaagggcaacagtacaccctgcggtctgtgttcgagagtccaggtacttgtcctttctag

SEQ ID NO: 59765 - DNA, 429 bp, Artificial Sequence
  derived and/or modified sequence
atggccttcaaggacaccgggaagacgcctgttgagcccgaggtagccatccacagaatccgtataactctcacttcccgcaacgtgaaatcactcgagaaagtctgtgcagatctgattagaggggcaaaggagaaaaacctcaaggtgaagggaccagtgaggatgcctaccaagaccctgcgcatcaccacccggaaaacaccatgtggagagggctcaaagacgtgggatcggttccagatgcggatccataaaagattaatcgacttgcacagtccctccgaaattgtgaaacagataacttccatctccatagagccgggagtagagttgatagagagcactgatgccgaacccatggatacagagggacagcaatacactctgcggtctgtattcgaatcacccggaacgtgccccttttag

SEQ ID NO: 59766 - DNA, 1826 bp, Artificial Sequence
  derived and/or modified sequence
tttctttttgaggaagacgcggtcgtaagggctgaggatttttggtccgcacgctcctgctcctgactcaccgctgttcgctctcgccgaggaacaagtcggtcaggaagcccgcgcgcaacagccatggcttttaaggataccggaaaaacacccgtggagccggaggtggcaattcaccgaattcgaatcaccctaacaagccgcaacgtaaaatccttggaaaaggtgtgtgctgacttgataagaggcgcaaaagaaaagaatctcaaagtgaaaggaccagttcgaatgcctaccaagactttgagaatcactacaagaaaaactccttgtggtgaaggttctaagacgtgggatcgtttccagatgagaattcacaagcgactcattgacttgcacagtccttctgagattgttaagcagattacttccatcagtattgagccaggagttgagttgatcgaatctacagatgcagaacccatggatacagagggccagcagtacactttgagaagtgtattcgaatccccggggacatgtcctttttaactgcattctcctccgccaaaaaagtgaccaagcagagtctttctctgtcacccaggctggagtgcaatggcgtgatctcagctcactgcaacctctgcctcctgggttcaagtgattctcgtgtctcagcctcctgagtagctgagactacaggtgtgcaccagtgttcccagctgatttttgtattttatgtagagatggggttatgccattttggccaggctagtctcgaactcctgagctcaggtgatacacacacctcagcaaatcttttaaattatacattctgtgatatttccttgactttcttatccagcacttgtattgattatttttcattttgataatgttgggtttttaaaaactcctttatgatggaaaatttcaaacatacacaaaagtagagagagaatggtataataaacccactcagttttaaggattgtcaactaataccagttttatttcatgtatgactccaacaacttccccaaccagccttcagattatttgaaagcaaatttcagacatcgtattttactcatacattttctagtatctaaatctgaaagagactcttttctaacagttctgtagcattaattatactcatactgttgtgcaacaaatatccagaaatcttttgtcttgcgaaactgaacctcttacccattaaacactaactcccttttttttcaccctgaaccattggcaaccacaattttactttctttttctgtgagtttgattacttgatacttcatgtgagtggaatcatataatatttgtctttttgtgactgacattttatttagcttaatgtcttcaagtttgacccataccatatcatgtggcaggatttttccctttttttttttttcagacggagtctcgctctgtcgcccaggctggagtgcagtggcgcgatctcggctcactgcaagctccgcctcccgggttcatgccattctcctgcctcagcctcctgagtagctgggactacaggcgcccaccactaaacccggctaatttttttgtatttttagtagagacagagtttcaccatgttaatgaggatggtctccatctcctgacctcgtgattcgctcgtctcggcctcccaaagtgctgggattacaggcgtgagccaccgcgcccggccatgatttttcttcttttttaaggctgaataatatctcaatgtatgtatatataccactttttaaaaattcattcatctgttggacatttagattgttcccacctcttgg

SEQ ID NO: 59767 - DNA, 429 bp, Artificial Sequence
  derived and/or modified sequence
atggccttcaaggacaccggcaagacccccgtggagcccgaggtggccatccacagaatcagaatcaccctgaccagcagaaacgtgaagagcctggagaaggtgtgcgccgacctgatcagaggcgccaaggagaagaacctgaaggtgaagggccccgtgagaatgcccaccaagaccctgagaatcaccaccagaaagaccccctgcggcgagggcagcaagacctgggacagattccagatgagaatccacaagagactgatcgacctgcacagccccagcgagatcgtgaagcagatcaccagcatcagcatcgagcccggcgtggagctgatcgagagcaccgacgccgagcccatggacaccgagggccagcagtacaccctgagaagcgtgttcgagagccccggcacctgccccttctag

SEQ ID NO: 59768 - protein, 328 aa, Artificial Sequence
  derived and/or modified sequence
MRRGWKMALSGGLRCCRRVLSWVPVLVIVLVVLWSYYAYVFELCLVIYLILYHAIFVFFTWTYWKSIFTLPQQPNQKFHLSYTDKERYENEERPEVQKQMLVDMAKKLPVYTRTGSGAVRFCDRCHLIKPDRCHHCSVCAMCVLKMDHHCPWVNNCIGFSNYKFFLQFLAYSVLYCLYIATTVFSYFIKYWRGELPSVRSKFHVLFLLFVACMFFVSLVILFGYHCWLVSRNKTTLEAFCTPVFTSGPEKNGFNLGFIKNIQQVFGDKKKFWLIPIGSSPGDGHSFPMRSMNESQNPLLANEETWEDNEDDNQDYPEGSSSLAVETET

SEQ ID NO: 59769 - DNA, 987 bp, Artificial Sequence
  derived and/or modified sequence
atgagaagaggctggaagatggccctgagcggcggcctgagatgctgcagaagagtgctgagctgggtgcccgtgctggtgatcgtgctggtggtgctgtggagctactacgcctacgtgttcgagctgtgcctggtgatctacctgatcctgtaccacgccatcttcgtgttcttcacctggacctactggaagagcatcttcaccctgccccagcagcccaaccagaagttccacctgagctacaccgacaaggagagatacgagaacgaggagagacccgaggtgcagaagcagatgctggtggacatggccaagaagctgcccgtgtacaccagaaccggcagcggcgccgtgagattctgcgacagatgccacctgatcaagcccgacagatgccaccactgcagcgtgtgcgccatgtgcgtgctgaagatggaccaccactgcccctgggtgaacaactgcatcggcttcagcaactacaagttcttcctgcagttcctggcctacagcgtgctgtactgcctgtacatcgccaccaccgtgttcagctacttcatcaagtactggagaggcgagctgcccagcgtgagaagcaagttccacgtgctgttcctgctgttcgtggcctgcatgttcttcgtgagcctggtgatcctgttcggctaccactgctggctggtgagcagaaacaagaccaccctggaggccttctgcacccccgtgttcaccagcggccccgagaagaacggcttcaacctgggcttcatcaagaacatccagcaggtgttcggcgacaagaagaagttctggctgatccccatcggcagcagccccggcgacggccacagcttccccatgagaagcatgaacgagagccagaaccccctgctggccaacgaggagacctgggaggacaacgaggacgacaaccaggactaccccgagggcagcagcagcctggccgtggagaccgagacctag

SEQ ID NO: 59770 - DNA, 987 bp, Artificial Sequence
  derived and/or modified sequence
atgcgccgcggctggaagatggcgcttagcggagggctcagatgttgtaggagagtgttgtcatgggtgcccgttctcgtgattgtgctcgtggtgctctggtcatattatgcgtatgtttttgaactgtgtctcgtcatctatctgattttgtaccacgcgattttcgttttttttacctggacgtactggaagtctatttttaccctcccgcagcagcctaatcagaaattccatctgtcctataccgacaaggaaaggtacgaaaacgaagaacgcccagaagtccaaaaacagatgctcgtcgatatggcgaagaagctgcccgtgtatactagaactggttccggtgctgtgcgcttttgtgatagatgccacctgatcaagcctgatcggtgccaccattgtagtgtgtgcgcgatgtgtgttctcaagatggatcatcattgcccctgggttaataactgtatcggtttctctaattacaaattcttcttgcagtttcttgcctactcagtgctgtattgcctctacatcgctactactgtttttagctactttattaagtactggcgcggagaactaccgtctgtgcggtccaagtttcacgttctattcctgcttttcgtggcatgcatgttttttgtcagcctggtgatactttttggttatcattgttggcttgtgtcacgcaataaaacgacattagaagcgttctgcactcctgtgtttacttcagggcccgagaaaaatggattcaacctgggctttattaaaaacatccaacaggtgttcggagataagaaaaaattctggctcattcctatcgggagtagcccaggggatgggcacagtttcccgatgcgttctatgaacgagtcccagaacccactgctggctaatgaggagacttgggaagacaacgaggatgacaaccaggactacccggaaggtagttcttccctcgccgtggaaaccgaaacatag

SEQ ID NO: 59771 - DNA, 987 bp, Artificial Sequence
  derived and/or modified sequence
atgaggcggggctggaagatggccctgagcggcggcctgcgctgctgcagaagagtgctgtcctgggtgcctgtgctggtgattgtgctggtggtgctgtggagctactatgcctacgtgtttgagctgtgcctggtgatctacctgatcctgtaccacgccatctttgtgttcttcacctggacctactggaagagcatcttcaccctgccccagcagcccaaccagaagttccacctgagctacacagacaaggagagatatgaaaatgaggagaggcctgaggtgcagaagcagatgctggtggacatggccaagaagctgcctgtgtacaccaggacaggcagcggggctgtgcgcttctgtgaccgctgccacctgatcaagccagaccgctgccaccactgcagcgtgtgtgccatgtgtgtgctgaagatggaccaccactgcccctgggtgaacaactgcatcggcttcagcaactacaagttcttcctgcagttcctggcctacagcgtgctgtactgcctgtacatcgccaccaccgtcttctcctacttcatcaagtactggagaggagagctgcccagcgtgcgcagcaagttccacgtgctcttcctgctgtttgtggcctgcatgttctttgtgtccctggtgatcctgtttggctaccactgctggctggtgtccaggaacaagaccaccctggaggccttctgcacccctgtgttcaccagcggccctgagaagaatggcttcaacctgggcttcatcaagaacatccagcaggtgtttggagacaagaagaagttctggctgatccccatcggcagcagccctggagatggccacagcttccccatgaggtccatgaatgaaagccagaaccccctgctggccaatgaggagacctgggaggacaatgaagatgacaaccaggactacccagagggcagcagcagcctggccgtggagacagagacctag

SEQ ID NO: 59772 - DNA, 987 bp, Artificial Sequence
  derived and/or modified sequence
atgcggcggggctggaagatggccctgagcggcggcctgcggtgctgcagaagggttctctcctgggttccagtgttggtgatagtgctcgttgttttgtggtcttattatgcttatgtttttgaactgtgtcttgtcatctatctgattctttatcatgctatttttgtatttttcacttggacgtattggaaatcaatctttacactgcctcaacagccaaaccagaaattccatctgtcgtatacagacaaggagcggtatgaaaacgaggaacgacccgaggtccagaaacagatgctggtggacatggctaagaagctgcctgtgtataccagaacaggttccggcgccgtccgcttttgtgaccggtgccatctgatcaagcccgatcgttgccatcactgttcagtttgcgccatgtgcgtgttgaagatggatcatcattgcccctgggtaaacaactgtatcgggttctccaattataaattcttcttacaattcttggcttacagcgtcctgtactgcctctacattgctaccacagtctttagctatttcattaaatactggagaggggagcttccttccgtgcggtctaagttccatgtactttttcttcttttcgtagcctgcatgttttttgtcagcctggtgattttgtttggttaccattgttggctggtttcgcgcaataagaccaccctggaggccttctgcacccctgtgtttacttccgggcccgaaaaaaacggatttaatctaggctttataaagaatatccagcaggtgtttggcgacaagaagaagttttggctgatcccaattggctcctccccaggtgacggacattccttccccatgaggagcatgaacgaatcacagaatccactactggccaatgaggaaacatgggaagataatgaagacgataatcaagactatcccgagggcagttcatcactggcagtggaaactgagacttag

SEQ ID NO: 59773 - DNA, 987 bp, Artificial Sequence
  derived and/or modified sequence
atgcggcgagggtggaagatggctctttctggaggtctccgatgctgccgccgagtgctgagttgggtccccgttctagtgatagtacttgtggtactctggtcttattacgcctatgtattcgagctctgcctggttatttacttgattctctaccacgcgatttttgtgttcttcacttggacttactggaagagcatctttacactgccacagcagcccaaccagaagtttcatctatcttacactgataaggagcgatatgaaaatgaagagagacctgaggtccagaagcagatgctagtggacatggcgaagaaactgcccgtttacaccagaactggcagtggggctgtgcggttttgtgacaggtgccatctgatcaagccggaccggtgccaccattgctctgtgtgcgccatgtgcgtgctgaagatggatcaccactgtccatgggtgaataattgtatcggattctccaattataaatttttcctacagtttctggcctattcggttctttactgtctctacatcgccactaccgtcttttcctattttatcaaatattggagaggcgagcttccatctgtgcggtcgaagttccacgtactcttcctcctcttcgttgcctgcatgttcttcgtgtccctcgttatcctctttggataccattgctggcttgtgagcaggaataaaaccacattggaggcattttgtactcccgtgttcacctcagggcctgagaagaatgggtttaatcttggttttattaagaacatccagcaggtatttggcgataagaaaaaattttggctcatcccaatcgggtcctctcctggcgacggacactcttttcccatgcggtcaatgaatgagtcacagaatcccttactggctaatgaagagacgtgggaagataatgaggacgacaaccaggactatccagagggctctagtagcctggcagtagaaacagagacttag

SEQ ID NO: 59774 - DNA, 6012 bp, Artificial Sequence
  derived and/or modified sequence
gtgtgtaactgtgggggggggtagcagggggagagaaagagaacgaagggagacagagagactgagacagaaacaaagagggcggacgcagtgcagtaagagcagatgggcggacccaaatttcttcggcttcacgattttgcggaggtctagccctgcatccagccttgaaacagggtggggaggaggcagaaaggggagggactgcactccctctgagcgtgctagctccgactgcctgacggatcacccttccgctccaacatggctagttcctcaacgccgtgactcaagcctgttgtgccaggcagggcgcactcagcagcgcagccccacaggtggcgaaggctccgcgagagggttcccgccaggctagacagtggagtgccgcacagcgcgccttccagcctcgcagccgccaccctagcggttccgacccggcgccagcaggcctgcttggtcgatcttcgagccaaagatgcggcgaggctggaagatggctctgtctggggggctgcggtgctgccgccgggtactgtcctgggtgccagtgctcgttattgtcctcgtcgtgctctggtcctactatgcctacgtctttgaactctgcctggttatttacctcatactctaccatgccatctttgtgttctttacctggacctactggaagtctatctttacactcccacagcagccaaaccagaagttccacttgtcctacacagacaaggagcgctatgaaaatgaagaaagacctgaggtccagaagcagatgcttgttgatatggccaaaaagctaccggtttacacaagaactggaagtggagctgtacgattctgtgaccggtgtcatctgatcaagccagaccgctgccaccactgctctgtctgtgctatgtgtgtgttaaaaatggatcatcactgcccttgggttaataactgcattggattttccaactacaaattcttccttcaattcttagcttactctgttctctactgcctgtacattgctacgacagtcttcagctatttcatcaaatactggagaggggaattacccagtgttcgctctaagttccatgtcctttttcttctctttgtggcctgcatgttttttgtcagccttgtgattctctttggttaccattgttggcttgtcagcagaaacaaaaccaccttagaggccttctgcactccagtgtttacaagtggcccagagaaaaatgggttcaaccttggcttcatcaagaatatccagcaggtgtttggagataagaagaagttctggttaatacctattggttccagccctggtgatggacactccttccctatgaggtctatgaatgagtcacagaacccactgctagcaaatgaagaaacctgggaagacaacgaggatgacaaccaagattatccagaaggctcatcatctcttgctgtggaaacggaaacatagcagttttcacatttcctgcatctctcagacaggactcaccatctctgcctcccatgaggcttacagagttcaatgttggaaatcattgtaatcttcaaaataagtcaccgtgttggattgaaagcttcaaaatttgaaagaattccatcaaatacttgctgtgtaaatgtttctggactttatgttatttaatttactgactgaaatccaatttggaatttggtagcagttaattcaagccaattttttttgtttcttcatttcccctcccccaatccatgaaagcctaaatgtaaaatatatcttttcattcatcttatcaggtaaaaggaaattcagaaaatttccttagagtctttaattcccccacaaagattattaatcacatatatagggcctttttggtgttgaagggaatcaaactacatttgctgcttgtgtgcgtgtgcatttgtgaacacgtacagcatatctatacaaaattctgctatagtgtgaaaatcagggctaaaaacctgaagcctttgtttaattatgcttttcctctaaatagcaacttaaatatttgctagactttgaatcatcgctatatcaagtatctaaaatttgggagggtgaatcagtacactgtgaccaaggtcctcaaattggaatttgaacaacaatgtaaaacctgttctgtcacaaatgttcctgaaagcaccacagctactcaagaagatcaaattcaggacataaactttattgaacataataaccagtgttttttaaagacttttttgtcagggtgcagtaaaattctccaattacttttattcatttatctgcttcctagttttattttagcctttatgagttattttatgatgaaagaaaatctataagcctaagttatggcccataggttttgttaagggttttcagagtgattttcaggtttaatttcactgcctttcataagggtaaagtttcacagctgacattagcctgaggattagcactaaagagctgtgttttcatagcaggggctattgtacagacagtgataaccaaatagtaatatgccagttctttcttctttttttagcttcagtagtagctaagccattaatacagtttgcatcaatttccccatttatttataatcagcctttcttttagtcctagtgcctgaatcaatgagtgagaatactagtactgattctttacaataataatatcttaagagtattgatatctttcattttttcatccagcagtctagtgcccagctgctgacaataaaagctccaactcttttagagatcagtggaatttagaagcatcttacaggtatcaaggaattgagcttctagagggatggtttggcttactaatttatcttccctgaaatatgtttgagtaaaaaagagttgcctgccacaatttagtgttggggttccagtggagctgagaaagtgaacaatccagctacttaaagcaacaacaaaacctgttcatctggatccctaggtaattttgaccaaggtgagacttttggcataaattaaatggattgtggtcagcattacatttgagagaatactagacatgactacacttattagggctagtgactttctcaaactcagaagctaaaaagcagcctagatgactatgcacacactgggtttcaagatgaaatcttcttatatattcagatggaaaaaaatttccccttacactctttctcaaaatactctcatttcggtttttcctgaaaccttatttggccattcccatggttttatgacagacaagccttgtcttctattcatatagatatgcacctttttctacatgtatggcctttacttactacacagcaagtaggcctcaaagtaatcttcctctttcccatcaatcatcttctgccaagcattcaggcagagcagctgttaactgtgattcaaagtcagaaaaacatcaagaacttctttgatgcatagggtgtatcagcactcagctcccacagaagtcaagtcacaaaatatagtgtcagttaactataaggaagttccggagaggtaaagctcaggaaagatgtaatgcaaagctgattgtttaatgtcttacagatttacactgtctttaaaaggccaaataaggctgggcgcagtggctcacacctgtaatcccaacattttgggagcccaaggcggccggaccacctgaggtcgggagttcaagaccagcctgaccaacatggagaaaccctgtctctactaaaaatacaaaaattagccaggagtgttggtgcatgactgtaatcccagctactcaggaggctgaggcaggagaatcgcttgaacctgggaggtagaggttgtggtgagctgagatcgtgccattgcactccggcctgggcaataagagtgaaactctgtctcaaaaaaaaaaaaaaaaaaaaaaaaagccaaataaatcagggttttaccaggggctcagagataaaaagaaaacctattcctatcttagcattttggtctcattggtttatagactctgataatatccctatccatggatcatttgagtattgactaatgtacataggtacccaactggttgattattaatcaagaatacagaactttatttaataattagcacaccctgatctggcttctttgcttgcttttctttggatccctgtccaataacctctgtggaatctcattccctaattgttgatactcattttctccgtttgcaaaatgaagatactcattgttaggatcctactgctgaagggtgctatgtcactttctagtgctcttatatgtctttaattataggactggaatgaaaagcttaaccatacagtatttctaagcaaaataatgtactccattcttttgtccatgctctcattgctgatttgttcttgcaggacttagagcactttgttaatgttcttccattcactccaacagcgtcctcagaaagagacagaataaaaaaattgttccccatggtacagctggaaaaattaaggggaaaagagattaagtggtccccaatggaacacagctgtcttatgcagggctcacagttaccatgttcagtacattgttaaagtaacttggcttcccaggactggaattatcatggagcagttagaattttgagagtaattacaacaggatcacattctgaaagagtcacattttgtcaaaaatctgaaaagtatgcaatttgtacaactcttactttctatgtgataagaatgcaatatgtgcctctttcccctactagccccatgtgacacatatttttcacactatgtggcatcaaccagtgccattacctcctgtggcaccatagagcccaatctcagggcagacattgccaaggtaaagaatgcactccatgtttataccaaattgcacaaagtatagacattgaggttaatggagatttaagcacaatcctagcaagtaagttttaagaatactgaatattatacattattgtaacatgaacctaaaattaatttaacagggcccaaattcataggaatgtaacagtcattgaaagcctattcttttcacctctcatcacacatatctacatacatgtatgcacatgtacacacacacacacacacacacacacacacatacacattttctccaaagcaggctgcctcttcagcaggagcaaatactttaatttaaaagaatgattatctgttttctccttttagaaaaagagtctaagaaacacagcatgtgaagaacattagatttatacattccagaatctctgctctcagagtagctaagagattcggtacagaagacgttctatggagaagcacagggggcatctaatgagattgtcaggcccttggacaagatccatattcttagaaaattaatgagttccatctcgttaggaattggttgatgaggtatggtacatctgcatttctttaaccatagctgtaatgtaccatattaaattgtagccttttgcatgcgggtattatataataatgaatgggtggctcctagtagcatgcaacccatgactgtttacttccctaaaagggttaggtctgtgtcctgcacagtgttcaaaaccattaaatgtgttctttgtagcaggatggtacacagccatcagcagaatgagttaaaaccaacaatgaattcaatataccaggaaatagattgttagtagggaatggcattaaaggaaaaaaaaattagataagatgcattcaaggaataattactttcactctgctggcttaatcagtgaaggaacataaaaggaaagctggcagtgggtcttggtaatatatgaactatattagagtgccagaaaaggagacctcagaagttaagcataggttgccaatctgctacaattatttttcccaccaatctgctcaaaatgattgtatatagtattcttaaaaccatgtgtcttggtgcagaaatattgacaaatgctggccagctttatcttcctatatccttcattaaaagtatatgcat

SEQ ID NO: 59775 - protein, 403 aa, Artificial Sequence
  derived and/or modified sequence
MASSSVPPATVSAATAGPGPGFGFASKTKKKHFVQQKVKVFRAADPLVGVFLWGVAHSINELSQVPPPVMLLPDDFKASSKIKEYCPQVFRNLRDRFGIDDQDYLVSLTRNPPSESEGSDGRFLISYDRTLVIKEVSSEDIADMHSNLSNYHQYIVKCHGNTLLPQFLGMYRVSVDNEDSYMLVMRNMFSHRLPVHRKYDLKGSLVSREASDKEKVKELPTLKDMDFLNKNQKVYIGEEEKKIFLEKLKRDVEFLVQLKIMDYSLLLGIHDIIRGSEPEEEAPVREDESEVDGDCSLTGPPALVGSYGTSPEGIGGYIHSHRPLGPGEFESFIDVYAIRSAEGAPQKEVYFMGLIDILTQYDAKKKAAHAAKTVKHGAGAEISTVHPEQYAKRFLDFITNIFA

SEQ ID NO: 59776 - DNA, 1212 bp, Artificial Sequence
  derived and/or modified sequence
atggccagcagcagcgtgccccccgccaccgtgagcgccgccaccgccggccccggccccggcttcggcttcgccagcaagaccaagaagaagcacttcgtgcagcagaaggtgaaggtgttcagagccgccgaccccctggtgggcgtgttcctgtggggcgtggcccacagcatcaacgagctgagccaggtgcccccccccgtgatgctgctgcccgacgacttcaaggccagcagcaagatcaaggagtactgcccccaggtgttcagaaacctgagagacagattcggcatcgacgaccaggactacctggtgagcctgaccagaaacccccccagcgagagcgagggcagcgacggcagattcctgatcagctacgacagaaccctggtgatcaaggaggtgagcagcgaggacatcgccgacatgcacagcaacctgagcaactaccaccagtacatcgtgaagtgccacggcaacaccctgctgccccagttcctgggcatgtacagagtgagcgtggacaacgaggacagctacatgctggtgatgagaaacatgttcagccacagactgcccgtgcacagaaagtacgacctgaagggcagcctggtgagcagagaggccagcgacaaggagaaggtgaaggagctgcccaccctgaaggacatggacttcctgaacaagaaccagaaggtgtacatcggcgaggaggagaagaagatcttcctggagaagctgaagagagacgtggagttcctggtgcagctgaagatcatggactacagcctgctgctgggcatccacgacatcatcagaggcagcgagcccgaggaggaggcccccgtgagagaggacgagagcgaggtggacggcgactgcagcctgaccggcccccccgccctggtgggcagctacggcaccagccccgagggcatcggcggctacatccacagccacagacccctgggccccggcgagttcgagagcttcatcgacgtgtacgccatcagaagcgccgagggcgccccccagaaggaggtgtacttcatgggcctgatcgacatcctgacccagtacgacgccaagaagaaggccgcccacgccgccaagaccgtgaagcacggcgccggcgccgagatcagcaccgtgcaccccgagcagtacgccaagagattcctggacttcatcaccaacatcttcgcctag

SEQ ID NO: 59777 - DNA, 1212 bp, Artificial Sequence
  derived and/or modified sequence
atggccagttcgagcgtccctcccgccacagttagcgcagccaccgcgggaccaggacctgggtttggatttgcctctaagaccaaaaagaagcatttcgtgcaacaaaaggtgaaggtctttcgtgcagcagaccctctggtgggagtgttcctgtggggagtcgctcattcaatcaacgaactttcccaggtaccaccccctgtgatgttactgccggacgattttaaggcgtcatccaagatcaaagaatattgcccccaagtttttcggaacctcagagacaggttcgggattgacgaccaagactatttggtgtccctgaccagaaaccccccctcagagagtgaggggagcgacggacgctttctcatatcctacgaccggactttagttataaaggaagtatcctctgaggacatcgcagacatgcacagtaatctctccaactatcaccagtatatcgtgaagtgccatgggaacactcttctgccccagttcctggggatgtatcgagttagcgttgacaacgaagactcatacatgctggtcatgagaaatatgttttctcaccgcttgcccgtccacagaaagtatgaccttaagggctcattggtgtccagggaagccagcgataaagagaaagtgaaggagctacccaccctgaaggatatggacttcttaaataagaatcagaaagtgtacatcggagaagaagagaaaaagatatttcttgaaaagctgaagcgcgatgtggagttcctagttcaactgaagataatggattatagtctgttgctgggcatacatgatattatccgaggctctgagcccgaggaggaggcccctgtgcgggaggacgaatccgaagtagacggagactgcagtctgactggtccccccgcactcgtaggatcttacggcaccagtcccgaaggaatcggcggttatatccactcacataggcctttgggcccaggagagtttgaatcctttatagacgtgtacgccattcggtcagccgaaggagctccccagaaggaagtgtacttcatgggcctcatagatatcctgacccagtacgatgccaagaagaaagccgcccatgcagctaaaacagttaagcacggtgccggtgcggaaatcagtaccgtacatccggagcagtatgcaaagaggttcctagatttcatcaccaacatattcgcttag

SEQ ID NO: 59778 - DNA, 1212 bp, Artificial Sequence
  derived and/or modified sequence
atggccagcagctctgtgcccccagccaccgtgtctgctgccacagctggccctggccctggcttcggctttgccagcaagaccaagaagaagcactttgtgcagcagaaggtgaaggtgttccgggctgctgaccccctggtgggcgtcttcctgtggggcgtggcccacagcatcaatgagctgagccaggtgcccccacctgtgatgctgctgcctgatgacttcaaggccagcagcaagatcaaggagtactgcccccaggtgttcaggaacctgcgggacagatttggaattgatgaccaggactacctggtgtccctgaccaggaacccccccagcgagagcgagggcagtgatggccgcttcctgatctcctatgacaggaccctggtgatcaaggaggtgtccagtgaagatattgctgacatgcacagcaacctgagcaactaccaccagtacatcgtgaagtgccacggcaacaccctgctgccccagttcctgggcatgtacagagtgtctgtggacaatgaagacagctacatgctggtgatgaggaacatgttcagccaccggctgcctgtgcacaggaaatatgacctgaagggcagcctggtgtcccgggaggccagtgacaaggagaaggtgaaggagctgcccaccctgaaggacatggacttcctgaacaagaaccagaaggtgtacatcggggaggaggagaagaagatcttcctggagaagctgaagagagatgtggagttcctggtgcagctgaagatcatggactacagcctgctgctgggcatccatgacatcatccggggcagcgagcctgaggaggaggcccctgtgcgggaggatgaaagtgaggtggatggagactgcagcctgaccggccccccagccctggtgggcagctatggcaccagccctgagggcatcggcggctacatccacagccaccggcccctgggccctggagaatttgagagcttcattgatgtgtatgccatccgctctgctgagggcgccccccagaaggaggtgtacttcatgggcctgattgacatcctgacccagtatgatgccaagaagaaggccgcccacgccgccaagacagtgaagcacggggccggggctgagatcagcacagtgcaccctgagcagtatgccaagcgcttcctggacttcatcaccaacatctttgcctag

SEQ ID NO: 59779 - DNA, 1212 bp, Artificial Sequence
  derived and/or modified sequence
atggccagcagcagcgtgccccccgccaccgtgagcgccgccaccgcaggtcccggacctggtttcggcttcgccagtaagacaaaaaaaaaacatttcgtgcagcagaaggtgaaagtgtttcgggcagcagatcctctcgtcggagtattcctgtggggcgtcgcccacagcattaacgagctgagccaggtgcccccacccgtcatgctgctccccgatgattttaaagcgtcaagcaaaatcaaggagtattgccctcaggtgttcaggaatctgagggacagatttggtattgacgaccaagattacctggtttcactgactcggaacccaccctctgaatctgaaggatccgatggtaggtttctgatcagctacgatcggaccctagtgattaaggaggttagttctgaagacatcgctgatatgcattctaatctgtcaaattaccatcagtacatagttaagtgtcacggaaacactttactgccccaattcctgggcatgtacagggtgagcgtggataacgaagacagttacatgctggtgatgaggaacatgttcagtcacagattgcccgtccatcgcaagtacgatctcaagggcagtttggtcagcagggaggcgtcagataaagaaaaggtgaaagaattgcccacgttaaaagacatggatttccttaacaagaaccaaaaggtctatatcggcgaggaggagaagaaaatttttctggaaaagttgaagcgcgatgtggaatttctcgtgcagcttaagataatggactactctttacttctcgggattcacgacatcatcagaggatccgagccagaggaggaggcccccgtcagggaggacgagagcgaagtcgatggtgactgctctctgacaggccccccagcacttgtcggcagctacggtacgtctcccgagggcattggcgggtacatccatagccatcgcccattaggcccaggcgagtttgaatcttttatagacgtctacgccatcaggagcgccgaaggagcacctcagaaggaggtgtacttcatgggactgatagacatcctcactcagtacgatgccaaaaagaaagcagctcacgcagcgaagacagttaagcacggcgctggcgcggaaatctcaacagtccaccccgagcagtatgctaaacgcttcctggatttcattaccaatattttcgcgtag

SEQ ID NO: 59780 - DNA, 1212 bp, Artificial Sequence
  derived and/or modified sequence
atggcctcttcatcagtaccgcctgccaccgtctctgcggctacggcagggcctgggcctggcttcggcttcgcatctaaaacaaagaagaagcactttgtacaacagaaagtgaaagtgttcagagccgctgaccctctggtgggcgtgtttctctggggggtggcacactctataaatgagctgagccaagtgcccccacctgtgatgttactcccggatgactttaaggcgagctcgaagattaaagaatactgtcctcaggtgttcagaaaccttcgtgataggttcggcattgacgaccaggactacctggtgtcgcttacgagaaatcccccttccgaaagcgagggctctgatggcagatttctgatcagctatgatagaacactagtgataaaggaagtgagtagcgaggacatagctgatatgcactctaacctgagtaactaccaccaatacattgtcaaatgccacggtaacactctcctgccccagttcctggggatgtaccgcgtttctgtggacaatgaggatagttacatgctcgtaatgcgtaacatgttctctcatcgccttcctgtgcaccggaaatatgatctaaaaggctcgctcgtctctagagaggctagcgataaagagaaggttaaggagctacccacgctcaaagatatggatttccttaataaaaatcagaaggtttatatcggcgaagaggagaagaagatttttttagagaagctcaagagagacgtcgaatttctagttcagttgaagatcatggactatagtttactgcttgggatccacgatatcattagaggttccgagcctgaagaagaagctcccgtcagggaagacgagtcagaagtggacggtgactgctcccttacaggacccccagcactcgtggggtcctatggcaccagtcccgaaggcattggcggttacatccactcccacaggcccctaggccctggggaatttgaatcatttattgacgtgtatgccattaggtccgccgagggggcaccgcagaaggaggtgtattttatgggactgatcgacatcctaactcaatacgacgccaagaagaaggccgctcatgccgctaaaactgtgaaacatggcgctggcgcagaaattagtacagtgcatcctgaacaatatgccaagcggtttttggatttcataacaaacatatttgcgtag

SEQ ID NO: 59781 - DNA, 1532 bp, Artificial Sequence
  derived and/or modified sequence
gatagctgccggctccggcttccacttggtcggttgcgcgggagactatggcgtcctcctcggtcccaccagccacggtatcggcggcgacagcaggccccggcccaggtttcggcttcgcctccaagaccaagaagaagcatttcgtgcagcagaaggtgaaggtgttccgggcggccgacccgctggtgggtgtgttcctgtggggcgtagcccactcgatcaatgagctcagccaggtgcctcccccggtgatgctgctgccagatgactttaaggccagctccaagatcaaggagtattgtccccaggtcttcaggaacctccgtgatcgatttggcattgatgaccaagattacttggtgtcccttacccgaaacccccccagcgaaagtgaaggcagtgatggtcgcttccttatctcctacgatcggactctggtcatcaaagaagtatccagtgaggacattgctgacatgcatagcaacctctccaactatcaccagtacattgtgaagtgccatggcaacacgcttctgccccagttcctggggatgtaccgagtcagtgtggacaacgaagacagctacatgcttgtgatgcgcaatatgtttagccaccgtcttcctgtgcacaggaagtatgacctcaagggttccctagtgtcccgggaagccagcgataaggaaaaggttaaagaattgcccacccttaaggatatggactttctcaacaagaaccagaaagtatatattggtgaagaggagaagaaaatatttctggagaagctgaagagagatgtggagtttctagtgcagctgaagatcatggactacagccttctgctaggcatccacgacatcattcggggctctgaaccagaggaggaagcgcccgtgcgggaggatgagtcagaggtggatggggactgcagcctgactggacctcctgctcttgtgggctcctatggcacctccccagagggtatcggaggctacatccattcccatcggcccctgggcccaggagagtttgagtccttcattgatgtctatgccatccggagtgctgaaggagccccccagaaggaggtctacttcatgggcctcattgatatccttacacagtatgatgctaagaagaaagcagctcatgcagccaaaactgtcaagcatggggctggggcagagatctctactgtccatccggagcagtatgctaagcgattcctggattttattaccaacatctttgcctaagagactgcctggttctctctgatgttcaaggtggtggggttctgagacacttgggggaattgtggggatattctagccaccagttctcttcttcctttgctaaattcaggctgcaggctccttccatccagataactccatcctgtcgagtaggctctttctgaccctcagaaatacattgtcctttttcctctttgcccatttttcttccctctcttcctccccatgagaagtctgcttgtagtattagaatgttattgttgactctctccc

SEQ ID NO: 59782 - protein, 373 aa, Artificial Sequence
  derived and/or modified sequence
MASSSVPPATVSAATAGPGPGFGFASKTKKKHFVQQKVKVFRAADPLVGVFLWGVAHSINELSQVPPPVMLLPDDFKASSKIKVNNHLFHRENLPSHFKFKEYCPQVFRNLRDRFGIDDQDYLYIVKCHGNTLLPQFLGMYRVSVDNEDSYMLVMRNMFSHRLPVHRKYDLKGSLVSREASDKEKVKELPTLKDMDFLNKNQKVYIGEEEKKIFLEKLKRDVEFLVQLKIMDYSLLLGIHDIIRGSEPEEEAPVREDESEVDGDCSLTGPPALVGSYGTSPEGIGGYIHSHRPLGPGEFESFIDVYAIRSAEGAPQKEVYFMGLIDILTQYDAKKKAAHAAKTVKHGAGAEISTVHPEQYAKRFLDFITNIFA

SEQ ID NO: 59783 - DNA, 1122 bp, Artificial Sequence
  derived and/or modified sequence
atggccagcagcagcgtgccccccgccaccgtgagcgccgccaccgccggccccggccccggcttcggcttcgccagcaagaccaagaagaagcacttcgtgcagcagaaggtgaaggtgttcagagccgccgaccccctggtgggcgtgttcctgtggggcgtggcccacagcatcaacgagctgagccaggtgcccccccccgtgatgctgctgcccgacgacttcaaggccagcagcaagatcaaggtgaacaaccacctgttccacagagagaacctgcccagccacttcaagttcaaggagtactgcccccaggtgttcagaaacctgagagacagattcggcatcgacgaccaggactacctgtacatcgtgaagtgccacggcaacaccctgctgccccagttcctgggcatgtacagagtgagcgtggacaacgaggacagctacatgctggtgatgagaaacatgttcagccacagactgcccgtgcacagaaagtacgacctgaagggcagcctggtgagcagagaggccagcgacaaggagaaggtgaaggagctgcccaccctgaaggacatggacttcctgaacaagaaccagaaggtgtacatcggcgaggaggagaagaagatcttcctggagaagctgaagagagacgtggagttcctggtgcagctgaagatcatggactacagcctgctgctgggcatccacgacatcatcagaggcagcgagcccgaggaggaggcccccgtgagagaggacgagagcgaggtggacggcgactgcagcctgaccggcccccccgccctggtgggcagctacggcaccagccccgagggcatcggcggctacatccacagccacagacccctgggccccggcgagttcgagagcttcatcgacgtgtacgccatcagaagcgccgagggcgccccccagaaggaggtgtacttcatgggcctgatcgacatcctgacccagtacgacgccaagaagaaggccgcccacgccgccaagaccgtgaagcacggcgccggcgccgagatcagcaccgtgcaccccgagcagtacgccaagagattcctggacttcatcaccaacatcttcgcctag

SEQ ID NO: 59784 - DNA, 1122 bp, Artificial Sequence
  derived and/or modified sequence
atggcgtcctcatccgttcctccggccacagtgagtgccgccaccgctgggcccggcccagggtttgggttcgccagtaagacaaagaagaaacatttcgtccagcagaaggtgaaggtgtttcgcgctgcagaccctctggtgggcgtatttttgtggggcgtggcacattcaataaacgagctgtcccaggttcccccacctgtcatgctgttacctgatgacttcaaggccagctccaaaatcaaggtgaacaaccacctttttcaccgggagaatctgccatcccattttaaatttaaagaatattgccctcaggtgttccggaaccttcgagatcgattcggcatagacgatcaggactatctctacattgtgaagtgtcatggcaacaccttgcttccacagttcctaggaatgtaccgagtgagcgtcgacaacgaagactcctacatgctggtaatgagaaacatgtttagccaccgccttcctgtacatcgaaagtacgacctgaaagggagcctggtcagccgcgaggcgtccgataaagagaaggtaaaggagcttccaaccctgaaggacatggattttctcaataaaaaccagaaagtgtacatcggagaagaggagaagaagatctttcttgaaaaacttaagcgcgatgtcgaattcctggtgcagctaaagatcatggattattctttgctgctggggatacatgacattatccgaggctctgaacctgaagaggaagcgccagtccgcgaggatgaatcggaggttgatggcgattgtagcctgaccggtcctcccgccttggtgggttcctatggtactagcccagaagggattggggggtatatccacagccacaggcccttgggacctggggaattcgagagtttcattgatgtatacgctatccgttccgctgaaggggctccccagaaagaggtatactttatgggtctcattgatatccttactcagtacgatgctaagaagaaggctgctcacgcagcaaagacagtgaaacatggggctggcgctgaaatctccacagttcacccagaacagtacgctaagaggttcctggatttcattacaaatatcttcgcttag

SEQ ID NO: 59785 - DNA, 1122 bp, Artificial Sequence
  derived and/or modified sequence
atggccagcagctctgtgcccccagccaccgtgtctgctgccacagctggccctggccctggcttcggctttgccagcaagaccaagaagaagcactttgtgcagcagaaggtgaaggtgttccgggctgctgaccccctggtgggcgtcttcctgtggggcgtggcccacagcatcaatgagctgagccaggtgcccccacctgtgatgctgctgcctgatgacttcaaggccagcagcaagatcaaggtgaacaaccacctgttccaccgggagaacctgcccagccacttcaagttcaaggagtactgcccccaggtgttcaggaacctgcgggacagatttggaattgatgaccaggactacctgtacatcgtgaagtgccacggcaacaccctgctgccccagttcctgggcatgtacagagtgtctgtggacaatgaagacagctacatgctggtgatgaggaacatgttcagccaccggctgcctgtgcacaggaaatatgacctgaagggcagcctggtgtcccgggaggccagtgacaaggagaaggtgaaggagctgcccaccctgaaggacatggacttcctgaacaagaaccagaaggtgtacatcggggaggaggagaagaagatcttcctggagaagctgaagagagatgtggagttcctggtgcagctgaagatcatggactacagcctgctgctgggcatccatgacatcatccggggcagcgagcctgaggaggaggcccctgtgcgggaggatgaaagtgaggtggatggagactgcagcctgaccggccccccagccctggtgggcagctatggcaccagccctgagggcatcggcggctacatccacagccaccggcccctgggccctggagaatttgagagcttcattgatgtgtatgccatccgctctgctgagggcgccccccagaaggaggtgtacttcatgggcctgattgacatcctgacccagtatgatgccaagaagaaggccgcccacgccgccaagacagtgaagcacggggccggggctgagatcagcacagtgcaccctgagcagtatgccaagcgcttcctggacttcatcaccaacatctttgcctag

SEQ ID NO: 59786 - DNA, 1122 bp, Artificial Sequence
  derived and/or modified sequence
atggccagcagcagcgtgccccccgccaccgtgagcgccgccaccgccggtccgggaccggggtttggttttgcttcgaagacaaaaaaaaagcacttcgtccagcagaaggtgaaggtatttagggcagccgatcccctggtgggtgtgtttctctggggggtagcccactctattaacgagctgtcacaggtgcctccccccgtcatgctgctcccggacgacttcaaagccagctcaaagattaaggtgaacaaccacttgtttcatcgggaaaatctgccctctcactttaaatttaaggaatactgcccccaggtcttccgcaacctcagggaccgattcggaatagacgatcaggactacctgtatatcgtgaagtgccatggcaatacgctgctgccccagttcctgggcatgtatagagtgagcgttgacaacgaggattcctacatgctggtcatgcggaacatgttctcacacaggctgcctgtccatcgcaagtatgatctaaagggttctctcgtctctagggaagcaagcgataaagaaaaagtgaaagagctgcctacgctcaaggacatggatttcctcaacaaaaaccagaaagtatatataggcgaggaggaaaagaagatttttcttgagaagcttaaacgggatgtggaatttctcgttcagctgaaaattatggattactcactccttctggggatccacgacatcatccggggctcagaacccgaggaagaggcccccgtcagggaggatgagtctgaggtggacggtgattgctccctcactggccctcccgccctggtggggagctacggcacctcacccgagggaattggagggtacatccatagccatcgcccattaggacccggggagttcgagagttttatcgatgtctatgcaattcgtagcgccgagggcgccccccaaaaggaagtttacttcatgggactcattgacatcttgactcagtacgatgcaaaaaaaaaagcagcacacgccgctaagacagtcaagcacggcgccggcgctgagattagcacagtccacccagagcagtacgccaagcgattcctggatttcattacaaacatattcgcgtag

SEQ ID NO: 59787 - DNA, 1558 bp, Artificial Sequence
  derived and/or modified sequence
gtccgctgtccggcctccggtcacgtgacagcagcgcaggtgagcgccgcttccggggtcgggcgcctggatagctgccggctccggcttccacttggtcggttgcgcgggagactatggcgtcctcctcggtcccaccagccacggtatcggcggcgacagcaggccccggcccaggtttcggcttcgcctccaagaccaagaagaagcatttcgtgcagcagaaggtgaaggtgttccgggcggccgacccgctggtgggtgtgttcctgtggggcgtagcccactcgatcaatgagctcagccaggtgcctcccccggtgatgctgctgccagatgactttaaggccagctccaagatcaaggtcaacaatcaccttttccacagggaaaatctgcccagtcatttcaagttcaaggagtattgtccccaggtcttcaggaacctccgtgatcgatttggcattgatgaccaagattacttgtacattgtgaagtgccatggcaacacgcttctgccccagttcctggggatgtaccgagtcagtgtggacaacgaagacagctacatgcttgtgatgcgcaatatgtttagccaccgtcttcctgtgcacaggaagtatgacctcaagggttccctagtgtcccgggaagccagcgataaggaaaaggttaaagaattgcccacccttaaggatatggactttctcaacaagaaccagaaagtatatattggtgaagaggagaagaaaatatttctggagaagctgaagagagatgtggagtttctagtgcagctgaagatcatggactacagccttctgctaggcatccacgacatcattcggggctctgaaccagaggaggaagcgcccgtgcgggaggatgagtcagaggtggatggggactgcagcctgactggacctcctgctcttgtgggctcctatggcacctccccagagggtatcggaggctacatccattcccatcggcccctgggcccaggagagtttgagtccttcattgatgtctatgccatccggagtgctgaaggagccccccagaaggaggtctacttcatgggcctcattgatatccttacacagtatgatgctaagaagaaagcagctcatgcagccaaaactgtcaagcatggggctggggcagagatctctactgtccatccggagcagtatgctaagcgattcctggattttattaccaacatctttgcctaagagactgcctggttctctctgatgttcaaggtggtggggttctgagacacttgggggaattgtggggatattctagccaccagttctcttcttcctttgctaaattcaggctgcaggctccttccatccagataactccatcctgtcgagtaggctctttctgaccctcagaaatacattgtcctttttcctctttgcccatttttcttccctctcttcctccccatgagaagtctgcttgtagtattagaatgttattgttgactctctcccaagtgccttgatctttgtaatatctcctgttgtttctatgatatagg

SEQ ID NO: 59788 - DNA, 1122 bp, Artificial Sequence
  derived and/or modified sequence
atggcatccagttccgtcccgccagctacagtttctgcggctactgctggtcccggtccaggcttcggcttcgctagtaagactaagaaaaagcactttgtgcagcaaaaggttaaggtgtttcgagccgcagaccccctggtgggggtgtttctgtggggcgtcgcccactctattaacgagctgtcgcaagtgcctcctcccgtgatgctgctgccagacgactttaaggcgtcatccaagataaaggtgaacaatcatctattccacagagagaatttgccctctcacttcaaattcaaggaatattgcccacaggtctttcgcaacttgagagacagatttgggatcgacgatcaagattatctttacatcgtcaagtgtcatggtaatactctgcttccgcagttccttggcatgtatagggtttcggtagacaacgaagactcttacatgctggtgatgcgaaacatgttcagccatcgtctcccggtacaccgcaaatatgatttgaaaggctcccttgtttcaagagaagcgtcagataaggagaaagtgaaggaattgccaactctcaaggacatggacttcctaaacaagaaccagaaggtgtacatcggagaggaagaaaaaaagatttttctcgagaagcttaaaagagacgtcgagtttcttgttcagctcaagattatggattacagcctcctgttggggatccatgacatcattcggggatcagagcccgaagaggaggcaccggtgagagaggacgaaagtgaagtggatggagattgctctctcacagggcctcctgctcttgtcggctcttacgggaccagccccgagggaattggaggttatatccactctcatcgcccacttggccctggggagtttgagagttttattgatgtatacgccatccggagcgccgaaggcgcacctcaaaaagaagtttatttcatggggcttatcgatatcctcacacaatacgacgcaaagaaaaaggctgcccatgcagctaaaacggtgaaacacggggctggcgcagagatttctacagtgcacccagagcagtatgccaagcgcttcctggatttcataactaatatctttgcatag

SEQ ID NO: 59789 - protein, 619 aa, Artificial Sequence
  derived and/or modified sequence
MASASWRLKVEREPVEYMNLSVLEKIGYFSVARLEYSGTILAHCNFRLLGSNDSSASASQVTGTTVSPEAVGFLSAVGVFIILMLLLFLYINKKFCFENVGGFPDLGSEYSTRKNSQDKIYNSYMDKDEHGSSSESEDEALGKYHEALSRTHNSRLPLADSRQRNYAWETRQKYSPLSAEYDGYSSEASIDEGNCIQRMRRTPPLDELQPPPYQDDSGSPHLSCTPSEIGDSKCEFSHCSNSPRCSYNKCPSEGSTGHEIESFHNKGYEEDVPSDSTAVLSPEDMSAQGSSSQLPKPFDPEPEAKYGTLDVTFDYDSQEQKLLVTVTAVTDIPTYNRTGGNSWQVHLVLLPIKKQRAKTSIQRGPCPVFTETFKFNHVESEMIGNYAVRFRLYGVHRMKKEKIVGEKIFYLTKLNLQGKMSLPVILEPSYNHSGCDSQMSVSEMSCSESTSSCQSLEHGSVPEILIGLLYNATTGRLSAEVIKGSHFKNLAANRPPNGLFCCLKHLIGGQVYIIRDTYVKLTLLNSMGQEMSKCKTSIRRGQPNPVYKETFVFQVALFQLSDVTLILSVYNKRSMKRKEMIGWISLGLNSSGEEELNHWTEMKESKGQQVCRWHALLES

SEQ ID NO: 59790 - DNA, 1860 bp, Artificial Sequence
  derived and/or modified sequence
atggccagcgccagctggagactgaaggtggagagagagcccgtggagtacatgaacctgagcgtgctggagaagatcggctacttcagcgtggccagactggagtacagcggcaccatcctggcccactgcaacttcagactgctgggcagcaacgacagcagcgccagcgccagccaggtgaccggcaccaccgtgagccccgaggccgtgggcttcctgagcgccgtgggcgtgttcatcatcctgatgctgctgctgttcctgtacatcaacaagaagttctgcttcgagaacgtgggcggcttccccgacctgggcagcgagtacagcaccagaaagaacagccaggacaagatctacaacagctacatggacaaggacgagcacggcagcagcagcgagagcgaggacgaggccctgggcaagtaccacgaggccctgagcagaacccacaacagcagactgcccctggccgacagcagacagagaaactacgcctgggagaccagacagaagtacagccccctgagcgccgagtacgacggctacagcagcgaggccagcatcgacgagggcaactgcatccagagaatgagaagaaccccccccctggacgagctgcagccccccccctaccaggacgacagcggcagcccccacctgagctgcacccccagcgagatcggcgacagcaagtgcgagttcagccactgcagcaacagccccagatgcagctacaacaagtgccccagcgagggcagcaccggccacgagatcgagagcttccacaacaagggctacgaggaggacgtgcccagcgacagcaccgccgtgctgagccccgaggacatgagcgcccagggcagcagcagccagctgcccaagcccttcgaccccgagcccgaggccaagtacggcaccctggacgtgaccttcgactacgacagccaggagcagaagctgctggtgaccgtgaccgccgtgaccgacatccccacctacaacagaaccggcggcaacagctggcaggtgcacctggtgctgctgcccatcaagaagcagagagccaagaccagcatccagagaggcccctgccccgtgttcaccgagaccttcaagttcaaccacgtggagagcgagatgatcggcaactacgccgtgagattcagactgtacggcgtgcacagaatgaagaaggagaagatcgtgggcgagaagatcttctacctgaccaagctgaacctgcagggcaagatgagcctgcccgtgatcctggagcccagctacaaccacagcggctgcgacagccagatgagcgtgagcgagatgagctgcagcgagagcaccagcagctgccagagcctggagcacggcagcgtgcccgagatcctgatcggcctgctgtacaacgccaccaccggcagactgagcgccgaggtgatcaagggcagccacttcaagaacctggccgccaacagaccccccaacggcctgttctgctgcctgaagcacctgatcggcggccaggtgtacatcatcagagacacctacgtgaagctgaccctgctgaacagcatgggccaggagatgagcaagtgcaagaccagcatcagaagaggccagcccaaccccgtgtacaaggagaccttcgtgttccaggtggccctgttccagctgagcgacgtgaccctgatcctgagcgtgtacaacaagagaagcatgaagagaaaggagatgatcggctggatcagcctgggcctgaacagcagcggcgaggaggagctgaaccactggaccgagatgaaggagagcaagggccagcaggtgtgcagatggcacgccctgctggagagctag

SEQ ID NO: 59791 - DNA, 1860 bp, Artificial Sequence
  derived and/or modified sequence
atggcaagcgcgtcctggaggctgaaggtggaacgcgaacctgtagaatacatgaacctatcggtgctggaaaagattgggtattttagtgtcgcgaggctcgagtactcaggcacaatcctggcccactgtaacttcagactcctcgggtcaaacgattccagcgcctccgcctcccaggtaacgggcacaactgtctcccccgaggccgtggggtttctgagtgccgtcggcgtgtttataattttgatgcttctgctgttcctgtacataaacaagaaattctgtttcgagaacgtgggaggatttcctgacctaggctccgaatactctacaaggaagaactcgcaggataagatatacaattcttacatggataaggacgagcacgggagctcaagcgagtccgaggatgaggcgttggggaaataccatgaggccttgagccggacccacaacagcagactcccgctggccgactctaggcagcggaattacgcctgggagacgcgccagaaatatagtcctctgagcgccgaatacgacggctattcctctgaagcttctatcgacgagggcaactgcatccagagaatgcgacgaacacccccgctggacgaactgcaacccccaccttaccaggacgacagtggatccccacatctctcctgcaccccctccgagataggcgattctaagtgtgaattcagccactgtagtaactcgcctaggtgttcgtacaataagtgtcctagcgaggggtctacaggccatgaaatcgagagcttccataacaaaggatatgaggaagacgtcccatctgactccaccgcagtcctttcgcccgaggacatgtcagcacagggatcgagcagccagttgccgaaaccattcgatcctgagcctgaggccaaatacgggaccttagatgtcacctttgattatgactcccaggaacagaagctgttagtcacagtcaccgccgtcacagatattcctacatataatcggacaggaggcaacagttggcaggtgcacttagtcctgctccccatcaagaaacagagggccaagacctctatacagcgggggccatgcccagtcttcaccgaaactttcaagtttaaccatgtggagtccgagatgatcgggaactacgccgttcgtttcagattatatggggttcatcggatgaaaaaagagaagatagtgggagagaagatcttctaccttacaaaactcaatcttcagggcaagatgtccttgccagtaatactggaaccctcttacaaccatagtggctgcgacagccaaatgagcgtctctgaaatgtcttgtagcgagtccaccagttcctgccaatcccttgagcacggatccgttcctgagatcctgattgggctgctgtacaacgcaaccaccgggagattgtcagcggaggtaatcaagggcagccattttaaaaacctagctgccaataggccccccaacggactgttttgctgcctgaagcatctgattgggggccaggtgtacatcatcagagacacctatgtaaagcttaccctgttgaattcaatgggacaggagatgagtaagtgtaaaacctctatcagacgaggacagcccaatcccgtgtataaggaaacttttgtgtttcaggttgctctttttcaactgtcagatgtgaccttgattctgtccgtgtataataaaagatctatgaagaggaaggagatgatcggctggatctcactgggtctaaactcttcaggcgaagaagagcttaaccattggactgagatgaaggagtccaaggggcagcaagtgtgcagatggcacgccttgctcgagagctag

SEQ ID NO: 59792 - DNA, 1860 bp, Artificial Sequence
  derived and/or modified sequence
atggccagcgcctcctggaggctgaaggtggagcgggagcctgtggagtacatgaacctgtctgtgctggagaagattggctacttctctgtggcccggctggagtacagcggcaccatcctggcccactgcaacttccggctgctgggcagcaatgacagcagcgccagcgccagccaggtgacaggcaccaccgtgtccccagaggccgtgggcttcctgtctgctgtgggcgtcttcatcatcctgatgctgctgctcttcctgtacatcaacaagaagttctgctttgaaaatgtgggcggcttcccagacctgggcagcgagtacagcaccaggaagaacagccaggacaagatctacaacagctacatggacaaggatgagcacggcagcagcagcgagagtgaagatgaggccctgggcaagtaccacgaggccctgagcaggacccacaacagccggctgcccctggccgacagccggcagaggaactatgcctgggagacccggcagaagtacagccccctgtctgcagaatatgatggctacagcagcgaggccagcattgatgagggcaactgcatccagaggatgaggaggaccccacccctggatgagctgcagcccccaccctaccaggatgattctggcagcccccacctgagctgcaccccatctgaaattggagacagcaaatgtgagttcagccactgcagcaacagcccccgctgcagctacaacaagtgccccagcgagggcagcacaggccacgagattgagagcttccacaacaagggctatgaggaggatgtgcccagcgacagcacagctgtgctgagccctgaggacatgtctgcccagggcagcagcagccagctgcccaagccctttgatcctgagcctgaggccaagtatggcaccctggatgtgacctttgattatgacagccaggagcagaagctgctggtgacagtgacagctgtgacagacatccccacctacaacagaactggaggcaacagctggcaggtgcacctggtgctgctgcccatcaagaagcagagggccaagaccagcatccagaggggcccctgccctgtgttcacagagaccttcaagttcaaccacgtggagagcgagatgattggcaactatgctgtgcgcttccggctgtatggagtgcacaggatgaagaaggagaagatcgtgggggagaagatcttctacctgaccaagctgaacctgcagggcaagatgagcctgcctgtgatcctggagcccagctacaaccacagcggctgtgacagccagatgtctgtgtctgagatgagctgcagcgagagcaccagcagctgccagagcctggagcacggctctgtgcctgagatcctgattggcctgctgtacaatgccaccaccggccgcctgtctgctgaggtgatcaagggcagccacttcaagaacctggccgccaacagacctccaaatggcctcttctgctgcctgaagcacctgattggaggccaggtgtacatcatccgggacacctacgtgaagctgaccctgctgaacagcatgggccaggagatgagcaagtgcaagaccagcatcagaagaggccagcccaaccctgtgtacaaggagacctttgtgttccaggtggccctcttccagctgagtgatgtgaccctcatcctgtctgtgtacaacaagaggtccatgaagaggaaggagatgattggctggatcagcctgggcctgaacagcagtggagaggaggagctgaaccactggacagagatgaaggagagcaagggccagcaggtgtgccgctggcacgccctgctggagagctag

SEQ ID NO: 59793 - DNA, 1860 bp, Artificial Sequence
  derived and/or modified sequence
atggccagcgccagctggcggctgaaggtggagcgggagcccgtggaatacatgaaccttagtgtgctcgaaaaaatcggatacttctcagtggcacggctggaatatagcggtacaattctcgctcactgcaattttaggttgctcgggtccaatgatagctctgctagtgcctcacaggttacaggcaccactgtatcccccgaagcagtgggattcctgagcgcggttggggttttcatcattttgatgctgctgttgtttttgtatatcaataagaagttctgtttcgagaatgtgggcggattccccgacctggggagtgagtattccacccggaaaaacagccaagataaaatttataatagttatatggataaagacgagcatggttcctccagcgagtccgaggatgaagcccttgggaagtatcacgaggctctgagccgcactcacaatagccggttgcctctggctgactcaagacaaagaaactatgcgtgggaaacccggcagaagtattccccactttccgcggagtacgatggttactccagcgaggcaagcattgacgagggaaactgtatccagcgcatgagacgcactcctcccctggacgagctacaacctccaccctatcaggatgattccggcagccctcacctgagctgcacgcccagcgagatcggagattccaagtgcgaattctcccattgtagtaattccccaagatgcagctacaataagtgccctagtgaggggagtaccggccacgaaatcgagtcatttcataacaagggatacgaagaggacgtgccaagtgacagcacggccgtgttatcgccagaggacatgtccgcccagggctctagtagtcagctccccaaaccgttcgatcctgagcccgaagccaagtatggcactctggatgtcacctttgactacgacagccaggagcagaaacttttggtaacagtcacagccgtaaccgacatccccacctataacagaacaggtgggaactcgtggcaagtccacttggtgcttttgcctattaaaaagcaaagggctaaaacttccatccagagaggtccatgccccgttttcaccgagacattcaaattcaatcacgtggaaagcgagatgatcgggaattatgctgtacgcttccgcctttacggtgtccaccggatgaagaaagagaaaattgtaggtgaaaaaatcttctatttgaccaaactcaaccttcagggcaagatgtccctgcccgtcattctcgagccaagctacaaccactccggatgcgactcccaaatgagtgtgtcagaaatgagctgctcagagagcactagcagttgccagtcacttgaacacggaagtgtcccagaaattttgatcggactgctgtacaacgccactaccggacgtttgagcgccgaggtgatcaaagggagtcatttcaagaatttggccgcaaataggccccccaacgggctcttttgttgcctcaaacacctgattggaggacaggtttacatcatccgggacacttacgtgaaattgacgttgcttaatagcatgggacaggagatgtcgaaatgcaaaacttctatcaggagaggacagccgaatccggtctacaaggaaacctttgtcttccaggtcgccttattccagctgagtgacgtaacactcatactgtccgtttataacaagcgttctatgaagcggaaagagatgattgggtggataagcctcggattaaacagcagcggggaggaggagttaaatcattggacagaaatgaaggaatccaaaggacagcaggtctgtcgctggcacgctttgttagaatcctag

SEQ ID NO: 59794 - DNA, 1860 bp, Artificial Sequence
  derived and/or modified sequence
atggcctcggcatcttggcggttgaaggtcgagcgggagcccgtagaatacatgaacctgtccgtgctcgagaaaattggctacttttccgtggcccgactggaatactctggaacaatcttggcacattgcaatttcagactgctgggcagcaacgattcttccgcgtctgcatcccaggtcactggcaccacagtgtcaccagaagccgtcggtttcctctccgcagtgggggtgtttataattcttatgctgttgttgtttctgtacatcaataagaaattttgctttgaaaatgtcggaggatttcctgatctaggtagtgagtactccacccggaagaacagccaggacaagatatataatagctacatggacaaggacgagcatggatcttctagcgaatcggaggacgaggctctgggaaagtaccacgaggccttgtctcgcacgcacaacagtcgtctgccgctggctgattcccggcaacgcaattatgcgtgggagacacgacagaaatatagtcccctgagcgcagaatacgacggctattcctccgaagcctcgatcgatgaaggtaattgtatccagaggatgaggaggactccccctctggacgaattgcagccccctccataccaggacgattctgggtctcctcatctgtcttgtacccccagcgaaattggggattccaagtgcgaattctcgcattgtagcaacagccctagatgttcatataataagtgtccttccgagggtagtactgggcacgagatcgaatcctttcataataaaggctatgaggaagatgtgccttcagatagcacagcagtcctgtcaccggaggacatgagcgctcaggggagctcatcacagcttcctaaaccttttgacccagaacctgaggccaagtatggcacgctggatgtaacattcgactacgactctcaggagcagaaactcctggtcacggttacggctgtgacggatataccaacttataatagaacaggtgggaattcatggcaggtgcacctcgtactactgcccattaagaagcagcgcgctaaaacatcgatacagcggggaccctgccccgtgtttaccgagacctttaaattcaatcacgtcgagtccgagatgattgggaactatgctgtcagatttaggctctatggcgtgcacaggatgaaaaaggaaaaaatcgtcggtgagaagatcttttaccttaccaagcttaacctgcagggcaaaatgagtctcccagtgatcctcgagccatcctacaatcatagcgggtgtgatagtcaaatgtcggtgagtgaaatgagctgctctgaaagcactagttcctgtcaatccctggagcacggaagcgtgcctgagatcctgattgggctgctatataacgccacaacaggtcgactgtccgcagaggttataaagggtagccactttaagaaccttgcagctaacagaccaccaaatggcctgttctgctgcctgaaacacctgatcgggggacaagtatacataatcagggacacctacgtgaaactgaccctgcttaacagcatgggccaggagatgtccaaatgcaaaacaagcattcggcgaggccaacctaacccagtgtacaaggaaacttttgtattccaggttgccctgtttcaactaagcgatgttactctgatccttagtgtttacaataaacgttcaatgaaaaggaaggaaatgattggctggatttccctggggctcaattcttccggagaagaggagttgaaccactggactgagatgaaggagtcaaaagggcagcaggtctgcaggtggcatgctctgctggagagttag

SEQ ID NO: 59795 - DNA, 5162 bp, Artificial Sequence
  derived and/or modified sequence
agcgcgtcctccgccagccctcgcgtctgctgcccccgccatccagttggtgcggtccatggcgagcgcatcatggcgattgaaggtggagagagaacctgtggagtacatgaacttatctgtattagaaaagatagggtatttctctgtggccaggctggagtacagtggcaccatcttggctcactgcaacttccgcctcctgggttcaaacgattcttctgcctcagcatcccaagtaactgggactacagtatctccagaggcagttggatttttgtcagctgttggggtgtttattatcttgatgctgctcctttttctctatattaataagaagttctgttttgaaaatgttggcgggtttccagatcttggttcagaatacagtacaaggaagaattcacaagataaaatttataattcctacatggacaaagatgagcatggttcatcctctgaaagtgaagatgaagcgctgggtaaatatcatgaggccttatccagaacacacaattccagactaccactggcagattctagacaaaggaactatgcttgggaaacaaggcagaaatacagtcctctatcggcagagtatgatggatacagtagtgaagcatcaatagatgaaggaaactgcattcagagaatgagaagaacacccccgctggatgaattgcagccaccaccatatcaggatgacagtggttctccccatctgtcatgtacaccctcagaaattggggacagtaaatgtgaattttcccactgcagcaacagtccaagatgctcatataacaagtgcccaagtgaaggaagcacaggtcatgaaatagaaagttttcataataaaggatatgaagaagatgttccaagtgacagcactgcagtcctgagccctgaagatatgtcagctcaaggatcatcttcgcagcttcctaaaccttttgatcctgagccagaagctaaatatggcacactggatgtgacttttgactatgactcacaagaacagaagcttctggtaacagtgacagctgtcacagacatcccaacatataacaggacaggtggcaactcatggcaagtacaccttgttcttctacctataaagaaacagagagcaaaaaccagcatccagagaggaccatgccctgtcttcacagaaacatttaaatttaatcatgttgaatctgagatgattggaaattatgcagttcggtttagactgtatggtgtacatcgcatgaaaaaagaaaagattgtgggggaaaagattttttatttaacaaaattgaatcttcaagggaaaatgtcattgcctgtgatattggaaccttcttacaatcattctggctgtgactcccaaatgagcgtgtcagaaatgtcgtgtagtgaaagtacatcctcatgtcagtctcttgaacatggctcagttccagaaattcttattggcctgctttataatgccacaactggaagactatcagcagaagtgataaaaggcagccacttcaaaaatttggcagcaaacagaccacccaatggactgttctgttgtctaaaacacttgataggtggacaggtttatataatccgagatacatatgttaagttaactctactgaattccatgggtcaagagatgtccaaatgcaagacatccatccgcagagggcagccaaatccagtatataaggaaacttttgtctttcaagtggccctatttcagctttctgatgtgacactcatactgtctgtgtataacaaacgcagcatgaaaagaaaagagatgataggctggatttctttaggtctcaacagctctggagaagaagaactcaatcactggactgaaatgaaagagtcaaaaggacagcaagtatgtagatggcatgcgttgctagagtcatgatgaatagaataagcaagcagttaccatcaaaggcagcatatttccaattccaacattactgtttctaccaagtcccattagaagagctgttctttgaagaatcatattcaaccttctaccaaaatgctttaagttctatggaaagaacgtctcatactgacataaatgaagaaaatatgtgtatctagtagagcttgtttaggaaactgagaaacgtacactatcattgctaaactaacagtcctccagaaatttaataagatgtttttgatttgaagttaattttaatttagcaaaagagccagtcattttatgaaaaatcaaaattataagtgattttaaaaaccagaattttagttgcaatacaattttaatatcaccctacatattatttataaaacatagtttgactggccagtccctggtgtttgtaatgttctttaatatgaaaaagtagttctccaactctatcataagtcatatctaatggtgaagggtttcagtcacattgaaaattgttttatttcaggcatgttccctttgtgcacttaggttcattgtgcctcagttcctctcaaaagcactaaatctaagtgcaaacaagtattcattttcatacaggaatttttttaatatgttatttttttaaaagttcatttttcatttgcctccgctttcgcctgatccaaagagaccaagtcactgtactggtcccttgcaagtcttctagacaggttgtactgtagaactacgtaactttctgttgaaagcacttcctgtattcttgtattccaatgtaggaagctaatagagcaggactttactttcaaatttctttcagtgattgactcttcaaaattgcagtagtgtgaaaatacattttttacaaactgaaaatacagtagataagctgtcgaaaatggaaaacaattcaattttaattttctgctctgagtatttagtaaccaacactgcgtaaagcaggtagcattcaaaataagaaactgttctctctctaaatcttcactcttacttcaatttatatttgtgatatgaagactatccagttctcagtttgaattggaacatcatgttaaaaacagttatgagattccttatgaagtttctagtaacttgtaactagactttatgaaattaacagataaagttcttcaacgtgatgtcatcttgtgcctttcatgtaagttaaatttgctcatacagcttgaacgttgtatttgcaaaattaagccttcgatttttataaatgtaaagattcctcagaacagtgtcgcaagatctttatttcctctgaagtatgtaaaagttgtataatgtgctaactttttaatggcaaggcactttcatttgtttttatatttaggaactctaatcaggaatattataagctgttttctttttaattttgcttcttacctaatatatcattttatgcatatactttatcagagtatgttttatatatattaaaaatagtttcttttttctccttctcatttctagttaaaatagacaaaaacatactatttaccagttactaaaaagcagtatatcattgcttctagtcccaactaagtactatatattattgtaaactagaacttgttattaccataataacaaaacaatgcgtagatattacttcagcttggctgtactgaaaggccttaaaagaaacccaaaaagaccgtgaacttctgtatttttttagtttaaaaaatggcagctctatgcattcatacacatgaattataagaaaaaatacaaatgctatattggatgacatgaggtttgagaatgtgtgttacagggctgcattaaagggaaaaatccatcttttattgttacatcaatgagctttttccaggatttttcaaataaacaagtaagagttagaacctgaatcaaatggcaaaatatctcatttaagtgttttcagcaacagtatgaaaaaagacttgaagaggggatgtagattttactgagaaattggacttaggcatttgaagctataatgaactttttagactttgaaacaactgactgcattgctaacaactgttatcttcctaataaaaagagttatcagtcttatctgtaactgtaacagagcttagtgaaacacattagtaagaccagcttggtgctttcactcttagtgagaaaaagacctaactaattgttatttgttaaatctaccttttttcagactattcccagaattgtgtgtgtgatttgatacatccctagggatttatctggcataagtatcaaatccttcatggcttaaaaattaataaacagttttttaatatttctggaaagaccctacctccaccccagctgccaagtcctcaaagattataaattatctatatgagtgtatgtatctgtatacacacatgcaccattacacatacaacataaatatgtatatgtatattcatttgtaaaggcaaaggtgccctggctttttcagataactgaatagaaaaacatttcatacatttaggattatttttctcctctatgtatttactagatattatatttggtttgggttgctttctgctgctgttctccttcacacacagcaaaatatacatttgtttctgtagattgacacaacttataataattactcccaaaaagttgtctgttcttttagaaaaggattaaataaggctcaggggacccacttcactctactgaatctaatgtacgagacagtactactgcttctttgtgtgcttgaatttgcatgaaagcttaatagcaaaatcttctatctcagtaattatagcaaatagggacctactggtagggagcaggtgttggctcagaaacctgaaaaagacaacccactttcatacagttctattaaaatcccctaagttttctaataaaatgatatagtccaaatatggcaatcgactggcatttatgggagcctctaaacctggaattatggggtttatttttctcccaaatgagctgcaaaagataattattgctgcccagtaaacaaaatgtatgtcaaatcagtaaagaatttgtttagcataatattgccttatctttcagaagctttcttctatattcttgtgtcttcagtacaatccacttttgtttgaaatccatttgcatattatcttactgtgcatttagtgaattctcaataatgttgtatttgctgacaagaataataaattggaccacaatt

SEQ ID NO: 59796 - protein, 574 aa, Artificial Sequence
  derived and/or modified sequence
MAIEGGERTCGVHELICIRKVSPEAVGFLSAVGVFIILMLLLFLYINKKFCFENVGGFPDLGSEYSTRKNSQDKIYNSYMDKDEHGSSSESEDEALGKYHEALSRTHNSRLPLADSRQRNYAWETRQKYSPLSAEYDGYSSEASIDEGNCIQRMRRTPPLDELQPPPYQDDSGSPHLSCTPSEIGDSKCEFSHCSNSPRCSYNKCPSEGSTGHEIESFHNKGYEEDVPSDSTAVLSPEDMSAQGSSSQLPKPFDPEPEAKYGTLDVTFDYDSQEQKLLVTVTAVTDIPTYNRTGGNSWQVHLVLLPIKKQRAKTSIQRGPCPVFTETFKFNHVESEMIGNYAVRFRLYGVHRMKKEKIVGEKIFYLTKLNLQGKMSLPVILEPSYNHSGCDSQMSVSEMSCSESTSSCQSLEHGSVPEILIGLLYNATTGRLSAEVIKGSHFKNLAANRPPNGLFCCLKHLIGGQVYIIRDTYVKLTLLNSMGQEMSKCKTSIRRGQPNPVYKETFVFQVALFQLSDVTLILSVYNKRSMKRKEMIGWISLGLNSSGEEELNHWTEMKESKGQQVCRWHALLES

SEQ ID NO: 59797 - protein, 581 aa, Artificial Sequence
  derived and/or modified sequence
MAIEGGERTCGVHELICIRKVSPEAVGFLSAVGVFIILMLLLFLYINKKFCFENVGGFPDLGSEYSTRKNSQDKIYNSYMDKDEHGSSSESEDEALGKYHEALSRTHNSRLPLADSRQRNYAWETRQKYSPLSAEYDGYSSEASIDEGNCIQRMRRTPPLDELQPPPYQDDSGSPHLSCTPSEIGDSKCEFSHCSNSPRCSYNKCPSEGSTGHEIESFHNKGYEEDVPSDSTAVLSPEDMSAQGSSSQLPKPFDPEPEAKYGTLDVTFDYDSQEQKLLVTVTAVTDIPTYNRTGGNSWQVHLVLLPIKKQRAKTSIQRGPCPVFTETFKFNHVESEMIGNYAVRFRLYGVHRMKKEKIVGEKIFYLTKLNLQGKMSLPVILEPSYNHSGCDSQMSVSEMSCSESTSSCQSLEHGSVPEILIGLLYNATTGRLSAEVIKGSHFKNLAANRPPTFHPLLSDGLFCCLKHLIGGQVYIIRDTYVKLTLLNSMGQEMSKCKTSIRRGQPNPVYKETFVFQVALFQLSDVTLILSVYNKRSMKRKEMIGWISLGLNSSGEEELNHWTEMKESKGQQVCRWHALLES

SEQ ID NO: 59798 - DNA, 1725 bp, Artificial Sequence
  derived and/or modified sequence
atggccatcgagggcggcgagagaacctgcggcgtgcacgagctgatctgcatcagaaaggtgagccccgaggccgtgggcttcctgagcgccgtgggcgtgttcatcatcctgatgctgctgctgttcctgtacatcaacaagaagttctgcttcgagaacgtgggcggcttccccgacctgggcagcgagtacagcaccagaaagaacagccaggacaagatctacaacagctacatggacaaggacgagcacggcagcagcagcgagagcgaggacgaggccctgggcaagtaccacgaggccctgagcagaacccacaacagcagactgcccctggccgacagcagacagagaaactacgcctgggagaccagacagaagtacagccccctgagcgccgagtacgacggctacagcagcgaggccagcatcgacgagggcaactgcatccagagaatgagaagaaccccccccctggacgagctgcagccccccccctaccaggacgacagcggcagcccccacctgagctgcacccccagcgagatcggcgacagcaagtgcgagttcagccactgcagcaacagccccagatgcagctacaacaagtgccccagcgagggcagcaccggccacgagatcgagagcttccacaacaagggctacgaggaggacgtgcccagcgacagcaccgccgtgctgagccccgaggacatgagcgcccagggcagcagcagccagctgcccaagcccttcgaccccgagcccgaggccaagtacggcaccctggacgtgaccttcgactacgacagccaggagcagaagctgctggtgaccgtgaccgccgtgaccgacatccccacctacaacagaaccggcggcaacagctggcaggtgcacctggtgctgctgcccatcaagaagcagagagccaagaccagcatccagagaggcccctgccccgtgttcaccgagaccttcaagttcaaccacgtggagagcgagatgatcggcaactacgccgtgagattcagactgtacggcgtgcacagaatgaagaaggagaagatcgtgggcgagaagatcttctacctgaccaagctgaacctgcagggcaagatgagcctgcccgtgatcctggagcccagctacaaccacagcggctgcgacagccagatgagcgtgagcgagatgagctgcagcgagagcaccagcagctgccagagcctggagcacggcagcgtgcccgagatcctgatcggcctgctgtacaacgccaccaccggcagactgagcgccgaggtgatcaagggcagccacttcaagaacctggccgccaacagaccccccaacggcctgttctgctgcctgaagcacctgatcggcggccaggtgtacatcatcagagacacctacgtgaagctgaccctgctgaacagcatgggccaggagatgagcaagtgcaagaccagcatcagaagaggccagcccaaccccgtgtacaaggagaccttcgtgttccaggtggccctgttccagctgagcgacgtgaccctgatcctgagcgtgtacaacaagagaagcatgaagagaaaggagatgatcggctggatcagcctgggcctgaacagcagcggcgaggaggagctgaaccactggaccgagatgaaggagagcaagggccagcaggtgtgcagatggcacgccctgctggagagctag

SEQ ID NO: 59799 - DNA, 1746 bp, Artificial Sequence
  derived and/or modified sequence
atggccatcgagggcggcgagagaacctgcggcgtgcacgagctgatctgcatcagaaaggtgagccccgaggccgtgggcttcctgagcgccgtgggcgtgttcatcatcctgatgctgctgctgttcctgtacatcaacaagaagttctgcttcgagaacgtgggcggcttccccgacctgggcagcgagtacagcaccagaaagaacagccaggacaagatctacaacagctacatggacaaggacgagcacggcagcagcagcgagagcgaggacgaggccctgggcaagtaccacgaggccctgagcagaacccacaacagcagactgcccctggccgacagcagacagagaaactacgcctgggagaccagacagaagtacagccccctgagcgccgagtacgacggctacagcagcgaggccagcatcgacgagggcaactgcatccagagaatgagaagaaccccccccctggacgagctgcagccccccccctaccaggacgacagcggcagcccccacctgagctgcacccccagcgagatcggcgacagcaagtgcgagttcagccactgcagcaacagccccagatgcagctacaacaagtgccccagcgagggcagcaccggccacgagatcgagagcttccacaacaagggctacgaggaggacgtgcccagcgacagcaccgccgtgctgagccccgaggacatgagcgcccagggcagcagcagccagctgcccaagcccttcgaccccgagcccgaggccaagtacggcaccctggacgtgaccttcgactacgacagccaggagcagaagctgctggtgaccgtgaccgccgtgaccgacatccccacctacaacagaaccggcggcaacagctggcaggtgcacctggtgctgctgcccatcaagaagcagagagccaagaccagcatccagagaggcccctgccccgtgttcaccgagaccttcaagttcaaccacgtggagagcgagatgatcggcaactacgccgtgagattcagactgtacggcgtgcacagaatgaagaaggagaagatcgtgggcgagaagatcttctacctgaccaagctgaacctgcagggcaagatgagcctgcccgtgatcctggagcccagctacaaccacagcggctgcgacagccagatgagcgtgagcgagatgagctgcagcgagagcaccagcagctgccagagcctggagcacggcagcgtgcccgagatcctgatcggcctgctgtacaacgccaccaccggcagactgagcgccgaggtgatcaagggcagccacttcaagaacctggccgccaacagaccccccaccttccaccccctgctgagcgacggcctgttctgctgcctgaagcacctgatcggcggccaggtgtacatcatcagagacacctacgtgaagctgaccctgctgaacagcatgggccaggagatgagcaagtgcaagaccagcatcagaagaggccagcccaaccccgtgtacaaggagaccttcgtgttccaggtggccctgttccagctgagcgacgtgaccctgatcctgagcgtgtacaacaagagaagcatgaagagaaaggagatgatcggctggatcagcctgggcctgaacagcagcggcgaggaggagctgaaccactggaccgagatgaaggagagcaagggccagcaggtgtgcagatggcacgccctgctggagagctag

SEQ ID NO: 59800 - DNA, 1725 bp, Artificial Sequence
  derived and/or modified sequence
atggctatcgaaggcggtgagcgcacatgtggggtccatgagctgatttgtattaggaaagtgagcccagaggccgtgggattcctgtcagccgtgggtgtgttcatcattttgatgctcctgctgttcttatacatcaacaagaagttctgctttgaaaatgttggtggatttcctgacctcggcagtgaatacagcacacgtaagaattctcaagacaagatttataacagttacatggacaaagatgagcatggtagttcatctgaatcagaggacgaggccctcggaaagtaccacgaagccctgagtcggacacacaatagtcggctgcctttggctgactccagacaacgcaattacgcctgggagacgaggcagaagtattctcctctctccgcagagtacgacggctattcatctgaagctagtattgacgaggggaactgtatacagaggatgcgcaggactccgcccctggatgaattgcagccccctccatatcaagacgatagtggcagcccccacttaagctgcactccgagcgaaataggggactcaaagtgcgaatttagccactgctcaaactctccaagatgctcctacaacaaatgcccctcggaggggtctacaggacatgagattgagtcttttcacaataaagggtacgaagaggacgtgccttccgattcaacagcggtgctaagcccagaggatatgtccgcccaggggagtagctcccagttaccaaagcccttcgatcctgagccagaagccaagtatgggacccttgacgtaaccttcgactacgattcccaggagcagaaacttctggtaaccgtgaccgcagtgacagatatccccacttataatcgcaccggcggaaattcttggcaggttcacttggtacttctacccattaagaagcaacgtgcgaagactagcatccagcgcggtccctgcccagtctttacagagacttttaagtttaatcatgtggaatcggagatgattggcaattacgccgtacggttcaggctgtacggagtccaccgcatgaaaaaggagaaaatagtgggcgagaaaatattttacttgaccaagctcaatctgcaaggaaaaatgagcttacctgtcatcctcgagccatcgtataatcacagtggttgcgactcacagatgagcgttagcgagatgagctgctccgaaagtacctcctcttgtcagtcattggaacacggcagcgtacccgaaatcctcattggcctattgtataacgccaccactgggcggctgagcgccgaggtgattaaaggctcccatttcaagaatctcgctgccaaccggccacctaatgggctgttttgctgcctcaagcatttgataggtgggcaggtgtacatcataagagacacttatgtgaagcttactcttcttaactctatgggccaggagatgtccaaatgtaaaacttctattagacggggtcagccgaaccctgtttacaaggagacgtttgtgttccaggtggcattgtttcagttgtcagacgtgactctgatactcagcgtgtacaacaagcgatcaatgaagagaaaagagatgattgggtggatctccttggggctcaatagctccggagaggaagaactgaaccattggacagaaatgaaagagagcaagggccaacaggtttgtcgatggcacgcccttctggaatcatag

SEQ ID NO: 59801 - DNA, 1746 bp, Artificial Sequence
  derived and/or modified sequence
atggccattgaggggggggagcgaacctgcggcgtgcatgagctgatatgcatccgaaaagtctcccctgaggcggtcgggtttcttagtgccgtcggtgtatttattatcctcatgctgctccttttcctgtacatcaataagaagttctgttttgagaatgtgggcggatttcccgatttggggagcgagtactcaacacgcaagaacagccaggataaaatttataatagctatatggacaaagatgagcatggttctagctccgaaagtgaggatgaggcattggggaagtatcatgaggccctgtcacgcacacataacagtcgccttccccttgcagattccaggcagcgcaattatgcgtgggagacccggcagaagtacagtccgctgagtgcagaatacgatggctacagctctgaagccagtatcgatgaaggcaactgtatccagcgcatgcgccgtactccacccctggatgagctccaaccccctccttaccaagacgattcagggagccctcacctgtcatgtacaccgtcagaaatcggtgatagcaagtgtgaatttagccactgctctaatagcccccgctgtagctacaataagtgtccttcagaggggtccactggccacgaaattgaaagtttccataacaagggctatgaagaagacgtgccttctgattcgactgcagtgttgtcaccggaggacatgtctgcacagggctcatctagtcaattaccgaagcccttcgatccagagcctgaggccaagtacgggactctcgacgtaaccttcgactacgatagtcaggagcagaaactgttagttacagtaaccgcggtgacagacatacccacgtacaaccgaacaggcggcaattcttggcaggtgcacctcgtgctactgccgatcaaaaagcagcgggctaagactagcatccaacggggcccgtgccctgtcttcacagagaccttcaaattcaatcacgtcgaatctgaaatgatcggcaattatgcggtgcgattcaggctgtacggggtgcatagaatgaaaaaagaaaagattgtaggagagaagattttctaccttaccaagctcaacctgcaaggtaaaatgtcactccctgtgatactcgagccaagctacaaccactccggctgcgactcccagatgagcgtatcagaaatgtcatgcagtgaaagtacatcctcttgccaaagtctcgagcacgggagcgtccctgagatcctcataggtctcctttacaacgcgacgaccgggaggctgtcagccgaggtgatcaagggtagtcatttcaagaacttagcggccaatcgaccccccaccttccatcctctcctgagtgatgggctgttctgctgcttgaaacatctaattggtggccaggtctacatcatacgcgatacatacgtgaagctgaccctgctaaatagtatggggcaggagatgtctaaatgcaaaacctccattcgccgagggcagccgaatcccgtctacaaagaaacttttgtcttccaagtggctttgttccagttatccgacgtaaccctcattcttagtgtgtacaacaagcgaagtatgaagcggaaagagatgatcggatggatttcactcggactgaatagctctggtgaagaggaactcaaccattggaccgagatgaaagagtcaaagggccagcaggtctgcagatggcatgcactgctggagagttag

SEQ ID NO: 59802 - DNA, 1725 bp, Artificial Sequence
  derived and/or modified sequence
atggccattgaaggaggagagaggacctgtggggtgcatgagctgatctgcatcaggaaggtgtccccagaggccgtgggcttcctgtctgctgtgggcgtcttcatcatcctgatgctgctgctcttcctgtacatcaacaagaagttctgctttgaaaatgtgggcggcttcccagacctgggcagcgagtacagcaccaggaagaacagccaggacaagatctacaacagctacatggacaaggatgaacatggcagcagcagcgagagtgaagatgaggccctgggcaagtaccacgaggccctgagcaggacccacaacagccggctgcccctggccgacagccggcagagaaattatgcctgggagacccggcagaagtacagccccctgtctgcagaatatgatggctacagcagcgaggccagcattgatgagggcaactgcatccagaggatgaggaggaccccacccctggatgagctgcagcccccaccctaccaggatgacagcggcagcccccacctgagctgcacccccagcgagatcggggacagcaaatgtgagttcagccactgcagcaacagcccccgctgcagctacaacaagtgccccagcgagggcagcactggacatgaaattgagagcttccacaacaagggctatgaagaagatgtgcccagcgacagcacagctgtgctgagccctgaggacatgtctgcccagggcagcagcagccagctgcccaagccctttgatcctgagcctgaggccaagtatggcaccctggatgtgacctttgattatgacagccaggagcagaagctgctggtgacagtgacagctgtgacagacatccccacctacaacagaactggaggcaacagctggcaggtgcacctggtgctgctgcccatcaagaagcagagggccaagaccagcatccagaggggcccctgccctgtgttcacagagaccttcaagttcaaccacgtggagagcgagatgattggcaactatgctgtgcgcttccggctgtatggagtgcacaggatgaagaaggagaagatcgtgggggagaagatcttctacctgaccaagctgaacctgcagggcaagatgagcctgcccgtcatcctggagcccagctacaaccacagcggctgtgacagccagatgtctgtgtctgagatgagctgcagcgagagcaccagcagctgccagagcctggagcacggctctgtgcctgagatcctgattggcctgctgtacaatgccaccaccggccgcctgtctgctgaggtgatcaagggcagccacttcaagaacctggccgccaaccggccccccaacggcctcttctgctgcctgaagcacctgattggaggccaggtgtacatcatccgggacacctacgtgaagctgaccctgctgaacagcatgggccaggagatgagcaagtgcaagaccagcatccggcggggccagcccaaccctgtgtacaaggagacctttgtgttccaggtggccctcttccagctgagtgatgtgaccctcatcctgtctgtgtacaacaagaggtccatgaagaggaaggagatgattggctggatcagcctgggcctgaacagcagcggggaggaggagctgaaccactggacagagatgaaggagagcaagggccagcaggtgtgccgctggcacgccctgctggagagctag

SEQ ID NO: 59803 - DNA, 1746 bp, Artificial Sequence
  derived and/or modified sequence
atggccattgaaggaggagagaggacctgtggggtgcatgagctgatctgcatcaggaaggtgtccccagaggccgtgggcttcctgtctgctgtgggcgtcttcatcatcctgatgctgctgctcttcctgtacatcaacaagaagttctgctttgaaaatgtgggcggcttcccagacctgggcagcgagtacagcaccaggaagaacagccaggacaagatctacaacagctacatggacaaggatgaacatggcagcagcagcgagagtgaagatgaggccctgggcaagtaccacgaggccctgagcaggacccacaacagccggctgcccctggccgacagccggcagagaaattatgcctgggagacccggcagaagtacagccccctgtctgcagaatatgatggctacagcagcgaggccagcattgatgagggcaactgcatccagaggatgaggaggaccccacccctggatgagctgcagcccccaccctaccaggatgacagcggcagcccccacctgagctgcacccccagcgagatcggggacagcaaatgtgagttcagccactgcagcaacagcccccgctgcagctacaacaagtgccccagcgagggcagcactggacatgaaattgagagcttccacaacaagggctatgaagaagatgtgcccagcgacagcacagctgtgctgagccctgaggacatgtctgcccagggcagcagcagccagctgcccaagccctttgatcctgagcctgaggccaagtatggcaccctggatgtgacctttgattatgacagccaggagcagaagctgctggtgacagtgacagctgtgacagacatccccacctacaacagaactggaggcaacagctggcaggtgcacctggtgctgctgcccatcaagaagcagagggccaagaccagcatccagaggggcccctgccctgtgttcacagagaccttcaagttcaaccacgtggagagcgagatgattggcaactatgctgtgcgcttccggctgtatggagtgcacaggatgaagaaggagaagatcgtgggggagaagatcttctacctgaccaagctgaacctgcagggcaagatgagcctgcccgtcatcctggagcccagctacaaccacagcggctgtgacagccagatgtctgtgtctgagatgagctgcagcgagagcaccagcagctgccagagcctggagcacggctctgtgcctgagatcctgattggcctgctgtacaatgccaccaccggccgcctgtctgctgaggtgatcaagggcagccacttcaagaacctggccgccaaccggccccccaccttccaccccctgctgagtgatggcctcttctgctgcctgaagcacctgattggaggccaggtgtacatcatccgggacacctacgtgaagctgaccctgctgaacagcatgggccaggagatgagcaagtgcaagaccagcatcagaagaggccagcccaaccctgtgtacaaggagacctttgtgttccaggtggccctcttccagctgagtgatgtgaccctcatcctgtctgtgtacaacaagaggtccatgaagaggaaggagatgattggctggatcagcctgggcctgaacagcagtggagaggaggagctgaaccactggacagagatgaaggagagcaagggccagcaggtgtgccgctggcacgccctgctggagagctag

SEQ ID NO: 59804 - DNA, 1725 bp, Artificial Sequence
  derived and/or modified sequence
atggccatcgagggcggcgagcggacctgcggcgtgcacgagctgatctgcatacgcaaggtgagcccagaggccgtcgggtttctgtctgccgtgggcgtctttattatcttgatgctattactgttcctctatatcaataaaaagttctgctttgaaaatgtgggtggcttcccggacctaggtagtgagtatagtacaagaaaaaacagccaggacaaaatctataatagttacatggataaggacgagcacggatccagcagcgagtccgaagacgaggctctggggaagtatcacgaagctctctccaggacacacaattcccggctgcctctggctgactcacgccagcgaaattacgcttgggaaacccgccagaaatattcaccattaagcgccgaatacgatggctactcctctgaggcttctatcgatgaagggaattgtatccagcgcatgcggaggacccccccactggacgaattgcagccacccccctaccaggacgattctggatctccccatctgagctgcaccccctcggagatcggcgatagtaagtgtgagttttctcactgcagcaattctccaagatgctcctacaataagtgcccaagcgagggctcaacggggcatgaaatagaaagcttccacaataaaggctatgaggaggacgttccttccgacagtacagctgtactgtcaccggaagacatgtctgcacagggttcatcttcccagctccccaagccttttgacccagagcccgaagccaaatatggcactctggatgttacatttgactacgattcgcaggagcagaagctcctggtgaccgtgaccgcggtaaccgatatcccaacttacaataggacagggggcaattcatggcaggttcatttggtcctgctgcccattaagaaacagcgtgcaaagacatcgatccagagaggcccatgtcctgtttttaccgaaacgttcaagtttaaccatgtcgagagcgaaatgatcggcaattatgccgtgaggttccgcctctacggagtgcacaggatgaagaaggagaagatagtaggggagaagattttttacctgactaaattgaatcttcagggaaagatgtctttaccggtgatcctcgagccctcctacaaccactctggatgtgatagtcagatgtccgtgagcgagatgtcatgctccgagtcaacttcaagctgccagtctcttgagcacggatcagtaccagaaattctgatcggactgctgtacaatgcgacgactggaagactgtcggctgaagtgataaaaggttcccatttcaaaaacctggccgccaaccgccccccaaacggactgttttgctgcctcaagcatctgattggcgggcaggtctacataattcgcgatacgtacgtgaagctgacactcttaaacagcatgggacaggagatgtccaaatgtaaaacgtccattaggaggggtcaacctaaccccgtttacaaggaaacttttgtgtttcaagtggcactgttccaactgtctgatgtcacattgatattgagtgtatataataagcgaagtatgaagcgtaaggagatgattggctggatcagcctcggcctcaattcttcaggcgaagaggaacttaaccactggacagagatgaaggagtctaaaggccagcaggtgtgtcggtggcatgctctgcttgaatcctag

SEQ ID NO: 59805 - DNA, 1746 bp, Artificial Sequence
  derived and/or modified sequence
atggccatcgagggcggcgagcggacctgcggcgtgcacgagctgatatgtattagaaaggtgtcccccgaagccgtcggcttcctgtccgcagttggtgtttttataatcctaatgctgctgctctttctgtacatcaataagaagttctgttttgaaaatgtgggcggatttccggaccttggatctgaatacagtactcgcaaaaactcccaggataaaatctataactcttacatggacaaggacgaacacggcagctccagtgaaagcgaagatgaggcgttggggaagtatcatgaagccctgtcccgaacacacaacagtaggctgcctcttgccgattctagacagcgaaactacgcctgggagacccggcagaagtactcgcccctcagtgctgagtatgatggctactccagcgaagcgagcattgatgaaggcaattgcatccagcggatgcgcagaaccccacctctggatgagctacaaccgccgccttatcaggatgacagcggtagtccgcacctgagctgtactccctcagaaattggagatagcaaatgtgaattttcacactgtagcaacagtcctcgttgttcgtataataagtgtccgagcgagggcagtaccgggcacgagatcgagtccttccacaataaggggtatgaggaagatgtgcctagcgatagcactgccgtactgagtccagaggacatgtcagctcaggggtcttcctcacaactgcccaaaccgttcgaccctgaaccggaggccaagtacggcactctcgatgtgacatttgattacgattctcaagagcaaaaactgctggtgacagttactgctgtgactgacattcctacgtacaaccgcactggggggaactcttggcaggttcacttggtgctcctgcctattaaaaaacagagggccaaaactagtatccagagggggccttgcccagtctttactgagacattcaagttcaaccacgtggagagtgagatgatcgggaactacgctgtcagatttcgactgtacggagttcatcgtatgaaaaaggaaaaaatagtgggtgaaaagatcttttacctgacgaagcttaatctgcaaggcaagatgagtctcccagtgattctggaaccaagctacaaccattcaggctgcgacagccaaatgtctgtctccgaaatgtcctgttcagagtctacctcttcttgccagtccctcgaacatgggtctgtacccgaaattctgatagggctgctctacaacgctacaaccgggagactctctgcagaagtcataaagggctcccacttcaaaaaccttgccgccaaccgccccccgactttccaccccctactaagcgacggcctgttttgttgcctgaaacacctgataggtggccaggtctatatcattcgggatacatacgtaaagctgactctgttaaattccatgggccaagagatgtccaaatgtaaaacctctatcaggcggggacagcctaaccctgtgtataaggaaacctttgtgtttcaagtcgccctgtttcagctctcggatgtcaccttgatcctgagtgtctacaataaaagatccatgaaacgtaaggaaatgatcggatggatctctctaggtctcaatagtagcggcgaggaagagcttaatcattggactgaaatgaaagagtctaaaggccagcaggtttgccggtggcacgctttgcttgagagttag

SEQ ID NO: 59806 - DNA, 1725 bp, Artificial Sequence
  derived and/or modified sequence
atggccatcgaggggggtgaacgcacttgtggcgtccacgaactcatctgcatcagaaaagtgagcccagaagccgtggggttcctctccgctgttggagtcttcattatcttgatgcttctcctgttcctgtatatcaacaagaagttctgttttgagaacgtgggtgggttcccggatttggggtctgaatactctacccgaaagaactctcaagacaagatatacaattcctatatggataaggacgaacatgggagtagctccgaatccgaggacgaggcactcggcaaataccacgaagccctgtctcgaacgcataacagtaggctgcctctggcagatagtaggcaaagaaactacgcatgggagacacgacaaaagtactccccactgtccgcagagtacgacggttacagttccgaagcttcaattgacgaaggcaactgcattcaacggatgaggagaactccaccccttgacgagctccagccacctccttaccaagatgattcggggagcccacatctttcttgtactccctcagaaattggagacagcaagtgcgaatttagtcactgctcaaattcccccaggtgtagttacaacaagtgtccctctgagggctcaactgggcacgaaatagagtcatttcataacaaggggtacgaagaggacgtcccctcagattcaacagccgtgctgagcccggaggacatgagtgcccagggatcctccagccaattacctaaaccattcgatcccgaacccgaggccaaatacggaaccctcgatgtgacatttgactacgactcacaggaacaaaagctgctcgtgaccgtcaccgcagtgaccgacattccgacttacaatcggactggaggaaattcttggcaagttcacctggtgctactgcctatcaagaagcagagagccaaaacatcaatccagcggggtccatgtcctgtgtttactgagaccttcaagtttaaccacgtggaatctgagatgattggaaactacgctgtgagattccgcctttatggtgtccaccggatgaagaaagaaaaaattgtcggtgagaagatcttctacctgaccaaactgaatctgcagggaaaaatgtcgttaccagtgatcctagagccttcttataatcactctggctgcgatagtcaaatgtccgtgagtgaaatgtcttgcagcgagtccactagctcatgtcagtccttggaacacggttccgtccccgaaattctgattggcctactgtacaacgcgactacaggcaggctgtcagctgaagtaattaaaggatctcactttaaaaacttagcggcaaataggcctccaaatggcttattctgctgcctgaagcacctcatagggggtcaggtgtacatcattagagatacctacgttaaactaaccctcctgaactccatgggccaggaaatgtccaaatgcaagaccagcatccgtagaggccagcctaatcccgtttataaggagacttttgttttccaggttgcattattccaattgagcgacgtcactctgatcctgtccgtgtacaacaagcgttcgatgaagagaaaagagatgatcggttggatctcgctcggcctcaactcctctggcgaggaagagcttaaccactggactgaaatgaaggagtcaaagggtcagcaagtctgtcgctggcatgcgctcttagaatcatag

SEQ ID NO: 59807 - DNA, 1746 bp, Artificial Sequence
  derived and/or modified sequence
atggccatcgagggcggagagcgcacatgtggcgtgcacgaacttatctgtatccggaaggtaagcccagaggctgttggctttctgtccgccgtcggcgtattcatcatcctcatgttgctgctctttttgtatatcaacaaaaagttttgcttcgagaatgtggggggttttcccgatctgggctctgagtactccacacgtaagaactcccaagacaaaatatataatagttatatggataaagatgagcacgggtcctcctcagagagcgaggatgaagccctcggcaagtatcatgaagccctaagtagaacacacaactcacgcctgcccctggctgacagtcggcagagaaattacgcctgggaaacccggcagaagtatagcccattgtctgctgagtatgacggttacagctccgaggcttcaatcgatgagggaaattgcattcagcgtatgcgtcgcacccctcctctggatgagctccaacccccaccttatcaggatgactctggctcacctcacttgtcctgcactccatctgaaattggcgactcgaagtgcgaatttagccattgcagcaatagcccaaggtgcagctataacaagtgcccatcagaagggagcaccgggcatgaaatcgagagttttcataataaaggttacgaagaggatgtaccgagcgacagtaccgcagtactgtctccggaggacatgagtgcccaggggtctagctctcagctcccgaagccatttgacccagagccagaagcaaagtatggtacactggatgtgaccttcgattacgactcccaagagcagaaactcctggttacggtgacggccgttaccgacattcccacctacaaccggaccggaggcaactcctggcaggtgcacctcgtcttgctccccataaagaagcagcgggcaaagacaagcattcagcggggaccttgcccagtcttcacagagacctttaagttcaaccacgtcgagtctgaaatgatcggaaattatgccgttcgtttccgactgtatggcgttcatagaatgaagaaagaaaagatcgtcggggaaaagatcttctacctgacaaagctgaacctgcagggaaagatgagcctgcccgtgatcctggagccaagctataaccacagtggctgcgactcccagatgagtgtctcagagatgtcatgttccgaatctacgagctcttgtcagtcgttggaacatggctctgtgcctgaaatcttaatcggtctgctctataacgcaaccaccggtcggctttccgctgaagtgattaaaggatctcatttcaagaatctggctgccaaccgtcctcctacctttcaccctctcctgtccgatggcttgttctgctgccttaaacacttgattggaggccaggtgtacatcattcgcgacacttatgtcaaactgactctccttaacagcatgggtcaggagatgagtaagtgtaagaccagtattcgcaggggtcagcctaaccccgtctacaaagaaacatttgtatttcaggtggccctgtttcagctgtctgatgtcacacttatactaagcgtttacaataagcggagcatgaagcggaaggagatgattgggtggatcagtcttgggctgaattcatcaggggaggaggagctgaatcattggaccgagatgaaagaatcaaaaggccagcaggtgtgccggtggcacgccctccttgagtcatag

SEQ ID NO: 59808 - DNA, 2940 bp, Artificial Sequence
  derived and/or modified sequence
ccatccagttggtgcggtccatggcgagcgcatcatggcgattgaaggtggagagagaacctgtggagtacatgaacttatctgtattagaaaagtatctccagaggcagttggatttttgtcagctgttggggtgtttattatcttgatgctgctcctttttctctatattaataagaagttctgttttgaaaatgttggcgggtttccagatcttggttcagaatacagtacaaggaagaattcacaagataaaatttataattcctacatggacaaagatgagcatggttcatcctctgaaagtgaagatgaagcgctgggtaaatatcatgaggccttatccagaacacacaattccagactaccactggcagattctagacaaaggaactatgcttgggaaacaaggcagaaatacagtcctctatcggcagagtatgatggatacagtagtgaagcatcaatagatgaaggaaactgcattcagagaatgagaagaacacccccgctggatgaattgcagccaccaccatatcaggatgacagtggttctccccatctgtcatgtacaccctcagaaattggggacagtaaatgtgaattttcccactgcagcaacagtccaagatgctcatataacaagtgcccaagtgaaggaagcacaggtcatgaaatagaaagttttcataataaaggatatgaagaagatgttccaagtgacagcactgcagtcctgagccctgaagatatgtcagctcaaggatcatcttcgcagcttcctaaaccttttgatcctgagccagaagctaaatatggcacactggatgtgacttttgactatgactcacaagaacagaagcttctggtaacagtgacagctgtcacagacatcccaacatataacaggacaggtggcaactcatggcaagtacaccttgttcttctacctataaagaaacagagagcaaaaaccagcatccagagaggaccatgccctgtcttcacagaaacatttaaatttaatcatgttgaatctgagatgattggaaattatgcagttcggtttagactgtatggtgtacatcgcatgaaaaaagaaaagattgtgggggaaaagattttttatttaacaaaattgaatcttcaagggaaaatgtcattgcctgtgatattggaaccttcttacaatcattctggctgtgactcccaaatgagcgtgtcagaaatgtcgtgtagtgaaagtacatcctcatgtcagtctcttgaacatggctcagttccagaaattcttattggcctgctttataatgccacaactggaagactatcagcagaagtgataaaaggcagccacttcaaaaatttggcagcaaacagaccacccaatggactgttctgttgtctaaaacacttgataggtggacaggtttatataatccgagatacatatgttaagttaactctactgaattccatgggtcaagagatgtccaaatgcaagacatccatccgcagagggcagccaaatccagtatataaggaaacttttgtctttcaagtggccctatttcagctttctgatgtgacactcatactgtctgtgtataacaaacgcagcatgaaaagaaaagagatgataggctggatttctttaggtctcaacagctctggagaagaagaactcaatcactggactgaaatgaaagagtcaaaaggacagcaagtatgtagatggcatgcgttgctagagtcatgatgaatagaataagcaagcagttaccatcaaaggcagcatatttccaattccaacattactgtttctaccaagtcccattagaagagctgttctttgaagaatcatattcaaccttctaccaaaatgctttaagttctatggaaagaacgtctcatactgacataaatgaagaaaatatgtgtatctagtagagcttgtttaggaaactgagaaacgtacactatcattgctaaactaacagtcctccagaaatttaataagatgtttttgatttgaagttaattttaatttagcaaaagagccagtcattttatgaaaaatcaaaattataagtgattttaaaaaccagaattttagttgcaatacaattttaatatcaccctacatattatttataaaacatagtttgactggccagtccctggtgtttgtaatgttctttaatatgaaaaagtagttctccaactctatcataagtcatatctaatggtgaagggtttcagtcacattgaaaattgttttatttcaggcatgttccctttgtgcacttaggttcattgtgcctcagttcctctcaaaagcactaaatctaagtgcaaacaagtattcattttcatacaggaatttttttaatatgttatttttttaaaagttcatttttcatttgcctccgctttcgcctgatccaaagagaccaagtcactgtactggtcccttgcaagtcttctagacaggttgtactgtagaactacgtaactttctgttgaaagcacttcctgtattcttgtattccaatgtaggaagctaatagagcaggactttactttcaaatttctttcagtgattgactcttcaaaattgcagtagtgtgaaaatacattttttacaaactgaaaatacagtagataagctgtcgaaaatggaaaacaattcaattttaattttctgctctgagtatttagtaaccaacactgcgtaaagcaggtagcattcaaaataagaaactgttctctctctaaatcttcactcttacttcaatttatatttgtgatatgaagactatccagttctcagtttgaattggaacatcatgttaaaaacagttatgagattccttatgaagtttctagtaacttgtaactagactttatgaaattaacagataaagttcttcaacgtga

SEQ ID NO: 59809 - DNA, 5043 bp, Artificial Sequence
  derived and/or modified sequence
agcgcgtcctccgccagccctcgcgtctgctgcccccgccatccagttggtgcggtccatggcgagcgcatcatggcgattgaaggtggagagagaacctgtggagtacatgaacttatctgtattagaaaagtatctccagaggcagttggatttttgtcagctgttggggtgtttattatcttgatgctgctcctttttctctatattaataagaagttctgttttgaaaatgttggcgggtttccagatcttggttcagaatacagtacaaggaagaattcacaagataaaatttataattcctacatggacaaagatgagcatggttcatcctctgaaagtgaagatgaagcgctgggtaaatatcatgaggccttatccagaacacacaattccagactaccactggcagattctagacaaaggaactatgcttgggaaacaaggcagaaatacagtcctctatcggcagagtatgatggatacagtagtgaagcatcaatagatgaaggaaactgcattcagagaatgagaagaacacccccgctggatgaattgcagccaccaccatatcaggatgacagtggttctccccatctgtcatgtacaccctcagaaattggggacagtaaatgtgaattttcccactgcagcaacagtccaagatgctcatataacaagtgcccaagtgaaggaagcacaggtcatgaaatagaaagttttcataataaaggatatgaagaagatgttccaagtgacagcactgcagtcctgagccctgaagatatgtcagctcaaggatcatcttcgcagcttcctaaaccttttgatcctgagccagaagctaaatatggcacactggatgtgacttttgactatgactcacaagaacagaagcttctggtaacagtgacagctgtcacagacatcccaacatataacaggacaggtggcaactcatggcaagtacaccttgttcttctacctataaagaaacagagagcaaaaaccagcatccagagaggaccatgccctgtcttcacagaaacatttaaatttaatcatgttgaatctgagatgattggaaattatgcagttcggtttagactgtatggtgtacatcgcatgaaaaaagaaaagattgtgggggaaaagattttttatttaacaaaattgaatcttcaagggaaaatgtcattgcctgtgatattggaaccttcttacaatcattctggctgtgactcccaaatgagcgtgtcagaaatgtcgtgtagtgaaagtacatcctcatgtcagtctcttgaacatggctcagttccagaaattcttattggcctgctttataatgccacaactggaagactatcagcagaagtgataaaaggcagccacttcaaaaatttggcagcaaacagaccacccaagatggactgttctgttgtctaaaacacttgataggtggacaggtttatataatccgagatacatatgttaagttaactctactgaattccatgggtcaagagatgtccaaatgcaagacatccatccgcagagggcagccaaatccagtatataaggaaacttttgtctttcaagtggccctatttcagctttctgatgtgacactcatactgtctgtgtataacaaacgcagcatgaaaagaaaagagatgataggctggatttctttaggtctcaacagctctggagaagaagaactcaatcactggactgaaatgaaagagtcaaaaggacagcaagtatgtagatggcatgcgttgctagagtcatgatgaatagaataagcaagcagttaccatcaaaggcagcatatttccaattccaacattactgtttctaccaagtcccattagaagagctgttctttgaagaatcatattcaaccttctaccaaaatgctttaagttctatggaaagaacgtctcatactgacataaatgaagaaaatatgtgtatctagtagagcttgtttaggaaactgagaaacgtacactatcattgctaaactaacagtcctccagaaatttaataagatgtttttgatttgaagttaattttaatttagcaaaagagccagtcattttatgaaaaatcaaaattataagtgattttaaaaaccagaattttagttgcaatacaattttaatatcaccctacatattatttataaaacatagtttgactggccagtccctggtgtttgtaatgttctttaatatgaaaaagtagttctccaactctatcataagtcatatctaatggtgaagggtttcagtcacattgaaaattgttttatttcaggcatgttccctttgtgcacttaggttcattgtgcctcagttcctctcaaaagcactaaatctaagtgcaaacaagtattcattttcatacaggaatttttttaatatgttatttttttaaaagttcatttttcatttgcctccgctttcgcctgatccaaagagaccaagtcactgtactggtcccttgcaagtcttctagacaggttgtactgtagaactacgtaactttctgttgaaagcacttcctgtattcttgtattccaatgtaggaagctaatagagcaggactttactttcaaatttctttcagtgattgactcttcaaaattgcagtagtgtgaaaatacattttttacaaactgaaaatacagtagataagctgtcgaaaatggaaaacaattcaattttaattttctgctctgagtatttagtaaccaacactgcgtaaagcaggtagcattcaaaataagaaactgttctctctctaaatcttcactcttacttcaatttatatttgtgatatgaagactatccagttctcagtttgaattggaacatcatgttaaaaacagttatgagattccttatgaagtttctagtaacttgtaactagactttatgaaattaacagataaagttcttcaacgtgatgtcatcttgtgcctttcatgtaagttaaatttgctcatacagcttgaacgttgtatttgcaaaattaagccttcgatttttataaatgtaaagattcctcagaacagtgtcgcaagatctttatttcctctgaagtatgtaaaagttgtataatgtgctaactttttaatggcaaggcactttcatttgtttttatatttaggaactctaatcaggaatattataagctgttttctttttaattttgcttcttacctaatatatcattttatgcatatactttatcagagtatgttttatatatattaaaaatagtttcttttttctccttctcatttctagttaaaatagacaaaaacatactatttaccagttactaaaaagcagtatatcattgcttctagtcccaactaagtactatatattattgtaaactagaacttgttattaccataataacaaaacaatgcgtagatattacttcagcttggctgtactgaaaggccttaaaagaaacccaaaaagaccgtgaacttctgtatttttttagtttaaaaaatggcagctctatgcattcatacacatgaattataagaaaaaatacaaatgctatattggatgacatgaggtttgagaatgtgtgttacagggctgcattaaagggaaaaatccatcttttattgttacatcaatgagctttttccaggatttttcaaataaacaagtaagagttagaacctgaatcaaatggcaaaatatctcatttaagtgttttcagcaacagtatgaaaaaagacttgaagaggggatgtagattttactgagaaattggacttaggcatttgaagctataatgaactttttagactttgaaacaactgactgcattgctaacaactgttatcttcctaataaaaagagttatcagtcttatctgtaactgtaacagagcttagtgaaacacattagtaagaccagcttggtgctttcactcttagtgagaaaaagacctaactaattgttatttgttaaatctaccttttttcagactattcccagaattgtgtgtgtgatttgatacatccctagggatttatctggcataagtatcaaatccttcatggcttaaaaattaataaacagttttttaatatttctggaaagaccctacctccaccccagctgccaagtcctcaaagattataaattatctatatgagtgtatgtatctgtatacacacatgcaccattacacatacaacataaatatgtatatgtatattcatttgtaaaggcaaaggtgccctggctttttcagataactgaatagaaaaacatttcatacatttaggattatttttctcctctatgtatttactagatattatatttggtttgggttgctttctgctgctgttctccttcacacacagcaaaatatacatttgtttctgtagattgacacaacttataataattactcccaaaaagttgtctgttcttttagaaaaggattaaataaggctcaggggacccacttcactctactgaatctaatgtacgagacagtactactgcttctttgtgtgcttgaatttgcatgaaagcttaatagcaaaatcttctatctcagtaattatagcaaatagggacctactggtagggagcaggtgttggctcagaaacctgaaaaagacaacccactttcatacagttctattaaaatcccctaagttttctaataaaatgatatagtccaaatatggcaatcgactggcatttatgggagcctctaaacctggaattatggggtttatttttctcccaaatgagctgcaaaagataattattgctgcccagtaaacaaaatgtatgtcaaatcagtaaagaatttgtttagcataatattgccttatctttcagaagctttcttctatattcttgtgtcttcagtacaatccacttttgtttgaaatccatttgcatattatcttactgtgcatttagtgaattctcaataatgttgtatttgctgacaagaataataaattggaccacaatt

SEQ ID NO: 59810 - DNA, 5062 bp, Artificial Sequence
  derived and/or modified sequence
agcgcgtcctccgccagccctcgcgtctgctgcccccgccatccagttggtgcggtccatggcgagcgcatcatggcgattgaaggtggagagagaacctgtggagtacatgaacttatctgtattagaaaagtatctccagaggcagttggatttttgtcagctgttggggtgtttattatcttgatgctgctcctttttctctatattaataagaagttctgttttgaaaatgttggcgggtttccagatcttggttcagaatacagtacaaggaagaattcacaagataaaatttataattcctacatggacaaagatgagcatggttcatcctctgaaagtgaagatgaagcgctgggtaaatatcatgaggccttatccagaacacacaattccagactaccactggcagattctagacaaaggaactatgcttgggaaacaaggcagaaatacagtcctctatcggcagagtatgatggatacagtagtgaagcatcaatagatgaaggaaactgcattcagagaatgagaagaacacccccgctggatgaattgcagccaccaccatatcaggatgacagtggttctccccatctgtcatgtacaccctcagaaattggggacagtaaatgtgaattttcccactgcagcaacagtccaagatgctcatataacaagtgcccaagtgaaggaagcacaggtcatgaaatagaaagttttcataataaaggatatgaagaagatgttccaagtgacagcactgcagtcctgagccctgaagatatgtcagctcaaggatcatcttcgcagcttcctaaaccttttgatcctgagccagaagctaaatatggcacactggatgtgacttttgactatgactcacaagaacagaagcttctggtaacagtgacagctgtcacagacatcccaacatataacaggacaggtggcaactcatggcaagtacaccttgttcttctacctataaagaaacagagagcaaaaaccagcatccagagaggaccatgccctgtcttcacagaaacatttaaatttaatcatgttgaatctgagatgattggaaattatgcagttcggtttagactgtatggtgtacatcgcatgaaaaaagaaaagattgtgggggaaaagattttttatttaacaaaattgaatcttcaagggaaaatgtcattgcctgtgatattggaaccttcttacaatcattctggctgtgactcccaaatgagcgtgtcagaaatgtcgtgtagtgaaagtacatcctcatgtcagtctcttgaacatggctcagttccagaaattcttattggcctgctttataatgccacaactggaagactatcagcagaagtgataaaaggcagccacttcaaaaatttggcagcaaacagaccacccactttccaccccctgttgtcagatggactgttctgttgtctaaaacacttgataggtggacaggtttatataatccgagatacatatgttaagttaactctactgaattccatgggtcaagagatgtccaaatgcaagacatccatccgcagagggcagccaaatccagtatataaggaaacttttgtctttcaagtggccctatttcagctttctgatgtgacactcatactgtctgtgtataacaaacgcagcatgaaaagaaaagagatgataggctggatttctttaggtctcaacagctctggagaagaagaactcaatcactggactgaaatgaaagagtcaaaaggacagcaagtatgtagatggcatgcgttgctagagtcatgatgaatagaataagcaagcagttaccatcaaaggcagcatatttccaattccaacattactgtttctaccaagtcccattagaagagctgttctttgaagaatcatattcaaccttctaccaaaatgctttaagttctatggaaagaacgtctcatactgacataaatgaagaaaatatgtgtatctagtagagcttgtttaggaaactgagaaacgtacactatcattgctaaactaacagtcctccagaaatttaataagatgtttttgatttgaagttaattttaatttagcaaaagagccagtcattttatgaaaaatcaaaattataagtgattttaaaaaccagaattttagttgcaatacaattttaatatcaccctacatattatttataaaacatagtttgactggccagtccctggtgtttgtaatgttctttaatatgaaaaagtagttctccaactctatcataagtcatatctaatggtgaagggtttcagtcacattgaaaattgttttatttcaggcatgttccctttgtgcacttaggttcattgtgcctcagttcctctcaaaagcactaaatctaagtgcaaacaagtattcattttcatacaggaatttttttaatatgttatttttttaaaagttcatttttcatttgcctccgctttcgcctgatccaaagagaccaagtcactgtactggtcccttgcaagtcttctagacaggttgtactgtagaactacgtaactttctgttgaaagcacttcctgtattcttgtattccaatgtaggaagctaatagagcaggactttactttcaaatttctttcagtgattgactcttcaaaattgcagtagtgtgaaaatacattttttacaaactgaaaatacagtagataagctgtcgaaaatggaaaacaattcaattttaattttctgctctgagtatttagtaaccaacactgcgtaaagcaggtagcattcaaaataagaaactgttctctctctaaatcttcactcttacttcaatttatatttgtgatatgaagactatccagttctcagtttgaattggaacatcatgttaaaaacagttatgagattccttatgaagtttctagtaacttgtaactagactttatgaaattaacagataaagttcttcaacgtgatgtcatcttgtgcctttcatgtaagttaaatttgctcatacagcttgaacgttgtatttgcaaaattaagccttcgatttttataaatgtaaagattcctcagaacagtgtcgcaagatctttatttcctctgaagtatgtaaaagttgtataatgtgctaactttttaatggcaaggcactttcatttgtttttatatttaggaactctaatcaggaatattataagctgttttctttttaattttgcttcttacctaatatatcattttatgcatatactttatcagagtatgttttatatatattaaaaatagtttcttttttctccttctcatttctagttaaaatagacaaaaacatactatttaccagttactaaaaagcagtatatcattgcttctagtcccaactaagtactatatattattgtaaactagaacttgttattaccataataacaaaacaatgcgtagatattacttcagcttggctgtactgaaaggccttaaaagaaacccaaaaagaccgtgaacttctgtatttttttagtttaaaaaatggcagctctatgcattcatacacatgaattataagaaaaaatacaaatgctatattggatgacatgaggtttgagaatgtgtgttacagggctgcattaaagggaaaaatccatcttttattgttacatcaatgagctttttccaggatttttcaaataaacaagtaagagttagaacctgaatcaaatggcaaaatatctcatttaagtgttttcagcaacagtatgaaaaaagacttgaagaggggatgtagattttactgagaaattggacttaggcatttgaagctataatgaactttttagactttgaaacaactgactgcattgctaacaactgttatcttcctaataaaaagagttatcagtcttatctgtaactgtaacagagcttagtgaaacacattagtaagaccagcttggtgctttcactcttagtgagaaaaagacctaactaattgttatttgttaaatctaccttttttcagactattcccagaattgtgtgtgtgatttgatacatccctagggatttatctggcataagtatcaaatccttcatggcttaaaaattaataaacagttttttaatatttctggaaagaccctacctccaccccagctgccaagtcctcaaagattataaattatctatatgagtgtatgtatctgtatacacacatgcaccattacacatacaacataaatatgtatatgtatattcatttgtaaaggcaaaggtgccctggctttttcagataactgaatagaaaaacatttcatacatttaggattatttttctcctctatgtatttactagatattatatttggtttgggttgctttctgctgctgttctccttcacacacagcaaaatatacatttgtttctgtagattgacacaacttataataattactcccaaaaagttgtctgttcttttagaaaaggattaaataaggctcaggggacccacttcactctactgaatctaatgtacgagacagtactactgcttctttgtgtgcttgaatttgcatgaaagcttaatagcaaaatcttctatctcagtaattatagcaaatagggacctactggtagggagcaggtgttggctcagaaacctgaaaaagacaacccactttcatacagttctattaaaatcccctaagttttctaataaaatgatatagtccaaatatggcaatcgactggcatttatgggagcctctaaacctggaattatggggtttatttttctcccaaatgagctgcaaaagataattattgctgcccagtaaacaaaatgtatgtcaaatcagtaaagaatttgtttagcataatattgccttatctttcagaagctttcttctatattcttgtgtcttcagtacaatccacttttgtttgaaatccatttgcatattatcttactgtgcatttagtgaattctcaataatgttgtatttgctgacaagaataataaattggaccacaatt

SEQ ID NO: 59811 - protein, 517 aa, Artificial Sequence
  derived and/or modified sequence
MLLLFLYINKKFCFENVGGFPDLGSEYSTRKNSQDKIYNSYMDKDEHGSSSESEDEALGKYHEALSRTHNSRLPLADSRQRNYAWETRQKYSPLSAEYDGYSSEASIDEGNCIQRMRRTPPLDELQPPPYQDDSGSPHLSCTPSEIGDSKCEFSHCSNSPRCSYNKCPSEGSTGHEIESFHNKGYEEDVPSDSTAVLSPEDMSAQGSSSQLPKPFDPEPEAKYGTLDVTFDYDSQEQKLLVTVTAVTDIPTYNRTGGNSWQVHLVLLPIKKQRAKTSIQRGPCPVFTETFKFNHVESEMIGNYAVRFRLYGVHRMKKEKIVGEKIFYLTKLNLQGKMSLPVILEPSYNHSGCDSQMSVSEMSCSESTSSCQSLEHGSVPEILIGLLYNATTGRLSAEVIKGSHFKNLAANRPPNTYVKLTLLNSMGQEMSKCKTSIRRGQPNPVYKETFVFQVALFQLSDVTLILSVYNKRSMKRKEMIGWISLGLNSSGEEELNHWTEMKESKGQQVCRWHALLES

SEQ ID NO: 59812 - DNA, 1554 bp, Artificial Sequence
  derived and/or modified sequence
atgctgctgctgttcctgtacatcaacaagaagttctgcttcgagaacgtgggcggcttccccgacctgggcagcgagtacagcaccagaaagaacagccaggacaagatctacaacagctacatggacaaggacgagcacggcagcagcagcgagagcgaggacgaggccctgggcaagtaccacgaggccctgagcagaacccacaacagcagactgcccctggccgacagcagacagagaaactacgcctgggagaccagacagaagtacagccccctgagcgccgagtacgacggctacagcagcgaggccagcatcgacgagggcaactgcatccagagaatgagaagaaccccccccctggacgagctgcagccccccccctaccaggacgacagcggcagcccccacctgagctgcacccccagcgagatcggcgacagcaagtgcgagttcagccactgcagcaacagccccagatgcagctacaacaagtgccccagcgagggcagcaccggccacgagatcgagagcttccacaacaagggctacgaggaggacgtgcccagcgacagcaccgccgtgctgagccccgaggacatgagcgcccagggcagcagcagccagctgcccaagcccttcgaccccgagcccgaggccaagtacggcaccctggacgtgaccttcgactacgacagccaggagcagaagctgctggtgaccgtgaccgccgtgaccgacatccccacctacaacagaaccggcggcaacagctggcaggtgcacctggtgctgctgcccatcaagaagcagagagccaagaccagcatccagagaggcccctgccccgtgttcaccgagaccttcaagttcaaccacgtggagagcgagatgatcggcaactacgccgtgagattcagactgtacggcgtgcacagaatgaagaaggagaagatcgtgggcgagaagatcttctacctgaccaagctgaacctgcagggcaagatgagcctgcccgtgatcctggagcccagctacaaccacagcggctgcgacagccagatgagcgtgagcgagatgagctgcagcgagagcaccagcagctgccagagcctggagcacggcagcgtgcccgagatcctgatcggcctgctgtacaacgccaccaccggcagactgagcgccgaggtgatcaagggcagccacttcaagaacctggccgccaacagaccccccaacacctacgtgaagctgaccctgctgaacagcatgggccaggagatgagcaagtgcaagaccagcatcagaagaggccagcccaaccccgtgtacaaggagaccttcgtgttccaggtggccctgttccagctgagcgacgtgaccctgatcctgagcgtgtacaacaagagaagcatgaagagaaaggagatgatcggctggatcagcctgggcctgaacagcagcggcgaggaggagctgaaccactggaccgagatgaaggagagcaagggccagcaggtgtgcagatggcacgccctgctggagagctag

SEQ ID NO: 59813 - DNA, 1554 bp, Artificial Sequence
  derived and/or modified sequence
atgctgcttctatttctgtacataaataaaaaattttgctttgagaatgttgggggattccccgatctggggagcgagtactccactcgaaaaaacagccaagataaaatttacaacagctatatggacaaagacgagcacggtagcagcagtgagtcggaggatgaggccttgggaaaataccacgaggccctctcccggacacataactctaggctccccctagctgattcccgccagagaaactatgcctgggaaacccggcagaagtactcccccctgtctgcagagtacgacggctacagctcggaagcctccattgacgaaggaaactgtattcagcgaatgcgccggacccctccactggacgagctccagccaccgccctaccaagacgactctggatcgccccacctgtcatgtaccccaagcgaaatcggcgattcaaagtgtgagttttctcattgttcaaattctccccgttgtagctataacaagtgcccatccgagggttccaccggacatgagattgagtcctttcacaataagggctatgaggaagatgtgcccagcgatagcacagcagttttaagtcccgaagacatgtctgcgcagggttcatcatcccaactgccaaagccttttgaccctgagcccgaagcgaagtacggtactttggacgtaacatttgactacgactctcaggaacagaaactgctggtgaccgtcactgcagtgacagatatacccacatataataggactggaggaaacagctggcaagtgcatttggtgctgttgccaatcaaaaaacagagggcgaaaacaagtatccagcgggggccgtgtcccgtctttaccgagacattcaagtttaatcacgtggaatccgaaatgattgggaactatgccgttcgtttcagattgtatggcgttcacaggatgaagaaggagaagattgttggcgaaaaaattttttacttgaccaagctcaacctccagggcaagatgtccttgcccgtaatactcgagcctagctataatcacagcggctgtgactcccagatgagtgtcagcgaaatgtcttgcagtgaatcgacatcgtcatgccaatcactggagcacggcagcgtccctgagatcctgattggcctcttgtataatgccaccacagggcgtctaagcgctgaagtcattaagggctcccacttcaagaatctagccgccaatcgcccccccaacacatacgtgaagctcacgctcctaaactccatggggcaggagatgtctaaatgcaagaccagcatccggaggggacaacccaacccggtgtacaaagaaacgttcgtgttccaagtagccctgtttcagctgtcagacgttactcttatcctttctgtctacaacaagagaagtatgaaaaggaaagagatgatcggatggatctcactggggctcaattcaagcggcgaggaggaactgaaccactggacagaaatgaaagaatccaaagggcagcaggtatgtcgctggcatgccctgcttgagtcctag

SEQ ID NO: 59814 - DNA, 1554 bp, Artificial Sequence
  derived and/or modified sequence
atgctgctgctgttcctctatatcaataagaaattctgtttcgaaaatgtcggcggctttcccgacttgggcagcgaatactccaccaggaagaacagccaagacaagatttacaacagctacatggataaagatgaacatggcagcagttccgaatccgaggacgaagcactgggaaaatatcacgaggcgctcagcaggacccacaattccaggctgccactggctgattctcgccagcgtaactatgcttgggagacgcgccagaaatactcccctctctccgccgagtatgacggatattcgagcgaagcaagtatcgatgagggtaactgtatacagcggatgcgccgcacccctcccctggacgagcttcagccaccaccttaccaggacgacagcgggtcaccgcacctgtcctgcactccctctgagatcggagactctaaatgcgaattcagccattgctctaactcaccgagatgttcctataacaagtgcccatctgagggctctaccggacatgagatcgaaagcttccacaacaaaggctacgaagaagatgtcccctccgactcaaccgcagtgctgtccccagaagacatgagcgcccaaggcagctccagccagttacccaagccttttgaccccgagcctgaggcgaaatacggcactctcgacgttaccttcgattatgacagccaagagcaaaaactgctggttaccgtgaccgctgtaaccgacatcccgacgtacaaccggaccgggggaaattcttggcaagtgcatttggtcctgctccctattaagaagcaacgtgccaagaccagcattcagcgggggccttgtccagtgtttactgaaacattcaagtttaatcacgttgagtccgagatgattggtaattatgcagtgcgattccgactctatggagttcatcggatgaagaaagagaagatcgtgggcgagaaaattttttatctcactaagttaaacctgcaggggaagatgtcactgcctgtgattctagagcccagttataatcatagtggatgcgatagccagatgagcgtctcagaaatgtcatgttcagagtccacaagctcatgtcagagcctggagcacggctctgtgccagagatactgattggcctcctctacaatgccacaactgggcgcctctcagccgaggtcattaagggatcccactttaagaatctagcagcaaaccgaccgccaaatacctacgtgaagttaacattactgaactccatgggccaggaaatgtcaaagtgcaaaaccagcatcaggcgcggtcaaccaaatcctgtgtataaagagaccttcgtgttccaggtagccctgtttcaactttcggatgtcacactgatcctgagcgtgtacaataagcgatccatgaagcgcaaagaaatgatcggatggatatctttaggactgaactcaagtggtgaggaggaactgaatcactggactgagatgaaagagagtaagggccagcaagtatgccggtggcacgccctcctggaaagttag

SEQ ID NO: 59815 - DNA, 1554 bp, Artificial Sequence
  derived and/or modified sequence
atgctgctgctcttcctgtacatcaacaagaagttctgctttgaaaatgtgggcggcttcccagacctgggcagcgagtacagcaccaggaagaacagccaggacaagatctacaacagctacatggacaaggatgaacatggcagcagcagcgagagtgaagatgaggccctgggcaagtaccacgaggccctgagcaggacccacaacagccggctgcccctggccgacagccggcagagaaattatgcctgggagacccggcagaagtacagccccctgtctgcagaatatgatggctacagcagcgaggccagcattgatgagggcaactgcatccagaggatgaggaggaccccacccctggatgagctgcagcccccaccctaccaggatgacagcggcagcccccacctgagctgcacccccagcgagatcggggacagcaaatgtgagttcagccactgcagcaacagcccccgctgcagctacaacaagtgccccagcgagggcagcactggacatgaaattgagagcttccacaacaagggctatgaagaagatgtgcccagcgacagcacagctgtgctgagccctgaggacatgtctgcccagggcagcagcagccagctgcccaagccctttgatcctgagcctgaggccaagtatggcaccctggatgtgacctttgattatgacagccaggagcagaagctgctggtgacagtgacagctgtgacagacatccccacctacaacagaactggaggcaacagctggcaggtgcacctggtgctgctgcccatcaagaagcagagggccaagaccagcatccagaggggcccctgccctgtgttcacagagaccttcaagttcaaccacgtggagagcgagatgattggcaactatgctgtgcgcttccggctgtatggagtgcacaggatgaagaaggagaagatcgtgggggagaagatcttctacctgaccaagctgaacctgcagggcaagatgagcctgcccgtcatcctggagcccagctacaaccacagcggctgtgacagccagatgtctgtgtctgagatgagctgcagcgagagcaccagcagctgccagagcctggagcacggctctgtgcctgagatcctgattggcctgctgtacaatgccaccaccggccgcctgtctgctgaggtgatcaagggcagccacttcaagaacctggccgccaaccggccccccaacacctacgtgaagctgaccctgctgaacagcatgggccaggagatgagcaagtgcaagaccagcatcagaagaggccagcccaaccctgtgtacaaggagacctttgtgttccaggtggccctcttccagctgagtgatgtgaccctcatcctgtctgtgtacaacaagaggtccatgaagaggaaggagatgattggctggatcagcctgggcctgaacagcagtggagaggaggagctgaaccactggacagagatgaaggagagcaagggccagcaggtgtgccgctggcacgccctgctggagagctag

SEQ ID NO: 59816 - DNA, 1554 bp, Artificial Sequence
  derived and/or modified sequence
atgctgctgctgttcctgtacatcaacaagaagttctgcttcgagaatgtgggtggctttcccgacctcggctctgaatatagcacccgcaagaatagtcaggacaaaatttataattcctacatggacaaggatgagcacggcagtagctctgagtccgaggatgaagctctggggaaatatcacgaagccttatcaaggacgcataacagtagattgccactggccgactctagacagcgtaactacgcctgggagacccggcagaaatatagcccactgtccgccgagtacgacggatactcctctgaagctagcatagacgaggggaattgcatacagagaatgagacgcacccctcccctcgatgagcttcagcctcccccataccaagacgattccggatctccacacctgtcatgcaccccttccgagatcggcgattccaagtgtgagttctcccactgctcaaattcaccccgctgtagctacaacaagtgccctagcgagggctcaaccggacacgagatcgagtccttccataataaagggtacgaagaagacgtgccttctgattcaaccgcggtcctatccccagaggatatgtcggctcagggatcttcaagccaactgccaaagcctttcgacccggaaccagaagcaaaatacggtaccctggacgtgacctttgattacgacagccaggaacagaaattgctcgtaacggtgacagccgttaccgacattcccacctacaatcgtaccggagggaattcttggcaggttcatttggtgctgttgcccataaagaagcagagagccaagactagtattcagaggggcccttgcccagtattcactgagacattcaagtttaaccacgtcgagtccgagatgatcgggaactacgcggtccggtttcggctgtacggtgtgcatagaatgaaaaaagagaagatcgttggcgaaaaaatcttctatctgaccaaactcaacctgcagggaaagatgtcactccccgtgatcctcgagccaagttataaccactctggttgtgactcccaaatgtctgtgtctgagatgtcttgctcagagagcacaagctcttgtcagtcccttgagcacgggagcgtgccagaaatcctcatcgggcttctgtataacgcaacaacgggaagactcagcgccgaggtgattaaaggatcacactttaaaaacctggctgccaatcggcccccgaatacgtatgtaaaactgacgctcctcaatagcatgggtcaggaaatgagcaagtgtaagactagtattagacgcggccagcccaatccagtgtataaagaaacctttgtgttccaagtagccttattccagctttcagatgtgactcttatcctatctgtgtacaacaaaaggagtatgaagcgtaaagaaatgattggatggatctcgctgggacttaattctagtggcgaggaggagctgaaccattggacagaaatgaaggagtccaaggggcagcaggtctgccggtggcatgcactgttggaatcatag

SEQ ID NO: 59817 - DNA, 1554 bp, Artificial Sequence
  derived and/or modified sequence
atgctgctgctgttcctgtacatcaacaagaagttctgcttcgagaacgtcggcggattccctgacctagggtctgagtactccaccagaaaaaactctcaggacaagatttataacagctacatggacaaggatgagcatggctccagcagtgagtccgaagatgaagcactcggtaagtaccatgaagcgctttctcgcacacacaacagccgtctacccctagctgattcccggcagagaaattacgcctgggaaactagacagaagtacagtcctctctccgcagaatacgatggatatagcagcgaggctagtatcgacgaggggaactgcattcagcggatgcggcgtactccccctctcgatgaactccaacctccgccctaccaggacgactcaggctcaccccacctctcgtgtacgccctcagagataggggacagcaagtgcgagttcagccactgtagcaactcacctcgttgttcctacaacaagtgtccaagcgagggatcaactggacatgagatcgagtcttttcacaacaaaggttacgaggaagacgtaccctctgattcgaccgccgtcctgagtcccgaggatatgtctgcacaagggtcttccagccagctgcccaagccctttgaccccgagccagaagccaagtacgggaccctggacgtgacattcgattatgactcccaagaacagaagctgttagtgaccgtaaccgccgtcacagacattcctacctacaatcgtaccgggggaaattcttggcaagtgcacctggtgctcctccctatcaagaagcagcgagccaaaacctccatacaacgtggaccttgccctgtattcactgagacatttaaattcaaccatgtggaatccgaaatgattggcaactacgccgtgcgcttcaggctgtacggagtacatcgcatgaagaaggagaaaatagttggagagaagattttttacctcactaaactgaacctgcagggaaagatgtctctccctgtgattctggaacctagctacaaccactccggctgcgacagccagatgagcgtgagcgaaatgtcatgcagcgagagcactagctcttgccagagcttagagcacggttctgtgcctgagatcctgataggtctcctctacaacgcaaccaccggacgtctctctgcagaggtgattaagggatctcattttaaaaacctcgccgcgaacagacccccaaacacgtatgtcaaactgactttgctgaacagcatgggccaagagatgtccaaatgcaagacaagtattaggcggggccaacccaatcctgtatacaaagaaacgtttgtcttccaggtagctctgtttcagctaagcgacgttaccttaatcctaagtgtctataataagcgttcaatgaagcgcaaggagatgataggctggatcagtctcggcctaaattcatctggggaagaggaactcaaccactggaccgaaatgaaggagtctaagggacagcaagtgtgccgctggcatgctcttctggagagttag

SEQ ID NO: 59818 - DNA, 1554 bp, Artificial Sequence
  derived and/or modified sequence
atgttactgttgtttctgtacattaataagaagttctgttttgagaacgtgggtgggtttcccgatttggggtctgagtacagtactaggaaaaattcgcaggacaagatctacaactcttatatggataaagacgagcacggctccagcagcgagagcgaggatgaggctctcggaaagtaccacgaggctctgagtaggactcataattcccgcctgccacttgctgattctagacaacgaaattacgcctgggaaacccggcaaaaatactctcccctatccgctgagtacgacggatactcctctgaagcttctatcgatgagggcaactgcatacagcggatgcgtagaacacctccattagatgagctgcagcctccaccatatcaggacgatagcggcagccctcacttgagctgcactccgagtgaaatcggagatagcaagtgtgagtttagtcactgtagtaattccccaaggtgctcctataataagtgcccttctgagggcagtacagggcatgaaatcgaaagttttcacaacaagggctacgaggaagacgtgccaagtgatagcacagctgtcctttccccggaagacatgagcgcacagggttcatccagccaactgccaaagccctttgacccagagcctgaggctaaatacggaacacttgatgtcacattcgactatgacagccaagagcagaaattgcttgtgacagtgaccgctgtgactgatatacctacatacaacaggaccgggggaaatagctggcaagtgcatttggtgttgctgccaatcaaaaagcaacgggctaagacttctattcagcgtgggccatgtccagtctttaccgagaccttcaaattcaatcacgtagagtccgaaatgatcggcaattacgcggtgcgatttcgactatacggggtacatcgcatgaaaaaagagaagatcgtgggcgaaaaaatcttttacttaaccaagctgaacttacaaggaaagatgtccttgcccgttattctcgagcccagctacaaccattcgggatgcgactcccagatgtcagtatcagaaatgagctgctctgagtcgacgagctcatgtcaatccttggaacatggtagcgtgcccgagatcctcattggtctcttatataacgccactactggtagactcagcgctgaggtgatcaaaggctctcacttcaaaaacctagcggctaaccggccaccaaatacttatgtgaaactgaccctcctcaatagcatgggacaagagatgtctaagtgcaaaacatctattcgacgcggacaaccaaacccagtgtataaagaaactttcgtgtttcaggtggctctatttcagctgagcgatgtaaccctaatcctgagtgtgtacaacaaaaggtccatgaaacgaaaagaaatgatagggtggatctcactcggacttaattctagcggtgaagaagaactcaatcactggacagagatgaaggaatccaagggccagcaggtgtgcaggtggcatgcactgttagaatcctag

SEQ ID NO: 59819 - DNA, 1554 bp, Artificial Sequence
  derived and/or modified sequence
atgctcctcctgtttctttacataaacaagaagttctgctttgagaacgtgggcggtttcccggatctgggaagtgaatactccaccagaaagaactcacaggataaaatatacaatagctacatggataaggacgaacatggttctagctcagaatccgaagacgaggcattgggaaaatatcacgaggcactctcccgcacacataactcaagactccctctggccgactcccgccaaagaaactatgcgtgggaaacacgccagaaatatagtccactctcagcagaatacgatggctattcctcggaagcctccatagacgaggggaactgtattcagcgaatgcggaggactccccctctagacgaactgcagcctcctccataccaggacgacagtggctcaccacatttgtcatgcaccccctccgaaataggggacagcaagtgcgagttctcacactgtagcaattctccgcgatgctcatataacaagtgcccatctgaaggatccacaggacacgaaattgagagctttcacaacaagggctacgaagaggatgtcccaagcgacagcacagctgttctgtcccccgaagacatgagcgcccagggcagctcctctcagctgcctaaaccctttgatcccgaaccggaagcaaagtatggtacgttagatgtgaccttcgactacgacagccaggaacagaagcttctggtcaccgttaccgctgttaccgacattcctacatataataggaccgggggtaacagctggcaggtccacctggtcttactaccgataaagaaacagcgagccaaaacatcaattcagaggggaccatgccctgtcttcacggaaacatttaaatttaatcatgttgagtctgaaatgattggcaattacgccgtgagattccggttgtatggcgtgcatagaatgaagaaagaaaaaatcgtaggggagaagattttttatctgaccaaactcaacttacaaggcaagatgagcctgcctgtcatcctggaacccagttataatcacagcggatgtgactcacaaatgtccgttagtgagatgtcgtgtagcgagagtaccagttcttgtcagtcgctcgagcacggatccgtacctgagattcttatcggactgctctataacgcgaccaccggacggttgtccgcagaggtgattaaaggcagccattttaaaaacttggcggctaaccgccctcccaatacatatgtgaagctgactctcctgaactcgatgggacaggaaatgagtaaatgcaagacttccattcgacggggacagccaaaccccgtctacaaagagacattcgttttccaggtggcactgttccagctgtctgacgtcaccttgattctctccgtgtacaacaagagaagcatgaaaaggaaagagatgatcggctggatatcactaggcctgaacagttccggcgaggaagaactgaaccactggaccgagatgaaggagtccaaggggcagcaggtctgccgatggcatgccttgctggagtcatag

SEQ ID NO: 59820 - DNA, 5109 bp, Artificial Sequence
  derived and/or modified sequence
gtggagagagaacctgtggagtacatgaacttatctgtattagaaaagaatctggaatctgagtgcatgctgatctcccattgacttctgttctattactgtaccccatcagagagatgtgaggagttggttgaaattcaaatcgggaacatatccaaagaccacaacatcctttgacaccaacaactgtctatgcttccttagaaggagccacctgacaactgggtggttcaacaaagtggccccaggaaagtatctccagaggcagttggatttttgtcagctgttggggtgtttattatcttgatgctgctcctttttctctatattaataagaagttctgttttgaaaatgttggcgggtttccagatcttggttcagaatacagtacaaggaagaattcacaagataaaatttataattcctacatggacaaagatgagcatggttcatcctctgaaagtgaagatgaagcgctgggtaaatatcatgaggccttatccagaacacacaattccagactaccactggcagattctagacaaaggaactatgcttgggaaacaaggcagaaatacagtcctctatcggcagagtatgatggatacagtagtgaagcatcaatagatgaaggaaactgcattcagagaatgagaagaacacccccgctggatgaattgcagccaccaccatatcaggatgacagtggttctccccatctgtcatgtacaccctcagaaattggggacagtaaatgtgaattttcccactgcagcaacagtccaagatgctcatataacaagtgcccaagtgaaggaagcacaggtcatgaaatagaaagttttcataataaaggatatgaagaagatgttccaagtgacagcactgcagtcctgagccctgaagatatgtcagctcaaggatcatcttcgcagcttcctaaaccttttgatcctgagccagaagctaaatatggcacactggatgtgacttttgactatgactcacaagaacagaagcttctggtaacagtgacagctgtcacagacatcccaacatataacaggacaggtggcaactcatggcaagtacaccttgttcttctacctataaagaaacagagagcaaaaaccagcatccagagaggaccatgccctgtcttcacagaaacatttaaatttaatcatgttgaatctgagatgattggaaattatgcagttcggtttagactgtatggtgtacatcgcatgaaaaaagaaaagattgtgggggaaaagattttttatttaacaaaattgaatcttcaagggaaaatgtcattgcctgtgatattggaaccttcttacaatcattctggctgtgactcccaaatgagcgtgtcagaaatgtcgtgtagtgaaagtacatcctcatgtcagtctcttgaacatggctcagttccagaaattcttattggcctgctttataatgccacaactggaagactatcagcagaagtgataaaaggcagccacttcaaaaatttggcagcaaacagaccacccaatacatatgttaagttaactctactgaattccatgggtcaagagatgtccaaatgcaagacatccatccgcagagggcagccaaatccagtatataaggaaacttttgtctttcaagtggccctatttcagctttctgatgtgacactcatactgtctgtgtataacaaacgcagcatgaaaagaaaagagatgataggctggatttctttaggtctcaacagctctggagaagaagaactcaatcactggactgaaatgaaagagtcaaaaggacagcaagtatgtagatggcatgcgttgctagagtcatgatgaatagaataagcaagcagttaccatcaaaggcagcatatttccaattccaacattactgtttctaccaagtcccattagaagagctgttctttgaagaatcatattcaaccttctaccaaaatgctttaagttctatggaaagaacgtctcatactgacataaatgaagaaaatatgtgtatctagtagagcttgtttaggaaactgagaaacgtacactatcattgctaaactaacagtcctccagaaatttaataagatgtttttgatttgaagttaattttaatttagcaaaagagccagtcattttatgaaaaatcaaaattataagtgattttaaaaaccagaattttagttgcaatacaattttaatatcaccctacatattatttataaaacatagtttgactggccagtccctggtgtttgtaatgttctttaatatgaaaaagtagttctccaactctatcataagtcatatctaatggtgaagggtttcagtcacattgaaaattgttttatttcaggcatgttccctttgtgcacttaggttcattgtgcctcagttcctctcaaaagcactaaatctaagtgcaaacaagtattcattttcatacaggaatttttttaatatgttatttttttaaaagttcatttttcatttgcctccgctttcgcctgatccaaagagaccaagtcactgtactggtcccttgcaagtcttctagacaggttgtactgtagaactacgtaactttctgttgaaagcacttcctgtattcttgtattccaatgtaggaagctaatagagcaggactttactttcaaatttctttcagtgattgactcttcaaaattgcagtagtgtgaaaatacattttttacaaactgaaaatacagtagataagctgtcgaaaatggaaaacaattcaattttaattttctgctctgagtatttagtaaccaacactgcgtaaagcaggtagcattcaaaataagaaactgttctctctctaaatcttcactcttacttcaatttatatttgtgatatgaagactatccagttctcagtttgaattggaacatcatgttaaaaacagttatgagattccttatgaagtttctagtaacttgtaactagactttatgaaattaacagataaagttcttcaacgtgatgtcatcttgtgcctttcatgtaagttaaatttgctcatacagcttgaacgttgtatttgcaaaattaagccttcgatttttataaatgtaaagattcctcagaacagtgtcgcaagatctttatttcctctgaagtatgtaaaagttgtataatgtgctaactttttaatggcaaggcactttcatttgtttttatatttaggaactctaatcaggaatattataagctgttttctttttaattttgcttcttacctaatatatcattttatgcatatactttatcagagtatgttttatatatattaaaaatagtttcttttttctccttctcatttctagttaaaatagacaaaaacatactatttaccagttactaaaaagcagtatatcattgcttctagtcccaactaagtactatatattattgtaaactagaacttgttattaccataataacaaaacaatgcgtagatattacttcagcttggctgtactgaaaggccttaaaagaaacccaaaaagaccgtgaacttctgtatttttttagtttaaaaaatggcagctctatgcattcatacacatgaattataagaaaaaatacaaatgctatattggatgacatgaggtttgagaatgtgtgttacagggctgcattaaagggaaaaatccatcttttattgttacatcaatgagctttttccaggatttttcaaataaacaagtaagagttagaacctgaatcaaatggcaaaatatctcatttaagtgttttcagcaacagtatgaaaaaagacttgaagaggggatgtagattttactgagaaattggacttaggcatttgaagctataatgaactttttagactttgaaacaactgactgcattgctaacaactgttatcttcctaataaaaagagttatcagtcttatctgtaactgtaacagagcttagtgaaacacattagtaagaccagcttggtgctttcactcttagtgagaaaaagacctaactaattgttatttgttaaatctaccttttttcagactattcccagaattgtgtgtgtgatttgatacatccctagggatttatctggcataagtatcaaatccttcatggcttaaaaattaataaacagttttttaatatttctggaaagaccctacctccaccccagctgccaagtcctcaaagattataaattatctatatgagtgtatgtatctgtatacacacatgcaccattacacatacaacataaatatgtatatgtatattcatttgtaaaggcaaaggtgccctggctttttcagataactgaatagaaaaacatttcatacatttaggattatttttctcctctatgtatttactagatattatatttggtttgggttgctttctgctgctgttctccttcacacacagcaaaatatacatttgtttctgtagattgacacaacttataataattactcccaaaaagttgtctgttcttttagaaaaggattaaataaggctcaggggacccacttcactctactgaatctaatgtacgagacagtactactgcttctttgtgtgcttgaatttgcatgaaagcttaatagcaaaatcttctatctcagtaattatagcaaatagggacctactggtagggagcaggtgttggctcagaaacctgaaaaagacaacccactttcatacagttctattaaaatcccctaagttttctaataaaatgatatagtccaaatatggcaatcgactggcatttatgggagcctctaaacctggaattatggggtttatttttctcccaaatgagctgcaaaagataattattgctgcccagtaaacaaaatgtatgtcaaatcagtaaagaatttgtttagcataatattgccttatctttcagaagctttcttctatattcttgtgtcttcagtacaatccacttttgtttgaaatccatttgcatattatcttactgtgcatttagtgaattctcaataatgttgtatttgctgacaagaataataaattggaccacaattaaaaa

SEQ ID NO: 59821 - DNA, 5189 bp, Artificial Sequence
  derived and/or modified sequence
agcgcgtcctccgccagccctcgcgtctgctgcccccgccatccagttggtgcggtccatggcgagcgcatcatggcgattgaaggtggagagagaacctgtggagtacatgaacttatctgtattagaaaagaatctggaatctgagtgcatgctgatctcccattgacttctgttctattactgtaccccatcagagagatgtgaggagttggttgaaattcaaatcgggaacatatccaaagaccacaacatcctttgacaccaacaactgtctatgcttccttagaaggagccacctgacaactgggtggttcaacaaagtggccccaggaaagtatctccagaggcagttggatttttgtcagctgttggggtgtttattatcttgatgctgctcctttttctctatattaataagaagttctgttttgaaaatgttggcgggtttccagatcttggttcagaatacagtacaaggaagaattcacaagataaaatttataattcctacatggacaaagatgagcatggttcatcctctgaaagtgaagatgaagcgctgggtaaatatcatgaggccttatccagaacacacaattccagactaccactggcagattctagacaaaggaactatgcttgggaaacaaggcagaaatacagtcctctatcggcagagtatgatggatacagtagtgaagcatcaatagatgaaggaaactgcattcagagaatgagaagaacacccccgctggatgaattgcagccaccaccatatcaggatgacagtggttctccccatctgtcatgtacaccctcagaaattggggacagtaaatgtgaattttcccactgcagcaacagtccaagatgctcatataacaagtgcccaagtgaaggaagcacaggtcatgaaatagaaagttttcataataaaggatatgaagaagatgttccaagtgacagcactgcagtcctgagccctgaagatatgtcagctcaaggatcatcttcgcagcttcctaaaccttttgatcctgagccagaagctaaatatggcacactggatgtgacttttgactatgactcacaagaacagaagcttctggtaacagtgacagctgtcacagacatcccaacatataacaggacaggtggcaactcatggcaagtacaccttgttcttctacctataaagaaacagagagcaaaaaccagcatccagagaggaccatgccctgtcttcacagaaacatttaaatttaatcatgttgaatctgagatgattggaaattatgcagttcggtttagactgtatggtgtacatcgcatgaaaaaagaaaagattgtgggggaaaagattttttatttaacaaaattgaatcttcaagggaaaatgtcattgcctgtgatattggaaccttcttacaatcattctggctgtgactcccaaatgagcgtgtcagaaatgtcgtgtagtgaaagtacatcctcatgtcagtctcttgaacatggctcagttccagaaattcttattggcctgctttataatgccacaactggaagactatcagcagaagtgataaaaggcagccacttcaaaaatttggcagcaaacagaccacccaatacatatgttaagttaactctactgaattccatgggtcaagagatgtccaaatgcaagacatccatccgcagagggcagccaaatccagtatataaggaaacttttgtctttcaagtggccctatttcagctttctgatgtgacactcatactgtctgtgtataacaaacgcagcatgaaaagaaaagagatgataggctggatttctttaggtctcaacagctctggagaagaagaactcaatcactggactgaaatgaaagagtcaaaaggacagcaagtatgtagatggcatgcgttgctagagtcatgatgaatagaataagcaagcagttaccatcaaaggcagcatatttccaattccaacattactgtttctaccaagtcccattagaagagctgttctttgaagaatcatattcaaccttctaccaaaatgctttaagttctatggaaagaacgtctcatactgacataaatgaagaaaatatgtgtatctagtagagcttgtttaggaaactgagaaacgtacactatcattgctaaactaacagtcctccagaaatttaataagatgtttttgatttgaagttaattttaatttagcaaaagagccagtcattttatgaaaaatcaaaattataagtgattttaaaaaccagaattttagttgcaatacaattttaatatcaccctacatattatttataaaacatagtttgactggccagtccctggtgtttgtaatgttctttaatatgaaaaagtagttctccaactctatcataagtcatatctaatggtgaagggtttcagtcacattgaaaattgttttatttcaggcatgttccctttgtgcacttaggttcattgtgcctcagttcctctcaaaagcactaaatctaagtgcaaacaagtattcattttcatacaggaatttttttaatatgttatttttttaaaagttcatttttcatttgcctccgctttcgcctgatccaaagagaccaagtcactgtactggtcccttgcaagtcttctagacaggttgtactgtagaactacgtaactttctgttgaaagcacttcctgtattcttgtattccaatgtaggaagctaatagagcaggactttactttcaaatttctttcagtgattgactcttcaaaattgcagtagtgtgaaaatacattttttacaaactgaaaatacagtagataagctgtcgaaaatggaaaacaattcaattttaattttctgctctgagtatttagtaaccaacactgcgtaaagcaggtagcattcaaaataagaaactgttctctctctaaatcttcactcttacttcaatttatatttgtgatatgaagactatccagttctcagtttgaattggaacatcatgttaaaaacagttatgagattccttatgaagtttctagtaacttgtaactagactttatgaaattaacagataaagttcttcaacgtgatgtcatcttgtgcctttcatgtaagttaaatttgctcatacagcttgaacgttgtatttgcaaaattaagccttcgatttttataaatgtaaagattcctcagaacagtgtcgcaagatctttatttcctctgaagtatgtaaaagttgtataatgtgctaactttttaatggcaaggcactttcatttgtttttatatttaggaactctaatcaggaatattataagctgttttctttttaattttgcttcttacctaatatatcattttatgcatatactttatcagagtatgttttatatatattaaaaatagtttcttttttctccttctcatttctagttaaaatagacaaaaacatactatttaccagttactaaaaagcagtatatcattgcttctagtcccaactaagtactatatattattgtaaactagaacttgttattaccataataacaaaacaatgcgtagatattacttcagcttggctgtactgaaaggccttaaaagaaacccaaaaagaccgtgaacttctgtatttttttagtttaaaaaatggcagctctatgcattcatacacatgaattataagaaaaaatacaaatgctatattggatgacatgaggtttgagaatgtgtgttacagggctgcattaaagggaaaaatccatcttttattgttacatcaatgagctttttccaggatttttcaaataaacaagtaagagttagaacctgaatcaaatggcaaaatatctcatttaagtgttttcagcaacagtatgaaaaaagacttgaagaggggatgtagattttactgagaaattggacttaggcatttgaagctataatgaactttttagactttgaaacaactgactgcattgctaacaactgttatcttcctaataaaaagagttatcagtcttatctgtaactgtaacagagcttagtgaaacacattagtaagaccagcttggtgctttcactcttagtgagaaaaagacctaactaattgttatttgttaaatctaccttttttcagactattcccagaattgtgtgtgtgatttgatacatccctagggatttatctggcataagtatcaaatccttcatggcttaaaaattaataaacagttttttaatatttctggaaagaccctacctccaccccagctgccaagtcctcaaagattataaattatctatatgagtgtatgtatctgtatacacacatgcaccattacacatacaacataaatatgtatatgtatattcatttgtaaaggcaaaggtgccctggctttttcagataactgaatagaaaaacatttcatacatttaggattatttttctcctctatgtatttactagatattatatttggtttgggttgctttctgctgctgttctccttcacacacagcaaaatatacatttgtttctgtagattgacacaacttataataattactcccaaaaagttgtctgttcttttagaaaaggattaaataaggctcaggggacccacttcactctactgaatctaatgtacgagacagtactactgcttctttgtgtgcttgaatttgcatgaaagcttaatagcaaaatcttctatctcagtaattatagcaaatagggacctactggtagggagcaggtgttggctcagaaacctgaaaaagacaacccactttcatacagttctattaaaatcccctaagttttctaataaaatgatatagtccaaatatggcaatcgactggcatttatgggagcctctaaacctggaattatggggtttatttttctcccaaatgagctgcaaaagataattattgctgcccagtaaacaaaatgtatgtcaaatcagtaaagaatttgtttagcataatattgccttatctttcagaagctttcttctatattcttgtgtcttcagtacaatccacttttgtttgaaatccatttgcatattatcttactgtgcatttagtgaattctcaataatgttgtatttgctgacaagaataataaattggaccacaatt

SEQ ID NO: 59822 - protein, 602 aa, Artificial Sequence
  derived and/or modified sequence
MPQLNGGGGDDLGANDELISFKDEGEQEEKSSENSSAERDLADVKSSLVNESETNQNSSSDSEAERRPPPRSESFRDKSRESLEEAAKRQDGGLFKGPPYPGYPFIMIPDLTSPYLPNGSLSPTARTLHFQSGSTHYSAYKTIEHQIAVQYLQMKWPLLDVQAGSLQSRQALKDARSPSPAHIVSNKVPVVQHPHHVHPLTPLITYSNEHFTPGNPPPHLPADVDPKTGIPRPPHPPDISPYYPLSPGTVGQIPHPLGWLVPQQGQPVYPITTGGFRHPYPTALTVNASMSRFPPHMVPPHHTLHTTGIPHPAIVTPTVKQESSQSDVGSLHSSKHQDSKKEEEKKKPHIKKPLNAFMLYMKEMRAKVVAECTLKESAAINQILGRRWHALSREEQAKYYELARKERQLHMQLYPGWSARDNYGKKKKRKRDKQPGETNDLSAPKKCRARFGLDQQNNWCGPCRRKKKCVRYIQGEGSCLSPPSSDGSLLDSPPPSPNLLGSPPRDAKSQTEQTQPLSLSLKPDPLAHLSMMPPPPALLLAEATHKASALCPNGALDLPPAALQPAAPSSSIAQPSTSSLHSHSSLAGTQPQPLSLVTKSLE

SEQ ID NO: 59823 - protein, 602 aa, Artificial Sequence
  derived and/or modified sequence
MPQLNGGGGDDLGANDELISFKDEGEQEEKSSENSSAERDLADVKSSLVNESETNQNSSSDSEAERRPPPRSESFRDKSRESLEEAAKRQDGGLFKGPPYPGYPFIMIPDLTSPYLPNGSLSPTARTLHFQSGSTHYSAYKTIEHQIAVQYLQMKWPLLDVQAGSLQSRQALKDARSPSPAHIVSNKVPVVQHPHHVHPLTPLITYSNEHFTPGNPPPHLPADVDPKTGIPRPPHPPDISPYYPLSPGTVGQIPHPLGWLVPQQGQPVYPITTGGFRHPYPTALTVNASMSRFPPHMVPPHHTLHTTGIPHPAIVTPTVKQESSQSDVGSLHSSKHQDSKKEEEKKKPHIKKPLNAFMLYMKEMRAKVVAECTLKESAAINQILGRRWHALSREEQAKYYELARKERQLHMQLYPGWSARDNYGKKKKRKRDKQPGETNDANTPKKCRALFGLDRQTLWCKPCRRKKKCVRYIQGEGSCLSPPSSDGSLLDSPPPSPNLLGSPPRDAKSQTEQTQPLSLSLKPDPLAHLSMMPPPPALLLAEATHKASALCPNGALDLPPAALQPAAPSSSIAQPSTSSLHSHSSLAGTQPQPLSLVTKSLE

SEQ ID NO: 59824 - DNA, 1809 bp, Artificial Sequence
  derived and/or modified sequence
atgccccagctgaacggcggcggcggcgacgacctgggcgccaacgacgagctgatcagcttcaaggacgagggcgagcaggaggagaagagcagcgagaacagcagcgccgagagagacctggccgacgtgaagagcagcctggtgaacgagagcgagaccaaccagaacagcagcagcgacagcgaggccgagagaagacccccccccagaagcgagagcttcagagacaagagcagagagagcctggaggaggccgccaagagacaggacggcggcctgttcaagggccccccctaccccggctaccccttcatcatgatccccgacctgaccagcccctacctgcccaacggcagcctgagccccaccgccagaaccctgcacttccagagcggcagcacccactacagcgcctacaagaccatcgagcaccagatcgccgtgcagtacctgcagatgaagtggcccctgctggacgtgcaggccggcagcctgcagagcagacaggccctgaaggacgccagaagccccagccccgcccacatcgtgagcaacaaggtgcccgtggtgcagcacccccaccacgtgcaccccctgacccccctgatcacctacagcaacgagcacttcacccccggcaacccccccccccacctgcccgccgacgtggaccccaagaccggcatccccagacccccccacccccccgacatcagcccctactaccccctgagccccggcaccgtgggccagatcccccaccccctgggctggctggtgccccagcagggccagcccgtgtaccccatcaccaccggcggcttcagacacccctaccccaccgccctgaccgtgaacgccagcatgagcagattccccccccacatggtgcccccccaccacaccctgcacaccaccggcatcccccaccccgccatcgtgacccccaccgtgaagcaggagagcagccagagcgacgtgggcagcctgcacagcagcaagcaccaggacagcaagaaggaggaggagaagaagaagccccacatcaagaagcccctgaacgccttcatgctgtacatgaaggagatgagagccaaggtggtggccgagtgcaccctgaaggagagcgccgccatcaaccagatcctgggcagaagatggcacgccctgagcagagaggagcaggccaagtactacgagctggccagaaaggagagacagctgcacatgcagctgtaccccggctggagcgccagagacaactacggcaagaagaagaagagaaagagagacaagcagcccggcgagaccaacgacgccaacacccccaagaagtgcagagccctgttcggcctggacagacagaccctgtggtgcaagccctgcagaagaaagaagaagtgcgtgagatacatccagggcgagggcagctgcctgagcccccccagcagcgacggcagcctgctggacagccccccccccagccccaacctgctgggcagcccccccagagacgccaagagccagaccgagcagacccagcccctgagcctgagcctgaagcccgaccccctggcccacctgagcatgatgccccccccccccgccctgctgctggccgaggccacccacaaggccagcgccctgtgccccaacggcgccctggacctgccccccgccgccctgcagcccgccgcccccagcagcagcatcgcccagcccagcaccagcagcctgcacagccacagcagcctggccggcacccagccccagcccctgagcctggtgaccaagagcctggagtag

SEQ ID NO: 59825 - DNA, 1809 bp, Artificial Sequence
  derived and/or modified sequence
atgccccaactgaacggtggtggaggcgatgacctgggggccaacgatgagctgatcagctttaaggatgaaggcgagcaggaggagaagagcagtgaaaacagctctgcggagcgcgacctggcagatgttaagtctagtctggtgaacgagtcagagactaatcagaacagttccagtgactccgaagccgagcgaaggccaccgcctaggagcgaatcctttcgtgataaatcaagagagtccctggaggaagcagctaaacgccaggacggcggcctctttaagggaccaccttacccagggtatcctttcataatgatcccagacttaaccagtccctacctgccaaacgggtctttgtcccctacagcacgcaccttacatttccagagtgggtcaacacactactctgcctacaagactatcgaacaccagattgcagtgcagtatctccagatgaaatggccactcctcgatgtgcaggcgggcagcttgcagtcacgacaggctttaaaagacgctagatcaccttcgcctgctcatatagtctctaataaggtgcctgtggtgcagcaccctcaccacgtccatcctttgactcccctcataacatacagcaatgaacacttcacaccagggaaccctccccctcatcttcctgccgacgtagatcctaagaccggcattccgagaccccctcaccctcccgacatctcaccatactacccacttagccccggtaccgtcggacagattccacatcctttgggctggttagtgcctcagcagggacagcccgtgtatcctatcaccaccggtggtttccgccatccgtaccccaccgcactgacagtcaacgcctctatgtcaaggttcccacctcatatggtgcctccccatcataccctgcataccaccgggattcctcaccccgctattgttacccccaccgtcaaacaggaatcctcccagtcagacgtgggaagcctgcactcaagcaaacatcaggactccaaaaaagaagaagagaaaaaaaaaccccatataaagaagccgctcaatgctttcatgctgtatatgaaggagatgagggctaaggtggtggccgagtgtaccttaaaggaatctgcggcgatcaatcaaatcctcgggcgccggtggcatgccctttcaagagaggaacaagcgaaatactatgagcttgcccgcaaagaacgtcaactgcacatgcaattataccctggatggtcagctcgggataactacggcaaaaaaaaaaaacggaagagagacaaacagccaggtgagaccaacgacgccaataccccaaaaaaatgtcgcgctttattcgggttggatcggcagacactgtggtgcaagccgtgccgcaggaagaaaaaatgcgtgcgttatatacaaggggagggatcatgcctgtctcctccaagcagtgacgggagcctgctggatagccccccaccatctcccaatctgctgggcagtccacctagagacgctaagagtcaaacagaacaaactcagcccctcagtcttagtctcaaaccggaccctcttgcccacctctctatgatgcccccccctcccgcgctccttcttgcagaagccacgcacaaagcctccgccctgtgccccaatggcgcgctggatcttcctccggcagctctccaacctgctgcccctagcagctccatcgcccagcctagcacaagctccctgcattcgcattcaagtctcgccggcacccagccccagcctctgtctctcgtgacaaagtcactagagtag

SEQ ID NO: 59826 - DNA, 1809 bp, Artificial Sequence
  derived and/or modified sequence
atgccccagctgaatggaggcggcggagatgacctgggcgccaatgatgagctgatctccttcaaggatgaaggagagcaggaggagaagagcagcgagaacagcagcgctgagcgggacctggctgatgtgaagagcagcctggtgaatgaaagtgagaccaaccagaacagcagcagtgacagcgaggccgagcggcggcccccacccaggtctgagagcttccgggacaagagccgggagagcctggaggaggccgccaagaggcaggacggcggcctcttcaagggccccccctacccaggctaccccttcatcatgatcccagacctgaccagcccctacctgcccaacggcagcctgagccccacagcccggaccctgcacttccagagcggcagcacccactacagcgcctacaagaccatcgagcaccagattgctgtgcagtacctgcagatgaagtggcccctgctggatgtgcaggccggcagcctgcagagccggcaggccctgaaggatgcccggagccccagccctgcccacatcgtgagcaacaaggtgcctgtggtgcagcacccccaccacgtgcaccccctgacccccctcatcacctacagcaatgagcacttcaccccaggcaaccccccaccccacctgcctgcagatgtggaccccaagacaggcatccccaggcctccccaccccccagacatcagcccctactaccccctgagccctggcaccgtgggccagatcccccaccccctgggctggctggtgccccagcagggccagcctgtgtaccccatcaccactggaggcttccgccacccctaccccacagccctgactgtgaatgcctccatgagccgcttccccccccacatggtgcccccccaccacaccctgcacaccaccggcatcccccacccagccatcgtgacccccaccgtgaagcaggagagcagccagagtgatgtgggcagcctgcacagcagcaagcaccaggacagcaagaaggaggaggagaagaagaagccccacatcaagaagcccctgaatgccttcatgctgtacatgaaggagatgagggccaaggtggtggctgaatgtaccctgaaggagagcgctgccatcaaccagatcctgggccgccgctggcacgccctgagccgggaggagcaggccaagtactatgagctggccaggaaggagcggcagctgcacatgcagctgtacccaggctggagcgcccgggacaactacggcaagaagaagaagaggaagagggacaagcagcctggagagaccaatgatgccaacacccccaagaagtgccgggccctgtttggcctggaccggcagaccctgtggtgcaagccctgcaggaggaagaagaagtgtgtgcgctacatccagggcgagggcagctgcctgagcccccccagcagtgatggcagcctgctggacagccccccacccagccccaacctgctgggcagccccccaagagatgccaagagccagacagagcagacccagcccctgagcctgagcctgaagccagaccccctggcccacctgtccatgatgcctcctcctccagccctgctgctggccgaggccacccacaaggccagcgccctgtgccccaatggagccctggacctgcccccagctgccctgcagcctgctgcccccagcagcagcatcgcccagcccagcaccagcagcctgcacagccacagcagcctggccggcacccagccccagcccctgagcctggtgaccaagagcctggagtag

SEQ ID NO: 59827 - DNA, 1809 bp, Artificial Sequence
  derived and/or modified sequence
atgccccagctgaacggcggcggcggcgacgacctgggcgccaacgacgagctgatttcattcaaagacgagggtgagcaggaagagaaatcaagtgagaattcaagcgccgagcgcgatctcgctgacgtgaaatccagtctcgtgaatgaaagcgagacaaatcaaaacagtagctcggacagcgaagcagagcggcggcctccaccacggtccgagagttttcgggataaatcccgggaatctctcgaggaagccgctaaacgacaggacggcggactattcaaggggcccccttaccccggatacccttttatcatgatccctgatctgacttcaccttatcttccaaatggctccctcagtcctacagcccgcacactgcatttccagagcggttccactcactattcggcctacaaaacgatcgaacatcagatcgccgtccaatacctacagatgaagtggcccttactcgatgtgcaggccggaagcctacaatccaggcaggccctcaaggacgcccgatctccatctccagctcatatcgtgagcaacaaggtgccagtggtgcagcatccacatcatgttcaccccttaacacctctgatcacctattccaacgagcactttactcccggaaacccccctccacacctccctgccgacgtggatccgaaaacaggcattcccagaccaccacatccacctgacattagcccttattacccactgtcccctggtaccgtgggacagattcctcacccactgggctggctggtgcctcaacagggacagcccgtctatccaattacgactggcggcttcaggcacccatacccaaccgcccttacggtgaatgcatccatgtccaggttcccaccgcacatggttccaccccaccataccctgcatactactggcattccccacccagccattgttacaccaaccgtgaagcaggaaagttcacagtccgacgtggggagcctgcacagttctaagcatcaggattctaaaaaagaggaggaaaagaagaaacctcacataaaaaagccattgaacgcctttatgctgtatatgaaggagatgagagccaaggttgttgccgaatgcacgcttaaagaatcagctgcaattaatcagatcttgggtaggcgctggcacgccctctcacgtgaggaacaggccaagtattacgagctcgcacggaaggagcgtcagctccacatgcagctgtatccgggctggtcagcccgtgataactatggcaagaagaagaagaggaaacgggataagcagccaggtgagacaaacgatgccaacactccgaagaaatgcagagccctgtttggtctcgatcgccaaaccctatggtgtaagccctgccggcggaagaaaaagtgtgttagatacattcaaggtgaaggcagttgcttgagtcccccctcctcagatggcagtctgctcgactcacctcctcccagcccaaatctccttggaagccccccacgcgatgcaaagagccagacagaacagacccaaccgctctccctatctctgaaacccgatcctctcgcacacctgtccatgatgcccccacccccggccctattattggccgaggccacacataaagccagcgctctgtgccctaacggagcccttgatctgcccccagccgcgctacagccggctgctcccagctcttcgattgcgcagccctcaaccagttctctgcatagtcattcttccctggcaggcacacaaccccaacctttgagtctagttacaaaatccctggagtag

SEQ ID NO: 59828 - DNA, 1809 bp, Artificial Sequence
  derived and/or modified sequence
atgcctcagctgaacggagggggaggtgatgacctaggtgcaaacgatgagcttattagctttaaagacgaaggagagcaggaagaaaagtcaagcgagaattcgtctgctgaaagagatcttgctgatgttaagtcaagcctggtgaacgagagcgaaactaatcagaattcaagctccgactctgaggcagaacgcagacctccaccccgtagtgagagctttagggataagagccgagagagcctcgaagaggcggctaaaagacaggatggcggtctattcaaaggacccccttatcctggataccccttcattatgatccccgatctcacttccccttacctgcccaatggctctctgtctccgactgcgagaacccttcactttcagtccggtagcacccactactctgcttataaaaccattgaacatcagattgccgtccagtatctgcaaatgaagtggccactgctggacgttcaggccggttccctgcaatctcgacaggcattgaaggacgcaaggagtccgagtcccgctcatattgtgagcaataaagttcccgtagtccagcacccccatcatgtgcaccctttgacccctctcatcacatattcgaacgaacactttacgccgggaaacccaccaccccacctgccagcggacgtggatcctaagactgggatcccgcgaccgccacatccccctgatatttcaccctattacccactttcccctggcacagtgggacagatcccccatccactcgggtggctggtacctcagcagggccagccagtctaccctattacaacagggggattccgccacccttatccaaccgctttgaccgtgaatgcctcaatgtcccggttccctccacatatggtcccaccccaccacacattgcacacgacgggcatcccgcatccagccatagtgacacctacggtcaaacaggagagctcccagtccgatgtcggaagcctacactccagcaagcaccaagacagcaagaaagaggaggagaagaaaaagccacacatcaagaaacccctgaatgcttttatgctatacatgaaggaaatgcgagcaaaagttgtggctgagtgtacacttaaagagtctgctgccatcaatcagatcttgggccgacggtggcacgctctgtcccgagaggaacaggctaagtactatgagttggctcgtaaggaaaggcaactacacatgcagctgtacccaggctggagtgccagggataactacggaaagaaaaagaagcgtaaaagagacaaacagcccggtgaaacaaacgacgctaacaccccgaagaagtgtcgcgcactattcggcttagaccgacagacactctggtgcaaaccgtgccgacggaagaaaaaatgcgtcagatacattcaaggggagggttcttgcctgtcccccccatcttccgatgggtccctgcttgactcacctccacctagccccaatttgttgggatctcctccaagagacgccaaatctcagactgaacagactcagccactgtccctctcgcttaagcctgacccactggcacatctgtccatgatgccccctcccccagcactgctgctagctgaagccacccacaaagctagtgctctgtgtcctaatggcgcactggacctgccgccagccgctcttcagccagcggcaccgtcttcctccatcgctcagccaagtacaagcagcctgcactcccacagctccctcgcaggaactcagccacagcccctaagtctggtgactaaatccttagaatag

SEQ ID NO: 59829 - DNA, 4022 bp, Artificial Sequence
  derived and/or modified sequence
aataatctccgctcccagactactccgttcctccggatttcgatccccctttttctatctgtcaatcagcgccgcctttgaactgaaaagctctcagtctaacttcaactcactcaaatccgagcggcacgagcacctcctgtatcttcggcttccccccccctttgctctttatatctgacttcttgttgttgttggtgttttttttttttttaccccccttttttatttattatttttttgcacattgatcggatccttgggaacgagagaaaaaagaaacccaaactcacgcgtgcagaagatctccccccccttcccctcccctcctccctcttttcccctccccaggagaaaaagacccccaagcagaaaaaagttcaccttggactcgtctttttcttgcaatattttttgggggggcaaaactttttgggggtgattttttttggcttttcttcctccttcatttttcttccaaaattgctgctggtgggtgaaaaaaaaatgccgcagctgaacggcggtggaggggatgacctaggcgccaacgacgaactgatttccttcaaagacgagggcgaacaggaggagaagagctccgaaaactcctcggcagagagggatttagctgatgtcaaatcgtctctagtcaatgaatcagaaacgaatcaaaacagctcctccgattccgaggcggaaagacggcctccgcctcgctccgaaagtttccgagacaaatcccgggaaagtttggaagaagcggccaagaggcaagatggagggctctttaaggggccaccgtatcccggctaccccttcatcatgatccccgacctgacgagcccctacctccccaacggatcgctctcgcccaccgcccgaaccctccattttcagtccggcagcacacattactctgcgtacaaaacgattgaacaccagattgcagttcagtatctccagatgaaatggccactgcttgatgtccaggcagggagcctccagagtagacaagccctcaaggatgcccggtccccatcaccggcacacattgtctctaacaaagtgccagtggtgcagcaccctcaccatgtccaccccctcacgcctcttatcacgtacagcaatgaacacttcacgccgggaaacccacctccacacttaccagccgacgtagaccccaaaacaggaatcccacggcctccgcaccctccagatatatccccgtattacccactatcgcctggcaccgtaggacaaatcccccatccgctaggatggttagtaccacagcaaggtcaaccagtgtacccaatcacgacaggaggattcagacacccctaccccacagctctgaccgtcaatgcttccatgtccaggttccctccccatatggtcccaccacatcatacgctacacacgacgggcattccgcatccggccatagtcacaccaacagtcaaacaggaatcgtcccagagtgatgtcggctcactccatagttcaaagcatcaggactccaaaaaggaagaagaaaagaagaagccccacataaagaaacctcttaatgcattcatgttgtatatgaaggaaatgagagcaaaggtcgtagctgagtgcacgttgaaagaaagcgcggccatcaaccagatccttgggcggaggtggcatgcactgtccagagaagagcaagcgaaatactacgagctggcccggaaggagcgacagcttcatatgcaactgtaccccggctggtccgcgcgggataactatggaaagaagaagaagaggaaaagggacaagcagccgggagagaccaatgatgcaaatactccaaagaagtgtcgggcactgttcgggcttgaccgacagactttatggtgcaaaccgtgcaggagaaaaaaaaagtgcgttcgctacatacaaggtgaaggcagctgcctcagcccaccctcttcagatggaagcttactagattcgcctcccccctccccgaacctgctaggctcccctccccgagacgccaagtcacagactgagcagacccagcctctgtcgctgtccctgaagcccgaccccctggcccacctgtccatgatgcctccgccacccgccctcctgctcgctgaggccacccacaaggcctccgccctctgtcccaacggggccctggacctgcccccagccgctttgcagcctgccgccccctcctcatcaattgcacagccgtcgacttcttccttacattcccacagctccctggccgggacccagccccagccgctgtcgctcgtcaccaagtctttagaatagctttagcgtcgtgaaccccgctgctttgtttatggttttgtttcacttttcttaatttgccccccacccccaccttgaaaggttttgttttgtactctcttaattttgtgccatgtggctacattagttgatgtttatcgagttcattggtcaatatttgacccattcttatttcaatttctccttttaaatatgtagatgagagaagaacctcatgattctaccaaaatttttatcaacagctgtttaaagtctttgtagcgtttaaaaaatatatatatatacataactgttatgtagttcggatagcttagttttaaaagactgattaaaaaacaaaaagaaaaaaaaagcaattttgaagcagccctccagaaggagttggttctgtattatttgtattaaatacgagcttgcgaaccaatcattttacatctggtttttaaaccgtaagggcaccatgaatgcagtgccgttactttttttttttttttctgtgtgaaacaactcttattgtgatgttacttgttattgtttaaatgtacagaaacaaagggtaaaaatgtgttaatataccttgttccatggtgttgttcttttggggggaggggacgctactcaacacttaatagaatcacaacgctgttgggccagtagtatttattgctttagagattgcttgtcgtacctgtatgtcgtccctttttaaatatgttttcctttttcttgaaactgtataaagtttttttcccccttagcataagcatcttatatataacaactcatttgtacaaggtttttaagtttatatataaaatgtgtatatatatttttgtttcccctttttgacttttttttttctgtatgaaacccagatgtcaccaaatggacattaatagttgcattaaggatcagtagcattaacaaaagttgctttaaaagccattatgtaaaacaagacttgaaaatgagtgagggaattttagcgacactgtctgagcagcagtgggaaccatcttcgtttcccctttgaactcccagtgggatgccctaccctgcgcccttaggacccggactgaccgtgtacaaaactttacgtgccaaaattctcagtgaatttagctttctccctctttttgatgctgtaatttttgttcatcatgttttgctgtgatgttacataggtagatttgtatgtagttttaatgtcacctataacaaaatgtgtttggtagcagattgtccagaaagcattttaaatgaagaggtataaacccttaagggccaaaattctgtatattagattactcttaaacgaaaaaccagctgccgcttttatgtacacatattacatacgagtaggcagcagactttaaaaataaaaaaaacctaggcatgttgatgttgcaaaatgctgtataaagctgaaacctgttcattcagtgccattgtagttgacatgaagcgattgtaaaactgtctccgatttttctctggtttattaaaatgctaactataacattttttgtgaatactttgaatgtttcctaacagttgtgatgttactgttccgttttatgctcttattccaagttcatttttaatggtttggaagccatttttgtaatgaataaatgttcatgctgtacagtatctgtagcatgccgttctggattaataaaagcaacttagtatgtgcagataaa

SEQ ID NO: 59830 - protein, 448 aa, Artificial Sequence
  derived and/or modified sequence
MSSCRGQKVAGGLRVVSPFPLCQPAGEPSQGKMRSSCVLLTALVALAAYYVYIPLPGSVSDPWKLMLLDATFRGAQQVSNLIHYLGLSHHLLALNFIIVSFGKKSAWSSAQVKVTDTDFDGVEVRVFEGPPKPEEPLKRSVVYIHGGGWALASASASWSPSDEIRYYDELCTAMAEELNAVIVSIEYRLVPKVYFPEQIHDVVRATKYFLKPEVLQKYMVDPGRICISGDSAGGNLAAALGQQFTQDASLKNKLKLQALIYPVLQALDFNTPSYQQNVNTPILPRYVMVKYWVDYFKGNYDFVQAMIVNNHTSLDVEEAAAVRARLNWTSLLPASFTKNYKPVVQTTGNARIVQELPQLLDARSAPLIADQAVLQLLPKTYILTCEHDVLRDDGIMYAKRLESAGVEVTLDHFEDGFHGCMIFTSWPTNFSVGIRTRNSYIKWLDQNL

SEQ ID NO: 59831 - DNA, 1347 bp, Artificial Sequence
  derived and/or modified sequence
atgagttcttgtcgtggccagaaagtcgccggaggtctgcgcgtggtgagcccatttcccctctgccagcctgccggggagccttctcaaggtaagatgcgtagcagctgcgttcttctaactgctctcgtggcactcgccgcgtactacgtgtacatcccgctgcccggcagcgtctccgatccgtggaagctcatgcttctagatgccacttttaggggcgcccaacaggtgagtaacctgattcattatctcgggttatcacaccacctcctggccctaaacttcattatcgtgagtttcggcaaaaagtctgcttggagtagcgcccaggtcaaagtgacagacacagactttgacggggtggaagtcagggtctttgagggccctcctaagcctgaggagcctctgaagcggagtgtggtctacatccacgggggcggttgggcactcgccagtgcttctgcatcctggagtccttctgatgaaattcggtactacgatgaactctgtacggcaatggcggaggagcttaatgccgtcatcgtgagcatcgagtaccgcctcgtgccaaaggtgtactttccagagcagatccacgacgtggttagagctaccaagtacttcttgaagccggaagtgctccaaaagtatatggttgatcccggccgcatctgcataagcggggattctgccggaggtaacctggctgcggcactggggcaacagttcacacaggacgctagcttgaagaataaattaaagctgcaggctctgatctacccagtactccaggccttagatttcaacaccccctcttaccagcagaacgtgaatacccctattctgcctagatacgtcatggtgaagtattgggtcgactatttcaagggtaactatgactttgtccaggctatgatcgtcaacaatcacacctctctggacgtagaggaggccgccgcggttcgcgccagactgaactggacctccctcctgcctgcctcatttactaagaactataagcccgtcgttcagaccaccggcaacgcacggatcgtacaggaactacctcaacttctggatgcacgtagtgccccgcttatcgctgatcaggccgttctgcaactgcttcccaaaacctatatcctgacctgtgagcacgacgttttacgggacgatggcattatgtacgctaaacgcctcgaatctgccggcgtggaagtcaccctggaccactttgaggatggatttcatggatgcatgattttcaccagttggcccacaaatttctcagtgggaattagaaccaggaacagctatatcaagtggttagatcaaaacctctag

SEQ ID NO: 59832 - DNA, 1347 bp, Artificial Sequence
  derived and/or modified sequence
atgagcagctgccggggccagaaggtggccggcggcctgcgggtggtgagccccttccccctgtgccagcctgctggggagcccagccagggcaagatgaggagcagctgtgtgctgctgacagccctggtggccctggccgcctactacgtgtacatccccctgcccggctctgtgtctgacccctggaagctgatgctgctggatgccaccttccggggggcccagcaggtgagcaacctgatccactacctgggcctgagccaccacctgctggccctgaacttcatcatcgtgtcctttgggaagaagagcgcctggagcagcgcccaggtgaaggtgacagacacagactttgatggagtggaggtgcgggtgtttgagggcccccccaagccagaggagcccctgaagaggtctgtggtgtacatccatggaggcggctgggccctggccagcgccagcgcctcctggagccccagtgatgagatccgctactatgatgagctgtgcacagccatggccgaggagctgaatgctgtgattgtgtccattgagtaccgcctggtgcccaaggtgtacttccctgagcagatccatgatgtggtgcgggccaccaagtacttcctgaagccagaggtgctgcagaagtacatggtggaccccggccgcatctgcatcagcggggacagcgctgggggcaacctggccgccgccctgggccagcagttcacccaggatgccagcctgaagaacaagctgaagctgcaggccctgatctaccctgtgctgcaggccctggacttcaacacccccagctaccagcagaatgtgaacacccccatcctgccccgctacgtgatggtgaagtactgggtggactacttcaagggcaactatgactttgtgcaggccatgattgtgaacaaccacaccagcctggatgtggaggaggccgctgctgtgcgggcccggctgaactggaccagcctgctgcctgccagcttcaccaagaactacaagcctgtggtgcagaccactggaaatgcccgcatcgtgcaggagctgccccagctgctggatgcccggagcgcccccctgattgctgaccaggccgtgctgcagctgctgcccaagacctacatcctgacctgtgaacatgatgtgctgagagatgatggcatcatgtatgccaagaggctggagagcgctggggtggaggtgaccctggaccactttgaagatggcttccacggctgcatgatcttcacctcctggcccaccaacttctctgtgggcatccgcaccagaaattcctacatcaagtggctggaccagaacctgtag

SEQ ID NO: 59833 - DNA, 1347 bp, Artificial Sequence
  derived and/or modified sequence
atgagcagctgccggggccagaaggtggccggcggcctgcgggtggtctcaccctttcctctgtgtcaacctgccggggagccctcacaagggaagatgagaagttcttgcgttctcctgaccgccttagtcgctctagccgcctactacgtgtacatcccacttccagggtcagtgagcgacccttggaaactcatgctgctcgacgcaactttccgaggcgctcagcaggtgagtaatctgattcattatctcgggctttcacaccacttgttggcactcaactttattattgtgtcctttggaaagaagtcagcgtggagtagtgcacaagttaaggtcaccgataccgacttcgatggggtcgaggtccgagtttttgagggcccacccaagcctgaagaaccactgaagcggagcgtcgtctacatccatggagggggttgggcgctggcctccgcttccgctagctggtcgccctccgacgaaatacgctattacgacgagctctgcacagccatggcggaagagctgaacgcagtgatcgtctcgattgagtaccgactggtgccaaaagtttattttcctgaacaaattcatgacgtagtacgggctactaagtacttccttaagccagaagttctacagaaatatatggtggaccctggccggatctgcatctcaggagacagtgccggggggaatctggccgccgcacttgggcagcagtttacacaggacgccagtctaaagaataagcttaagttgcaggcgttaatctatcccgtgcttcaggccctcgactttaacactccatcgtaccagcagaatgtgaacacacccatcctgcctaggtatgtaatggtgaagtattgggttgactactttaaaggaaactatgacttcgttcaagccatgattgtgaacaatcacacctctctcgacgtcgaggaggcagccgctgtccgggctaggttgaactggacttctctactccccgcttctttcaccaaaaactacaaacctgtagttcagaccaccggtaatgccagaatcgtccaggagctgccacagctcctcgacgcaagaagcgcgcccttgatcgcggatcaggctgtgctgcaattattgccaaaaacttacatccttacttgtgaacacgatgtgcttcgggacgatggtatcatgtacgcaaagcggctggaatcagccggggttgaggtcacccttgatcatttcgaagatggctttcacggttgtatgatttttacgagctggccaaccaacttcagtgtcggcatcaggactagaaacagttatatcaaatggttagaccaaaacctgtag

SEQ ID NO: 59834 - DNA, 4315 bp, Artificial Sequence
  derived and/or modified sequence
agagcagcgacagagccttcctcaaacctgtagtgactgccacactttgcaaggacaccgtagagggggcatgtccgcgctccaacttcctcccgacgcagcctctgattggctcctgggcttataagaaacgcgtgaatgagcagctgccgcgggcagaaagttgccggaggtctccgggtggtatcgccctttcctctttgccagcccgctggcgagccgagccagggcaagatgaggtcgtcctgtgtcctgctcaccgccctggtggcgctggccgcctattacgtctacatcccgctgcctggctccgtgtccgacccctggaagctgatgctgctggacgccactttccggggtgcacagcaagtgagtaacctgatccactacctgggactgagccatcacctgctggcactgaattttatcattgtttcttttggcaaaaaaagcgcgtggtcttctgcccaagtgaaggtgaccgacacagactttgatggtgtggaagtcagagtgtttgaaggccctccgaagcccgaagagccactgaaacgcagcgtcgtttatatccacggaggaggctgggccttggcaagtgcaagtgcgtcctggtcaccttcagatgaaatcaggtattatgatgagctgtgtacagcaatggctgaggaattgaatgctgtcattgtttccattgaatacaggctagttccaaaggtttattttcctgagcaaattcatgatgttgtacgggccacaaagtatttcctgaagccagaagtcttacagaagtatatggttgatccaggcagaatttgcatttctggtgacagtgctggtggaaatctggctgctgcccttggacaacagtttactcaagatgccagcctaaaaaataagctcaaactacaagctttaatttatccagttcttcaagctttagattttaacacaccatcttatcagcaaaatgtgaacaccccaatcctgccccgctatgtcatggtgaagtattgggtggactacttcaaaggcaactatgactttgtgcaggcaatgatcgttaacaatcacacttcacttgatgtggaagaggctgctgctgtcagggcccgtctaaactggacatccctcttgcctgcatccttcacaaagaactacaagcctgttgtacagaccacaggcaatgccaggattgtccaggagcttcctcagttgctggatgcccgctccgccccactcattgcagaccaggcagtgctgcagctcctcccaaagacctacattctgacgtgtgagcatgatgtcctcagagacgatggcatcatgtatgccaagcgtttggagagtgccggtgtggaggtgaccctggatcactttgaggatggctttcacggatgtatgattttcactagctggcccaccaacttctcagtgggaatccggactaggaatagttacatcaagtggctagatcaaaacctgtaaaggagcaaaacttccagaagcctcgagcccctcttgacctcctacacctgctttggaaagacatgcactttttagttgactaattcttcctcccattcccctctacttgcgagttatggaatttctattccataactgaagtctttatgataacctaatttttaaaaatgaatttgactaacttaagtgcaaaacatgtaaatttggttcccagagtgggccaatctctctgttcttgttatcttagccaactatactgatacctacagctacagaaagcaggactaggaactggaaataactttgggtcctgccttcattaggacgttctttttagaagcagttcttccagctctggatcatagagtgacctttaataagttaaaaaaacgaggactccttaattctgctagagttaaccttgagttcagagcagtattaaatgcgtgcactttcaggtcagtactggggaccaagtaccctctggtcttttgtgaatggatggttttgtttcctatgggaattttggcaaaggttttctggaaagaacaagtttctcaaaggactttcttcctctagaatgttcattttatgagatcgctatctgtaagtccagttggattacaggaatacttgaaagttactttctaccactattagaaaatatgaagtcgcatgcactggatatctatatatcattaggtttttgttgtgtttttggttatgctgtcccccttctccttggggagatatttgggagcaaacttatttagatttagagtaaacttttcattatagagcaagtaaaaacagacaaatgaaacaacctagtgtttcacataaaaatacttctgacataaagtaccaagagcagtgtgaatatacttggcatagtcaaaaaagaaaatacatttaatattagttcaaaattgttaaaaatacctttagaaggtctagtctattattgaaaactcaattttttcacttatatggctttaaaatggagctattttgctacaatataatgtattgtttatttttttaagttatttaatgttaatatacatagctagacttaaggtttttcagaaagatgtccataataaatattaaaaacaatggtattttttaaaaaactgccttagggttttaaaaccttccctacagttataaccacgtgtaattttgtggaaatgatataacagctattaatactactataacataggcataaatattttcgtgtttatatgcatatacaagttaaaataattagaaactatgactgcgcctagtaaagtcatctaggtttatagttcagtagcttaggcaaggcacacactgctcatctccgctttttagggtcagaggaacacaagctcatgttctgagtgaagggcgtacactggcacctggtgttgcctagatcccccatctcctccttccagccaggtctggaagtttcaacagcccaagcttaacttcatgtaaagtcttcactgccagtgggaacatctttgacacaacaagacactccaattgtgatttgagttgaggatctctgcctgccttcctgccgtccttccttcttccccgatccatgctacttttaggggctgcggagagcagcagcagagctgagtaatgatacagggcaccacggagagaaagtagaaccatttcactcctgggaagatggggtatttcccacttccagcaacgaaataacaaatgaaaagttgcatacttattgatgtattgtatgagccagtagcattttatgtacaaaacagaagtcaatgcaacagtatgtatgtgtgcctgtgtgtgtataaaaataaccattgaagctaacttgctaatgtacttaggcaagccacttcccatctctgggcctcgtctttcctccctctaaaatcaaagagctgaattatgtgatccttgaggtctcttccacttataataccaactgtcttgtcagactggcaaattatattggcctctccttatgtggtggtttttttggtaggtcatagttccttatacacagacacctgcatcatcgaaggtctttttttcctaaaaaaaaaaaatgggattttagttcttattctgtgataactatcctcctcatataatactattctttttgacaccatttgaaggaaccaatatttggaccttattttgaggttgtctgtctcgaagaaaaagaaaataaaatgtataggcagggttccttcaattggcattttccccagaattgtgagccaaagcctatagtaattgcagacagcaaatgattccggatctctaaaaggctctctcagatgaaaagggagtaaaggaaaaaagaggtcaaccactgtttctgataatgtacttgagtttcattgttcttttagtttgtattcttataaaaaatgtttacactctgcagattgattttttttttttagtactgtggctttcttttcctattttatgaaaaaaatgataatctttttgtaaaattgtctgtgaaatataaacattaatatataaagaaaaaccttgaagtgctgtatagtgaagtataaattaatgttttattgatttgtgaagaatttaagactattatataattatcttggtggatctattttatgcatgaccttttaacctttgactttgcttatttcccactacgaaggggaaggtagattttatgaatgattttaatagcaaatatattttataaagtgaaaatccagtgtggaggtagcaaagcatctatctattctgaatcatgtttggaaataaaattgctccatctgggaatgtgctttca

SEQ ID NO: 59835 - DNA, 4062 bp, Artificial Sequence
  derived and/or modified sequence
agagcagcgacagagccttcctcaaacctgtagtgactgccacactttgcaaggacaccgtagagggggcatgtccgcgctccaacttcctcccgacgcagcctctgattggctcctgggcttataagaaacgcgtgaatgagcagctgccgcgggcagaaagttgccggaggtctccgggtggtatcgccctttcctctttgccagcccgctggcgagccgagccagggcaagatgaggtcgtcctgtgtcctgctcaccgccctggtggcgctggccgcctattacgtctacatcccgctgcctggctccgtgtccgacccctggaagctgatgctgctggacgccactttccggggtgcacagcaagtgaaatcaggtattatgatgagctgtgtacagcaatggctgaggaattgaatgctgtcattgtttccattgaatacaggctagttccaaaggtttattttcctgagcaaattcatgatgttgtacgggccacaaagtatttcctgaagccagaagtcttacagaagtatatggttgatccaggcagaatttgcatttctggtgacagtgctggtggaaatctggctgctgcccttggacaacagtttactcaagatgccagcctaaaaaataagctcaaactacaagctttaatttatccagttcttcaagctttagattttaacacaccatcttatcagcaaaatgtgaacaccccaatcctgccccgctatgtcatggtgaagtattgggtggactacttcaaaggcaactatgactttgtgcaggcaatgatcgttaacaatcacacttcacttgatgtggaagaggctgctgctgtcagggcccgtctaaactggacatccctcttgcctgcatccttcacaaagaactacaagcctgttgtacagaccacaggcaatgccaggattgtccaggagcttcctcagttgctggatgcccgctccgccccactcattgcagaccaggcagtgctgcagctcctcccaaagacctacattctgacgtgtgagcatgatgtcctcagagacgatggcatcatgtatgccaagcgtttggagagtgccggtgtggaggtgaccctggatcactttgaggatggctttcacggatgtatgattttcactagctggcccaccaacttctcagtgggaatccggactaggaatagttacatcaagtggctagatcaaaacctgtaaaggagcaaaacttccagaagcctcgagcccctcttgacctcctacacctgctttggaaagacatgcactttttagttgactaattcttcctcccattcccctctacttgcgagttatggaatttctattccataactgaagtctttatgataacctaatttttaaaaatgaatttgactaacttaagtgcaaaacatgtaaatttggttcccagagtgggccaatctctctgttcttgttatcttagccaactatactgatacctacagctacagaaagcaggactaggaactggaaataactttgggtcctgccttcattaggacgttctttttagaagcagttcttccagctctggatcatagagtgacctttaataagttaaaaaaacgaggactccttaattctgctagagttaaccttgagttcagagcagtattaaatgcgtgcactttcaggtcagtactggggaccaagtaccctctggtcttttgtgaatggatggttttgtttcctatgggaattttggcaaaggttttctggaaagaacaagtttctcaaaggactttcttcctctagaatgttcattttatgagatcgctatctgtaagtccagttggattacaggaatacttgaaagttactttctaccactattagaaaatatgaagtcgcatgcactggatatctatatatcattaggtttttgttgtgtttttggttatgctgtcccccttctccttggggagatatttgggagcaaacttatttagatttagagtaaacttttcattatagagcaagtaaaaacagacaaatgaaacaacctagtgtttcacataaaaatacttctgacataaagtaccaagagcagtgtgaatatacttggcatagtcaaaaaagaaaatacatttaatattagttcaaaattgttaaaaatacctttagaaggtctagtctattattgaaaactcaattttttcacttatatggctttaaaatggagctattttgctacaatataatgtattgtttatttttttaagttatttaatgttaatatacatagctagacttaaggtttttcagaaagatgtccataataaatattaaaaacaatggtattttttaaaaaactgccttagggttttaaaaccttccctacagttataaccacgtgtaattttgtggaaatgatataacagctattaatactactataacataggcataaatattttcgtgtttatatgcatatacaagttaaaataattagaaactatgactgcgcctagtaaagtcatctaggtttatagttcagtagcttaggcaaggcacacactgctcatctccgctttttagggtcagaggaacacaagctcatgttctgagtgaagggcgtacactggcacctggtgttgcctagatcccccatctcctccttccagccaggtctggaagtttcaacagcccaagcttaacttcatgtaaagtcttcactgccagtgggaacatctttgacacaacaagacactccaattgtgatttgagttgaggatctctgcctgccttcctgccgtccttccttcttccccgatccatgctacttttaggggctgcggagagcagcagcagagctgagtaatgatacagggcaccacggagagaaagtagaaccatttcactcctgggaagatggggtatttcccacttccagcaacgaaataacaaatgaaaagttgcatacttattgatgtattgtatgagccagtagcattttatgtacaaaacagaagtcaatgcaacagtatgtatgtgtgcctgtgtgtgtataaaaataaccattgaagctaacttgctaatgtacttaggcaagccacttcccatctctgggcctcgtctttcctccctctaaaatcaaagagctgaattatgtgatccttgaggtctcttccacttataataccaactgtcttgtcagactggcaaattatattggcctctccttatgtggtggtttttttggtaggtcatagttccttatacacagacacctgcatcatcgaaggtctttttttcctaaaaaaaaaaaatgggattttagttcttattctgtgataactatcctcctcatataatactattctttttgacaccatttgaaggaaccaatatttggaccttattttgaggttgtctgtctcgaagaaaaagaaaataaaatgtataggcagggttccttcaattggcattttccccagaattgtgagccaaagcctatagtaattgcagacagcaaatgattccggatctctaaaaggctctctcagatgaaaagggagtaaaggaaaaaagaggtcaaccactgtttctgataatgtacttgagtttcattgttcttttagtttgtattcttataaaaaatgtttacactctgcagattgattttttttttttagtactgtggctttcttttcctattttatgaaaaaaatgataatctttttgtaaaattgtctgtgaaatataaacattaatatataaagaaaaaccttgaagtgctgtatagtgaagtataaattaatgttttattgatttgtgaagaatttaagactattatataattatcttggtggatctattttatgcatgaccttttaacctttgactttgcttatttcccactacgaaggggaaggtagattttatgaatgattttaatagcaaatatattttataaagtgaaaatccagtgtggaggtagcaaagcatctatctattctgaatcatgtttggaaataaaattgctccatctgggaatgtgctttca

SEQ ID NO: 59836 - DNA, 1347 bp, Artificial Sequence
  derived and/or modified sequence
atgtcctcgtgtagagggcaaaaggtggcgggtggtctgcgggtggtgagtccttttccgttgtgccagcctgccggagagccttcacagggtaaaatgagatcttcttgcgtcctcctaacggcgcttgtcgctttggcagcatactatgtatacattcctctccctggctcagtctccgatccctggaagttgatgctcctggacgcaacctttcgcggtgcacagcaggtgtctaacctcatacattacctcggcttatctcaccacctcctggcgttgaacttcattatcgtgtctttcggcaagaagtctgcatggtctagcgcccaggttaaagtcaccgacacagacttcgatggcgttgaggttagggtctttgaaggcccaccaaagcctgaggaaccactaaaacgttccgtggtctacattcatggcggaggatgggccctcgcttccgcctccgcaagttggtcacctagcgatgaaattcgctattacgacgaactgtgcaccgctatggccgaagagctgaatgcagtcatagtgtctattgagtaccgactggtgccaaaagtctattttcccgagcagatacatgacgtagttagagcaacaaagtatttcctaaagccagaggtgctccagaagtacatggtcgatcccggaagaatttgcatctctggtgatagtgctggaggcaatctcgccgcagccttaggacaacagttcacgcaggatgccagtctgaaaaacaaactcaagctgcaagcactcatctatccggttcttcaagcccttgactttaacacaccaagttaccaacaaaacgtcaacactccaatcctgccaaggtacgtgatggtgaagtactgggttgattacttcaagggaaactacgatttcgtgcaagcaatgatcgtcaataatcacacaagtttggacgtggaagaagcagcagccgtgcgggctcgcctgaattggacttcgctgctcccagcgagttttacgaaaaactacaagccagtagtgcaaaccaccggtaacgccaggatcgtccaggagcttccacagttgctggacgccagaagtgcaccacttatcgccgaccaggctgttttgcagttactgccaaagacctatatcctcacatgtgaacacgacgtgttgcgagacgacggcatcatgtatgcgaagaggcttgagagtgcgggtgtagaggtgaccctcgatcacttcgaagatggatttcatggctgtatgatctttacatcatggccaacgaatttcagcgtcggcatcagaaccagaaactcttacatcaaatggctggaccagaacctgtag

SEQ ID NO: 59837 - DNA, 1347 bp, Artificial Sequence
  derived and/or modified sequence
atgagcagctgcagaggccagaaggtggccggcggcctgagagtggtgagccccttccccctgtgccagcccgccggcgagcccagccagggcaagatgagaagcagctgcgtgctgctgaccgccctggtggccctggccgcctactacgtgtacatccccctgcccggcagcgtgagcgacccctggaagctgatgctgctggacgccaccttcagaggcgcccagcaggtgagcaacctgatccactacctgggcctgagccaccacctgctggccctgaacttcatcatcgtgagcttcggcaagaagagcgcctggagcagcgcccaggtgaaggtgaccgacaccgacttcgacggcgtggaggtgagagtgttcgagggcccccccaagcccgaggagcccctgaagagaagcgtggtgtacatccacggcggcggctgggccctggccagcgccagcgccagctggagccccagcgacgagatcagatactacgacgagctgtgcaccgccatggccgaggagctgaacgccgtgatcgtgagcatcgagtacagactggtgcccaaggtgtacttccccgagcagatccacgacgtggtgagagccaccaagtacttcctgaagcccgaggtgctgcagaagtacatggtggaccccggcagaatctgcatcagcggcgacagcgccggcggcaacctggccgccgccctgggccagcagttcacccaggacgccagcctgaagaacaagctgaagctgcaggccctgatctaccccgtgctgcaggccctggacttcaacacccccagctaccagcagaacgtgaacacccccatcctgcccagatacgtgatggtgaagtactgggtggactacttcaagggcaactacgacttcgtgcaggccatgatcgtgaacaaccacaccagcctggacgtggaggaggccgccgccgtgagagccagactgaactggaccagcctgctgcccgccagcttcaccaagaactacaagcccgtggtgcagaccaccggcaacgccagaatcgtgcaggagctgccccagctgctggacgccagaagcgcccccctgatcgccgaccaggccgtgctgcagctgctgcccaagacctacatcctgacctgcgagcacgacgtgctgagagacgacggcatcatgtacgccaagagactggagagcgccggcgtggaggtgaccctggaccacttcgaggacggcttccacggctgcatgatcttcaccagctggcccaccaacttcagcgtgggcatcagaaccagaaacagctacatcaagtggctggaccagaacctgtag

SEQ ID NO: 59838 - protein, 275 aa, Artificial Sequence
  derived and/or modified sequence
MAEELNAVIVSIEYRLVPKVYFPEQIHDVVRATKYFLKPEVLQKYMVDPGRICISGDSAGGNLAAALGQQFTQDASLKNKLKLQALIYPVLQALDFNTPSYQQNVNTPILPRYVMVKYWVDYFKGNYDFVQAMIVNNHTSLDVEEAAAVRARLNWTSLLPASFTKNYKPVVQTTGNARIVQELPQLLDARSAPLIADQAVLQLLPKTYILTCEHDVLRDDGIMYAKRLESAGVEVTLDHFEDGFHGCMIFTSWPTNFSVGIRTRNSYIKWLDQNL

SEQ ID NO: 59839 - DNA, 828 bp, Artificial Sequence
  derived and/or modified sequence
atggcagaggagttaaacgctgtgattgtgtcgatcgagtatcgactggtgcccaaggtctacttccctgaacagatccatgatgttgttcgagctactaaatacttcctgaagcctgaagttcttcagaaatatatggtagaccctgggcgtatctgtatctcgggcgacagtgcaggcggaaaccttgcagctgcgttaggccagcaattcactcaggatgcctcactgaaaaacaagctgaagttacaggccttgatatacccagtcttgcaggctcttgattttaatactccctcgtaccagcagaatgtgaatacacccatcctaccaagatacgtgatggttaaatattgggttgactacttcaagggcaactacgactttgtccaggccatgattgtcaacaaccacacgtccctggatgttgaggaagccgccgccgtccgggcaagacttaactggacctcattactccccgccagttttaccaaaaactataagcccgttgtgcagaccacaggcaacgccaggatcgtgcaggaattacctcaactgttggacgcccggagtgcgcctctcatagccgaccaggcagtattgcagcttcttcctaagacctatattctcacatgtgaacatgacgtattgagagacgacggcattatgtacgcaaaaaggctggaatcagcaggcgtagaagtaacactggatcatttcgaagacggttttcacggctgcatgatctttaccagctggccaacaaatttctctgttggtatcagaactcgaaatagctatattaagtggctcgaccagaacctgtag

SEQ ID NO: 59840 - DNA, 828 bp, Artificial Sequence
  derived and/or modified sequence
atggccgaggagctgaatgctgtgattgtgtccattgagtaccgcctggtgcccaaggtgtacttccctgagcagatccatgatgtggtgcgggccaccaagtacttcctgaagccagaggtgctgcagaagtacatggtggaccccggccgcatctgcatcagcggggacagcgctgggggcaacctggccgccgccctgggccagcagttcacccaggatgccagcctgaagaacaagctgaagctgcaggccctgatctaccctgtgctgcaggccctggacttcaacacccccagctaccagcagaatgtgaacacccccatcctgcccaggtatgtgatggtgaagtactgggtggactacttcaagggcaactatgactttgtgcaggccatgattgtgaacaaccacaccagcctggatgtggaggaggccgctgctgtgcgggcccggctgaactggaccagcctgctgcctgccagcttcaccaagaactacaagcctgtggtgcagaccactggaaatgccagaattgtgcaggagctgccccagctgctggatgcccggagcgcccccctgattgctgaccaggccgtgctgcagctgctgcccaagacctacatcctgacctgtgaacatgatgtgctgagagatgatggcatcatgtatgccaagaggctggagagcgctggggtggaggtgaccctggaccactttgaagatggcttccacggctgcatgatcttcacctcctggcccaccaacttctctgtgggcatccgcaccaggaacagctacatcaagtggctggaccagaacctgtag

SEQ ID NO: 59841 - DNA, 828 bp, Artificial Sequence
  derived and/or modified sequence
atggccgaggagctgaacgccgtgatcgtgagcatcgagtaccggctggtaccgaaagtctattttcccgagcagatacacgacgtagtgcgcgctaccaagtatttcttaaaaccagaagtactacagaagtacatggtggatccaggccgcatctgtatctcaggcgactctgctggcggcaacctcgcggccgccctaggccagcagtttacccaggatgccagcctgaaaaataagcttaagctgcaagcgctcatttaccctgtccttcaagccctggacttcaacactccttcatatcagcagaatgtgaatacccctattttgcctcgctacgtcatggtcaagtattgggtcgattacttcaagggcaattatgacttcgtgcaagccatgatcgtgaataatcacacatctctggacgtcgaagaagcggcagctgtgcgtgccaggctcaattggacctctttgcttcctgcctcttttaccaaaaattacaaaccagtggtgcaaaccacgggaaatgcccgcatcgtgcaggagttacctcaactgttggacgcaaggtccgctcccctgattgcagaccaggccgtattgcagcttcttcccaaaacttacatcctcacctgtgagcacgatgtgctcagggatgatggcataatgtatgccaaacgcttggagagtgccggggttgaagtgacactggaccattttgaagacggatttcatggctgcatgatttttacttcctggcctaccaatttctccgttggtattaggacccgcaactcttacatcaaatggctagatcagaatctctag

SEQ ID NO: 59842 - DNA, 828 bp, Artificial Sequence
  derived and/or modified sequence
atggccgaagaactgaacgcggtgatcgtcagcatcgagtaccgcctggtccctaaggtctacttccctgaacagatacatgatgttgttagggccaccaagtatttcctgaagcccgaggtgttacagaaatatatggtggatccgggaaggatttgcataagcggcgatagcgccggaggaaatcttgccgcagcactgggccagcagtttacgcaagatgcatctctaaaaaataagctcaaactgcaagcgctgatttaccccgtgctacaggcactggacttcaataccccatcgtaccagcaaaacgtgaacactcccatcctgcctcgctatgtgatggtgaaatactgggtggattatttcaaaggcaattatgattttgtccaggccatgatcgtcaacaaccatacctcactcgatgtcgaggaagcagctgcagtgcgcgcacggctcaattggacaagtctgttgccagcatcttttaccaagaattataaacctgtagtgcagacaactggaaatgcccgaatagtgcaggaactgcctcaactgctggatgctagatccgccccactaattgctgaccaggcagtgcttcagctactaccaaagacctatatacttacctgcgaacacgatgtgctgcgggatgatgggattatgtacgcaaaaaggctggaatctgctggtgtggaggtaaccctggatcattttgaggacggcttccacggctgcatgatcttcacctcatggccaacaaacttttctgtaggcataagaacacggaactcctacataaaatggctagatcagaacctgtag

SEQ ID NO: 59843 - DNA, 828 bp, Artificial Sequence
  derived and/or modified sequence
atggccgaggagctgaacgccgtgatcgtgagcatcgagtacagactggtgcccaaggtgtacttccccgagcagatccacgacgtggtgagagccaccaagtacttcctgaagcccgaggtgctgcagaagtacatggtggaccccggcagaatctgcatcagcggcgacagcgccggcggcaacctggccgccgccctgggccagcagttcacccaggacgccagcctgaagaacaagctgaagctgcaggccctgatctaccccgtgctgcaggccctggacttcaacacccccagctaccagcagaacgtgaacacccccatcctgcccagatacgtgatggtgaagtactgggtggactacttcaagggcaactacgacttcgtgcaggccatgatcgtgaacaaccacaccagcctggacgtggaggaggccgccgccgtgagagccagactgaactggaccagcctgctgcccgccagcttcaccaagaactacaagcccgtggtgcagaccaccggcaacgccagaatcgtgcaggagctgccccagctgctggacgccagaagcgcccccctgatcgccgaccaggccgtgctgcagctgctgcccaagacctacatcctgacctgcgagcacgacgtgctgagagacgacggcatcatgtacgccaagagactggagagcgccggcgtggaggtgaccctggaccacttcgaggacggcttccacggctgcatgatcttcaccagctggcccaccaacttcagcgtgggcatcagaaccagaaacagctacatcaagtggctggaccagaacctgtag

SEQ ID NO: 59844 - protein, 140 aa, Artificial Sequence
  derived and/or modified sequence
MESRGPLATSRLLLLLLLLLLRHTRQGWALRPVLPTQSAHDPPAVHLSNGPGQEPIAVMTFDLTKITKTSSSFEVRTWDPEGVIFYGDTNPKDDWFMLGLRDGRPEIQLHNHWAQLTVGAGPRLDDGRWHQEKTLPPLFA

SEQ ID NO: 59845 - protein, 384 aa, Artificial Sequence
  derived and/or modified sequence
MESRGPLATSRLLLLLLLLLLRHTRQGWALRPVLPTQSAHDPPAVHLSNGPGQEPIAVMTFDLTKITKTSSSFEVRTWDPEGVIFYGDTNPKDDWFMLGLRDGRPEIQLHNHWAQLTVGAGPRLDDGRWHQVEVKMEGDSVLLEVDGEEVLRLRQVSGPLTSKRHPIMRIALGGLLFPASNLRLPAEISASAPTSLRSCDVESNPGIFLPPGTQAEFNLRDIPQPHAEPWAFSLDLGLKQAAGSGHLLALGTPENPSWLSLHLQDQKVVLSSGSGPGLDLPLVLGLPLQLKLSMSRVVLSQGSKMKALALPPLGLAPLLNLWAKPQGRLFLGALPGEDSSTSFCLNGLWAQGQRLDVDQALNRSHEIWTHSCPQSPGNGTDASH

SEQ ID NO: 59846 - DNA, 1155 bp, Artificial Sequence
  derived and/or modified sequence
atggagagcagaggccccctggccaccagcagactgctgctgctgctgctgctgctgctgctgagacacaccagacagggctgggccctgagacccgtgctgcccacccagagcgcccacgacccccccgccgtgcacctgagcaacggccccggccaggagcccatcgccgtgatgaccttcgacctgaccaagatcaccaagaccagcagcagcttcgaggtgagaacctgggaccccgagggcgtgatcttctacggcgacaccaaccccaaggacgactggttcatgctgggcctgagagacggcagacccgagatccagctgcacaaccactgggcccagctgaccgtgggcgccggccccagactggacgacggcagatggcaccaggtggaggtgaagatggagggcgacagcgtgctgctggaggtggacggcgaggaggtgctgagactgagacaggtgagcggccccctgaccagcaagagacaccccatcatgagaatcgccctgggcggcctgctgttccccgccagcaacctgagactgcccgccgagatcagcgccagcgcccccaccagcctgagaagctgcgacgtggagagcaaccccggcatcttcctgccccccggcacccaggccgagttcaacctgagagacatcccccagccccacgccgagccctgggccttcagcctggacctgggcctgaagcaggccgccggcagcggccacctgctggccctgggcacccccgagaaccccagctggctgagcctgcacctgcaggaccagaaggtggtgctgagcagcggcagcggccccggcctggacctgcccctggtgctgggcctgcccctgcagctgaagctgagcatgagcagagtggtgctgagccagggcagcaagatgaaggccctggccctgccccccctgggcctggcccccctgctgaacctgtgggccaagccccagggcagactgttcctgggcgccctgcccggcgaggacagcagcaccagcttctgcctgaacggcctgtgggcccagggccagagactggacgtggaccaggccctgaacagaagccacgagatctggacccacagctgcccccagagccccggcaacggcaccgacgccagccactag

SEQ ID NO: 59847 - DNA, 1155 bp, Artificial Sequence
  derived and/or modified sequence
atggagtcacggggcccgttggccaccagtcgactacttctgctcctactgctactgttacttagacacacccgacagggctgggctctgcggcctgtgctgccaactcagtcagcccatgatccacccgccgttcatctcagtaacggacccggacaggagcctatagccgtcatgacatttgatctgacaaagatcaccaaaaccagttcttcctttgaagttagaacttgggaccctgagggagtgattttctacggcgatacgaatcctaaggacgactggttcatgctgggccttcgggatggcaggcctgaaatccaactccacaatcactgggcacagctgactgtcggagcaggcccacgcttagatgacggtcgctggcatcaggtggaggtgaagatggagggggattcggtcttgttggaagttgatggggaagaggtccttagattgaggcaggttagcggaccactaacttcgaagcgacaccccataatgaggatcgctctcggaggccttcttttcccagcttctaacttacggctccctgccgagatctccgcaagtgcccctacctcattaagaagctgtgatgtagagtccaatccagggatttttctgccacctggtactcaggccgagtttaatctccgcgatatccctcagcctcacgccgagccttgggccttttctctcgacttgggcctgaagcaagccgcagggagcggacatctgttggccctgggtacccctgagaatccctcatggctttcacttcacctgcaggaccagaaggtggtactgtcaagcgggagcggaccagggttagatctgcccttagttctcggccttccgctccaactaaagctgtccatgagtcgtgttgttctctcccaagggagtaagatgaaggccttagccctgccccctctcggccttgcccctctgctgaatctgtgggctaaacctcagggacgtttattcttgggcgccctccccggcgaagactcttcaacttcattctgtctgaatgggctttgggcccaggggcagcgattggatgtggaccaggctctcaaccgatcccacgagatttggactcactcatgtccacagtctcctggtaatggaaccgacgccagccactag

SEQ ID NO: 59848 - DNA, 1155 bp, Artificial Sequence
  derived and/or modified sequence
atggagagccggggccccctggccaccagccggctgctgctgctgctgctgctgctgctgctgcggcacacccggcagggctgggccctgcggcctgtgctgcccacccagagcgcccatgaccccccagctgtgcacctgagcaatggacctggccaggagcccatcgctgtgatgacctttgacctgaccaagatcaccaagaccagcagcagctttgaggtgaggacctgggaccctgagggcgtcatcttctacggggacaccaaccccaaggatgactggttcatgctgggcctgagagatggccggcctgagatccagctgcacaaccactgggcccagctgactgtgggcgccggcccccggctggatgatggccgctggcaccaggtggaggtgaagatggagggggacagcgtgctgctggaggtggatggagaggaggtgctgcggctgcggcaggtgtctggccccctgaccagcaagaggcaccccatcatgagaattgccctgggcggcctgctcttccctgccagcaacctgcggctgcctgctgagatcagcgccagcgcccccaccagcctgcggagctgtgatgtggagagcaaccctggcatcttcctgcccccaggcacccaggccgagttcaacctgcgggacatcccccagccccatgctgagccctgggccttcagcctggacctgggcctgaagcaggccgccggcagcggccacctgctggccctgggcaccccagagaaccccagctggctgagcctgcacctgcaggaccagaaggtggtgctgagcagcggcagcggccctggcctggacctgcccctggtgctgggcctgcccctgcagctgaagctgtccatgagccgggtggtgctgagccagggcagcaagatgaaggccctggccctgccccccctgggcctggcccccctgctgaacctgtgggccaagccccagggccgcctcttcctgggcgccctgcctggagaggacagcagcaccagcttctgcctgaatggcctgtgggcccagggccagaggctggatgtggaccaggccctgaacagaagccatgagatctggacccacagctgcccccagagccctggaaatggaacagatgccagccactag

SEQ ID NO: 59849 - DNA, 1155 bp, Artificial Sequence
  derived and/or modified sequence
atggagagccggggccccctggccaccagccggctgctgctgctgcttctgctccttctgttgcgacacactaggcagggatgggctctgcgccctgtgctaccaacacagtccgcccacgatcctccagcagtacacctgagtaatggccccggtcaggagccgatagccgtgatgactttcgatttgactaagattaccaagacctcatcttccttcgaggtccgcacttgggatcctgagggcgttatcttttacggggatacaaaccctaaggacgattggttcatgttaggactgagagatggcagacccgaaatccagctacataaccactgggcccaattgacagtgggcgctggcccgcgacttgacgatggacggtggcaccaggtggaagtgaagatggagggggatagtgtcctgctggaggtggatggggaagaagtgctccgactcaggcaggtgagcggtccactcacctcaaagaggcaccccatcatgcgaattgcgctcggcggcctgctcttcccagcgtctaatcttaggctgcctgctgaaatatcagcatccgctccaaccagtttaagaagttgtgacgttgagtctaatccgggaatcttcctccctcctgggacacaggctgagttcaaccttcgcgatattcctcaaccccatgctgaaccgtgggcgttttctctggacttgggccttaaacaagcagccggatcaggtcatcttttggcgctcggcacccccgagaatccctcttggctctcgttgcatttacaagatcagaaggtcgtcctgtcaagtggctccggcccaggcctggacctgcctttagtgctgggcttgcctctccagctcaagctgagcatgtctcgggtggtcctgtcacaggggtcaaagatgaaggctctggcccttcctcccttgggccttgcgcctctcctcaacctttgggctaaaccacagggccggctgtttctaggggcacttcctggcgaggatagttctaccagcttctgtttaaacggactgtgggcacaaggtcagagactggacgtggaccaagctctcaacaggagccacgagatctggactcactcgtgccctcaatctcctggcaatggaaccgatgcctctcactag

SEQ ID NO: 59850 - DNA, 1155 bp, Artificial Sequence
  derived and/or modified sequence
atggaatcaaggggccctcttgccacatctagattactgctgctgctattgttactgttacttcgacacacccgacaggggtgggctctgcgccctgtgctcccaacacagtccgcccatgatcctcctgcagtacacctgagcaatggcccagggcaggaacctattgcggtcatgacattcgacctaactaagatcacgaagaccagcagctcgttcgaagtgcggacctgggatcctgagggcgtgatcttttacggggacactaatcctaaggacgactggttcatgctgggtttgagggacggtagacccgaaatacagctgcacaaccactgggctcaattaacggtgggggctggtccgcgtctggacgatggcagatggcaccaggtggaagtgaaaatggaaggagactccgttcttcttgaggtcgacggggaagaagtgttgcggctgcggcaggtgtcaggtcctctgacaagtaaacgccatccaattatgcgcatcgctctggggggactgctgtttcctgccagtaacctccgtcttcctgcagaaatctcagccagcgcaccaacaagtctgcggtcttgcgatgttgagagcaatccaggcatttttctgcctcccggaacccaggccgagttcaacctgcgggacatcccccaaccccatgccgagccgtgggcattcagcctcgacttggggctcaagcaagctgccggtagtggccacctcctcgcactcggcactcccgaaaatcccagttggctcagtctccatttacaggatcagaaagtggtcttgtcaagcgggtcaggacccggactggacctcccacttgtgctggggctgccactgcagctcaaactttccatgtcccgggtcgttctttcccaggggtcaaaaatgaaagctcttgcccttcctcctctgggactagctcctctcttgaatctgtgggccaagccccaaggaaggctgtttcttggggctctgccgggagaggactccagcacatccttttgcctgaacgggctctgggcgcagggccaacggctcgacgtggaccaggcacttaatcgcagccacgaaatttggacacattcttgcccccagagtcctggtaatggcactgacgccagccactag

SEQ ID NO: 59851 - DNA, 1196 bp, Artificial Sequence
  derived and/or modified sequence
ccgagtggacagtggctgattatggagagcagaggcccactggctacctcgcgcctgctgctgttgctgctgttgctactactgcgtcacacccgccagggatgggccctgagacctgttctccccacccagagtgcccacgaccctccggctgtccacctcagcaatggcccaggacaagagcctatcgctgtcatgacctttgacctcaccaagatcacaaaaacctcctcctcctttgaggttcgaacctgggacccagagggagtgattttttatggggataccaaccctaaggatgactggtttatgctgggacttcgagacggcaggcctgagatccaactgcacaatcactgggcccagcttacggtgggtgctggaccacggctggatgatgggagatggcaccaggtggaagtcaagatggagggggactctgtgctgctggaggtggatggggaggaggtgctgcgcctgagacaggtctctgggcccctgaccagcaaacgccatcccatcatgaggattgcgcttggggggctgctcttccccgcttccaaccttcggttgccggccgagatctcagcatctgcccccactagcctcagaagctgtgatgtagaatcaaatcccgggatatttctccctccagggactcaggcagaattcaatctccgagacattccccagcctcatgcagagccctgggccttctctttggacctgggactcaagcaggcagcaggctcaggccacctccttgctcttgggacaccagagaacccatcttggctcagtctccacctccaagatcaaaaggtggtgttgtcttctgggtcggggccagggctggatctgcccctggtcttgggactccctcttcagctgaagctgagtatgtccagggtggtcttgagccaagggtcgaagatgaaggcccttgccctgcctcccttaggcctggctcccctccttaacctctgggccaagcctcaagggcgtctcttcctgggggctttaccaggagaagactcttccacctctttttgcctgaatggcctttgggcacaaggtcagaggctggatgtggaccaggccctgaacagaagccatgagatctggactcacagctgcccccagagcccaggcaatggcactgacgcttcccattaaagctccacctaagaaccccc

SEQ ID NO: 59852 - protein, 235 aa, Artificial Sequence
  derived and/or modified sequence
MTFDLTKITKTSSSFEVRTWDPEGVIFYGDTNPKDDWFMLGLRDGRPEIQLHNHWAQLTVGAGPRLDDGRWHQVEVKMEGDSVLLEVDGEEVLRLRQVSGPLTSKRHPIMRIALGGLLFPASNLRLPLVPALDGCLRRDSWLDKQAEISASAPTSLRSCDVESNPGIFLPPGTQAEFNLRDIPQPHAEPWAFSLDLGLKQAAGSGHLLALGTPENPSWLSLHLQDQEKTLPPLFA

SEQ ID NO: 59853 - protein, 293 aa, Artificial Sequence
  derived and/or modified sequence
MESRGPLATSRLLLLLLLLLLRHTRQGWALRPVLPTQSAHDPPAVHLSNGPGQEPIAVMTFDLTKITKTSSSFEVRTWDPEGVIFYGDTNPKDDWFMLGLRDGRPEIQLHNHWAQLTVGAGPRLDDGRWHQVEVKMEGDSVLLEVDGEEVLRLRQVSGPLTSKRHPIMRIALGGLLFPASNLRLPLVPALDGCLRRDSWLDKQAEISASAPTSLRSCDVESNPGIFLPPGTQAEFNLRDIPQPHAEPWAFSLDLGLKQAAGSGHLLALGTPENPSWLSLHLQDQEKTLPPLFA

SEQ ID NO: 59854 - protein, 239 aa, Artificial Sequence
  derived and/or modified sequence
MESRGPLATSRLLLLLLLLLLRHTRQGWALRPVLPTQSAHDPPAVHLSNGPGQEPIAVMTFDLTKITKTSSSFEVRTWDPEGVIFYGDTNPKDDWFMLGLRDGRPEIQLHNHWAQLTVGAGPRLDDGRWHQLVPALDGCLRRDSWLDKQAEISASAPTSLRSCDVESNPGIFLPPGTQAEFNLRDIPQPHAEPWAFSLDLGLKQAAGSGHLLALGTPENPSWLSLHLQDQEKTLPPLFA

SEQ ID NO: 59855 - DNA, 882 bp, Artificial Sequence
  derived and/or modified sequence
atggagagcagaggccccctggccaccagcagactgctgctgctgctgctgctgctgctgctgagacacaccagacagggctgggccctgagacccgtgctgcccacccagagcgcccacgacccccccgccgtgcacctgagcaacggccccggccaggagcccatcgccgtgatgaccttcgacctgaccaagatcaccaagaccagcagcagcttcgaggtgagaacctgggaccccgagggcgtgatcttctacggcgacaccaaccccaaggacgactggttcatgctgggcctgagagacggcagacccgagatccagctgcacaaccactgggcccagctgaccgtgggcgccggccccagactggacgacggcagatggcaccaggtggaggtgaagatggagggcgacagcgtgctgctggaggtggacggcgaggaggtgctgagactgagacaggtgagcggccccctgaccagcaagagacaccccatcatgagaatcgccctgggcggcctgctgttccccgccagcaacctgagactgcccctggtgcccgccctggacggctgcctgagaagagacagctggctggacaagcaggccgagatcagcgccagcgcccccaccagcctgagaagctgcgacgtggagagcaaccccggcatcttcctgccccccggcacccaggccgagttcaacctgagagacatcccccagccccacgccgagccctgggccttcagcctggacctgggcctgaagcaggccgccggcagcggccacctgctggccctgggcacccccgagaaccccagctggctgagcctgcacctgcaggaccaggagaagaccctgccccccctgttcgcctag

SEQ ID NO: 59856 - DNA, 720 bp, Artificial Sequence
  derived and/or modified sequence
atggagagcagaggccccctggccaccagcagactgctgctgctgctgctgctgctgctgctgagacacaccagacagggctgggccctgagacccgtgctgcccacccagagcgcccacgacccccccgccgtgcacctgagcaacggccccggccaggagcccatcgccgtgatgaccttcgacctgaccaagatcaccaagaccagcagcagcttcgaggtgagaacctgggaccccgagggcgtgatcttctacggcgacaccaaccccaaggacgactggttcatgctgggcctgagagacggcagacccgagatccagctgcacaaccactgggcccagctgaccgtgggcgccggccccagactggacgacggcagatggcaccagctggtgcccgccctggacggctgcctgagaagagacagctggctggacaagcaggccgagatcagcgccagcgcccccaccagcctgagaagctgcgacgtggagagcaaccccggcatcttcctgccccccggcacccaggccgagttcaacctgagagacatcccccagccccacgccgagccctgggccttcagcctggacctgggcctgaagcaggccgccggcagcggccacctgctggccctgggcacccccgagaaccccagctggctgagcctgcacctgcaggaccaggagaagaccctgccccccctgttcgcctag

SEQ ID NO: 59857 - DNA, 882 bp, Artificial Sequence
  derived and/or modified sequence
atggaaagccggggcccgctggccacgagtcggctgctgcttctcctacttctgctcctgttgagacatacaagacagggatgggccctccggccggtgctgcccacccaatcggcccacgatcctcccgccgtgcatcttagtaatggaccagggcaggaacccattgccgtgatgacgttcgacctgaccaagatcacgaagaccagttcatcttttgaggttaggacctgggatccagagggtgtgattttttatggtgacacaaatcctaaggacgactggttcatgttgggactgcgggacgggcggccagaaatacagttgcataaccactgggcgcagctgacggtgggagcgggtccaagactggacgacggccgatggcatcaggttgaggtgaaaatggaaggggactctgtcttattggaggttgacggggaggaagtcttgcggctccgccaggtctctggtcctctcacctcaaaacgccatcctatcatgaggattgcgctggggggcttgctgttcccggcttctaacttgcggttgcctctggtccctgcactcgacggatgtttgcggcgtgactcttggctagataaacaagcagagatctctgcatcagctccaactagtctgcgaagctgcgacgtagaatcgaatcccggaatctttttacctccgggaacgcaggcagagtttaaccttcgggatataccccagcctcacgccgaaccatgggctttctcacttgacttaggactcaaacaggcggcgggaagcggtcatcttctggctttgggtacccctgaaaacccgagctggttgtccctgcatctgcaggaccaggaaaagaccttgccaccactatttgcttag

SEQ ID NO: 59858 - DNA, 720 bp, Artificial Sequence
  derived and/or modified sequence
atggaatctcggggccctcttgctacgtccagactgctcctcctcctgctcctgctgctgctgagacacacacgccaggggtgggctctccgcccagtcttgcctacccaaagcgcgcacgatccgcctgccgtgcacctgtccaatggaccaggccaggaacctatagctgtcatgacattcgatctgacaaagattactaagaccagtagctctttcgaggtgagaacatgggatcccgaaggcgttattttctatggagacacaaatcctaaagatgattggtttatgttaggactgagggacgggaggcctgaaatccagctgcacaaccactgggcccagctgaccgtgggggcggggccgaggctcgacgatggacgctggcatcaactggttccagccctggacggttgcctgcgaagggactcatggcttgataagcaggccgagatctccgcaagcgcaccgacctctttgaggagttgcgatgtggaatccaaccctggaatctttctccctcctgggacccaggcggaatttaacctacgagatattcctcagccacacgcagaaccctgggccttctctctagacctaggacttaagcaggctgctgggtccggccacctgctcgccctggggactccagaaaatccatcgtggctgtcccttcacttacaggaccaggagaagacactgccacctctttttgcatag

SEQ ID NO: 59859 - DNA, 882 bp, Artificial Sequence
  derived and/or modified sequence
atggagagccggggccccctggccaccagccggctgctgctgctgctgctgctgctgctgctgcggcacacccggcagggctgggccctgcggcctgtgctgcccacccagagcgcccatgaccccccagctgtgcacctgagcaatggacctggccaggagcccatcgctgtgatgacctttgacctgaccaagatcaccaagaccagcagcagctttgaggtgaggacctgggaccctgagggcgtcatcttctacggggacaccaaccccaaggatgactggttcatgctgggcctgagagatggccggcctgagatccagctgcacaaccactgggcccagctgactgtgggcgccggcccccggctggatgatggccgctggcaccaggtggaggtgaagatggagggggacagcgtgctgctggaggtggatggagaggaggtgctgcggctgcggcaggtgtctggccccctgaccagcaagaggcaccccatcatgagaattgccctgggcggcctgctcttccctgccagcaacctgcggctgcccctggtgcctgccctggatggctgcctgcggcgggacagctggctggacaagcaggccgagatcagcgccagcgcccccaccagcctgcggagctgtgatgtggagagcaaccctggcatcttcctgcccccaggcacccaggccgagttcaacctgcgggacatcccccagccccatgctgagccctgggccttcagcctggacctgggcctgaagcaggccgccggcagcggccacctgctggccctgggcaccccagagaaccccagctggctgagcctgcacctgcaggaccaggagaagaccctgccccccctgtttgcctag

SEQ ID NO: 59860 - DNA, 720 bp, Artificial Sequence
  derived and/or modified sequence
atggagagccggggccccctggccaccagccggctgctgctgctgctgctgctgctgctgctgcggcacacccggcagggctgggccctgcggcctgtgctgcccacccagagcgcccatgaccccccagctgtgcacctgagcaatggacctggccaggagcccatcgctgtgatgacctttgacctgaccaagatcaccaagaccagcagcagctttgaggtgaggacctgggaccctgagggcgtcatcttctacggggacaccaaccccaaggatgactggttcatgctgggcctgagagatggccggcctgagatccagctgcacaaccactgggcccagctgactgtgggcgccggcccccggctggatgatggccgctggcaccagctggtgcctgccctggatggctgcctgcggcgggacagctggctggacaagcaggccgagatcagcgccagcgcccccaccagcctgcggagctgtgatgtggagagcaaccctggcatcttcctgcccccaggcacccaggccgagttcaacctgcgggacatcccccagccccatgctgagccctgggccttcagcctggacctgggcctgaagcaggccgccggcagcggccacctgctggccctgggcaccccagagaaccccagctggctgagcctgcacctgcaggaccaggagaagaccctgccccccctgtttgcctag

SEQ ID NO: 59861 - DNA, 882 bp, Artificial Sequence
  derived and/or modified sequence
atggagagccggggccccctggccaccagccggctgctgctgctgctgctgctactccttctgcgccacaccaggcagggctgggccctgcggccagtgctgcccacacaatccgcccacgacccacctgctgtccatctcagcaacggacctggccaggagcctatcgcggtcatgacatttgacttgactaagattactaagacaagctcgtcctttgaggtacgtacatgggatcccgagggcgttatcttctacggagatactaatcctaaggacgattggttcatgctcggcctgcgggacggtcgccctgaaatccagttacataatcattgggcgcaactcacagttggagccggcccgaggctcgacgatgggcgctggcaccaagtcgaggtgaagatggagggagactctgtgctgctggaggttgacggcgaggaggtgctccgcctcagacaggtaagtggcccactcacatccaagaggcatcctatcatgaggattgcactgggcggtctgttgttccccgcctcgaacctgaggttaccgctggtgccggcgcttgatggctgccttcgcagggattcctggctggacaagcaagccgaaattagtgcgagcgctcctacttcactgaggtcttgtgatgtagagtcgaaccccggcatatttttgccacccggcacacaagcggaatttaacttgcgagatatcccacagcctcacgccgagccatgggctttctcactggacctcgggctgaagcaggcggcaggctcagggcatctcttggctctcgggaccccagaaaacccaagctggttgagtctgcacctgcaggaccaggagaagactctgcctcccctcttcgcctag

SEQ ID NO: 59862 - DNA, 720 bp, Artificial Sequence
  derived and/or modified sequence
atggagagccggggccccctggccaccagccggctgctgctgctgctgctgctcctgctgctccggcataccagacaggggtgggccctgagaccagtattgcccactcaaagcgcacatgatcccccagctgtccatctgagcaacggccctgggcaggaaccaatcgccgtgatgacttttgacctgaccaagattacgaagacctcctccagtttcgaggtccgcacatgggacccagagggcgtcatcttttatggtgatacaaatcccaaggacgattggttcatgctaggtctgagggatggacgcccagaaatccagttgcacaaccattgggcacagctgaccgtgggcgcaggacctcgcttagatgatggacgctggcaccaacttgtgcctgcactggacggatgcctgcgcagggatagctggctggacaagcaggccgagatctctgcgtccgctccgacttcacttaggtcatgcgatgtcgaaagtaaccccggaatctttctcccccccgggacacaggctgaattcaacttgcgcgatatcccacagccccacgcggagccgtgggcattttcactggacctgggcttgaagcaggcggcaggctctggccatctgctcgctctcgggactccagagaatcccagttggctgagcctccacctccaagatcaagagaagaccctgcctcccctgttcgcatag

SEQ ID NO: 59863 - DNA, 882 bp, Artificial Sequence
  derived and/or modified sequence
atggaatcgagaggccctctcgctacgtctcgactcttgttactgctgcttctgctgctgttgcggcatacccggcaagggtgggccctgcgcccagtgctgccaactcagagcgcccatgacccacctgccgtccatctctccaacgggcctggccaggaacctatcgcagttatgaccttcgacttaaccaaaattactaaaacctcctcatcttttgaagtgagaacctgggatccagagggagtcatcttctacggagataccaatcccaaagacgactggttcatgttaggcctgcgcgacggcagaccagagatccagctccacaatcactgggctcaactgactgtgggggctggcccacgtcttgatgatggaagatggcatcaggtagaggttaagatggaaggggactctgtgctgctggaggttgacggcgaagaggtgttgcggctacgtcaggtatccgggccacttacttcaaaacgccacccaattatgaggatcgctctaggcggactgctgttcccagcaagcaatctgcgcttacccttggtccctgccctcgacgggtgcctgagaagggactcttggttggataaacaggctgaaatctcagcgagtgccccaacatcactcaggtcctgcgacgtcgaatcgaaccccggtatatttctgcccccaggcacacaggcagaattcaacctcagagatattccacagccccatgctgagccttgggcattcagcctcgacctcggcctcaagcaagcggcaggatccggccacctacttgccttaggcacgccagaaaatccttcttggctctcactacatctgcaggaccaggagaaaacccttccacctctttttgcgtag

SEQ ID NO: 59864 - DNA, 720 bp, Artificial Sequence
  derived and/or modified sequence
atggaatcccggggtcccttggcaacgtctagacttttgctgctgctcttgctgctgcttcttaggcacactcggcagggttgggcgcttcgccctgttttacctacgcagtccgcacacgaccccccagctgtgcacctcagtaatggccctggtcaggagcccatagctgtgatgacctttgatctgaccaagattactaaaaccagctctagctttgaggtccgaacttgggatcctgaaggcgtgattttttacggcgacaccaaccctaaggacgactggttcatgttgggcctacgcgacggcagaccggagatccagttgcacaaccattgggctcaactcaccgttggggcagggcctcgccttgatgatggcagatggcatcagctagtacccgcactggatggctgcttgaggcgggactcctggctcgacaaacaggccgagattagtgcttccgccccaacgtccttgaggagctgtgacgtcgagtccaaccccggtatcttcctccccccaggaacgcaggctgaattcaacctacgcgacatcccacaacctcacgcagaaccgtgggccttctcccttgacctggggttgaagcaggccgcaggcagtggccatcttctggccctcggcacccctgagaatcccagttggctctctctccatttgcaggaccaggaaaaaaccttacccccattattcgcatag

SEQ ID NO: 59865 - DNA, 1038 bp, Artificial Sequence
  derived and/or modified sequence
gtgactgggctcctgggtagagttcaaggttggagtgaagcggcttccttgcggttgtgtgggtgtcccaacctgggtcgagataccccgcggttcaaaggctcccccgcagtgctttttaaattgacatatgcagtgataacctgctttagcctcaggctcactcacccgcccagaccctggagtgcccacgaccctccggctgtccacctcagcaatggcccaggacaagagcctatcgctgtcatgacctttgacctcaccaagatcacaaaaacctcctcctcctttgaggttcgaacctgggacccagagggagtgattttttatggggataccaaccctaaggatgactggtttatgctgggacttcgagacggcaggcctgagatccaactgcacaatcactgggcccagcttacggtgggtgctggaccacggctggatgatgggagatggcaccaggtggaagtcaagatggagggggactctgtgctgctggaggtggatggggaggaggtgctgcgcctgagacaggtctctgggcccctgaccagcaaacgccatcccatcatgaggattgcgcttggggggctgctcttccccgcttccaaccttcggttgccgctggttcctgccctggatggctgcctgcgccgggattcctggctggacaaacaggccgagatctcagcatctgcccccactagcctcagaagctgtgatgtagaatcaaatcccgggatatttctccctccagggactcaggcagaattcaatctccgagacattccccagcctcatgcagagccctgggccttctctttggacctgggactcaagcaggcagcaggctcaggccacctccttgctcttgggacaccagagaacccatcttggctcagtctccacctccaagatcaagagaagactcttccacctctttttgcctgaatggcctttgggcacaaggtcagaggctggatgtggaccaggccctgaacagaagccatgagatctggactcacagctgccccc

SEQ ID NO: 59866 - DNA, 1069 bp, Artificial Sequence
  derived and/or modified sequence
aagagttgtctgagccgccgagtggacagtggctgattatggagagcagaggcccactggctacctcgcgcctgctgctgttgctgctgttgctactactgcgtcacacccgccagggatgggccctgagacctgttctccccacccagagtgcccacgaccctccggctgtccacctcagcaatggcccaggacaagagcctatcgctgtcatgacctttgacctcaccaagatcacaaaaacctcctcctcctttgaggttcgaacctgggacccagagggagtgattttttatggggataccaaccctaaggatgactggtttatgctgggacttcgagacggcaggcctgagatccaactgcacaatcactgggcccagcttacggtgggtgctggaccacggctggatgatgggagatggcaccaggtggaagtcaagatggagggggactctgtgctgctggaggtggatggggaggaggtgctgcgcctgagacaggtctctgggcccctgaccagcaaacgccatcccatcatgaggattgcgcttggggggctgctcttccccgcttccaaccttcggttgccgctggttcctgccctggatggctgcctgcgccgggattcctggctggacaaacaggccgagatctcagcatctgcccccactagcctcagaagctgtgatgtagaatcaaatcccgggatatttctccctccagggactcaggcagaattcaatctccgagacattccccagcctcatgcagagccctgggccttctctttggacctgggactcaagcaggcagcaggctcaggccacctccttgctcttgggacaccagagaacccatcttggctcagtctccacctccaagatcaagagaagactcttccacctctttttgcctgaatggcctttgggcacaaggtcagaggctggatgtggaccaggccctgaacagaagccatgagatctggactcacagctgcccccagagcccaggcaatggcactgacgcttcccattaaagctccacctaagaaccccctttgaaagtt

SEQ ID NO: 59867 - DNA, 907 bp, Artificial Sequence
  derived and/or modified sequence
aagagttgtctgagccgccgagtggacagtggctgattatggagagcagaggcccactggctacctcgcgcctgctgctgttgctgctgttgctactactgcgtcacacccgccagggatgggccctgagacctgttctccccacccagagtgcccacgaccctccggctgtccacctcagcaatggcccaggacaagagcctatcgctgtcatgacctttgacctcaccaagatcacaaaaacctcctcctcctttgaggttcgaacctgggacccagagggagtgattttttatggggataccaaccctaaggatgactggtttatgctgggacttcgagacggcaggcctgagatccaactgcacaatcactgggcccagcttacggtgggtgctggaccacggctggatgatgggagatggcaccagctggttcctgccctggatggctgcctgcgccgggattcctggctggacaaacaggccgagatctcagcatctgcccccactagcctcagaagctgtgatgtagaatcaaatcccgggatatttctccctccagggactcaggcagaattcaatctccgagacattccccagcctcatgcagagccctgggccttctctttggacctgggactcaagcaggcagcaggctcaggccacctccttgctcttgggacaccagagaacccatcttggctcagtctccacctccaagatcaagagaagactcttccacctctttttgcctgaatggcctttgggcacaaggtcagaggctggatgtggaccaggccctgaacagaagccatgagatctggactcacagctgcccccagagcccaggcaatggcactgacgcttcccattaaagctccacctaagaaccccctttgaaagtt

SEQ ID NO: 59868 - protein, 287 aa, Artificial Sequence
  derived and/or modified sequence
MESRGPLATSRLLLLLLLLLLRHTRQGWALRPVLPTQSAHDPPAVHLSNGPGQEPIAVMTFDLTKITKTSSSFEVRTWDPEGVIFYGDTNPKDDWFMLGLRDGRPEIQLHNHWAQLTVGAGPRLDDGRWHQVEVKMEGDSVLLEVDGEEVLRLRQVSGPLTSKRHPIMRIALGGLLFPASNLRLPLVPALDGCLRRDSWLDKQAEISASAPTSLRSCDVESNPGIFLPPGTQAEFNLRGEDSSTSFCLNGLWAQGQRLDVDQALNRSHEIWTHSCPQSPGNGTDASH

SEQ ID NO: 59869 - DNA, 864 bp, Artificial Sequence
  derived and/or modified sequence
atggagagcagaggccccctggccaccagcagactgctgctgctgctgctgctgctgctgctgagacacaccagacagggctgggccctgagacccgtgctgcccacccagagcgcccacgacccccccgccgtgcacctgagcaacggccccggccaggagcccatcgccgtgatgaccttcgacctgaccaagatcaccaagaccagcagcagcttcgaggtgagaacctgggaccccgagggcgtgatcttctacggcgacaccaaccccaaggacgactggttcatgctgggcctgagagacggcagacccgagatccagctgcacaaccactgggcccagctgaccgtgggcgccggccccagactggacgacggcagatggcaccaggtggaggtgaagatggagggcgacagcgtgctgctggaggtggacggcgaggaggtgctgagactgagacaggtgagcggccccctgaccagcaagagacaccccatcatgagaatcgccctgggcggcctgctgttccccgccagcaacctgagactgcccctggtgcccgccctggacggctgcctgagaagagacagctggctggacaagcaggccgagatcagcgccagcgcccccaccagcctgagaagctgcgacgtggagagcaaccccggcatcttcctgccccccggcacccaggccgagttcaacctgagaggcgaggacagcagcaccagcttctgcctgaacggcctgtgggcccagggccagagactggacgtggaccaggccctgaacagaagccacgagatctggacccacagctgcccccagagccccggcaacggcaccgacgccagccactag

SEQ ID NO: 59870 - DNA, 423 bp, Artificial Sequence
  derived and/or modified sequence
atggagagcagaggccccctggccaccagcagactgctgctgctgctgctgctgctgctgctgagacacaccagacagggctgggccctgagacccgtgctgcccacccagagcgcccacgacccccccgccgtgcacctgagcaacggccccggccaggagcccatcgccgtgatgaccttcgacctgaccaagatcaccaagaccagcagcagcttcgaggtgagaacctgggaccccgagggcgtgatcttctacggcgacaccaaccccaaggacgactggttcatgctgggcctgagagacggcagacccgagatccagctgcacaaccactgggcccagctgaccgtgggcgccggccccagactggacgacggcagatggcaccaggagaagaccctgccccccctgttcgcctag

SEQ ID NO: 59871 - DNA, 864 bp, Artificial Sequence
  derived and/or modified sequence
atggaatctcgcgggccactggcaacctctcggttgctattgcttcttttgctactgctgctgagacacactaggcagggttgggcccttcggcctgtgttacccacacagtccgcccacgacccgcccgctgtacacctaagtaacggtcccggtcaagagcccatcgctgtcatgacttttgatcttacaaaaatcacgaaaactagctctagcttcgaggtgagaacttgggaccctgagggcgttatcttttatggtgacaccaatccaaaggacgactggtttatgctcggactcagggacggccgacccgagatccagctgcacaatcattgggcccagctgactgtcggggctggccctcgtctagatgatggacggtggcatcaggtggaggttaagatggaaggtgatagcgtgctcttggaggttgacggcgaggaggtgcttaggttacgccaggtgagtggcccactgacatccaaaagacatcccatcatgcgtatagccttaggcggcttacttttcccggccagtaatctacgcctccctttggtacccgcactagacgggtgtctgaggcgcgattcatggctcgataagcaggctgagatcagtgcatctgcgcctacatcgctccggagttgtgacgtggagagtaacccagggatctttctgccaccagggactcaggccgaattcaatctccgcggagaggacagtagcacgtctttctgtctgaatggactctgggcccagggccagcggctcgatgttgatcaggcactgaatcggagccacgaaatctggacgcatagctgcccacaatcccccggcaatggtactgacgcatcacactag

SEQ ID NO: 59872 - DNA, 423 bp, Artificial Sequence
  derived and/or modified sequence
atggaatcacggggtcctctcgcgacgagcagattattactcctcctattattgttgctgttacgtcatacacgccagggatgggccctcaggccagtgctgcctactcaatctgcccacgatcctcctgccgtgcacctgtctaatgggcctggccaggaaccaattgcagtgatgacatttgacctcacaaagattacaaaaacttcaagcagtttcgaggtgcggacgtgggaccctgagggagtcatcttttatggtgacactaatcctaaagacgactggttcatgctcggattgcgggacggcagacctgaaattcagttgcacaaccactgggcgcagctgacagtgggtgctggcccacgcctagacgacggccgttggcaccaggagaagaccctgcctcccctctttgcctag

SEQ ID NO: 59873 - DNA, 864 bp, Artificial Sequence
  derived and/or modified sequence
atggagagccggggccccctggccaccagccggctgctgctgctgctgctgctgctgctgctgcggcacacccggcagggctgggccctgcggcctgtgctgcccacccagagcgcccatgaccccccagctgtgcacctgagcaatggacctggccaggagcccatcgctgtgatgacctttgacctgaccaagatcaccaagaccagcagcagctttgaggtgaggacctgggaccctgagggcgtcatcttctacggggacaccaaccccaaggatgactggttcatgctgggcctgagagatggccggcctgagatccagctgcacaaccactgggcccagctgactgtgggcgccggcccccggctggatgatggccgctggcaccaggtggaggtgaagatggagggggacagcgtgctgctggaggtggatggagaggaggtgctgcggctgcggcaggtgtctggccccctgaccagcaagaggcaccccatcatgagaattgccctgggcggcctgctcttccctgccagcaacctgcggctgcccctggtgcctgccctggatggctgcctgcggcgggacagctggctggacaagcaggccgagatcagcgccagcgcccccaccagcctgcggagctgtgatgtggagagcaaccctggcatcttcctgcccccaggcacccaggccgagttcaacctgcggggggaggacagcagcaccagcttctgcctgaatggcctgtgggcccagggccagaggctggatgtggaccaggccctgaacagaagccatgagatctggacccacagctgcccccagagccctggaaatggaacagatgccagccactag

SEQ ID NO: 59874 - DNA, 423 bp, Artificial Sequence
  derived and/or modified sequence
atggagagccggggccccctggccaccagccggctgctgctgctgctgctgctgctgctgctgcggcacacccggcagggctgggccctgcggcctgtgctgcccacccagagcgcccatgaccccccagctgtgcacctgagcaatggacctggccaggagcccatcgctgtgatgacctttgacctgaccaagatcaccaagaccagcagcagctttgaggtgaggacctgggaccctgagggcgtcatcttctacggggacaccaaccccaaggatgactggttcatgctgggcctgagagatggccggcctgagatccagctgcacaaccactgggcccagctgactgtgggcgccggcccccggctggatgatggccgctggcaccaggagaagaccctgccccccctgtttgcctag

SEQ ID NO: 59875 - DNA, 864 bp, Artificial Sequence
  derived and/or modified sequence
atggagagccggggccccctggccaccagccggctgctgctgctgctcttgctgttgttgcttcgccacactcgacagggctgggccctccgccccgtgttgccaactcagagcgcccacgacccacccgcagtccacctgagcaatggcccaggccaggagcctatagcagtcatgacattcgaccttaccaaaattactaagactagtagttcttttgaggtcagaacgtgggaccccgagggagtcattttttacggggacacaaaccctaaggacgattggtttatgctcggactgcgggatggccgtcccgagattcagctgcataatcactgggctcagctgactgtgggtgccgggccgaggttggatgatggcagatggcaccaggttgaagttaaaatggagggcgatagtgtactccttgaggtggatggggaagaagtactccggttaagacaggtgtcggggcccctgacttcaaagcgccacccaatcatgagaattgcactaggcggactcctcttccctgccagcaacctgcgtttgcctctggtccctgccttggacggatgtttgaggcgagactcctggctggataagcaggcagagataagcgcgtctgcccctacaagcctgagatcatgtgacgttgagtctaatccaggcatattcttgcctccgggaactcaagcagaattcaatctgagaggtgaggacagtagtacctcattctgtctgaacggattatgggcccaggggcagagactggatgtggaccaggcactaaatagatcccacgaaatctggactcactcatgcccccagagtcccggcaacgggaccgacgcctcccattag

SEQ ID NO: 59876 - DNA, 423 bp, Artificial Sequence
  derived and/or modified sequence
atggagagccggggccccctggccaccagccggctgctgctgctgctcttattgctccttctgcgccatacgcggcagggatgggctctccgacccgtgctgcccacccagtctgcccacgacccccccgcggtgcacctgagcaacggacctggccaggagcccatcgccgtcatgacgttcgacctgactaagattacaaagacgtcctcctccttcgaggtccgcacctgggatcctgaaggtgttatcttttatggtgacaccaacccaaaagatgactggtttatgcttggtttgcgtgacgggagacccgagatccaactccataatcactgggctcagctgaccgtaggggccggacctagactggacgatggacggtggcaccaggagaaaaccttaccgcccctgtttgcctag

SEQ ID NO: 59877 - DNA, 864 bp, Artificial Sequence
  derived and/or modified sequence
atggaaagcagaggtcccctggccacaagtcgcttactgctgttactcctcctcttactgctgagacatacaagacagggctgggccctgcgacctgtgcttcctacacaaagtgcccatgaccccccagccgtgcacttgtccaatgggcctggccaggagcctattgcagtaatgaccttcgacctaaccaagataacaaaaacttcaagctcttttgaggttagaacttgggatcccgagggtgtcatattctatggtgacactaaccctaaggatgactggtttatgttgggcttgcgtgatggtaggccagagatacagcttcacaatcattgggcccagttgacagtgggcgctggacccaggttggacgatggaaggtggcaccaggtggaggtgaaaatggagggcgacagcgtcctgttggaggtggacggggaagaggtgttacggctgaggcaagtgagcgggccactcacaagcaagcgacacccaataatgcggatagctctgggcggactgctgttccctgcatccaatctgcgactgcccctggtgccagctcttgatggctgccttagacgcgattcctggcttgacaaacaggcagaaattagcgcttcagcaccgacctccctgaggagttgcgacgttgaaagcaacccgggaattttcctcccccctggtacccaggccgagttcaatttgagaggcgaggactccagcactagcttttgcctgaatgggctgtgggcacaggggcagaggttggatgtggatcaggccctaaaccgctcacatgagatctggactcatagctgcccacagtctccgggaaacgggacagacgcctctcactag

SEQ ID NO: 59878 - DNA, 423 bp, Artificial Sequence
  derived and/or modified sequence
atggaatcaagaggacccttggccacctctagactgcttctccttctgctgctgctcctgttacgtcacactcgccagggctgggcactgcgccctgttctgccgacacagtcagcccacgatccacccgctgtgcacctgagcaatggtccaggccaggaacccattgccgtcatgacatttgatctcaccaagattactaagacctccagttctttcgaggttaggacctgggaccctgaaggggtcatattttatggcgacaccaatccaaaggatgattggtttatgctgggcctaagagatggtcggcctgagatccagctgcataaccactgggcacagctgactgttggagcaggacctagacttgacgatggacgatggcaccaggagaagacattacccccactgtttgcctag

SEQ ID NO: 59879 - DNA, 932 bp, Artificial Sequence
  derived and/or modified sequence
aagagttgtctgagccgccgagtggacagtggctgattatggagagcagaggcccactggctacctcgcgcctgctgctgttgctgctgttgctactactgcgtcacacccgccagggatgggccctgagacctgttctccccacccagagtgcccacgaccctccggctgtccacctcagcaatggcccaggacaagagcctatcgctgtcatgacctttgacctcaccaagatcacaaaaacctcctcctcctttgaggttcgaacctgggacccagagggagtgattttttatggggataccaaccctaaggatgactggtttatgctgggacttcgagacggcaggcctgagatccaactgcacaatcactgggcccagcttacggtgggtgctggaccacggctggatgatgggagatggcaccaggtggaagtcaagatggagggggactctgtgctgctggaggtggatggggaggaggtgctgcgcctgagacaggtctctgggcccctgaccagcaaacgccatcccatcatgaggattgcgcttggggggctgctcttccccgcttccaaccttcggttgccgctggttcctgccctggatggctgcctgcgccgggattcctggctggacaaacaggccgagatctcagcatctgcccccactagcctcagaagctgtgatgtagaatcaaatcccgggatatttctccctccagggactcaggcagaattcaatctccgaggagaagactcttccacctctttttgcctgaatggcctttgggcacaaggtcagaggctggatgtggaccaggccctgaacagaagccatgagatctggactcacagctgcccccagagcccaggcaatggcactgacgcttcccattaaagctccacctaagaaccccctttgaaagtt

SEQ ID NO: 59880 - DNA, 610 bp, Artificial Sequence
  derived and/or modified sequence
aagagttgtctgagccgccgagtggacagtggctgattatggagagcagaggcccactggctacctcgcgcctgctgctgttgctgctgttgctactactgcgtcacacccgccagggatgggccctgagacctgttctccccacccagagtgcccacgaccctccggctgtccacctcagcaatggcccaggacaagagcctatcgctgtcatgacctttgacctcaccaagatcacaaaaacctcctcctcctttgaggttcgaacctgggacccagagggagtgattttttatggggataccaaccctaaggatgactggtttatgctgggacttcgagacggcaggcctgagatccaactgcacaatcactgggcccagcttacggtgggtgctggaccacggctggatgatgggagatggcaccaggagaagactcttccacctctttttgcctgaatggcctttgggcacaaggtcagaggctggatgtggaccaggccctgaacagaagccatgagatctggactcacagctgcccccagagcccaggcaatggcactgacgcttcccattaaagctccacctaagaaccccctttgaaagtt

SEQ ID NO: 59881 - protein, 489 aa, Artificial Sequence
  derived and/or modified sequence
MPQLNGGGGDDLGANDELISFKDEGEQEEKSSENSSAERDLADVKSSLVNESETNQNSSSDSEAERRPPPRSESFRDKSRESLEEAAKRQDGGLFKGPPYPGYPFIMIPDLTSPYLPNGSLSPTARTYLQMKWPLLDVQAGSLQSRQALKDARSPSPAHIVSPLPCCTQGHDCQHFYPPSDFTVSTQVFRDMKRSHSLQKVGEPWCIESNKVPVVQHPHHVHPLTPLITYSNEHFTPGNPPPHLPADVDPKTGIPRPPHPPDISPYYPLSPGTVGQIPHPLGWLVPQQGQPVYPITTGGFRHPYPTALTVNASMSRFPPHMVPPHHTLHTTGIPHPAIVTPTVKQESSQSDVGSLHSSKHQDSKKEEEKKKPHIKKPLNAFMLYMKEMRAKVVAECTLKESAAINQILGRRWHALSREEQAKYYELARKERQLHMQLYPGWSARDNYGKKKKRKRDKQPGETNGEKKSAFATYKVKAAASAHPLQMEAY

SEQ ID NO: 59882 - DNA, 1470 bp, Artificial Sequence
  derived and/or modified sequence
atgccccagctgaacggcggcggcggcgacgacctgggcgccaacgacgagctgatcagcttcaaggacgagggcgagcaggaggagaagagcagcgagaacagcagcgccgagagagacctggccgacgtgaagagcagcctggtgaacgagagcgagaccaaccagaacagcagcagcgacagcgaggccgagagaagacccccccccagaagcgagagcttcagagacaagagcagagagagcctggaggaggccgccaagagacaggacggcggcctgttcaagggccccccctaccccggctaccccttcatcatgatccccgacctgaccagcccctacctgcccaacggcagcctgagccccaccgccagaacctacctgcagatgaagtggcccctgctggacgtgcaggccggcagcctgcagagcagacaggccctgaaggacgccagaagccccagccccgcccacatcgtgagccccctgccctgctgcacccagggccacgactgccagcacttctacccccccagcgacttcaccgtgagcacccaggtgttcagagacatgaagagaagccacagcctgcagaaggtgggcgagccctggtgcatcgagagcaacaaggtgcccgtggtgcagcacccccaccacgtgcaccccctgacccccctgatcacctacagcaacgagcacttcacccccggcaacccccccccccacctgcccgccgacgtggaccccaagaccggcatccccagacccccccacccccccgacatcagcccctactaccccctgagccccggcaccgtgggccagatcccccaccccctgggctggctggtgccccagcagggccagcccgtgtaccccatcaccaccggcggcttcagacacccctaccccaccgccctgaccgtgaacgccagcatgagcagattccccccccacatggtgcccccccaccacaccctgcacaccaccggcatcccccaccccgccatcgtgacccccaccgtgaagcaggagagcagccagagcgacgtgggcagcctgcacagcagcaagcaccaggacagcaagaaggaggaggagaagaagaagccccacatcaagaagcccctgaacgccttcatgctgtacatgaaggagatgagagccaaggtggtggccgagtgcaccctgaaggagagcgccgccatcaaccagatcctgggcagaagatggcacgccctgagcagagaggagcaggccaagtactacgagctggccagaaaggagagacagctgcacatgcagctgtaccccggctggagcgccagagacaactacggcaagaagaagaagagaaagagagacaagcagcccggcgagaccaacggcgagaagaagagcgccttcgccacctacaaggtgaaggccgccgccagcgcccaccccctgcagatggaggcctactag

SEQ ID NO: 59883 - DNA, 954 bp, Artificial Sequence
  derived and/or modified sequence
atgccccagctgaacggcggcggcggcgacgacctgggcgccaacgacgagctgatcagcttcaaggacgagggcgagcaggaggagaagagcagcgagaacagcagcgccgagagagacctggccgacgtgaagagcagcctggtgaacgagagcgagaccaaccagaacagcagcagcgacagcgaggccgagagaagacccccccccagaagcgagagcttcagagacaagagcagagagagcctggaggaggccgccaagagacaggacggcggcctgttcaagggccccccctaccccggctaccccttcatcatgatccccgacctgaccagcccctacctgcccaacggcagcctgagccccaccgccagaacctacctgcagatgaagtggcccctgctggacgtgcaggccggcagcctgcagagcagacaggccctgaaggacgccagaagccccagccccgcccacatcgtgcagagccccctgccctgctgcacccagggccacgactgccagcacttctacccccccagcgacttcaccgtgagcacccaggtgttcagagacatgaagagaagccacagcctgcagaaggtgggcgagccctggtgcatcgagagcaacaaggtgcccgtggtgcagcacccccaccacgtgcaccccctgacccccctgatcacctacagcaacgagcacttcacccccggcaacccccccccccacctgcccgccgacgtggaccccaagaccggcatccccagacccccccacccccccgacatcagcccctactaccccctgagccccggcaccgtgggccagatcccccaccccctgggctggctggtgccccagcagggccagcccgtgtaccccatcaccaccggcggcttcagacacccctaccccaccgccctgaccgtgaacgccagcatgagcagatag

SEQ ID NO: 59884 - DNA, 1470 bp, Artificial Sequence
  derived and/or modified sequence
atgcctcagctaaacggaggggggggggatgaccttggcgctaacgatgagcttatctcattcaaggatgaaggcgagcaggaagagaaatcctccgagaactcgagtgccgaacgggatctggctgacgtaaagagcagtctggtaaatgagagcgaaactaatcagaactccagtagtgacagcgaagcggagagacgccccccacctcgatcagagtctttcagggacaagagcagggaatctttggaggaagctgcgaagcgtcaggacggtggcctgtttaaaggtcctccttatccagggtatcctttcataatgatacctgacctgacctccccctatctacctaatgggtccctttcccccacagcacggacttaccttcagatgaagtggcccctgcttgacgtccaggccggatctctacagagcaggcaggctctgaaggacgcgcgctcacccagtcctgcccatatcgtcagccctctcccatgttgcacacagggccacgattgccagcatttctaccctccttccgacttcacggtgtcaacacaggtcttcagagatatgaagcggagtcacagcctgcagaaggtgggcgaaccttggtgcattgaaagtaacaaagtgccagtggttcaacacccacatcatgtgcatccacttacccctctgattacatactcaaatgagcactttacacccggaaaccccccgccacaccttcctgctgacgtagacccaaaaacaggaatccctcgccctccccaccctcccgacatctcaccatactaccccttatcccccggcaccgtgggccaaataccacaccctctgggttggcttgttccgcagcaaggccagcccgtgtatccaatcactaccggagggttcaggcacccttaccccaccgcactgactgtaaacgcctctatgtctcgatttccccctcacatggttccccctcaccacaccctgcatacgacgggaattccccacccggctatcgtcacacccacagttaagcaggagtcatcccagtcagacgtgggatcgctccacagctccaaacatcaggactcgaagaaggaagaggagaaaaaaaagccacacattaagaagccgctgaacgcctttatgctgtacatgaaagaaatgcgcgctaaggtggtggctgagtgcacattaaaagagtctgctgcgattaatcaaattctcgggaggcgctggcacgccctttctcgggaggagcaggccaagtactacgagcttgctagaaaggagcgtcagctccacatgcagctttaccccggatggtcggccagagacaactatggtaaaaaaaagaagcggaagagggataaacagccaggtgagaccaatggagagaagaagtccgcttttgcgacctacaaagtcaaagcagctgcctcggctcatcccttacagatggaagcatactag

SEQ ID NO: 59885 - DNA, 954 bp, Artificial Sequence
  derived and/or modified sequence
atgccccagctgaatggaggaggcggggatgacctgggcgccaacgatgagctgatctcattcaaagatgaaggcgagcaggaggaaaagtcatctgagaatagcagcgccgagagagatctggccgacgttaaaagctccttagtgaacgagtccgaaactaaccaaaattctagctcagacagcgaagctgaacggcggcctccccctcgttccgagagcttccgcgacaaatcacgtgagagtcttgaagaagccgcaaaaagacaggatgggggcttgttcaaagggcccccttacccaggatacccatttattatgattcccgacctcacgtccccttatctgcccaacggctctctgagcccaacagcaaggacctacctgcagatgaaatggcctctgctggacgtccaggccggctcactgcagagccggcaggctttaaaggatgcgcgttcaccatcacctgcgcacattgtgcaatccccactcccgtgctgcacccaaggccacgactgccaacatttctatccccctagcgactttacagtgtccacccaggtgttcagagatatgaaacgatctcactcactgcaaaaagtgggcgagccctggtgcatagaatccaataaagtgcccgtggtgcagcacccacatcatgtacatcctctgacacccctgatcacctactccaatgaacacttcactcctgggaacccaccgccacatttgcctgccgatgttgacccaaaaaccggaattccccgcccaccacaccccccagacatctccccctactaccctctcagccctggcaccgtcggacaaatacctcaccccctgggttggctggtaccccagcagggccagccagtttaccctatcactacgggggggttccgccatccttaccccacggccttaacagtgaacgctagcatgagccggtag

SEQ ID NO: 59886 - DNA, 1470 bp, Artificial Sequence
  derived and/or modified sequence
atgccccagctgaatggaggcggcggagatgacctgggcgccaatgatgagctgatctccttcaaggatgaaggagagcaggaggagaagagcagcgagaacagcagcgctgagcgggacctggctgatgtgaagagcagcctggtgaatgaaagtgagaccaaccagaacagcagcagtgacagcgaggccgagcggcggcccccacccaggtctgagagcttccgggacaagagccgggagagcctggaggaggccgccaagaggcaggacggcggcctcttcaagggccccccctacccaggctaccccttcatcatgatcccagacctgaccagcccctacctgcccaacggcagcctgagccccacagcccggacctacctgcagatgaagtggcccctgctggatgtgcaggccggcagcctgcagagccggcaggccctgaaggatgcccggagccccagccctgcccacatcgtgagccccctgccctgctgcacccagggccatgactgccagcacttctacccacccagcgacttcaccgtgtccacccaggtgttccgggacatgaagaggagccacagcctgcagaaggtgggggagccctggtgcatcgagagcaacaaggtgcctgtggtgcagcacccccaccacgtgcaccccctgacccccctcatcacctacagcaatgagcacttcaccccaggcaaccccccaccccacctgcctgcagatgtggaccccaagacaggcatccccaggcctccccaccccccagacatcagcccctactaccccctgagccctggcaccgtgggccagatcccccaccccctgggctggctggtgccccagcagggccagcctgtgtaccccatcaccactggaggcttccgccacccctaccccacagccctgactgtgaatgcctccatgagccgcttccccccccacatggtgcccccccaccacaccctgcacaccaccggcatcccccacccagccatcgtgacccccaccgtgaagcaggagagcagccagagtgatgtgggcagcctgcacagcagcaagcaccaggacagcaagaaggaggaggagaagaagaagccccacatcaagaagcccctgaatgccttcatgctgtacatgaaggagatgagggccaaggtggtggctgaatgtaccctgaaggagagcgctgccatcaaccagatcctgggccgccgctggcacgccctgagccgggaggagcaggccaagtactatgagctggccaggaaggagcggcagctgcacatgcagctgtacccaggctggagcgcccgggacaactacggcaagaagaagaagaggaagagggacaagcagcctggagagaccaatggagagaagaagagcgcctttgccacctacaaggtgaaggccgccgccagcgcccaccccctgcagatggaggcctactag

SEQ ID NO: 59887 - DNA, 954 bp, Artificial Sequence
  derived and/or modified sequence
atgccccagctgaatggaggcggcggagatgacctgggcgccaatgatgagctgatctccttcaaggatgaaggagagcaggaggagaagagcagcgagaacagcagcgctgagcgggacctggctgatgtgaagagcagcctggtgaatgaaagtgagaccaaccagaacagcagcagtgacagcgaggccgagcggcggcccccacccaggtctgagagcttccgggacaagagccgggagagcctggaggaggccgccaagaggcaggacggcggcctcttcaagggccccccctacccaggctaccccttcatcatgatcccagacctgaccagcccctacctgcccaacggcagcctgagccccacagcccggacctacctgcagatgaagtggcccctgctggatgtgcaggccggcagcctgcagagccggcaggccctgaaggatgcccggagccccagccctgcccacatcgtgcagagccccctgccctgctgcacccagggccatgactgccagcacttctacccacccagcgacttcaccgtgtccacccaggtgttccgggacatgaagaggagccacagcctgcagaaggtgggggagccctggtgcatcgagagcaacaaggtgcctgtggtgcagcacccccaccacgtgcaccccctgacccccctcatcacctacagcaatgagcacttcaccccaggcaaccccccaccccacctgcctgcagatgtggaccccaagacaggcatcccccggcccccccaccccccagacatcagcccctactaccccctgagccctggcaccgtgggccagatcccccaccccctgggctggctggtgccccagcagggccagcctgtgtaccccatcaccaccggcggcttccgccacccctaccccacagccctgactgtgaatgcctccatgagcaggtag

SEQ ID NO: 59888 - DNA, 1470 bp, Artificial Sequence
  derived and/or modified sequence
atgccccagctgaacggcggcggcggcgacgacctgggcgccaacgatgagctgatatctttcaaagatgagggtgaacaggaggagaagagctctgaaaatagcagcgctgaacgggatctggccgacgtgaaatcttccttagtgaacgaatcagaaactaaccaaaactcctcctccgattcagaagcagaacgccgtcctcctccccgttctgagtcatttcgggataagtccagggagtctctggaagaggccgccaaacgccaggatggcggtctgttcaagggcccgccttacccaggataccccttcatcatgattcctgacctgacctctccttatctgccaaacggttccctctcacctaccgcacgtacctacctccaaatgaagtggcctcttctggatgttcaagcaggaagtctgcagtcccgacaggccctaaaggacgccagaagcccctcgcccgcccacatcgtgtctccgcttccttgctgcacgcaaggccacgattgccagcacttctatcctcctagcgattttacagtgagcactcaagtcttcagggacatgaagaggagtcactcgctgcagaaggtcggcgagccttggtgtatagagtctaacaaggtgcctgtggtacaacaccctcaccatgtgcacccgctcaccccgttaattacttactcaaacgaacacttcactcccggtaatccacccccgcatctgccagcggatgtcgaccctaaaactgggattccacggcctccccatccacccgacattagtccatattacccactcagccctggaactgtcggccagattccacaccccctcggctggcttgtcccgcagcaggggcaacctgtgtacccaataacgaccgggggtttccgacacccatacccaacagctttaacggtgaacgccagcatgtctagattccctccgcacatggtgcccccacaccataccctgcacacaacgggtatccctcaccccgcgatcgtgacgcccaccgtgaaacaggagtcatcgcagagcgacgtcggctcccttcacagttccaagcaccaggactctaaaaaggaagaagaaaagaaaaaacctcacattaaaaaacctctgaatgccttcatgttgtacatgaaggaaatgagagccaaggtcgtggctgagtgtacccttaaggagtccgctgccattaatcagatactgggtcggagatggcacgctttgtcccgcgaggagcaggccaagtactatgagctggcgcggaaagagagacagctgcacatgcagttgtacccaggctggagtgcaagggataactacggaaagaagaaaaagcggaagcgcgacaagcagcctggcgagactaacggcgagaaaaagagcgcctttgcaacctacaaggtgaaagcggccgcctctgcccatccactgcaaatggaggcttattag

SEQ ID NO: 59889 - DNA, 954 bp, Artificial Sequence
  derived and/or modified sequence
atgccccagctgaacggcggcggcggcgacgacctgggcgccaacgacgagctgatctctttcaaggacgagggggaacaggaggaaaagtcctcggaaaattcctctgccgagagggaccttgccgacgttaagtcctcactggtgaatgaaagcgaaactaatcaaaactcttcaagtgatagcgaggcagagaggcgacccccccctcgcagcgaaagctttagagacaaaagccgcgagtcgctggaagaggcagccaagagacaggatggaggactattcaaaggtcccccctatccaggatacccattcatcatgattcccgaccttacatctccgtatctcccaaatggatcattatcacccactgccaggacttatttacagatgaaatggcccctacttgatgtccaggcaggatcccttcagagtcgccaggcgcttaaagacgcaagatcgcctagtcccgcacacatagtgcagtcaccgttaccttgctgtacacaggggcacgactgtcagcatttttacccgccgtctgattttaccgtgagcactcaggtgttccgagatatgaaaagaagccatagtctccaaaaagttggcgagccctggtgtatagagtctaacaaagtgcccgtcgtgcagcatcctcaccatgtgcacccactgacaccactgataacctactctaatgagcactttacacccggaaaccctcccccacacctccccgccgatgtagatccaaaaaccggaataccgagaccaccacaccctccagatatttcaccctactatcctttaagtcctggaaccgtggggcaaataccccaccctctcggatggctagttccacagcagggacagccagtgtatccaataactacaggaggctttagacatccgtacccaacagcgctgactgtaaacgcctctatgtcccgctag

SEQ ID NO: 59890 - DNA, 1470 bp, Artificial Sequence
  derived and/or modified sequence
atgccacaactcaacggaggaggcggagacgacctgggtgcaaacgacgaattaatttcgtttaaagacgagggggagcaagaggagaaatcctcagagaacagtagcgccgaacgtgatctggctgatgtgaaaagctcgctcgtgaatgaaagcgagactaatcagaactcctccagcgactcagaggcagaacgcaggccacccccacgctctgagagttttcgggataagtccagagaaagtcttgaggaggccgctaaacggcaggatggcggtttatttaagggacccccttacccgggatatccgtttatcatgattcctgatctgaccagtccctacctgcctaatggttctctctcccccaccgctcgaacctacctgcagatgaagtggccactcctggacgtacaggcgggaagccttcagagtagacaagcgctcaaggacgcaagatcccccagcccggcacatatcgtcagcccactgccctgctgtacccaagggcacgattgccagcatttctaccccccaagcgattttaccgtttccacccaagtgtttagggacatgaagagatcccatagcctgcagaaagtgggtgagccttggtgtattgaatcaaacaaggttccggtcgtgcagcacccacatcatgttcatcccctgaccccattaattacttatagtaatgaacatttcactcctggcaacccaccgccacatctcccagccgatgtcgatcccaagaccggtatcccgcgaccaccccaccctcccgacatatcgccgtactaccccctgagtcccggtaccgtgggtcagattccacatcccctaggctggttagtcccccagcagggccagcccgtataccccattaccacaggcggattcagacacccataccccaccgctctcacagtcaacgcgagcatgtcccgcttccctccccacatggtcccacctcaccatacgctgcacacaacagggatcccgcatcctgccatcgtgaccccaaccgtcaagcaagagagctctcagtccgatgtcggcagcctccacagcagcaagcaccaggactcaaagaaggaagaggagaagaagaagccccacattaaaaagccattgaatgccttcatgctctatatgaaagagatgcgagcaaaggtggtggcagagtgcacccttaaggaatcagccgctataaatcaaatactcgggagaagatggcatgcactgagcagagaagagcaggcaaaatattatgagctagcacgcaaagaaagacagctacacatgcagttgtaccccggatggagtgcgagagataactacggtaaaaaaaagaagcgcaaacgcgacaagcagcccggagaaaccaacggagagaagaagtctgcattcgctacgtataaagtcaaggccgctgccagcgcccacccactgcagatggaagcgtactag

SEQ ID NO: 59891 - DNA, 954 bp, Artificial Sequence
  derived and/or modified sequence
atgcctcaactgaacggaggcggtggcgacgatctgggggctaacgacgagctaataagcttcaaagatgaaggggagcaggaggagaaatcctcagagaacagttccgccgaacgagacctggccgacgtgaaatcaagtctggtgaatgagagtgaaacaaaccagaactcaagttccgatagtgaggccgagcggcgtccccctcccagaagcgagagctttcgagacaagtcgcgtgagtccctcgaggaagcagcgaaaaggcaggatggaggcctgtttaaggggcctccctatcccggataccctttcattatgattccagatctgacctccccctatctgcctaacggttctttgtcgcctacagctagaacatacctacagatgaaatggcctctgttagatgtgcaggccggttctctgcaaagtcgtcaagcactcaaggatgcaagaagcccaagcccagcacacatagttcagtctcccttgccatgctgtacccaggggcacgattgccaacatttttatccacctagcgacttcacagtgagcacgcaggtgttccgggatatgaaaaggagccattccctccagaaagtcggggagccttggtgcatcgaaagcaacaaagtgccagtggtacaacatccccaccacgtgcaccctctgactcccctcatcacttacagcaacgagcacttcaccccaggaaaccccccaccacacctcccagctgacgtggatcctaaaacaggaatcccaaggcctccccacccacccgatatatcgccctattatcctctgagcccaggaaccgtgggtcagattccccatccgctgggatggcttgtgccccagcaggggcagcctgtctatcctatcacaacgggagggtttcggcatccctatcccacagccctgacggtgaacgcatcaatgtcaaggtag

SEQ ID NO: 59892 - DNA, 4021 bp, Artificial Sequence
  derived and/or modified sequence
aataatctccgctcccagactactccgttcctccggatttcgatccccctttttctatctgtcaatcagcgccgcctttgaactgaaaagctctcagtctaacttcaactcactcaaatccgagcggcacgagcacctcctgtatcttcggcttccccccccctttgctctttatatctgacttcttgttgttgttggtgttttttttttttttaccccccttttttatttattatttttttgcacattgatcggatccttgggaacgagagaaaaaagaaacccaaactcacgcgtgcagaagatctccccccccttcccctcccctcctccctcttttcccctccccaggagaaaaagacccccaagcagaaaaaagttcaccttggactcgtctttttcttgcaatattttttgggggggcaaaactttttgggggtgattttttttggcttttcttcctccttcatttttcttccaaaattgctgctggtgggtgaaaaaaaaatgccgcagctgaacggcggtggaggggatgacctaggcgccaacgacgaactgatttccttcaaagacgagggcgaacaggaggagaagagctccgaaaactcctcggcagagagggatttagctgatgtcaaatcgtctctagtcaatgaatcagaaacgaatcaaaacagctcctccgattccgaggcggaaagacggcctccgcctcgctccgaaagtttccgagacaaatcccgggaaagtttggaagaagcggccaagaggcaagatggagggctctttaaggggccaccgtatcccggctaccccttcatcatgatccccgacctgacgagcccctacctccccaacggatcgctctcgcccaccgcccgaacctatctccagatgaaatggccactgcttgatgtccaggcagggagcctccagagtagacaagccctcaaggatgcccggtccccatcaccggcacacattgtcagccccctcccttgctgcactcagggacatgactgtcagcacttctaccccccctcagacttcactgtcagcactcaagtcttcagggacatgaaaaggagccactccttacaaaaagttggggagccctggtgtattgagtctaacaaagtgccagtggtgcagcaccctcaccatgtccaccccctcacgcctcttatcacgtacagcaatgaacacttcacgccgggaaacccacctccacacttaccagccgacgtagaccccaaaacaggaatcccacggcctccgcaccctccagatatatccccgtattacccactatcgcctggcaccgtaggacaaatcccccatccgctaggatggttagtaccacagcaaggtcaaccagtgtacccaatcacgacaggaggattcagacacccctaccccacagctctgaccgtcaatgcttccatgtccaggttccctccccatatggtcccaccacatcatacgctacacacgacgggcattccgcatccggccatagtcacaccaacagtcaaacaggaatcgtcccagagtgatgtcggctcactccatagttcaaagcatcaggactccaaaaaggaagaagaaaagaagaagccccacataaagaaacctcttaatgcattcatgttgtatatgaaggaaatgagagcaaaggtcgtagctgagtgcacgttgaaagaaagcgcggccatcaaccagatccttgggcggaggtggcatgcactgtccagagaagagcaagcgaaatactacgagctggcccggaaggagcgacagcttcatatgcaactgtaccccggctggtccgcgcgggataactatggaaagaagaagaagaggaaaagggacaagcagccgggagagaccaatggagaaaaaaaaagtgcgttcgctacatacaaggtgaaggcagctgcctcagcccaccctcttcagatggaagcttactagattcgcctcccccctccccgaacctgctaggctcccctccccgagacgccaagtcacagactgagcagacccagcctctgtcgctgtccctgaagcccgaccccctggcccacctgtccatgatgcctccgccacccgccctcctgctcgctgaggccacccacaaggcctccgccctctgtcccaacggggccctggacctgcccccagccgctttgcagcctgccgccccctcctcatcaattgcacagccgtcgacttcttccttacattcccacagctccctggccgggacccagccccagccgctgtcgctcgtcaccaagtctttagaatagctttagcgtcgtgaaccccgctgctttgtttatggttttgtttcacttttcttaatttgccccccacccccaccttgaaaggttttgttttgtactctcttaattttgtgccatgtggctacattagttgatgtttatcgagttcattggtcaatatttgacccattcttatttcaatttctccttttaaatatgtagatgagagaagaacctcatgattctaccaaaatttttatcaacagctgtttaaagtctttgtagcgtttaaaaaatatatatatatacataactgttatgtagttcggatagcttagttttaaaagactgattaaaaaacaaaaagaaaaaaaaagcaattttgaagcagccctccagaaggagttggttctgtattatttgtattaaatacgagcttgcgaaccaatcattttacatctggtttttaaaccgtaagggcaccatgaatgcagtgccgttactttttttttttttttctgtgtgaaacaactcttattgtgatgttacttgttattgtttaaatgtacagaaacaaagggtaaaaatgtgttaatataccttgttccatggtgttgttcttttggggggaggggacgctactcaacacttaatagaatcacaacgctgttgggccagtagtatttattgctttagagattgcttgtcgtacctgtatgtcgtccctttttaaatatgttttcctttttcttgaaactgtataaagtttttttcccccttagcataagcatcttatatataacaactcatttgtacaaggtttttaagtttatatataaaatgtgtatatatatttttgtttcccctttttgacttttttttttctgtatgaaacccagatgtcaccaaatggacattaatagttgcattaaggatcagtagcattaacaaaagttgctttaaaagccattatgtaaaacaagacttgaaaatgagtgagggaattttagcgacactgtctgagcagcagtgggaaccatcttcgtttcccctttgaactcccagtgggatgccctaccctgcgcccttaggacccggactgaccgtgtacaaaactttacgtgccaaaattctcagtgaatttagctttctccctctttttgatgctgtaatttttgttcatcatgttttgctgtgatgttacataggtagatttgtatgtagttttaatgtcacctataacaaaatgtgtttggtagcagattgtccagaaagcattttaaatgaagaggtataaacccttaagggccaaaattctgtatattagattactcttaaacgaaaaaccagctgccgcttttatgtacacatattacatacgagtaggcagcagactttaaaaataaaaaaaacctaggcatgttgatgttgcaaaatgctgtataaagctgaaacctgttcattcagtgccattgtagttgacatgaagcgattgtaaaactgtctccgatttttctctggtttattaaaatgctaactataacattttttgtgaatactttgaatgtttcctaacagttgtgatgttactgttccgttttatgctcttattccaagttcatttttaatggtttggaagccatttttgtaatgaataaatgttcatgctgtacagtatctgtagcatgccgttctggattaataaaagcaacttagtatgtgcagataaa

SEQ ID NO: 59893 - DNA, 1041 bp, Artificial Sequence
  derived and/or modified sequence
gcaaaactttttgggggtgattttttttggcttttcttcctccttcatttttcttccaaaattgctgctggtgggtgaaaaaaaaatgccgcagctgaacggcggtggaggggatgacctaggcgccaacgacgaactgatttccttcaaagacgagggcgaacaggaggagaagagctccgaaaactcctcggcagagagggatttagctgatgtcaaatcgtctctagtcaatgaatcagaaacgaatcaaaacagctcctccgattccgaggcggaaagacggcctccgcctcgctccgaaagtttccgagacaaatcccgggaaagtttggaagaagcggccaagaggcaagatggagggctctttaaggggccaccgtatcccggctaccccttcatcatgatccccgacctgacgagcccctacctccccaacggatcgctctcgcccaccgcccgaacctatctccagatgaaatggccactgcttgatgtccaggcagggagcctccagagtagacaagccctcaaggatgcccggtccccatcaccggcacacattgtccagagccccctcccttgctgcactcagggacatgactgtcagcacttctaccccccctcagacttcactgtcagcactcaagtcttcagggacatgaaaaggagccactccttacaaaaagttggggagccctggtgtattgagtctaacaaagtgccagtggtgcagcaccctcaccatgtccaccccctcacgcctcttatcacgtacagcaatgaacacttcacgccgggaaacccacctccacacttaccagccgacgtagaccccaaaacaggaatcccacggcctccgcaccctccagatatatccccgtattacccactatcgcctggcaccgtaggacaaatcccccatccgctaggatggttagtaccacagcaaggtcaaccagtgtacccaatcacgacaggaggattcagacacccctaccccacagctctgaccgtcaatgcttccatgtccaggtgagt

SEQ ID NO: 59894 - protein, 207 aa, Artificial Sequence
  derived and/or modified sequence
LTVNASMSRFPPHMVPPHHTLHTTGIPHPAIVTPTVKQESSQSDVGSLHSSKHQDSKKEEEKKKPHIKKPLNAFMLYMKEMRAKVVAECTLKESAAINQILGRRWHALSREEQAKYYELARKERQLHMQLYPGWSARDNYGKKKKRKRDKQPGETNDLSAPKKCRARFGLDQQNNWCGPCRRKKKCVRYIQGEGSCLSPPSSDGSLL

SEQ ID NO: 59895 - DNA, 624 bp, Artificial Sequence
  derived and/or modified sequence
ctgaccgtgaacgccagcatgagcagattccccccccacatggtgcccccccaccacaccctgcacaccaccggcatcccccaccccgccatcgtgacccccaccgtgaagcaggagagcagccagagcgacgtgggcagcctgcacagcagcaagcaccaggacagcaagaaggaggaggagaagaagaagccccacatcaagaagcccctgaacgccttcatgctgtacatgaaggagatgagagccaaggtggtggccgagtgcaccctgaaggagagcgccgccatcaaccagatcctgggcagaagatggcacgccctgagcagagaggagcaggccaagtactacgagctggccagaaaggagagacagctgcacatgcagctgtaccccggctggagcgccagagacaactacggcaagaagaagaagagaaagagagacaagcagcccggcgagaccaacgacctgagcgcccccaagaagtgcagagccagattcggcctggaccagcagaacaactggtgcggcccctgcagaagaaagaagaagtgcgtgagatacatccagggcgagggcagctgcctgagcccccccagcagcgacggcagcctgctgtag

SEQ ID NO: 59896 - DNA, 624 bp, Artificial Sequence
  derived and/or modified sequence
cttactgtgaacgcatctatgagccggtttccccctcacatggttccccctcatcacacgctgcatactactggcattccgcaccccgccatagtcactcccactgttaagcaggaatcaagccagtccgacgttggttctctgcattcatccaaacaccaagattctaaaaaggaggaggagaaaaaaaaacctcatataaagaaacctctgaacgcatttatgttgtatatgaaagagatgagggccaaggtcgtggcagaatgtacactgaaagagtcagcagccattaaccagatcttggggaggcggtggcatgctctttcaagagaggaacaggccaaatattatgaactcgcccgcaaagaaagacagctacatatgcagctgtacccaggatggagtgcgagagataattacggaaaaaagaagaagaggaagagggataaacaacctggcgagacaaacgatctatctgcaccaaagaaatgccgagcaagattcgggctggaccagcaaaataattggtgcggcccttgtagaagaaaaaagaaatgtgttcggtatattcagggcgaaggcagctgcctgtcacctccctccagcgacggctccctgttgtag

SEQ ID NO: 59897 - DNA, 624 bp, Artificial Sequence
  derived and/or modified sequence
ctgactgtgaatgcctccatgagccgcttccccccccacatggtgcccccccaccacaccctgcacaccaccggcatcccccacccagccatcgtgacccccaccgtgaagcaggagagcagccagagtgatgtgggcagcctgcacagcagcaagcaccaggacagcaagaaggaggaggagaagaagaagccccacatcaagaagcccctgaatgccttcatgctgtacatgaaggagatgagggccaaggtggtggccgagtgcaccctgaaggagagcgctgccatcaaccagatcctgggccgccgctggcacgccctgagccgggaggagcaggccaagtactatgagctggccaggaaggagcggcagctgcacatgcagctgtacccaggctggagcgcccgggacaactacggcaagaagaagaagaggaagagggacaagcagcccggggagaccaatgacctgagcgcccccaagaagtgccgggcccgcttcggcctggaccagcagaacaactggtgtggcccctgcaggaggaagaagaagtgtgtgcgctacatccagggcgagggcagctgcctgagcccccccagcagtgatggcagcctgctgtag

SEQ ID NO: 59898 - DNA, 624 bp, Artificial Sequence
  derived and/or modified sequence
ctgaccgtgaacgccagcatgagccggttccccccccacatggtgcccccacatcacacattacacacgacaggcatcccccacccagcaattgtaacacccaccgtgaaacaagaatcttcccagtccgacgttgggagcctgcactcctccaagcaccaggacagcaaaaaggaagaagagaaaaagaaacctcacattaagaagcccttaaatgccttcatgctgtatatgaaggagatgcgggccaaagttgtcgccgagtgtaccttgaaggagtccgccgcaataaaccaaatcttgggtcgacgatggcacgctctcagtagggaggagcaggcaaaatattacgagctggccaggaaggagagacagctgcacatgcagctgtacccaggatggagcgccagagacaactacggcaagaaaaaaaaaagaaaacgcgataagcagcccggggagacgaacgatctcagtgcaccaaagaaatgcagggccagattcggccttgaccaacagaacaattggtgtggcccatgtcgccgcaaaaagaaatgtgttagatacattcagggagagggctcatgtctttcacctccctcgtctgatgggtctttgttatag

SEQ ID NO: 59899 - DNA, 624 bp, Artificial Sequence
  derived and/or modified sequence
cttactgtgaatgcgtcgatgtcccggttcccccctcatatggtcccacctcatcacacgcttcacactaccgggatcccccatcccgcaatcgtgacccccactgttaaacaggagtctagccagtctgacgtgggctcacttcactctagcaagcatcaggacagtaagaaggaagaggaaaagaaaaagccacatatcaagaagcctctcaacgccttcatgctgtatatgaaagaaatgcgggctaaagtggtggcagagtgcactctcaaagaatcagcagccattaaccagatcttaggaaggaggtggcatgccctcagccgcgaagagcaggcaaagtactacgagctggcccgtaaggaacgacagctacacatgcagctctaccccggatggtcagcaagagataactacggcaagaagaaaaaacgcaagagggacaagcagcctggcgaaaccaatgacctcagcgcgcctaaaaagtgccgggctcgattcggtttggaccagcagaacaactggtgcggaccttgtaggaggaagaagaaatgtgtccgctatatccagggcgagggatcctgcctgtctcctcccagttcggacggctccctcctctag

SEQ ID NO: 59900 - DNA, 620 bp, Artificial Sequence
  derived and/or modified sequence
ctgaccgtcaatgcttccatgtccaggttccctccccatatggtcccaccacatcatacgctacacacgacgggcattccgcatccggccatagtcacaccaacagtcaaacaggaatcgtcccagagtgatgtcggctcactccatagttcaaagcatcaggactccaaaaaggaagaagaaaagaagaagccccacataaagaaacctcttaatgcattcatgttgtatatgaaggaaatgagagcaaaggtcgtagctgagtgcacgttgaaagaaagcgcggccatcaaccagatccttgggcggaggtggcatgcactgtccagagaagagcaagcgaaatactacgagctggcccggaaggagcgacagcttcatatgcaactgtaccccggctggtccgcgcgggataactatggaaagaagaagaagaggaaaagggacaagcagccgggagagaccaatgacctgagcgctcctaagaaatgccgagcgcgctttggccttgatcaacagaataactggtgcggcccttgcaggagaaaaaaaaagtgcgttcgctacatacaaggtgaaggcagctgcctcagcccaccctcttcagatggaagcttact

SEQ ID NO: 59901 - protein, 604 aa, Artificial Sequence
  derived and/or modified sequence
MGGCFSKPKPGAALPTVELKIEVVLPEKERGKEELSASGKGSPRAYQGNGTARHFHTEERLSTPHPYPSPQDCVEAAVCHVKDLENGQMREVELGWGKVLLVKDNGEFHALGHKCPHYGAPLVKGVLSRGRVRCPWHGACFNISTGDLEDFPGLDSLHKFQVKIEKEKVYVRASKQALQLQRRTKVMAKCISPSAGYSSSTNVLIVGAGAAGLVCAETLRQEGFSDRIVLCTLDRHLPYDRPKLSKSLDTQPEQLALRPKEFFRAYGIEVLTEAQVVTVDVRTKKVVFKDGFKLEYSKLLLAPGSSPKTLSCKGKEVENVFTIRTPEDANRVVRLARGRNVVVVGAGFLGMEVAAYLTEKAHSVSVVELEETPFRRFLGERVGRALMKMFENNRVKFYMQTEVSELRGQEGKLKEVVLKSSKVVRADVCVVGIGAVPATGFLRQSGIGLDSRGFIPVNKMMQTNVPGVFAAGDAVTFPLAWRNNRKVNIPHWQMAHAQGRVAAQNMLAQEAEMSTVPYLWTAMFGKSLRYAGYGEGFDDVIIQGDLEELKFVAFYTKGDEVIAVASMNYDPIVSKVAEVLASGRAIRKREVETGDMSWLTGKGS

SEQ ID NO: 59902 - DNA, 1815 bp, Artificial Sequence
  derived and/or modified sequence
atgggcggctgcttcagcaagcccaagcccggcgccgccctgcccaccgtggagctgaagatcgaggtggtgctgcccgagaaggagagaggcaaggaggagctgagcgccagcggcaagggcagccccagagcctaccagggcaacggcaccgccagacacttccacaccgaggagagactgagcaccccccacccctaccccagcccccaggactgcgtggaggccgccgtgtgccacgtgaaggacctggagaacggccagatgagagaggtggagctgggctggggcaaggtgctgctggtgaaggacaacggcgagttccacgccctgggccacaagtgcccccactacggcgcccccctggtgaagggcgtgctgagcagaggcagagtgagatgcccctggcacggcgcctgcttcaacatcagcaccggcgacctggaggacttccccggcctggacagcctgcacaagttccaggtgaagatcgagaaggagaaggtgtacgtgagagccagcaagcaggccctgcagctgcagagaagaaccaaggtgatggccaagtgcatcagccccagcgccggctacagcagcagcaccaacgtgctgatcgtgggcgccggcgccgccggcctggtgtgcgccgagaccctgagacaggagggcttcagcgacagaatcgtgctgtgcaccctggacagacacctgccctacgacagacccaagctgagcaagagcctggacacccagcccgagcagctggccctgagacccaaggagttcttcagagcctacggcatcgaggtgctgaccgaggcccaggtggtgaccgtggacgtgagaaccaagaaggtggtgttcaaggacggcttcaagctggagtacagcaagctgctgctggcccccggcagcagccccaagaccctgagctgcaagggcaaggaggtggagaacgtgttcaccatcagaacccccgaggacgccaacagagtggtgagactggccagaggcagaaacgtggtggtggtgggcgccggcttcctgggcatggaggtggccgcctacctgaccgagaaggcccacagcgtgagcgtggtggagctggaggagacccccttcagaagattcctgggcgagagagtgggcagagccctgatgaagatgttcgagaacaacagagtgaagttctacatgcagaccgaggtgagcgagctgagaggccaggagggcaagctgaaggaggtggtgctgaagagcagcaaggtggtgagagccgacgtgtgcgtggtgggcatcggcgccgtgcccgccaccggcttcctgagacagagcggcatcggcctggacagcagaggcttcatccccgtgaacaagatgatgcagaccaacgtgcccggcgtgttcgccgccggcgacgccgtgaccttccccctggcctggagaaacaacagaaaggtgaacatcccccactggcagatggcccacgcccagggcagagtggccgcccagaacatgctggcccaggaggccgagatgagcaccgtgccctacctgtggaccgccatgttcggcaagagcctgagatacgccggctacggcgagggcttcgacgacgtgatcatccagggcgacctggaggagctgaagttcgtggccttctacaccaagggcgacgaggtgatcgccgtggccagcatgaactacgaccccatcgtgagcaaggtggccgaggtgctggccagcggcagagccatcagaaagagagaggtggagaccggcgacatgagctggctgaccggcaagggcagctag

SEQ ID NO: 59903 - DNA, 1815 bp, Artificial Sequence
  derived and/or modified sequence
atggggggctgtttttcaaagccgaagccaggcgctgctctcccaaccgtcgaactgaaaatcgaagtcgtattacccgagaaagagcggggcaaggaggaactgagcgcgagcggaaaggggtcgccaagagcataccagggtaacgggaccgcaaggcacttccacactgaggagcgtctgtccacgccccacccctacccttcaccacaagactgtgtggaggctgccgtctgccacgtgaaagatctggagaatgggcaaatgagagaggtggaattgggctggggaaaagtgcttctggtgaaggacaacggggagtttcatgcactgggacataaatgtccacactatggcgccccgctcgtgaagggagttttgagtcggggccgtgtcagatgtccctggcatggagcctgttttaatatatcaacaggagacctggaggattttccgggcctcgactccttgcacaaatttcaggttaagatcgagaaagagaaggtctatgtgcgagctagtaagcaggccttgcagctgcagcgccggaccaaagttatggctaagtgcatttcgccttcggcaggctattccagcagcacaaacgtcctgatcgttggtgccggcgcagctggacttgtgtgcgccgaaactctgagacaggaaggctttagcgataggatagtgctctgtaccctcgataggcacctgccctatgacagaccaaaattgtccaagagtctggacacgcagccagagcagctggcactccggcctaaggagttctttagggcttatgggatcgaagtgctaacagaagcacaggtggtaacagttgatgtccgtaccaaaaaggtcgtcttcaaagacggattcaagttggaatactctaaactgctgctggcccccggcagcagtcccaaaacactgtcttgcaagggtaaggaggtagagaatgtgttcacaatccgaactcctgaggatgctaatcgggttgttaggttggcccgcggacgcaatgtcgtcgtggtcggcgccggattcctgggcatggaggttgctgcgtacctgaccgaaaaagctcatagcgtgagcgtcgtagagctggaggagactcccttcagacggttcttaggcgaacgggtcggaagggcactaatgaaaatgtttgagaataacagggtgaaattctacatgcaaactgaagtctctgagctgcgaggccaggaagggaaattaaaagaagtggtgctgaaatcctcaaaggtggtcagagccgacgtgtgtgtggtcggaattggtgccgtcccagccacggggttcttgagacagagcgggattggattggattcacgcggattcattcccgtgaacaagatgatgcagacaaacgtgccgggcgtgttcgctgcaggtgacgctgtgacttttccactagcttggaggaacaatcggaaggtgaacattcctcattggcagatggcccatgcccaggggagggtggccgcccaaaacatgctggcgcaggaggcagaaatgtcgacagtgccgtacttgtggacagccatgtttgggaaatcattgagatacgctggttacggtgagggcttcgatgacgtcataattcagggcgatctggaggagctgaagtttgtcgcattttatactaaaggggatgaggtgatcgccgttgccagcatgaattacgaccccatagtgtcaaaggtggcagaagtgctcgctagcggtagggccatccgtaagagggaagtggagaccggcgatatgtcttggctcaccggcaaagggtcctag

SEQ ID NO: 59904 - DNA, 1815 bp, Artificial Sequence
  derived and/or modified sequence
atgggcggctgcttcagcaagcccaagccaggggccgccctgcccaccgtggagctgaagattgaggtggtgctgcctgagaaggagcggggcaaggaggagctgagcgccagcggcaagggcagcccccgggcctaccagggcaatggaacagcccggcacttccacacagaggagcggctgagcaccccccacccctaccccagcccccaggactgtgtggaggccgctgtgtgccacgtgaaggacctggagaatggccagatgagggaggtggagctgggctggggcaaggtgctgctggtgaaggacaatggagagttccacgccctgggccacaagtgcccccactacggggcccccctggtgaagggcgtgctgagccggggccgggtgcgctgcccctggcatggagcctgcttcaacatcagcactggagacctggaggacttccctggcctggacagcctgcacaagttccaggtgaagattgagaaggagaaggtgtatgtgcgggccagcaagcaggccctgcagctgcagaggaggaccaaggtgatggccaagtgcatcagccccagcgctggctacagcagcagcaccaacgtgctgattgtgggcgctggagctgctggcctggtgtgtgccgagaccctgcggcaggagggcttcagtgaccgcatcgtgctgtgcaccctggacagacacctgccctatgaccggcccaagctgagcaagagcctggacacccagcctgagcagctggccctgcggcccaaggagttcttccgggcctacggcatcgaggtgctgacagaggcccaggtggtgacagtggatgtgaggaccaagaaggtggtgttcaaggatggcttcaagctggagtacagcaagctgctgctggcccctggcagcagccccaagaccctgagctgcaagggcaaggaggtggagaatgtgttcaccatccgcaccccagaagatgccaacagagtggtgcggctggcccggggcagaaatgtggtggtggtgggcgccggcttcctgggcatggaggtggccgcctacctgacagagaaggcccacagcgtgtctgtggtggagctggaggagacccccttccgccgcttcctgggggagcgggtgggccgggccctgatgaagatgtttgagaacaacagagtgaagttctacatgcagacagaggtgtctgagctgcggggccaggagggcaagctgaaggaggtggtgctgaagagcagcaaggtggtgcgggcagatgtgtgtgtggtgggcattggagctgtgcctgccaccggcttcctgcggcagagcggcatcggcctggacagccggggcttcatccctgtgaacaagatgatgcagaccaacgtgcctggggtgtttgctgctggagatgctgtgaccttccccctggcctggaggaacaacaggaaggtgaacatcccccactggcagatggcccacgcccagggccgggtggccgcccagaacatgctggcccaggaggccgagatgagcacagtgccctacctgtggacagccatgtttgggaagagcctgcgctatgccggctatggagagggctttgatgatgtgatcatccagggcgacctggaggagctgaagtttgtggccttctacaccaagggagatgaggtgattgctgtggcctccatgaactatgaccccatcgtgtccaaggtggccgaggtgctggccagcggccgggccatcaggaagcgggaggtggagactggagacatgtcctggctgaccgggaagggcagctag

SEQ ID NO: 59905 - DNA, 1815 bp, Artificial Sequence
  derived and/or modified sequence
atgggcggctgcttcagcaagcccaagcccggcgccgccctgcccactgtcgagctgaagatcgaggtggttctacctgaaaaggaaagagggaaggaggagctgtcagcatccggcaagggaagcccaagagcgtatcaaggcaatggaaccgcccgacatttccatactgaagaacgactgagcacaccccacccctacccgtctccccaggactgtgtagaggcggccgtgtgccatgtgaaggatctcgaaaatggccagatgagagaggtcgagctggggtgggggaaggttctgctggtgaaggacaatggcgagtttcatgcactcggccacaagtgtcctcactacggagctccactcgttaaaggtgtattgagccgcggtcgggtgcggtgtccctggcacggagcctgtttcaacatctctaccggggatctcgaagactttccaggattggactcccttcataaatttcaggtgaagatcgagaaagagaaggtctatgtccgggccagcaagcaggcactgcagcttcagcgccgaaccaaggtgatggccaagtgcatctcaccttcagccgggtacagttctagcacaaatgtactgattgtcggggcaggggcggccggcctggtttgcgccgaaactctgcggcaggaaggcttcagcgaccgcatcgtcttgtgcaccctcgatagacatttaccctacgacaggccaaaacttagcaagagcctcgacacccagccggaacagctggctctgcgcccaaaagaattttttagagcgtatggcatcgaggttctcacagaggcacaggtagttacagtggatgtgcggacgaaaaaggtagtgttcaaagacgggtttaagctggagtacagtaagctcttgcttgccccaggctcctcacccaagacactttcttgcaaggggaaggaagtcgaaaatgtgtttaccattaggacgcctgaggatgccaacagggttgtaagactggcgcgaggtagaaacgtcgtggtcgtaggagccggattccttgggatggaggtcgccgcctaccttactgagaaggctcatagcgtatccgtggtggagctggaggagaccccgttccgccgttttctcggggaacgagtaggtagggccctgatgaaaatgtttgaaaataacagagttaagttttacatgcagactgaagtgtcggaattacgcggccaggaaggcaagttgaaagaagtggtacttaaatccagcaaggtggtaagggctgatgtctgcgttgtcggcatcggggctgtgcctgctactggcttcctgcgacagtctggcatcggactcgactcacgcggatttatccccgtcaataagatgatgcagactaacgttccgggagtctttgcagccggagacgcagttacatttcctctggcctggaggaacaacagaaaggtgaatattcctcactggcagatggcccacgcacagggacgcgtcgcagctcagaatatgctcgctcaggaggccgagatgtcaactgtgccctacctgtggaccgctatgtttggtaaaagcctaagatacgcaggctacggggagggcttcgatgacgtgatcattcagggtgacctggaggagctcaagttcgtagccttctacacaaaaggagatgaagtcatcgctgttgcctcaatgaactatgaccccattgtgtcaaaagttgcagaggtgctggcctctggccgcgcaattcgaaaacgggaagtggagaccggggacatgagttggttgaccgggaagggctcatag

SEQ ID NO: 59906 - DNA, 2333 bp, Artificial Sequence
  derived and/or modified sequence
agtccactgctgggcctggaacacggagcagtggctgccctgcgaggaggtcctagagcagctccagcaggatggcggctccagcgtctctaaggcctgcagggggtccagccccatggggggcgccctaggcctccgacagctccccatctgtgctcctgcctgccggccatcctcaggccactcgccatgggcggctgcttctccaaacccaaaccaggcgctgccttgcccacagtggagctcaagatcgaggtggtgctgcctgagaaggagcgaggcaaggaggagctgtcggccagtgggaagggcagcccccgggcctaccagggcaatggcacggcccgccacttccacacggaggagcgcctgtccacccctcacccctaccccagccctcaggattgcgtggaggctgctgtctgccacgtcaaggacctcgagaatggccagatgcgggaagtggagctgggctgggggaaggtgttgctggtgaaggacaatggggagttccacgccctgggccataagtgtccgcactacggcgcacccctggtgaaaggcgttctgtcccgtggtcgggtgcgctgcccctggcacggcgcctgcttcaacatcagcactggggacctggaggacttccctggcctggacagtctacacaagttccaggtgaagattgagaaggagaaggtgtacgtccgggccagcaagcaggccctacagctgcagcgaaggaccaaggtgatggccaagtgtatctctccaagtgctgggtacagcagtagcaccaatgtgctcattgtgggtgcaggtgcagctggcctggtgtgtgcagagacactgcggcaggagggcttctccgaccggatcgtcctgtgcacgctagaccggcaccttccctacgaccgtcccaagctcagcaagtccctggacacacagcctgagcagctggccctgaggcccaaggagtttttccgagcctatggcatcgaggtgctcaccgaggctcaggtggtcacagtggacgtgagaactaagaaggtcgtgttcaaggatggcttcaagctggagtacagcaagctgctgctggcaccagggagcagccccaagactctgagctgcaaaggcaaagaagtggagaacgtgttcactatccggacgccagaggatgccaatcgcgtggtgaggctggcccgaggccgcaacgtggtcgtcgtgggagccggcttcctggggatggaggtggccgcttacctgacggagaaggcccactctgtgtctgtggtggagctggaggagacgcccttcaggaggttcctgggggagcgcgtgggtcgagccctcatgaagatgtttgagaacaaccgggtgaagttctacatgcagacggaggtgtctgagctgcggggccaggagggaaagctgaaggaggttgtgctgaagagcagcaaggtcgtgcgggctgacgtctgcgtggtgggcattggtgcagtgcccgccacaggcttcctgaggcaaagcggcatcggtttggattcccgaggcttcatccctgtcaacaagatgatgcagaccaatgtcccaggcgtgtttgcagctggcgatgctgtcaccttcccccttgcctggaggaacaaccgcaaagtgaacattccacattggcagatggctcatgctcaggggcgcgtggcagcccagaacatgttggcgcaggaggcggagatgagcactgtgccctacctctggaccgccatgtttggcaagagcctgcgctacgcgggctacggagaaggcttcgacgacgtcatcatccagggggatctggaggagctgaagtttgtggctttttacactaaaggcgacgaggtgatcgccgtggccagcatgaactacgatcccattgtgtccaaggtcgctgaggtgctggcctcaggccgtgccatccggaagcgggaggtggagactggcgacatgtcctggcttacggggaaaggatcctgagctcacatgcagtagacttgggcaggcaaagggggcaccaagggcacaggccaagccttgggggcaggtgccaatctccagtcccaggatcccccagggcagaacctgagccctcccagtgcttgccttcagccacctggctcccctcctgggaggcctctgctggatccagaagatgctcaaccctcaaggcctctgctgccactgacagctggcactggaggcaggacaagccctgcctcttctccctctattgggactggtcccctgaagaaccctgcaacacgttaaacattaccgtaaaattaaaacgcacaaatttgcagatc

SEQ ID NO: 59907 - DNA, 1815 bp, Artificial Sequence
  derived and/or modified sequence
atggggggttgcttctcaaaacctaaaccaggggcagcactgcctactgtcgagctcaaaatcgaagtggtcctccctgagaaagagaggggcaaagaagaactgagcgcttccggtaaggggagcccaagggcttaccagggaaatgggactgccagacacttccatactgaggaaaggctctccacgcctcacccataccccagtcctcaggactgcgttgaggctgcggtttgtcacgtgaaggacctcgaaaacggccaaatgagagaagttgagctgggatgggggaaagtgctgctggtgaaggacaacggggaatttcatgccttggggcacaagtgtccccactatggcgctccgctcgtgaagggtgtgctgagccggggacgtgtgcgatgtccttggcacggggcatgcttcaacatttctactggtgacctggaagacttccctggattagacagcttgcacaaattccaggtgaaaattgagaaagaaaaagtttacgtgcgggcaagcaaacaagctcttcagctgcaacggcgtactaaggtgatggctaaatgcatatcccctagcgccggttatagctcttccacgaatgtcttgattgtgggcgctggagctgccggtctggtgtgcgctgagaccctgcgccaagagggcttctcagaccggatcgtgttatgcaccctagataggcatctgccgtacgaccgacccaagctctcaaaaagtctcgacactcagcccgaacagcttgcactgcgcccaaaagagtttttccgcgcttacggcatagaggtcctgacggaggcccaggtcgttactgtcgatgtgagaaccaaaaaagtggtatttaaggatggcttcaaactggaatacagtaagctccttcttgcacccggtagctcacctaagactctctcgtgcaaagggaaagaggtcgagaacgtgttcactattcgcaccccagaagacgcaaatcgggttgtgcggctagccagagggcgaaacgttgtcgtcgttggggctggatttctgggaatggaagtggccgcatacttgacagaaaaggcacattctgtttcggttgttgaactggaggagaccccttttcgacgcttcctgggagaacgggtgggccgagccctcatgaaaatgtttgaaaataacagggtgaagttttacatgcagactgaggtgagtgaactgcgcggtcaggagggaaagctgaaagaggtggtgctgaaatccagcaaggtcgtgcgcgcagacgtgtgcgttgttggaatcggtgcagtgccggctactggatttctgcgacagtccggaattggcctcgactctaggggcttcattccggtgaacaaaatgatgcaaacgaacgtcccaggagtgtttgctgccggagacgccgtgacattcccgctcgcctggagaaacaaccgtaaagtaaacataccgcactggcagatggcacatgcccaaggaagggtagcagctcagaacatgctggcacaggaagctgagatgtctacggtgccatacctttggacagcgatgtttgggaagagcctaaggtacgccggatacggtgaaggattcgatgatgtaatcattcagggggatttagaagaacttaagtttgtggccttctacacaaagggcgacgaggttatcgccgtcgcatccatgaactacgatcctatcgtgagcaaggtggcagaggttcttgctagtggcagagctatcaggaagcgtgaagtggagaccggagacatgtcgtggcttactggcaagggtagttag

SEQ ID NO: 59908 - protein, 575 aa, Artificial Sequence
  derived and/or modified sequence
MAMSQESLTFKDVFVDFTLEEWQQLDSAQKNLYRDVMLENYSHLVSVGHLVGKPDVIFRLGPGDESWMADGGTPVRTCAVWEVDEQIDHYKESQDKFLWQAAFIGKETLKDESGQECKICRKIIYLNTDFVSVKQRLPKYYSWERCSKHHLNFLGQNRSYVRKKDDGCKAYWKVCLHYNLHKAQPAERFFDPNQRGKALHQKQALRKSQRSQTGEKLYKCTECGKVFIQKANLVVHQRTHTGEKPYECCECAKAFSQKSTLIAHQRTHTGEKPYECSECGKTFIQKSTLIKHQRTHTGEKPFVCDKCPKAFKSSYHLIRHEKTHIRQAFYKGIKCTTSSLIYQRIHTSEKPQCSEHGKASDEKPSPTKHWRTHTKENIYECSKCGKSFRGKSHLSVHQRIHTGEKPYECSICGKTFSGKSHLSVHHRTHTGEKPYECRRCGKAFGEKSTLIVHQRMHTGEKPYKCNECGKAFSEKSPLIKHQRIHTGERPYECTDCKKAFSRKSTLIKHQRIHTGEKPYKCSECGKAFSVKSTLIVHHRTHTGEKPYECRDCGKAFSGKSTLIKHQRSHTGDKNL

SEQ ID NO: 59909 - DNA, 1728 bp, Artificial Sequence
  derived and/or modified sequence
atggccatgagccaggagagcctgaccttcaaggacgtgttcgtggacttcaccctggaggagtggcagcagctggacagcgcccagaagaacctgtacagagacgtgatgctggagaactacagccacctggtgagcgtgggccacctggtgggcaagcccgacgtgatcttcagactgggccccggcgacgagagctggatggccgacggcggcacccccgtgagaacctgcgccgtgtgggaggtggacgagcagatcgaccactacaaggagagccaggacaagttcctgtggcaggccgccttcatcggcaaggagaccctgaaggacgagagcggccaggagtgcaagatctgcagaaagatcatctacctgaacaccgacttcgtgagcgtgaagcagagactgcccaagtactacagctgggagagatgcagcaagcaccacctgaacttcctgggccagaacagaagctacgtgagaaagaaggacgacggctgcaaggcctactggaaggtgtgcctgcactacaacctgcacaaggcccagcccgccgagagattcttcgaccccaaccagagaggcaaggccctgcaccagaagcaggccctgagaaagagccagagaagccagaccggcgagaagctgtacaagtgcaccgagtgcggcaaggtgttcatccagaaggccaacctggtggtgcaccagagaacccacaccggcgagaagccctacgagtgctgcgagtgcgccaaggccttcagccagaagagcaccctgatcgcccaccagagaacccacaccggcgagaagccctacgagtgcagcgagtgcggcaagaccttcatccagaagagcaccctgatcaagcaccagagaacccacaccggcgagaagcccttcgtgtgcgacaagtgccccaaggccttcaagagcagctaccacctgatcagacacgagaagacccacatcagacaggccttctacaagggcatcaagtgcaccaccagcagcctgatctaccagagaatccacaccagcgagaagccccagtgcagcgagcacggcaaggccagcgacgagaagcccagccccaccaagcactggagaacccacaccaaggagaacatctacgagtgcagcaagtgcggcaagagcttcagaggcaagagccacctgagcgtgcaccagagaatccacaccggcgagaagccctacgagtgcagcatctgcggcaagaccttcagcggcaagagccacctgagcgtgcaccacagaacccacaccggcgagaagccctacgagtgcagaagatgcggcaaggccttcggcgagaagagcaccctgatcgtgcaccagagaatgcacaccggcgagaagccctacaagtgcaacgagtgcggcaaggccttcagcgagaagagccccctgatcaagcaccagagaatccacaccggcgagagaccctacgagtgcaccgactgcaagaaggccttcagcagaaagagcaccctgatcaagcaccagagaatccacaccggcgagaagccctacaagtgcagcgagtgcggcaaggccttcagcgtgaagagcaccctgatcgtgcaccacagaacccacaccggcgagaagccctacgagtgcagagactgcggcaaggccttcagcggcaagagcaccctgatcaagcaccagagaagccacaccggcgacaagaacctgtag

SEQ ID NO: 59910 - DNA, 1728 bp, Artificial Sequence
  derived and/or modified sequence
atggccatgtcccaggagtctctaacctttaaagacgtgtttgtcgatttcaccctggaggaatggcagcagctcgactctgcgcagaaaaatctgtaccgagacgtgatgctggaaaattactcacacctcgtcagcgtgggccaccttgtgggcaaacctgatgttatcttccgactgggcccaggggacgagagttggatggccgatggcggaacaccggttcggacgtgcgcagtgtgggaagttgacgaacagatcgatcattacaaggaaagccaggacaaatttctgtggcaggccgcgtttatcggcaaggaaactctcaaggacgaatcaggccaggaatgtaagatctgccgcaagataatttacctcaacacggacttcgtgtccgtgaaacagcggctgcctaaatattactcttgggaaagatgcagcaaacatcatctgaacttcctcgggcagaaccggtcttacgtaaggaagaaagatgatgggtgcaaggcctactggaaggtgtgtttgcattacaatctgcacaaagcccaacctgccgaacgctttttcgatcccaaccagcgggggaaggcgctgcatcagaaacaggcactgcggaaaagccagcgctcacaaacaggcgaaaaactctacaagtgcacggaatgcggcaaagtcttcattcaaaaagccaatttggtcgtacaccaacggacccataccggagagaagccctacgagtgctgtgagtgcgcaaaagcctttagccaaaaaagcaccctcattgcccatcagcgaacgcacacaggcgaaaaaccctacgagtgcagcgaatgcgggaaaacattcatccaaaaaagcacactcattaagcaccagaggacacacaccggcgaaaaaccctttgtctgcgacaaatgtccaaaagcctttaaaagtagttatcaccttattaggcacgaaaaaacccacatacgccaggccttctacaaggggatcaagtgcacaaccagctcactaatttaccagcggattcatacctctgagaagcctcagtgctccgagcatgggaaagcttccgacgagaagccttcacccacgaagcactggaggacgcacacaaaagaaaacatctatgagtgctctaagtgtggaaagagctttaggggcaaatctcatctttcggtacatcagaggattcacactggagaaaagccatatgaatgttctatctgtgggaaaaccttctcaggcaagagccatctgagtgttcatcacaggactcataccggcgaaaaaccttacgagtgcaggcggtgtggcaaagcctttggggagaagtccacactgatcgtgcaccagcggatgcacactggcgagaagccctataaatgcaatgagtgcggaaaggcctttagcgaaaaaagcccactcattaagcaccagcggattcataccggggaacgcccttacgagtgcacagattgcaagaaggccttctccaggaaatccaccttaatcaagcaccagagaatccatacgggagagaaaccctacaagtgctctgaatgcggtaaagcattttccgtgaaatcaacactcatagttcaccatagaactcacactggagagaaaccctatgaatgccgtgattgcgggaaggccttttctgggaaatccactttgatcaaacaccagcgatcccacactggggataagaatctgtag

SEQ ID NO: 59911 - DNA, 1728 bp, Artificial Sequence
  derived and/or modified sequence
atggccatgagccaggagagcctgaccttcaaggatgtgtttgtggacttcaccctggaggagtggcagcagctggacagcgcccagaagaacctgtacagagatgtgatgctggagaactacagccacctggtgtctgtgggccacctggtgggcaagccagatgtgatcttccggctgggccctggagatgagagctggatggctgatggcggcacccctgtgaggacctgtgctgtgtgggaggtggatgagcagattgaccactacaaggagagccaggacaagttcctgtggcaggccgccttcatcggcaaggagaccctgaaggatgaaagtggccaggagtgcaagatctgcaggaagatcatctacctgaacacagactttgtgtctgtgaagcagaggctgcccaagtactacagctgggagcgctgcagcaagcaccacctgaacttcctgggccagaacagaagctatgtgaggaagaaggatgatggctgcaaggcctactggaaggtgtgcctgcactacaacctgcacaaggcccagcctgctgagcgcttctttgaccccaaccagaggggcaaggccctgcaccagaagcaggccctgaggaagagccagaggagccagacaggagagaagctgtacaagtgcacagaatgtgggaaggtgttcatccagaaggccaacctggtggtgcaccagaggacccacactggagagaagccctatgagtgctgtgaatgtgccaaggccttcagccagaagagcaccctcatcgcccaccagaggacccacactggagagaagccctatgaatgttctgaatgtgggaagaccttcatccagaagagcaccctcatcaagcaccagaggacccacactggagagaagccctttgtgtgtgacaagtgccccaaggccttcaagagcagctaccacctgatcagacatgagaagacccacatccggcaggccttctacaagggcatcaagtgcaccaccagcagcctcatctaccagaggatccacaccagcgagaagccccagtgcagcgagcacggcaaggccagtgatgagaagcccagccccaccaagcactggaggacccacaccaaggagaacatctatgagtgcagcaaatgtgggaagagcttccggggcaagagccacctgtctgtgcaccagaggatccacactggagagaagccctatgagtgcagcatctgtgggaagaccttcagcggcaagagccacctgtctgtgcaccacaggacccacactggagagaagccctatgagtgccgccgctgtgggaaggccttcggggagaagagcaccctgattgtgcaccagaggatgcacactggagagaagccctacaagtgcaatgaatgtgggaaggccttcagcgagaagagccccctcatcaagcaccagaggatccacactggagagcggccctatgagtgcacagactgcaagaaggccttcagcaggaagagcaccctcatcaagcaccagaggatccacactggagagaagccctacaagtgcagtgaatgtgggaaggccttctctgtgaagagcaccctgattgtgcaccacaggacccacactggagagaagccctatgagtgccgggactgtgggaaggccttcagcggcaagagcaccctcatcaagcaccagaggagccacactggagacaagaacctgtag

SEQ ID NO: 59912 - DNA, 1728 bp, Artificial Sequence
  derived and/or modified sequence
atggccatgagccaggagagcctgaccttcaaggacgtgttcgtggattttacattggaggagtggcaacaacttgacagcgcacagaaaaatttataccgagacgtgatgcttgagaattacagccatctcgtatccgtggggcacctagtggggaaaccagacgtgatcttccgcctgggccctggcgatgagtcctggatggcagatggcgggacacccgtgaggacatgcgcagtatgggaagtggatgaacagatcgaccactataaagaaagccaggacaaatttttatggcaagctgcctttatcggtaaagagacactgaaggatgaaagcggacaagagtgtaaaatctgtagaaaaatcatttacctcaacacagactttgtaagcgttaagcaacgactgcccaagtactacagttgggaaagatgcagcaagcatcatctgaatttcctcggccagaatagaagctacgtaaggaaaaaggatgatggttgcaaggcctattggaaggtgtgcttacactacaacctgcacaaagcgcagcctgccgagcgattcttcgaccctaatcagaggggcaaggccctgcaccaaaaacaggctctccgaaagtcccagcgatcccagacaggcgaaaagttatataaatgcaccgaatgcggcaaagttttcatccaaaaggctaacttagtcgtacatcaacggacgcacactggagaaaagccatacgagtgttgtgagtgcgctaaagccttctcacagaagtccaccctgatcgcgcaccaaaggacccatacaggtgaaaaaccatacgagtgtagcgagtgcggcaaaacctttatccagaagtccactctgatcaaacatcagcgcacacacactggagagaagccgtttgtctgtgacaagtgtcccaaagctttcaaatcatcttatcacctgatccggcacgagaagactcatatccggcaggcgttctacaagggcattaaatgcactacaagctcgttgatctatcagcgaatccacacatccgaaaagccccaatgtagtgagcatggcaaagccagcgatgaaaaaccttcacctacaaaacactggcggacccatacgaaagagaacatctatgaatgctccaagtgcgggaagtcttttagaggtaaatcacatttaagcgttcatcaacgcatccatactggagaaaaaccatacgaatgctcgatttgtggcaaaaccttttccgggaagagtcatctgtctgtgcaccatcggactcatacaggcgagaaaccatacgagtgtcgccggtgcggtaaagcttttggggaaaagagcactctgatagtccaccagcgaatgcataccggtgagaagccctataagtgtaacgagtgcggcaaggcattttcggagaagagtccactaattaaacaccagcgcattcatactggggagcggccctatgagtgcacagattgtaagaaagcttttagcagaaagtctaccttgatcaagcatcagaggatccacacaggagaaaaaccctataaatgcagtgaatgcggtaaggccttcagtgtgaaatccacacttatagtccaccaccggacgcacacgggcgagaaaccctacgagtgtcgggactgtggtaaggcgttttccggcaagagtactttaattaagcaccagagatcccacacaggcgataaaaacctttag

SEQ ID NO: 59913 - DNA, 1728 bp, Artificial Sequence
  derived and/or modified sequence
atggcaatgagtcaggaatcactgaccttcaaggacgtctttgtcgacttcacactcgaggagtggcagcaactggactctgcccaaaaaaatctgtacagggacgtgatgctggagaattacagccaccttgtttcagtcggacacctagtgggcaaacctgacgtcatcttcagactcggacccggagacgagtcatggatggcagatggaggcacaccggtgagaacgtgtgccgtgtgggaagtggacgagcagattgaccattacaaggagtctcaggacaaattcttgtggcaggccgctttcatcggcaaagaaacacttaaagacgagtccggacaggagtgtaaaatctgccgcaaaatcatatacctaaacactgacttcgtgagcgtgaagcagcgcctaccaaagtattattcctgggagcgctgctccaagcatcacctgaactttctcggacagaacaggtcttacgttaggaagaaggacgatggatgtaaggcatattggaaggtttgtctgcattataatttgcacaaggcccagcccgctgagaggttctttgatcctaatcaaaggggcaaagcgctacaccagaagcaggccctgcgcaagtcccagcgatcgcagacaggagagaaactgtacaagtgcactgagtgtggcaaggtctttatccagaaggcaaatttggtggtacatcagcggacccatacaggcgaaaaaccctatgaatgctgtgagtgtgccaaggctttcagccagaagagtacactgattgcccaccagaggacgcataccggtgaaaagccttatgaatgttccgaatgcgggaaaacattcattcaaaagagcacattaattaagcaccagcggacacacacgggtgaaaagccatttgtgtgcgacaagtgcccaaaggcattcaaaagctcatatcatttaatccgacacgagaaaacccatattcgacaagctttttataagggtattaaatgcaccaccagctctctgatataccagaggatacacacgtcagagaagccccagtgtagtgaacacggaaaggcatccgatgagaaacctagccctactaagcattggagaacccacaccaaagagaacatttacgagtgctccaagtgtggtaaatcatttcgaggtaagagtcacctaagcgttcatcagagaattcacaccggagagaagccatacgaatgttctatctgtggcaaaacatttagcggtaaatcccacctgtcagtccaccaccgaacccatacgggcgagaaaccttatgagtgtcgcagatgcggcaaagccttcggagaaaagagcacgctgatcgtccaccagcggatgcatacaggagaaaagccatacaaatgcaacgagtgcggcaaagcattcagcgagaagagccccctcatcaaacatcagcgcattcataccggtgagcgtccatatgagtgcacagattgcaagaaagcattctctcggaaatcaaccctgattaagcatcagaggatccacaccggagaaaagccttataaatgcagtgagtgtgggaaggccttctcggttaagtccacgctgatagtgcatcataggacccacacgggcgaaaaaccctacgaatgcagagactgtggaaaagcttttagtggtaagagtacgcttattaagcaccagagatctcacacaggtgataagaacctgtag

SEQ ID NO: 59914 - DNA, 2274 bp, Artificial Sequence
  derived and/or modified sequence
ggtcagagtgcagacctgagaccactgctcaccgatttcagactccagtttatctgtgcctcggcttccccacttagtcgcagaagacttaggctgaggccccaggaagagatctccatcctttgcaggagcacaacaagatggccatgtcccaggaatcattgaccttcaaggacgtgtttgtggacttcaccctggaggagtggcagcaactggactctgcccagaagaacctctacagggatgtcatgcttgagaactacagccacctggtgtccgtggggcatctagttgggaagccagatgtgatcttcaggttgggaccaggtgacgagtcctggatggcagatggagggaccccggtacggacctgtgcagtctgggaagttgacgagcagatagatcactacaaggaaagccaagacaaatttctgtggcaagctgcattcataggcaaggaaacactgaaggatgaaagtggtcaagaatgtaaaatatgtagaaaaatcatttatctcaacacagactttgtttctgtaaaacaaagactccctaaatattattcatgggaaaggtgttcaaaacatcatttaaactttcttggtcaaaatagaagctatgtaagaaagaaagatgatggatgtaaggcatattggaaagtatgcctccattataatcttcataaagctcaacctgcagagagattttttgaccctaatcaacgagggaaagccctccaccaaaagcaagcccttagaaaaagtcagagaagtcaaactggggagaaactctacaaatgtactgaatgtggaaaagtgtttatccagaaagcaaacttagttgtacatcaaagaactcacaccggagagaaaccttatgaatgctgcgaatgtgcaaaagccttcagccagaagtcaaccctcatagcacaccagagaactcacacaggggagaagccctatgaatgcagtgaatgtggaaaaacctttatccagaagtcaactctgattaaacatcaacgaactcatacaggagagaaaccatttgtatgtgacaaatgtccaaaagcctttaagagttcatatcatcttattagacatgaaaaaacacacattagacaagcattttataaaggtattaaatgtactacgtccagccttatatatcaaagaattcacacaagtgagaaacctcagtgcagtgaacatgggaaagcctctgatgagaagcccagtcccactaaacattggagaactcatacaaaagagaacatttatgagtgtagtaaatgtgggaaaagcttcagaggaaagtcacacctctctgttcatcagagaattcatacaggagagaaaccctatgaatgtagtatatgtgggaagactttcagtggaaagtcacacctctctgtccatcatagaactcatacaggagagaaaccttatgaatgcagaagatgtgggaaagcctttggggagaagtcaacccttattgtacatcagagaatgcatacaggagagaaaccctataaatgcaacgaatgtgggaaagcctttagtgagaagtcaccactgattaaacatcagagaattcatacaggagagagaccctatgaatgcactgactgtaaaaaagccttcagtaggaagtcaactctcatcaaacatcagagaattcatacaggagaaaaaccttacaaatgtagtgaatgtgggaaggccttcagtgtgaaatcaactctcattgtgcatcacagaactcatacaggagagaaaccttatgaatgcagagactgtgggaaagcattcagtgggaagtcaactctcattaaacatcagagaagtcacacaggagataaaaacctatgattatacttgagagtgggataattatactagtagttatttgtcatttgactattactagtctcattatttgtcaaataatcatggcgagtaatcttataaatgtccagaatattggaaattcttcatatgttaatgttcatttaacttaatacaaagtacaaaagtataattccagaggtgtcaataaatgtgatcagttttttcacccagaattcttcacccaggagtgaagaactgtatgtcaaataattcaaaaggggcaaaactgaatgtagttatgtgggaaagccttcagaaataatttaaatggcactgtttatcagagtatgtatgccgaggaaaactaagaatttagtgagcttataaaaccatggtagccaggcgtggtacgtagctcacacctgta

SEQ ID NO: 59915 - protein, 684 aa, Artificial Sequence
  derived and/or modified sequence
MKLKRARLADDLNEKIALRPGPLELVEKNILPVDSAVKEAIKGNQVSFSKSTDAFAFEEDSSSDGLSPDQTRSEDPQNSAGSPPDAKASDTPSTGSLGTNQDLASGSENDRNDSASQPSHQSDAGKQGLGPPSTPIAVHAAVKSKSLGDSKNRHKKPKDPKPKVKKLKYHQYIPPDQKAEKSPPPMDSAYARLLQQQQLFLQLQILSQQQQQQQHRFSYLGMHQAQLKEPNEQMVRNPNSSSTPLSNTPLSPVKNSFSGQTGVSSFKPGPLPPNLDDLKVSELRQQLRIRGLPVSGTKTALMDRLRPFQDCSGNPVPNFGDITTVTFPVTPNTLPNYQSSSSTSALSNGFYHFGSTSSSPPISPASSDLSVAGSLPDTFNDASPSFGLHPSPVHVCTEESLMSSLNGGSVPSELDGLDSEKDKMLVEKQKVINELTWKLQQEQRQVEELRMQLQKQKRNNCSEKKPLPFLAASIKQEEAVSSCPFASQVPVKRQSSSSECHPPACEAAQLQPLGNAHCVESSDQTNVLSSTFLSPQCSPQHSPLGAVKSPQHISLPPSPNNPHFLPSSSGAQGEGHRVSSPISSQVCTAQNSGAHDGHPPSFSPHSSSLHPPFSGAQADSSHGAGGNPCPKSPCVQQKMAGLHSSDKVGPKFSIPSPTFSKSSSAISEVTQPPSYEDAVKQVTM

SEQ ID NO: 59916 - protein, 986 aa, Artificial Sequence
  derived and/or modified sequence
MTLLGSEHSLLIRSKFRSVLQLRLQQRRTQEQLANQGIIPPLKRPAEFHEQRKHLDSDKAKNSLKRKARNRCNSADLVNMHILQASTAERSIPTAQMKLKRARLADDLNEKIALRPGPLELVEKNILPVDSAVKEAIKGNQVSFSKSTDAFAFEEDSSSDGLSPDQTRSEDPQNSAGSPPDAKASDTPSTGSLGTNQDLASGSENDRNDSASQPSHQSDAGKQGLGPPSTPIAVHAAVKSKSLGDSKNRHKKPKDPKPKVKKLKYHQYIPPDQKAEKSPPPMDSAYARLLQQQQLFLQLQILSQQQQQQQHRFSYLGMHQAQLKEPNEQMVRNPNSSSTPLSNTPLSPVKNSFSGQTGVSSFKPGPLPPNLDDLKVSELRQQLRIRGLPVSGTKTALMDRLRPFQDCSGNPVPNFGDITTVTFPVTPNTLPNYQSSSSTSALSNGFYHFGSTSSSPPISPASSDLSVAGSLPDTFNDASPSFGLHPSPVHVCTEESLMSSLNGGSVPSELDGLDSEKDKMLVEKQKVINELTWKLQQEQRQVEELRMQLQKQKRNNCSEKKPLPFLAASIKQEEAVSSCPFASQVPVKRQSSSSECHPPACEAAQLQPLGNAHCVESSDQTNVLSSTFLSPQCSPQHSPLGAVKSPQHISLPPSPNNPHFLPSSSGAQGEGHRVSSPISSQVCTAQNSGAHDGHPPSFSPHSSSLHPPFSGAQADSSHGAGGNPCPKSPCVQQKMAGLHSSDKVGPKFSIPSPTFSKSSSAISEVTQPPSYEDAVKQQMTRSQQMDELLDVLIESGEMPADAREDHSCLQKVPKIPRSSRSPTAVLTKPSASFEQASSGSQIPFDPYATDSDEHLEVLLNSQSPLGKMSDVTLLKIGSEEPHFDGIMDGFSGKAAEDLFNAHEILPGPLSPMQTQFSPSSVDSNGLQLSFTESPWETMEWLDLTPPNSTPGFSALTTSSPSIFNIDFLDVTDLNLNSSMDLHLQQW

SEQ ID NO: 59917 - DNA, 2961 bp, Artificial Sequence
  derived and/or modified sequence
atgacacttttggggtccgaacatagcctcctgatcagatccaagttcagatctgtgttgcagctgcggctgcagcagaggcgaacccaggagcagttggcaaaccagggcattatcccccctcttaagaggcctgctgaattccatgagcagcggaagcatctggattccgacaaagctaagaatagcttgaagcgcaaggctcggaatagatgcaacagcgcggatctagtgaacatgcatatcctccaagcttccaccgctgagaggagcatccctactgctcagatgaaactgaagagggcccgcctggccgatgacttgaacgagaaaattgctcttcgccccggcccactggaactggtggagaaaaacatccttccagtggactccgccgtcaaagaggctattaaaggaaaccaagtgtcattctctaaatcaacggatgccttcgcgttcgaagaagatagctcatcagacggcctttcacccgaccagaccaggtctgaagatccacagaacagtgctggctcccccccagatgccaaggcaagtgacacaccctcaaccggctccctcgggaccaatcaggatttagcttccggctccgaaaatgatcgcaatgattcagccagccaaccctcgcaccaatccgatgctggtaagcaaggtctgggccccccgtcaacacccattgctgttcatgccgctgtgaaaagtaagtctttgggggacagcaagaacaggcataaaaagccgaaggaccctaagcccaaggttaagaaactgaagtatcaccaatatatccccccagatcagaaggctgaaaaaagccctccaccaatggactctgcctacgccagactgttgcagcagcagcagctgttcctacagcttcagatactgagccagcagcaacagcaacagcagcataggttcagttatctggggatgcaccaggcccaactgaaggagccaaacgaacagatggtcaggaatccaaattcatcatcaactcccctcagtaatactcctctgtctccggtcaaaaacagcttctcagggcaaacaggcgtatcctccttcaagccagggccactcccccctaatttagatgatctgaaagtcagcgagttacgacagcagctgcggatcaggggattgcccgtctctggaaccaagaccgcacttatggatcggttgaggcccttccaggattgtagcggcaaccccgtcccaaattttggggacattaccactgtgaccttccccgtgacccctaatactttgccaaactaccagtcctcgtctagcacttctgcactgagcaatggtttctaccacttcggtagtacctccagcagtccacccatcagtccggcttccagtgacctaagcgtggccgggtctctcccagataccttcaacgacgcaagcccatctttcggtctgcacccctcacccgtgcatgtctgtacagaagagtccttgatgagcagtctgaacggcgggtctgtgccttccgaacttgatggcctcgattccgagaaggataaaatgttggtcgaaaaacagaaggtgatcaatgaactgacatggaagcttcagcaggaacagcgacaggtagaagagctgaggatgcaattgcaaaaacaaaagagaaacaactgcagcgaaaaaaaacctttgccttttttagcagcatctataaaacaggaggaggcggtgtcctcttgtcctttcgctagccaggtccctgtgaaaaggcagtcttctagctctgaatgtcacccgcctgcctgtgaagcagctcaattgcagcctctgggtaacgctcattgtgtggagtcctcggaccagacaaatgtgctctccagtacttttctctctccccaatgttccccccagcactctccattgggggcagttaagtcgccccagcacattagcttacctccttcacccaataacccgcacttcctcccttcctcatcaggagcccagggtgagggacatcgcgtgtcctctccaatctcatcccaggtctgtaccgcacagaactcgggggcccatgacggccacccaccttctttcagtcctcattctagcagcctgcatcctccttttagcggcgctcaggccgactcatcgcacggggctggcggaaacccgtgccctaaatccccctgcgtgcagcaaaagatggctggcctccactcgtcagataaggtggggcccaaattcagcattcccagcccaacgttcagcaaatcaagtagcgcgatctctgaggtcacacaaccgccaagctatgaagatgcagtaaaacagcaaatgacacggagtcaacagatggacgagctgctggacgttctcattgagtccggcgaaatgcctgccgatgcgcgggaggatcattcttgcttgcagaaggtgcccaagatcccccgctccagcagaagcccaaccgcggtgctcacaaagcccagtgcatcattcgaacaggcatccagcggaagccagataccgtttgacccctatgctacggacagcgacgagcatctcgaggtcctcctaaattcacagtctccactgggtaagatgtctgacgttacacttttgaagattgggtcggaagagcctcacttcgatggcatcatggacggcttcagcgggaaggctgctgaggatctcttcaacgctcacgagattctcccagggccgcttagccctatgcagacacaattctctccctcaagcgttgactctaatgggctccagttgtcatttacagaaagcccttgggagacaatggaatggttggacctcaccccaccaaattccacccctggattcagcgccctgaccacctcctcccccagtatttttaatattgatttcctggacgtcaccgatctgaacctgaactcaagtatggatctgcacctgcagcaatggtag

SEQ ID NO: 59918 - DNA, 2961 bp, Artificial Sequence
  derived and/or modified sequence
atgaccctgctgggcagcgagcacagcctgctgatccgcagcaagttccgctctgtgctgcagctgcggctgcagcagaggaggacccaggagcagctggccaaccagggcatcatcccccccctgaagaggcctgctgagttccacgagcagaggaagcacctggacagcgacaaggccaagaacagcctgaagaggaaggccaggaaccgctgcaacagcgctgacctggtgaacatgcacatcctgcaggccagcacagctgagaggagcatccccacagcccagatgaagctgaagagggcccggctggctgatgacctgaatgagaagatcgccctgcggcccggccccctggagctggtggagaagaacatcctgcctgtggacagcgctgtgaaggaggccatcaagggcaaccaggtgtccttcagcaagagcacagatgcctttgcctttgaggaggacagcagcagtgatggcctgagcccagaccagaccaggtctgaggacccccagaacagcgctggcagccccccagatgccaaggccagtgacacccccagcacaggcagcctgggcaccaaccaggacctggccagcggctctgaaaatgacagaaatgacagcgccagccagcccagccaccagagtgatgctgggaagcagggcctgggcccccccagcacccccatcgctgtgcacgccgctgtgaagagcaagagcctgggggacagcaagaacagacacaagaagcccaaggaccccaagcccaaggtgaagaagctgaagtaccaccagtacatccccccagaccagaaggccgagaagagccccccacccatggacagcgcctatgcccggctgctgcagcagcagcagctgttcctgcagctgcagatcctgagccagcagcagcagcagcagcagcaccgcttctcctacctgggcatgcaccaggcccagctgaaggagcccaatgagcagatggtgaggaaccccaacagcagcagcacccccctgagcaacacccccctgagccctgtgaagaacagcttcagcggccagacaggagtgtcctccttcaagccaggccccctgccccccaacctggatgacctgaaggtgtctgagctgcggcagcagctgcgcatccggggcctgcctgtgtctggcaccaagacagccctgatggaccggctgcggcccttccaggactgcagcggcaaccctgtgcccaactttggagacatcaccaccgtgaccttccctgtgacccccaacaccctgcccaactaccagagcagcagcagcaccagcgccctgagcaatggcttctaccacttcggcagcaccagcagcagcccccccatcagccctgccagcagtgacctgtctgtggccggcagcctgcctgacaccttcaatgatgccagccccagctttggcctgcaccccagccctgtgcacgtgtgcacagaggagagcctgatgagcagcctgaatggaggctctgtgcccagcgagctggatggcctggacagcgagaaggacaagatgctggtggagaagcagaaggtgatcaatgagctgacctggaagctgcagcaggagcagaggcaggtggaggagctgaggatgcagctgcagaagcagaagaggaacaactgcagcgagaagaagcccctgcccttcctggccgccagcatcaagcaggaggaggccgtgagcagctgcccctttgccagccaggtgcctgtgaagaggcagagcagcagcagcgagtgccaccccccagcctgtgaggccgcccagctgcagcccctgggcaatgcccactgtgtggagagcagtgaccagaccaacgtgctgagcagcaccttcctgagcccccagtgcagcccccagcacagccccctgggcgctgtgaagagcccccagcacatcagcctgccccccagccccaacaacccccacttcctgcccagcagcagcggggcccagggcgagggccaccgggtgagcagccccatcagcagccaggtgtgcacagcccagaacagcggggcccatgatggccaccccccatccttcagcccccacagcagcagcctgcacccccccttcagcggggcccaggccgacagcagccacggggccggcggcaacccctgccccaagagcccctgtgtgcagcagaagatggccggcctgcacagcagtgacaaggtgggccccaagttcagcatccccagccccaccttcagcaagagcagcagcgccatcagcgaggtgacccagccccccagctatgaagatgctgtgaagcagcagatgaccaggagccagcagatggatgagctgctggatgtgctgattgaaagtggagagatgccagcagatgcccgggaggaccacagctgcctgcagaaggtgcccaagatccccaggagcagccgcagccccacagctgtgctgaccaagcccagcgccagctttgagcaggccagcagcggcagccagatcccctttgacccctatgccacagacagtgatgagcacctggaggtgctgctgaacagccagagccccctgggcaagatgtctgatgtgaccctgctgaagattggcagcgaggagccccactttgatggcatcatggatggcttcagcggcaaggctgctgaggacctcttcaatgcccacgagatcctgcccggccccctgagccccatgcagacccagttcagccccagctctgtggacagcaatggcctgcagctgtccttcacagagagcccctgggagaccatggagtggctggacctgaccccacccaacagcaccccaggcttcagcgccctgaccaccagcagccccagcatcttcaacatcgacttcctggatgtgacagacctgaacctgaacagctccatggacctgcacctgcagcagtggtag

SEQ ID NO: 59919 - DNA, 8466 bp, Artificial Sequence
  derived and/or modified sequence
aattagccccgcacggcgaggggggaggcgccagttttctggggacactggctgccactgtactcctacccaggggagctcacggagagttggatgaattctgggttgttagctgcggtcagctgggctcccgggagcctgttgctggtggagaacagggggcgcctggccaagggaccagcggcttgctgagactcaacatgacactcctggggtctgagcattccttgctgattaggagcaagttcagatcagttttacagttaagacttcaacaaagaaggacccaggaacaactggctaaccaaggcataataccaccactgaaacgtccagctgaattccatgagcaaagaaaacatttggatagtgacaaggctaaaaattccctgaagcgcaaagccagaaacaggtgcaacagtgccgacttggttaatatgcacatactccaagcttccactgcagagaggtccattccaactgctcagatgaagctgaaaagagcccgactcgccgatgatctcaatgaaaaaattgctctacgaccagggccactggagctggtggaaaaaaacattcttcctgtggattctgctgtgaaagaggccataaaaggtaaccaggtgagtttctccaaatccacggatgcttttgcctttgaagaggacagcagcagcgatgggctttctccggatcagactcgaagtgaagacccccaaaactcagcgggatccccgccagacgctaaagcctcagataccccttcgacaggttctctggggacaaaccaggatcttgcttctggctcagaaaatgacagaaatgactcagcctcacagcccagccaccagtcagatgcggggaagcaggggcttggcccccccagcacccccatagccgtgcatgctgctgtaaagtccaaatccttgggtgacagtaagaaccgccacaaaaagcccaaggaccccaagccaaaggtgaagaagcttaaatatcaccagtacattcccccagaccagaaggcagagaagtcccctccacctatggactcagcctacgctcggctgctccagcaacagcagctgttcctgcagctccaaatcctcagccagcagcagcagcagcagcaacaccgattcagctacctagggatgcaccaagctcagcttaaggaaccaaatgaacagatggtcagaaatccaaactcttcttcaacgccactgagcaatacccccttgtctcctgtcaaaaacagtttttctggacaaactggtgtctcttctttcaaaccaggcccactcccacctaacctggatgatctgaaggtctctgaattaagacaacagcttcgaattcggggcttgcctgtgtcaggcaccaaaacggctctcatggaccggcttcgacccttccaggactgctctggcaacccagtgccgaactttggggatataacgactgtcacttttcctgtcacacccaacacgctgcccaattaccagtcttcctcttctaccagtgccctgtccaacggcttctaccactttggcagcaccagctccagccccccgatctccccagcctcctctgacctgtcagtcgctgggtccctgccggacaccttcaatgatgcctccccctccttcggcctgcacccgtccccagtccacgtgtgcacggaggaaagtctcatgagcagcctgaatgggggctctgttccttctgagctggatgggctggactccgagaaggacaagatgctggtggagaagcagaaggtgatcaatgaactcacctggaaactccagcaagagcagaggcaggtggaggagctgaggatgcagcttcagaagcagaaaaggaataactgttcagagaagaagccgctgcctttcctggctgcctccatcaagcaggaagaggctgtctccagctgtccttttgcatcccaagtacctgtgaaaagacaaagcagcagctcagagtgtcacccaccggcttgtgaagctgctcaactccagcctcttggaaatgctcattgtgtggagtcctcagatcaaaccaatgtactttcttccacatttctcagcccccagtgttcccctcagcattcaccgctgggggctgtgaaaagcccacagcacatcagtttgcccccatcacccaacaaccctcactttctgccctcatcctccggggcccagggagaagggcacagggtctcctcgcccatcagcagccaggtgtgcactgcacagaactcaggagcacacgatggccatcctccaagcttctctccccattcttccagcctccacccgcccttctctggagcccaagcagacagcagtcatggtgccgggggaaacccttgtcccaaaagcccatgtgtacagcaaaagatggctggtttacactcttctgataaggtggggccaaagttttcaattccatccccaactttttctaagtcaagttcagcaatttcagaggtaacacagcctccatcctatgaagatgccgtaaagcagcaaatgacccggagtcagcagatggatgaactcctggacgtgcttattgaaagcggagaaatgccagcagacgctagagaggatcactcatgtcttcaaaaagtcccaaagatacccagatcttcccgaagtccaactgctgtcctcaccaagccctcggcttcctttgaacaagcctcttcaggcagccagatcccctttgatccctatgccaccgacagtgatgagcatcttgaagtcttattaaattcccagagccccctaggaaagatgagtgatgtcacccttctaaaaattgggagcgaagagcctcactttgatgggataatggatggattctctgggaaggctgcagaagacctcttcaatgcacatgagatcttgccaggccccctctctccaatgcagacacagttttcaccctcttctgtggacagcaatgggctgcagttaagcttcactgaatctccctgggaaaccatggagtggctggacctcactccgccaaattccacaccaggctttagcgccctcaccaccagcagccccagcatcttcaacatcgatttcctggatgtcactgatctcaatttgaattcttccatggaccttcacttgcagcagtggtagaatgcccaatgcaccagtgctatggaagaccaatggagttccatgggggaaagcacacagccatacatactttactgtccaaaaacagaagaagaagaagagaattaaaaagaagcaatgatttctgtgccaatgaacaagaacaaaagtcatttttagaaatacatatactgtaatatttaccaacagtcagtaactgttaatgatttcaacaatgcattaaaagaatgtgctttctcagattaaggatgccaaaaaagatatttcactgccttttcaaagaccagtatattttctagcccataatttttctcaggcattgttggggcataagctcacactgtaagcttttctcatgaattcactagacataacgtggaaggaaaacgtagtcttttgggagtacagggaagccagcccctcaaagcttatggaagacatacctgcaatggaagctgttgcccaatgtctccattactatctttcaaaagagaagccagacccagcttcagatcaaaagttcttgagacagaggaacaaaaccaatcgatttccagggaagctaatcaactctcttttccctctaccacaaaactgccctgctggagtggttctgaacctgtacccaggactcgatgtggtcactaataacaattaacctgaactgagtccacagaactccactcggaactttcttcttttttaactagtggcccaatcattcccaccatctctgtgctgataagtacgtgtcctagatgagaaccctgaagaatgcagaccttcttcccccgaaggagatgccacaagctctccaacacagccccctttagttccaaagactagagatgaccacattggtagaagtatatctcgaggcacaggaagggagccccaccagggataattcagacaggactagagaataacatcatttcacataccctgggataaacaccctgggttcctatagaaggactattacttatgggagtccaacttctccttttgttttgttattatcagtttatctttctcccactccacttttccttcaaggtaccaatcctttcctgttcctcgtttggccatctttctttttctgcctccacattgggaggggaggacttctcagttctaacaagctgccatactcctaagaaagccatttttgaaaaatttaacaatccaggttcttctggagaactcattctccacacgcacagtttgctgcaaaaggaagttgcaagaatttcttgaggaagaaactggtgacttggtccatcagtcacgaagttctttctattctcgtttagttttcaagaaattattggtttgtgttgctctggggaaattggaaatcattacattgtaaagacaaatatggatgatatttacaagagagaatttcagatctgggtttttgaaagaaaacagaattgcgcattgaaaacgatggaaggaaaaagacaatggtctaatgtgcattcctcattacctctcgtggctttggctgggagttggaaaaagctaaaatttcagaacagtctctgtaaggctctctgtggctccagttcaccattttatattgttgcatgctgtagaaaggagctattgctgttgttttgtttttttatttaaatcactaaggcactgtttttatcttttgtaaaaaaaaaaaaaaagttgttcactgtgcacttatagaaaaaataatcaaaaatgttgggattttagaagctctctttttgataaaccaaagatttagaagtcattccattgttaacttgtaaaaatgtgtgaacacagagagtttttggtgattgctactctgaaagctgccagatcttattctgggggtgggatgtggaggaatacacatacacacacaaacatacatgtatgtataatagatatatacatatgtgtatattatatctgtgtgtgcatgtatctccaaaagcggcgttacagagttctacaccaaaagcctttaacccttaatctgctgtgaatgatacctggcctttctcactatgaatttctgattaaccaaccagactacacgttgcctctctgtgtatgactaacggctccaacccgatgactcacagctacttgcttatcgtgaacaagctcatcttggcaatgaatatggatgtgaaaagacagaacagcttcaccattagtagctggaaatggtatcacagtctcttatagaggaatatgaaaggaacaagaaaatcattttacattccttttatctgtattgtgctttaaaagatccacatggtaaattttttattttgcttttatgtcagtcatcagaaccaaaaaaatccagaagaaaaaattgccagtgtttcctttgaagatgaagctactggggaagaaaaccttattaatacactccacacatttgttcattcctcagctgttggtgttttcttggggtcttgacaaagcttgctggtcagtgcacttttcaggtgtcacgttttgctgtttgtatgttttttcttccccttacttcctttggaaaacaaactcacacagtgcccctactctgagacctgggactgagtgttaattattttttccttgggtatttctatctgagagactagacctagttaggaggcctctgtacttctccagattgtacctttttatggggatctttgaggctatgacccaggactgatagatatgccttacggaagacaaaagataaaatggttcctatatcctaatgcaaaccaacacagttaaaagagcagatctctggataactgctctcaacctgcttctacagtctccacaaaccgcattcaccctctctcttcatagctcagacatgaaatttgagggagaaaactggagataattgggagaaaattgatgaagttggctgcttccagtagatcagataatccatgaatttgtctcccattgagaattttattttaaattcttttaaactcttcgttgtgtcttttgtgatgacaaatcaggcatgactaaaagatgtacagagacttacgaagatggtcacattcaagttccctaatgctcttagaacctgaagatgaccatgtgtagttttcttaagacctctgaacccccatggtgatgaagacttgaagacatttgcagctatctgctgcagtctggtagattcatacttatctaaagaagtcaaaaaatttattcgtgcaagtgcttgcaggaagccagtgcttattagtagtgaccctgcttctatcaacgttattgagacaacacatattctattctaagggagaaagagggaggaagagagggagggagggaggaagaagagggagggagcgaggaaggaagataggagatgggtaggggggtaaagagaaaaggagggagaagggaaggaaggaaagaagagaggaaagaaaggagggaaggaaaaaagggccaaactttctgatctatgaacttctcagttcagctgtcacattatgagaagtaaatcagaatttttttaaggagaagtcattcttagcactacaataattgtaccagtaattgaggaaaccaagacaatcttcacctgaataatagagggtctgagaactgtcagccttttgccattcaaaaacatttatgtccaacctgaaaaaaaagcatcaataaaacctatcccaagcattcaaaatagtcctttccaaatgttatttattttaaagtcaatcagctcttttagaaacagattctggtctggctgaaaactcccacaacaaatttactcatccagtggctaatatttaatgcccaccatgggcagagcacacaaatcttcagataaacaatactgaattgattcagcacagattgttcagatttgaatgaccagggagttgtatttgcacatgcaagaacactaagaatctcccagtcctcaaactagaaacctttcagctacgatgaaaaaaaaaaaggggtcttcatttttccaagagggggtggaggtggggatcactttttagctaaaagctatctctcacttcaaaattcttgtctttttctttgtggacaaacaccagtagtctatcacttggagatcttttaatatctcccatcatttaaaacatccacgagagtttgaagatttgtgttgattgccagatacagaagccccttgaaaataaggaaagggtggaggaagcatttttgtgtcctatccctacttatcgtagcagctctatagacaaaagggacacttactggtgagcctctggcccttaaaagaaaatcatctaagaatatgaaggcaatttgatttccccccacagccctcagctgccttcctcacagaaggaagttcccaaaattgctggtacacagtttgcaatcaaatatcagatatgagaaaacctgtagtgaagagtctgggttcttggttttctcataaatccaatataaatttgtaggttggttcagggtcaaaattgccagtgctttattagacagatgatactgatagacacacagagcccaggtcctggaacaagacaatcctgtagtgccaagatctggtcagttgcgttaaggagctgggtttgattctagagtccaggtttatagagaaaccctggctagattgagcctacccatggggagacgatttcaagacaggatgagatctgggaagaattttgttgtcatctgccagggaaattatcacaggactcattgaatgcaataacatgtgagtaagttcccttttgattctgggaatcagcgattttccctgtggattaagacaaaccaacgccagaaggtctcctgtgcttattttaaccatctgctcccatcgtgaaccctggagcatgcatttcctagaagtggtttcatagctcctgtgtgttcatggaaaaggggagtataatgatggggatgctggaagcttttttaatgttttccaaaggaaaggaacccacactgctccccagagttcctttccaatggccctgcagtaagaacggaggacaatgtattgctgggtgcttaaaatcctccctcagtgaagcacaaagagacactttgtaaagaaaaaaagagcaagcataggttctctgtgggaccttgtggagtggtgttttcacgttggtctctttggctcaattgagcataatcagaaagaaatgtgggttattgggaagagacaaaaagcagtggctaaaataccaaagttggcatgtgttcttttttaaaaaaaaaaaaaaatgcatatatttttaaataaaatgtttattttaaaaagaaa

SEQ ID NO: 59920 - DNA, 2961 bp, Artificial Sequence
  derived and/or modified sequence
atgaccctgctgggcagcgagcacagcctgctgatccggagcaagtttcgatccgtgttacagttgaggctgcagcaacgccgaacacaggaacagttagcaaaccagggaataatcccgcccttgaagcgacctgccgagtttcacgaacagaggaaacatctggactctgataaggcaaagaactctctgaaacgaaaggctaggaaccgctgtaacagcgccgatctggtgaacatgcatatcttgcaagcctctaccgctgagagatctatccctactgcccagatgaagttgaagcgggcacgactggctgatgatttgaatgagaaaatcgcactgagaccagggccgctggagctggtggagaaaaacatcctgcccgtcgattctgccgtgaaggaagccattaaggggaaccaggttagcttcagcaagtcaactgacgcgttcgctttcgaagaagatagctcctcagacgggctaagtcccgaccagacaagatccgaagaccctcaaaactcagctggatcccctcccgacgctaaggcatccgacacaccttcaaccggcagtttaggcacaaaccaagatttggcctccgggagtgagaacgataggaacgatagtgccagccagccttcacatcagtccgacgccggaaagcagggtctgggccctcctagcaccccgatcgcggtgcatgcagccgttaaatctaagtcactcggggacagcaaaaacaggcacaaaaagccaaaggatccaaaacctaaagtcaaaaaactgaaatatcaccagtacattcctcccgatcagaaggctgaaaagagcccaccaccaatggacagcgcatacgcacgactgctccagcaacagcagttgttcctccagctccagattctgtcccaacagcagcaacagcaacagcatcggttctcctacctcggcatgcaccaagctcagcttaaggagcccaacgaacaaatggtgagaaaccccaactctagctccaccccgctctcgaacactcccttatcccccgtcaaaaattcgttcagcggtcagactggagtttcttctttcaagccagggccactgcccccaaatctggacgacctaaaagttagtgaactgcggcagcagctgagaattcggggattgcccgtctccggaacgaagactgctctcatggataggctgcggcccttccaggactgttcaggaaaccctgttcctaactttggggatatcaccacagtgacttttcctgtgacccccaacaccctccctaactaccagtcttcctcatctaccagcgcccttagcaacggcttttatcatttcgggtcgacgtcgagcagccctccaatctcccctgcctcttccgacctctccgtggccggcagtcttccagacacttttaacgacgccagcccctcctttggacttcacccctccccagtgcacgtctgcacggaagagtccctcatgtccagccttaatggtggatctgtgccatccgagcttgacggactggactcagagaaagataaaatgttagtggaaaaacagaaggtaatcaatgaactcacttggaagctgcagcaagaacagcgccaggtcgaagaactgcgtatgcaattgcaaaaacagaaacgcaataactgttccgagaagaagccactgccatttctggccgcgagcatcaagcaggaggaggcagtgagcagctgcccatttgccagccaggtgcccgtcaagagacaaagctcgagctctgaatgccacccgccagcttgtgaggccgcgcagctgcagccgttggggaacgcacattgcgtcgaatcttctgaccagacaaatgtgctttcctccacgtttctgagtcctcagtgctctccacagcatagccctcttggcgcagtgaagagtccacaacacatcagcctacccccttcccccaacaatcctcatttcctgccttccagtagcggggctcagggggaggggcaccgcgtgtcctcccctatctccagtcaggtgtgtaccgctcagaactccggcgcccacgacgggcatcccccaagcttctcccctcattcctcatccttgcatccacctttttctggcgcccaggctgatagctcacatggggccggcggtaacccgtgtcccaagtccccttgtgttcagcagaaaatggccggccttcacagttcggataaggtcggacctaaattcagcatcccctctcccacgttctctaagtcttccagtgccatttcagaggtgacgcaacccccatcatatgaagatgccgtgaaacagcagatgacgaggtcacaacagatggatgaactactggacgtgctcatcgaaagcggagagatgcccgctgatgcccgggaggaccacagctgccttcagaaagtacccaagatcccacggtcaagccggagcccgacagccgttctgaccaaacccagcgcctccttcgagcaggcttcttccgggtctcaaattccctttgatccctacgccactgactcagatgagcacttggaggttctgctcaactctcagtccccgcttgggaagatgtctgacgttacacttttaaaaatcggctcagaggagccgcatttcgatggtatcatggatggcttttcaggcaaggccgccgaagacttgttcaacgctcacgaaatcttacctggtcccctatcgcccatgcagacccagtttagccctagtagtgtggatagtaacggactccagctgtctttcacagagagcccctgggaaaccatggaatggctggatctcacaccacctaactcaactcccgggttttcagcattgacgacttcttcaccatctattttcaatatagacttcctagatgtgacggacctcaatctaaactccagtatggacctccacctgcagcagtggtag

SEQ ID NO: 59921 - DNA, 2961 bp, Artificial Sequence
  derived and/or modified sequence
atgacattgctggggagcgaacactcattactgatcagatcaaagtttcggtccgtgcttcagctgcgtctacaacagaggcgcacgcaagaacagctggccaaccagggcattattcccccactgaagagaccagctgagttccatgagcaacgaaagcatctggattcagataaggccaagaactcattgaagcgcaaggcaagaaaccgatgcaacagcgcagatctggtaaatatgcacatattgcaggcaagcacagcggagcggtccatacccaccgctcaaatgaagctgaagcgcgctagacttgctgacgatcttaatgaaaagatcgctctgcgcccaggtccactggagctagttgagaaaaatattctgcccgtggatagcgctgttaaagaggctatcaagggaaaccaggtgagcttctctaagtcaacagatgcgttcgcctttgaagaggattcttcaagtgacgggctctcaccagaccagaccaggtctgaagatcctcaaaactccgctggctcaccccctgatgcaaaagccagtgacactccctcaacgggaagcttaggcacaaatcaggatctcgccagcggaagtgagaatgatagaaatgactctgcaagccagccttctcatcaatctgacgccggaaaacaaggcttgggccctcctagcaccccaattgcggttcacgcagctgtaaaaagcaagtctctgggagacagcaaaaacaggcataagaagccaaaagatcctaagcccaaggtcaagaagcttaagtatcaccaatatattccgcctgaccagaaggctgagaaaagtccgccacctatggattccgcctacgcaaggctcctgcagcagcagcaactatttctccagctccagatcttgtctcagcaacagcaacagcagcagcaccgatttagttatctggggatgcaccaggctcaattgaaggagccaaacgaacagatggtgaggaatcccaatagctccagtactcctttgtctaatacacctctgtcccccgtgaaaaattccttcagtggtcagacgggcgtgtctagctttaagcccggtccactgcccccaaacctcgacgatttaaaggtatcagaactacgacagcaattaaggataagaggactgcctgtgtccgggacaaagacggcattaatggatcggctgcgtcccttccaggattgtagcggaaatccagttcccaatttcggagacataaccacagtcaccttccctgtcacccccaatacactgcccaattaccaatcaagctcgtctaccagtgctctcagcaatggattttatcatttcggatcaaccagctcttctccccctatctctccagcgtcaagcgatctgagcgtcgctggttctctgcctgatacatttaacgacgccagtccatcatttggtctgcatccctcacctgtgcacgtgtgcacagaggagagccttatgtcatccttgaatggcggtagcgtgccttccgagctggatgggctcgattcagagaaggacaagatgctggtggaaaagcagaaggtcatcaacgagctgacatggaaattacagcaggaacagagacaggtggaggagcttagaatgcaactgcaaaaacaaaaaaggaacaattgcagtgagaagaagcccctgcctttcctcgctgcaagtatcaagcaggaggaggcggtttctagctgtccgtttgcaagccaggtaccagttaagagacagtcatcctctagcgagtgtcatcctcccgcttgtgaagcagctcagcttcagccactcgggaacgctcactgtgtcgagagctccgaccaaaccaatgttctgtcctctacttttctctcacctcagtgctccccgcagcattccccactgggggctgtgaagagcccacagcacatctccttgccaccatccccgaacaacccacacttcttaccgtcttcctcaggggctcagggcgagggacatagggtgagttcccctatctcatctcaggtgtgcactgcacaaaattcaggcgctcacgatggacatccgccttccttctcaccccactcctcttcactacatccacccttttctggagcccaggctgattcaagtcacggcgctgggggtaatccatgccctaagagcccctgtgttcaacagaaaatggccggtctccactcaagcgataaagttggcccaaagttctccataccgtcgcccacattttctaaaagttctagcgcaatttctgaggttactcagcccccaagctacgaagatgcagtgaagcagcagatgaccaggtctcagcaaatggacgagctgctggatgtgcttatagagtccggcgagatgcctgcggatgcgcgagaggaccacagttgcctccagaaagtgcctaaaattcccagaagcagccgttcccccactgcggtgctgactaaaccctctgcttctttcgaacaggcctcgtcaggcagtcagattccctttgacccctacgccacggactcagatgaacatcttgaagttttactgaattcacagtcaccactgggaaagatgtcggacgtgaccctgttgaagattgggagcgaggaacctcactttgacggaattatggacggattctccggtaaagctgcagaagatctgttcaatgctcacgaaatccttccagggcctcttagtcccatgcagacccagttcagccccagcagtgtggattctaacggcctgcaactgtcgttcaccgagtccccttgggagaccatggaatggcttgatctgaccccgcctaattcgacccccggattcagcgctctgacaacctcaagcccaagcattttcaacattgacttcctggacgtcactgacctgaatctcaactcctctatggacctccacttgcagcagtggtag

SEQ ID NO: 59922 - DNA, 2961 bp, Artificial Sequence
  derived and/or modified sequence
atgaccctgctgggcagcgagcacagcctgctgatcagaagcaagttcagaagcgtgctgcagctgagactgcagcagagaagaacccaggagcagctggccaaccagggcatcatcccccccctgaagagacccgccgagttccacgagcagagaaagcacctggacagcgacaaggccaagaacagcctgaagagaaaggccagaaacagatgcaacagcgccgacctggtgaacatgcacatcctgcaggccagcaccgccgagagaagcatccccaccgcccagatgaagctgaagagagccagactggccgacgacctgaacgagaagatcgccctgagacccggccccctggagctggtggagaagaacatcctgcccgtggacagcgccgtgaaggaggccatcaagggcaaccaggtgagcttcagcaagagcaccgacgccttcgccttcgaggaggacagcagcagcgacggcctgagccccgaccagaccagaagcgaggacccccagaacagcgccggcagcccccccgacgccaaggccagcgacacccccagcaccggcagcctgggcaccaaccaggacctggccagcggcagcgagaacgacagaaacgacagcgccagccagcccagccaccagagcgacgccggcaagcagggcctgggcccccccagcacccccatcgccgtgcacgccgccgtgaagagcaagagcctgggcgacagcaagaacagacacaagaagcccaaggaccccaagcccaaggtgaagaagctgaagtaccaccagtacatcccccccgaccagaaggccgagaagagccccccccccatggacagcgcctacgccagactgctgcagcagcagcagctgttcctgcagctgcagatcctgagccagcagcagcagcagcagcagcacagattcagctacctgggcatgcaccaggcccagctgaaggagcccaacgagcagatggtgagaaaccccaacagcagcagcacccccctgagcaacacccccctgagccccgtgaagaacagcttcagcggccagaccggcgtgagcagcttcaagcccggccccctgccccccaacctggacgacctgaaggtgagcgagctgagacagcagctgagaatcagaggcctgcccgtgagcggcaccaagaccgccctgatggacagactgagacccttccaggactgcagcggcaaccccgtgcccaacttcggcgacatcaccaccgtgaccttccccgtgacccccaacaccctgcccaactaccagagcagcagcagcaccagcgccctgagcaacggcttctaccacttcggcagcaccagcagcagcccccccatcagccccgccagcagcgacctgagcgtggccggcagcctgcccgacaccttcaacgacgccagccccagcttcggcctgcaccccagccccgtgcacgtgtgcaccgaggagagcctgatgagcagcctgaacggcggcagcgtgcccagcgagctggacggcctggacagcgagaaggacaagatgctggtggagaagcagaaggtgatcaacgagctgacctggaagctgcagcaggagcagagacaggtggaggagctgagaatgcagctgcagaagcagaagagaaacaactgcagcgagaagaagcccctgcccttcctggccgccagcatcaagcaggaggaggccgtgagcagctgccccttcgccagccaggtgcccgtgaagagacagagcagcagcagcgagtgccacccccccgcctgcgaggccgcccagctgcagcccctgggcaacgcccactgcgtggagagcagcgaccagaccaacgtgctgagcagcaccttcctgagcccccagtgcagcccccagcacagccccctgggcgccgtgaagagcccccagcacatcagcctgccccccagccccaacaacccccacttcctgcccagcagcagcggcgcccagggcgagggccacagagtgagcagccccatcagcagccaggtgtgcaccgcccagaacagcggcgcccacgacggccacccccccagcttcagcccccacagcagcagcctgcacccccccttcagcggcgcccaggccgacagcagccacggcgccggcggcaacccctgccccaagagcccctgcgtgcagcagaagatggccggcctgcacagcagcgacaaggtgggccccaagttcagcatccccagccccaccttcagcaagagcagcagcgccatcagcgaggtgacccagccccccagctacgaggacgccgtgaagcagcagatgaccagaagccagcagatggacgagctgctggacgtgctgatcgagagcggcgagatgcccgccgacgccagagaggaccacagctgcctgcagaaggtgcccaagatccccagaagcagcagaagccccaccgccgtgctgaccaagcccagcgccagcttcgagcaggccagcagcggcagccagatccccttcgacccctacgccaccgacagcgacgagcacctggaggtgctgctgaacagccagagccccctgggcaagatgagcgacgtgaccctgctgaagatcggcagcgaggagccccacttcgacggcatcatggacggcttcagcggcaaggccgccgaggacctgttcaacgcccacgagatcctgcccggccccctgagccccatgcagacccagttcagccccagcagcgtggacagcaacggcctgcagctgagcttcaccgagagcccctgggagaccatggagtggctggacctgaccccccccaacagcacccccggcttcagcgccctgaccaccagcagccccagcatcttcaacatcgacttcctggacgtgaccgacctgaacctgaacagcagcatggacctgcacctgcagcagtggtag

SEQ ID NO: 59923 - protein, 447 aa, Artificial Sequence
  derived and/or modified sequence
MTRRQQVLQAKRSIQQTFQAQLMPWKSMFHGREVKPVGPDLELSEAENGVEEKKKACRSPTAQSPTPSVEADSPDQKKIISLWSKSSFDGASLASDKNDCKTESKNDPKTERKKSSSSSQYKANMHFHKLFLSVPTEEPLKQSFTCALQKEILYQGKLFVSENWICFHSKVFGKDTKISIPAFSVTLIKKTKTALLVPNALIIATVTDRYIFVSLLSRDSTYKLLKSVCGHLENTSVGNSPNPSSAENSFRADRPSSLPLDFNDEFSDLDGVVQQRRQDMEGYSSSGSQTPESENSRDFHATESQTVLNVSKGEAKPTRADAHVNRVPEGKAKSLPVQGLSETVGILHKVKSQKCPMLHHILIFYAIVVCALIISTFYMRYRINTLEEQLGLLTSIVDTHNTEQAAPSGLRSQVQFNVEVLCQELTANIVKLEKIQNNLQKLLENGD

SEQ ID NO: 59924 - DNA, 1344 bp, Artificial Sequence
  derived and/or modified sequence
atgaccagaagacagcaggtgctgcaggccaagagaagcatccagcagaccttccaggcccagctgatgccctggaagagcatgttccacggcagagaggtgaagcccgtgggccccgacctggagctgagcgaggccgagaacggcgtggaggagaagaagaaggcctgcagaagccccaccgcccagagccccacccccagcgtggaggccgacagccccgaccagaagaagatcatcagcctgtggagcaagagcagcttcgacggcgccagcctggccagcgacaagaacgactgcaagaccgagagcaagaacgaccccaagaccgagagaaagaagagcagcagcagcagccagtacaaggccaacatgcacttccacaagctgttcctgagcgtgcccaccgaggagcccctgaagcagagcttcacctgcgccctgcagaaggagatcctgtaccagggcaagctgttcgtgagcgagaactggatctgcttccacagcaaggtgttcggcaaggacaccaagatcagcatccccgccttcagcgtgaccctgatcaagaagaccaagaccgccctgctggtgcccaacgccctgatcatcgccaccgtgaccgacagatacatcttcgtgagcctgctgagcagagacagcacctacaagctgctgaagagcgtgtgcggccacctggagaacaccagcgtgggcaacagccccaaccccagcagcgccgagaacagcttcagagccgacagacccagcagcctgcccctggacttcaacgacgagttcagcgacctggacggcgtggtgcagcagagaagacaggacatggagggctacagcagcagcggcagccagacccccgagagcgagaacagcagagacttccacgccaccgagagccagaccgtgctgaacgtgagcaagggcgaggccaagcccaccagagccgacgcccacgtgaacagagtgcccgagggcaaggccaagagcctgcccgtgcagggcctgagcgagaccgtgggcatcctgcacaaggtgaagagccagaagtgccccatgctgcaccacatcctgatcttctacgccatcgtggtgtgcgccctgatcatcagcaccttctacatgagatacagaatcaacaccctggaggagcagctgggcctgctgaccagcatcgtggacacccacaacaccgagcaggccgcccccagcggcctgagaagccaggtgcagttcaacgtggaggtgctgtgccaggagctgaccgccaacatcgtgaagctggagaagatccagaacaacctgcagaagctgctggagaacggcgactag

SEQ ID NO: 59925 - DNA, 1344 bp, Artificial Sequence
  derived and/or modified sequence
atgacgcggaggcagcaggtccttcaagcgaaaagaagtattcagcagacttttcaggctcaattgatgccatggaagagtatgttccacggccgcgaggtcaagccagtgggtcccgacctggagctgtccgaggcagaaaatggcgttgaagaaaaaaaaaaggcatgtcgaagccccaccgcccagtctccaaccccgtcggtggaagcagactctcctgatcagaagaaaatcattagcttatggtccaaaagctcttttgacggagcgagtctggcttcagacaagaacgattgtaagaccgagagtaagaatgatccaaagacggagcgcaaaaagtcgtcctcttccagtcaatataaagccaacatgcattttcataaactgttcttatctgttcctacggaagagccactgaaacagtcctttacctgcgccctccaaaaagaaatactgtatcagggaaagctgtttgtgtctgagaattggatctgtttccactcaaaagtgttcggcaaagacaccaagatctctattcccgctttctccgtgacgctgataaagaagacgaagacagcccttctcgtccccaacgcgctgattatcgcaacagtaaccgacaggtacatcttcgttagcctgctgtcccgggatagtacctacaagctgctgaaatcagtctgtggacatctggaaaatacatccgtcggcaacagcccaaacccctctagtgcggaaaatagtttccgtgccgaccgcccctcttccctgcctcttgatttcaatgacgaatttagtgacctagatggcgtggtgcaacagcggcggcaggatatggaaggatatagcagctccggctctcagacaccggaaagcgaaaactcaagagactttcatgcgaccgagagccaaactgtcctgaatgtttcaaaaggagaagcaaaacctacaagagctgacgcgcacgtcaatcgcgtccccgagggtaaagctaagtcacttcctgttcagggactgtctgagactgtgggcatactgcacaaggttaaatcgcagaagtgtcccatgctgcatcatatcctgatattctacgccatcgtggtatgcgccctcataatttctactttctatatgcgatatcgcattaataccctagaagagcagcttggattgctgacctccatcgtggacacacacaacacagagcaagcggctccctctggattgcgaagccaggttcagtttaacgttgaggttttgtgtcaggagctgacagctaatattgtcaagcttgagaaaattcaaaacaatctccaaaagctgttggagaatggtgactag

SEQ ID NO: 59926 - DNA, 1344 bp, Artificial Sequence
  derived and/or modified sequence
atgacccggcggcagcaggtgctgcaggccaagaggagcatccagcagaccttccaggcccagctgatgccctggaagtccatgttccacggccgggaggtgaagcctgtgggccctgacctggagctgtctgaggctgaaaatggagtggaggagaagaagaaggcctgccgcagccccacagcccagagccccacccccagcgtggaggccgacagcccagaccagaagaagatcatcagcctgtggagcaagagcagctttgatggagccagcctggccagtgacaagaatgactgcaagacagagagcaagaatgaccccaagacagagaggaagaagagcagcagcagcagccagtacaaggccaacatgcacttccacaagctgttcctgtctgtgcccacagaggagcccctgaagcagagcttcacctgtgccctgcagaaggagatcctgtaccagggcaagctgtttgtgtctgagaactggatctgcttccacagcaaggtgtttgggaaggacaccaagatcagcatcccagccttctctgtgaccctcatcaagaagaccaagacagccctgctggtgcccaatgccctgatcatcgccaccgtgacagaccgctacatctttgtgtccctgctgagccgggacagcacctacaagctgctgaagtctgtgtgtggccacctggagaacacctctgtgggcaacagccccaaccccagcagcgcagaaaattccttccgggctgaccggcccagcagcctgcccctggacttcaatgatgagttcagtgacctggatggagtggtgcagcagaggcggcaggacatggagggctacagcagcagcggcagccagaccccagagagcgagaacagccgggacttccacgccacagagagccagacagtgctgaatgtgtccaagggggaggccaagcccaccagggcagatgcccacgtgaacagagtgcctgagggcaaggccaagagcctgcctgtgcagggcctgtctgaaacagtgggcatcctgcacaaggtgaagagccagaagtgccccatgctgcaccacatcctgatcttctacgccatcgtggtgtgtgccctgatcatcagcaccttctacatgagataccgcatcaacaccctggaggagcagctgggcctgctgaccagcatcgtggacacccacaacacagagcaggccgcccccagcggcctgcggagccaggtgcagttcaacgtggaggtgctgtgccaggagctgacagccaacatcgtgaagctggagaagatccagaacaacctgcagaagctgctggagaatggagactag

SEQ ID NO: 59927 - DNA, 2196 bp, Artificial Sequence
  derived and/or modified sequence
tctcacacatgtgggtttcaagtgcggctggtgccatccctctgagcagacgctgaaagagaaaacttctgagatagcacttgtgagcgaaaagcacaccaactggctcaaagagctgtggttgggcagatctggtgtaaatacaaagttccttcccgacatttcccagagtttcttgaagatcacctggcctctagaagatgacaaggagacagcaagtcctacaagcaaaaaggagcattcagcaaacattccaagcacagcttatgccctggaagagtatgttccacgggagagaagtgaagccagtgggtccggacctggaactctcagaggctgagaatggtgtggaggagaaaaagaaagcctgcaggtcgccaacagcccaatcccctaccccatctgtggaggcggactccccagaccagaagaaaatcattagcctatggtcaaaatccagttttgatggtgcctctttagcaagtgataagaacgactgtaaaacagaaagcaaaaatgaccctaagactgaaagaaaaaagtcttcatcttccagccagtacaaggccaatatgcactttcacaagttgtttcttagtgtcccaacggaggaaccactgaagcaaagctttacctgtgctctacagaaagaaatactataccaaggaaagctctttgtatcagaaaactggatttgttttcattccaaagtctttggaaaagacacaaagatctctattccagctttctcggtaaccctaataaagaaaaccaaaactgctcttctagtgccaaacgccctgatcatagcaacagtcacagacaggtacatatttgtctccttactctccagagattcaacttacaaactactaaaatctgtgtgtggacacttagaaaatacaagtgttggtaacagtcccaatccatcttctgctgaaaacagtttccgagcagaccgcccttcatctctgcctctggatttcaatgatgaattctcagatctggatggagtggttcaacaaagaaggcaagacatggaaggatatagcagttctggttctcaaactcctgaatctgagaactctcgagatttccatgcgacagaatcccaaacagttctgaatgtctccaagggagaagcaaagccaactcgggcagatgcccatgtgaacagagtacctgaaggaaaagccaagagtctccctgtacagggtctgtcagaaactgttggaatcttacataaagtcaagtctcagaaatgtccgatgcttcaccatattcttatattctatgcaattgttgtctgtgcactaatcatctcgaccttctacatgagatacagaattaatactctggaggagcagctggggttactaacctccattgtggacacccataatactgaacaggcagcaccatctggcctgaggtcacaagtacaattcaatgtggaggttctctgtcaagagcttacagctaacatagtgaaattagaaaagatacaaaataacttacagaagttgcttgagaatggtgactgatcgaccagattgcttgggccatcggaatacctcatgtttccctttgaagaaggtgcttcctgaggcgttttgtttgagtgcaccctgctggtcagaggtgcaagcagatgagaatccagacattgcatgtggaggtctccagctcaggaaagtgaggagggaaataattttggttcttgtgcaataaaagttgaccttgactctctgaggaagattttgctgcttttgcctgaagaaaacagacccatctctggaggtctcaggaagggcccagcgaacacactctcttggataattaccacgatggcgtcagcaaacactccaccctgtgcctttttagtccttcccgccctcctgcctctcccttacacccctcttaacgactttcaaactaaaggatacatcatatactgacaaactcaatgtggtcctttcaagaattagccatgagtctcaaaaaggcaataaatggctctaagtggacaggtttgcttcaaacaagtaacatctacattttgtcttttttttttcagttctcctgttatgttctggttgaaatcacctgtgtgtcttaatttctcaattcctttttggcaagaatatcaagcaaggtgaatttaacattatgtttatgttttgttttgttgctgta

SEQ ID NO: 59928 - DNA, 1344 bp, Artificial Sequence
  derived and/or modified sequence
atgacccggcggcagcaggtgctgcaggccaagcggagcatccagcagacctttcaggcacagctgatgccctggaaaagcatgtttcatggcagagaggtgaagccagtaggaccagatttagagctctctgaggctgaaaacggcgtcgaggagaaaaagaaggcctgcaggtctccaactgcacagtcaccaactccttctgtggaagctgactcaccagatcagaagaagatcatttccctgtggagtaagagcagtttcgacggcgcttcccttgcaagcgacaagaacgactgtaaaacagagtctaagaacgacccaaaaactgaacggaaaaagtctagctcgagcagccagtacaaggccaatatgcatttccataaattattcctcagtgtgccgacggaagagccactgaagcagtcttttacgtgtgcgctacagaaagagattctgtatcagggcaaactgtttgtctcagaaaactggatttgcttccattcaaaagtctttggaaaggatacaaagatcagcattccagcatttagtgtcacacttattaagaagacgaaaactgcattgttggttccaaatgcccttattattgctaccgtgacggacaggtacatctttgtaagtctcctttctagagactcaacatacaagctcctgaagagcgtgtgcggacacttggaaaacacatccgtaggaaatagccccaacccaagctcagctgaaaacagcttcagagccgacagacccagctcactgcctttggacttcaacgacgagttttctgatctcgacggtgtggttcagcagagaagacaagacatggaaggatatagcagctcgggctcgcagacccctgaatcggagaacagcagagatttccacgcaacggagagccagaccgtcctcaacgtgtctaagggcgaggcaaaaccaaccagagcggacgcccatgttaaccgagtgcccgagggaaaggcaaagtccctccctgtgcagggcttgtcagagacggtgggcattcttcacaaagtgaaatcccaaaaatgtcccatgctccatcatatcctgatcttctacgcaattgtcgtgtgcgcgctgattatcagtaccttctacatgaggtacagaattaacacgctcgaggagcagctgggactgcttacatccattgtggacactcataatacagaacaagctgccccttcagggctccgcagtcaggtgcagttcaacgtagaggtgctctgccaggaactcactgcgaacatcgttaagctggagaaaattcagaacaatctgcagaagctcctcgagaacggagactag

SEQ ID NO: 59929 - DNA, 417 bp, Artificial Sequence
  derived and/or modified sequence
atggaaaggtttctgaattcaaaggcccgaaggctggggtcctgctcacacccagcgttttacttattgtgtgtccctgacgaagataccagttgctctactatctatttgcccctcaagcgtagggctgacccagatcaattgttctccgatctccttggaggcacgcagcgcctgtggagcaaccggtttggaaacgaggaatcgttcccagggagagttcgggctttggtggacactttctgttggatcgctagagctccaccattgggcaaccctttacggctggaagagcggattgcctggagaatccagcgcctgaagtccggacagacagccctgattgaaaaaaaaaaacagaagatagaagaagatgtgcgccaccaatgtcaacagacaacgtgtgaccggtgctag

SEQ ID NO: 59930 - DNA, 1344 bp, Artificial Sequence
  derived and/or modified sequence
atgacccgaaggcagcaggtacttcaggccaaacgatccatccaacagacttttcaagcccagctgatgccttggaaatcaatgttccacgggagggaggtgaaacccgttggacccgacttagaactgtccgaagctgaaaatggtgtggaggagaagaagaaggcctgcaggtcccccacagcccaatcccccacgccaagcgtggaggccgactcaccggatcagaagaagattatttccctctggagtaaaagttctttcgacggcgcttcattggccagtgacaagaacgattgtaagactgaatccaagaacgaccccaagacagaacgcaaaaaatccagttcttcctctcagtacaaagcgaatatgcacttccataagcttttcttgtctgtgccaaccgaagagccactgaagcagtctttcacttgtgccctgcagaaagaaattctgtatcagggaaaactgttcgtctccgagaattggatctgctttcatagcaaggtctttggcaaggatacaaagatttctatccctgccttttccgtgaccttgatcaaaaagaccaaaaccgcccttctcgtcccaaatgccctgattatagccacggtgacagacagatatatattcgttagtctcctgagccgagatagcacttataaattgttaaaatctgtttgcggccacctggaaaacacttccgttggtaatagccccaatccctccagcgctgaaaactccttccgcgctgatcgaccctcctcgttgccactggactttaatgacgagttctcagacctggatggggttgtccagcagagacggcaggacatggagggctactcatcttccggctcacaaactccagaaagtgagaacagtagggatttccacgccaccgagtcgcagacagtgctgaacgtcagcaagggggaggccaaacctactagggctgatgctcacgtgaacagagtccccgagggtaaagctaaatcactgcccgtgcagggcctttcagaaaccgtagggatattgcacaaagtgaagagccagaagtgtcctatgcttcaccacatcctgattttttatgcaattgtggtctgtgcactgattatctctaccttttacatgagatatcgcataaatacgttggaagagcagctggggctattgacaagcattgtcgacacgcacaacactgaacaggctgcccctagcggactgcgatcacaggttcaatttaacgtggaggtgctgtgtcaggagttaacagccaacatcgtgaagctcgagaagattcagaataatttgcagaagctgctagaaaacggggattag

SEQ ID NO: 59931 - DNA, 987 bp, Artificial Sequence
  derived and/or modified sequence
atgtacaaggccaacatgcacttccacaagctgttcctgagcgtgcccaccgaggagcccctgaagcagagcttcacctgcgccctgcagaaggagatcctgtaccagggcaagctgttcgtgagcgagaactggatctgcttccacagcaaggtgttcggcaaggacaccaagatcagcatccccgccttcagcgtgaccctgatcaagaagaccaagaccgccctgctggtgcccaacgccctgatcatcgccaccgtgaccgacagatacatcttcgtgagcctgctgagcagagacagcacctacaagctgctgaagagcgtgtgcggccacctggagaacaccagcgtgggcaacagccccaaccccagcagcgccgagaacagcttcagagccgacagacccagcagcctgcccctggacttcaacgacgagttcagcgacctggacggcgtggtgcagcagagaagacaggacatggagggctacagcagcagcggcagccagacccccgagagcgagaacagcagagacttccacgccaccgagagccagaccgtgctgaacgtgagcaagggcgaggccaagcccaccagagccgacgcccacgtgaacagagtgcccgagggcaaggccaagagcctgcccgtgcagggcctgagcgagaccgtgggcatcctgcacaaggtgaagagccagaagtgccccatgctgcaccacatcctgatcttctacgccatcgtggtgtgcgccctgatcatcagcaccttctacatgagatacagaatcaacaccctggaggagcagctgggcctgctgaccagcatcgtggacacccacaacaccgagcaggccgcccccagcggcctgagaagccaggtgcagttcaacgtggaggtgctgtgccaggagctgaccgccaacatcgtgaagctggagaagatccagaacaacctgcagaagctgctggagaacggcgactag

SEQ ID NO: 59932 - DNA, 987 bp, Artificial Sequence
  derived and/or modified sequence
atgtacaaggctaatatgcacttccacaaattgtttctcagcgtgcccaccgaggaacctctcaagcagtcattcacttgtgctctccagaaagaaattttatatcagggcaagctattcgtgtccgagaactggatatgctttcattccaaagtatttggcaaagacaccaagatctccataccggcgttttcagtaacgctgatcaaaaaaactaagacagcgctgctcgtacccaatgccttaattattgccacagtcacggatcggtacatcttcgtaagcctgctgtcccgggacagcacttacaaactgctaaagtctgtgtgcggacacttggagaacaccagcgtaggaaattccccgaacccttcatccgccgagaacagcttcagggccgatagaccctcatcattaccgctcgactttaacgacgagttcagtgacctggatggggtggtgcaacagcgacgtcaggacatggaggggtattctagtagcggctcccagacacctgagtcagaaaattctcgtgattttcacgcaacagaatcccagacagtccttaacgtgtccaagggagaagcaaaaccgactcgagcagatgctcacgtgaaccgagttccagagggcaaggcaaaatcattacctgtccagggtttaagcgaaacagtggggatcttgcacaaggtgaaatcacaaaagtgtcccatgttgcaccatatcttgattttttatgcaatcgtagtgtgcgccctgatcatttccacgttttatatgaggtacagaattaacacattagaggagcagctcggactgctgacgtccattgtggacacccataataccgaacaggcagcaccatccgggctaagatcccaggtgcagtttaacgtggaggttctctgccaggagctcactgcaaatatcgtaaagctagaaaagatccagaataacctgcagaagctgctcgagaatggggattag

SEQ ID NO: 59933 - DNA, 987 bp, Artificial Sequence
  derived and/or modified sequence
atgtacaaggccaacatgcacttccacaagctgttcctgtctgtgcccacagaggagcccctgaagcagagcttcacctgtgccctgcagaaggagatcctgtaccagggcaagctgtttgtgtctgagaactggatctgcttccacagcaaggtgtttgggaaggacaccaagatcagcatcccagccttctctgtgaccctcatcaagaagaccaagacagccctgctggtgcccaatgccctgatcatcgccaccgtgacagaccgctacatctttgtgtccctgctgagccgggacagcacctacaagctgctgaagtctgtgtgtggccacctggagaacacctctgtgggcaacagccccaaccccagcagcgctgagaacagcttccgggctgaccggcccagcagcctgcccctggacttcaatgatgagttcagtgacctggatggagtggtgcagcagaggcggcaggacatggagggctacagcagcagcggcagccagaccccagagagcgagaacagccgggacttccacgccacagagagccagacagtgctgaatgtgtccaaaggagaggccaagcccaccagggcagatgcccacgtgaacagagtgcctgagggcaaggccaagagcctgcctgtgcagggcctgtctgagaccgtgggcatcctgcacaaggtgaagagccagaagtgccccatgctgcaccacatcctgatcttctacgccatcgtggtgtgtgccctgatcatcagcaccttctacatgagataccgcatcaacaccctggaggagcagctgggcctgctgaccagcatcgtggacacccacaacacagagcaggccgcccccagcggcctgcggagccaggtgcagttcaacgtggaggtgctgtgccaggagctgacagccaacatcgtgaagctggagaagatccagaacaacctgcagaagctgctggagaatggagactag

SEQ ID NO: 59934 - DNA, 2822 bp, Artificial Sequence
  derived and/or modified sequence
ctgttacagtcgggatagaaaacaaaaagcttaatttaccaggaggctaaacagattgtgccttcttaggcaaatgttccacctgcttggccaattagcttcctctcccgaaagactcgttcaacaggtttcctttttctcttctctgcctcctgggttggggaaagaggctgtcacttcgcttcgaccctccccttccctccctctcggcttttccacagtgggtcggaccaatcgcgcccgctccgacgtgtccaggtccgcggccccgggagcttggcgcggcccggcctggatgcgctgggcggagggtgcaggggagggcacggcgccgcttgcttggcctgcgcacccggacctagaagccgggacgagccggggcagagccaggcgcgcggaagtctgaaggtgccctccagacacggccccgatgactgaactacagcaagatgtggaagacacaaagcctgcgaaagtgctcgggaagagggagagcaaacttggctcagcccactcagaggctgagaatggtgtggaggagaaaaagaaagcctgcaggtcgccaacagcccaatcccctaccccatctgtggaggcggactccccagaccagaagaaaatcattagcctatgtacaaggccaatatgcactttcacaagttgtttcttagtgtcccaacggaggaaccactgaagcaaagctttacctgtgctctacagaaagaaatactataccaaggaaagctctttgtatcagaaaactggatttgttttcattccaaagtctttggaaaagacacaaagatctctattccagctttctcggtaaccctaataaagaaaaccaaaactgctcttctagtgccaaacgccctgatcatagcaacagtcacagacaggtacatatttgtctccttactctccagagattcaacttacaaactactaaaatctgtgtgtggacacttagaaaatacaagtgttggtaacagtcccaatccatcttctgctgaaaacagtttccgagcagaccgcccttcatctctgcctctggatttcaatgatgaattctcagatctggatggagtggttcaacaaagaaggcaagacatggaaggatatagcagttctggttctcaaactcctgaatctgagaactctcgagatttccatgcgacagaatcccaaacagttctgaatgtctccaagggagaagcaaagccaactcgggcagatgcccatgtgaacagagtacctgaaggaaaagccaagagtctccctgtacagggtctgtcagaaactgttggaatcttacataaagtcaagtctcagaaatgtccgatgcttcaccatattcttatattctatgcaattgttgtctgtgcactaatcatctcgaccttctacatgagatacagaattaatactctggaggagcagctggggttactaacctccattgtggacacccataatactgaacaggcagcaccatctggcctgaggtcacaagtacaattcaatgtggaggttctctgtcaagagcttacagctaacatagtgaaattagaaaagatacaaaataacttacagaagttgcttgagaatggtgactgatcgaccagattgcttgggccatcggaatacctcatgtttccctttgaagaaggtgcttcctgaggcgttttgtttgagtgcaccctgctggtcagaggtgcaagcagatgagaatccagacattgcatgtggaggtctccagctcaggaaagtgaggagggaaataattttggttcttgtgcaataaaagttgaccttgactctctgaggaagattttgctgcttttgcctgaagaaaacagacccatctctggaggtctcaggaagggcccagcgaacacactctcttggataattaccacgatggcgtcagcaaacactccaccctgtgcctttttagtccttcccgccctcctgcctctcccttacacccctcttaacgactttcaaactaaaggatacatcatatactgacaaactcaatgtggtcctttcaagaattagccatgagtctcaaaaaggcaataaatggctctaagtggacaggtttgcttcaaacaagtaacatctacattttgtcttttttttttcagttctcctgttatgttctggttgaaatcacctgtgtgtcttaatttctcaattcctttttggcaagaatatcaagcaaggtgaatttaacattatgtttatgttttgttttgttgctgtaactaatagttaattggactgattcttacccagccctggtcaagaatctgtgaggcatgtgactgaagtactaaattaaacttattttgaaaccaaacctaatttttaagccaaaaggtgtaatagtgatttaatacaggatgaaaaacactgaatttttaagactgtaggtggactatgttagtagttttcaagcaggatgtctgtattcagcattcaataatgctaaaatccctttcagcatgaaatttgtatgtttttatcctttgctgactaaaataaaataactggtggtttgctaactatttaccatatgggttggctggtttttattaataattgtttagggtatcataagatctgtaagtacaaaggatattctgtttctatctgcaatgcatttgataatcatttctatgaaatgtattttatttaatcagataagctaataagcgaattggttacatcgtttgtatctgttggcctagtggacagctgtgcctggtgcacctctggcttttaataaatactcattggttgaaacaccctgctaa

SEQ ID NO: 59935 - DNA, 987 bp, Artificial Sequence
  derived and/or modified sequence
atgtacaaggccaacatgcacttccacaagctgttcctgagcgtgcccactgaagaaccactgaagcagtcattcacctgcgcgcttcagaaggagatcctgtatcagggcaagttgttcgttagcgagaactggatatgtttccatagtaaagtgttcggtaaggacacaaaaatatcaatcccagcctttagcgtcaccctcataaagaagaccaagacagcactgcttgtgccaaatgccctcataattgcgaccgtgactgaccgctacatttttgtgagcctccttagccgggactccacctacaagctcctgaaatctgtctgcggacacctggaaaatacgtccgtcggaaactctcctaacccatcctctgccgaaaacagttttagagcagaccggccctcatctttgccgctggactttaatgatgaatttagtgatttggatggcgtagttcagcagcgtcggcaagacatggagggatatagtagtagtggatctcagacccctgaatctgaaaattctagagacttccacgctactgaatctcagacggtgctgaatgtgtccaagggagaggctaagcccacgagagcagacgcccacgtcaatagagtgccagaggggaaggcgaaaagcctgcccgtccaagggttgagcgagacagtgggtattttgcataaggtgaagtcccagaagtgccctatgcttcaccacatcctgatcttttacgccatagttgtctgcgctctgatcatctctaccttttatatgaggtaccgcatcaacaccctggaggaacagctcggattgctgactagtatcgtcgatactcacaatacggaacaagcagcccctagcgggctcaggtcccaagtccaatttaatgtagaggtgctttgccaagaactgacagccaatatcgtgaaactggagaagatccagaataacctgcagaagcttttggagaatggcgattag

SEQ ID NO: 59936 - DNA, 987 bp, Artificial Sequence
  derived and/or modified sequence
atgtataaggctaatatgcactttcacaagctcttcctttccgtcccaactgaggagcccctgaagcagtccttcacatgtgcactgcaaaaggaaatcctgtaccaaggaaagttatttgtgtccgaaaattggatttgttttcattctaaagtatttggcaaggacactaagatcagtatacctgccttcagtgtgacactgatcaagaaaacaaagaccgcattacttgttcccaacgctctaataatcgctaccgtgaccgatcgctatatctttgttagcctgctgagtcgcgacagtacatacaaactgctcaaaagtgtgtgcggtcatctcgaaaataccagcgtgggtaattctcctaaccccagtagcgcagagaactcatttagagccgatcgaccttcgtccctgccactggatttcaatgatgaattttctgatctcgacggagtggtgcaacagcggagacaagacatggaggggtattcctcgtcggggtcccaaactcctgagtcagagaactccagagattttcacgccaccgaatcccagactgtcctgaatgtaagcaaaggggaggcaaagcccacccgcgcagatgcacatgtgaatcgggtgcccgaagggaaagcgaagtcattgcctgtgcagggactgagcgaaacggtgggcatcttgcataaagtaaagagtcagaaatgccctatgctgcaccacatcctgattttctacgccatcgttgtatgtgccctgatcatttccacattttatatgagatatcggatcaacactctggaggagcagctcggccttttgacctccattgtcgatactcacaacacagagcaggcagcaccaagcggtctgcgaagtcaggtgcaatttaacgtagaggtgctatgtcaggagctcaccgcgaacatcgtgaagctggagaaaattcagaataatcttcagaagcttctggagaatggggactag

SEQ ID NO: 59937 - protein, 440 aa, Artificial Sequence
  derived and/or modified sequence
MWKTQSLRKCSGRGRANLAQPTQRLRMVWRRKRKPAGRQQPNPLPHLWRRTPQTRRKSLAYAHIFSPNLCFIQDQESKSSFDGASLASDKNDCKTESKNDPKTERKKSSSSSQYKANMHFHKLFLSVPTEEPLKQSFTCALQKEILYQGKLFVSENWICFHSKVFGKDTKISIPAFSVTLIKKTKTALLVPNALIIATVTDRYIFVSLLSRDSTYKLLKSVCGHLENTSVGNSPNPSSAENSFRADRPSSLPLDFNDEFSDLDGVVQQRRQDMEGYSSSGSQTPESENSRDFHATESQTVLNVSKGEAKPTRADAHVNRVPEGKAKSLPVQGLSETVGILHKVKSQKCPMLHHILIFYAIVVCALIISTFYMRYRINTLEEQLGLLTSIVDTHNTEQAAPSGLRSQVQFNVEVLCQELTANIVKLEKIQNNLQKLLENGD

SEQ ID NO: 59938 - DNA, 1323 bp, Artificial Sequence
  derived and/or modified sequence
atgtggaagacccagagcctgagaaagtgcagcggcagaggcagagccaacctggcccagcccacccagagactgagaatggtgtggagaagaaagagaaagcccgccggcagacagcagcccaaccccctgccccacctgtggagaagaaccccccagaccagaagaaagagcctggcctacgcccacatcttcagccccaacctgtgcttcatccaggaccaggagagcaagagcagcttcgacggcgccagcctggccagcgacaagaacgactgcaagaccgagagcaagaacgaccccaagaccgagagaaagaagagcagcagcagcagccagtacaaggccaacatgcacttccacaagctgttcctgagcgtgcccaccgaggagcccctgaagcagagcttcacctgcgccctgcagaaggagatcctgtaccagggcaagctgttcgtgagcgagaactggatctgcttccacagcaaggtgttcggcaaggacaccaagatcagcatccccgccttcagcgtgaccctgatcaagaagaccaagaccgccctgctggtgcccaacgccctgatcatcgccaccgtgaccgacagatacatcttcgtgagcctgctgagcagagacagcacctacaagctgctgaagagcgtgtgcggccacctggagaacaccagcgtgggcaacagccccaaccccagcagcgccgagaacagcttcagagccgacagacccagcagcctgcccctggacttcaacgacgagttcagcgacctggacggcgtggtgcagcagagaagacaggacatggagggctacagcagcagcggcagccagacccccgagagcgagaacagcagagacttccacgccaccgagagccagaccgtgctgaacgtgagcaagggcgaggccaagcccaccagagccgacgcccacgtgaacagagtgcccgagggcaaggccaagagcctgcccgtgcagggcctgagcgagaccgtgggcatcctgcacaaggtgaagagccagaagtgccccatgctgcaccacatcctgatcttctacgccatcgtggtgtgcgccctgatcatcagcaccttctacatgagatacagaatcaacaccctggaggagcagctgggcctgctgaccagcatcgtggacacccacaacaccgagcaggccgcccccagcggcctgagaagccaggtgcagttcaacgtggaggtgctgtgccaggagctgaccgccaacatcgtgaagctggagaagatccagaacaacctgcagaagctgctggagaacggcgactag

SEQ ID NO: 59939 - DNA, 1323 bp, Artificial Sequence
  derived and/or modified sequence
atgtggaagacccaatctctgcgcaaatgctccggccgaggccgcgctaatctggctcagcctactcaaaggctgcgaatggtgtggcgccgcaaacgcaagcctgctggtagacagcagcccaacccactgccacacttatggcgtaggacccctcagactcggaggaaatctctggcttacgctcacatcttcagccctaatctctgttttatccaagaccaggaatcaaagagcagcttcgacggggcctcattggcctcggacaaaaacgattgtaaaacagagagtaaaaacgaccccaagaccgaaaggaagaaaagttcctcgtcttcacagtataaagcgaacatgcactttcacaagttgttcctttccgtccctacggaggaacccctgaagcagagctttacctgcgcactccagaaagaaatcctctatcaaggtaagctgtttgtgtctgaaaattggatctgtttccacagtaaggtcttcggtaaggacacaaagatttctatccccgccttttccgtaactctgatcaaaaaaactaagaccgcacttcttgtgcccaacgccctgattatcgccactgtgaccgacagatacatcttcgtgtctctcctctcccgagattctacgtataagctgctcaagtccgtctgcggtcatctggaaaacacgtccgtgggaaactctccaaatcctagttctgccgaaaactcgtttcgggctgatagacccagcagcctacccctcgatttcaatgatgaattttcggacctggacggagtggtgcaacagaggagacaggatatggaaggctacagttcctccggcagccagactcctgaatccgagaattcccgcgattttcatgcaactgagtctcagacagtgctcaacgtaagtaagggagaggccaaacccacacgggctgacgcccacgtcaatcgcgttcccgagggcaaagcaaagtctttgccagtccagggcctaagtgaaactgtcgggatccttcacaaggtgaagtcgcagaagtgcccgatgcttcaccatatcctgatcttctacgccatcgtggtgtgcgccttgatcatcagtactttttatatgcggtataggatcaacaccctggaggagcagctgggtcttctgacttctatagtggatacgcataacacagaacaggctgccccctcagggttgcgatctcaagttcagttcaacgtagaggtgctctgtcaggaactgacagccaatattgtgaaacttgagaaaatccaaaacaaccttcagaagctgctggaaaatggggattag

SEQ ID NO: 59940 - DNA, 1323 bp, Artificial Sequence
  derived and/or modified sequence
atgtggaagacccagagcctgaggaaatgttctggccggggccgggccaacctggcccagcccacccagaggctgaggatggtgtggaggaggaagaggaagccagctggccggcagcagcccaaccccctgccccacctgtggaggaggaccccccagaccaggaggaagagcctggcctatgcccacatcttcagccccaacctgtgcttcatccaggaccaggagagcaagagcagctttgatggagccagcctggccagtgacaagaatgactgcaagacagagagcaagaatgaccccaagacagagaggaagaagagcagcagcagcagccagtacaaggccaacatgcacttccacaagctgttcctgtctgtgcccacagaggagcccctgaagcagagcttcacctgtgccctgcagaaggagatcctgtaccagggcaagctgtttgtgtctgagaactggatctgcttccacagcaaggtgtttgggaaggacaccaagatcagcatcccagccttctctgtgaccctcatcaagaagaccaagacagccctgctggtgcccaatgccctgatcatcgccaccgtgacagaccgctacatctttgtgtccctgctgagccgggacagcacctacaagctgctgaagtctgtgtgtggccacctggagaacacctctgtgggcaacagccccaaccccagcagcgctgagaacagcttccgggctgaccggcccagcagcctgcccctggacttcaatgatgagttcagtgacctggatggagtggtgcagcagaggcggcaggacatggagggctacagcagcagcggcagccagaccccagagagcgagaacagccgggacttccacgccacagagagccagacagtgctgaatgtgtccaaaggagaggccaagcccaccagggcagatgcccacgtgaacagagtgcctgagggcaaggccaagagcctgcctgtgcagggcctgtctgagaccgtgggcatcctgcacaaggtgaagagccagaagtgccccatgctgcaccacatcctgatcttctacgccatcgtggtgtgtgccctgatcatcagcaccttctacatgagataccgcatcaacaccctggaggagcagctgggcctgctgaccagcatcgtggacacccacaacacagagcaggccgcccccagcggcctgcggagccaggtgcagttcaacgtggaggtgctgtgccaggagctgacagccaacatcgtgaagctggagaagatccagaacaacctgcagaagctgctggagaatggagactag

SEQ ID NO: 59941 - DNA, 2977 bp, Artificial Sequence
  derived and/or modified sequence
ctgttacagtcgggatagaaaacaaaaagcttaatttaccaggaggctaaacagattgtgccttcttaggcaaatgttccacctgcttggccaattagcttcctctcccgaaagactcgttcaacaggtttcctttttctcttctctgcctcctgggttggggaaagaggctgtcacttcgcttcgaccctccccttccctccctctcggcttttccacagtgggtcggaccaatcgcgcccgctccgacgtgtccaggtccgcggccccgggagcttggcgcggcccggcctggatgcgctgggcggagggtgcaggggagggcacggcgccgcttgcttggcctgcgcacccggacctagaagccgggacgagccggggcagagccaggcgcgcggaagtctgaaggtgccctccagacacggccccgatgactgaactacagcaagatgtggaagacacaaagcctgcgaaagtgctcgggaagagggagagcaaacttggctcagcccactcagaggctgagaatggtgtggaggagaaaaagaaagcctgcaggtcgccaacagcccaatcccctaccccatctgtggaggcggactccccagaccagaagaaaatcattagcctatgcccatatcttctctccaaatctatgcttcattcaggaccaagagtcaaaatccagttttgatggtgcctctttagcaagtgataagaacgactgtaaaacagaaagcaaaaatgaccctaagactgaaagaaaaaagtcttcatcttccagccagtacaaggccaatatgcactttcacaagttgtttcttagtgtcccaacggaggaaccactgaagcaaagctttacctgtgctctacagaaagaaatactataccaaggaaagctctttgtatcagaaaactggatttgttttcattccaaagtctttggaaaagacacaaagatctctattccagctttctcggtaaccctaataaagaaaaccaaaactgctcttctagtgccaaacgccctgatcatagcaacagtcacagacaggtacatatttgtctccttactctccagagattcaacttacaaactactaaaatctgtgtgtggacacttagaaaatacaagtgttggtaacagtcccaatccatcttctgctgaaaacagtttccgagcagaccgcccttcatctctgcctctggatttcaatgatgaattctcagatctggatggagtggttcaacaaagaaggcaagacatggaaggatatagcagttctggttctcaaactcctgaatctgagaactctcgagatttccatgcgacagaatcccaaacagttctgaatgtctccaagggagaagcaaagccaactcgggcagatgcccatgtgaacagagtacctgaaggaaaagccaagagtctccctgtacagggtctgtcagaaactgttggaatcttacataaagtcaagtctcagaaatgtccgatgcttcaccatattcttatattctatgcaattgttgtctgtgcactaatcatctcgaccttctacatgagatacagaattaatactctggaggagcagctggggttactaacctccattgtggacacccataatactgaacaggcagcaccatctggcctgaggtcacaagtacaattcaatgtggaggttctctgtcaagagcttacagctaacatagtgaaattagaaaagatacaaaataacttacagaagttgcttgagaatggtgactgatcgaccagattgcttgggccatcggaatacctcatgtttccctttgaagaaggtgcttcctgaggcgttttgtttgagtgcaccctgctggtcagaggtgcaagcagatgagaatccagacattgcatgtggaggtctccagctcaggaaagtgaggagggaaataattttggttcttgtgcaataaaagttgaccttgactctctgaggaagattttgctgcttttgcctgaagaaaacagacccatctctggaggtctcaggaagggcccagcgaacacactctcttggataattaccacgatggcgtcagcaaacactccaccctgtgcctttttagtccttcccgccctcctgcctctcccttacacccctcttaacgactttcaaactaaaggatacatcatatactgacaaactcaatgtggtcctttcaagaattagccatgagtctcaaaaaggcaataaatggctctaagtggacaggtttgcttcaaacaagtaacatctacattttgtcttttttttttcagttctcctgttatgttctggttgaaatcacctgtgtgtcttaatttctcaattcctttttggcaagaatatcaagcaaggtgaatttaacattatgtttatgttttgttttgttgctgtaactaatagttaattggactgattcttacccagccctggtcaagaatctgtgaggcatgtgactgaagtactaaattaaacttattttgaaaccaaacctaatttttaagccaaaaggtgtaatagtgatttaatacaggatgaaaaacactgaatttttaagactgtaggtggactatgttagtagttttcaagcaggatgtctgtattcagcattcaataatgctaaaatccctttcagcatgaaatttgtatgtttttatcctttgctgactaaaataaaataactggtggtttgctaactatttaccatatgggttggctggtttttattaataattgtttagggtatcataagatctgtaagtacaaaggatattctgtttctatctgcaatgcatttgataatcatttctatgaaatgtattttatttaatcagataagctaataagcgaattggttacatcgtttgtatctgttggcctagtggacagctgtgcctggtgcacctctggcttttaataaatactcattggttgaaacaccctgctaa

SEQ ID NO: 59942 - DNA, 1323 bp, Artificial Sequence
  derived and/or modified sequence
atgtggaagacccagagcctgcggaagtgcagcggccggggccgggccaaccttgcccaaccaacgcaacgactacgaatggtttggcgaaggaagcgcaagccagccggcagacagcagcctaaccctcttccccacctgtggcgcagaacccctcagacccggcgcaaaagtctggcctatgcccatatcttttcacccaacctttgttttatccaagaccaagagagtaaaagctccttcgacggcgcgtccctagcttccgataagaacgactgcaaaacagaaagcaagaacgaccctaaaaccgagcggaagaagtcatcttcttcttcccagtataaagctaatatgcactttcacaagctattcctgtcagtgccaactgaggagcccctgaagcagtctttcacctgtgcgttacaaaaagagatactttaccaaggcaagctgttcgtcagcgagaattggatatgctttcatagcaaggtgttcggaaaagacaccaaaatttctatccctgctttctccgttacactgattaaaaagacgaaaaccgccctgctcgtcccaaatgccctgattattgcaactgtgacagatcggtatatcttcgtgtccctgttgagcagagacagtacttacaagctattgaagagtgtctgtgggcacctcgagaatacgtctgttggaaattcaccaaatcctagtagtgcagagaattcatttcgggcagacagacctagcagtctcccactagacttcaacgacgagttttctgatctcgatggtgtcgtccagcagcgccggcaagacatggagggatacagctctagcggtagtcaaacgcctgagagcgagaattcccgtgactttcatgccaccgaatcccagactgttttaaacgtgtcaaagggagaggccaagcccacgcgggctgacgcccacgttaatcgggtgccagaagggaaggctaagagtttgcctgtacagggcctttcagagacggtaggaatcttacataaggtgaaatcacagaaatgtcctatgctgcaccatatcctcatcttttatgccatcgtcgtctgcgccctaatcatcagcacattttacatgagatacaggattaatacgctcgaagagcagttaggcctgctgacaagcatcgtcgatactcataacactgagcaggccgcgccctcagggttacgatctcaagtgcagtttaatgttgaagtgttgtgccaagaactgactgctaatatcgtgaagttagaaaagatccagaataatttgcaaaaactgctggaaaacggagactag

SEQ ID NO: 59943 - DNA, 1323 bp, Artificial Sequence
  derived and/or modified sequence
atgtggaagacccagtctctaagaaaatgtagcgggaggggaagggctaatctggcacagccgacacagcgactgcgcatggtctggaggaggaagcgcaagcccgctggacgccagcagcctaatcccctgccacatctgtggcggaggacgccccagactcggcgaaagtctctcgcgtacgctcacatcttctctcctaatttgtgtttcatccaggatcaggagtccaaatcaagttttgatggagcttctctagctagcgacaagaacgattgcaaaaccgaaagtaaaaacgaccccaagacagaacgcaagaaatcatcctcatcctcccagtacaaagcaaatatgcattttcacaagctgttcctgagcgtgcctactgaggagccattgaaacagtcattcacctgcgccctgcaaaaggaaattctgtatcaagggaaactgttcgtgagcgaaaactggatctgttttcactctaaagtgtttggcaaagatactaagattagcattccggctttcagtgtcacacttattaaaaaaacgaagacagctcttttagtccccaacgccctcattatcgccacagtgacagataggtatattttcgtgtcccttctcagccgggacagcacctacaagctgctcaaatctgtgtgcgggcacctcgaaaacacttcagtagggaacagtccaaacccaagttcagctgaaaatagcttcagggctgataggccatcaagtttgcctctggactttaatgatgaattctctgacctggatggcgtcgtccagcagcggcgtcaagatatggaagggtactccagcagcgggagccaaaccccagagagcgagaactcccgggatttccatgctacagaaagccaaacagtgctaaacgtgtccaagggcgaggcgaagcccacacgagcagatgcgcatgttaatcgggtgccggagggaaaagccaaatccttacccgtccagggactgtccgagactgtgggcatcctccacaaggttaagtcacagaaatgcccgatgctccaccatattctcatcttctatgctattgtggtgtgcgccttgatcattagcacgttttacatgagataccggatcaacacgttggaggagcagctcggcctgctgacctctatcgtcgacacgcataacacagagcaagccgcacctagcgggctgagatcgcaggtgcagttcaatgtagaagttctatgccaggaactgactgcgaacatagtgaaactggagaagattcagaataaccttcagaaacttctggagaatggcgattag

SEQ ID NO: 59944 - protein, 292 aa, Artificial Sequence
  derived and/or modified sequence
MSKVKRFPFFFSSEAENGVEEKKKACRSPTAQSPTPSVEADSPDQKKIISLWSKSSFDGASLASDKNDCKTESKNDPKTERKKSSSSSQYKANMHFHKLFLSVPTEEPLKQSFTCALQKEILYQGKLFVSENWICFHSKVFGKDTKISIPAFSVTLIKKTKTALLVPNALIIATVTDRYIFVSLLSRDSTYKLLKSVCGHLENTSVGNSPNPSSAENSFRADRPSSLPLDFNDEFSDLDGVVQQRRQDMEGYSSSGSQTPESENSRDFHATESQTVLNVSIFLYSMQLLSVH

SEQ ID NO: 59945 - protein, 416 aa, Artificial Sequence
  derived and/or modified sequence
MSKVKRFPFFFSSEAENGVEEKKKACRSPTAQSPTPSVEADSPDQKKIISLWSKSSFDGASLASDKNDCKTESKNDPKTERKKSSSSSQYKANMHFHKLFLSVPTEEPLKQSFTCALQKEILYQGKLFVSENWICFHSKVFGKDTKISIPAFSVTLIKKTKTALLVPNALIIATVTDRYIFVSLLSRDSTYKLLKSVCGHLENTSVGNSPNPSSAENSFRADRPSSLPLDFNDEFSDLDGVVQQRRQDMEGYSSSGSQTPESENSRDFHATESQTVLNVSKGEAKPTRADAHVNRVPEGKAKSLPVQGLSETVGILHKVKSQKCPMLHHILIFYAIVVCALIISTFYMRYRINTLEEQLGLLTSIVDTHNTEQAAPSGLRSQVQFNVEVLCQELTANIVKLEKIQNNLQKLLENGD

SEQ ID NO: 59946 - DNA, 879 bp, Artificial Sequence
  derived and/or modified sequence
atgagcaaggtgaagagattccccttcttcttcagcagcgaggccgagaacggcgtggaggagaagaagaaggcctgcagaagccccaccgcccagagccccacccccagcgtggaggccgacagccccgaccagaagaagatcatcagcctgtggagcaagagcagcttcgacggcgccagcctggccagcgacaagaacgactgcaagaccgagagcaagaacgaccccaagaccgagagaaagaagagcagcagcagcagccagtacaaggccaacatgcacttccacaagctgttcctgagcgtgcccaccgaggagcccctgaagcagagcttcacctgcgccctgcagaaggagatcctgtaccagggcaagctgttcgtgagcgagaactggatctgcttccacagcaaggtgttcggcaaggacaccaagatcagcatccccgccttcagcgtgaccctgatcaagaagaccaagaccgccctgctggtgcccaacgccctgatcatcgccaccgtgaccgacagatacatcttcgtgagcctgctgagcagagacagcacctacaagctgctgaagagcgtgtgcggccacctggagaacaccagcgtgggcaacagccccaaccccagcagcgccgagaacagcttcagagccgacagacccagcagcctgcccctggacttcaacgacgagttcagcgacctggacggcgtggtgcagcagagaagacaggacatggagggctacagcagcagcggcagccagacccccgagagcgagaacagcagagacttccacgccaccgagagccagaccgtgctgaacgtgagcatcttcctgtacagcatgcagctgctgagcgtgcactag

SEQ ID NO: 59947 - DNA, 1251 bp, Artificial Sequence
  derived and/or modified sequence
atgagcaaggtgaagagattccccttcttcttcagcagcgaggccgagaacggcgtggaggagaagaagaaggcctgcagaagccccaccgcccagagccccacccccagcgtggaggccgacagccccgaccagaagaagatcatcagcctgtggagcaagagcagcttcgacggcgccagcctggccagcgacaagaacgactgcaagaccgagagcaagaacgaccccaagaccgagagaaagaagagcagcagcagcagccagtacaaggccaacatgcacttccacaagctgttcctgagcgtgcccaccgaggagcccctgaagcagagcttcacctgcgccctgcagaaggagatcctgtaccagggcaagctgttcgtgagcgagaactggatctgcttccacagcaaggtgttcggcaaggacaccaagatcagcatccccgccttcagcgtgaccctgatcaagaagaccaagaccgccctgctggtgcccaacgccctgatcatcgccaccgtgaccgacagatacatcttcgtgagcctgctgagcagagacagcacctacaagctgctgaagagcgtgtgcggccacctggagaacaccagcgtgggcaacagccccaaccccagcagcgccgagaacagcttcagagccgacagacccagcagcctgcccctggacttcaacgacgagttcagcgacctggacggcgtggtgcagcagagaagacaggacatggagggctacagcagcagcggcagccagacccccgagagcgagaacagcagagacttccacgccaccgagagccagaccgtgctgaacgtgagcaagggcgaggccaagcccaccagagccgacgcccacgtgaacagagtgcccgagggcaaggccaagagcctgcccgtgcagggcctgagcgagaccgtgggcatcctgcacaaggtgaagagccagaagtgccccatgctgcaccacatcctgatcttctacgccatcgtggtgtgcgccctgatcatcagcaccttctacatgagatacagaatcaacaccctggaggagcagctgggcctgctgaccagcatcgtggacacccacaacaccgagcaggccgcccccagcggcctgagaagccaggtgcagttcaacgtggaggtgctgtgccaggagctgaccgccaacatcgtgaagctggagaagatccagaacaacctgcagaagctgctggagaacggcgactag

SEQ ID NO: 59948 - DNA, 879 bp, Artificial Sequence
  derived and/or modified sequence
atgtccaaggttaagcggtttccctttttcttcagcagcgaggcggaaaatggagtagaggaaaaaaaaaaagcgtgccggtctccaacggctcagtctccaacaccgagtgtcgaggcagactctccagaccagaagaagataattagtttgtggtcgaagagcagcttcgatggagcctcattggccagcgacaaaaacgattgtaaaacagaaagtaaaaatgatccaaagacggaacggaaaaaatcttctagtagcagtcaatacaaagctaacatgcacttccataagcttttcctgtctgtgccgacagaggaacctctcaagcagagcttcacttgtgcactgcaaaaagagatcctgtatcaggggaaactgtttgtctccgagaactggatttgcttccacagcaaagtattcggcaaggacacaaaaatctccatccctgcctttagtgtgactcttattaaaaagaccaaaactgcgcttctagttcctaatgctttaatcatcgcaaccgtaactgacagatatattttcgtctctctgctctctcgggatagcacatacaaattactcaaaagtgtttgtgggcatttagagaacacgtcagtcgggaattctcccaacccctcatcagcggagaattctttcagggccgatagaccaagctccctccccctggatttcaacgacgagttctccgacctagatggagtcgtgcaacaaaggcgtcaggatatggagggatatagtagttccggctcccagacacccgagtccgaaaacagcagagactttcacgccaccgagagtcagaccgtacttaatgtaagtatcttcttgtactctatgcagctcctgagtgtccattag

SEQ ID NO: 59949 - DNA, 1251 bp, Artificial Sequence
  derived and/or modified sequence
atgagcaaggttaagagatttcctttctttttctcatccgaagccgaaaatggtgtcgaagagaaaaagaaggcgtgtaggtctcctacagcgcaatctccaacacctagtgtggaagcagatagccccgaccagaagaagattatctctctctggagtaaatccagtttcgatggggccagccttgcctccgataaaaacgactgcaagacagagagcaagaacgatcctaagacagaacgtaagaagagttccagttcatcccagtataaagccaatatgcactttcataaattgttcttaagtgttcctacggaagaacctttgaaacagagcttcacatgtgcattgcagaaagaaatcctttaccagggtaagctgttcgtgagcgagaattggatctgtttccacagtaaggtcttcggtaaggacacaaaaataagcatccccgctttttctgtcaccttgattaagaagactaagactgctcttctggtgcccaatgctcttataattgccaccgtcacagatcgatacattttcgtgagtctcctctcaagagattccacttacaagctgctcaagagcgtttgtggccatctggagaataccagcgtggggaacagccctaacccaagctctgctgagaacagttttcgagctgacaggccatcctctctcccactggattttaacgatgagttctctgatctggacggggtggtccagcagaggcgtcaagacatggaaggatattcctctagcggcagccaaacccctgagtccgagaattctagagacttccatgccaccgaaagccagacggtgctaaatgtctcgaagggagaggcgaagcctactcgggcagacgcccacgtgaaccgagtccccgaaggcaaggctaaatcgttgccagtccaaggactgtccgagacagtcgggatcctgcacaaagtgaagagccagaaatgtccaatgctccatcacattctgatcttctacgccattgttgtttgcgcattaatcatatctaccttctacatgcgatatcggattaatacccttgaggaacagctcggtctgcttacgtcaatcgttgatactcacaatacagagcaggccgcaccaagtggcctgaggtcccaggtccaattcaacgtggaggtgctgtgccaagagctgacagcaaatatagtgaagctcgagaaaattcagaacaatctccagaagctgctagaaaatggcgattag

SEQ ID NO: 59950 - DNA, 879 bp, Artificial Sequence
  derived and/or modified sequence
atgagcaaggtgaagcgcttccccttcttcttcagcagcgaggccgagaatggagtggaggagaagaagaaggcctgccgcagccccacagcccagagccccaccccatctgtggaggccgacagcccagaccagaagaagatcatcagcctgtggagcaagagcagctttgatggagccagcctggccagtgacaagaatgactgcaagacagagagcaagaatgaccccaagacagagaggaagaagagcagcagcagcagccagtacaaggccaacatgcacttccacaagctgttcctgtctgtgcccacagaggagcccctgaagcagagcttcacctgtgccctgcagaaggagatcctgtaccagggcaagctgtttgtgtctgagaactggatctgcttccacagcaaggtgtttgggaaggacaccaagatcagcatcccagccttctctgtgaccctcatcaagaagaccaagacagccctgctggtgcccaatgccctgatcatcgccaccgtgacagaccgctacatctttgtgtccctgctgagccgggacagcacctacaagctgctgaagtctgtgtgtggccacctggagaacacctctgtgggcaacagccccaaccccagcagcgctgagaacagcttccgggctgaccggcccagcagcctgcccctggacttcaatgatgagttcagtgacctggatggagtggtgcagcagaggcggcaggacatggagggctacagcagcagcggcagccagaccccagagagcgagaacagccgggacttccacgccacagagagccagacagtgctgaatgtgtccatcttcctgtacagcatgcagctgctgtctgtgcactag

SEQ ID NO: 59951 - DNA, 1251 bp, Artificial Sequence
  derived and/or modified sequence
atgagcaaggtgaagcgcttccccttcttcttcagcagcgaggccgagaatggagtggaggagaagaagaaggcctgccgcagccccacagcccagagccccaccccatctgtggaggccgacagcccagaccagaagaagatcatcagcctgtggagcaagagcagctttgatggagccagcctggccagtgacaagaatgactgcaagacagagagcaagaatgaccccaagacagagaggaagaagagcagcagcagcagccagtacaaggccaacatgcacttccacaagctgttcctgtctgtgcccacagaggagcccctgaagcagagcttcacctgtgccctgcagaaggagatcctgtaccagggcaagctgtttgtgtctgagaactggatctgcttccacagcaaggtgtttgggaaggacaccaagatcagcatcccagccttctctgtgaccctcatcaagaagaccaagacagccctgctggtgcccaatgccctgatcatcgccaccgtgacagaccgctacatctttgtgtccctgctgagccgggacagcacctacaagctgctgaagtctgtgtgtggccacctggagaacacctctgtgggcaacagccccaaccccagcagcgctgagaacagcttccgggctgaccggcccagcagcctgcccctggacttcaatgatgagttcagtgacctggatggagtggtgcagcagaggcggcaggacatggagggctacagcagcagcggcagccagaccccagagagcgagaacagccgggacttccacgccacagagagccagacagtgctgaatgtgtccaaaggagaggccaagcccaccagggcagatgcccacgtgaacagagtgcctgagggcaaggccaagagcctgcctgtgcagggcctgtctgagaccgtgggcatcctgcacaaggtgaagagccagaagtgccccatgctgcaccacatcctgatcttctacgccatcgtggtgtgtgccctgatcatcagcaccttctacatgagataccgcatcaacaccctggaggagcagctgggcctgctgaccagcatcgtggacacccacaacacagagcaggccgcccccagcggcctgcggagccaggtgcagttcaacgtggaggtgctgtgccaggagctgacagccaacatcgtgaagctggagaagatccagaacaacctgcagaagctgctggagaatggagactag

SEQ ID NO: 59952 - DNA, 1210 bp, Artificial Sequence
  derived and/or modified sequence
aataagcgcacaatggtgaagaaaaggctgccttctagtgacacggtgttccggtttgagactccgggcagcccaaggaaggccaacgtggaggcctcacgcagctccacagacagccccagctcggtgttcctcagctacctctctctgaatgtctaaagtgaagcggtttcctttcttcttcagctcagaggctgagaatggtgtggaggagaaaaagaaagcctgcaggtcgccaacagcccaatcccctaccccatctgtggaggcggactccccagaccagaagaaaatcattagcctatggtcaaaatccagttttgatggtgcctctttagcaagtgataagaacgactgtaaaacagaaagcaaaaatgaccctaagactgaaagaaaaaagtcttcatcttccagccagtacaaggccaatatgcactttcacaagttgtttcttagtgtcccaacggaggaaccactgaagcaaagctttacctgtgctctacagaaagaaatactataccaaggaaagctctttgtatcagaaaactggatttgttttcattccaaagtctttggaaaagacacaaagatctctattccagctttctcggtaaccctaataaagaaaaccaaaactgctcttctagtgccaaacgccctgatcatagcaacagtcacagacaggtacatatttgtctccttactctccagagattcaacttacaaactactaaaatctgtgtgtggacacttagaaaatacaagtgttggtaacagtcccaatccatcttctgctgaaaacagtttccgagcagaccgcccttcatctctgcctctggatttcaatgatgaattctcagatctggatggagtggttcaacaaagaaggcaagacatggaaggatatagcagttctggttctcaaactcctgaatctgagaactctcgagatttccatgcgacagaatcccaaacagttctgaatgtctccatattcttatattctatgcaattgttgtctgtgcactaatcatctcgaccttctacatgagatacagaattaatactctggaggagcagctggggttactaacctccattgtggacacccataatactgaacaggcagcaccatctggcctgaggtcacaagtacaattcaatgtggaggttctctgtcaagagcttacagctaacatagtgaaattag

SEQ ID NO: 59953 - DNA, 1577 bp, Artificial Sequence
  derived and/or modified sequence
agagctgggcagcacagacctgggagccagcaagtccacacagtctggcatttacaagtgaaacagctacctctctctgaatgtctaaagtgaagcggtttcctttcttcttcagctcagaggctgagaatggtgtggaggagaaaaagaaagcctgcaggtcgccaacagcccaatcccctaccccatctgtggaggcggactccccagaccagaagaaaatcattagcctatggtcaaaatccagttttgatggtgcctctttagcaagtgataagaacgactgtaaaacagaaagcaaaaatgaccctaagactgaaagaaaaaagtcttcatcttccagccagtacaaggccaatatgcactttcacaagttgtttcttagtgtcccaacggaggaaccactgaagcaaagctttacctgtgctctacagaaagaaatactataccaaggaaagctctttgtatcagaaaactggatttgttttcattccaaagtctttggaaaagacacaaagatctctattccagctttctcggtaaccctaataaagaaaaccaaaactgctcttctagtgccaaacgccctgatcatagcaacagtcacagacaggtacatatttgtctccttactctccagagattcaacttacaaactactaaaatctgtgtgtggacacttagaaaatacaagtgttggtaacagtcccaatccatcttctgctgaaaacagtttccgagcagaccgcccttcatctctgcctctggatttcaatgatgaattctcagatctggatggagtggttcaacaaagaaggcaagacatggaaggatatagcagttctggttctcaaactcctgaatctgagaactctcgagatttccatgcgacagaatcccaaacagttctgaatgtctccaagggagaagcaaagccaactcgggcagatgcccatgtgaacagagtacctgaaggaaaagccaagagtctccctgtacagggtctgtcagaaactgttggaatcttacataaagtcaagtctcagaaatgtccgatgcttcaccatattcttatattctatgcaattgttgtctgtgcactaatcatctcgaccttctacatgagatacagaattaatactctggaggagcagctggggttactaacctccattgtggacacccataatactgaacaggcagcaccatctggcctgaggtcacaagtacaattcaatgtggaggttctctgtcaagagcttacagctaacatagtgaaattagaaaagatacaaaataacttacagaagttgcttgagaatggtgactgatcgaccagattgcttgggccatcggaatacctcatgtttccctttgaagaaggtgcttcctgaggcgttttgtttgagtgcaccctgctggtcagaggtgcaagcagatgagaatccagacattgcatgtggaggtctccagctcaggaaagtgaggagggaaataattttggttcttgtgcaataaaagttgaccttgactctctgaggaagattttgctgcttttgcctgaagaaaacagaccc

SEQ ID NO: 59954 - DNA, 879 bp, Artificial Sequence
  derived and/or modified sequence
atgagcaaggtgaagcggttccccttcttcttcagcagcgaggccgaaaatggggtcgaagagaagaaaaaagcatgtaggagccccactgctcaaagccccacaccaagtgtggaggcggattcacccgatcaaaagaagataatctccctgtggtcaaagagctccttcgatggagcaagcctggcgtcggacaaaaacgactgcaagaccgaaagtaagaatgacccaaagacagagcgtaagaaaagctcttcttcgtcccaatacaaggccaatatgcacttccataagttgtttctctcagtgccaacagaggagccacttaaacagtccttcacatgcgccctgcagaaggagattttataccagggcaagttgttcgtgagcgagaattggatatgttttcatagcaaggtattcggtaaagacacgaagataagcatccctgccttttcggttaccttgattaaaaaaactaagacagccctccttgtgcccaacgccctgattatcgcaaccgttacggacagatacatcttcgtgagtttgctaagccgggattccacatacaagttgctcaaaagcgtgtgtggacacctcgagaacacgtccgtaggtaattctccaaacccctccagcgcggagaattccttccgggctgaccggccatcctctcttccattggattttaatgatgaattcagtgatctagacggtgtagtgcaacaaagaagacaggacatggaaggctactcttcctccggcagtcagacacccgaaagcgagaacagccgtgacttccacgctaccgaatcccagacagtgttaaacgtgtccatctttttatactccatgcagcttctctccgtgcattag

SEQ ID NO: 59955 - DNA, 1251 bp, Artificial Sequence
  derived and/or modified sequence
atgagcaaggtgaagcggttccccttcttcttcagcagcgaggccgagaatggagttgaagaaaagaaaaaagcgtgtaggagtccaactgcccagagccccaccccatccgtcgaggctgactctccggatcagaaaaaaatcatctccctttggtctaaaagttcctttgacggcgcttccctcgccagcgataaaaacgattgcaaaactgaatctaagaatgatcctaagacagagcggaaaaagtctagcagtagtagccagtacaaagccaatatgcattttcacaaactatttctcagcgtgcccacggaggaaccgctgaagcagagcttcacctgtgcactccagaaagagattctctatcaggggaagctgttcgtatcagagaattggatctgtttccatagtaaggttttcgggaaggatacaaagatctcaatccccgcattctctgtgacacttataaagaaaactaagaccgccctgctcgtccccaatgcacttattattgctaccgtgactgataggtacatattcgtgagcttgctgagccgagactccacctataaacttttaaaatcggtctgtggtcatctcgagaacacttccgtcggaaactcaccgaacccctcttcagccgagaacagcttcagggcagaccgcccaagtagtctgcctctcgattttaacgacgaattcagcgatctcgatggcgtcgtgcagcagcgacgacaagacatggaaggatattcgtccagcgggagccagacacccgaatctgaaaacagccgggacttccacgccacagagtctcaaacagtccttaatgtcagtaagggcgaggccaaacccactagagcggacgcccatgtgaatagagttcctgaaggcaaagctaaaagtctgcctgtgcagggcctgagcgagactgttgggatcctccataaagttaagtcccaaaagtgtccgatgctccaccacatcctgattttctacgcaatcgtagtctgtgccctgataatcagcacattctatatgcggtaccggattaacaccttagaggagcaactcggcctcctaacatcgatcgtagatactcataatacagaacaggcagcacctagcggcctacggagtcaagtgcagttcaacgtggaggtcctatgccaggaattgacagctaatattgtcaagcttgaaaaaattcagaataatctgcagaagctgttagaaaatggtgactag

SEQ ID NO: 59956 - DNA, 879 bp, Artificial Sequence
  derived and/or modified sequence
atgtccaaggtgaaacggtttccatttttcttcagctctgaagcagaaaatggggttgaagagaagaagaaggcttgtcgcagtccaacagcccagagtcccacgcccagtgtggaggccgactcacccgatcagaagaaaataatcagcctgtggagtaagtccagttttgacggcgcttcattggcgagtgacaaaaatgactgcaagaccgaaagcaagaatgaccccaaaacggagcgaaagaaatcctcctcttccagccaatacaaagccaatatgcatttccacaagctgtttctgtcggtgcctactgaggaacctctcaaacagtcttttacttgcgccttacaaaaagagatactataccaggggaaactgttcgtatccgaaaactggatctgttttcattcgaaggtgtttggcaaagacacaaagatatcgatcccagctttttccgtgactctcattaagaaaactaagaccgccctactcgtgccaaatgctctcatcatagctaccgtcaccgatcggtacatcttcgtctcgctgttatccagggattcgacttacaagttgcttaagtcggtgtgtggacacctggagaatacctccgtgggcaattcccctaacccctcctccgcagagaacagtttcagagcggaccggccatcctcactcccactcgacttcaacgatgagtttagcgatctggatggagtcgtgcaacagcggagacaggacatggagggttacagtagctctggctctcagaccccagaaagcgaaaattctcgcgattttcacgcgaccgagtcacagacagtgcttaatgtaagcatttttttgtatagcatgcaactccttagtgtgcattag

SEQ ID NO: 59957 - DNA, 1251 bp, Artificial Sequence
  derived and/or modified sequence
atgtccaaagtcaagcggtttccattttttttttcttccgaagccgagaacggggtggaggaaaagaagaaggcatgccgtagccctactgctcagagtcccacgccatctgtcgaggcagattcccctgatcagaagaagatcatctctctctggtccaaatcgtccttcgatggggcttccctggctagcgataagaacgactgtaaaactgagtctaaaaacgatcccaaaacggagcggaagaaaagttcaagctcctcccagtacaaagccaatatgcactttcacaagctctttctgagcgtccctaccgaggagccccttaagcagagtttcacatgcgcactacagaaggagatactgtaccaaggaaagctgtttgtgagtgagaactggatctgttttcacagtaaagttttcggcaaggacactaagataagtatccctgccttctcagtgacattaataaagaagaccaaaaccgccttacttgtgcccaatgctctgataatcgccaccgtgaccgaccggtacattttcgtgagtctgctgagccgggacagtacctacaagctgctcaaatcagtgtgcggtcatctggaaaacactagtgtgggcaatagccctaacccatcctcagccgagaactcatttagagccgaccggccatcaagtctgccgctggactttaatgatgaattctccgacctggatggagtcgttcagcagcgcaggcaggacatggaagggtattcatcctcgggaagtcagaccccagaaagcgagaatagccgtgactttcacgcaactgaaagtcagactgtgcttaacgtcagtaaaggcgaggccaaacctaccagagcggacgcccacgtgaatcgtgtgccagaggggaaagccaaatcgctgccggtacaggggttatcagagaccgtcgggatactccacaaggttaagtcccagaagtgtccaatgctacatcatattctgattttctatgcaattgtggtttgcgctttgatcatttctactttctacatgcgctatcgtatcaataccctggaggagcaactgggacttctgaccagtatcgtcgatacgcataatacagaacaagccgcacctagtggtctgcggagccaggtccaatttaatgtggaggttctatgccaggagttaacagccaatatagtgaagctggagaagattcaaaacaacctgcagaaattacttgagaatggcgactag

SEQ ID NO: 59958 - protein, 527 aa, Artificial Sequence
  derived and/or modified sequence
MYQPEDDNNSDVTSDDDMTRNRRESSPPHSVHSFSGDRDWDRRGRSRDMEPRDRWSHTRNPRSRMPPRDLSLPVVAKTSFEMDREDDRDSRAYESRSQDAESYQNVVDLAEDRKPHNTIQDNMENYRKLLSLGFLAQDSVPAEKRNTEMLDNLPSAGSQFPDFKHLGTFLVFEELVTFEDVLVDFSPEELSSLSAAQRNLYREVMLENYRNLVSLGHQFSKPDIISRLEEEESYAMETDSRHTVICQGESHDDPLEPHQGNQEKLLTPITMNDPKTLTPERSYGSDEFERSSNLSKQSKDPLGKDPQEGTAPGICTSPQSASQENKHNRCEFCKRTFSTQVALRRHERIHTGKKPYECKQCAEAFYLMPHLNRHQKTHSGRKTSGCNEGRKPSVQCANLCERVRIHSQEDYFECFQCGKAFLQNVHLLQHLKAHEAARVLPPGLSHSKTYLIRYQRKHDYVGERACQCCDCGRVFSRNSYLIQHYRTHTQERPYQCQLCGKCFGRPSYLTQHYQLHSQEKTVECDHC

SEQ ID NO: 59959 - DNA, 2113 bp, Artificial Sequence
  derived and/or modified sequence
ggtgcagaagtctgggcagctgcgggaggagaggtttgggaggcgcgggagatgtccaccctgggctggtggcgccgccgggcgccgggcgccatgagggtgcgctaggcggctgttcgtgcccgaggctgcgcagcactgagctttgccttcttgatcttccgtccttcttggagacgactggcgagaggaagagggactaggtccaaacgctaggtggctgggtccagccggagacccgcaccaaggaggagatcatcgagctcttggtccttgagcagtacctgaccatcatccctgaaaagctcaagccttgggtgcgagcaaaaaagccggagaactgtgagaagctcgtcactctgctggagaattacaaggagatgtaccaaccagaagacgacaacaacagtgacgtgaccagcgacgacgacatgacccggaacagaagagagtcctcaccacctcactcagtccattctttcagtggtgaccgggactgggaccggaggggcagaagcagagacatggagccacgagaccgctggtcccacaccaggaacccaagaagcaggatgcctccgcgggatctttcccttcctgtggtggcgaaaacaagctttgaaatggacagagaggacgacagggactccagggcttatgagtcccgatctcaggatgctgaatcataccaaaatgtggtggacctcgctgaggacaggaaacctcacaacacaatccaggacaacatggaaaactacaggaagctgctctccctcggtttccttgctcaggactctgtccctgcagaaaagaggaacacagagatgttagacaatctgccatctgctgggtcccagttcccggacttcaaacacttaggaacatttctggtgtttgaggagttggtgaccttcgaggatgtgcttgtggacttcagcccagaggaacttagttcccttagtgctgctcagagaaacctctacagggaggtgatgctggagaattaccggaacctggtctccctggggcaccagttctctaaacctgacattatctcacgcctggaagaggaggaatcatatgcaatggagacagacagcagacatacagtgatttgtcaaggagagtctcatgatgatccattggaaccacaccagggcaaccaagagaaacttttgactcctataacaatgaatgaccccaagaccctcactccggaaagaagctatggcagtgatgaatttgagagaagctctaatcttagtaaacaatcaaaggatcctctaggaaaggatccccaggaaggcactgctcctggaatatgtacgagtccccagtcagcatcccaagagaacaaacacaacagatgtgaattttgcaaacgaacctttagtacgcaagtagcccttaggagacacgaacggatccatactgggaagaaaccctatgaatgtaaacagtgtgctgaagccttctatctcatgccacacctcaacagacatcagaagacccattctggtaggaagacttctggctgcaatgaaggtagaaagccttccgtccagtgtgcgaatctctgtgaacgtgtaagaattcacagtcaggaggactactttgaatgttttcagtgcggcaaagcttttctccagaatgtgcatcttcttcaacatctcaaagcccatgaggcagcaagagtccttcctcctgggttgtcccacagcaagacatacttaattcgttatcagcggaaacatgactacgttggagagagagcctgccagtgttgtgactgtggcagagtcttcagtcggaattcatatctcattcagcattatagaactcacactcaagagaggccttaccagtgtcagctatgtgggaaatgtttcggccgaccctcatacctcactcaacattatcaactccattctcaagagaaaactgttgagtgcgatcactgttgagaaacctttagtcacagcacacacttttctcaacattattggcttcctcctagagtgttgtgagtgtgagaaggcctttcactagccccaccttgttaacaacttgaacattcatcaaagtgtggtaaaaaaaaaaaaaaaaaaaaaaa

SEQ ID NO: 59960 - DNA, 1584 bp, Artificial Sequence
  derived and/or modified sequence
atgtaccagcccgaggacgacaacaacagcgacgtgaccagcgacgacgacatgaccagaaacagaagagagagcagccccccccacagcgtgcacagcttcagcggcgacagagactgggacagaagaggcagaagcagagacatggagcccagagacagatggagccacaccagaaaccccagaagcagaatgccccccagagacctgagcctgcccgtggtggccaagaccagcttcgagatggacagagaggacgacagagacagcagagcctacgagagcagaagccaggacgccgagagctaccagaacgtggtggacctggccgaggacagaaagccccacaacaccatccaggacaacatggagaactacagaaagctgctgagcctgggcttcctggcccaggacagcgtgcccgccgagaagagaaacaccgagatgctggacaacctgcccagcgccggcagccagttccccgacttcaagcacctgggcaccttcctggtgttcgaggagctggtgaccttcgaggacgtgctggtggacttcagccccgaggagctgagcagcctgagcgccgcccagagaaacctgtacagagaggtgatgctggagaactacagaaacctggtgagcctgggccaccagttcagcaagcccgacatcatcagcagactggaggaggaggagagctacgccatggagaccgacagcagacacaccgtgatctgccagggcgagagccacgacgaccccctggagccccaccagggcaaccaggagaagctgctgacccccatcaccatgaacgaccccaagaccctgacccccgagagaagctacggcagcgacgagttcgagagaagcagcaacctgagcaagcagagcaaggaccccctgggcaaggacccccaggagggcaccgcccccggcatctgcaccagcccccagagcgccagccaggagaacaagcacaacagatgcgagttctgcaagagaaccttcagcacccaggtggccctgagaagacacgagagaatccacaccggcaagaagccctacgagtgcaagcagtgcgccgaggccttctacctgatgccccacctgaacagacaccagaagacccacagcggcagaaagaccagcggctgcaacgagggcagaaagcccagcgtgcagtgcgccaacctgtgcgagagagtgagaatccacagccaggaggactacttcgagtgcttccagtgcggcaaggccttcctgcagaacgtgcacctgctgcagcacctgaaggcccacgaggccgccagagtgctgccccccggcctgagccacagcaagacctacctgatcagataccagagaaagcacgactacgtgggcgagagagcctgccagtgctgcgactgcggcagagtgttcagcagaaacagctacctgatccagcactacagaacccacacccaggagagaccctaccagtgccagctgtgcggcaagtgcttcggcagacccagctacctgacccagcactaccagctgcacagccaggagaagaccgtggagtgcgaccactgctag

SEQ ID NO: 59961 - DNA, 1584 bp, Artificial Sequence
  derived and/or modified sequence
atgtaccaacctgaagatgacaacaatagtgacgtgacttcagacgacgacatgactcgaaaccgcagggaatcctcccccccccacagcgttcactcattcagcggagatagagattgggacagaaggggtcgctcccgagatatggaaccccgcgacagatggagccacactcgtaaccccaggtccagaatgccaccccgcgacctgtctttaccggtcgtcgctaagacaagctttgagatggatcgcgaggacgaccgagattcccgagcttacgaatcaagatcacaggacgccgagagctatcaaaatgtagtggatcttgccgaggaccgtaaacctcacaatacaatccaagacaacatggaaaattatcggaagcttcttagtctcgggttcctggcacaagactccgtgcccgcggaaaaaagaaataccgaaatgctcgataaccttcccagcgctggtagtcagttccctgactttaaacaccttggcacattcctcgtgtttgaagaattagttaccttcgaggacgtcctggtcgatttttcacccgaggagctgagctccctcagcgctgctcaacggaacttatatcgcgaagtgatgctggagaactacaggaatctcgtgagcttggggcaccagttctccaaaccggacattatctcgcgattagaagaggaggagagctatgctatggagaccgacagtaggcatactgtaatttgccagggggaatcccatgatgatcccctggagccccatcaaggtaaccaggagaaactcctgacccccatcaccatgaacgacccgaagacgttaacgcctgagagatcttatggcagtgatgaatttgaacggagtagcaacctcagcaaacaatcaaaggatccccttgggaaggacccccaggagggcaccgcacccggcatttgtacgagcccccagtcggcctcccaggagaataaacataataggtgcgaattttgcaagcggacattctccacacaggtcgccctacgcagacacgaaagaattcataccggaaagaagccttacgaatgtaagcagtgtgctgaggccttttacctcatgccccatctaaatcgacatcagaaaacccattcgggtcgaaagacgtcaggctgcaatgaaggtcgcaagccctcagtgcagtgcgccaacctgtgtgagagagtcaggattcattcccaggaagattattttgaatgttttcaatgtggaaaggccttcctacagaatgtccatctgttacagcacctgaaagctcatgaggctgcccgggtgctgcctcccggcctgagtcacagtaaaacctatctcatcaggtaccagaggaaacatgattacgttggcgagcgcgcctgtcagtgctgtgattgtggtagagtgttctccaggaactcttacctgatccaacactaccgcactcacacacaggagcgtccctaccagtgtcaactgtgcggcaagtgtttcggccgaccttcatacctgacacaacactatcaacttcacagccaggaaaagacagtggagtgtgatcactgctag

SEQ ID NO: 59962 - DNA, 1584 bp, Artificial Sequence
  derived and/or modified sequence
atgtatcagcctgaagacgacaataattctgatgtgacttcagacgatgatatgacccggaatcgtagggaaagcagtcctccgcactctgttcacagtttctcgggggatcgcgattgggatcgcagaggacggagccgagacatggagccacgcgacaggtggtcacatacccggaaccctaggagcagaatgcccccccgggatctgtctctgcctgtcgtggccaagacctcattcgaaatggaccgggaagatgatagagacagtagggcttatgagtcgaggagccaagatgctgagtcttaccagaacgttgtggacttggccgaagaccggaaaccccacaacaccatccaggacaacatggaaaactatcgcaaactgctctccttgggctttcttgcccaggatagcgtgcccgctgagaagcggaataccgaaatgctcgacaatctaccttccgctggaagccaattccccgactttaagcatttgggcacgtttttggtgttcgaagaattggtgaccttcgaagacgttttagtcgacttttcacctgaagagctgagtagcttatccgcagcccagcgcaatctgtatcgagaggtaatgctcgaaaactatcggaacctcgtgtccctgggacatcaattctcaaaaccagacattattagccgtcttgaggaggaagaaagttatgctatggaaacagatagtcggcatacagtcatatgtcagggggagagtcatgacgatccattggagcctcaccagggaaatcaagagaagctgctgactccaatcacaatgaacgatcctaaaactctgacaccagagcgatcttatgggtctgacgaatttgagaggagcagcaacctttctaagcaaagcaaggatcccctgggcaaagacccacaggagggaactgcccctggcatctgcacatctccccaatcagcgtcacaggaaaacaaacacaaccgatgcgaattttgcaaaagaacatttagcactcaggtggccctccgccggcacgaacgcatccatactggcaagaaaccatacgagtgcaagcagtgcgccgaggccttctaccttatgccgcacctaaataggcaccagaagacacatagtggtcggaaaacttcgggatgcaacgagggtcgcaaaccttccgtgcagtgcgcaaacctctgcgaacgcgtacgcatccactcccaggaggactattttgaatgtttccaatgcggcaaagcctttctacagaatgtgcacttgctccaacacttaaaggcccacgaagctgcacgggttctgcctcccggactgagtcactcaaaaacgtacctaattaggtaccagcgtaaacatgattatgtgggtgagcgcgcgtgccagtgctgtgattgtggaagagtgttctccagaaactcttatcttatacagcactaccggacccacacccaggagcgcccatatcagtgtcagttatgtgggaagtgctttggacgcccttcatatcttacccaacattatcagctgcactcccaggagaagaccgttgaatgcgatcattgttag

SEQ ID NO: 59963 - DNA, 1584 bp, Artificial Sequence
  derived and/or modified sequence
atgtatcaacctgaagacgacaataactccgacgttacttcagacgatgacatgacacgaaatcgcagggaaagcagccccccccactctgttcatagcttctctggcgaccgggattgggaccgccgcggtcggagccgggatatggagccccgagacaggtggagtcacaccaggaaccctaggagccgcatgcctcctagagatctcagcctgccggtggtagccaagaccagcttcgaaatggatcgtgaggacgacagagatagcagggcctatgaaagtcgctcccaggacgctgaatcttaccagaacgttgtcgatttggccgaggaccggaaaccccacaatactatccaggataacatggaaaactacagaaagctgctgagtctcggctttctggcccaggattcggttcccgctgaaaaaagaaacacggaaatgcttgacaacctgccctctgccggcagccagttccccgattttaaacacctcgggacgttcctggtgttcgaggagctggtgacttttgaggatgtcctggtggatttctcacctgaggagctttcctcactgtcagccgcacagcgcaacctgtatagggaggtcatgcttgaaaactatcgaaatctggtctcacttggtcatcagttcagcaagcctgacatcataagtaggctggaagaagaggagtcttatgcgatggagaccgactcccggcacacagttatttgccaaggagagtcgcacgacgaccccctggaaccacaccagggaaatcaggagaagttgttgacccccataactatgaatgaccccaagacccttacgcctgaacgctcctacggcagcgacgaattcgagaggtcatctaacctgtctaaacagagtaaagacccactgggtaaggacccccaggaaggcaccgcccctggtatctgtacatcaccacagagtgctagccaggaaaacaagcacaaccggtgtgagttctgcaaacgtaccttctctactcaggtcgcattacgccgccacgagaggatccatacgggcaagaagccctacgaatgcaaacagtgtgccgaggcattctacctcatgcctcacctcaacagacatcaaaaaacacatagtggacgaaaaaccagtggctgcaacgaggggcggaaacctagcgtgcagtgcgctaatctgtgcgaacgtgtgcggatccattcgcaggaagactattttgagtgcttccagtgtgggaaggcattcctgcagaatgtccatttgctccaacacctgaaggcacatgaggctgctagagtccttccgccagggctctcacattccaagacatacctcatccgctaccaacggaagcacgattacgtcggagagcgggcgtgtcaatgttgcgactgtggacgagtgttttctagaaattcttacctcattcagcattaccgcacccatacccaggaacgtccctaccaatgccagctctgtggcaaatgctttggccggccctcctatctgactcagcactaccagctccactctcaggagaaaactgttgaatgcgaccactgctag

SEQ ID NO: 59964 - DNA, 1584 bp, Artificial Sequence
  derived and/or modified sequence
atgtaccagcccgaggatgacaacaactctgacgtgacttcagacgacgacatgacaagaaatcgccgcgagagctcaccccctcatagtgtgcacagcttttccggcgacagagattgggacagacgtggtcgtagtagggatatggagccaagggaccggtggagccacacaagaaatcctcggagcagaatgcctccaagggacttgagcttgcccgtggtcgccaaaacatctttcgaaatggaccgggaggacgatcgtgacagtagggcatacgagtcaaggagccaagatgctgagtcataccagaacgtggtcgacctcgccgaggatcgaaaaccccacaacaccatacaggacaatatggaaaattacagaaagctgctgagcctgggcttcttagcgcaggacagcgttcccgcagaaaaaaggaatacagaaatgctggacaatttgccaagcgcagggtcccagttccctgacttcaagcatctgggtacgtttctggtgtttgaggaattggttacttttgaggacgtgttagtagactttagcccagaagagttgtcttccctctccgctgctcagcgaaacctttaccgcgaggtgatgctcgaaaactatcggaacttagtctccctcggacaccagttttcaaaacctgatatcatcagtcgcttagaagaagaagagagttacgcgatggagactgatagccgccacaccgtaatctgccaaggcgaatcccacgacgatccactggagcctcaccagggcaaccaggagaagctcctgacgccaatcaccatgaacgaccctaagactcttaccccggagagatcttacggaagcgacgaatttgagagatcttccaacttatctaagcaatccaaagatcctttaggtaaagatccacaagagggaacggcacccggaatctgcaccagcccacagtctgccagccaggagaataagcataaccgatgcgaattctgtaagcgtaccttcagtacgcaggtggcgctcagacgccatgagcggatacataccgggaaaaaaccgtacgagtgcaaacagtgtgccgaggccttttacctgatgccacatttgaatcgccatcaaaagacccattcggggagaaagacatccgggtgcaatgaaggcaggaagccctccgtccagtgcgcaaacttgtgcgagcgcgtgaggatccacagccaggaagattattttgagtgttttcagtgcggaaaagccttcctgcagaacgtccatctgctgcagcacttgaaagcacatgaggcagctcgggtactacctcccggtctctcccattctaaaacatacctgatcagatatcagcgaaagcatgattatgtgggcgagagggcctgccagtgttgcgactgtggccgtgtgttcagccgcaatagttatctgatccagcactacagaacccatacccaagagcgtccctaccagtgccaactgtgtgggaagtgttttggaaggccaagctacttgacccagcattatcaactgcactcccaggaaaagacggtcgagtgtgatcattgctag

SEQ ID NO: 59965 - DNA, 1584 bp, Artificial Sequence
  derived and/or modified sequence
atgtaccagccagaagatgacaacaacagtgatgtgaccagtgatgatgacatgaccaggaacagaagagagagcagccccccccacagcgtgcacagcttcagcggggaccgggactgggaccggcggggccgcagccgggacatggagccccgggaccgctggagccacaccaggaaccccaggagcaggatgccaccccgggacctgagcctgcctgtggtggccaagaccagctttgagatggacagagaagatgaccgggacagccgggcctatgagagccgcagccaggatgctgagagctaccagaatgtggtggacctggccgaggacaggaagccccacaacaccatccaggacaacatggagaactacaggaagctgctgagcctgggcttcctggcccaggacagcgtgcctgctgagaagaggaacacagagatgctggacaacctgcccagcgctggcagccagttcccagacttcaagcacctgggcaccttcctggtgtttgaggagctggtgacctttgaagatgtgctggtggacttcagccctgaggagctgagcagcctgtctgctgcccagaggaacctgtaccgggaggtgatgctggagaactacagaaacctggtgtccctgggccaccagttcagcaagccagacatcatcagccggctggaggaggaggagagctatgccatggagacagacagccgccacacagtcatctgccagggcgagagccatgatgaccccctggagccccaccagggcaaccaggagaagctgctgacccccatcaccatgaatgaccccaagaccctgaccccagagaggagctatggcagtgatgaatttgagaggagcagcaacctgagcaagcagagcaaggaccccctgggcaaggacccccaggagggcacagcccctggcatctgcaccagcccccagagcgccagccaggagaacaagcacaacagatgtgagttctgcaagaggaccttcagcacccaggtggccctgcggagacatgagcgcatccacacaggcaagaagccctatgagtgcaagcagtgtgccgaggccttctacctgatgccccacctgaacagacaccagaagacccacagcggcaggaagaccagcggctgcaatgaaggaaggaagcccagcgtgcagtgtgccaacctgtgtgagcgggtgcgcatccacagccaggaggactactttgagtgcttccagtgtgggaaggccttcctgcagaatgtgcacctgctgcagcacctgaaggcccacgaggccgcccgggtgctgcccccaggcctgagccacagcaagacctacctgatccgctaccagaggaagcatgactatgtgggggagcgggcctgccagtgctgtgactgtggccgggtcttcagcagaaattcctacctgatccagcactaccgcacccacacccaggagcggccctaccagtgccagctgtgtgggaaatgttttggccggcccagctacctgacccagcactaccagctgcacagccaggagaagacagtggagtgtgaccactgctag

SEQ ID NO: 59966 - DNA, 1584 bp, Artificial Sequence
  derived and/or modified sequence
atgtaccagcccgaggacgacaacaacagcgacgtgaccagcgacgatgacatgacccggaatcgtagagaatcatctcctccacattctgtgcacagttttagcggcgacagagattgggacaggcgaggcagatcccgcgatatggagcctcgagacaggtggtcacacacccggaatcctaggagccgaatgcccccaagagacctgtcactgccggttgtcgcaaaaacaagtttcgagatggatcgcgaagatgatcgcgatagtagagcttatgagtcacggtcccaggacgccgaaagctaccagaacgtggtggacctggcagaagaccgtaagcctcacaacactatccaggataacatggagaattaccgaaagctgctcagcttggggtttctggcacaagattccgttccagctgagaagcgcaacacagaaatgttggacaatctgccctctgccgggtctcagtttccggacttcaaacatctagggacatttctcgtgttcgaggagctggtaacctttgaggacgtactggtggacttttcccctgaagagctgagcagcctatctgcggcacagcgcaatctctatcgcgaagtgatgctggagaattacaggaacctggtgtccttggggcatcaattctctaaacctgatattatcagcaggctggaagaggaggaatcttacgcaatggagacagattccaggcatactgtaatatgtcagggagaatcccatgacgatcccctcgaaccccatcaggggaaccaggagaaactcctaacaccaataacaatgaacgaccctaaaacactgactccagaacgatcttacggtagcgacgagttcgaacgctcgtccaatctgtctaagcagtctaaggatccattgggcaaggatccccaagaagggaccgcccctggaatctgtacatcgcctcagtcagcgtcgcaggagaataagcacaaccgttgcgagttctgtaaacgcaccttcagtactcaggtcgccctcaggagacatgaaaggatacacacgggaaagaagccctacgaatgcaaacagtgtgctgaggctttctacttaatgccccatctgaatcggcaccaaaaaactcacagtgggcggaaaacaagtggctgcaacgaaggacgcaaacctagcgtgcaatgcgccaacctgtgcgagcgtgtccgcattcactcccaggaggactacttcgaatgcttccagtgtggaaaagctttccttcagaatgtgcatttgcttcagcacctgaaggcccacgaagctgctagagtgcttccccccgggctgtcacatagtaagacgtatctgatccgctaccagcggaagcacgactacgtgggggaaagagcctgccagtgttgcgactgtggtagggtgttttcccgaaactcttatctgatccagcactatcggactcacacacaggaaaggccgtaccagtgtcagttgtgcggaaaatgtttcgggagaccttcgtacctgacccagcattaccagctgcacagtcaagagaagacagttgaatgtgaccactgctag

SEQ ID NO: 59967 - DNA, 1584 bp, Artificial Sequence
  derived and/or modified sequence
atgtaccagcccgaggacgacaacaacagcgacgtgaccagcgacgatgatatgaccagaaatcgacgcgagtcaagccccccgcattcagtacatagtttcagtggggatagagattgggatcggcgggggcgcagcagagatatggagccccgggatcgctggtcacacactaggaatcctcgatcccggatgcctcctcgggatttaagtctgccagtggtagctaaaacaagcttcgaaatggatagagaggacgatcgggatagcagagcctacgaatctcgcagccaggatgccgagtcttaccagaatgtggttgatcttgcagaggaccgaaagccccacaatacaattcaggataatatggaaaattaccgtaagttgctgtccttgggttttctggctcaagacagtgtgcctgctgagaagcgtaatacggaaatgctcgacaacctgccttctgccggatctcaatttccagattttaaacatttgggtactttccttgtcttcgaagaattggtaaccttcgaggacgttctggtagatttctcacctgaggaactatcttccctttccgccgctcagcggaacttatacagagaagttatgctggagaattaccgcaatctcgtcagcttaggccatcagttctcaaaaccggacatcatctctcggctggaagaagaagagtcttacgcgatggagactgattcccggcacaccgtcatctgtcaaggagagagccatgacgaccccctagagccccatcagggcaatcaggagaaactactaaccccgatcaccatgaatgaccctaaaacgttaacccccgaaaggtcatatgggagtgacgaattcgaaagatcaagcaacttgtccaagcagagcaaggacccgcttggcaaggacccacaggagggaaccgctcctgggatttgcaccagtccgcagtctgcctcgcaggaaaataagcacaataggtgcgagttctgcaagcgtactttcagtacacaggtggctcttcggagacatgagcggattcacacaggtaagaagccctacgaatgcaagcagtgtgcagaggccttctacctaatgcctcaccttaacaggcatcaaaagacccactccggcagaaagacttccgggtgtaacgaggggaggaaaccaagcgtacagtgcgccaacctttgtgaaagggtgagaatccacagtcaggaggactactttgagtgttttcagtgcggcaaagcgttcctccagaacgtgcaccttcttcagcacctcaaagcccatgaagccgcacgggtcctgccacccggtctcagtcatagtaagacatatcttatcaggtatcaaaggaagcacgattatgtcggcgaaagagcttgtcaatgctgtgactgcggtcgcgtcttctcacgaaactcttacctcatacagcactatagaactcacacccaggagaggccatatcagtgccagctgtgtggaaaatgcttcggccggccttcatatctgactcagcactaccagctgcactcacaggaaaaaacagttgagtgtgatcactgctag

SEQ ID NO: 59968 - DNA, 1584 bp, Artificial Sequence
  derived and/or modified sequence
atgtaccagcccgaggacgacaacaacagcgacgtgaccagcgacgatgacatgacccggaatcgccgggagtcttcacccccgcattctgtacattcattctctggtgacagagactgggacagaaggggaaggtctagggacatggagcctcgagataggtggtctcatactcgtaaccctcgatctcgcatgcctcccagagatctctcattacccgtggtggctaagactagttttgagatggacagagaggacgaccgagattctcgagcgtatgagagcaggagtcaggatgctgaatcttaccagaacgttgtggatttagccgaagatcgcaagcctcacaatactatacaggataacatggagaactaccgtaagttgctgagtcttggttttcttgcccaggattctgtgccagcagagaagcgcaacaccgaaatgctagacaatctgccatcagccggatcccaatttcccgatttcaagcacctggggaccttcctcgttttcgaagaactggtgaccttcgaagacgtgcttgttgacttttcaccagaggagctttcctctctctcagccgctcagcggaatctgtaccgggaagttatgctagaaaactatagaaacctggtgtccttgggccatcagttttctaaacccgacatcatctcccggctcgaagaggaggaatcctacgccatggaaaccgattctagacacaccgtcatttgccagggagagtcccatgacgaccccctggagcctcatcagggaaatcaggaaaagttactcactccaataacaatgaacgatccaaagactcttacgcctgagcgcagttatggatctgacgagttcgagcggtcatccaatctctctaaacaaagcaaagaccccctggggaaggacccccaggaaggaaccgcccctggcatttgcacatccccccagagtgcgtcgcaagagaacaaacacaatcggtgtgagttttgcaagcgaactttcagcacacaagtggcattaagaagacacgaaagaattcatactgggaaaaaaccctacgagtgcaagcagtgtgccgaggccttttacctcatgccacacctcaatcggcaccaaaaaacgcactctggtagaaagacgtccgggtgcaatgaaggacgtaagcctagcgtccaatgtgcaaacttatgcgagcgagtacgtatccacagccaggaggactactttgaatgcttccagtgcgggaaggcattcctgcagaacgttcatctcttacagcacctgaaagcccatgaggctgctagagttctgccaccaggcctgagccactcaaaaacttacttgatcagataccagaggaagcacgattatgtgggagaacgtgcctgccagtgctgcgactgtggacgcgtcttttcaagaaacagctacctgatccagcattacaggactcacactcaagaaaggccataccaatgtcagctgtgtggcaagtgcttcggtcggccgtcttacctgacccaacactaccagctccattcacaggaaaagaccgtggagtgtgaccattgctag

SEQ ID NO: 59969 - DNA, 1584 bp, Artificial Sequence
  derived and/or modified sequence
atgtaccagcccgaggacgacaacaacagcgacgtgaccagcgacgatgatatgacacgaaatagacgagaatcgtccccccctcactccgttcactctttctcaggcgatagggattgggacaggcgtggcaggtcaagagatatggagcctagagacagatggtcccacactagaaatccgaggagccggatgcctccccgagatctgtctctgccagttgtcgccaaaacatcctttgagatggaccgtgaggacgacagagacagtagggcctatgagagcaggtcccaagacgcggagagctaccaaaatgtcgtggacctcgcagaggaccggaagccacacaacaccatccaagataatatggaaaactatagaaagctgttatctttgggcttcctcgcccaggatagcgttcccgcagagaagcgcaacacagaaatgctcgataacctgccgtccgccggctcacagttcccggactttaagcacctaggcaccttcctggtgttcgaggaactagtaacattcgaagacgtgcttgtggatttctcacctgaggagctgtcatcactctccgcagcccagagaaacttgtaccgggaggtgatgctggaaaactacaggaaccttgtttctttgggtcatcagttttccaagccagacattatttctcgcttggaagaagaagagagctacgcaatggaaaccgattcccgacacacagtgatctgccaaggtgagagtcacgatgaccccctagagccacaccaggggaaccaagagaagcttctgactcccattacgatgaacgatccaaagacgctcactccagaaaggagctacgggtctgacgagttcgaaaggtcctcaaacttgtcaaaacaatctaaagacccactaggcaaagacccacaagaaggcacagcccctgggatctgcacctctcctcaaagtgccagccaggagaacaagcacaatcgctgtgagttttgtaagcgaacattctccacgcaggtggcactgcgaaggcacgaacggatccacacaggaaagaaaccatacgagtgcaagcagtgcgcggaggccttctaccttatgccccatctgaataggcaccagaagacacattctgggcgaaagaccagtggttgcaacgaaggacggaagcctagtgtgcaatgcgccaatctgtgtgaacgggttcgtattcactcccaagaagattattttgagtgtttccagtgcggcaaagcctttttacaaaatgtgcaccttttgcagcatctgaaagcgcatgaagccgcacgcgtcctccctccaggtctgagccattctaaaacttacctaattagataccagcggaaacatgactacgtgggggaacgcgcttgtcagtgctgcgattgtggacgtgtcttttctagaaattcctatctgatccaacattacaggacccacacccaggagcggccataccagtgtcagctgtgcggaaaatgtttcgggagacccagttacctgacacaacactaccagctgcacagccaggaaaagaccgtggaatgcgatcactgctag

SEQ ID NO: 59970 - DNA, 1584 bp, Artificial Sequence
  derived and/or modified sequence
atgtatcagcctgaagatgataataattccgatgttacttcagacgacgatatgacccgtaacagaagggagagttctcctcctcatagcgttcatagcttttccggggaccgcgattgggaccggcgaggaagatcccgggatatggaaccacgggaccggtggtcgcacacaagaaacccccgttcgaggatgcccccacgcgatctgtcactgcctgtggtcgccaaaacaagtttcgaaatggacagagaggatgatagagatagccgagcctacgagtcccgcagtcaagatgctgagtcctaccaaaacgtagtcgatttagctgaggatcgcaagccacacaataccatccaggacaatatggagaactaccgtaagcttttgtcactgggtttcttggctcaggacagcgtccctgctgagaaacgcaacacagagatgctcgacaatctgccttcagccggttcccaattccctgatttcaaacatctggggacgtttctcgtcttcgaagagctggttactttcgaggacgtgctggttgacttttcacccgaggagctgtccagcttatccgcagcccagagaaacctgtacagagaggtcatgttggagaattaccgcaacctggtttcgttggggcaccagttctctaagcccgatattatcagccgtttggaagaagaagagtcctatgccatggagactgactccaggcacaccgtgatatgtcagggggagtcccatgacgatcccctggagccccatcagggaaatcaagaaaagctcctgaccccaattaccatgaacgatcccaaaaccctcacgcctgagaggagctacggctccgatgagtttgagagatctagcaatctgtctaagcaaagcaaggatccccttggcaaggatccacaggagggtaccgcacctggtatttgcactagccctcagtccgcaagccaggagaacaaacacaacaggtgcgaattctgcaagcgcacattttctacccaggtcgctctgaggagacacgaacgcattcacaccggtaaaaaaccctacgaatgtaaacagtgcgccgaggccttctatctgatgccacatctgaaccgccaccagaagacccactcgggcagaaagacttctgggtgtaacgagggacgaaagcccagcgtgcagtgcgccaatttgtgcgaacgcgtgcgaattcattctcaggaagactatttcgaatgtttccagtgcggtaaagccttccttcagaacgttcacctgctccagcatctcaaagcccacgaagcagccagagtgttacccccaggtctcagtcactctaagacatacctgattaggtaccagcggaagcatgactacgtcggcgaaagagcctgccagtgctgcgattgcggcagagtcttttcccgaaatagttacctaattcagcactacagaactcatacccaggagcgcccataccaatgtcagctgtgtggcaagtgcttcggccgtccaagctaccttacacaacactatcagctgcacagccaggagaaaacagtcgagtgcgatcattgctag

SEQ ID NO: 59971 - DNA, 1584 bp, Artificial Sequence
  derived and/or modified sequence
atgtaccagcctgaagatgataacaacagcgatgttacttcagatgacgacatgacccgcaaccgtcgagagtcttcgccacctcactccgtgcacagtttctccggcgacagagattgggaccgacggggaaggtcaagggatatggaaccgagggaccgctggagtcacactcgtaaccccaggagtcgcatgcccccaagggatctgagtctccccgtcgtggctaagacatccttcgagatggatagggaagatgatcgggattcgcgcgcttatgagagccgctcccaagatgctgagtcttaccagaacgtagtcgacctggccgaagataggaagccccacaacacaatacaggacaatatggaaaactacagaaagctcctttccctgggttttttagctcaggattcagtccccgctgaaaagaggaatacagaaatgctggacaacctgccaagcgcgggttctcaatttcctgacttcaaacaccttggaacatttctggtgtttgaagagcttgtcacatttgaagatgtgctggtggatttcagtccggaagaactgagttctctgtccgctgcacagcggaacctatatagggaagtcatgctagagaattacagaaacttggttagcctcggccatcagttctcaaagccggacattatatccagactggaagaggaggaatcttatgcgatggagacagattctagacacactgtgatctgtcagggcgaatcccacgatgatccgctggagccacaccaaggtaaccaagagaagctgctgactcccatcacaatgaatgatcctaagaccctgactcccgaaagatcatatggatcagacgagttcgaacgctcctcaaacctgtctaaacagtccaaagaccctcttgggaaagaccctcaggaggggacagctcccggaatatgtacatcccctcagtccgcgagccaggagaataaacacaataggtgcgagttttgtaaaaggactttctcaacccaggtcgctctacggcgacacgaaaggattcataccgggaaaaagccgtatgaatgcaagcagtgcgcagaagccttctatctcatgccgcacctgaataggcaccagaaaacgcattctgggaggaagaccagtggatgcaacgagggccgtaagccatcagtacagtgtgctaacctttgcgaacgtgtcaggatccacagccaggaagactattttgaatgctttcaatgtggaaaggcctttctgcagaacgttcacctgcttcagcatctcaaggcccatgaggccgctcgagtcttgcctccagggctctctcactccaagacttatctgatccggtatcagcgaaagcatgattacgtgggggagagggcatgccagtgttgcgactgcgggagggttttcagcagaaacagctatctcattcaacactacaggacccatacccaggagcggccttaccaatgccaattgtgtggaaaatgtttcggtcgcccaagctatcttactcaacattatcagttacattctcaggagaagaccgttgaatgtgaccactgttag

SEQ ID NO: 59972 - DNA, 1584 bp, Artificial Sequence
  derived and/or modified sequence
atgtatcagccagaggatgataacaattccgacgttacatccgacgacgatatgacacggaaccgccgtgaaagtagtccccctcatagcgtgcacagcttttcaggcgaccgggactgggacagacggggaaggtcaagagatatggagccgagggacagatggagtcacacccgaaaccccagatccaggatgccacctcgggacctctctttacccgtcgtggccaagacctcctttgaaatggatcgggaggacgaccgggactctagagcatatgagtcacgctcccaggacgcagaaagctaccagaacgtcgtggacttagccgaagaccgtaaaccccacaacacaattcaggacaatatggagaattacagaaaattgctcagcctgggattcctagctcaagatagcgtgccggctgagaaaaggaacactgagatgctggataacctgccttctgccggatcacaatttccggatttcaaacatcttggaaccttcctcgtgttcgaagaacttgtgactttcgaagacgtgctcgtggatttttcaccagaggagctgagctccctctctgcagcacagcggaatctgtatagggaggtgatgctcgaaaattacaggaacctggttagtttgggccatcagttcagtaagcctgatattatctcccggctggaggaggaggaatcctatgccatggagacagactcaagacacactgtgatctgtcaaggggagtcacacgacgacccccttgaaccccatcagggtaatcaggaaaagctgttaacaccaataaccatgaacgacccgaaaaccctgacacctgagcgctcttacggtagcgatgaattcgagcgctcatccaacttgtccaagcagtccaaagaccccctcggcaaagatccacaggagggtactgccccaggtatttgcacatccccgcaatcggcctcccaagagaataagcacaaccgctgcgagttttgcaaacgtacattttcaactcaagtggccctgcggcgtcacgaacgcatccatacaggaaaaaaaccatatgagtgcaagcagtgtgccgaagccttctaccttatgcctcacttgaatcggcaccagaagacacattccggcagaaaaacttccggctgcaacgagggaagaaagccctcagtgcagtgcgcaaatttgtgtgagcgagtacggatccattcacaggaagactatttcgagtgcttccagtgtgggaaggcctttctgcagaatgtccatttgctgcaacatctgaaggctcacgaggctgccagagtgctccctcccggattgagccattcaaaaacctaccttattcggtaccaacgtaaacacgactatgtaggcgagcgagcatgccagtgttgcgactgcggccgagtcttttctaggaacagttatttgattcagcattatcgcactcacacccaggagagaccgtatcagtgtcagctctgtggtaaatgttttggcaggccttcatacctgacgcaacactaccagttgcactctcaggagaaaacagtcgaatgcgaccactgctag

SEQ ID NO: 59973 - DNA, 1584 bp, Artificial Sequence
  derived and/or modified sequence
atgtatcagcctgaagatgacaacaatagcgatgtaacttcagatgatgacatgaccaggaatcgacgggagtcatcaccaccccatagcgtgcactccttttcaggagaccgcgattgggatcgaagaggcagaagccgtgacatggaacctcgtgataggtggtcgcacactagaaacccccgaagtcggatgccgcctagagacctgagcctgcccgtcgtggctaaaacatcattcgagatggatcgcgaggacgacagagactctagagcctacgagagtcggagtcaagatgctgaatcttaccagaatgttgtggatctggctgaggatcggaagccccacaatactatccaggacaacatggagaactataggaagcttctgtcactagggtttctagcccaggactcagtgcccgcagaaaagcgcaatactgaaatgctggataaccttccatcagccggttcccaatttcccgacttcaaacatctgggcacattccttgttttcgaagagttggtgaccttcgaagacgtcctcgtcgatttctcgcctgaggagctgtccagtttaagtgcggcacagaggaatctctaccgggaggttatgcttgaaaactacaggaatctggtcagcctggggcatcagtttagcaaacctgacattatttcaagactagaggaagaagaatcatacgctatggaaactgattcacgacatactgtcatctgccaaggggaaagccatgacgacccgcttgagccgcatcaaggcaatcaggaaaaattgctgacaccgatcacgatgaacgaccctaagactctgacgcccgagcgcagttacgggtccgatgaatttgagaggagttctaacctgagcaagcagagtaaggatcccctgggcaaagaccctcaggagggcacagcaccaggtatctgcacgtctcctcagtcagcctcacaggaaaataagcacaacaggtgtgagttttgcaaaagaactttttccacacaggtagctctccgacgtcatgagcgcattcatacagggaaaaagccctacgagtgcaaacagtgtgcggaggcgttttacctaatgccacacttgaaccgccaccaaaaaacacattccggacgcaaaacgtctggatgcaatgaaggcagaaagccctcagtccagtgcgccaatttgtgtgagagggtcaggattcacagccaagaggactacttcgagtgcttccaatgtggaaaggcatttctgcagaacgtccacctgctgcagcatctgaaggctcacgaggccgctagggtgttacctcccggtctctcccattcgaagacttatctgatccgctaccagaggaaacatgattacgtgggcgaacgggcatgtcagtgctgcgattgcggccgagtattttctcggaacagctacctgatccagcactatcgcactcatacccaggagcgaccgtaccagtgccagctgtgcggcaagtgttttgggaggccgtcgtatttgactcaacattaccagctccatagccaagaaaagactgtggaatgcgatcactgttag

SEQ ID NO: 59974 - DNA, 2090 bp, Artificial Sequence
  derived and/or modified sequence
ggtgcagaagtctgggcagctgcgggaggagaggtttgggaggcgcgggagatgtccaccctgggctggtggcgccgccgggcgccgggcgccatgagggtgcgctaggcggctgttcgtgcccgaggctgcgcagcactgagctttgccttcttgatcttccgtccttcttggagacgactggcgagaggaagagggactaggtccaaacgctaggtggctgggtccagccggagacccgcaccaaggaggagatcatcgagctcttggtccttgagcagtacctgaccatcatccctgaaaagctcaagccttgggtgcgagcaaaaaagccggagaactgtgagaagctcgtcactctgctggagaattacaaggagatgtaccaaccagaagacgacaacaacagtgacgtgaccagcgacgacgacatgacccggaacagaagagagtcctcaccacctcactcagtccattctttcagtggtgaccgggactgggaccggaggggcagaagcagagacatggagccacgagaccgctggtcccacaccaggaacccaagaagcaggatgcctccgcgggatctttcccttcctgtggtggcgaaaacaagctttgaaatggacagagaggacgacagggactccagggcttatgagtcccgatctcaggatgctgaatcataccaaaatgtggtggacctcgctgaggacaggaaacctcacaacacaatccaggacaacatggaaaactacaggaagctgctctccctcggtttccttgctcaggactctgtccctgcagaaaagaggaacacagagatgttagacaatctgccatctgctgggtcccagttcccggacttcaaacacttaggaacatttctggtgtttgaggagttggtgaccttcgaggatgtgcttgtggacttcagcccagaggaacttagttcccttagtgctgctcagagaaacctctacagggaggtgatgctggagaattaccggaacctggtctccctggggcaccagttctctaaacctgacattatctcacgcctggaagaggaggaatcatatgcaatggagacagacagcagacatacagtgatttgtcaaggagagtctcatgatgatccattggaaccacaccagggcaaccaagagaaacttttgactcctataacaatgaatgaccccaagaccctcactccggaaagaagctatggcagtgatgaatttgagagaagctctaatcttagtaaacaatcaaaggatcctctaggaaaggatccccaggaaggcactgctcctggaatatgtacgagtccccagtcagcatcccaagagaacaaacacaacagatgtgaattttgcaaacgaacctttagtacgcaagtagcccttaggagacacgaacggatccatactgggaagaaaccctatgaatgtaaacagtgtgctgaagccttctatctcatgccacacctcaacagacatcagaagacccattctggtaggaagacttctggctgcaatgaaggtagaaagccttccgtccagtgtgcgaatctctgtgaacgtgtaagaattcacagtcaggaggactactttgaatgttttcagtgcggcaaagcttttctccagaatgtgcatcttcttcaacatctcaaagcccatgaggcagcaagagtccttcctcctgggttgtcccacagcaagacatacttaattcgttatcagcggaaacatgactacgttggagagagagcctgccagtgttgtgactgtggcagagtcttcagtcggaattcatatctcattcagcattatagaactcacactcaagagaggccttaccagtgtcagctatgtgggaaatgtttcggccgaccctcatacctcactcaacattatcaactccattctcaagagaaaactgttgagtgcgatcactgttgagaaacctttagtcacagcacacacttttctcaacattattggcttcctcctagagtgttgtgagtgtgagaaggcctttcactagccccaccttgttaacaacttgaacattcatcaaagtgtggt

SEQ ID NO: 59975 - DNA, 2253 bp, Artificial Sequence
  derived and/or modified sequence
ggtgcagaagtctgggcagctgcgggaggagaggtttgggaggcgcgggagatgtccaccctgggctggtggcgccgccgggcgccgggcgccatgagggtgcgctaggcggctgttcgtgcccgaggctgcgcagcactgagctttgccttcttgatcttccgtccttcttggagacgactggcgagaggaagagggactaggtccaaacgctaggtggctgggtccagatacctgtgttttgactctgttcctgtggatagctgcttggtctgaagttccagaaaggatcctgttcccagacagaggtttcggaacctaatctatgtggaatttgttgggcctcggaagaccctgatcaaactccgaaacctctgcctcgattggttgcagccggagacccgcaccaaggaggagatcatcgagctcttggtccttgagcagtacctgaccatcatccctgaaaagctcaagccttgggtgcgagcaaaaaagccggagaactgtgagaagctcgtcactctgctggagaattacaaggagatgtaccaaccagaagacgacaacaacagtgacgtgaccagcgacgacgacatgacccggaacagaagagagtcctcaccacctcactcagtccattctttcagtggtgaccgggactgggaccggaggggcagaagcagagacatggagccacgagaccgctggtcccacaccaggaacccaagaagcaggatgcctccgcgggatctttcccttcctgtggtggcgaaaacaagctttgaaatggacagagaggacgacagggactccagggcttatgagtcccgatctcaggatgctgaatcataccaaaatgtggtggacctcgctgaggacaggaaacctcacaacacaatccaggacaacatggaaaactacaggaagctgctctccctcggtttccttgctcaggactctgtccctgcagaaaagaggaacacagagatgttagacaatctgccatctgctgggtcccagttcccggacttcaaacacttaggaacatttctggtgtttgaggagttggtgaccttcgaggatgtgcttgtggacttcagcccagaggaacttagttcccttagtgctgctcagagaaacctctacagggaggtgatgctggagaattaccggaacctggtctccctggggcaccagttctctaaacctgacattatctcacgcctggaagaggaggaatcatatgcaatggagacagacagcagacatacagtgatttgtcaaggagagtctcatgatgatccattggaaccacaccagggcaaccaagagaaacttttgactcctataacaatgaatgaccccaagaccctcactccggaaagaagctatggcagtgatgaatttgagagaagctctaatcttagtaaacaatcaaaggatcctctaggaaaggatccccaggaaggcactgctcctggaatatgtacgagtccccagtcagcatcccaagagaacaaacacaacagatgtgaattttgcaaacgaacctttagtacgcaagtagcccttaggagacacgaacggatccatactgggaagaaaccctatgaatgtaaacagtgtgctgaagccttctatctcatgccacacctcaacagacatcagaagacccattctggtaggaagacttctggctgcaatgaaggtagaaagccttccgtccagtgtgcgaatctctgtgaacgtgtaagaattcacagtcaggaggactactttgaatgttttcagtgcggcaaagcttttctccagaatgtgcatcttcttcaacatctcaaagcccatgaggcagcaagagtccttcctcctgggttgtcccacagcaagacatacttaattcgttatcagcggaaacatgactacgttggagagagagcctgccagtgttgtgactgtggcagagtcttcagtcggaattcatatctcattcagcattatagaactcacactcaagagaggccttaccagtgtcagctatgtgggaaatgtttcggccgaccctcatacctcactcaacattatcaactccattctcaagagaaaactgttgagtgcgatcactgttgagaaacctttagtcacagcacacacttttctcaacattattggcttcctcctagagtgttgtgagtgtgagaaggcctttcactagccccaccttgttaacaacttgaacattcatcaaagtgtggt

SEQ ID NO: 59976 - DNA, 2049 bp, Artificial Sequence
  derived and/or modified sequence
ggagacgactggcgagaggaagagggactaggtccaaacgctaggtggctgggtccagatacctgtgttttgactctgttcctgtggatagctgcttggtctgaagttccagaaaggatcctgttcccagacagaggtttcggaacctaatctatgtggaatttgttgggcctcggaagaccctgatcaaactccgaaacctctgcctcgattggttgcagccggagacccgcaccaaggaggagatcatcgagctcttggtccttgagcagtacctgaccatcatccctgaaaagctcaagccttgggtgcgagcaaaaaagccggagaactgtgagaagctcgtcactctgctggagaattacaaggagatgtaccaaccagaagacgacaacaacagtgacgtgaccagcgacgacgacatgacccggaacagaagagagtcctcaccacctcactcagtccattctttcagtggtgaccgggactgggaccggaggggcagaagcagagacatggagccacgagaccgctggtcccacaccaggaacccaagaagcaggatgcctccgcgggatctttcccttcctgtggtggcgaaaacaagctttgaaatggacagagaggacgacagggactccagggcttatgagtcccgatctcaggatgctgaatcataccaaaatgtggtggacctcgctgaggacaggaaacctcacaacacaatccaggacaacatggaaaactacaggaagctgctctccctcggtttccttgctcaggactctgtccctgcagaaaagaggaacacagagatgttagacaatctgccatctgctgggtcccagttcccggacttcaaacacttaggaacatttctggtgtttgaggagttggtgaccttcgaggatgtgcttgtggacttcagcccagaggaacttagttcccttagtgctgctcagagaaacctctacagggaggtgatgctggagaattaccggaacctggtctccctggggcaccagttctctaaacctgacattatctcacgcctggaagaggaggaatcatatgcaatggagacagacagcagacatacagtgatttgtcaaggagagtctcatgatgatccattggaaccacaccagggcaaccaagagaaacttttgactcctataacaatgaatgaccccaagaccctcactccggaaagaagctatggcagtgatgaatttgagagaagctctaatcttagtaaacaatcaaaggatcctctaggaaaggatccccaggaaggcactgctcctggaatatgtacgagtccccagtcagcatcccaagagaacaaacacaacagatgtgaattttgcaaacgaacctttagtacgcaagtagcccttaggagacacgaacggatccatactgggaagaaaccctatgaatgtaaacagtgtgctgaagccttctatctcatgccacacctcaacagacatcagaagacccattctggtaggaagacttctggctgcaatgaaggtagaaagccttccgtccagtgtgcgaatctctgtgaacgtgtaagaattcacagtcaggaggactactttgaatgttttcagtgcggcaaagcttttctccagaatgtgcatcttcttcaacatctcaaagcccatgaggcagcaagagtccttcctcctgggttgtcccacagcaagacatacttaattcgttatcagcggaaacatgactacgttggagagagagcctgccagtgttgtgactgtggcagagtcttcagtcggaattcatatctcattcagcattatagaactcacactcaagagaggccttaccagtgtcagctatgtgggaaatgtttcggccgaccctcatacctcactcaacattatcaactccattctcaagagaaaactgttgagtgcgatcactgttgagaaacctttagtcacagcacacacttttctcaacattattggcttcctcctagagtgttgtgagtgtgagaaggcctttcactagccccacctt

SEQ ID NO: 59977 - DNA, 2083 bp, Artificial Sequence
  derived and/or modified sequence
cgggaggagaggtttgggaggcgcgggagatgtccaccctgggctggtggcgccgccgggcgccgggcgccatgagggtgcgctaggcggctgttcgtgcccgaggctgcgcagcactgaggtgagctttgccttcttgatcttccgtccttcttggagacgactggcgagaggaagagggactaggtccaaacgctaggtggctgggtccagccggagacccgcaccaaggaggagatcatcgagctcttggtccttgagcagtacctgaccatcatccctgaaaagctcaagccttgggtgcgagcaaaaaagccggagaactgtgagaagctcgtcactctgctggagaattacaaggagatgtaccaaccagaagacgacaacaacagtgacgtgaccagcgacgacgacatgacccggaacagaagagagtcctcaccacctcactcagtccattctttcagtggtgaccgggactgggaccggaggggcagaagcagagacatggagccacgagaccgctggtcccacaccaggaacccaagaagcaggatgcctccgcgggatctttcccttcctgtggtggcgaaaacaagctttgaaatggacagagaggacgacagggactccagggcttatgagtcccgatctcaggatgctgaatcataccaaaatgtggtggacctcgctgaggacaggaaacctcacaacacaatccaggacaacatggaaaactacaggaagctgctctccctcggtttccttgctcaggactctgtccctgcagaaaagaggaacacagagatgttagacaatctgccatctgctgggtcccagttcccggacttcaaacacttaggaacatttctggtgtttgaggagttggtgaccttcgaggatgtgcttgtggacttcagcccagaggaacttagttcccttagtgctgctcagagaaacctctacagggaggtgatgctggagaattaccggaacctggtctccctggggcaccagttctctaaacctgacattatctcacgcctggaagaggaggaatcatatgcaatggagacagacagcagacatacagtgatttgtcaaggagagtctcatgatgatccattggaaccacaccagggcaaccaagagaaacttttgactcctataacaatgaatgaccccaagaccctcactccggaaagaagctatggcagtgatgaatttgagagaagctctaatcttagtaaacaatcaaaggatcctctaggaaaggatccccaggaaggcactgctcctggaatatgtacgagtccccagtcagcatcccaagagaacaaacacaacagatgtgaattttgcaaacgaacctttagtacgcaagtagcccttaggagacacgaacggatccatactgggaagaaaccctatgaatgtaaacagtgtgctgaagccttctatctcatgccacacctcaacagacatcagaagacccattctggtaggaagacttctggctgcaatgaaggtagaaagccttccgtccagtgtgcgaatctctgtgaacgtgtaagaattcacagtcaggaggactactttgaatgttttcagtgcggcaaagcttttctccagaatgtgcatcttcttcaacatctcaaagcccatgaggcagcaagagtccttcctcctgggttgtcccacagcaagacatacttaattcgttatcagcggaaacatgactacgttggagagagagcctgccagtgttgtgactgtggcagagtcttcagtcggaattcatatctcattcagcattatagaactcacactcaagagaggccttaccagtgtcagctatgtgggaaatgtttcggccgaccctcatacctcactcaacattatcaactccattctcaagagaaaactgttgagtgcgatcactgttgagaaacctttagtcacagcacacacttttctcaacattattggcttcctcctagagtgttgtgagtgtgagaaggcctttcactagccccaccttgttaacaacttgaacattcatcaaagtgtggtaaaaaaaaaa

SEQ ID NO: 59978 - DNA, 1965 bp, Artificial Sequence
  derived and/or modified sequence
cttggagacgactggcgagaggaagagggactaggtccaaacgctaggtggctgggtccagatacctgtgttttgactctgttcctgtggatagctgcttggtctgaagttccagaaaggatcctgttcccagacagccggagacccgcaccaaggaggagatcatcgagctcttggtccttgagcagtacctgaccatcatccctgaaaagctcaagccttgggtgcgagcaaaaaagccggagaactgtgagaagctcgtcactctgctggagaattacaaggagatgtaccaaccagaagacgacaacaacagtgacgtgaccagcgacgacgacatgacccggaacagaagagagtcctcaccacctcactcagtccattctttcagtggtgaccgggactgggaccggaggggcagaagcagagacatggagccacgagaccgctggtcccacaccaggaacccaagaagcaggatgcctccgcgggatctttcccttcctgtggtggcgaaaacaagctttgaaatggacagagaggacgacagggactccagggcttatgagtcccgatctcaggatgctgaatcataccaaaatgtggtggacctcgctgaggacaggaaacctcacaacacaatccaggacaacatggaaaactacaggaagctgctctccctcggtttccttgctcaggactctgtccctgcagaaaagaggaacacagagatgttagacaatctgccatctgctgggtcccagttcccggacttcaaacacttaggaacatttctggtgtttgaggagttggtgaccttcgaggatgtgcttgtggacttcagcccagaggaacttagttcccttagtgctgctcagagaaacctctacagggaggtgatgctggagaattaccggaacctggtctccctggggcaccagttctctaaacctgacattatctcacgcctggaagaggaggaatcatatgcaatggagacagacagcagacatacagtgatttgtcaaggagagtctcatgatgatccattggaaccacaccagggcaaccaagagaaacttttgactcctataacaatgaatgaccccaagaccctcactccggaaagaagctatggcagtgatgaatttgagagaagctctaatcttagtaaacaatcaaaggatcctctaggaaaggatccccaggaaggcactgctcctggaatatgtacgagtccccagtcagcatcccaagagaacaaacacaacagatgtgaattttgcaaacgaacctttagtacgcaagtagcccttaggagacacgaacggatccatactgggaagaaaccctatgaatgtaaacagtgtgctgaagccttctatctcatgccacacctcaacagacatcagaagacccattctggtaggaagacttctggctgcaatgaaggtagaaagccttccgtccagtgtgcgaatctctgtgaacgtgtaagaattcacagtcaggaggactactttgaatgttttcagtgcggcaaagcttttctccagaatgtgcatcttcttcaacatctcaaagcccatgaggcagcaagagtccttcctcctgggttgtcccacagcaagacatacttaattcgttatcagcggaaacatgactacgttggagagagagcctgccagtgttgtgactgtggcagagtcttcagtcggaattcatatctcattcagcattatagaactcacactcaagagaggccttaccagtgtcagctatgtgggaaatgtttcggccgaccctcatacctcactcaacattatcaactccattctcaagagaaaactgttgagtgcgatcactgttgagaaacctttagtcacagcacacacttttctcaacattattggcttcctcctagagtgttgtgagtgtgagaaggcctttcactagccccacctt

SEQ ID NO: 59979 - DNA, 1584 bp, Artificial Sequence
  derived and/or modified sequence
atgtaccagcctgaagacgataataactccgacgtgacaagcgacgatgatatgaccaggaaccgtcgtgaaagttctccccctcatagcgtccattcctttagcggggaccgtgactgggaccggagaggtaggtcaagggatatggagcctagagaccgctggagccatacccggaatccacgttcacgcatgccaccaagggacctctctttacctgttgttgccaagaccagcttcgagatggatagagaagacgatagagattccagagcttatgagtcacgctcccaggatgccgagagctaccagaatgtggttgaccttgcggaagatagaaagccccataacacaatacaggacaacatggagaattaccgcaaactgctatctttgggctttctcgcacaggatagcgttcccgctgagaagaggaataccgagatgttagacaacctacccagcgcaggatcccagtttcctgactttaaacatttaggcacgttcctcgtcttcgaagagctggtcacctttgaagacgtactggtggactttagtcccgaggagctttctagcttaagtgctgcacagcggaacctgtacagagaggttatgctggaaaactaccgcaacctagtgtctctggggcatcagttctctaaacctgatattatctcaagactcgaagaggaggagtcttacgctatggagactgattcacgtcataccgtgatctgccagggcgagtctcacgatgatcctctggagccccaccaggggaaccaggagaaattgcttaccccgattaccatgaacgatcctaaaactctgacccctgagagatcatacggttccgatgagttcgaacgtagctccaacctcagtaaacagtccaaggaccccctggggaaggatcctcaagagggcacggctccgggtatctgcacctccccgcagagtgccagccaggagaataaacataatcggtgcgaattttgtaagcggacattctctacgcaggtggccttgagacggcacgagcgtatccacaccggtaaaaaaccctatgagtgtaagcagtgcgccgaagccttttacttaatgccccacctcaatcgacatcagaagactcactccggcaggaagaccagcggatgcaacgaaggcaggaaaccttctgtccagtgtgcaaacctctgtgaacgggtgaggattcattcacaggaggactactttgagtgcttccaatgtggcaaggccttcctccagaacgtgcatctgcttcaacacctgaaagcccacgaagccgctcgggtgctcccccctggtctctctcactctaagacctaccttatccggtatcagcggaaacacgactacgttggtgaaagggcctgccagtgttgcgactgtggccgagtttttagtagaaattcctacttgattcagcactaccgtacccacactcaagagagaccttatcagtgccagctgtgcggaaagtgctttgggagacccagctacctgacacagcactaccagctgcattcacaggagaagacagttgaatgcgatcactgttag

SEQ ID NO: 59980 - DNA, 1584 bp, Artificial Sequence
  derived and/or modified sequence
atgtatcagcccgaggatgataacaacagtgatgtgacctctgacgatgatatgacgcgcaatagacgcgagtcctcacccccccactctgtgcactccttttcaggagaccgtgattgggatcgcaggggccgatccagggacatggagccccgcgatcggtggagccacactcgaaatccacgatcgagaatgcctccgagagacttaagcttacctgtggtagcaaagacctccttcgagatggatcgggaggatgacagggacagtcgcgcctatgagagtcgcagtcaggacgccgagtcttatcagaacgtagttgaccttgctgaggatagaaaaccccacaacacgatacaggataatatggagaactatcggaaactgctttccctagggttcctggctcaggatagtgtgccagccgaaaagcgaaacacagaaatgctcgacaatctgccatctgcagggagccagttccccgacttcaagcatctggggacattcctcgtgtttgaggagctcgtaacatttgaagatgttctggtggacttttcgcctgaggaattgtcaagtctcagtgcagctcaacggaacctgtaccgtgaggtgatgcttgagaactatagaaatctggtatctcttggccaccagttttcgaaaccagatatcatttcacggcttgaggaggaggaatcttatgcaatggaaacggacagcaggcataccgtcatctgtcaaggcgagtctcacgacgacccactggagccgcatcagggaaatcaagagaaattactgacccccatcaccatgaatgatcccaagacactgaccccagaacgcagttatggatccgatgagtttgaaaggtcttccaatctttccaagcagagtaaggatccactcggaaaagatcctcaggagggcacggctccaggaatctgcacaagtccccaatcagcctctcaagagaataagcataatcgatgcgaattctgtaagcggaccttcagcactcaagtcgcccttaggcgccatgaacggattcacactggcaagaaaccctatgaatgtaagcagtgcgcggaagcgttttacctgatgccacacctaaatcgacatcagaaaacccactcaggtcggaagactagcggatgcaatgaaggccgaaaaccctcggtgcagtgcgccaatctgtgcgaaagagtaaggattcactctcaggaagattatttcgaatgcttccagtgcgggaaagccttcctgcagaacgttcacctgctgcagcatttgaaagctcacgaagctgctagagttcttccccctggattgtcacattcgaaaacctacctgattagataccagagaaagcatgactacgtgggggagcgggcgtgccaatgttgcgactgcgggcgagtgttttcgcgcaactcatatctgattcaacattatcggacccatacccaggaacggccataccagtgccagttgtgtgggaagtgcttcgggcgtccttcatatctgactcaacactaccagttgcacagccaggagaagacagtggagtgtgatcattgctag

SEQ ID NO: 59981 - DNA, 1584 bp, Artificial Sequence
  derived and/or modified sequence
atgtaccagcccgaggacgacaacaacagcgacgtgaccagcgacgacgacatgacccgaaacagaagggagtcgtcccctcctcactctgtgcattccttctctggcgatagagattgggacagaaggggcaggtctagagacatggaacctcgcgatcgatggtctcacacacgcaatccgcgcagcaggatgcctccacgcgatctttccctgccggtggttgccaagacttccttcgagatggacagagaggacgacagagattcaagggcttatgagagcagatcccaggacgcagaatcctatcagaatgttgtggatctggcggaagatcgtaaaccccataacacgatccaggacaatatggaaaactacagaaagcttttgagcctgggatttctagctcaggactctgttcccgcagaaaaaaggaatacagagatgctagacaacttaccatccgcagggtctcagttcccggatttcaaacatttaggcaccttcttagtattcgaggagcttgtaacgttcgaagatgtgcttgtggacttttcccccgaggagctctcaagcctttctgcagcccaacgaaacctgtacagagaagtaatgctggagaattacagaaatctagtgtcactggggcatcaattttctaagcccgacattatctctagactggaggaggaggagtcctatgcaatggagactgactcccggcatacagtgatttgtcagggagaaagccatgacgacccattggagcctcaccaggggaatcaggagaagcttctaacccccataactatgaacgacccaaagaccctaacgccggagcgaagttatggttctgacgagttcgaaaggtctagcaacctgtctaaacagagcaaggaccccttgggcaaggatccgcaggaaggaactgctcctggaatctgcacttcgccacagagcgcctcacaggaaaacaagcataatcggtgtgaattctgtaaacggaccttttccacccaggtcgcgctgagacgccacgaaagaattcacactggaaaaaagccatacgagtgcaaacagtgtgccgaagctttctacctaatgccccatttaaacagacatcagaaaacacactccggtagaaagacgagcggatgtaatgagggtcgaaaacccagcgtccagtgtgcgaacctgtgcgagagagttagaatccatagccaggaggattactttgaatgcttccagtgtgggaaggccttcttacagaacgtacatcttctgcaacatttaaaggctcacgaagccgcaagagtgctgccaccaggattatcccactctaaaacctacctaattaggtaccagcggaaacatgactatgtgggcgaaagggcttgccagtgttgtgactgtggacgggtattttcaagaaatagctacctgatccaacattatcggacgcacacgcaagagcgcccatatcagtgtcagctttgtggaaaatgttttggccgtcctagttacctaacgcagcattaccagctccacagtcaggaaaagacagtcgagtgcgatcactgctag

SEQ ID NO: 59982 - DNA, 1584 bp, Artificial Sequence
  derived and/or modified sequence
atgtatcaaccagaggatgataacaactcagacgttaccagcgacgatgacatgacacgcaacaggcgggagagctcacctccacacagcgttcactctttttctggtgatagagactgggaccgccgcggaagatcaagggacatggaaccacgggatagatggagtcacaccagaaacccccgatcccgtatgccaccgcgggatctaagcttaccggtggtcgcaaagacttcttttgaaatggatcgcgaagacgatcgcgacagtagagcatacgaaagtaggtcccaggatgctgagtcctaccagaatgttgtggatctcgctgaggatcgaaagccccataacaccatacaggataacatggagaactacaggaaactcctgagtctgggattcctcgcgcaagactccgtgcccgcagaaaaaaggaatactgaaatgctcgataatctcccctcggccggatcccaattcccagacttcaagcatctagggactttcctggtttttgaggagttagttacatttgaagatgttctcgtggattttagtcctgaggaactgtcgtcactctccgcagcgcagagaaacctttaccgggaggtaatgcttgagaactatcggaacctcgtgtccctaggccaccagttttcaaagcctgacatcatttccagactagaggaggaggaaagctacgccatggaaacagactcccgccacacagtgatatgtcagggagaaagtcatgacgacccattggaaccccatcaggggaaccaggagaaactactcaccccgattaccatgaacgatcccaaaacactgacccctgagcgctcctatggctcagacgagttcgagagaagttccaacctgtctaagcagtccaaagacccccttggcaaagacccacaggagggaaccgcccccggcatctgtactagcccccagagcgccagccaggaaaacaagcacaatcgctgtgaattctgcaagcgcaccttctctacacaggtggcgttgaggcgacatgagaggatccataccggcaaaaagccctacgagtgtaagcagtgtgccgaggctttctacctgatgccccacctcaataggcatcagaaaacccatagcggacggaagaccagcggttgcaatgaaggaaggaagccctctgtccagtgcgctaacctgtgcgagcgcgtgagaatccatagtcaggaagattatttcgagtgctttcagtgcgggaaggccttcctgcagaacgtgcacctgcttcagcatctgaaagcccacgaagctgcacgcgtcctgccacctgggctgtcccactccaagacttacctgatcagataccagaggaaacatgactacgtgggtgaacgagcgtgccagtgttgcgactgcggacgcgtgttcagcaggaattcctacctgatacagcactaccgcacgcatacacaagagcggccctatcagtgccagctctgcggaaagtgctttggccgtccatcttatcttacccaacattaccagctccattcccaggagaagaccgtggagtgtgaccactgctag

SEQ ID NO: 59983 - DNA, 1584 bp, Artificial Sequence
  derived and/or modified sequence
atgtaccagcccgaggacgacaacaacagcgacgtgaccagcgacgacgatatgacccgcaatcggagggaaagtagcccaccacattcggtgcattctttctcaggcgatagggactgggacagaaggggcagatccagagatatggagcctagggacaggtggagccatacccgcaaccctagaagccgaatgccacctagggacctcagcttgccagtggtcgctaagacctcctttgagatggacagggaggatgaccgggacagcagggcctacgaaagccgaagccaggacgctgaaagttaccagaacgtggtcgacctggccgaagacagaaagccccacaataccatccaggacaacatggagaattataggaaactactgtcattgggctttttagcgcaggatagcgtccctgctgaaaagcggaataccgaaatgctggataatctcccttctgccggttcacagtttccagattttaaacatctgggcaccttcctcgtctttgaagagctggttacattcgaggacgttttagtggattttagccctgaggaactatcttccctgagcgccgctcagcggaatttgtaccgcgaggtcatgctggagaattatcgcaatctggtaagtcttggacaccagttttcgaagcctgatatcattagcaggcttgaagaagaggagtcatatgctatggaaacagatagcaggcacaccgtcatttgtcagggggaatcccatgatgacccccttgagccccaccagggcaaccaggaaaagctcctaacccctattactatgaacgatccgaagacccttaccccagaacgctcctatggttcggacgaatttgaaagatccagtaatctctccaagcaaagcaaggaccctctgggcaaggaccctcaggaggggacagcccctggcatctgcacttccccccaaagcgcatcccaggagaacaagcacaaccgttgcgagttttgtaaacggaccttctcaactcaggttgctttgcgccgccatgagaggatacatactggaaaaaaaccttatgaatgcaagcaatgcgctgaagctttttacctgatgccacacctcaaccgacatcagaagactcactcaggcaggaagacctcgggatgcaacgaagggcgtaagccgtctgtccaatgtgccaacctgtgcgagcgagtccgcatacacagccaggaagactatttcgaatgtttccagtgcggaaaggccttcctgcagaacgtgcatcttctgcagcatctcaaagcacatgaggcagctagggtgttgcctccaggactgtcgcactctaagacctacctgataagataccagcggaagcacgactacgtgggagagcgcgcatgccaatgctgcgactgcggacgcgtgttcagccgcaattcttatctcatccagcactatcggacgcacactcaagaaaggccctaccaatgccagttgtgcggcaaatgtttcgggcggccctcctacctcacacaacactaccagctccatagccaggaaaagaccgttgagtgcgaccactgttag

SEQ ID NO: 59984 - DNA, 1584 bp, Artificial Sequence
  derived and/or modified sequence
atgtatcagcctgaggacgacaacaatagtgatgttacctctgacgacgacatgactcggaataggcgggaaagttccccaccacacagcgttcactccttttctggagacagagattgggacagaaggggacggagccgagacatggagccccgagacagatggtctcacactaggaatcccaggtcccgaatgcctcccagagacttgagtctgccagtcgtggctaaaacgagcttcgaaatggaccgcgaagacgaccgggatagtagagcctatgaatccagaagccaggacgccgagagctatcagaacgtggttgacctggccgaagatcgcaaaccacataataccattcaggacaacatggagaactacagaaagcttctgagcctggggtttctggctcaggatagcgtgcctgcggaaaagcggaatacggagatgttagacaacctcccatccgccggttcccagtttccagacttcaagcacttgggtacatttctggtttttgaggaactggttactttcgaggatgtcctagttgactttagcccagaagaactgtcttcgctgtcagctgcccagcgaaacctgtaccgtgaagtcatgctagagaactatcggaacctcgtgagcttaggacatcaattttccaagccagacattatttcccgactggaagaagaggagtcctacgctatggagacagactctaggcacactgtaatttgccaaggggaatctcacgatgaccctctcgaacctcatcaaggtaaccaagagaaactgctgacccctatcacgatgaatgatccaaaaactcttaccccagagcgttcctatgggtccgacgaattcgaacggtcatcaaacttatccaagcagtctaaggacccgttgggcaaagacccccaggaggggactgcccctggaatttgcacctcacctcagagtgcatcacaggagaataaacacaatcgttgtgagttttgcaagaggaccttttctacacaggttgctctgcgaaggcatgaaaggattcataccggcaagaagccttacgagtgtaaacagtgcgcggaagccttttacctgatgccccacctcaaccgacaccagaagacccattcaggtaggaagacctccggatgtaacgagggacgaaagccttccgttcaatgtgctaacttgtgcgagcgcgtgagaatccactctcaagaagattacttcgaatgcttccagtgcgggaaagcatttttacagaatgtccatctcctgcagcacctgaaagcccacgaggcagcccgagttctgccacctgggctatcccattcaaaaacttaccttataaggtatcagcgtaaacacgattacgtgggcgagagggcctgccagtgctgcgattgtggcagagtatttagcaggaactcttatcttattcagcactacaggacccacacccaagaaaggccttaccagtgccagttgtgcggaaaatgttttggaagaccatcctacctgactcaacattatcagttgcattcacaagagaagacggtggaatgtgatcactgctag

SEQ ID NO: 59985 - DNA, 642 bp, Artificial Sequence
  derived and/or modified sequence
atgttcggctggagcttcgtgttcgaggacttcgtgagcgacgagctgagaaacaaggccacccagcccatgaagagcgtgctgtggtggctgcccgtggagaaggccttctggagacagcccgccggccccggcagcggcatcagagagagactggagcaccccgtgctgcacgtgagctggaacgacgccagagcctactgcgcctggagaggcaagagactgcccaccgaggaggagtgggagttcgccgccagaggcggcctgaagggccaggtgtacccctggggcaactggttccagcccaacagaaccaacctgtggcagggcaagttccccaagggcgacaaggccgaggacggcttccacggcgtgagccccgtgaacgccttccccgcccagaacaactacggcctgtacgacctgctgggcaacgtgtgggagtggaccgccagcccctaccaggccgccgagcaggacatgagagtgctgagaggcgccagctggatcgacaccgccgacggcagcgccaaccacagagccagagtgaccaccagaatgggcaacacccccgacagcgccagcgacaacctgggcttcagatgcgccgccgacgccggcagaccccccggcgagctgtag

SEQ ID NO: 59986 - DNA, 642 bp, Artificial Sequence
  derived and/or modified sequence
atgtttggctggagcttcgtcttcgaagattttgtgagtgatgaattaaggaacaaagctactcagcctatgaagtctgtcctttggtggctcccagtagaaaaagccttctggcggcagcccgctggcccagggtccgggatcagagagcgcttagagcacccagtgctccacgtgtcctggaacgacgcacgcgcctactgtgcctggcggggaaagaggctgccaactgaggaggagtgggagttcgcagcacggggcggactaaaaggacaggtctacccatggggaaattggttccagcccaatcggaccaacctgtggcagggaaagttcccaaagggagataaagcagaggatggcttccacggagtctccccagttaacgctttccccgcccagaataattacggtctctacgatctgttggggaatgtgtgggagtggacagcttccccttaccaagcggcggagcaagatatgagagtacttcgtggcgcctcctggatcgacaccgccgacgggtctgctaatcatagggctcgagtcactacccgaatgggaaacacccccgattccgcaagtgataacttgggattcagatgcgcagctgacgctgggaggcctcccggagaactttag

SEQ ID NO: 59987 - DNA, 642 bp, Artificial Sequence
  derived and/or modified sequence
atgtttggctggagctttgtgtttgaagattttgtgtctgatgagctgaggaacaaggccacccagcccatgaagtctgtgctgtggtggctgcctgtggagaaggccttctggaggcagcctgctggccctggcagcggcatccgggagcggctggagcaccctgtgctgcacgtgtcctggaatgatgcccgggcctactgtgcctggaggggcaagaggctgcccacagaggaggagtgggagtttgctgcccggggcggcctgaagggccaggtgtacccctggggcaactggttccagcccaacagaaccaacctgtggcagggcaagttccccaagggggacaaggcagaagatggcttccatggagtgtcccctgtgaatgccttccctgcccagaacaactacggcctgtatgacctgctgggcaatgtgtgggagtggacagccagcccctaccaggccgctgagcaggacatgagggtgctgcggggggcctcctggattgacacagcagatggcagcgccaaccaccgggcccgggtgaccaccaggatgggcaacaccccagattctgccagtgacaacctgggcttccgctgtgccgcagatgctggccggcccccaggagagctgtag

SEQ ID NO: 59988 - DNA, 642 bp, Artificial Sequence
  derived and/or modified sequence
atgttcggctggagcttcgtgttcgaggacttcgtgagcgacgagttgagaaacaaagcgacccagcctatgaagagcgtcctttggtggctgcctgtagagaaagccttttggcgtcagccggctgggcctgggtctgggattcgggaaaggctcgagcacccagtactccacgtcagttggaatgacgctagagcctattgtgcctggcggggcaaacgcctgccaaccgaggaagaatgggaattcgctgcccgcggcggacttaagggccaggtgtacccatggggaaactggtttcaaccaaatcggaccaacctttggcaggggaaatttccaaagggcgataaagcagaagacggctttcatggggtctccccagtgaacgccttcccagcacaaaacaattatggactatacgacctgctcggtaacgtgtgggaatggacagctagcccctatcaggcagcagagcaggatatgagagtcctcagaggcgccagttggatagacacagctgatggctccgcgaaccacagagccagggtgacaaccagaatggggaacacccccgatagtgcctccgacaacctggggttccggtgtgccgctgatgctggccgtccaccgggtgagttgtag

SEQ ID NO: 59989 - DNA, 642 bp, Artificial Sequence
  derived and/or modified sequence
atgtttgggtggtcctttgtgtttgaggacttcgtgagcgatgaactgcggaataaagccactcagcccatgaagtccgtgctctggtggctccccgtagaaaaggccttctggaggcagccagcaggaccgggatcagggatccgtgaaagactagaacatcccgtgttgcacgtctcctggaacgacgcccgtgcatactgcgcctggaggggaaaaaggctgcccactgaagaagagtgggaatttgcagccaggggcggactcaagggccaagtgtacccatggggaaactggttccagccgaaccggaccaatctttggcagggaaaattcccaaaaggggacaaggccgaggatgggttccacggcgtctctccagttaacgcctttcctgcgcagaataattatggcctgtatgacctcttggggaatgtgtgggaatggaccgcctccccctaccaggccgcagagcaggacatgcgagtcctccggggagccagctggatcgacacagccgatggatcagctaatcatcgcgcaagagtgacgacacggatgggaaacactccagactcagcttctgacaatctcgggtttaggtgcgcagccgatgctggcagacctcccggtgagctatag

SEQ ID NO: 59990 - protein, 725 aa, Artificial Sequence
  derived and/or modified sequence
MDRGQVLEQLLPELTGLLSLLDHEYLSDTTLEKKMAVASILQSLQPLPAKEVSYLYVNTADLHSGPSFVESLFEEFDCDLSDLRDMPEDDGEPSKGASPELAKSPRLRNAADLPPPLPNKPPPEDYYEEALPLGPGKSPEYISSHNGCSPSHSIVDGYYEDADSSYPATRVNGELKSSYNDSDAMSSSYESYDEEEEEGKSPQPRHQWPSEEASMHLVRECRICAFLLRKKRFGQWAKQLTVIREDQLLCYKSSKDRQPHLRLALDTCSIIYVPKDSRHKRHELRFTQGATEVLVLALQSREQAEEWLKVIREVSKPVGGAEGVEVPRSPVLLCKLDLDKRLSQEKQTSDSDSVGVGDNCSTLGRRETCDHGKGKKSSLAELKGSMSRAAGRKITRIIGFSKKKTLADDLQTSSTEEEVPCCGYLNVLVNQGWKERWCRLKCNTLYFHKDHMDLRTHVNAIALQGCEVAPGFGPRHPFAFRILRNRQEVAILEASCSEDMGRWLGLLLVEMGSRVTPEALHYDYVDVETLTSIVSAGRNSFLYARSCQNQWPEPRVYDDVPYEKMQDEEPERPTGAQVKRHASSCSEKSHRVDPQVKVKRHASSANQYKYGKNRAEEDARRYLVEKEKLEKEKETIRTELIALRQEKRELKEAIRSSPGAKLKALEEAVATLEAQCRAKEERRIDLELKLVAVKERLQQSLAGGPALGLSVSSKPKSGEWEMKKT

SEQ ID NO: 59991 - DNA, 2178 bp, Artificial Sequence
  derived and/or modified sequence
atggatcggggccaggtattggaacaactgctacccgaactgacagggctgttaagtttgcttgatcatgagtatctgtccgatacaactttggaaaagaagatggcagttgcatcgattctacagtccttacaaccactgcccgctaaagaagtcagctacctctatgtaaacactgcggatctacatagtggtcctagctttgtggaatcgttgttcgaggaatttgactgcgatttgtcagatctgcgggacatgcctgaagacgacggcgaaccatccaaaggggctagtccggaacttgctaagtcccctcggctgagaaatgccgccgacctcccacctccactccctaacaaacccccacctgaggactattacgaagaagcgttacctttaggcccgggcaaatcacccgagtacatcagcagccataatggttgctccccctctcactcaatagtcgatgggtattatgaggatgccgacagcagctatcctgccactcgagtaaatggtgaactcaaatcctcctacaacgactctgacgcaatgtccagctcatacgagtcttatgacgaagaagaagaagaaggtaagagcccccaaccccgtcaccagtggccttccgaggaggcctccatgcacctcgtgcgtgagtgcagaatatgcgccttcctgctgcgaaaaaagagatttggacaatgggcaaagcagttaaccgtaatcagggaggatcagctactttgctacaagtcatctaaagaccggcagcctcacctccggttggcgctcgacacatgttcgatcatttatgtccccaaagatagtaggcacaaacgacacgaactcaggtttacccagggtgccaccgaggttttggtcctggccttacaatcacgtgagcaggcagaagagtggctcaaagtgatcagggaagtgagcaaaccggtcggcggagctgaaggcgtggaggtccctcgttcaccagtgctgctctgcaaactggatctggataaaagattgagtcaggagaaacaaacctcggattcagactctgtgggtgtcggagataactgcagcactctgggtaggcgggagacctgcgatcacggaaaaggcaaaaagagctcactggccgaactgaaaggctctatgtctcgggctgctgggcggaagatcacaagaattatcggcttctcgaaaaagaagacccttgctgacgatctgcagactagctccaccgaggaagaagtgccatgctgcggctacctcaacgtacttgtcaaccaaggatggaaggaacggtggtgtagactgaaatgcaatacactttatttccataaggatcacatggatctgagaacccacgttaatgctattgctctgcagggctgcgaggtcgcccccggatttggcccacggcatccctttgctttcaggatcctgcgaaataggcaggaagtggccatcttggaggcctcgtgtagcgaggacatggggcgctggctgggccttctgttggtggagatggggtcccgcgtgacccctgaagccttacactacgactacgtggatgtggagaccctgacctccatcgtgtctgctggacgcaattctttcctatatgccagatcatgccagaatcagtggcctgaaccacgcgtgtacgatgacgttccttacgagaagatgcaggatgaggagccggaacgacccacgggagcgcaagtcaaacgtcacgcctctagctgttccgagaagtcacatcgtgtcgacccccaggtgaaggtaaaaagacatgccagcagtgccaatcagtacaagtatggaaagaacagagcagaggaagacgccagaaggtacctggtagaaaaggaaaagcttgaaaaggaaaaagagacaatcagaaccgaactcattgcccttcgccaagagaaacgcgagctcaaggaagccattcgaagctctccgggggcaaaattgaaagctctggaggaggccgtcgccacgctggaagcacagtgccgcgctaaagaggaacggcgcatagatcttgagctgaaacttgtggcggtgaaggagagactgcagcaatccctagccggcggtcctgcattgggtctgagtgtttccagcaagcctaaaagcggtgagtgggagatgaagaagacctag

SEQ ID NO: 59992 - DNA, 2178 bp, Artificial Sequence
  derived and/or modified sequence
atggaccggggccaggtgctggagcagctgctgcctgagctgaccggcctgctgagcctgctggaccacgagtacctgagtgacaccaccctggagaagaagatggctgtggccagcatcctgcagagcctgcagcccctgcctgccaaggaggtgtcctacctgtatgtgaacacagctgacctgcacagcggccccagctttgtggagagcctgtttgaggagtttgactgtgacctgagtgacctgcgggacatgccagaagatgatggagagcccagcaaaggagccagccctgagctggccaagagcccccggctgagaaatgctgctgacctgcccccacccctgcccaacaagcccccacctgaggactactatgaggaggccctgcccctgggccctgggaagagccctgagtacatcagcagccacaacggctgcagccccagccacagcatcgtggatggctactatgaagatgctgacagcagctacccagccaccagggtgaatggagagctgaagagcagctacaatgacagtgatgccatgagcagcagctatgagagctatgatgaggaggaggaggagggcaagagcccccagcccaggcaccagtggcccagcgaggaggcctccatgcacctggtgcgggagtgccgcatctgtgccttcctgctgaggaagaagagatttggccagtgggccaagcagctgaccgtcatccgggaggaccagctgctgtgctacaagagcagcaaggaccggcagccccacctgcggctggccctggacacctgcagcatcatctacgtgcccaaggacagccgccacaagagacatgagctgcgcttcacccagggcgccacagaggtgctggtgctggccctgcagagccgggagcaggccgaggagtggctgaaggtgatccgggaggtgtccaagcctgtgggcggcgctgagggcgtggaggtgcccaggagccctgtgctgctgtgcaagctggacctggacaagaggctgagccaggagaagcagaccagtgacagcgacagcgtgggcgtgggggacaactgcagcaccctgggcagaagagagacctgtgaccacggcaagggcaagaagagcagcctggccgagctgaagggctccatgagcagagctgctggcaggaagatcacccgcatcatcggcttcagcaagaagaagaccctggctgatgacctgcagaccagcagcacagaggaggaggtgccctgctgcggctacctgaatgtgctggtgaaccagggctggaaggagcgctggtgccgcctgaagtgcaacaccctgtacttccacaaggaccacatggacctgcggacccacgtgaatgccatcgccctgcagggctgtgaggtggcccctggcttcggccccaggcacccctttgccttccgcatcctgaggaaccggcaggaggtggccatcctggaggccagctgcagcgaggacatgggccgctggctgggcctgctgctggtggagatgggcagccgggtgaccccagaggccctgcactatgactatgtggatgtggagaccctgaccagcatcgtgtctgctggcaggaacagcttcctgtatgcccggagctgccagaaccagtggccagagccccgggtgtatgatgatgtgccctatgagaagatgcaggatgaggagcctgagcggcccaccggggcccaggtgaagagacatgccagcagctgcagcgagaagagccaccgggtggacccccaggtgaaggtgaagagacatgccagcagcgccaaccagtacaagtatggcaagaacagagcagaagaagatgcccggcgctacctggtggagaaggagaagctggagaaggagaaggagaccatcagaacagagctgattgccctgcggcaggagaagcgggagctgaaggaggccatccgcagcagccctggggccaagctgaaggccctggaggaggccgtggccaccctggaggcccagtgccgggccaaggaggagaggagaattgacctggagctgaagctggtggccgtgaaggagcggctgcagcagagcctggccggcggccctgccctgggcctgtctgtgagcagcaagcccaagtctggagagtgggagatgaagaagacctag

SEQ ID NO: 59993 - DNA, 2178 bp, Artificial Sequence
  derived and/or modified sequence
atggaccggggccaggtgctggagcagctgctgcccgagctgaccggactcttgagtctgctggaccacgagtatttatcagacacaacgttagagaagaagatggccgtggccagcatcctccagtcactccagcccttaccagcaaaggaagttagctacctgtacgtcaatactgcagatcttcacagcggcccctcgtttgtcgaatctttatttgaggaatttgattgcgatctgtccgatctgcgtgatatgcccgaggacgacggcgaaccttccaaaggggcatctccagagctggcaaaaagtcctcggctgcgaaatgcagcagacctgcctcccccattgcccaataagccgcctcccgaggattattacgaagaagcgctacccctggggccaggcaagtcccccgagtatatttcctcacacaacggatgcagccccagtcatagcatcgtagacggttactatgaggacgcggactcctcttacccagccacgagggtgaacggggaattaaagtcatcctataatgattccgatgccatgtcctcctcttatgagtcttacgacgaagaggaggaggaagggaagtctccacagcccagacatcaatggccatccgaggaagcatccatgcacttagtgcgtgagtgtcgcatctgcgcctttctccttaggaaaaaaaggttcgggcaatgggcgaaacagctcacagtcatccgcgaggatcagctcctttgctataagtcgtccaaggatagacagcctcatttgagactggcgctggacacttgctctattatttatgttcccaaggacagccggcataaacgccacgaacttcggttcacgcagggtgctactgaggtccttgttctggctctccaaagtcgcgagcaagcagaagaatggctaaaggtgatcagggaggtgagcaaaccggttggtggtgcagagggtgtggaggttcccagaagccccgtgttgttgtgtaaactggatctggacaaaagactctcccaggaaaaacagaccagcgattctgacagcgtgggggtgggggacaattgctctacgctgggcagaagagaaacttgcgaccacggaaaggggaaaaagtcctccctggccgagctgaaaggctccatgtcgcgggcagctggaaggaagatcactaggatcatagggtttagcaagaagaaaaccctcgccgatgatctgcagaccagctccaccgaagaggaggttccgtgttgtgggtacttgaacgttctagtgaaccaaggttggaaagagcggtggtgcagattgaagtgcaatactctttacttccataaggaccacatggatctgcgcactcatgtgaatgctatcgccctgcagggatgtgaagttgccccaggcttcgggccccgccacccgtttgccttcagaatcctgcggaataggcaggaggttgccattcttgaagccagctgctccgaagatatgggacggtggctcgggttgctcctagtggaaatggggtctcgcgtgactccggaagccctacattatgactacgtggacgtggagaccctgactagcatcgtcagtgcaggtaggaactccttcctgtatgcacgctcgtgtcaaaaccagtggcccgagcctcgggtttatgacgatgttccctacgagaagatgcaggatgaggaacccgagaggcccactggcgctcaggtgaagcgtcatgcttccagctgtagtgagaaatcacatagggtcgatcctcaggtgaaggtgaagcgccacgcaagcagcgctaaccagtacaagtacggtaaaaacagggcagaggaggacgcccgccgatatctcgtggagaaagagaagctggagaaagagaaggaaacaatccgtaccgagttaatcgccctacgccaggagaagagagagctgaaggaggctatccggagttcccctggagccaagttgaaagcactggaagaagctgtggcaacactagaagcacaatgccgagcaaaagaagaacgcaggatcgacctggaactgaagctggtcgccgtgaaggagcggctgcagcagagtttagctggggggcctgctctgggattgagcgtgtcaagcaagccaaagtccggagagtgggaaatgaaaaaaacctag

SEQ ID NO: 59994 - DNA, 2178 bp, Artificial Sequence
  derived and/or modified sequence
atggatcggggacaggttctcgagcagcttctgcctgaacttaccggcctcctctctctgctggatcacgagtacctttctgacacaactcttgagaagaagatggctgtggccagcattctacagagcctccagcctctgccggcaaaggaggtgtcttacctatacgttaacaccgccgacctgcacagtggcccatctttcgtggagtccctcttcgaggagttcgattgtgatctgtcagacctaagggatatgccagaggacgacggtgaaccctctaagggtgcctccccggaacttgccaagtctcctaggctccgtaacgcagctgatttgccaccaccactgccaaataagccacctccagaggattattatgaggaagctctcccactcgggccagggaagagtcccgaatacatctccagtcataatggatgctcgccttctcatagcatcgtggacggctattacgaggatgcggactcctcctacccagctactcgggtcaacggcgagctaaaatcaagttataacgactccgatgccatgagttcctcgtatgagagttatgatgaggaagaagaggagggcaaatccccacagccgagacaccagtggccaagcgaggaagcaagcatgcacctggtccgagaatgccggatatgtgcgttcttgctccgcaagaagcggttcggccagtgggcaaagcagctgacagtcatccgagaagatcagctgctttgttacaagagcagcaaagaccgccagccccacctgaggcttgcacttgacacgtgctcaatcatatatgtgcccaaggacagcagacataaaagacatgagctcaggttcacgcaaggcgctacagaggtgctggtgttggccctgcaaagcagagagcaggcagaggagtggctgaaggtaatcagggaagtgtccaaaccagtggggggtgcagagggagtcgaggttccacgtagtcctgtcctgctgtgcaagctggatctcgacaagagactctctcaggaaaaacagacatccgattccgatagcgtgggagtcggcgacaattgtagcacactgggtcgacgagagacctgtgaccacggaaaaggtaaaaaatctagcctagccgaactgaagggctccatgtctagggcagccggtaggaagattactcgtatcatcggcttctcaaaaaaaaaaaccctcgctgacgatctccaaacatcatctacggaggaggaagtcccctgctgcggctacctgaacgtactggtcaaccaggggtggaaggagcggtggtgtcggcttaagtgtaatactctctatttccacaaggaccatatggacctcaggacacacgttaacgctattgctcttcaggggtgtgaggtggctcccggttttggacccagacatcccttcgctttcagaatactgcgcaatcggcaagaagttgctatcctggaggcttcatgctccgaagatatgggcagatggctgggcttactcttagtggaaatggggtcacgggtcacccctgaggcactacactacgattatgttgatgtggagactcttacttcaatcgtaagtgctgggcgaaattcgtttctgtatgcacgtagctgtcaaaatcagtggccagagccgcgagtgtacgatgatgtcccatacgagaaaatgcaagatgaggagcccgaacggccaaccggagcacaggtaaaacgtcatgcatcttcatgctctgagaaatcccacagagtggacccacaggttaaggtgaagagacacgcctcaagcgctaaccaatacaagtacggcaagaacagggccgaggaggatgcgaggaggtacctggtggagaaggagaagttggaaaaggagaaagagacaatacgcacagagctgatcgcgctgagacaggaaaaacgcgagctgaaggaagctattaggtcttccccaggggcaaagctgaaggctcttgaggaagcagtagccactttggaggcacagtgccgtgccaaagaggagagacggattgatctggagttaaagctagtagccgtgaaggagcgcttgcaacagagcctggcaggcggacccgctctgggcttgtccgtcagctccaagccaaagtctggggaatgggagatgaagaaaacgtag

SEQ ID NO: 59995 - DNA, 2319 bp, Artificial Sequence
  derived and/or modified sequence
ccggagcccctgcgccctgcggcccgctccccggggaccgggccggcgccatggaccgaggccaggtgctggagcagctgctcccagagctcaccgggctgctcagcctcctggaccacgagtacctcagcgataccaccctggaaaagaagatggccgtggcctccatcctgcagagcctgcagccccttccagcaaaggaggtctcctacctgtatgtgaacacagcagacctccactcggggcccagcttcgtggaatccctctttgaagaatttgactgtgacctgagtgaccttcgggacatgccagaggatgatggggagcccagcaaaggagccagccctgagctagccaagagcccacgcctgagaaacgcggccgacctgcctccaccgctccccaacaagcctccccctgaggactactatgaagaggcccttcctctgggacccggcaagtcgcctgagtacatcagctcccacaatggctgcagcccctcacactcgattgtggatggctactatgaggacgcagacagcagctaccctgcaaccagggtgaacggcgagcttaagagctcctataatgactctgacgcaatgagcagctcctatgagtcctacgatgaagaggaggaggaagggaagagcccgcagccccgacaccagtggccctcagaggaggcctccatgcacctggtgagggaatgcaggatatgtgccttcctgctgcggaaaaagcgtttcgggcagtgggccaagcagctgacggtcatcagggaggaccagctcctgtgttacaaaagctccaaggatcggcagccacatctgaggttggcactggatacctgcagcatcatctacgtgcccaaggacagccggcacaagaggcacgagctgcgtttcacccagggggctaccgaggtcttggtgctggcactgcagagccgagagcaggccgaggagtggctgaaggtcatccgagaagtgagcaagccagttgggggagctgagggagtggaggtccccagatccccagtcctcctgtgcaagttggacctggacaagaggctgtcccaagagaagcagacctcagattctgacagcgtgggtgtgggtgacaactgttctacccttggccgccgggagacctgtgatcacggcaaagggaagaagagcagcctggcagaactgaagggctcaatgagcagggctgcgggccgcaagatcacccgtatcattggcttctccaagaagaagacactggccgatgacctgcagacgtcctccaccgaggaggaggttccctgctgtggctacctgaacgtgctggtgaaccagggctggaaggaacgctggtgccgcctgaagtgcaacactctgtatttccacaaggatcacatggacctgcgaacccatgtgaacgccatcgccctgcaaggctgtgaggtggccccgggctttgggccccgacacccatttgccttcaggatcctgcgcaaccggcaggaggtggccatcttggaggcaagctgttcagaggacatgggtcgctggctcgggctgctgctggtggagatgggctccagagtcactccggaggcgctgcactatgactacgtggatgtggagaccttaaccagcatcgtcagtgctgggcgcaactccttcctatatgcaagatcctgccagaatcagtggcctgagccccgagtctatgatgatgttccttatgaaaagatgcaggacgaggagcccgagcgccccacaggggcccaggtgaagcgtcacgcctcctcctgcagtgagaagtcccatcgtgtggacccgcaggtcaaagtcaaacgccacgcctccagtgccaatcaatacaagtatggcaagaaccgagccgaggaggatgcccggaggtacttggtagaaaaagagaagctggagaaagagaaagagacgattcggacagagctgatagcactgagacaggagaagagggaactgaaggaagccattcggagcagcccaggagcaaaattaaaggctctggaagaagccgtggccaccctggaagctcagtgtcgggcaaaggaggagcgccggattgacctggagctgaagctggtggctgtgaaggagcgcttgcagcagtccctggcaggagggccagccctggggctctccgtgagcagcaagcccaagagtggggaatgggaaatgaagaagacctaggaagaggatgaggatttcattccaaaggaaataccagcttgtccacctgaggaagaaatgcttttttcacaaggagacaccaagagaagac

SEQ ID NO: 59996 - DNA, 2178 bp, Artificial Sequence
  derived and/or modified sequence
atggacagaggccaggtgctggagcagctgctgcccgagctgaccggcctgctgagcctgctggaccacgagtacctgagcgacaccaccctggagaagaagatggccgtggccagcatcctgcagagcctgcagcccctgcccgccaaggaggtgagctacctgtacgtgaacaccgccgacctgcacagcggccccagcttcgtggagagcctgttcgaggagttcgactgcgacctgagcgacctgagagacatgcccgaggacgacggcgagcccagcaagggcgccagccccgagctggccaagagccccagactgagaaacgccgccgacctgcccccccccctgcccaacaagcccccccccgaggactactacgaggaggccctgcccctgggccccggcaagagccccgagtacatcagcagccacaacggctgcagccccagccacagcatcgtggacggctactacgaggacgccgacagcagctaccccgccaccagagtgaacggcgagctgaagagcagctacaacgacagcgacgccatgagcagcagctacgagagctacgacgaggaggaggaggagggcaagagcccccagcccagacaccagtggcccagcgaggaggccagcatgcacctggtgagagagtgcagaatctgcgccttcctgctgagaaagaagagattcggccagtgggccaagcagctgaccgtgatcagagaggaccagctgctgtgctacaagagcagcaaggacagacagccccacctgagactggccctggacacctgcagcatcatctacgtgcccaaggacagcagacacaagagacacgagctgagattcacccagggcgccaccgaggtgctggtgctggccctgcagagcagagagcaggccgaggagtggctgaaggtgatcagagaggtgagcaagcccgtgggcggcgccgagggcgtggaggtgcccagaagccccgtgctgctgtgcaagctggacctggacaagagactgagccaggagaagcagaccagcgacagcgacagcgtgggcgtgggcgacaactgcagcaccctgggcagaagagagacctgcgaccacggcaagggcaagaagagcagcctggccgagctgaagggcagcatgagcagagccgccggcagaaagatcaccagaatcatcggcttcagcaagaagaagaccctggccgacgacctgcagaccagcagcaccgaggaggaggtgccctgctgcggctacctgaacgtgctggtgaaccagggctggaaggagagatggtgcagactgaagtgcaacaccctgtacttccacaaggaccacatggacctgagaacccacgtgaacgccatcgccctgcagggctgcgaggtggcccccggcttcggccccagacaccccttcgccttcagaatcctgagaaacagacaggaggtggccatcctggaggccagctgcagcgaggacatgggcagatggctgggcctgctgctggtggagatgggcagcagagtgacccccgaggccctgcactacgactacgtggacgtggagaccctgaccagcatcgtgagcgccggcagaaacagcttcctgtacgccagaagctgccagaaccagtggcccgagcccagagtgtacgacgacgtgccctacgagaagatgcaggacgaggagcccgagagacccaccggcgcccaggtgaagagacacgccagcagctgcagcgagaagagccacagagtggacccccaggtgaaggtgaagagacacgccagcagcgccaaccagtacaagtacggcaagaacagagccgaggaggacgccagaagatacctggtggagaaggagaagctggagaaggagaaggagaccatcagaaccgagctgatcgccctgagacaggagaagagagagctgaaggaggccatcagaagcagccccggcgccaagctgaaggccctggaggaggccgtggccaccctggaggcccagtgcagagccaaggaggagagaagaatcgacctggagctgaagctggtggccgtgaaggagagactgcagcagagcctggccggcggccccgccctgggcctgagcgtgagcagcaagcccaagagcggcgagtgggagatgaagaagacctag

SEQ ID NO: 59997 - protein, 332 aa, Artificial Sequence
  derived and/or modified sequence
MLAWQDGGAKAAPSHHKISFSVLDILDPQKFTRAALPAVRPAPREARKSLAEVEAGKDASSRDPVRQLETPGQGFAASLLTRQAHPHHSSDARDAAGPGAGQASPLEGSEAEEEEDAEDPRRPRLRERAARLLPGLARSPDAPAGALASGEPCEDGGGGPVRSPPGSPGSPRPRRRRLEPNCAKPRRARTAFTYEQLVALENKFRATRYLSVCERLNLALSLSLTETQVKIWFQNRRTKWKKQNPGADGAAQVGGGAPQPGAAGGGGGGGSGGSPGPPGTGALHFQTFPSYSAANVLFPSAASFPLTAAAPGSPFAPFLGPSYLTPFYAPRL

SEQ ID NO: 59998 - protein, 310 aa, Artificial Sequence
  derived and/or modified sequence
MLAWQDGGAKAAPSHHKISFSVLDILDPQKFTRAALPAVRPAPREARKSLAEVEAGKDASSRDPVRQLETPDAAGPGAGQASPLEGSEAEEEEDAEDPRRPRLRERAARLLPGLARSPDAPAGALASGEPCEDGGGGPVRSPPGSPGSPRPRRRRLEPNCAKPRRARTAFTYEQLVALENKFRATRYLSVCERLNLALSLSLTETQVKIWFQNRRTKWKKQNPGADGAAQVGGGAPQPGAAGGGGGGGSGGSPGPPGTGALHFQTFPSYSAANVLFPSAASFPLTAAAPGSPFAPFLGPSYLTPFYAPRL

SEQ ID NO: 59999 - DNA, 999 bp, Artificial Sequence
  derived and/or modified sequence
atgctggcctggcaggacggcggcgccaaggccgcccccagccaccacaagatcagcttcagcgtgctggacatcctggacccccagaagttcaccagagccgccctgcccgccgtgagacccgcccccagagaggccagaaagagcctggccgaggtggaggccggcaaggacgccagcagcagagaccccgtgagacagctggagacccccggccagggcttcgccgccagcctgctgaccagacaggcccacccccaccacagcagcgacgccagagacgccgccggccccggcgccggccaggccagccccctggagggcagcgaggccgaggaggaggaggacgccgaggaccccagaagacccagactgagagagagagccgccagactgctgcccggcctggccagaagccccgacgcccccgccggcgccctggccagcggcgagccctgcgaggacggcggcggcggccccgtgagaagcccccccggcagccccggcagccccagacccagaagaagaagactggagcccaactgcgccaagcccagaagagccagaaccgccttcacctacgagcagctggtggccctggagaacaagttcagagccaccagatacctgagcgtgtgcgagagactgaacctggccctgagcctgagcctgaccgagacccaggtgaagatctggttccagaacagaagaaccaagtggaagaagcagaaccccggcgccgacggcgccgcccaggtgggcggcggcgccccccagcccggcgccgccggcggcggcggcggcggcggcagcggcggcagccccggcccccccggcaccggcgccctgcacttccagaccttccccagctacagcgccgccaacgtgctgttccccagcgccgccagcttccccctgaccgccgccgcccccggcagccccttcgcccccttcctgggccccagctacctgacccccttctacgcccccagactgtag

SEQ ID NO: 60000 - DNA, 933 bp, Artificial Sequence
  derived and/or modified sequence
atgctggcctggcaggacggcggcgccaaggccgcccccagccaccacaagatcagcttcagcgtgctggacatcctggacccccagaagttcaccagagccgccctgcccgccgtgagacccgcccccagagaggccagaaagagcctggccgaggtggaggccggcaaggacgccagcagcagagaccccgtgagacagctggagacccccgacgccgccggccccggcgccggccaggccagccccctggagggcagcgaggccgaggaggaggaggacgccgaggaccccagaagacccagactgagagagagagccgccagactgctgcccggcctggccagaagccccgacgcccccgccggcgccctggccagcggcgagccctgcgaggacggcggcggcggccccgtgagaagcccccccggcagccccggcagccccagacccagaagaagaagactggagcccaactgcgccaagcccagaagagccagaaccgccttcacctacgagcagctggtggccctggagaacaagttcagagccaccagatacctgagcgtgtgcgagagactgaacctggccctgagcctgagcctgaccgagacccaggtgaagatctggttccagaacagaagaaccaagtggaagaagcagaaccccggcgccgacggcgccgcccaggtgggcggcggcgccccccagcccggcgccgccggcggcggcggcggcggcggcagcggcggcagccccggcccccccggcaccggcgccctgcacttccagaccttccccagctacagcgccgccaacgtgctgttccccagcgccgccagcttccccctgaccgccgccgcccccggcagccccttcgcccccttcctgggccccagctacctgacccccttctacgcccccagactgtag

SEQ ID NO: 60001 - DNA, 999 bp, Artificial Sequence
  derived and/or modified sequence
atgcttgcttggcaagatggcggggccaaggctgcaccatctcaccacaaaatctcattctcggtactggacatcctcgaccctcagaagttcacccgcgccgctctccctgctgttcgcccagcaccccgcgaagctaggaagagtctagccgaagtggaagccggaaaggatgcctcctctcgcgaccccgttcggcagctggagacacccggacagggattcgcagcctcccttctcactagacaggcacaccctcaccactcaagcgatgccagggatgccgccggaccaggggcggggcaagcttcgccccttgagggaagcgaagctgaagaagaagaggatgctgaggatccgcgccgcccccgcctcagggagcgggccgctaggttgctgccaggcttggcaaggtcaccagacgccccagctggggcactcgctagcggtgagccatgcgaggacgggggcggaggtccggtgcggagcccgcccgggtcaccaggctcacctcgcccccgccgacgcagattagagccgaattgcgctaaacctcggcgggctagaactgcattcacctatgagcaattggttgcattggagaacaaatttcgggcgactcgttatctttctgtgtgcgagaggctgaatctcgcattgtccctgtcactcaccgagacacaggtaaagatttggttccagaaccggcgaaccaagtggaagaagcaaaacccaggagccgatggggcggcacaagtgggcgggggggccccacagcccggagctgcgggggggggcggcggcggcgggtccgggggctcccctggcccgcctggaaccggggcacttcatttccaaacttttccttcctacagtgccgcaaatgttctgtttcccagtgccgcctccttccccctcacggcggccgctcctgggagcccctttgctccattccttggccctagttatctcactcctttctacgctccgaggttgtag

SEQ ID NO: 60002 - DNA, 933 bp, Artificial Sequence
  derived and/or modified sequence
atgctggcttggcaggacggcggcgccaaagccgcccctagtcaccataagatcagtttctccgtgctagatatactggacccccagaagttcaccagagccgctctacctgctgtgcggccagccccaagagaagccaggaaatcactggccgaagttgaagccggaaaggatgctagctccagggaccccgtaaggcagttggagacacccgatgcagccggtccaggcgccgggcaggctagccctctggaaggcagcgaagcagaggaggaggaggacgctgaggaccctagaaggccacggctgagggaacgagccgctcgactgctccccggattagcaaggagtccagatgcccctgccggggccctggcctctggcgaaccgtgcgaggatggcggagggggaccagtgcggtcccctccgggttcgccaggatcgcccaggcctaggaggcgcagattagagcccaattgtgccaaaccaagacgcgcccgaaccgcgttcacgtatgagcagttggtggctttagagaataagttcagagctactcgatatctctcagtctgtgagaggttaaatctagccctctccctgagtctgactgagacgcaggtaaagatttggttccagaaccgaagaactaagtggaaaaagcagaaccccggcgcggacggcgccgcgcaggtgggagggggggccccacagcctggcgctgcagggggtggtggagggggaggctctggtggctctccgggcccacctgggacaggggccctccattttcagacctttccttcttactccgccgccaacgtgctgtttccttcagccgcctctttccctcttacagccgcagctcccggatccccgttcgccccttttctgggcccatcttatctcactcccttttacgcacctagactgtag

SEQ ID NO: 60003 - DNA, 999 bp, Artificial Sequence
  derived and/or modified sequence
atgctggcctggcaggacggcggggccaaggccgcccccagccaccacaagatctccttctctgtgctggacatcctggacccccagaagttcacccgggccgccctgcctgctgtgcggcctgccccccgggaggccaggaagagcctggccgaggtggaggccggcaaggatgccagcagccgggaccctgtgcggcagctggagaccccaggccagggctttgctgccagcctgctgacccggcaggcccacccccaccacagcagtgatgccagagatgctgctggccctggggccggccaggccagccccctggagggcagcgaggccgaggaggaggaggatgctgaggacccccggcggccccggctgcgggagagagctgcccggctgctgcccggcctggcccggagcccagatgccccagctggggccctggccagcggggagccctgtgaagatggcggcggcggccctgtgcgcagccccccaggcagccctggcagcccccggcccaggagaagaaggctggagcccaactgtgccaagccccggcgggccaggacagccttcacctatgagcagctggtggccctggagaacaagttccgggccacccgctacctgtctgtgtgtgagcggctgaacctggccctgagcctgagcctgacagagacccaggtgaagatctggttccagaacagaaggaccaagtggaagaagcagaaccctggagcagatggagctgcccaggtgggcggcggggccccccagcccggggctgctgggggcggcggcggcggcggcagcggcggcagccctggccccccaggcaccggggccctgcacttccagaccttccccagctacagcgctgccaacgtgctcttccccagcgctgccagcttccccctgacagctgctgcccctggcagcccctttgcccccttcctgggccccagctacctgacccccttctacgccccccggctgtag

SEQ ID NO: 60004 - DNA, 933 bp, Artificial Sequence
  derived and/or modified sequence
atgctggcctggcaggacggcggggccaaggccgcccccagccaccacaagatctccttctctgtgctggacatcctggacccccagaagttcacccgggccgccctgcctgctgtgcggcctgccccccgggaggccaggaagagcctggccgaggtggaggccggcaaggatgccagcagccgggaccctgtgcggcagctggagaccccagatgctgctggccctggggccggccaggccagccccctggagggcagcgaggccgaggaggaggaggatgctgaggacccccggcggccccggctgcgggagagagctgcccggctgctgcccggcctggcccggagcccagatgccccagctggggccctggccagcggggagccctgtgaagatggcggcggcggccctgtgcgcagccccccaggcagccctggcagcccccggcccaggagaagaaggctggagcccaactgtgccaagccccggcgggccaggacagccttcacctatgagcagctggtggccctggagaacaagttccgggccacccgctacctgtctgtgtgtgagcggctgaacctggccctgagcctgagcctgacagagacccaggtgaagatctggttccagaacagaaggaccaagtggaagaagcagaaccctggagcagatggagctgcccaggtgggcggcggggccccccagcccggggctgctgggggcggcggcggcggcggcagcggcggcagccctggccccccaggcaccggggccctgcacttccagaccttccccagctacagcgctgccaacgtgctcttccccagcgctgccagcttccccctgacagctgctgcccctggcagcccctttgcccccttcctgggccccagctacctgacccccttctacgccccccggctgtag

SEQ ID NO: 60005 - DNA, 999 bp, Artificial Sequence
  derived and/or modified sequence
atgctggcctggcaggacggcggcgccaaggccgcccccagccaccacaagatctctttttctgtgttggacatcttggatccccaaaaattcactcgcgctgccttacctgcagtacgaccagctccgcgtgaggcccgcaagtctctagctgaggttgaggcagggaaagatgctagttccagggaccctgtgagacagttggagacacctggacaagggtttgctgccagcctgctgacgcggcaggctcacccacatcactcatctgatgcgcgtgacgcagcaggaccaggggcagggcaggctagcccactcgaagggtcggaagctgaggaggaagaggacgccgaggacccacgtcgccctagattgagggagcgagcggcacggttattgcctgggttggctagaagcccagatgcgcccgctggggcactggcatcaggagagccttgcgaagatggcggtggcgggccagtccgatctccccccgggtctccggggtccccgaggccaagacgaagacgactcgagccaaactgtgctaagccgaggcgggctcggaccgcgtttacgtacgagcaactcgtcgctctagaaaacaagttcagggcaacacggtacctctctgtgtgtgagaggctgaacttagctttgtcactgagcttgacagaaacacaggtgaagatctggttccaaaatcgcagaaccaaatggaagaaacagaacccaggcgcagacggtgctgcacaggtgggcggtggcgctccgcagcccggggcagcaggcggcggtggaggtggtggatctggcggctcacccgggcctccagggacgggtgcattacacttccaaactttcccgagttatagcgctgcgaatgtgctgtttcccagcgccgctagtttcccactgaccgcagctgcgcctggatctccctttgctcccttcttgggcccctcttacctgacaccattctacgctcctcgcttatag

SEQ ID NO: 60006 - DNA, 933 bp, Artificial Sequence
  derived and/or modified sequence
atgctggcctggcaggacggcggcgccaaggccgcccccagccaccataagatcagtttcagcgtcctcgacatcttagacccccagaagtttacgcgggccgccctgcctgcagtccgacctgccccccgggaggctaggaagagtcttgctgaagtggaggctggcaaggatgcatcttcacgcgaccctgttaggcagttggagacgccagacgcagcaggtccaggagctggacaggctagccctctcgaagggtccgaagcggaagaagaagaggatgccgaagaccctagaagacccagactgcgggagagagcggctcgattgttaccaggcctcgcacggagcccagacgcaccagccggtgcactggcctctggcgagccttgcgaagacggaggcggaggacctgttcgttcccccccaggaagccccggctctccgcgaccccgccggaggcgcctagagccaaattgcgccaagccccgaagagccagaaccgcatttacctacgaacagctggtggcattggaaaataaattccgggctacccggtacctaagtgtttgtgaaagactgaatctggcactaagcctgagcttgacggagactcaggtcaaaatttggttccagaacagaaggactaagtggaagaagcagaatcccggggctgatggggccgcccaagtgggtggcggggcgccacagcccggagctgcaggaggaggcggaggtggcggatccggcggttcacctgggccaccgggaaccggggcactacattttcagaccttccctagctattctgccgccaacgtcttatttcctagcgctgcaagctttcccctcacagctgccgccccaggatccccctttgcaccctttctgggcccttcctacctgacccccttttacgcccctaggctatag

SEQ ID NO: 60007 - DNA, 1037 bp, Artificial Sequence
  derived and/or modified sequence
accccgcgccgccgaccgccggcccgtgggcgacgggcatgctggcatggcaggacggcggggccaaggcggctccctcccaccacaagatttctttctctgtcctggacatcctggacccacagaaattcacccgcgcagcgctccctgccgtgcgcccggctccccgggaagccaggaaaagtttggcggaggtcgaagcggggaaagatgccagctccagggaccctgtccgacagctggagacccctgggcagggatttgccgcatccctgctcacccgccaagctcacccgcaccacagttctgatgctcgcgatgctgcgggcccaggcgccggccaggcgtcccccctggagggttccgaggcggaagaggaggaggatgcggaggatccgaggaggccgcggctgcgggagcgggctgcgcgcttgctgccgggcctagcgcgctcacctgacgccccggccggggcattggcgtctggggagccctgcgaggacggcgggggcggccctgtgaggtcccccccgggatcccccggctccccgcgtcccaggcgccggcgcctggagcccaactgcgccaagccgcggcgcgcgcgcaccgccttcacctacgagcagctggtggccttggagaacaagttccgggccacgcgctacctgtcagtgtgcgagcgcctgaacctcgcgctgtctctcagcctcaccgagacgcaggtcaaaatctggttccagaatcgcaggaccaagtggaagaagcagaacccgggtgccgacggcgcggcgcaggtggggggtggcgcgccccagccaggggcggcggggggcggcggcggcggcggctcggggggcagtcctggccctcccggcaccggcgctctgcacttccagactttcccctcctactccgcggccaatgtcctcttcccgtccgccgcctccttcccgctgacggctgccgcccccgggagccctttcgcgccgttccttgggccttcctacctgacccccttctacgccccgcgtctatga

SEQ ID NO: 60008 - DNA, 1580 bp, Artificial Sequence
  derived and/or modified sequence
gcggccgcggcacagcgcctgatagtcccgaggctggcccgggctgcgccggtgccaatcggcgcgcagccccccgcggcgctctccccgccccgcctccccgcccccctccccagcttcacttggcagcgcggacccggctcctggctggaaagctaccgccaagccacagccgaaggcaagcccgagcggcgccatccccaaccccgcgccgccgaccgccggcccgtgggcgacgggcatgctggcatggcaggacggcggggccaaggcggctccctcccaccacaagatttctttctctgtcctggacatcctggacccacagaaattcacccgcgcagcgctccctgccgtgcgcccggctccccgggaagccaggaaaagtttggcggaggtcgaagcggggaaagatgccagctccagggaccctgtccgacagctggagacccctgatgctgcgggcccaggcgccggccaggcgtcccccctggagggttccgaggcggaagaggaggaggatgcggaggatccgaggaggccgcggctgcgggagcgggctgcgcgcttgctgccgggcctagcgcgctcacctgacgccccggccggggcattggcgtctggggagccctgcgaggacggcgggggcggccctgtgaggtcccccccgggatcccccggctccccgcgtcccaggcgccggcgcctggagcccaactgcgccaagccgcggcgcgcgcgcaccgccttcacctacgagcagctggtggccttggagaacaagttccgggccacgcgctacctgtcagtgtgcgagcgcctgaacctcgcgctgtctctcagcctcaccgagacgcaggtcaaaatctggttccagaatcgcaggaccaagtggaagaagcagaacccgggtgccgacggcgcggcgcaggtggggggtggcgcgccccagccaggggcggcggggggcggcggcggcggcggctcggggggcagtcctggccctcccggcaccggcgctctgcacttccagactttcccctcctactccgcggccaatgtcctcttcccgtccgccgcctccttcccgctgacggctgccgcccccgggagccctttcgcgccgttccttgggccttcctacctgacccccttctacgccccgcgtctatgaatccggagccccctggcccctctttcgcgggattcacgagggattggcatcgtcgtgtgccctcggctcctccaccgggggtgcaggtgcgcgggtgtcagcgcacccctgcccgccgcgcgcacccgcgatcctcgcgggccaccaaggggtcagggatctgccgtccttcaaagtgtccggggacggaggctgacctcaagccttgccgtttctggaccttgctgttcactttgggtcaggtttaattcagttcaggggctagtttttgagggtctgggtgttcggcgcggggctaaccaagatgccaggagggaaatacagggagcagagacgccctggctgccagctgctggcggctaggatggaacctttaaaggtgctggctcatcagagggtgagaaac

SEQ ID NO: 60009 - DNA, 999 bp, Artificial Sequence
  derived and/or modified sequence
atgttggcatggcaggacgggggagctaaggctgccccatctcatcacaaaatttctttctctgttcttgacatactggatcctcagaaatttactagggctgcattacctgctgtcaggccagctcctcgcgaagctaggaaaagcttagctgaggttgaggctggaaaggatgcgtcttcgcgggatcctgtgcggcagctggaaaccccaggacaaggatttgccgcttcactgctgacacggcaggcccatccacatcacagcagcgacgcccgagatgccgctgggccaggagcaggtcaagcgagcccccttgaaggatctgaggctgaagaggaggaagatgccgaggatccccgtcggccacgattgagggagagggcggcacgcctcctgcctggcttggcaaggtctccagacgcacctgccggagcactcgcctctggcgagccttgtgaagacggaggtggaggccctgtgaggtctcctcctggaagcccaggatctcccagaccaaggcggcgtagactcgaaccaaattgtgccaagccgagaagggctaggacagcgttcacatacgagcaactggtggcactggaaaataagtttagggccactaggtacctgtccgtgtgcgaacggttaaacttagccctcagcttgagcctgacagaaacccaggtaaaaatatggttccagaatagacgtacaaagtggaagaagcagaaccccggtgccgacggggctgcccaggtgggcggtggcgcaccgcagccaggtgccgctggtggtggtgggggtggaggcagtggtggatctcctggaccacccggaacaggcgctctccactttcagacctttccatcctattccgccgctaacgttttgttccctagtgcagcttcgttccctctaactgctgccgcaccgggttccccctttgcacctttcctgggcccatcctacctcactccattctacgctccaagactgtag

SEQ ID NO: 60010 - DNA, 933 bp, Artificial Sequence
  derived and/or modified sequence
atgctcgcctggcaggacggaggtgcaaaggctgcgcctagtcaccataaaatctccttttcagtgctggatatcctggatccacagaagttcaccagagccgcattgccggcagtcaggcctgctcccagagaggcgcgtaagtccctcgcagaggtcgaggcaggcaaggacgcgagtagcagagatcctgtccggcagctcgaaaccccagacgctgcgggtccgggtgctggccaagcatctcctctggaggggtctgaggctgaggaagaagaggacgctgaagaccccagacggcctcgcctccgcgagcgggcagctcgcctgctgcctggtttagccagaagcccggacgcaccagccggtgcgttggctagcggggagccctgcgaggatggagggggtggacctgtgcggtcacctccaggcagtccaggatcccccaggcctaggcggcgaaggctggaacctaattgtgccaagcctcgcagagccaggaccgcattcacttacgagcagctggtggcactcgaaaacaaatttcgggctactaggtacctgagtgtttgcgaaagactgaatttggccctgagcctctcactcaccgaaacacaagtgaagatctggtttcaaaataggagaacaaagtggaaaaagcagaaccccggagccgatggggctgcacaggtgggcggtggggcaccgcagcccggtgcagccggtggcggaggtggaggtggttctggaggctccccaggaccgccaggtacgggcgcactgcactttcaaacgttcccctcttattcagccgctaacgtgctgtttccctcggccgcttctttccctctgactgctgcagcgccagggagccccttcgctccatttttagggcctagttatctcacaccattctatgcacccagattatag

SEQ ID NO: 60011 - protein, 493 aa, Artificial Sequence
  derived and/or modified sequence
MCELYSKRDTLGLRKKHIGPSCKVFFASDPIKIVRAQRQYMFDENGEQYLDCINNVAHGVVKAALKQMELLNTNSRFLHDNIVEYAKRLSATLPEKLSVCYFTNSGSEANDLALRLARQFRGHQDVITLDHAYHGHLSSLIEISPYKFQKGKDVKKEFVHVAPTPDTYRGKYREDHADSASAYADEVKKIIEDAHNSGRKIAAFIAESMQSCGGQIIPPAGYFQKVAEYVHGAGGVFIADEVQVGFGRVGKHFWSFQMYGEDFVPDIVTMGKPMGNGHPVACVVTTKEIAEAFSSSGMEYFNTYGGNPVSCAVGLAVLDIIENEDLQGNAKRVGNYLTELLKKQKAKHTLIGDIRGIGLFIGIDLVKDHLKRTPATAEAQHIIYKMKEKRVLLSADGPHRNVLKIKPPMCFTEEDAKFMVDQLDRILTVLEEAMGTKTESVTSENTPCKTKMLKEAHIELLRDSTTDSKENPSRKRNGMCTDTHSLLSKRLKT

SEQ ID NO: 60012 - DNA, 1482 bp, Artificial Sequence
  derived and/or modified sequence
atgtgcgagctgtacagcaagagagacaccctgggcctgagaaagaagcacatcggccccagctgcaaggtgttcttcgccagcgaccccatcaagatcgtgagagcccagagacagtacatgttcgacgagaacggcgagcagtacctggactgcatcaacaacgtggcccacggcgtggtgaaggccgccctgaagcagatggagctgctgaacaccaacagcagattcctgcacgacaacatcgtggagtacgccaagagactgagcgccaccctgcccgagaagctgagcgtgtgctacttcaccaacagcggcagcgaggccaacgacctggccctgagactggccagacagttcagaggccaccaggacgtgatcaccctggaccacgcctaccacggccacctgagcagcctgatcgagatcagcccctacaagttccagaagggcaaggacgtgaagaaggagttcgtgcacgtggcccccacccccgacacctacagaggcaagtacagagaggaccacgccgacagcgccagcgcctacgccgacgaggtgaagaagatcatcgaggacgcccacaacagcggcagaaagatcgccgccttcatcgccgagagcatgcagagctgcggcggccagatcatcccccccgccggctacttccagaaggtggccgagtacgtgcacggcgccggcggcgtgttcatcgccgacgaggtgcaggtgggcttcggcagagtgggcaagcacttctggagcttccagatgtacggcgaggacttcgtgcccgacatcgtgaccatgggcaagcccatgggcaacggccaccccgtggcctgcgtggtgaccaccaaggagatcgccgaggccttcagcagcagcggcatggagtacttcaacacctacggcggcaaccccgtgagctgcgccgtgggcctggccgtgctggacatcatcgagaacgaggacctgcagggcaacgccaagagagtgggcaactacctgaccgagctgctgaagaagcagaaggccaagcacaccctgatcggcgacatcagaggcatcggcctgttcatcggcatcgacctggtgaaggaccacctgaagagaacccccgccaccgccgaggcccagcacatcatctacaagatgaaggagaagagagtgctgctgagcgccgacggcccccacagaaacgtgctgaagatcaagccccccatgtgcttcaccgaggaggacgccaagttcatggtggaccagctggacagaatcctgaccgtgctggaggaggccatgggcaccaagaccgagagcgtgaccagcgagaacaccccctgcaagaccaagatgctgaaggaggcccacatcgagctgctgagagacagcaccaccgacagcaaggagaaccccagcagaaagagaaacggcatgtgcaccgacacccacagcctgctgagcaagagactgaagacctag

SEQ ID NO: 60013 - DNA, 1482 bp, Artificial Sequence
  derived and/or modified sequence
atgtgtgaactgtattccaagcgcgacacactggggctgcgcaagaagcacatcgggccatcctgtaaggtcttcttcgcttctgatcctatcaaaatcgttagggctcagcggcagtatatgttcgatgaaaacggggagcagtatctcgactgtatcaataacgtggctcacggcgtcgtgaaagcagcattgaaacaaatggagctgctgaacacaaactctcgatttctgcacgacaacatagtagaatacgccaagagactctcagctacgttgccagaaaagctgtctgtctgctattttacaaactctggcagcgaagccaatgacctggcccttcgcctggcacgtcagttccgggggcatcaggacgtgattaccctcgaccacgcgtatcacggtcatctcagtagcctgattgagatcagcccgtacaagttccaaaaaggtaaagatgttaaaaaggagtttgtccacgttgccccgacccccgacacgtatagaggaaaatatcgagaggaccacgcggattctgctagcgcgtatgctgatgaagttaagaaaatcatagaggacgcacacaattcaggtcggaaaatcgctgctttcattgctgagagtatgcagtcatgtggaggccagataattcccccagccggttacttccagaaagtggccgaatatgtgcacggggcgggaggggtatttattgcggatgaagtgcaagtgggcttcggcagggtcggtaagcacttttggtcttttcaaatgtacggcgaggactttgttcctgatatcgtgaccatgggtaagcccatgggcaacggccatcctgtggcctgtgtcgttaccaccaaagagatcgccgaagcattctcttcgagcggcatggagtactttaatacttacggcggaaaccctgtgagttgcgccgtgggcttagccgtcctggacatcatcgagaatgaggatctgcagggtaacgccaagcgtgtgggcaattaccttaccgaacttctgaaaaagcaaaaggctaagcacaccctcataggcgacataagagggatcgggctttttattggaatcgacctcgtgaaagaccacttaaagcgaactcccgcaaccgccgaagctcagcacatcatatacaaaatgaaagaaaaaagggtgctgttgtctgcggacggcccccaccgaaatgtcctgaaaatcaagcccccaatgtgctttaccgaggaggatgcaaagtttatggtcgaccagctcgaccgaatcctcacagtgctggaggaagcaatgggaactaagacagagtcagtgaccagcgaaaacacaccctgcaagaccaagatgcttaaggaagcgcacatcgaactgcttagagatagtacaactgattctaaggagaaccctagccggaaacggaacggtatgtgcactgacacccacagcctattgtcaaaacgcctcaaaacatag

SEQ ID NO: 60014 - DNA, 1482 bp, Artificial Sequence
  derived and/or modified sequence
atgtgtgagctgtacagcaagagggacaccctgggcctgaggaagaagcacatcggccccagctgcaaggtgttctttgccagtgaccccatcaagatcgtgcgggcccagaggcagtacatgtttgatgaaaatggagagcagtacctggactgcatcaacaacgtggcccacggcgtggtgaaggccgccctgaagcagatggagctgctgaacaccaacagccgcttcctgcatgacaacatcgtggagtatgccaagaggctgagcgccaccctgcctgagaagctgtctgtgtgctacttcaccaacagcggcagcgaggccaatgacctggccctgcggctggcccggcagttccggggccaccaggatgtgatcaccctggaccacgcctaccacggccacctgagcagcctgattgagatcagcccctacaagttccagaagggcaaggatgtgaagaaggagtttgtgcacgtggcccccaccccagacacctaccggggcaagtaccgggaggaccatgctgacagcgccagcgcctatgcagatgaggtgaagaagatcattgaagatgcccacaacagcggcaggaagattgctgccttcatcgccgagagcatgcagagctgtggcggccagatcatccccccagctggctacttccagaaggtggccgagtatgtgcatggagctggaggagtcttcatcgcagatgaggtgcaggtgggcttcggccgggtgggcaagcacttctggagcttccagatgtatggagaagattttgtgcctgacatcgtgaccatgggcaagcccatgggaaatggccaccctgtggcctgtgtggtgaccaccaaggagattgctgaggccttcagcagcagcggcatggagtacttcaacacctacggcggcaaccctgtgtcctgtgctgtgggcctggccgtgctggacatcattgaaaatgaagacctgcagggcaatgccaagagggtgggcaactacctgacagagctgctgaagaagcagaaggccaagcacaccctgattggagacatccggggcatcggcctcttcatcggcatcgacctggtgaaggaccacctgaagaggaccccagccacagctgaggcccagcacatcatctacaagatgaaggagaagagggtgctgctgtctgcagatggcccccacagaaatgtgctgaagatcaagccacccatgtgcttcacagaggaggatgccaagttcatggtggaccagctggaccgcatcctgactgtgctggaggaggccatgggcaccaagacagagagcgtgaccagcgagaacaccccctgcaagaccaagatgctgaaggaggcccacatcgagctgctgcgggacagcaccacagacagcaaggagaaccccagcaggaagagaaatggcatgtgcacagacacccacagcctgctgagcaagaggctgaagacctag

SEQ ID NO: 60015 - DNA, 2028 bp, Artificial Sequence
  derived and/or modified sequence
gggataacgggaggaaggccggccggggccgccaaggcagtcccaggctcgcgtaggaggcgcgcagaccttgcaccttgcaccttcgcagcgccctgcaccccgccaccatgtgcgagctgtacagtaagcgggacactctggggctgaggaagaagcacatcgggccctcatgcaaagttttctttgcatcggatcccatcaaaatagtgagagcccagaggcagtacatgtttgatgagaacggtgaacagtacttggactgcatcaacaatgttgcccatggagtggtcaaagctgccctgaaacagatggaactgctaaatacaaattctcgattcctccacgacaacattgttgagtatgccaaacgcctttcagcaactctgccggagaaactctctgtttgttattttacaaattcaggatccgaagccaacgacttagccttacgcctggctcggcagttcagaggccaccaggatgtgatcactcttgaccatgcttaccatggtcacctatcatccttaattgagattagcccatataagtttcagaaaggaaaagatgtcaaaaaagaatttgtacatgtggcaccaactccagatacttacagaggaaaatatagagaagaccatgcagactcagccagtgcttatgcagatgaagtgaagaaaatcattgaagatgctcataacagtggaaggaagattgctgcctttattgctgaatccatgcagagttgtggcggacaaataattcctccagcaggctacttccagaaagtggcagaatatgtacacggtgcagggggtgtgtttatagctgatgaagttcaagtgggctttggcagagttgggaaacatttctggagcttccagatgtatggtgaagactttgttccagacatcgtcacaatgggaaaaccgatgggcaacggccacccggtggcatgtgtggtaacaaccaaagaaattgcagaagccttcagcagctctgggatggaatattttaatacgtatggaggaaatccagtatcttgtgctgttggtttggctgtcctggatataattgaaaatgaagaccttcaaggaaatgccaagagagtagggaattatctcactgagttactgaaaaaacagaaggctaaacacactttgataggagatattaggggcattggcctttttattggaattgatttagtgaaggaccatctgaaaaggacccctgccacagctgaagctcagcacatcatctacaagatgaaagaaaaacgagtgcttctcagtgccgatggacctcatagaaatgtacttaaaataaaaccacctatgtgcttcactgaagaagatgcaaagttcatggtggaccaacttgataggattctaacagttttagaagaagctatgggaaccaaaaccgaaagtgtgacctctgagaatactccatgcaaaacaaagatgctgaaagaagcccacatagaactgcttagggacagcaccactgactccaaagaaaatcccagcagaaagagaaatggaatgtgcacggatacacattcactgctcagtaagaggctcaagacatgactgatttgcattttaaagcaagatgcgatgtccagagttacagagaatgagtagatgtgtctcatcggttaatagctctattatacctctaaaggtggaattgtcagtttagattcataaatgaaaaggtaaatgagtaatcagaataaaccaagtgataatcaaaccatgtcaagattattagttcagactctagcctgttaattttcttagttgatttctgaagctacctgatttattctattaaattgtaagcttgcaaactcaaaataaattggcagatttacctctcatgttttaatgtgtcaaattagagagcaaagtataacaggtgccttcacttttgagacttagtgccttaaaatatgtattctataatgatttcatatataaaagtatatttattgactgtaataaaataaaatatgatgtaaac

SEQ ID NO: 60016 - DNA, 1482 bp, Artificial Sequence
  derived and/or modified sequence
atgtgcgagctgtacagcaagcgggacaccctgggcctgcggaagaagcatatcggccccagctgcaaggtattcttcgcctcagatccaataaaaattgtgcgagcccagagacaatacatgtttgacgaaaatggcgagcagtacctggattgcattaataatgtagcccacggcgtagtgaaagccgccttgaaacagatggaattactcaacactaacagccgctttctacacgacaatatcgtcgagtatgccaaacgcctgtccgctactttgcccgagaagctgtcagtgtgttattttaccaattccggatcagaggccaacgacctggcacttcgcttggccagacagttccgcggccatcaggatgttatcacacttgaccacgcctaccacgggcatttatcaagcctgatcgagataagtccatacaaattccagaagggcaaagacgtgaaaaaggagtttgtccacgtagctcctactcccgacacgtaccggggaaaataccgggaggatcatgccgactccgcgtctgcatacgctgacgaagtgaaaaagatcattgaggacgctcataactccggccgcaagattgcagcctttattgccgagtccatgcagagttgtggagggcaaatcatcccccctgctggctatttccagaaagtcgctgagtatgtgcatggtgccggcggggttttcatcgccgatgaggtccaagtcgggttcgggcgagtcgggaagcacttctggagctttcagatgtacggagaggattttgtgccagatatcgttactatgggtaaaccaatgggaaatggccatccggtggcctgtgtcgtgaccacaaaggagatcgcagaagctttctctagttcgggaatggaatatttcaatacttacggcggtaaccccgtctcctgtgccgtgggtctggctgtgctggatattatagagaatgaagatctgcagggaaacgctaagcgcgtgggaaactatttgaccgaactgctcaagaagcaaaaggcgaagcacactctgataggcgatatccgagggatcggactgttcataggaattgacctcgtcaaggatcacctgaagcgaacgcctgctactgcggaagcccagcatattatctataaaatgaaggagaaacgagttctgctgagcgcggacggccctcaccgaaacgtgctgaagattaaacctcctatgtgcttcactgaggaagacgccaagttcatggtggatcagctggatcgtattttaactgttcttgaggaagccatgggcacaaaaacagaatcggtcacaagtgaaaacacaccttgtaagaccaaaatgctgaaagaggctcatatcgaactattaagggacagtactaccgattctaaggagaatcccagcaggaaacggaacggaatgtgcaccgatacacattctctcctttctaagcggttaaaaacctag

SEQ ID NO: 60017 - DNA, 1482 bp, Artificial Sequence
  derived and/or modified sequence
atgtgcgagctatactcaaaaagggatactctggggctcaggaaaaagcatatcgggccttcctgtaaggtgttctttgctagcgaccctatcaagatagtgcgagcccagagacagtacatgtttgacgagaacggagaacaataccttgattgtatcaacaatgtagcccatggggttgttaaggctgcactgaagcagatggagttgctgaacaccaattcacgcttcctgcacgataacatcgtcgagtatgctaaacggctcagcgcgacgctcccggaaaagctcagcgtgtgctatttcacgaactctggttctgaagctaatgatctggcgctcaggctagcacgccaatttcgcggacaccaagacgtcataacgctggaccatgcctaccacggtcatctcagtagtttgatcgaaatcagcccgtacaagttccagaaaggtaaggatgttaaaaaggagttcgtacacgtagcaccaacaccagacacctaccggggaaaatatcgcgaagaccacgcagactctgcctccgcctacgcagacgaggtgaaaaagattattgaagacgcccacaattcaggtaggaaaatagccgcttttatcgccgagagcatgcagagttgcgggggacagataatccctccggctggatattttcagaaggtcgccgaatacgttcatggcgcaggcggagtgtttatcgcggatgaggtgcaggtcgggtttgggcgtgttggcaagcacttttggagtttccagatgtatggggaagattttgtgcccgacattgtaacaatgggcaaacccatgggcaatggtcaccctgtggcttgcgtggtaacaactaaggagattgccgaggccttttccagtagcggtatggaatattttaacacatacgggggaaatccagtctcatgcgcagtcgggctggctgtcctcgatattatcgaaaatgaagatctgcaggggaatgcaaaacgcgtgggaaactatctgaccgagttgctgaagaagcagaaggctaagcacacactgattggagacatcagggggatagggctgttcattggtatcgacctggtgaaggaccacctgaaacgaaccccagctactgccgaagctcagcacattatctacaagatgaaggaaaaacgggtactgctgtccgccgacggaccacatcggaacgtgctcaaaattaaacctcctatgtgtttcacggaggaggacgccaaatttatggtggatcagctcgaccgaatcctcaccgttcttgaagaagctatgggtacaaaaaccgaaagtgtgactagtgagaacactccgtgtaagaccaagatgctcaaggaagcacatatagaactgctgcgggacagcacgacagattcaaaagaaaatccttccagaaagagaaacgggatgtgtacagatacccatagtttattgagtaaacggcttaagacctag

SEQ ID NO: 60018 - protein, 441 aa, Artificial Sequence
  derived and/or modified sequence
MGHCHPGVVKAALKQMELLNTNSRFLHDNIVEYAKRLSATLPEKLSVCYFTNSGSEANDLALRLARQFRGHQDVITLDHAYHGHLSSLIEISPYKFQKGKDVKKEFVHVAPTPDTYRGKYREDHADSASAYADEVKKIIEDAHNSGRKIAAFIAESMQSCGGQIIPPAGYFQKVAEYVHGAGGVFIADEVQVGFGRVGKHFWSFQMYGEDFVPDIVTMGKPMGNGHPVACVVTTKEIAEAFSSSGMEYFNTYGGNPVSCAVGLAVLDIIENEDLQGNAKRVGNYLTELLKKQKAKHTLIGDIRGIGLFIGIDLVKDHLKRTPATAEAQHIIYKMKEKRVLLSADGPHRNVLKIKPPMCFTEEDAKFMVDQLDRILTVLEEAMGTKTESVTSENTPCKTKMLKEAHIELLRDSTTDSKENPSRKRNGMCTDTHSLLSKRLKT

SEQ ID NO: 60019 - DNA, 1326 bp, Artificial Sequence
  derived and/or modified sequence
atgggccactgccaccccggcgtggtgaaggccgccctgaagcagatggagctgctgaacaccaacagcagattcctgcacgacaacatcgtggagtacgccaagagactgagcgccaccctgcccgagaagctgagcgtgtgctacttcaccaacagcggcagcgaggccaacgacctggccctgagactggccagacagttcagaggccaccaggacgtgatcaccctggaccacgcctaccacggccacctgagcagcctgatcgagatcagcccctacaagttccagaagggcaaggacgtgaagaaggagttcgtgcacgtggcccccacccccgacacctacagaggcaagtacagagaggaccacgccgacagcgccagcgcctacgccgacgaggtgaagaagatcatcgaggacgcccacaacagcggcagaaagatcgccgccttcatcgccgagagcatgcagagctgcggcggccagatcatcccccccgccggctacttccagaaggtggccgagtacgtgcacggcgccggcggcgtgttcatcgccgacgaggtgcaggtgggcttcggcagagtgggcaagcacttctggagcttccagatgtacggcgaggacttcgtgcccgacatcgtgaccatgggcaagcccatgggcaacggccaccccgtggcctgcgtggtgaccaccaaggagatcgccgaggccttcagcagcagcggcatggagtacttcaacacctacggcggcaaccccgtgagctgcgccgtgggcctggccgtgctggacatcatcgagaacgaggacctgcagggcaacgccaagagagtgggcaactacctgaccgagctgctgaagaagcagaaggccaagcacaccctgatcggcgacatcagaggcatcggcctgttcatcggcatcgacctggtgaaggaccacctgaagagaacccccgccaccgccgaggcccagcacatcatctacaagatgaaggagaagagagtgctgctgagcgccgacggcccccacagaaacgtgctgaagatcaagccccccatgtgcttcaccgaggaggacgccaagttcatggtggaccagctggacagaatcctgaccgtgctggaggaggccatgggcaccaagaccgagagcgtgaccagcgagaacaccccctgcaagaccaagatgctgaaggaggcccacatcgagctgctgagagacagcaccaccgacagcaaggagaaccccagcagaaagagaaacggcatgtgcaccgacacccacagcctgctgagcaagagactgaagacctag

SEQ ID NO: 60020 - DNA, 1326 bp, Artificial Sequence
  derived and/or modified sequence
atggggcattgccacccaggcgtggtgaaggccgctctgaagcagatggagttgctaaatactaatagtcgatttttgcatgacaacattgtggagtacgctaagagactctctgctacgctcccagagaagctgtcagtctgctactttacaaatagcggatctgaagcaaacgacctcgctcttcgactggcaagacagttccgagggcatcaggacgtgataacactcgatcacgcttatcatgggcatctgagttctttgatcgaaatctctccttacaaatttcagaaaggtaaagacgtgaagaaagagttcgttcacgttgctcccacacctgacacatacagaggtaagtatcgtgaggatcacgcagattcagcttcagcatacgctgacgaagtcaaaaagatcatagaagacgcccacaattccgggagaaaaatcgcagctttcatcgccgagtcaatgcagagctgtggtgggcagatcatacctccagccggctactttcagaaagtcgcagagtacgttcacggtgccggtggggtcttcattgcagacgaagtccaggttggcttcggcagggtcgggaagcacttttggtcttttcaaatgtatggcgaagacttcgttccagatatcgtcacaatgggcaaaccaatggggaatggccaccccgtagcatgtgtggtgacaacgaaagagattgcagaagcctttagctcaagtggcatggagtacttcaacacttacggtggcaaccccgtgtcctgtgcagtgggtctggccgtgctcgatattatagaaaacgaggacctgcaaggcaacgcgaagcgcgttggtaattacctgaccgaactgttgaagaagcagaaagccaaacacaccctcatcggggatatccggggaatcggcctgttcatcggaatcgacctggtgaaagaccatctcaagcgaacacctgcaactgccgaggcccagcatattatctacaagatgaaggagaaacgcgtgttgctctcagcagacggaccacaccgtaacgtcctgaagattaagcctccgatgtgttttactgaggaagacgccaagttcatggtggatcagctggatagaattctgacagttctggaggaggcaatgggcacaaagacggaatctgtaactagcgagaacaccccctgcaaaaccaagatgcttaaggaagctcacattgagctccttcgggattcaacaacggatagcaaggagaatccctcccgcaagcgcaatgggatgtgtaccgacacacactctctgctcagtaaaaggctgaagacttag

SEQ ID NO: 60021 - DNA, 1326 bp, Artificial Sequence
  derived and/or modified sequence
atgggccactgccaccctggggtggtgaaggccgccctgaagcagatggagctgctgaacaccaacagccgcttcctgcatgacaacatcgtggagtatgccaagaggctgagcgccaccctgcctgagaagctgtctgtgtgctacttcaccaacagcggcagcgaggccaatgacctggccctgcggctggcccggcagttccggggccaccaggatgtgatcaccctggaccacgcctaccacggccacctgagcagcctgattgagatcagcccctacaagttccagaagggcaaggatgtgaagaaggagtttgtgcacgtggcccccaccccagacacctaccggggcaagtaccgggaggaccatgctgacagcgccagcgcctatgcagatgaggtgaagaagatcattgaagatgcccacaacagcggcaggaagattgctgccttcatcgccgagagcatgcagagctgtggcggccagatcatccccccagctggctacttccagaaggtggccgagtatgtgcatggagctggaggagtcttcatcgcagatgaggtgcaggtgggcttcggccgggtgggcaagcacttctggagcttccagatgtatggagaagattttgtgcctgacatcgtgaccatgggcaagcccatgggaaatggccaccctgtggcctgtgtggtgaccaccaaggagattgctgaggccttcagcagcagcggcatggagtacttcaacacctacggcggcaaccctgtgtcctgtgctgtgggcctggccgtgctggacatcattgaaaatgaagacctgcagggcaatgccaagagggtgggcaactacctgacagagctgctgaagaagcagaaggccaagcacaccctgattggagacatccggggcatcggcctcttcatcggcatcgacctggtgaaggaccacctgaagaggaccccagccacagctgaggcccagcacatcatctacaagatgaaggagaagagggtgctgctgtctgcagatggcccccacagaaatgtgctgaagatcaagccacccatgtgcttcacagaggaggatgccaagttcatggtggaccagctggaccgcatcctgactgtgctggaggaggccatgggcaccaagacagagagcgtgaccagcgagaacaccccctgcaagaccaagatgctgaaggaggcccacatcgagctgctgcgggacagcaccacagacagcaaggagaaccccagcaggaagagaaatggcatgtgcacagacacccacagcctgctgagcaagaggctgaagacctag

SEQ ID NO: 60022 - DNA, 1561 bp, Artificial Sequence
  derived and/or modified sequence
aggctcgcgtaggaggcgcgcagaccttgcaccttgcaccttcgcagcgccctgcaccccgccaccatgtgcgagctgtacagtaagcgggacactctggggctgaggaagaagcacatcgggtaagggcaccctggcccggaatgggacactgtcacccaggagtggtcaaagctgccctgaaacagatggaactgctaaatacaaattctcgattcctccacgacaacattgttgagtatgccaaacgcctttcagcaactctgccggagaaactctctgtttgttattttacaaattcaggatccgaagccaacgacttagccttacgcctggctcggcagttcagaggccaccaggatgtgatcactcttgaccatgcttaccatggtcacctatcatccttaattgagattagcccatataagtttcagaaaggaaaagatgtcaaaaaagaatttgtacatgtggcaccaactccagatacttacagaggaaaatatagagaagaccatgcagactcagccagtgcttatgcagatgaagtgaagaaaatcattgaagatgctcataacagtggaaggaagattgctgcctttattgctgaatccatgcagagttgtggcggacaaataattcctccagcaggctacttccagaaagtggcagaatatgtacacggtgcagggggtgtgtttatagctgatgaagttcaagtgggctttggcagagttgggaaacatttctggagcttccagatgtatggtgaagactttgttccagacatcgtcacaatgggaaaaccgatgggcaacggccacccggtggcatgtgtggtaacaaccaaagaaattgcagaagccttcagcagctctgggatggaatattttaatacgtatggaggaaatccagtatcttgtgctgttggtttggctgtcctggatataattgaaaatgaagaccttcaaggaaatgccaagagagtagggaattatctcactgagttactgaaaaaacagaaggctaaacacactttgataggagatattaggggcattggcctttttattggaattgatttagtgaaggaccatctgaaaaggacccctgccacagctgaagctcagcacatcatctacaagatgaaagaaaaacgagtgcttctcagtgccgatggacctcatagaaatgtacttaaaataaaaccacctatgtgcttcactgaagaagatgcaaagttcatggtggaccaacttgataggattctaacagttttagaagaagctatgggaaccaaaaccgaaagtgtgacctctgagaatactccatgcaaaacaaagatgctgaaagaagcccacatagaactgcttagggacagcaccactgactccaaagaaaatcccagcagaaagagaaatggaatgtgcacggatacacattcactgctcagtaagaggctcaagacatgactgatttgcattttaaagcaagatgcgatgtccagagttacagagaatgagtagatgtgtctcatcggttaatagctctattatacctctaa

SEQ ID NO: 60023 - DNA, 1326 bp, Artificial Sequence
  derived and/or modified sequence
atgggccactgccaccccggcgtggtgaaggccgccctgaagcagatggaacttttaaataccaattccaggttcctgcacgacaacattgtggagtacgccaaacgcttgtccgcgacgttgcctgagaagctgtctgtgtgctattttaccaactccggaagcgaagccaacgacctggctttacgccttgctcgccagttccgcggtcaccaggatgtgatcacactcgaccacgcctaccacggacacctgagctcactgatcgaaatctcaccctataagttccagaagggaaaagatgttaaaaaggagtttgtccatgtagcccctacccccgacacttaccgtggcaaatacagagaggatcacgctgattccgccagtgcttacgctgacgaagtgaagaagatcatagaggacgcacataatagcggacgcaagatcgctgcgttcatcgctgagagcatgcagagctgcggaggtcagatcattccccctgcagggtacttccagaaggttgccgaatacgtgcacggggcaggcggtgtttttatcgcagatgaagtgcaggttggttttgggagggtgggtaaacatttctggtcctttcagatgtacggtgaggattttgttccagacatcgtcaccatggggaaacccatggggaatgggcaccctgttgcgtgcgtggtcaccactaaagaaatcgctgaagccttctcaagtagcggaatggaatatttcaatacttatgggggaaatccggtctcttgcgccgtgggtctggcagttctggatattattgagaatgaagatctgcaaggaaacgccaagcgggttgggaactacctcacggagctcctgaaaaagcaaaaggctaaacataccctgattggagacatccggggcatcggactcttcatcgggatcgatctggtgaaggaccacctgaagcgtacacctgcgacggcggaagctcagcatatcatttataagatgaaagagaaacgggtgttgcttagtgcagatggtccacatcgcaacgtcctcaagataaagccaccaatgtgttttacagaggaagatgcaaaatttatggtggatcagctggacaggatcctcactgtacttgaggaggccatgggcaccaaaaccgagtccgtgacctcagaaaatacaccttgtaagactaagatgctaaaagaggcccacatcgaattactcagagatagcacaacagactcaaaagaaaacccatctagaaagcgcaatggaatgtgtaccgacacccactctctgttgagtaaaaggctgaagacttag

SEQ ID NO: 60024 - DNA, 1326 bp, Artificial Sequence
  derived and/or modified sequence
atgggccattgccatcctggcgtcgtcaaggctgccctcaagcagatggaactccttaacaccaactctcgttttctccatgataatattgttgagtacgccaagaggcttagcgccactcttccagagaaactgagcgtctgttatttcaccaacagcggcagcgaagctaatgacttggcactcagactggccagacagttccgaggacaccaggatgtgatcacactggaccatgcttatcacggacatctgtcatcacttattgaaattagcccctacaaatttcagaaaggcaaggacgtgaaaaaggaattcgtccacgtggccccaacacctgatacatacagagggaagtaccgcgaagaccatgcagatagtgcatctgcttacgccgacgaggtaaagaagatcattgaagatgcccataattctggccgaaaaatcgccgcatttattgctgagagtatgcagagttgtggcggacagatcatccctcccgctggatatttccagaaagtggcagagtatgtgcacggggctggcggagtgttcatagctgacgaagtgcaagtcggatttggacgtgtgggcaagcacttttggtcgttccagatgtatggtgaggatttcgttcctgatatcgtgaccatgggcaagccaatgggcaacggtcatccagtggcttgtgtggtaacaacaaaagaaattgctgaggccttttcttccagtgggatggagtatttcaatacttacgggggaaaccccgtcagttgtgctgtcgggctggccgttctggacattatcgaaaatgaggacctccagggcaatgccaagagggtcggcaactatcttacagagctgcttaagaagcaaaaagctaaacacacactgattggagatattaggggcatcggcctgtttattggaattgaccttgtaaaagaccatctcaaacggaccccagcaactgccgaggcccaacatattatctataagatgaaggaaaagagggttttgctgagtgcagacgggcctcaccgcaacgtgctcaaaattaaacctcccatgtgcttcacagaggaggatgcaaaattcatggtcgatcagctggatcgtatactcacggtgcttgaagaagctatgggaacgaagacagaatctgtgactagcgagaatactccgtgtaagaccaagatgctgaaggaagcccacattgagctactgcgggatagtacgaccgactccaaagaaaacccctctaggaaaagaaacggtatgtgcaccgacacacactcgttgctgagcaagcggttgaagacatag

SEQ ID NO: 60025 - DNA, 2442 bp, Artificial Sequence
  derived and/or modified sequence
atggaggttgcagaagtcgaaagccccctcaaccccagctgcaaaatcatgacctttcgcccaagtatggaagagtttcgggagttcaataagtatctggcctatatggaaagcaaaggggctcatcgggcagggctcgccaaagtcattcccccaaaagaatggaagccccgacagtgctacgacgacatcgacaacttgctgatcccagcgcctatacaacagatggtcaccggtcagtcagggttatttacacaatacaatatccaaaagaaagcaatgaccgtcaaagaattcagacagttggcaaattccggtaaatactgcactccacggtacttggattatgaggatttagaaagaaagtactggaaaaatttgacgtttgtcgctcccatctatggcgctgatattaatggaagtatttacgacgagggtgtagatgagtggaacatcgcacgactgaacacggtgttggatgtagtcgaagaggagtgcggtatttcaatcgagggcgtgaacacaccgtatctgtacttcggaatgtggaaaaccacttttgcctggcacactgaggacatggacctctactcaattaactacctgcactttggggaacctaaaagctggtacgctattccccccgagcacggaaaaagactcgaaaggctggcacagggtttcttcccctcaagctcacagggttgtgacgccttcctccgtcacaaaatgactctcatctcccctagcgtgctcaaaaagtacgggatacctttcgataaaatcacacaggaggcaggggagtttatgatcaccttcccctatggctatcacgcgggctttaatcatggcttcaactgcgcagagtctaccaattttgctacagtccggtggatcgattacggaaaggtcgccaagctttgtacttgtagaaaggatatggtgaagatatcaatggatatctttgtgagaaaattccaacctgatcgatatcagctttggaaacaaggcaaggatatttacacaatcgatcatactaagcccacacctgcatcaacgcctgaagtgaaggcctggctgcagcgacgtcgcaaagtccggaaggcatctaggagttttcaatgtgcacgctcgacctccaaacgccctaaggctgacgaagaggaagaggtgagcgacgaggttgatggggcagaggttccaaatccggactctgtgaccgatgatttaaaggtctccgagaaatcagaggcagctgttaaactgaggaacacggaggccagttcagaggaggagagtagtgccagccggatgcaagtggagcaaaatctgtctgaccacatcaagctgtcaggcaacagttgcctgtccacatccgtcaccgaggatattaagactgaggacgacaaagcttacgcttacagatccgtgccttccatttcgagtgaggcagacgactccatcccactaagttctggctatgagaagccagagaagtcagatccttccgaactgtcctggcctaagagccccgagtcgtgttccagcgtcgccgaatcaaacggggtgctgacagagggggaggaatcggacgttgagagtcatggaaacgggctcgagccaggcgaaatcccagcggtgccatctggtgagcggaatagcttcaaggtgccatctatcgccgaaggagagaacaagactagcaaaagctggaggcacccactgtcccggcccccagccagatccccaatgacacttgtgaagcagcaggcaccctccgatgaagagctccccgaggtgctgagtattgaggaagaggtggaggagaccgaaagttgggcgaaaccccttattcatctctggcaaacaaaatcacctaatttcgccgccgagcaggagtataacgctaccgtggccaggatgaagcctcattgcgcgatttgcactctgctgatgccttatcataagccagattcttccaacgaagaaaatgacgcccggtgggaaacgaagctggacgaagtcgttaccagcgagggcaaaacaaagcccctgattccagagatgtgttttatttactctgaggagaacatcgaatactcaccccccaacgccttcctggaagaagatggaaccagtctgctgatctcttgcgccaagtgctgtgtccgcgtgcatgccagctgttacgggatcccttcccacgaaatttgtgacggatggctatgtgctcgctgtaagagaaatgcgtggacggcagaatgttgtctgtgcaatttgcgcgggggtgctttgaaacaaactaagaataataaatgggcccatgtgatgtgtgccgtcgcggtacccgaggtgaggttcaccaatgtcccggaacgaacgcagatcgacgtcggccgcattcctttgcagcgtcttaaactcgggcggctgggtatttag

SEQ ID NO: 60026 - DNA, 2442 bp, Artificial Sequence
  derived and/or modified sequence
atggaggtggccgaggtggagagccccctgaaccccagctgcaagatcatgaccttccggcccagcatggaggagttccgggagttcaacaagtacctggcctacatggagagcaaaggagcccaccgggccggcctggccaaggtgattcctcccaaggagtggaagccccggcagtgctatgatgacatcgacaacctgctgatcccagcccccatccagcagatggtgacaggccagagcggcctcttcacccagtacaacatccagaagaaggccatgacagtgaaggagttccggcagctggccaacagcggcaagtactgcaccccccgctacctggactatgaggacctggagaggaagtactggaagaacctgacctttgtggcccccatctacggggctgacatcaatggcagcatctatgatgagggcgtggatgagtggaacatcgcccggctgaacacagtgctggatgtggtggaggaggagtgtggcatcagcattgagggcgtgaacaccccctacctgtacttcggcatgtggaagaccacctttgcctggcacacagaggacatggacctgtacagcatcaactacctgcactttggagagcccaagtcctggtacgccatccccccagagcacggcaagaggctggagcggctggcccagggcttcttccccagcagcagccagggctgtgatgccttcctgcggcacaagatgaccctcatcagccccagcgtgctgaagaagtatggcatcccctttgacaagatcacccaggaggccggggagttcatgatcaccttcccctacggctaccacgccggcttcaaccacggcttcaactgtgccgagagcaccaactttgccaccgtgcgctggattgattatggcaaggtggccaagctgtgcacctgcaggaaggacatggtgaagatctccatggacatctttgtgaggaagttccagcctgaccgctaccagctgtggaagcagggcaaggacatctacaccatcgaccacaccaagcccaccccagccagcaccccagaggtgaaggcctggctgcagaggaggaggaaggtgaggaaggccagccgctccttccagtgtgcccggagcaccagcaagaggcccaaggcagatgaggaggaggaggtgtctgatgaggtggatggagctgaggtgcccaacccagattctgtgacagatgacctgaaggtgtctgagaagtctgaggccgctgtgaagctgaggaacacagaggccagcagcgaggaggagagcagcgccagcaggatgcaggtggagcagaacctgagtgaccacatcaagctgagcggcaacagctgcctgagcacctctgtgacagaggacatcaagacagaagatgacaaggcctatgcctacagatctgtgcccagcatcagcagcgaggctgatgacagcatccccctgagcagcggctatgagaagccagagaagagtgaccccagcgagctgtcctggcccaagagccctgagagctgcagctctgtggccgagagcaatggagtgctgacagaaggagaggagagtgatgtggagagccatggaaatggcctggagcctggagagatcccagctgtgcccagcggggagaggaacagcttcaaggtgcccagcattgctgagggggagaacaagaccagcaagtcctggaggcaccccctgagccggcccccagcccggagccccatgaccctggtgaagcagcaggcccccagtgatgaggagctgcctgaggtgctgagcattgaggaggaggtggaggagacagagagctgggccaagcccctcatccacctgtggcagaccaagagccccaactttgctgctgagcaggagtacaatgccaccgtggccaggatgaagccccactgtgccatctgcaccctgctgatgccctaccacaagccagacagcagcaatgaagaaaatgatgcccgctgggagaccaagctggatgaggtggtgaccagcgagggcaagaccaagcccctcatccctgagatgtgcttcatctacagcgaggagaacatcgagtacagccccccaaatgccttcctggaggaggatggcaccagcctgctgatcagctgtgccaagtgctgcgtgcgggtgcacgccagctgctacggcatccccagccatgagatctgtgatggctggctgtgtgcccgctgcaagagaaatgcctggacagctgagtgctgcctgtgcaacctgcggggcggggccctgaagcagaccaagaacaacaagtgggcccacgtgatgtgtgctgtggccgtgcctgaggtgcgcttcaccaacgtgcctgagaggacccagattgatgtgggccgcatccccctgcagaggctgaagctgggccgcctgggcatctag

SEQ ID NO: 60027 - DNA, 2442 bp, Artificial Sequence
  derived and/or modified sequence
atggaggtggccgaggtggagagccccctgaaccccagctgcaagatcatgaccttcagaccatcaatggaggaatttagggagtttaacaagtacctggcctacatggaatcgaaaggagcgcacagggcaggtttagcaaaggtcattccaccaaaggagtggaagccccggcagtgttatgatgatattgacaacctactgatcccagctccgattcagcaaatggtgaccggtcagagtggtctgtttacccaatataatattcagaagaaggcaatgacagtcaaagagtttcggcaacttgcaaactcgggcaagtactgcactccaaggtacttggattacgaggatctggagagaaaatattggaagaacctgacctttgtagcgccgatctacggggccgacatcaacggctccatctacgacgagggcgtcgatgagtggaacattgccagactcaatacagttttagacgtggtcgaggaagagtgcggcattagcatagaaggggtgaatacaccctatctgtacttcgggatgtggaagacgaccttcgcttggcacaccgaagacatggacctttactcgattaactacctccattttggagaacctaagtcatggtatgcaatcccccccgagcatggaaaaagactggagcggcttgctcagggcttcttcccgagctcctcacagggatgcgatgccttcctacggcacaaaatgacgctgatctctccgtctgtgctgaaaaagtatggcataccatttgacaaaatcacccaggaggccggggagttcatgattactttcccatacggctatcatgcaggatttaatcatgggtttaactgtgccgagtctacaaatttcgccactgtaaggtggatcgattatggaaaggtggccaagctgtgcacctgccgcaaagatatggtcaaaatttcgatggacatttttgtcaggaagttccagccagatagataccagctgtggaaacaggggaaagatatctatacaatcgatcacaccaaaccaaccccagcatcaacacccgaagtcaaggcctggttacagaggaggaggaaagtgcgtaaagcctcccgatcgtttcaatgcgcacggagcaccagcaagcgcccgaaggccgacgaggaggaagaagtgtccgatgaggttgatggcgccgaggtgcctaaccctgattctgtcaccgatgacctcaaggtgagtgaaaagagtgaggccgccgttaagcttagaaacaccgaggcctccagcgaggaggaatcttctgccagccgtatgcaggtggaacagaacctctctgaccatatcaaactgagcggaaacagctgcctaagtaccagcgtgactgaagacatcaagacggaggacgacaaggcttacgcctaccgatccgtgccatccatatcctctgaggctgacgactccattcccctcagttcaggctacgaaaagcctgagaaatccgatccatccgagcttagctggcccaaaagccctgaatcctgtagtagtgtggcggaatccaacggcgtcttgaccgaaggcgaggaatcagacgtagaatcacatggtaatggattagaacctggggagatcccggccgtaccttcaggcgaaagaaattccttcaaggtgcctagcatcgccgagggagagaacaagaccagcaagagttggagacatccactcagccggcctcccgccagatcgcccatgacactggttaagcagcaggcgccttctgatgaagaactgccagaagtcttgagtatcgaggaagaggtggaggaaactgaatcctgggcgaagcctcttatacacctgtggcagacaaaatcccccaactttgccgcggaacaggagtataatgctacagtggcacgaatgaagccacactgcgccatttgtacattactcatgccataccacaaacccgactcatcaaacgaagagaatgacgcccgttgggaaactaagttagacgaagtagtgacaagtgagggaaagacaaaacccctgatccctgaaatgtgtttcatttactcagaggaaaatattgaatactcccccccaaacgcttttctggaggaagacgggacatccctgctgatcagttgcgcaaaatgctgtgtgcgcgttcacgcttcctgttatgggatcccctcacacgagatctgtgatggctggctgtgtgcccgctgcaaacgcaatgcctggacagcagaatgttgcctctgcaatcttcgtgggggcgccctgaagcaaacgaaaaataataagtgggcccatgtgatgtgtgctgtggccgtgccggaagttagatttacaaatgtccctgaacggacccaaatcgacgtcggcaggatccccctgcagaggttaaaacttggcagactcggaatctag

SEQ ID NO: 60028 - DNA, 2442 bp, Artificial Sequence
  derived and/or modified sequence
atggaagttgcggaggtggaatcccccctcaacccgtcctgcaagataatgacctttcgcccttccatggaggagttcagggagtttaacaagtaccttgcgtacatggaaagcaaaggtgcccacagagctgggttagccaaagtaatcccacccaaggagtggaaaccacgccagtgttatgacgacatagacaacctcctgattcccgctcctattcaacagatggtgaccggacagagcggattgtttacccagtataatatccaaaagaaggcaatgacggtgaaagagtttcgacagctggccaatagcggaaaatactgcacaccgaggtacctggactacgaagaccttgaacggaagtactggaaaaacctgacattcgttgcacccatttatggcgcagacatcaacggatcaatatacgatgaaggtgttgacgaatggaacatagctcgactcaataccgttctcgatgtggtggaggaagagtgtgggatctctatcgagggggtgaacaccccatacctgtactttggaatgtggaaaacgacatttgcatggcacactgaagacatggacctttactctatcaattatttacacttcggagaacctaaatcctggtatgccattccacccgaacacgggaagagactcgaacggctcgctcagggctttttcccaagttcaagccaagggtgtgacgcctttctcaggcataagatgactcttataagtcccagcgttctgaaaaagtacggaattcccttcgataaaataacacaagaggccggagaatttatgattaccttcccatatgggtaccacgcagggtttaatcacggattcaattgcgcagaatccacaaactttgccacagtgaggtggattgattatggcaaggttgccaaactgtgtacttgcaggaaggacatggtgaagattagcatggatatcttcgtgcggaagtttcagccagaccgatatcagctctggaagcagggcaaagatatttatactatagaccacaccaaaccgacgccagcttccacccccgaggtgaaggcatggttacagcggcgacggaaggtgagaaaggctagtagatcctttcaatgtgctaggtccacttccaagaggccaaaggccgatgaggaagaagaggtttccgatgaagtagatggagctgaagtaccgaaccccgattcagttaccgatgatttgaaagtctcagaaaagagcgaggccgcagtcaagctccgtaacacagaagccagctctgaggaggaaagcagcgcctctagaatgcaggtggagcagaacctgtccgatcacattaaactgtctggaaactcctgcctgagtactagtgtgaccgaagacatcaaaaccgaagatgacaaggcttatgcctacaggagcgtgccttcgatctcgagcgaagccgacgatagcatccctctttcctccgggtatgagaagccggaaaaatctgacccttccgagctttcttggcctaagtctcctgagtcttgctcctcagttgccgaatccaacggagttcttaccgagggagaagaatcagacgtggagagtcacggtaacgggttggagcccggagagataccagctgtgccaagcggggagcgaaacagtttcaaggtgccttctatcgcggaaggagaaaacaagacaagcaagtcatggcgccatcctttgtcacggcctcccgctaggtcccccatgacactcgtcaagcagcaggctccatctgacgaagaacttccagaggtactgtcgattgaagaggaggtcgaggagacagagtcctgggctaagcccctgattcatctctggcaaaccaaatcccctaactttgccgcagagcaggaatacaacgccactgtggctagaatgaagccacattgcgccatctgcactttactgatgccttatcacaaaccagacagctccaatgaagaaaatgacgcgcgttgggagactaaactagatgaagtggtcacctccgaaggtaagacaaagccactgatcccggagatgtgcttcatctactcagaagaaaatatcgagtattcccctcccaacgcatttctggaagaggacggaacttctctgctgatctcttgtgctaagtgctgcgtgcgggtgcatgcaagttgttacggaatccccagccatgaaatttgtgacggatggctttgtgcacgttgtaaacgtaacgcctggaccgcagagtgctgcctgtgcaacctcaggggaggggctctgaagcagactaaaaataataagtgggctcatgtcatgtgtgcagttgcggtgccggaagtgaggttcacaaatgtgcctgagcgcacacaaatagacgtgggtagaattcctctgcagcgtcttaagctcggtaggttgggaatctag

SEQ ID NO: 60029 - DNA, 2442 bp, Artificial Sequence
  derived and/or modified sequence
atggaggtggccgaggtggagagccccctgaaccccagctgcaagatcatgaccttcagacccagcatggaggagttcagagagttcaacaagtacctggcctacatggagagcaagggcgcccacagagccggcctggccaaggtgatcccccccaaggagtggaagcccagacagtgctacgacgacatcgacaacctgctgatccccgcccccatccagcagatggtgaccggccagagcggcctgttcacccagtacaacatccagaagaaggccatgaccgtgaaggagttcagacagctggccaacagcggcaagtactgcacccccagatacctggactacgaggacctggagagaaagtactggaagaacctgaccttcgtggcccccatctacggcgccgacatcaacggcagcatctacgacgagggcgtggacgagtggaacatcgccagactgaacaccgtgctggacgtggtggaggaggagtgcggcatcagcatcgagggcgtgaacaccccctacctgtacttcggcatgtggaagaccaccttcgcctggcacaccgaggacatggacctgtacagcatcaactacctgcacttcggcgagcccaagagctggtacgccatcccccccgagcacggcaagagactggagagactggcccagggcttcttccccagcagcagccagggctgcgacgccttcctgagacacaagatgaccctgatcagccccagcgtgctgaagaagtacggcatccccttcgacaagatcacccaggaggccggcgagttcatgatcaccttcccctacggctaccacgccggcttcaaccacggcttcaactgcgccgagagcaccaacttcgccaccgtgagatggatcgactacggcaaggtggccaagctgtgcacctgcagaaaggacatggtgaagatcagcatggacatcttcgtgagaaagttccagcccgacagataccagctgtggaagcagggcaaggacatctacaccatcgaccacaccaagcccacccccgccagcacccccgaggtgaaggcctggctgcagagaagaagaaaggtgagaaaggccagcagaagcttccagtgcgccagaagcaccagcaagagacccaaggccgacgaggaggaggaggtgagcgacgaggtggacggcgccgaggtgcccaaccccgacagcgtgaccgacgacctgaaggtgagcgagaagagcgaggccgccgtgaagctgagaaacaccgaggccagcagcgaggaggagagcagcgccagcagaatgcaggtggagcagaacctgagcgaccacatcaagctgagcggcaacagctgcctgagcaccagcgtgaccgaggacatcaagaccgaggacgacaaggcctacgcctacagaagcgtgcccagcatcagcagcgaggccgacgacagcatccccctgagcagcggctacgagaagcccgagaagagcgaccccagcgagctgagctggcccaagagccccgagagctgcagcagcgtggccgagagcaacggcgtgctgaccgagggcgaggagagcgacgtggagagccacggcaacggcctggagcccggcgagatccccgccgtgcccagcggcgagagaaacagcttcaaggtgcccagcatcgccgagggcgagaacaagaccagcaagagctggagacaccccctgagcagaccccccgccagaagccccatgaccctggtgaagcagcaggcccccagcgacgaggagctgcccgaggtgctgagcatcgaggaggaggtggaggagaccgagagctgggccaagcccctgatccacctgtggcagaccaagagccccaacttcgccgccgagcaggagtacaacgccaccgtggccagaatgaagccccactgcgccatctgcaccctgctgatgccctaccacaagcccgacagcagcaacgaggagaacgacgccagatgggagaccaagctggacgaggtggtgaccagcgagggcaagaccaagcccctgatccccgagatgtgcttcatctacagcgaggagaacatcgagtacagcccccccaacgccttcctggaggaggacggcaccagcctgctgatcagctgcgccaagtgctgcgtgagagtgcacgccagctgctacggcatccccagccacgagatctgcgacggctggctgtgcgccagatgcaagagaaacgcctggaccgccgagtgctgcctgtgcaacctgagaggcggcgccctgaagcagaccaagaacaacaagtgggcccacgtgatgtgcgccgtggccgtgcccgaggtgagattcaccaacgtgcccgagagaacccagatcgacgtgggcagaatccccctgcagagactgaagctgggcagactgggcatctag

SEQ ID NO: 60030 - protein, 835 aa, Artificial Sequence
  derived and/or modified sequence
MKHYGLPWKRTEEAAADTALTIMEVAEVESPLNPSCKIMTFRPSMEEFREFNKYLAYMESKGAHRAGLAKVIPPKEWKPRQCYDDIDNLLIPAPIQQMVTGQSGLFTQYNIQKKAMTVKEFRQLANSGKYCTPRYLDYEDLERKYWKNLTFVAPIYGADINGSIYDEGVDEWNIARLNTVLDVVEEECGISIEGVNTPYLYFGMWKTTFAWHTEDMDLYSINYLHFGEPKSWYAIPPEHGKRLERLAQGFFPSSSQGCDAFLRHKMTLISPSVLKKYGIPFDKITQEAGEFMITFPYGYHAGFNHGFNCAESTNFATVRWIDYGKVAKLCTCRKDMVKISMDIFVRKFQPDRYQLWKQGKDIYTIDHTKPTPASTPEVKAWLQRRRKVRKASRSFQCARSTSKRPKADEEEEVSDEVDGAEVPNPDSVTDDLKVSEKSEAAVKLRNTEASSEEESSASRMQVEQNLSDHIKLSGNSCLSTSVTEDIKTEDDKAYAYRSVPSISSEADDSIPLSSGYEKPEKSDPSELSWPKSPESCSSVAESNGVLTEGEESDVESHGNGLEPGEIPAVPSGERNSFKVPSIAEGENKTSKSWRHPLSRPPARSPMTLVKQQAPSDEELPEVLSIEEEVEETESWAKPLIHLWQTKSPNFAAEQEYNATVARMKPHCAICTLLMPYHKPDSSNEENDARWETKLDEVVTSEGKTKPLIPEMCFIYSEENIEYSPPNAFLEEDGTSLLISCAKCCVRVHASCYGIPSHEICDGWLCARCKRNAWTAECCLCNLRGGALKQTKNNKWAHVMCAVAVPEVRFTNVPERTQIDVGRIPLQRLKLGRLGI

SEQ ID NO: 60031 - protein, 813 aa, Artificial Sequence
  derived and/or modified sequence
MEVAEVESPLNPSCKIMTFRPSMEEFREFNKYLAYMESKGAHRAGLAKVIPPKEWKPRQCYDDIDNLLIPAPIQQMVTGQSGLFTQYNIQKKAMTVKEFRQLANSGKYCTPRYLDYEDLERKYWKNLTFVAPIYGADINGSIYDEGVDEWNIARLNTVLDVVEEECGISIEGVNTPYLYFGMWKTTFAWHTEDMDLYSINYLHFGEPKSWYAIPPEHGKRLERLAQGFFPSSSQGCDAFLRHKMTLISPSVLKKYGIPFDKITQEAGEFMITFPYGYHAGFNHGFNCAESTNFATVRWIDYGKVAKLCTCRKDMVKISMDIFVRKFQPDRYQLWKQGKDIYTIDHTKPTPASTPEVKAWLQRRRKVRKASRSFQCARSTSKRPKADEEEEVSDEVDGAEVPNPDSVTDDLKVSEKSEAAVKLRNTEASSEEESSASRMQVEQNLSDHIKLSGNSCLSTSVTEDIKTEDDKAYAYRSVPSISSEADDSIPLSSGYEKPEKSDPSELSWPKSPESCSSVAESNGVLTEGEESDVESHGNGLEPGEIPAVPSGERNSFKVPSIAEGENKTSKSWRHPLSRPPARSPMTLVKQQAPSDEELPEVLSIEEEVEETESWAKPLIHLWQTKSPNFAAEQEYNATVARMKPHCAICTLLMPYHKPDSSNEENDARWETKLDEVVTSEGKTKPLIPEMCFIYSEENIEYSPPNAFLEEDGTSLLISCAKCCVRVHASCYGIPSHEICDGWLCARCKRNAWTAECCLCNLRGGALKQTKNNKWAHVMCAVAVPEVRFTNVPERTQIDVGRIPLQRLKLGRLGI

SEQ ID NO: 60032 - DNA, 3405 bp, Artificial Sequence
  derived and/or modified sequence
atggctgacatgatggtctgtgacctgaaagttgttgaatagttggagtgttctgcattcatgtggaagaggctaaaggatgtttgatgaagcactatgggctgccctggaagaggactgaagaagcagctgcagacactgccctaaccatcatggaggtggccgaggtggaaagtcctctgaaccccagctgtaagataatgaccttcagaccctccatggaggagttccgggagttcaacaaataccttgcatacatggagtctaaaggagcccatcgtgcgggtcttgcaaaggtgattcctcctaaggagtggaagccaagacagtgctatgatgacattgataatttgctcattccagcaccaattcagcagatggtcacagggcagtcaggactgttcactcagtacaacatccagaaaaaagcgatgactgtgaaggagttcaggcagctggccaacagtggcaaatattgtactccaagatacttggattacgaagatttggagcgcaagtactggaagaacttaacttttgtggcacctatctatggtgcagatattaatgggagcatatatgatgagggtgtggatgaatggaacatagctcgcctcaatacagtcttggatgtggttgaagaagagtgtggcatttctattgagggtgtaaataccccatatctctattttggcatgtggaagaccacgtttgcatggcacaccgaagacatggacctctatagcattaattatctccactttggagagcccaagtcttggtatgctatacctccggagcatggaaaacgacttgaaagactagctcaaggttttttcccaagcagctcccaagggtgtgatgcatttcttcgccacaagatgacattgatttctccatcagtattgaagaaatatggtattccctttgacaagataacccaggaggctggagaattcatgatcactttcccatatggctaccatgctggttttaatcatggtttcaactgtgcagaatctacaaattttgctactgtcagatggattgactatggaaaagttgccaaattgtgcacttgcaggaaagacatggtgaagatttcaatggatatctttgtgaggaaatttcagccagacagatatcagctttggaaacaaggaaaggatatatacaccattgatcacacgaagcctactccagcatccacccctgaagtaaaagcatggctgcagaggaggaggaaagtaagaaaagcatcccgaagcttccagtgtgctaggtctacctctaaaaggcctaaggctgatgaggaagaggaagtgtcagatgaagtcgatggggcagaggtccctaaccccgactcagtcacagatgacctcaaggtcagtgaaaagtcagaagcagcagtgaagctgaggaacacagaagcatcttcagaagaagagtcatctgctagcaggatgcaggtggagcagaatttatcagatcatatcaaactctcaggaaacagctgcttaagtacatctgtaacagaagacataaaaactgaggatgacaaagcttatgcatatagaagtgtaccttctatatccagtgaggctgatgattccattccattgtctagtggctatgagaagcccgagaaatcagacccatccgagctttcatggccaaagtcacctgagtcatgctcatcagtggcagagagtaatggtgtgttaacagagggagaagagagtgatgtggagagccatgggaatggccttgaacctggggaaatcccagcggtccccagtggagagagaaatagcttcaaagtccccagtatagcagagggagagaacaaaacctctaagagttggcgccatccacttagcaggcctccagcaagatctccgatgactcttgtgaagcagcaggcgccaagtgatgaagaattgcctgaggttctgtccattgaggaggaagtggaagaaacagagtcttgggcgaaacctctcatccacctttggcagacgaagtcccctaacttcgcagctgagcaagagtataatgcaacagtggccaggatgaagccacactgtgccatctgcactctgctcatgccgtaccacaagccagatagcagcaatgaagaaaatgatgctagatgggagacaaaattagatgaagtcgttacatcggagggaaagactaagcccctcataccagagatgtgttttatttatagtgaagaaaatatagaatattctccacccaatgccttccttgaagaggatggaacaagtctccttatttcctgtgcaaagtgctgcgtacgggttcatgcaagttgttatggtattccttctcatgagatctgtgatggatggctgtgtgcccggtgcaaaagaaatgcgtggacagcagaatgctgtctctgcaatttgagaggaggtgctcttaagcaaacgaagaacaataagtgggcccatgtcatgtgcgccgttgcggtcccagaagttcgattcactaatgtcccagaaaggacacaaatagatgtaggcagaatacctttacagaggttaaaattgggaaggctgggaatctagacacagcaacagtaacaacaacaacaataacaatgaaggctcactgtgaaaacatcaattcattaggaaagttacatcccctccgccactgtttcagatgctgtttctcattctccatgggagcagccagcatcgtgtttaggatggggatacaatagcctgagctcctgattgagtcagaccctggactttcccttttgtatctgtcattttcctctggatcctcacacctttgtgtttaatttttttaaatttcatttgttgacttcctatgtggggtaaaatgacttcctttgattaatgtactttctgtatcctagagtttccctttccctttgtgatttagtccaacgtgtcctactacagcctcaaaaattgtcattggaatcaaaagctttccaaggtgcatcaggttaatgatttggatgcatcctgaggttgtctcctgtagcatggaggcattataataggagtctcagaagttacaccatttttctacagcacatcacaggcccagaggcttgaatctaagagaatccactctatgtctgtcagcctgaatccttccttcttgctgcacaacaaagcaactgaacgtattttgagtttaggtgaaaactatcactcattcatcaaagttctatctgggtgatatatgctatcgaaacagatgtggacactgggctgacagatgttgagaacggacctgttgctgaagctcatgttatcacacatgctgtgggaagagaggtcattggcattcaagatgcaacacctacaatatggtgaattaaagatgccatttgcatgg

SEQ ID NO: 60033 - DNA, 3833 bp, Artificial Sequence
  derived and/or modified sequence
gccataggtgcgcgtcggcgcccaggaggacgtgtggcgcgtggactacatcaggtccagccctgcgggaccccagccagcgcttccgggcaaggttctgtgcacctgttttctccttctacgcgagtatctttcccctccggaaagaatgggatatgcctgtgtccaaaggacaagaagatgcgcgccagcaagcctaagttaaccacagcgcggaagttgagcccaaagcaagagcgtgccgggcacctttaagctgtttgtaagcccacgtgactcaccaagtgcgggccccagcggtcacgtgacggcgcgcgcgccctcgcgcagggagagccggcggtgcgcgcgccttcgccgctgcctcccacccaccccctcgacgggagggtgaggcgcggcgcagtgatcgggcggccggggtcctgtgcgcgtgcgcagcgaacagctgtcacctagtgcggaacaagtctcccaaatttcccaaatctccctgggccggaggccactgtcttctcttcctcctccaccgagtcgtgctctcgccccaacccgcgcgccagacactgccctaaccatcatggaggtggccgaggtggaaagtcctctgaaccccagctgtaagataatgaccttcagaccctccatggaggagttccgggagttcaacaaataccttgcatacatggagtctaaaggagcccatcgtgcgggtcttgcaaaggtgattcctcctaaggagtggaagccaagacagtgctatgatgacattgataatttgctcattccagcaccaattcagcagatggtcacagggcagtcaggactgttcactcagtacaacatccagaaaaaagcgatgactgtgaaggagttcaggcagctggccaacagtggcaaatattgtactccaagatacttggattacgaagatttggagcgcaagtactggaagaacttaacttttgtggcacctatctatggtgcagatattaatgggagcatatatgatgagggtgtggatgaatggaacatagctcgcctcaatacagtcttggatgtggttgaagaagagtgtggcatttctattgagggtgtaaataccccatatctctattttggcatgtggaagaccacgtttgcatggcacaccgaagacatggacctctatagcattaattatctccactttggagagcccaagtcttggtatgctatacctccggagcatggaaaacgacttgaaagactagctcaaggttttttcccaagcagctcccaagggtgtgatgcatttcttcgccacaagatgacattgatttctccatcagtattgaagaaatatggtattccctttgacaagataacccaggaggctggagaattcatgatcactttcccatatggctaccatgctggttttaatcatggtttcaactgtgcagaatctacaaattttgctactgtcagatggattgactatggaaaagttgccaaattgtgcacttgcaggaaagacatggtgaagatttcaatggatatctttgtgaggaaatttcagccagacagatatcagctttggaaacaaggaaaggatatatacaccattgatcacacgaagcctactccagcatccacccctgaagtaaaagcatggctgcagaggaggaggaaagtaagaaaagcatcccgaagcttccagtgtgctaggtctacctctaaaaggcctaaggctgatgaggaagaggaagtgtcagatgaagtcgatggggcagaggtccctaaccccgactcagtcacagatgacctcaaggtcagtgaaaagtcagaagcagcagtgaagctgaggaacacagaagcatcttcagaagaagagtcatctgctagcaggatgcaggtggagcagaatttatcagatcatatcaaactctcaggaaacagctgcttaagtacatctgtaacagaagacataaaaactgaggatgacaaagcttatgcatatagaagtgtaccttctatatccagtgaggctgatgattccattccattgtctagtggctatgagaagcccgagaaatcagacccatccgagctttcatggccaaagtcacctgagtcatgctcatcagtggcagagagtaatggtgtgttaacagagggagaagagagtgatgtggagagccatgggaatggccttgaacctggggaaatcccagcggtccccagtggagagagaaatagcttcaaagtccccagtatagcagagggagagaacaaaacctctaagagttggcgccatccacttagcaggcctccagcaagatctccgatgactcttgtgaagcagcaggcgccaagtgatgaagaattgcctgaggttctgtccattgaggaggaagtggaagaaacagagtcttgggcgaaacctctcatccacctttggcagacgaagtcccctaacttcgcagctgagcaagagtataatgcaacagtggccaggatgaagccacactgtgccatctgcactctgctcatgccgtaccacaagccagatagcagcaatgaagaaaatgatgctagatgggagacaaaattagatgaagtcgttacatcggagggaaagactaagcccctcataccagagatgtgttttatttatagtgaagaaaatatagaatattctccacccaatgccttccttgaagaggatggaacaagtctccttatttcctgtgcaaagtgctgcgtacgggttcatgcaagttgttatggtattccttctcatgagatctgtgatggatggctgtgtgcccggtgcaaaagaaatgcgtggacagcagaatgctgtctctgcaatttgagaggaggtgctcttaagcaaacgaagaacaataagtgggcccatgtcatgtgcgccgttgcggtcccagaagttcgattcactaatgtcccagaaaggacacaaatagatgtaggcagaatacctttacagaggttaaaattgggaaggctgggaatctagacacagcaacagtaacaacaacaacaataacaatgaaggctcactgtgaaaacatcaattcattaggaaagttacatcccctccgccactgtttcagatgctgtttctcattctccatgggagcagccagcatcgtgtttaggatggggatacaatagcctgagctcctgattgagtcagaccctggactttcccttttgtatctgtcattttcctctggatcctcacacctttgtgtttaatttttttaaatttcatttgttgacttcctatgtggggtaaaatgacttcctttgattaatgtactttctgtatcctagagtttccctttccctttgtgatttagtccaacgtgtcctactacagcctcaaaaattgtcattggaatcaaaagctttccaaggtgcatcaggttaatgatttggatgcatcctgaggttgtctcctgtagcatggaggcattataataggagtctcagaagttacaccatttttctacagcacatcacaggcccagaggcttgaatctaagagaatccactctatgtctgtcagcctgaatccttccttcttgctgcacaacaaagcaactgaacgtattttgagtttaggtgaaaactatcactcattcatcaaagttctatctgggtgatatatgctatcgaaacagatgtggacactgggctgacagatgttgagaacggacctgttgctgaagctcatgttatcacacatgctgtgggaagagaggtcattggcattcaagatgcaacacctacaatatggtgaattaaagatgccatttgcatgg

SEQ ID NO: 60034 - DNA, 2508 bp, Artificial Sequence
  derived and/or modified sequence
atgaagcactacggacttccctggaaacggacagaggaggccgctgccgataccgctctcaccattatggaggtggcggaagtggaatcgccccttaacccatcctgcaagatcatgacattccgcccttcgatggaggaattccgggagtttaataagtatctcgcttatatggaatcaaaaggcgcccatcgggccggcctagcaaaggtgataccccctaaggagtggaagccgcggcagtgttatgatgatatagataacttgctaatacccgcacccattcagcagatggtaacaggacagtccgggctgttcacacagtataacatacagaagaaagcgatgactgtgaaagaatttaggcagctggcaaactccggcaagtactgtactcccagatatctggactacgaggatctggaaagaaaatactggaagaatctaacattcgtcgcccccatctacggcgcagacataaatggcagcatttatgatgaaggggtggatgagtggaacatcgcgaggttaaatacagtactcgatgtggtggaagaagaatgtggcatcagtattgagggagttaatacaccttacctctactttggtatgtggaagacaacctttgcatggcacaccgaagacatggatctttattcaatcaattatctacactttggtgaacctaaatcctggtacgcgataccccctgagcacggcaagcgccttgagagactggcccaggggttcttcccctcgtccagccagggttgtgacgccttcttaagacataagatgactttgatttcaccatctgtgcttaaaaaatacggcatccccttcgacaagatcactcaggaagccggagaatttatgattactttcccctacggctatcacgccgggttcaaccacgggttcaactgtgcagagtcaaccaatttcgctacagtgcgttggatcgattatggaaaggtagccaagctttgcacatgccggaaggacatggtgaagatttccatggacattttcgtgagaaagtttcagccagacagatatcaactctggaagcagggtaaggatatatataccatagaccatacaaaacctacacctgcatctacacctgaggtcaaggcctggctgcagagacgcaggaaagtaaggaaggcgtcccgcagcttccaatgtgctaggagcacttccaagcgccccaaggccgatgaggaagaggaagttagcgatgaggtggacggggcagaggtgccaaatccagattccgtgactgatgacctgaaagtctctgaaaagtcagaggccgcagtcaaactccggaatacggaggcgtcgtcagaggaggagtcatccgcttccaggatgcaggtggaacagaacctgtctgaccacataaagctgagtgggaacagttgtttatccacgtctgtcacagaagatattaagactgaggacgacaaggcttacgcttatcgatctgtgccgtccattagctccgaggctgatgatagtatccccctctctagcggctatgagaagcccgaaaaatcagacccaagcgagctgtcctggcccaaatccccagaatcatgcagttcagttgctgaaagcaacggcgttttgaccgaaggggaagaaagcgatgtggagtctcatggtaatggattagaacccggcgagatccccgcagtgccctctggagagcgcaatagctttaaggtgccgtcaattgcggaaggagagaacaaaacttccaaaagctggaggcacccattgagccgtcccccagcccgcagcccaatgaccctggtgaagcagcaagctcccagtgatgaggagttgcctgaggtgctttctattgaggaagaggttgaagaaacagagagttgggccaaacctctcatccacctgtggcaaactaagtcgccgaacttcgcagccgagcaggagtacaacgccacggtggcacgcatgaaaccacattgtgccatctgcacactcctcatgccctatcataaaccagattcctccaatgaggagaatgatgcaaggtgggagacgaagcttgatgaggtggtgactagcgagggcaaaacaaagcccctgatcccagaaatgtgctttatctacagcgaagaaaatattgagtattcacccccgaacgcatttttagaggaggacggtaccagccttttaattagttgtgccaagtgctgtgtgagagttcatgcttcatgttatggcatcccatctcacgaaatctgtgacgggtggctatgcgcccgctgcaagcgcaatgcatggaccgcagaatgctgtctctgtaacttgaggggtggcgcgctgaaacagactaaaaacaacaaatgggcccatgtgatgtgtgccgtggcggtgcctgaagtgcgatttactaacgttcccgaaaggacccaaattgatgtagggaggattcctctgcagaggttaaagcttggaagactgggaatttag

SEQ ID NO: 60035 - DNA, 2508 bp, Artificial Sequence
  derived and/or modified sequence
atgaagcactacggcctgccctggaagaggacagaggaggccgctgctgacacagccctgaccatcatggaggtggccgaggtggagagccccctgaaccccagctgcaagatcatgaccttccggcccagcatggaggagttccgggagttcaacaagtacctggcctacatggagagcaaaggagcccaccgggccggcctggccaaggtgattcctcccaaggagtggaagccccggcagtgctatgatgacatcgacaacctgctgatcccagcccccatccagcagatggtgacaggccagagcggcctcttcacccagtacaacatccagaagaaggccatgacagtgaaggagttccggcagctggccaacagcggcaagtactgcaccccccgctacctggactatgaggacctggagaggaagtactggaagaacctgacctttgtggcccccatctacggggctgacatcaatggcagcatctatgatgagggcgtggatgagtggaacatcgcccggctgaacacagtgctggatgtggtggaggaggagtgtggcatcagcattgagggcgtgaacaccccctacctgtacttcggcatgtggaagaccacctttgcctggcacacagaggacatggacctgtacagcatcaactacctgcactttggagagcccaagtcctggtacgccatccccccagagcacggcaagaggctggagcggctggcccagggcttcttccccagcagcagccagggctgtgatgccttcctgcggcacaagatgaccctcatcagccccagcgtgctgaagaagtatggcatcccctttgacaagatcacccaggaggccggggagttcatgatcaccttcccctacggctaccacgccggcttcaaccacggcttcaactgtgccgagagcaccaactttgccaccgtgcgctggattgattatggcaaggtggccaagctgtgcacctgcaggaaggacatggtgaagatctccatggacatctttgtgaggaagttccagcctgaccgctaccagctgtggaagcagggcaaggacatctacaccatcgaccacaccaagcccaccccagccagcaccccagaggtgaaggcctggctgcagaggaggaggaaggtgaggaaggccagccgctccttccagtgtgcccggagcaccagcaagaggcccaaggcagatgaggaggaggaggtgtctgatgaggtggatggagctgaggtgcccaacccagattctgtgacagatgacctgaaggtgtctgagaagtctgaggccgctgtgaagctgaggaacacagaggccagcagcgaggaggagagcagcgccagcaggatgcaggtggagcagaacctgagtgaccacatcaagctgagcggcaacagctgcctgagcacctctgtgacagaggacatcaagacagaagatgacaaggcctatgcctacagatctgtgcccagcatcagcagcgaggctgatgacagcatccccctgagcagcggctatgagaagccagagaagagtgaccccagcgagctgtcctggcccaagagccctgagagctgcagctctgtggccgagagcaatggagtgctgacagaaggagaggagagtgatgtggagagccatggaaatggcctggagcctggagagatcccagctgtgcccagcggggagaggaacagcttcaaggtgcccagcattgctgagggggagaacaagaccagcaagtcctggaggcaccccctgagccggcccccagcccggagccccatgaccctggtgaagcagcaggcccccagtgatgaggagctgcctgaggtgctgagcattgaggaggaggtggaggagacagagagctgggccaagcccctcatccacctgtggcagaccaagagccccaactttgctgctgagcaggagtacaatgccaccgtggccaggatgaagccccactgtgccatctgcaccctgctgatgccctaccacaagccagacagcagcaatgaagaaaatgatgcccgctgggagaccaagctggatgaggtggtgaccagcgagggcaagaccaagcccctcatccctgagatgtgcttcatctacagcgaggagaacatcgagtacagccccccaaatgccttcctggaggaggatggcaccagcctgctgatcagctgtgccaagtgctgcgtgcgggtgcacgccagctgctacggcatccccagccatgagatctgtgatggctggctgtgtgcccgctgcaagagaaatgcctggacagctgagtgctgcctgtgcaacctgcggggcggggccctgaagcagaccaagaacaacaagtgggcccacgtgatgtgtgctgtggccgtgcctgaggtgcgcttcaccaacgtgcctgagaggacccagattgatgtgggccgcatccccctgcagaggctgaagctgggccgcctgggcatctag

SEQ ID NO: 60036 - DNA, 2508 bp, Artificial Sequence
  derived and/or modified sequence
atgaagcactacggcctgccctggaagcggaccgaggaggccgccgcggatactgcccttacgatcatggaagtggccgaagtggaaagcccattgaatcccagctgcaagatcatgactttccggccctcaatggaagagtttagggagttcaataaatatttggcctatatggagtctaaaggggcccaccgggcgggtttggctaaggttatccccccaaaagaatggaagccaagacagtgctacgacgacattgacaatttgttgattcccgcccctattcagcaaatggtgaccggccagtctgggctttttacccagtataacatccaaaaaaaggctatgaccgttaaggagtttcggcagctagccaactctgggaaatattgtacgccacgctatcttgactacgaggatctggaacgtaagtactggaagaatctgactttcgtcgccccaatctatggggctgatataaatggatccatctacgacgagggcgtggatgagtggaacattgcccggttgaataccgtcctagacgtggtggaggaggagtgtggaatcagcatcgaaggggtaaatactccttacctatacttcgggatgtggaagacaacgttcgcatggcacaccgaagacatggacctgtattccatcaactatctgcattttggagaaccaaagtcgtggtacgccatcccaccagagcacggcaagcgactcgagcgcctggcccagggcttttttccttcaagttcccaaggctgtgacgccttcctccggcacaaaatgacactgatctccccatccgttttgaagaagtatggaattcctttcgacaaaatcactcaggaagctggcgagtttatgataacttttccctatgggtaccatgccggctttaaccatggtttcaactgtgccgagagcactaattttgccacagtaaggtggattgattatgggaaggtcgcaaaactgtgtacatgccgaaaagatatggtgaagatttctatggatattttcgtcaggaagttccaacccgaccgctatcaactgtggaaacagggtaaagacatatacacaatcgaccacacaaagcccactcctgcaagcacacctgaggtaaaggcctggctccagcggcggcggaaggtgcgaaaggcttcccgcagctttcagtgcgcgcggtcaacctccaagaggcccaaagctgatgaggaggaggaagtcagcgatgaagtcgatggcgcggaagtgcccaacccagactctgtcacggacgacctcaaagtgagtgagaaatcagaagccgccgtcaagttaaggaatactgaggcatcgtccgaggaagaatcatcggcctctcgtatgcaggttgagcagaacctgtccgatcacattaagttgtccggcaatagctgcctgtcaacgtccgtgaccgaggatatcaagaccgaggacgacaaagcatacgcctaccgatctgttcccagtatcagctccgaagctgatgactcgatacccctttccagcggatacgagaagcctgagaaatcagatcctagcgagttgagttggcctaaaagcccagaatcatgttcatccgtcgccgaaagcaacggggtcttgacagagggcgaggaaagcgatgtggagagccacggaaacggcttagagcccggggaaatcccagccgttcctagtggtgagcgcaactctttcaaagtgccttcgattgccgaaggagaaaacaagacttcgaagagttggcgacatccattgagccggccaccggcacggagccccatgactcttgttaagcagcaggccccctccgacgaagagctgccagaggtcctgtcaatcgaagaggaagtggaggagacagaatcctgggccaagcctctgatccacctgtggcagaccaaatcccccaatttcgcagcagaacaggaatacaatgcaacagtggccagaatgaaaccccactgcgcaatttgcacgttgctgatgccctatcataagcccgattcttcaaacgaggaaaacgacgctagatgggagaccaagcttgacgaggttgtgacctctgagggaaagacgaagcccctgatccccgagatgtgtttcatctactcagaggaaaatatcgaatacagcccccctaacgccttccttgaggaagacggaacaagtttactgatctcttgcgctaagtgttgcgtgcgagtacacgcatcttgttatggaatcccctctcacgaaatctgcgacggatggctttgcgcacgctgtaagcgaaacgcatggacggccgaatgttgcttgtgcaacttgaggggcggagcgctcaagcagactaagaataataaatgggctcacgttatgtgtgcagtggctgtcccagaggtccgcttcactaacgtgccagagcgaacacagattgacgttggtagaattccccttcaacgcttgaaactggggaggctcggaatctag

SEQ ID NO: 60037 - DNA, 2508 bp, Artificial Sequence
  derived and/or modified sequence
atgaagcactatgggctgccttggaagaggaccgaagaagccgctgctgatacagctctgaccatcatggaggttgcagaggtggaaagccccctcaacccgtcctgcaagatcatgacttttcggccttcgatggaggagtttcgcgagtttaacaagtacctggcgtatatggagagcaaaggcgcacatcgcgctggtttagccaaagttatcccacccaaagagtggaagccaaggcagtgttatgatgatatcgacaacctcttgatccctgcgccaatccaacagatggtgacaggccagagcggcttatttacccagtataacatccagaagaaagccatgactgtgaaggagttccgtcagctcgccaacagcgggaaatattgcaccccacgctatctggactacgaagacctagagcgtaaatattggaagaatctgacattcgtggcccctatctatggcgcagacataaatggctccatatatgatgagggagtggatgagtggaatattgcacgcctgaatactgtgttggacgtagttgaagaagagtgcgggatctctatcgaaggcgtcaatacgccttacctctactttggcatgtggaagaccacatttgcctggcatacagaggatatggacctatatagtatcaattatctgcatttcggagagccaaagtcctggtatgcaattccaccggagcacggtaagagactggagcggcttgcacaaggattcttccccagctcgtcccagggctgtgatgcattcctccggcataagatgacacttatcagcccttccgtcctgaagaagtacggtatcccttttgacaagattactcaggaagcaggtgaattcatgattacctttccttacggataccacgccggttttaaccatggatttaactgtgccgagagcacgaatttcgctactgtgcgatggattgactacgggaaggtggcaaagctctgcacctgtagaaaggatatggttaaaatctcaatggatatcttcgtgcggaagttccaaccagaccggtatcaactgtggaagcaaggaaaggacatttacactattgaccacacaaaaccgacacccgcatcgacccccgaggttaaggcttggctccagcgcaggaggaaggtccggaaggccagtcgctcctttcaatgcgccagaagtacttccaagaggccgaaagcagacgaagaagaggaggtctccgatgaagtggacggagccgaggtccccaatcccgacagcgtcactgacgatctaaaggtcagtgaaaagtcagaggctgctgttaaactcagaaatacggaggcctcctctgaagaagaatcctccgcctctcgcatgcaggtggaacagaatctgtccgaccacataaaactctcagggaatagttgtctttctacgtctgtgacagaagacattaaaacagaagacgataaagcctacgcttataggtctgtaccaagtatttcatcagaggctgatgattctatcccactgagtagtggatacgagaaaccggagaaatcggatcctagtgagcttagctggcctaaatctcccgagtcttgtagctcagtggcagaaagtaatggggtgctgaccgaaggtgaagaatccgacgtggagagtcatggcaacgggctggagccgggagagattcctgctgtgcctagcggagagcggaattccttcaaggtaccctctatcgcagagggtgagaacaagacatccaagtcctggaggcatcccctgagcagacccccagctaggagtcccatgacactagtgaagcaacaggctccgagtgacgaggaactccctgaggtgctcagtatagaggaggaagtagaggagaccgagtcatgggccaaacccttaattcacctttggcaaacgaaatcccctaatttcgcggcagagcaggaatataacgctaccgtggcaagaatgaaaccccactgcgcgatctgcactctgctcatgccctaccacaagcctgatagttccaacgaggagaacgacgccaggtgggagactaagcttgatgaagtggtgacctctgaggggaaaaccaagccactgatcccagaaatgtgctttatctatagtgaagagaacatagaatacagtccccctaatgccttcttggaggaggatggaacctcgctcctgatatcttgcgcgaaatgctgcgtgagagttcacgcctcatgctacggcataccctcccatgaaatttgtgacggttggttgtgcgctaggtgcaaaaggaatgcttggaccgctgagtgctgcttgtgcaatctcagaggaggagcgcttaaacagaccaaaaacaataaatgggcgcacgtgatgtgtgccgtggcagtgcctgaagtgcgcttcaccaacgtccccgagcggactcagattgatgtaggcagaatccctctccagagacttaaattaggaaggctaggaatctag

SEQ ID NO: 60038 - DNA, 2508 bp, Artificial Sequence
  derived and/or modified sequence
atgaagcactacggcctgccctggaagagaaccgaggaggccgccgccgacaccgccctgaccatcatggaggtggccgaggtggagagccccctgaaccccagctgcaagatcatgaccttcagacccagcatggaggagttcagagagttcaacaagtacctggcctacatggagagcaagggcgcccacagagccggcctggccaaggtgatcccccccaaggagtggaagcccagacagtgctacgacgacatcgacaacctgctgatccccgcccccatccagcagatggtgaccggccagagcggcctgttcacccagtacaacatccagaagaaggccatgaccgtgaaggagttcagacagctggccaacagcggcaagtactgcacccccagatacctggactacgaggacctggagagaaagtactggaagaacctgaccttcgtggcccccatctacggcgccgacatcaacggcagcatctacgacgagggcgtggacgagtggaacatcgccagactgaacaccgtgctggacgtggtggaggaggagtgcggcatcagcatcgagggcgtgaacaccccctacctgtacttcggcatgtggaagaccaccttcgcctggcacaccgaggacatggacctgtacagcatcaactacctgcacttcggcgagcccaagagctggtacgccatcccccccgagcacggcaagagactggagagactggcccagggcttcttccccagcagcagccagggctgcgacgccttcctgagacacaagatgaccctgatcagccccagcgtgctgaagaagtacggcatccccttcgacaagatcacccaggaggccggcgagttcatgatcaccttcccctacggctaccacgccggcttcaaccacggcttcaactgcgccgagagcaccaacttcgccaccgtgagatggatcgactacggcaaggtggccaagctgtgcacctgcagaaaggacatggtgaagatcagcatggacatcttcgtgagaaagttccagcccgacagataccagctgtggaagcagggcaaggacatctacaccatcgaccacaccaagcccacccccgccagcacccccgaggtgaaggcctggctgcagagaagaagaaaggtgagaaaggccagcagaagcttccagtgcgccagaagcaccagcaagagacccaaggccgacgaggaggaggaggtgagcgacgaggtggacggcgccgaggtgcccaaccccgacagcgtgaccgacgacctgaaggtgagcgagaagagcgaggccgccgtgaagctgagaaacaccgaggccagcagcgaggaggagagcagcgccagcagaatgcaggtggagcagaacctgagcgaccacatcaagctgagcggcaacagctgcctgagcaccagcgtgaccgaggacatcaagaccgaggacgacaaggcctacgcctacagaagcgtgcccagcatcagcagcgaggccgacgacagcatccccctgagcagcggctacgagaagcccgagaagagcgaccccagcgagctgagctggcccaagagccccgagagctgcagcagcgtggccgagagcaacggcgtgctgaccgagggcgaggagagcgacgtggagagccacggcaacggcctggagcccggcgagatccccgccgtgcccagcggcgagagaaacagcttcaaggtgcccagcatcgccgagggcgagaacaagaccagcaagagctggagacaccccctgagcagaccccccgccagaagccccatgaccctggtgaagcagcaggcccccagcgacgaggagctgcccgaggtgctgagcatcgaggaggaggtggaggagaccgagagctgggccaagcccctgatccacctgtggcagaccaagagccccaacttcgccgccgagcaggagtacaacgccaccgtggccagaatgaagccccactgcgccatctgcaccctgctgatgccctaccacaagcccgacagcagcaacgaggagaacgacgccagatgggagaccaagctggacgaggtggtgaccagcgagggcaagaccaagcccctgatccccgagatgtgcttcatctacagcgaggagaacatcgagtacagcccccccaacgccttcctggaggaggacggcaccagcctgctgatcagctgcgccaagtgctgcgtgagagtgcacgccagctgctacggcatccccagccacgagatctgcgacggctggctgtgcgccagatgcaagagaaacgcctggaccgccgagtgctgcctgtgcaacctgagaggcggcgccctgaagcagaccaagaacaacaagtgggcccacgtgatgtgcgccgtggccgtgcccgaggtgagattcaccaacgtgcccgagagaacccagatcgacgtgggcagaatccccctgcagagactgaagctgggcagactgggcatctag

SEQ ID NO: 60039 - protein, 1379 aa, Artificial Sequence
  derived and/or modified sequence
MEPGSDDFLPPPECPVFEPSWAEFRDPLGYIAKIRPIAEKSGICKIRPPAIVVEEGGYEAICKDRRWARVAQRLNYPPGKNIGSLLRSHYERIVYPYEMYQSGANLVQCNTRPFDNEEKDKEYKPHSIPLRQSVQPSKFNSYGRRAKRLQPDPEPTEEDIEKNPELKKLQIYGAGPKMMGLGLMAKDKTLRKKDKEGPECPPTVVVKEELGGDVKVESTSPKTFLESKEELSHSPEPCTKMTMRLRRNHSNAQFIESYVCRMCSRGDEDDKLLLCDGCDDNYHIFCLLPPLPEIPKGVWRCPKCVMAECKRPPEAFGFEQATREYTLQSFGEMADSFKADYFNMPVHMVPTELVEKEFWRLVNSIEEDVTVEYGADIHSKEFGSGFPVSDSKRHLTPEEEEYATSGWNLNVMPVLEQSVLCHINADISGMKVPWLYVGMVFSAFCWHIEDHWSYSINYLHWGEPKTWYGVPSLAAEHLEEVMKKLTPELFDSQPDLLHQLVTLMNPNTLMSHGVPVVRTNQCAGEFVITFPRAYHSGFNQGYNFAEAVNFCTADWLPAGRQCIEHYRRLRRYCVFSHEELICKMAACPEKLDLNLAAAVHKEMFIMVQEERRLRKALLEKGITEAEREAFELLPDDERQCIKCKTTCFLSALACYDCPDGLVCLSHINDLCKCSSSRQYLRYRYTLDELPAMLHKLKVRAESFDTWANKVRVALEVEDGRKRSLEELRALESEARERRFPNSELLQQLKNCLSEAEACVSRALGLVSGQEAGPHRVAGLQMTLTELRAFLDQMNNLPCAMHQIGDVKGVLEQVEAYQAEAREALASLPSSPGLLQSLLERGRQLGVEVPEAQQLQRQVEQARWLDEVKRTLAPSARRGTLAVMRGLLVAGASVAPSPAVDKAQAELQELLTIAERWEEKAHLCLEARQKHPPATLEAIIREAENIPVHLPNIQALKEALAKARAWIADVDEIQNGDHYPCLDDLEGLVAVGRDLPVGLEELRQLELQVLTAHSWREKASKTFLKKNSCYTLLEVLCPCADAGSDSTKRSRWMEKELGLYKSDTELLGLSAQDLRDPGSVIVAFKEGEQKEKEGILQLRRTNSAKPSPLASSSTASSTTSICVCGQVLAGAGALQCDLCQDWFHGRCVSVPRLLSSPRPNPTSSPLLAWWEWDTKFLCPLCMRSRRPRLETILALLVALQRLPVRLPEGEALQCLTERAISWQGRARQALASEDVTALLGRLAELRQRLQAEPRPEEPPNYPAAPASDPLREGSGKDMPKVQGLLENGDSVTSPEKVAPEEGSDLELLSSLLPQLTGPVLELPEATRAPLEELMMEGDLLEVTLDENHSIPESLDFCILTPRYCSDLSSWGPAPGVFPPW

SEQ ID NO: 60040 - DNA, 6097 bp, Artificial Sequence
  derived and/or modified sequence
cttgttcctccgccgttgcaatgaactattttctctcagtccggggtggtacttttgagtaaccccttccaaatagaaacccataccagcctatttagctcggtctccactatatgaaggtttcctagggcttggtgtgacgcaacgtatacgaggctcggaaggacaccccgcggaaggatccggtttgttgtggtgtggggaggggagacgctgacaaaccaagatggcggcggcggcgctgaaggccgcggcgtttgggaggtaactgtggtggcgaaggctgcggtagtggggaggcaaccacacagtttggaagaaacggagcgggacgaagaggcggtagcagtagagtcagcctgagactctcagagcacgacggccacacgcccccttaggccctcggcgggcggcggctgccccgcttagggcctagcctccgagcattgcctcggcttcaaacagcggcggcgccatgagtccttaagggcggtccaagcctcccgatccctggcccagacctcgggcccaccatggagccggggtccgacgatttcctaccgccaccggagtgcccggtgttcgagcctagctgggccgagttccgagaccctcttggctacatcgcgaaaatcaggcccatcgcagagaaatcgggcatttgcaagatccgcccacccgcgattgtggtggaggaaggtggttatgaagctatctgcaaggaccgtcggtgggctcgggtagcccagcgcctcaactatccaccaggcaaaaatattggctccttgctacgctcccactacgaacgcattgtttatccctatgaaatgtaccagtctggagccaaccttgtgcagtgtaacacacgtccatttgataatgaggagaaggacaaggaatacaaaccccacagcatccccctacgacagtctgtgcagccttccaagttcaacagctatggccggcgggccaagagactgcagcctgatccggaacccacagaggaagacattgagaagaatccagagctgaaaaagctacagatctatggggcaggccccaagatgatgggcctgggcctcatggccaaagacaagactctgcggaagaaagataaggaggggcctgagtgtccccccacagtagtggtgaaggaggagttaggtggggatgtgaaggtggagtcaacatcgcctaagaccttcctggagagcaaggaggagctgagtcacagcccagaaccctgcaccaagatgaccatgaggctacggaggaaccacagcaatgcccagtttattgagtcatatgtctgccggatgtgttctcgaggggatgaggatgacaagctcctgctgtgtgatggctgtgatgacaactaccacatcttctgcctgctgcctcctctgcctgagatccccaagggtgtctggcggtgcccaaagtgtgtcatggcggagtgtaagcggcccccagaagcctttggctttgagcaggctacccgggaatacactctgcagagctttggcgagatggccgactcctttaaagctgactacttcaacatgcccgtgcatatggtgcccacagaacttgtggagaaggagttctggaggctggtaaatagcattgaggaagatgtgactgttgagtatggagctgacatccattccaaagaatttggcagcggtttccctgtcagtgacagtaaacggcacctaacccccgaagaggaggagtatgctaccagtggttggaacctaaatgtgatgccggtgttggaacagtctgtactgtgccacatcaatgcagatatctctggcatgaaggtgccctggctctacgtgggcatggtcttctcagccttttgctggcatattgaggatcactggagttactccattaactacctccactggggtgagccgaagacctggtatggggtgccctcacttgcagcagaacatttggaagaagtgatgaagaagctgacacctgaactatttgatagccagcctgacctcctgcaccaacttgtcaccctcatgaatcccaacaccctcatgtcccatggtgtgccagttgtccgcacaaaccagtgtgcaggagagtttgtcatcaccttcccccgtgcttaccacagcggcttcaaccaaggctacaactttgccgaggctgtcaacttttgcactgctgactggttgcctgctgggcgccagtgcattgagcactaccgccggctccggagatactgcgtcttctcccatgaggagcttatctgcaagatggctgcctgcccagagaagctagacctgaacctggcggcagctgtgcataaggagatgttcatcatggtgcaagaagagcggcgtctacgaaaggccctgctggagaagggtatcacagaggctgagcgagaggctttcgagctgctcccagatgatgagcgccagtgtatcaagtgcaagactacgtgtttcctgtcagccctggcctgctacgactgcccagacggccttgtctgcctttcccacatcaatgatctctgcaagtgctccagtagccggcagtacctgcggtatcggtataccttggatgagcttcctgccatgctgcataagctgaaggttcgggctgagtcctttgacacctgggccaacaaagtgcgagtggccctggaggtggaggatgggcggaagcgcagccttgaagaactgagggcactagagtctgaagcccgtgagcggaggtttcctaatagtgagctgctgcagcaactaaagaactgcctgagtgaggcagaggcttgcgtgtcccgagctctgggactggtcagcggccaggaagctggcccccacagggtggctggtctacagatgaccctgactgagctccgggcctttctggaccagatgaacaacctgccttgcgccatgcaccagattggggatgtcaagggtgttctggaacaggtggaggcctaccaggctgaggctcgtgaggccctggcctcactgccctccagtccagggctactgcagtccctgttggagagggggcggcagctgggggtggaggtgcctgaggcccagcagctccagcggcaggtggaacaggcgcgatggctggatgaggtgaaacgcacactggccccctcagcccgaaggggcaccttggctgtcatgcgaggactgttggtcgcgggtgccagtgtagcccctagccctgctgtggataaagcccaggccgagctgcaggaactgctgaccattgctgaacgctgggaggagaaagcccacctctgcctggaggccaggcagaagcatccaccagccacacttgaggccataatccgtgaagcggaaaacatccctgttcacctgcccaacatccaggctctcaaggaggctcttgctaaggcccgggcctggattgctgatgttgatgagatccaaaatggtgaccactacccctgcctggatgacttggagggcctagtagctgtgggccgggacctacctgtggggctggaggagctgagacagctagagctacaggtactgacagcgcactcctggagggagaaggcctccaagaccttcctcaagaaaaattcttgctacacgctgctggaggttctctgcccatgtgcagatgccggctcagacagcaccaagcgcagccggtggatggagaaggagctggggttgtacaaatctgacacagagctgctggggctgtctgcgcaggacctcagggacccaggctctgtgatcgtggccttcaaggagggggaacagaaggagaaggagggtatcctgcagctgcgtcgcaccaattcggccaagcccagtccactggcatcatcgagcacggcctcctctacaacctctatctgtgtgtgtgggcaggtgctggctggggcgggagctctgcagtgtgacctgtgtcaggactggttccatgggcggtgtgtgtcagtgcctcgcctcctcagctctccgaggcccaatcccacctcatccccactgctggcctggtgggaatgggacaccaaattcctgtgtccactgtgtatgcgctcaaggcgcccgcgcctggagaccatcctggcactgctggtagccctgcagagactgcctgtgcggctgcccgagggcgaggccctgcagtgcctcacagagagggccatcagctggcaaggccgcgccaggcaggctctggcctctgaagatgtgactgctcttttgggacggctggctgagctccgccaacggctacaggctgaacctagacctgaggagcctcctaactaccctgcagcccctgcttctgaccccctcagagagggcagtggcaaggatatgcctaaggtccagggcttactggagaatggagacagtgtgaccagtcctgagaaggtagccccggaggagggctcagatctggagctgctgtcctcgctgttgccacagttgactggccctgtgttggaactgcctgaggcaacccgggcccccttggaggagctcatgatggagggggacctgctcgaggtgaccctggatgagaaccacagcatccctgagtcccttgacttttgtattctgactccaaggtattgttcagacctcagctcctgggggccggcccctggagtcttccctccctggtagcctctaaccagcattcccagacacctgaggcagatagatggatgggctggtgggcaggggggtggctggggctgggccatcaccattccagagacaaggccagtgtatatgcaaactgggggactctcctcccttctctccccagttctggtcctggccaggccatgctacactaacccctgcccccactctcctcccctcttttccttccttcctacccccttctccctctcccttcccctgactgttccacccaggaggaggaaacttcacatagccgtgctcacagttttttattttaaaggaatttggctggggagctgaacagggctccctgtgatctgaagaaagcttttggtgcttgtcctcacaaccacctcagtcctccctccctgtcctcccctgtctcctttcctcctcctgggttcatgttgtaataaaagaagattgttggtgtgtaattaatttgttcaaaagaaaaaaaaaagcaaaacaagaaacttggttccaactgaagcctattttaattttattttattattttcctcttgttagaaataaaacccttagaaacattttttggaaacatgtttctgaagtgcatttctcttagacggggaagacagtgcttccatcaccagtcagtggagcagctgtagtgctggcaggagcactagggctgaagccagggagctctgggttctgaaatcaagttccaccagcttcttaaccttgggcaagacattctgatcctcccccgactctaaccccaagccactttccctcaagtccaaacagatgggctcgggccccctcacccaaactcctacactacaacctcccccagttgatgccctccagtttatcctcctcaagctcccaaagggatttttttgttaatggctttattgagatataatttacatactataaaattcacttgtttgaaatgtacaattcagtgatttggggggtttctaaagtgtagatctgattatatactgcttaaaaccttccatgatgctttattgcccttaagattatacatagaatctcgttcttcctagaatgttttcctgtctaacccatctactgcataattccctgatttttctccacaggttatgcccctgatgaatggggactaaagctcagatgtgtggtcatttgcaacccctgagttcacttttttaagacagcttattgatatatataatgtacataccatacagtcacccacttaaaagtatacaattaaatagcttttagtatattcagagttgtgcagccatcattcgaaaaaaaatttcagaacattttcatcactgcagaaagaaactccatatcccttaggcgtcctttacccctcatcccatttgcctattctggacattttacataaatggaatcgtataatatgtgaa

SEQ ID NO: 60041 - DNA, 4140 bp, Artificial Sequence
  derived and/or modified sequence
atggaaccagggtccgatgactttctgcctccccctgagtgcccagtgttcgaacctagttgggcagaatttcgtgatcctctgggctatatcgctaaaatccgtcctatcgccgagaagagtggcatatgtaaaattcgcccccccgctatagttgtggaagagggtggctatgaggctatttgtaaagatcggagatgggcacgggtcgctcagcgtctgaattatcctcccggaaagaatatcgggtcactcttacgaagtcactacgaaaggatcgtctacccgtatgaaatgtaccaatcaggggccaacttggtccagtgtaacactcgcccctttgataacgaggaaaaagataaagagtataagccccacagcattccgttgcgccagtccgtgcagccgtctaaattcaactcatacggaaggagggctaagaggctccagccagaccctgaacctacggaggaggacattgagaagaaccccgaactgaaaaagctgcagatatacggtgctggccccaagatgatgggcttgggactgatggcaaaggataagaccctcaggaagaaggataaagaaggacctgaatgccctcctacagtcgttgtaaaggaagagctgggcggagatgtaaaggtggaaagtacgagtcccaagacatttctggaatccaaggaagagctctctcattccccagagccatgcaccaagatgacgatgcgtttaaggaggaaccactcaaacgctcagttcatagagagttatgtttgccgtatgtgctcccgaggcgatgaagacgacaaactgctgctgtgtgacggttgtgacgataactatcatattttttgtttattgcctccactgcccgagatccccaaaggagtatggagatgtcccaaatgcgtcatggccgagtgcaaacgtcccccggaggcctttggtttcgagcaggccacaagagaatataccctccagagcttcggtgaaatggctgacagtttcaaggcagactacttcaacatgcctgtgcacatggtgccaaccgagttagttgagaaggaattctggagactggtcaatagcattgaagaagacgtgacagtagagtatggagcggatattcacagcaaggagttcggaagcgggtttcccgtaagcgatagtaagcgtcacttaactcccgaggaggaagaatatgccacctccggatggaacttgaacgtgatgcctgtgctggagcagagtgtactgtgccatattaacgcggatatttccgggatgaaggtgccatggctttacgtgggcatggtgttctcagccttttgttggcatattgaggaccactggagctactccattaactatctgcactggggcgagccaaagacctggtacggggtaccttccctcgccgccgagcaccttgaagaagtgatgaagaagcttacccctgaactttttgacagtcagccggacctgctgcaccagctggttaccctcatgaatcctaacacactgatgagccacggcgtgcccgtcgtcaggactaatcagtgcgcaggcgaatttgtcatcacgtttcctagagcctatcattccggcttcaatcagggttataatttcgctgaggccgtgaatttttgtacagccgactggcttccagcgggaaggcagtgcattgagcattataggcgccttcgacggtactgcgtcttcagtcatgaggaactgatttgtaaaatggcggcctgcccggagaagctcgatctgaacctagcagctgcagtacacaaggagatgttcatcatggtgcaagaggagcgacggctgcgaaaggccctgttggaaaaaggtatcactgaggcagaaagggaagcctttgaactgctgccggatgacgagcgacagtgcattaagtgtaagacaacatgctttctctcagcactcgcatgctacgattgtccggatgggctcgtttgtctctcccatatcaatgacctgtgtaagtgcagcagcagcagacagtacctacgctatagatataccttagacgagctcccggcgatgctccataagctgaaagttcgggccgagtcatttgatacttgggcgaacaaggtgcgggtggcgctggaagtggaggacggaagaaagcgtagcctcgaggaactccgggccctagagtccgaggcaagagagcggcggttcccaaatagtgaacttctgcagcagttgaagaactgtttgtccgaagccgaagcttgcgtcagccgcgctttgggcttggtgtccgggcaggaggccggccctcatcgggtggcaggactgcagatgactctgactgagctaagagccttcttggatcagatgaataatctgccatgcgcaatgcatcagataggcgatgttaagggagttctcgagcaggttgaggcatatcaggccgaggcccgtgaggctctcgcctctctcccatcatccccgggcctgctccagagcctgctagagaggggtcgacagctcggcgtagaggtgcccgaagcacagcagctgcagcgccaggtggaacaagcccgctggctcgatgaagtaaagcgcacactggccccaagcgctcgtcgggggacactggctgtcatgaggggactgctggtggcaggagctagcgtcgctcccagtccggccgtggataaagctcaggcagagttgcaagagttacttaccatagccgaaagatgggaagagaaggcccatctttgcctggaggctcggcagaaacacccccccgccacgctggaggctattatccgggaagccgagaatatccccgtccatctgccaaacatccaggccctgaaagaggccctcgcaaaggcccgtgcttggatcgccgatgttgacgagatccagaatggagatcattatccttgtctcgacgaccttgaaggccttgtggccgtaggtcgtgatctgccggttggactggaagagctgcggcagctggagctgcaagtgcttactgctcacagctggcgcgagaaggcaagcaagacctttctgaaaaaaaactcatgctacacactccttgaagtgctgtgtccttgcgcggacgcggggtctgacagcacaaagcgatctagatggatggaaaaggagctcgggctgtacaagtccgacaccgaactgctaggactgtccgctcaggatctccgggaccctgggagcgtgatcgtggcctttaaagaaggcgaacagaaggagaaagaaggcatactccagttgcggaggactaattccgccaagccatctccgttagccagctcaagtaccgcctccagcacgacatcaatttgcgtgtgcgggcaggtcttggctggagctggggctctgcagtgcgatctgtgccaggattggttccacggacggtgcgtgagcgtgccacgtctacttagctcccctaggccgaatccaacttccagtccactactggcctggtgggagtgggacacgaagttcctgtgccccctgtgcatgagatctagaagacctaggttggagactatcctagcactcctggtggcactacagcgcctgccagtccgtctcccagaaggcgaggccttgcagtgcttgaccgagcgtgccatctcttggcaggggcgagcccgtcaggctctagccagtgaagacgtcacagcactcttagggcggcttgccgagcttagacagcgattgcaggcagagccacggccagaggaaccgcctaactacccagcagcacccgcaagtgacccgctgagggaaggctcaggcaaagatatgccaaaagtccagggtctgttggagaacggtgactcagtgaccagtcctgaaaaggtcgcccctgaggaaggctcagacctggaactcctctcatccttgttgcctcagctgacgggcccagtgctagagctccccgaagccactagagcccccttggaggagcttatgatggaaggtgacctgttagaagttacccttgatgagaaccactctatccctgaatctttggatttttgtattcttaccccgcgttactgctctgatctcagctcctgggggcccgctccaggagtcttccctccttggtag

SEQ ID NO: 60042 - DNA, 4140 bp, Artificial Sequence
  derived and/or modified sequence
atggagcccggcagtgatgacttcctgcccccaccagaatgtcctgtgtttgagcccagctgggccgagttccgggaccccctgggctacatcgccaagatccggcccatcgccgagaagagcggcatctgcaagatccggcccccagccatcgtggtggaggagggcggctatgaggccatctgcaaggaccggcgctgggcccgggtggcccagaggctgaactacccacctgggaagaacatcggcagcctgctgcggagccactatgaaagaattgtgtacccctatgagatgtaccagagcggggccaacctggtgcagtgcaacacccggccctttgacaatgaggagaaggacaaggagtacaagccccacagcatccccctgcggcagagcgtgcagcccagcaagttcaacagctatggccggcgggccaagaggctgcagcctgaccctgagcccacagaggaggacatcgagaagaaccctgagctgaagaagctgcagatctacggggccggccccaagatgatgggcctgggcctgatggccaaggacaagaccctgaggaagaaggacaaggagggcccagaatgtcctcccaccgtggtggtgaaggaggagctgggcggagatgtgaaggtggagagcaccagccccaagaccttcctggagagcaaggaggagctgagccacagccctgagccctgcaccaagatgaccatgaggctgcggaggaaccacagcaatgcccagttcatcgagagctatgtgtgcaggatgtgcagcagaggagatgaagatgacaagctgctgctgtgtgatggctgtgatgacaactaccacatcttctgcctgctgccccccctgcctgagatccccaagggcgtgtggcgctgccccaagtgtgtgatggccgagtgcaagaggcctcctgaggccttcggctttgagcaggccacccgggagtacaccctgcagagctttggagagatggctgacagcttcaaggctgactacttcaacatgcctgtgcacatggtgcccacagagctggtggagaaggagttctggaggctggtgaacagcattgaagaagatgtgacagtggagtatggagctgacatccacagcaaggagtttggcagcggcttccctgtgtctgacagcaagaggcacctgaccccagaggaggaggagtatgccaccagcggctggaacctgaatgtgatgcctgtgctggagcagagcgtgctgtgccacatcaatgctgacatcagcggcatgaaggtgccctggctgtatgtgggcatggtgttcagcgccttctgctggcacatcgaggaccactggagctacagcatcaactacctgcactggggcgagcccaagacctggtacggcgtgcccagcctggccgctgagcacctggaggaggtgatgaagaagctgaccccagagctgtttgacagccagcctgacctgctgcaccagctggtgaccctgatgaaccccaacaccctgatgagccacggcgtgcctgtggtgaggaccaaccagtgtgccggggagtttgtgatcaccttcccccgggcctaccacagcggcttcaaccagggctacaactttgctgaggccgtgaacttctgcacagctgactggctgcctgctggccggcagtgcatcgagcactacagaaggctgcggcgctactgtgtgttcagccatgaggagctgatctgcaagatggccgcctgcccagagaagctggacctgaacctggccgctgctgtgcacaaggagatgttcatcatggtgcaggaggagcggcggctgaggaaggccctgctggagaagggcatcacagaagctgagcgggaggcctttgagctgctgcctgatgatgagcggcagtgcatcaagtgcaagaccacctgcttcctgagcgccctggcctgctatgactgcccagatggcctggtgtgcctgagccacatcaatgacctgtgcaagtgcagcagcagccggcagtacctgcgctaccgctacaccctggatgagctgcctgccatgctgcacaagctgaaggtgcgggcagagagctttgacacctgggccaacaaggtgcgggtggccctggaggtggaggatggcaggaagaggagcctggaggagctgcgggccctggagagcgaggcccgggagcggcgcttccccaacagcgagctgctgcagcagctgaagaactgcctgtctgaggccgaggcctgtgtgtcccgggccctgggcctggtgtctggccaggaggccggcccccaccgggtggccggcctgcagatgaccctgacagagctgcgggccttcctggaccagatgaacaacctgccctgtgccatgcaccagattggagatgtgaagggcgtgctggagcaggtggaggcctaccaggccgaggcccgggaggccctggccagcctgcccagcagccctggcctgctgcagagcctgctggagcggggccggcagctgggcgtggaggtgcctgaggcccagcagctgcagaggcaggtggagcaggcccgctggctggatgaggtgaagaggaccctggcccccagcgcccggcggggcaccctggccgtgatgaggggcctgctggtggccggggcctctgtggcccccagccctgctgtggacaaggcccaggccgagctgcaggagctgctgaccatcgccgagcgctgggaggagaaggcccacctgtgcctggaggcccggcagaagcaccccccagccaccctggaggccatcatccgggaggccgagaacatccctgtgcacctgcccaacatccaggccctgaaggaggccctggccaaggcccgggcctggattgctgatgtggatgagatccagaatggagaccactacccctgcctggatgacctggagggcctggtggccgtgggccgggacctgcctgtgggcctggaggagctgcggcagctggagctgcaggtgctgacagcccacagctggagggagaaggccagcaagaccttcctgaagaagaacagctgctacaccctgctggaggtgctgtgcccctgtgctgatgctggcagtgacagcaccaagaggagccgctggatggagaaggagctgggcctgtacaagagtgacacagagctgctgggcctgagcgcccaggacctgcgggaccccggcagcgtcatcgtggccttcaaggagggggagcagaaggagaaggagggcatcctgcagctgcggaggaccaacagcgccaagcccagccccctggccagcagcagcacagccagcagcaccaccagcatctgtgtgtgtggccaggtgctggccggggccggggccctgcagtgtgacctgtgccaggactggttccacggccgctgtgtgtctgtgccccggctgctgagcagcccccggcccaaccccaccagcagccccctgctggcctggtgggagtgggacaccaagttcctgtgccccctgtgcatgaggagccggcggccccggctggagaccatcctggccctgctggtggccctgcagaggctgcctgtgcggctgcctgagggggaggccctgcagtgcctgacagagcgggccatctcctggcagggccgggcccggcaggccctggcctctgaagatgtgacagccctgctgggccgcctggccgagctgcggcagaggctgcaggccgagcccaggcctgaggagccccccaactacccagctgccccagccagtgaccccctgcgggagggcagcggcaaggacatgcccaaggtgcagggcctgctggagaatggagacagcgtgaccagccctgagaaggtggcccctgaggagggcagtgacctggagctgctgagcagcctgctgccccagctgactggacctgtgctggagctgcctgaggccacccgggcccccctggaggagctgatgatggagggggacctgctggaggtgaccctggatgagaaccacagcatccctgagagcctggacttctgcatcctgaccccccgctactgcagcgacctgagctcctggggccctgcccctggggtcttccccccctggtag

SEQ ID NO: 60043 - DNA, 6096 bp, Artificial Sequence
  derived and/or modified sequence
cttgttcctccgccgttgcaatgaactattttctctcagtccggggtggtacttttgagtaaccccttccaaatagaaacccataccagcctatttagctcggtctccactatatgaaggtttcctagggcttggtgtgacgcaacgtatacgaggctcggaaggacaccccgcggaaggatccggtttgttgtggtgtggggaggggagacgctgacaaaccaagatggcggcggcggcgctgaaggccgcggcgtttgggaggtaactgtggtggcgaaggctgcggtagtggggaggcaaccacacagtttggaagaaacggagcgggacgaagaggcggtagcagtagagtcagcctgagactctcagagcacgacggccacacgcccccttaggccctcggcgggcggcggctgccccgcttagggcctagcctccgagcattgcctcggcttcaaacagcggcggcgccatgagtccttaagggcggtccaagcctcccgatccctggcccagacctcgggcccaccatggagccggggtccgacgatttcctaccgccaccggagtgcccggtgttcgagcctagctgggccgagttccgagaccctcttggctacatcgcgaaaatcaggcccatcgcagagaaatcgggcatttgcaagatccgcccacccgcgattgtggtggaggaaggtggttatgaagctatctgcaaggaccgtcggtgggctcgggtagcccagcgcctcaactatccaccaggcaaaaatattggctccttgctacgctcccactacgaacgcattgtttatccctatgaaatgtaccagtctggagccaaccttgtgcagtgtaacacacgtccatttgataatgaggagaaggacaaggaatacaaaccccacagcatccccctacgacagtctgtgcagccttccaagttcaacagctatggccggcgggccaagagactgcagcctgatccggaacccacagaggaagacattgagaagaatccagagctgaaaaagctacagatctatggggcaggccccaagatgatgggcctgggcctcatggccaaagacaagactctgcggaagaaagataaggaggggcctgagtgtccccccacagtagtggtgaaggaggagttaggtggggatgtgaaggtggagtcaacatcgcctaagaccttcctggagagcaaggaggagctgagtcacagcccagaaccctgcaccaagatgaccatgaggctacggaggaaccacagcaatgcccagtttattgagtcatatgtctgccggatgtgttctcgaggggatgaggatgacaagctcctgctgtgtgatggctgtgatgacaactaccacatcttctgcctgctgcctcctctgcctgagatccccaagggtgtctggcggtgcccaaagtgtgtcatggcggagtgtaagcggcccccagaagcctttggctttgagcaggctacccgggaatacactctgcagagctttggcgagatggccgactcctttaaagctgactacttcaacatgcccgtgcatatggtgcccacagaacttgtggagaaggagttctggaggctggtaaatagcattgaggaagatgtgactgttgagtatggagctgacatccattccaaagaatttggcagcggtttccctgtcagtgacagtaaacggcacctaacccccgaagaggaggagtatgctaccagtggttggaacctaaatgtgatgccggtgttggaacagtctgtactgtgccacatcaatgcagatatctctggcatgaaggtgccctggctctacgtgggcatggtcttctcagccttttgctggcatattgaggatcactggagttactccattaactacctccactggggtgagccgaagacctggtatggggtgccctcacttgcagcagaacatttggaagaagtgatgaagaagctgacacctgaactatttgatagccagcctgacctcctgcaccaacttgtcaccctcatgaatcccaacaccctcatgtcccatggtgtgccagttgtccgcacaaaccagtgtgcaggagagtttgtcatcaccttcccccgtgcttaccacagcggcttcaaccaaggctacaactttgccgaggctgtcaacttttgcactgctgactggttgcctgctgggcgccagtgcattgagcactaccgccggctccggagatactgcgtcttctcccatgaggagcttatctgcaagatggctgcctgcccagagaagctagacctgaacctggcggcagctgtgcataaggagatgttcatcatggtgcaagaagagcggcgtctacgaaaggccctgctggagaagggtatcacagaggctgagcgagaggctttcgagctgctcccagatgatgagcgccagtgtatcaagtgcaagactacgtgtttcctgtcagccctggcctgctacgactgcccagacggccttgtctgcctttcccacatcaatgatctctgcaagtgctccagtagccggcagtacctgcggtatcggtataccttggatgagcttcctgccatgctgcataagctgaaggttcgggctgagtcctttgacacctgggccaacaaagtgcgagtggccctggaggtggaggatgggcggaagcgcagccttgaagaactgagggcactagagtctgaagcccgtgagcggaggtttcctaatagtgagctgctgcagcaactaaagaactgcctgagtgaggcagaggcttgcgtgtcccgagctctgggactggtcagcggccaggaagctggcccccacagggtggctggtctacagatgaccctgactgagctccgggcctttctggaccagatgaacaacctgccttgcgccatgcaccagattggggatgtcaagggtgttctggaacaggtggaggcctaccaggctgaggctcgtgaggccctggcctcactgccctccagtccagggctactgcagtccctgttggagagggggcggcagctgggggtggaggtgcctgaggcccagcagctccagcggcaggtggaacaggcgcgatggctggatgaggtgaaacgcacactggccccctcagcccgaaggggcaccttggctgtcatgcgaggactgttggtcgcgggtgccagtgtagcccctagccctgctgtggataaagcccaggccgagctgcaggaactgctgaccattgctgaacgctgggaggagaaagcccacctctgcctggaggccaggcagaagcatccaccagccacacttgaggccataatccgtgaagcggaaaacatccctgttcacctgcccaacatccaggctctcaaggaggctcttgctaaggcccgggcctggattgctgatgttgatgagatccaaaatggtgaccactacccctgcctggatgacttggagggcctagtagctgtgggccgggacctacctgtggggctggaggagctgagacagctagagctacaggtactgacagcgcactcctggagggagaaggcctccaagaccttcctcaagaaaaattcttgctacacgctgctggaggttctctgcccatgtgcagatgccggctcagacagcaccaagcgcagccggtggatggagaaggagctggggttgtacaaatctgacacagagctgctggggctgtctgcgcaggacctcagggacccaggctctgtgatcgtggccttcaaggagggggaacagaaggagaaggagggtatcctgcagctgcgtcgcaccaattcggccaagcccagtccactggcatcatcgagcacggcctcctctacaacctctatctgtgtgtgtgggcaggtgctggctggggcgggagctctgcagtgtgacctgtgtcaggactggttccatgggcggtgtgtgtcagtgcctcgcctcctcagctctccgaggcccaatcccacctcatccccactgctggcctggtgggaatgggacaccaaattcctgtgtccactgtgtatgcgctcaaggcgcccgcgcctggagaccatcctggcactgctggtagccctgcagagactgcctgtgcggctgcccgagggcgaggccctgcagtgcctcacagagagggccatcagctggcaaggccgcgccaggcaggctctggcctctgaagatgtgactgctcttttgggacggctggctgagctccgccaacggctacaggctgaacctagacctgaggagcctcctaactaccctgcagcccctgcttctgaccccctcagagagggcagtggcaaggatatgcctaaggtccagggcttactggagaatggagacagtgtgaccagtcctgagaaggtagccccggaggagggctcagatctggagctgctgtcctcgctgttgccacagttgactggccctgtgttggaactgcctgaggcaacccgggcccccttggaggagctcatgatggagggggacctgctcgaggtgaccctggatgagaaccacagcatccctgagtcccttgacttttgtattctgactccaaggtattgttcagacctcagctcctgggggccggcccctggagtcttccctccctggtagcctctaaccagcattcccagacacctgaggcagatagatggatgggctggtgggcaggggggtggctggggctgggccatcaccattccagagacaaggccagtgtatatgcaaactgggggactctcctcccttctctccccagttctggtcctggccaggccatgctacactaacccctgcccccactctcctcccctcttttccttccttcctacccccttctccctctcccttcccctgactgttccacccaggaggaggaaacttcacatagccgtgctcacagttttttattttaaaggaatttggctggggagctgaacagggctccctgtgatctgaagaaagcttttggtgcttgtcctcacaaccacctcagtcctccctccctgtcctcccctgtctcctttcctcctcctgggttcatgttgtaataaaagaagattgttggtgtgtaattaatttgttcaaaagaaaaaaaaaagcaaaacaagaaacttggttccaactgaagcctattttaattttattttattattttcctcttgttagaaataaaacccttagaaacattttttggaaacatgtttctgaagtgcatttctcttagacggggaagacagtgcttccatcaccagtcagtggagcagctgtagtgctggcaggagcactagggctgaagccagggagctctgggttctgaaatcaagttccaccagcttcttaaccttgggcaagacattctgatcctcccccgactctaaccccaagccactttccctcaagtccaaacagatgggctcgggccccctcacccaaactcctacactacaacctcccccagttgatgccctccagtttatcctcctcaagctcccaaagggatttttttgttaatggctttattgagatataatttacatactataaaattcacttgtttgaaatgtacaattcagtgatttggggggtttctaaagtgtagatctgattatatactgcttaaaaccttccatgatgctttattgcccttaagattatacatagaatctcgttcttcctagaatgttttcctgtctaacccatctactgcataattccctgatttttctccacaggttatgcccctgatgaatggggactaaagctcagatgtgtggtcatttgcaacccctgagttcacttttttaagacagcttattgatatatataatgtacataccatacagtcacccacttaaaagtatacaattaaatagcttttagtatattcagagttgtgcagccatcattcgaaaaaaaatttcagaacattttcatcactgcagaaagaaactccatatcccttaggcgtcctttacccctcatcccatttgcctattctggacattttacataaatggaatcgtataatatgtga

SEQ ID NO: 60044 - DNA, 4140 bp, Artificial Sequence
  derived and/or modified sequence
atggagcccggcagcgacgacttcctgcccccccccgagtgccccgtgtttgagccttcgtgggccgaattccgtgatccattaggttacatagcaaaaatccggccaatagccgaaaagtccggcatctgtaagattagacccccagccatcgtggtggaggaggggggatatgaggccatctgtaaagacagacggtgggcacgggtcgcccagcggctcaactaccctccagggaagaacataggaagcttgcttcgatcccactacgagaggatagtgtacccatatgaaatgtaccagagcggagccaaccttgttcagtgtaataccagaccatttgacaatgaggagaaggataaagagtacaaacctcatagcataccactaaggcagtcggttcagccgtccaagttcaactcctatggcagacgcgctaaaagactgcagccagatccagagccgactgaggaagatatcgagaaaaaccctgagctgaaaaagctccagatttacggtgccggacccaaaatgatgggcttgggtctaatggccaaagacaaaacattgcggaagaaggacaaagagggtccagagtgtccacctaccgtggtcgttaaagaagagctggggggtgacgtgaaagttgagtccacctcacccaagacctttctggagagcaaagaagaactatctcattcgccggaaccttgtacgaaaatgaccatgcgactaagaaggaatcacagcaatgcccagttcatagaaagctacgtgtgcaggatgtgcagccggggtgatgaggacgacaagctcctgctgtgcgacggatgcgatgacaattaccacattttctgcttgcttccacctctgccagaaatccccaaaggtgtgtggcgctgccctaagtgtgtgatggccgagtgcaaaaggcctccggaggcatttgggtttgaacaagctacacgcgaatatacactccagagcttcggggaaatggccgacagcttcaaggcagattactttaacatgccagttcatatggttcccacggaattagtggaaaaagaattttggagattggtcaactccatcgaagaagacgtgaccgtcgagtatggcgcagatatccattctaaggaatttggcagtgggttccccgtgtccgactctaaacggcacctgacacccgaggaggaagagtatgccacaagcggctggaatctcaatgtgatgcccgtcctggagcagagcgtcttatgccatatcaacgccgatatttctgggatgaaagtcccatggctgtacgtgggaatggtgttcagtgctttttgttggcacattgaagaccattggtcatattctattaattacctgcactggggcgaacccaaaacatggtacggcgtgccatctctggctgccgagcacctggaggaggttatgaagaagttgacgcctgaactttttgattcgcagccagacttgctccaccagctggtcaccctcatgaaccccaacaccctgatgtcacatggcgttcctgttgtgagaactaatcaatgcgcaggtgaattcgtcatcacgttcccccgggcttaccacagcggcttcaaccaaggctataactttgccgaagccgttaacttttgcactgctgattggctacccgcgggccgccagtgcattgaacattaccgcagactccgccggtactgtgtgttcagccacgaagaactgatttgtaagatggccgcctgcccagaaaaactagatttgaacctggccgccgccgtgcataaagaaatgtttattatggtccaagaggaacgacgtctccgcaaggccctgctggaaaaggggattaccgaggcggaacgggaagcctttgagctccttcctgatgacgaaaggcagtgtatcaaatgcaagaccacctgcttcctgagcgcattagcctgttacgactgtcctgatggtctggtgtgtctgtcccacattaatgatctatgcaagtgcagctcttccaggcaatatttaagatatcggtatacactggacgaactccctgcaatgctccataagctcaaagtccgggccgagagcttcgacacatgggccaacaaggttcgcgtcgcgctggaggtggaagacggtagaaaaaggagtctggaggagctgagagctttggagtccgaagcacgggagcgacgttttccaaactcggaattacttcagcagcttaaaaattgtttgtcagaggccgaggcctgcgtgtcccgggcgctgggactggtgagtggccaggaggcaggcccccatagagtcgccggactccaaatgacgttgactgaattaagagcctttctggaccagatgaacaatctgccatgcgcaatgcaccagatcggagatgtcaaaggtgtgttggaacaggtcgaagcttaccaggcggaggcacgcgaggccctggcatccctgccttcctccccagggctccttcagtctcttctggagagaggtcgccaactgggcgtcgaggtaccggaggcgcagcagctccagaggcaggtcgagcaagcccggtggctggatgaagtcaaaagaactcttgccccgagtgctcgaagggggacccttgcggtcatgcgcggacttctcgttgctggggccagtgtcgcaccaagccccgccgtcgacaaagcgcaggccgaactgcaagagctgctgacaatcgctgaaagatgggaggaaaaggcccacctttgcctggaagcccgtcaaaagcacccccccgcgacccttgaggctatcattagagaagccgaaaatataccagtgcatctccccaatatacaggctcttaaggaagcactcgctaaagcacgcgcatggatcgccgacgtggacgagatacaaaatggcgatcattacccgtgtttggacgaccttgaaggtctcgtggccgttggtagggacctccccgtggggcttgaagaattgcggcaattggagctgcaagtgctgactgcacattcttggagagaaaaagcttcaaagactttcctgaagaagaattcgtgctacacactgctggaagtgctgtgcccatgtgccgacgctgggtccgactccactaaaagaagccggtggatggagaaagagctgggcctgtataagagtgacactgagctcctggggctgtctgctcaagatctgagggaccctggctccgttatagttgcctttaaggagggcgagcaaaaggagaaggagggcattcttcagctgaggagaaccaactccgcaaagccgtcgcccctggcttcatcctccacggcctcaagtacaacctcaatatgtgtgtgcgggcaggtcctggcaggggcgggagcccttcaatgcgatctgtgccaggactggttccatgggaggtgcgtttccgtgcccagactgcttagttcgccaaggccaaacccaacctcttctcctctgctggcttggtgggaatgggacacaaaatttctttgccctctttgtatgcggtctcgaaggccaaggttagaaaccattttggcattgctcgtcgccctccagcggctgcctgtccggcttccagagggggaagctctgcaatgtttgactgagagagcaatctcttggcaagggcgtgcccggcaggcattggccagtgaagatgttacggcacttttaggacggttagccgagctgagacaaaggttgcaggctgagcccagaccggaagagcctccaaactacccggcagcgcccgcctcagatcccctgcgagagggttctggaaaagacatgcccaaggttcaagggctgttggaaaacggagacagtgtcacttctccagagaaggtggcccctgaagagggttcagacttggagctcttatcttccctgctgcctcaactcaccggccctgttttggaactccctgaggccacaagagccccactggaggaactcatgatggagggggatttgctggaggtcaccttagatgaaaatcactctatccccgagagcctggacttctgtatattgacccctcggtactgctcagacctgtccagttggggccccgcaccaggtgtcttccctccttggtag

SEQ ID NO: 60045 - DNA, 4140 bp, Artificial Sequence
  derived and/or modified sequence
atggagccgggttctgacgactttttgcccccacccgaatgtcccgtattcgagccctcctgggctgaatttagagatcccctggggtacatagccaaaatccgccctattgctgaaaagtcggggatttgtaagatccgaccacctgctatagtagtggaggagggtggctatgaggccatctgcaaggataggcggtgggccagggttgcacagcgactgaattatccgccaggaaagaatattggcagtttactcagaagccactatgagagaattgtgtacccttacgagatgtaccagagtggtgcaaacctcgtgcagtgtaatactaggccattcgacaatgaggagaaagataaggagtataaaccgcattccatccccctgaggcagagcgtacagcccagcaaatttaattcttatggcaggcgagcgaaacgcctgcagcccgaccccgagcctacggaggaagatatcgaaaagaaccccgaactgaagaaattgcagatctacggtgccggtccgaagatgatgggcctgggacttatggccaaggataaaaccctaagaaaaaaggataaagagggtcccgagtgtccacccacagtggtggttaaggaggaactaggcggagatgtgaaggtggaatcaaccagccccaagaccttcttggagtccaaagaagaactgtcccacagcccagagccatgcacaaagatgactatgagattaaggaggaaccacagcaacgcgcagtttatcgagagttacgtctgccgaatgtgtagcagaggcgacgaagacgataaactgctgctgtgtgacggctgtgacgacaactatcatatcttctgtctcctgccacccttgcctgaaatccctaaaggcgtttggagatgcccaaagtgcgttatggcagaatgcaaacgcccacctgaggccttcggatttgagcaagccacacgcgaatacactctgcaatcctttggggaaatggctgacagtttcaaagccgactatttcaacatgcctgtgcatatggtgcctacagaactcgttgaaaaggaattctggcgcctcgtcaactccatcgaagaagatgtgaccgtcgagtatggtgctgatatccatagcaaggagtttggctccggcttccccgtgtctgattccaagagacacctcactcctgaggaagaggaatacgccacaagcggttggaaccttaatgtgatgcctgtgctggaacagtcagttctttgtcacattaacgccgacataagtgggatgaaggtgccttggttgtacgtggggatggtattttcagccttctgctggcacattgaagatcactggagctattccatcaactacctgcattggggcgaacccaagacttggtacggggttccatcgttagctgcagagcatctcgaggaagttatgaagaaactaactccggaactttttgacagtcagccggacctgctgcaccagctagtcacattaatgaaccccaatacccttatgtcccatggcgtgccggtggttcggactaatcagtgtgccggagagttcgtgatcacattcccacgggcttatcactcaggtttcaaccagggctataatttcgcggaagccgtgaatttttgcactgctgattggctgcccgcagggcgacaatgtatcgaacactaccgcaggttaagacgttactgcgttttctctcacgaagaattgatttgcaagatggctgcctgtcccgaaaagctcgacctgaacctagctgccgcagtacacaaagaaatgtttatcatggtccaggaagagagacgcctgcggaaagccctgctcgaaaagggtattactgaggcggagagagaggccttcgagcttctgcctgatgacgagcggcagtgtattaaatgcaagaccacatgtttcctatccgctttggcctgttacgattgtcctgacgggctcgtgtgtttatcacacataaacgacctgtgtaagtgttctagttcacggcagtacctgcgctatcggtacacgctggatgagctccccgctatgctacataagctcaaagtgcgcgctgaatccttcgacacctgggcaaataaagtaagagttgcactcgaagtagaagacgggaggaagcggtccttggaggagctccgcgcactagaatctgaggctcgcgagcgcagattccctaattcggaactgctccagcaactaaaaaattgcctgtctgaagccgaagcctgtgttagtcgggcactcggcctcgtttcaggccaagaagcgggaccccacagggtggctgggttacagatgaccttgactgaactgagagctttcctggatcagatgaataatttaccttgcgcaatgcatcagatcggcgacgtgaagggagttttggaacaggtggaggcttatcaagctgaggctcgggaggccctggcaagccttccttccagcccgggtctgttgcagtccctgctggaacgcggtaggcagctgggggtggaagtgcccgaagctcagcagctgcagagacaggtcgagcaggccagatggttggacgaggtaaaacgaacgttggccccaagtgccaggcgcggaaccctcgccgtcatgagaggtctgcttgtcgccggagccagcgtcgctccttctcccgctgtggacaaagcacaggccgagttgcaggagcttctgaccatagcagaacgctgggaggagaaagcacatttgtgtctggaagcaagacagaagcacccacctgcgacgctggaggcaattattcgggaggctgaaaacatccctgtgcatctgcccaacatccaggccctgaaagaagcactagctaaggctcgggcttggatcgccgacgttgacgaaattcagaacggcgatcactacccatgtcttgacgatttagaagggctggtggcagtcggtcgcgatcttcccgtgggtcttgaagagctcagacagttagagctccaggtgctgaccgcgcacagttggcgagaaaaagcctccaaaaccttcctgaagaaaaattcttgctatacattattggaggtcctgtgtccatgcgcggacgctggctcggactcaaccaagagatctcgatggatggagaaggaactcggcctttataagtccgataccgaactgctggggttgagcgctcaggacctacgcgatcctgggtcagtaattgtggcattcaaagaaggtgagcagaaagaaaaggagggaatactacaattacgcaggacaaacagtgccaagcccagtcctctggcctcctcctctactgcgtcctctacgacctccatttgtgtgtgtgggcaggtgttagcgggtgccggtgctctgcagtgcgatctgtgtcaggactggtttcacggcagatgtgtgagtgtgccgaggctattatcatccccccgacccaaccctacaagctcaccacttctggcctggtgggaatgggacacgaaattcctgtgccctctttgtatgcgatccaggcgccctagactggaaacaatactggccctactggtggcccttcagagacttcccgtgcgactgcccgaaggggaggcgctccagtgcctcactgagagggctattagctggcaggggcgagcccgacaggcactggcttcagaggacgtaacggctcttctaggaaggctggcagagctccgtcagagactgcaggccgaacctcgcccagaggagccgccaaattaccccgctgctcccgctagcgaccccctccgtgaagggagcggcaaagatatgcccaaggtccaaggccttttggagaacggagattccgtgacatcaccagagaaggtggcgcctgaggaaggttccgatctagagctactgtcctcactcctcccgcagctgaccgggccagtgctggagcttccggaagctacgcgcgcacctctcgaagagttgatgatggagggcgatttgctggaagtgaccctggatgaaaaccactctattccagaatcccttgatttctgcatcttgaccccaagatactgcagtgacctctccagctggggaccagcacccggagtatttcctccctggtag

SEQ ID NO: 60046 - DNA, 4140 bp, Artificial Sequence
  derived and/or modified sequence
atggagcccggcagcgacgacttcctgcccccccccgagtgccccgtgttcgagcccagctgggccgagttcagagaccccctgggctacatcgccaagatcagacccatcgccgagaagagcggcatctgcaagatcagaccccccgccatcgtggtggaggagggcggctacgaggccatctgcaaggacagaagatgggccagagtggcccagagactgaactacccccccggcaagaacatcggcagcctgctgagaagccactacgagagaatcgtgtacccctacgagatgtaccagagcggcgccaacctggtgcagtgcaacaccagacccttcgacaacgaggagaaggacaaggagtacaagccccacagcatccccctgagacagagcgtgcagcccagcaagttcaacagctacggcagaagagccaagagactgcagcccgaccccgagcccaccgaggaggacatcgagaagaaccccgagctgaagaagctgcagatctacggcgccggccccaagatgatgggcctgggcctgatggccaaggacaagaccctgagaaagaaggacaaggagggccccgagtgcccccccaccgtggtggtgaaggaggagctgggcggcgacgtgaaggtggagagcaccagccccaagaccttcctggagagcaaggaggagctgagccacagccccgagccctgcaccaagatgaccatgagactgagaagaaaccacagcaacgcccagttcatcgagagctacgtgtgcagaatgtgcagcagaggcgacgaggacgacaagctgctgctgtgcgacggctgcgacgacaactaccacatcttctgcctgctgccccccctgcccgagatccccaagggcgtgtggagatgccccaagtgcgtgatggccgagtgcaagagaccccccgaggccttcggcttcgagcaggccaccagagagtacaccctgcagagcttcggcgagatggccgacagcttcaaggccgactacttcaacatgcccgtgcacatggtgcccaccgagctggtggagaaggagttctggagactggtgaacagcatcgaggaggacgtgaccgtggagtacggcgccgacatccacagcaaggagttcggcagcggcttccccgtgagcgacagcaagagacacctgacccccgaggaggaggagtacgccaccagcggctggaacctgaacgtgatgcccgtgctggagcagagcgtgctgtgccacatcaacgccgacatcagcggcatgaaggtgccctggctgtacgtgggcatggtgttcagcgccttctgctggcacatcgaggaccactggagctacagcatcaactacctgcactggggcgagcccaagacctggtacggcgtgcccagcctggccgccgagcacctggaggaggtgatgaagaagctgacccccgagctgttcgacagccagcccgacctgctgcaccagctggtgaccctgatgaaccccaacaccctgatgagccacggcgtgcccgtggtgagaaccaaccagtgcgccggcgagttcgtgatcaccttccccagagcctaccacagcggcttcaaccagggctacaacttcgccgaggccgtgaacttctgcaccgccgactggctgcccgccggcagacagtgcatcgagcactacagaagactgagaagatactgcgtgttcagccacgaggagctgatctgcaagatggccgcctgccccgagaagctggacctgaacctggccgccgccgtgcacaaggagatgttcatcatggtgcaggaggagagaagactgagaaaggccctgctggagaagggcatcaccgaggccgagagagaggccttcgagctgctgcccgacgacgagagacagtgcatcaagtgcaagaccacctgcttcctgagcgccctggcctgctacgactgccccgacggcctggtgtgcctgagccacatcaacgacctgtgcaagtgcagcagcagcagacagtacctgagatacagatacaccctggacgagctgcccgccatgctgcacaagctgaaggtgagagccgagagcttcgacacctgggccaacaaggtgagagtggccctggaggtggaggacggcagaaagagaagcctggaggagctgagagccctggagagcgaggccagagagagaagattccccaacagcgagctgctgcagcagctgaagaactgcctgagcgaggccgaggcctgcgtgagcagagccctgggcctggtgagcggccaggaggccggcccccacagagtggccggcctgcagatgaccctgaccgagctgagagccttcctggaccagatgaacaacctgccctgcgccatgcaccagatcggcgacgtgaagggcgtgctggagcaggtggaggcctaccaggccgaggccagagaggccctggccagcctgcccagcagccccggcctgctgcagagcctgctggagagaggcagacagctgggcgtggaggtgcccgaggcccagcagctgcagagacaggtggagcaggccagatggctggacgaggtgaagagaaccctggcccccagcgccagaagaggcaccctggccgtgatgagaggcctgctggtggccggcgccagcgtggcccccagccccgccgtggacaaggcccaggccgagctgcaggagctgctgaccatcgccgagagatgggaggagaaggcccacctgtgcctggaggccagacagaagcacccccccgccaccctggaggccatcatcagagaggccgagaacatccccgtgcacctgcccaacatccaggccctgaaggaggccctggccaaggccagagcctggatcgccgacgtggacgagatccagaacggcgaccactacccctgcctggacgacctggagggcctggtggccgtgggcagagacctgcccgtgggcctggaggagctgagacagctggagctgcaggtgctgaccgcccacagctggagagagaaggccagcaagaccttcctgaagaagaacagctgctacaccctgctggaggtgctgtgcccctgcgccgacgccggcagcgacagcaccaagagaagcagatggatggagaaggagctgggcctgtacaagagcgacaccgagctgctgggcctgagcgcccaggacctgagagaccccggcagcgtgatcgtggccttcaaggagggcgagcagaaggagaaggagggcatcctgcagctgagaagaaccaacagcgccaagcccagccccctggccagcagcagcaccgccagcagcaccaccagcatctgcgtgtgcggccaggtgctggccggcgccggcgccctgcagtgcgacctgtgccaggactggttccacggcagatgcgtgagcgtgcccagactgctgagcagccccagacccaaccccaccagcagccccctgctggcctggtgggagtgggacaccaagttcctgtgccccctgtgcatgagaagcagaagacccagactggagaccatcctggccctgctggtggccctgcagagactgcccgtgagactgcccgagggcgaggccctgcagtgcctgaccgagagagccatcagctggcagggcagagccagacaggccctggccagcgaggacgtgaccgccctgctgggcagactggccgagctgagacagagactgcaggccgagcccagacccgaggagccccccaactaccccgccgcccccgccagcgaccccctgagagagggcagcggcaaggacatgcccaaggtgcagggcctgctggagaacggcgacagcgtgaccagccccgagaaggtggcccccgaggagggcagcgacctggagctgctgagcagcctgctgccccagctgaccggccccgtgctggagctgcccgaggccaccagagcccccctggaggagctgatgatggagggcgacctgctggaggtgaccctggacgagaaccacagcatccccgagagcctggacttctgcatcctgacccccagatactgcagcgacctgagcagctggggccccgcccccggcgtgttccccccctggtag

SEQ ID NO: 60047 - protein, 1570 aa, Artificial Sequence
  derived and/or modified sequence
MEPGCDEFLPPPECPVFEPSWAEFQDPLGYIAKIRPIAEKSGICKIRPPADWQPPFAVEVDNFRFTPRVQRLNELEAQTRVKLNYLDQIAKFWEIQGSSLKIPNVERKILDLYSLSKIVIEEGGYEAICKDRRWARVAQRLHYPPGKNIGSLLRSHYERIIYPYEMFQSGANHVQCNTHPFDNEVKDKEYKPHSIPLRQSVQPSKFSSYSRRAKRLQPDPEPTEEDIEKHPELKKLQIYGPGPKMMGLGLMAKDKDKTVHKKVTCPPTVTVKDEQSGGGNVSSTLLKQHLSLEPCTKTTMQLRKNHSSAQFIDSYICQVCSRGDEDDKLLFCDGCDDNYHIFCLLPPLPEIPRGIWRCPKCILAECKQPPEAFGFEQATQEYSLQSFGEMADSFKSDYFNMPVHMVPTELVEKEFWRLVSSIEEDVTVEYGADIHSKEFGSGFPVSNSKQNLSPEEKRQSLTVLTRLISSFWAQAVLPPWPPKVLGLQEYATSGWNLNVMPVLDQSVLCHINADISGMKVPWLYVGMVFSAFCWHIEDHWSYSINYLHWGEPKTWYGVPSLAAEHLEEVMKMLTPELFDSQPDLLHQLVTLMNPNTLMSHGVPVVRTNQCAGEFVITFPRAYHSGFNQGYNFAEAVNFCTADWLPAGRQCIEHYRRLRRYCVFSHEELICKMAAFPETLDLNLAVAVHKEMFIMVQEERRLRKALLEKGVTEAEREAFELLPDDERQCIKCKTTCFLSALACYDCPDGLVCLSHINDLCKCSSSRQYLRYRYTLDELPTMLHKLKIRAESFDTWANKVRVALEVEDGRKRSFEELRALESEARERRFPNSELLQRLKNCLSEVEACIAQVLGLVSGQVARMDTPQLTLTELRVLLEQMGSLPCAMHQIGDVKDVLEQVEAYQAEAREALATLPSSPGLLRSLLERGQQLGVEVPEAHQLQQQVEQAQWLDEVKQALAPSAHRGSLVIMQGLLVMGAKIASSPSVDKARAELQELLTIAERWEEKAHFCLEARQKHPPATLEAIIRETENIPVHLPNIQALKEALTKAQAWIADVDEIQNGDHYPCLDDLEGLVAVGRDLPVGLEELRQLELQVLTAHSWREKASKTFLKKNSCYTLLEVLCPCADAGSDSTKRSRWMEKALGLYQCDTELLGLSAQDLRDPGSVIVAFKEGEQKEKEGILQLRRTNSAKPSPLAPSLMASSPTSICVCGQVPAGVGVLQCDLCQDWFHGQCVSVPHLLTSPKPSLTSSPLLAWWEWDTKFLCPLCMRSRRPRLETILALLVALQRLPVRLPEGEALQCLTERAIGWQDRARKALASEDVTALLRQLAELRQQLQAKPRPEEASVYTSATACDPIREGSGNNISKVQGLLENGDSVTSPENMAPGKGSDLELLSSLLPQLTGPVLELPEAIRAPLEELMMEGDLLEVTLDENHSIWQLLQAGQPPDLDRIRTLLELEKFEHQGSRTRSRALERRRRRQKVDQGRNVENLVQQELQSKRARSSGIMSQVGREEEHYQEKADRENMFLTPSTDHSPFLKGNQNSLQHKDSGSSAACPSLMPLLQLSYSDEQQL

SEQ ID NO: 60048 - DNA, 4713 bp, Artificial Sequence
  derived and/or modified sequence
atggaacccggttgcgacgagttccttccccctcctgaatgcccagtttttgagcccagctgggctgagtttcaggatcctctgggctacattgccaagattagaccaattgctgagaaaagcggaatctgcaagatccggccccctgcagattggcagcctcccttcgcagtggaggtcgacaacttcagatttacccctagagttcagcgtcttaatgaattagaagcacagacacgcgtgaagttgaactatctggaccaaattgccaagttctgggagatccagggatccagtctcaagattccaaacgtcgaaagaaaaatcttagacctgtacagcctgtctaagattgtaattgaggaaggcggatacgaggccatctgcaaggatagaagatgggccagagttgcccaacgactgcactaccccccggggaaaaatataggatctctcctcaggagccattatgaacgcattatctatccatacgagatgttccaaagcggggctaatcatgtacagtgcaacactcatcccttcgacaacgaggttaaagacaaggagtataagccccactcaattcccttgaggcaaagtgtgcagcccagcaagtttagttcctactcaaggcgggctaagcggctccagccagaccctgaacccacagaggaggacatcgaaaagcatccagagctgaaaaagctacaaatctacggccctgggccgaaaatgatgggactcggactcatggccaaggataaagacaagacggttcacaaaaaggtgacctgcccccctaccgtgaccgtgaaagatgaacagagtggcggggggaacgtcagctccacgctgctgaagcagcacctcagcctggagccctgcacaaagaccacaatgcagctgaggaagaatcattccagcgcacagttcatcgatagctatatctgccaggtgtgttccaggggggatgaggacgacaagttgctgttctgcgatggctgcgacgataactatcacatcttctgcctgctgcctccactcccggagatccctagaggcatctggcgctgtccaaaatgcattctcgcggaatgtaaacaacccccagaggccttcggctttgagcaggctactcaggaatactcattgcagagctttggtgagatggccgattcatttaaatccgattacttcaacatgccagttcacatggttccaacagaactggtagaaaaggaattctggaggctggtctcgtctattgaggaagatgtgacggtggagtacggcgcagatatccatagcaaggagtttggaagcgggttcccagtgtcaaattctaaacagaacttgtctcccgaagaaaagagacagtcactcacagtcctgaccaggctgataagctcgttttgggcacaggctgtcctgccaccatggcccccgaaagtactggggctccaggagtacgcaacctcgggctggaatcttaacgtgatgccggtccttgaccagtctgtgttatgccatatcaatgctgatatttctggcatgaaggttccatggctgtatgtcggcatggtgttcagcgcattttgctggcatattgaagaccattggtcttacagcatcaactacctgcattggggagaacctaaaacctggtatggcgtgccctcgctggctgcagagcacctagaggaagtgatgaaaatgctcactcctgagctgttcgactcccaacccgacctactccaccagctggtcaccctgatgaatcccaacaccctcatgtctcatggcgtccctgtcgtccgaactaatcagtgcgcaggagagtttgtgataacattcccaagagcttatcactcagggttcaaccagggttacaactttgcagaggccgttaacttctgtacggccgattggctgccagcgggtcggcagtgcatagaacattacaggcggctgcggcgatattgcgtgttcagtcatgaagaactgatctgcaagatggccgctttccctgaaacgctagacctaaaccttgctgtggcggtgcataaagagatgttcattatggttcaggaagaacgccgcctccgcaaagcactgctggaaaagggggtcaccgaggctgagagggaagcctttgagctcttgcccgacgatgagcgccagtgcattaaatgtaagacaacttgttttctgtcggccttggcatgctacgactgtccggatgggctggtatgcctgtcacatatcaatgatttatgcaagtgtagcagctctagacagtacctcagatatagatatactctggacgaacttcccacaatgttacacaaactgaaaatccgcgcagaaagctttgacacgtgggctaacaaggtcagggtcgccctggaagtggaagatggacgcaagaggagcttcgaggagctgcgggccctggaatcagaggcgcgtgagcggcgcttcccaaactctgagctcctacaaagactgaagaactgtttgagcgaggtggaggcctgtattgcccaagtcctggggctggtgtcaggacaggtcgcaaggatggataccccccagctgacactgaccgagctccgcgtgctcctcgagcagatgggatctttaccctgcgcaatgcatcagatcggtgatgtgaaagacgtgcttgaacaagtagaggcctaccaggctgaggccagggaagctctagccactctgcccagcagtccgggacttctccgttcattgctcgaacgggggcagcagttgggggtggaggttcctgaggcgcatcagttgcagcaacaggtggagcaagcccaatggttagatgaggtaaaacaggctctagcccccagcgcacaccgaggatccctagtgataatgcagggactcctggtcatgggcgcaaaaattgctagctctccatccgtagacaaggccagagcggagctgcaggagctcctcactatagcagagaggtgggaagaaaaggctcatttctgtctggaggcccgtcagaagcacccaccagcaacccttgaggcaatcatccgcgagacagaaaatattccagtacatctgccaaacattcaagcactgaaagaggccctcaccaaggctcaggcatggatagctgacgtagatgagatccaaaacggggatcattatccctgcttggacgatctggagggactggtggctgtggggagagatctcccagtgggccttgaggagctgcgccaactggaactgcaggtgttaacagcccattcatggagagagaaggcatcaaaaacctttcttaaaaagaattcttgttacacgctccttgaggtgctctgcccttgtgcagatgctggaagcgacagcaccaagcgcagcagatggatggaaaaggctttagggctgtaccaatgcgacacagagctcctgggactctccgcccaggatcttcgcgatccagggagcgtcattgtggccttcaaagagggagagcagaaagagaaagaagggatcctgcagctgcgtaggacgaatagcgccaagccctccccccttgctcctagcctcatggcttcatcgccaacgtctatctgtgtgtgtgggcaagttcccgctggggtcggcgtcttacagtgtgatttgtgccaggactggttccatggccagtgtgtgagtgtcccgcaccttctcacatcaccaaagccaagtctgacgtctagccccctcctagcatggtgggagtgggacacaaagttcctgtgtcctttgtgcatgaggtcaaggagacctagacttgaaacgatccttgccttactggtcgccttacagagacttcccgtgcgactgccagagggagaggcattacagtgccttactgagcgcgcaattggctggcaggacagagcaagaaaagccctcgcttcggaggacgtgacagctcttctcaggcagctcgccgagctcagacaacagctgcaggctaagccaaggcccgaggaagcaagtgtgtacacttccgccaccgcctgtgatccaattcgcgaggggtcaggtaataacatatccaaggtccaggggctgctcgagaacggggactctgttacgtctcctgagaacatggcccctggtaagggctctgatctcgagctgctttcctcactcttgccccagctgactggtcctgtacttgaactccccgaggcaatcagggcccctctggaggagctgatgatggaaggggatctcctggaagtcacacttgacgagaatcactccatctggcagctgctgcaggccggacaacctcccgacctggatcgtataaggacactgctggagctggagaagttcgaacaccagggaagccgcacgcgtagtagagcgctcgagcggcgccgcaggcggcagaaggtagatcaggggcggaacgttgaaaatctggtgcagcaggaactccagagtaagcgagcccgcagtagcggtatcatgtcacaagtgggtagagaagaggagcattaccaagagaaagccgacagggagaacatgtttttaacaccttcaacagaccattcaccattcctcaagggcaatcagaattcccttcagcacaaagatagtgggtcttctgctgcctgtccctccttgatgccacttcttcagctgtcatactccgatgaacagcaactgtag

SEQ ID NO: 60049 - DNA, 4713 bp, Artificial Sequence
  derived and/or modified sequence
atggagcccggctgtgatgagttcctgcccccaccagaatgtcctgtgtttgagcccagctgggccgagttccaggaccccctgggctacatcgccaagatccggcccatcgccgagaagagcggcatctgcaagatccggcccccagctgactggcagcccccatttgctgtggaggtggacaacttccgcttcaccccccgggtgcagaggctgaatgagctggaggcccagaccagggtgaagctgaactacctggaccagatcgccaagttctgggagatccagggcagcagcctgaagatccccaacgtggagaggaagatcctggacctgtacagcctgagcaagatcgtcatcgaggagggcggctatgaggccatctgcaaggaccggcgctgggcccgggtggcccagaggctgcactacccacctgggaagaacatcggcagcctgctgcggagccactatgagcgcatcatctacccctatgagatgttccagagcggggccaaccacgtgcagtgcaacacccacccctttgacaatgaggtgaaggacaaggagtacaagccccacagcatccccctgcggcagagcgtgcagcccagcaagttcagcagctacagcagaagagccaagaggctgcagcctgaccctgagcccacagaagaagatattgagaagcaccctgagctgaagaagctgcagatctacggccctggccccaagatgatgggcctgggcctgatggccaaggacaaggacaagacagtgcacaagaaggtgacctgcccccccaccgtgacagtgaaggatgagcagagcggcggcggcaatgtgagcagcaccctgctgaagcagcacctgagcctggagccctgcaccaagaccaccatgcagctgaggaagaaccacagcagcgcccagttcatcgacagctacatctgccaggtgtgcagcagaggagatgaagatgacaagctgctcttctgtgatggctgtgatgacaactaccacatcttctgcctgctgccccccctgcctgagatcccccggggcatctggcgctgccccaagtgcatcctggccgagtgcaagcagcccccagaggcctttggatttgagcaggccacccaggagtacagcctgcagagctttggagagatggctgacagcttcaagagtgactacttcaacatgcctgtgcacatggtgcccacagagctggtggagaaggagttctggaggctggtgagcagcattgaggaggatgtgacagtggagtatggagctgacatccacagcaaggagtttggaagtggcttccctgtgagcaacagcaagcagaacctgagccctgaggagaagaggcagagcctgactgtgctgaccaggctcatcagcagcttctgggcccaggccgtgctgcccccctggccacccaaggtgctgggcctgcaggagtatgccaccagcggctggaacctgaatgtgatgcctgtgctggaccagagcgtgctgtgccacatcaatgctgacatcagcggcatgaaggtgccctggctgtatgtgggcatggtgttcagcgccttctgctggcacatcgaggaccactggagctacagcatcaactacctgcactggggcgagcccaagacctggtacggcgtgcccagcctggccgctgagcacctggaggaggtgatgaagatgctgaccccagagctgtttgacagccagcctgacctgctgcaccagctggtgaccctgatgaaccccaacaccctgatgagccacggcgtgcctgtggtgaggaccaaccagtgtgccggggagtttgtgatcaccttcccccgggcctaccacagcggcttcaaccagggctacaactttgctgaggccgtgaacttctgcacagctgactggctgcctgctggccggcagtgcatcgagcactacagaaggctgcggcgctactgtgtgttcagccatgaggagctgatctgcaagatggccgccttccctgagaccctggacctgaacctggccgtggccgtgcacaaggagatgttcatcatggtgcaggaggagcggcggctgaggaaggccctgctggagaagggcgtgacagaagctgagcgggaggcctttgagctgctgcctgatgatgagcggcagtgcatcaagtgcaagaccacctgcttcctgagcgccctggcctgctatgactgcccagatggcctggtgtgcctgagccacatcaatgacctgtgcaagtgcagcagcagccggcagtacctgcgctaccgctacaccctggatgagctgcccaccatgctgcacaagctgaagatccgggcagagagctttgacacctgggccaacaaggtgcgggtggccctggaggtggaggatggcaggaagaggagctttgaggagctgcgggccctggagagcgaggcccgggagcggcgcttccccaacagcgagctgctgcagaggctgaagaactgcctgtctgaggtggaggcctgcatcgcccaggtgctgggcctggtgtctggccaggtggccaggatggacaccccccagctgaccctgacagagctgcgggtgctgctggagcagatgggcagcctgccctgtgccatgcaccagattggagatgtgaaggatgtgctggagcaggtggaggcctaccaggccgaggcccgggaggccctggccaccctgcccagcagccctggcctgctgcggagcctgctggagcggggccagcagctgggcgtggaggtgcctgaggcccaccagctgcagcagcaggtggagcaggcccagtggctggatgaggtgaagcaggccctggcccccagcgcccaccggggcagcctggtgatcatgcagggcctgctggtgatgggcgccaagatcgccagcagccccagcgtggacaaggcccgggcagagctgcaggagctgctgaccatcgccgagcgctgggaggagaaggcccacttctgcctggaggcccggcagaagcaccccccagccaccctggaggccatcatccgggagacagagaacatccctgtgcacctgcccaacatccaggccctgaaggaggccctgaccaaggcccaggcctggattgctgatgtggatgagatccagaatggagaccactacccctgcctggatgacctggagggcctggtggccgtgggccgggacctgcctgtgggcctggaggagctgcggcagctggagctgcaggtgctgacagcccacagctggagggagaaggccagcaagaccttcctgaagaagaacagctgctacaccctgctggaggtgctgtgcccctgtgctgatgctggcagtgacagcaccaagaggagccgctggatggagaaggccctgggcctgtaccagtgtgacacagagctgctgggcctgagcgcccaggacctgcgggaccccggctctgtgattgtggccttcaaggagggggagcagaaggagaaggagggcatcctgcagctgcggaggaccaacagcgccaagcccagccccctggcccccagcctgatggccagcagccccaccagcatctgtgtgtgtggccaggtgcctgctggggtgggcgtgctgcagtgtgacctgtgccaggactggttccacggccagtgtgtgtctgtgccccacctgctgaccagccccaagcccagcctgaccagcagccccctgctggcctggtgggagtgggacaccaagttcctgtgccccctgtgcatgaggagcagaagaccccggctggagaccatcctggccctgctggtggccctgcagaggctgcctgtgcggctgcctgagggggaggccctgcagtgcctgacagagcgggccatcggctggcaggaccgggccaggaaggccctggcctctgaagatgtgacagccctgctgcggcagctggccgagctgcggcagcagctgcaggccaagcccaggcctgaggaggcctctgtgtacaccagcgccacagcctgtgaccccatccgggagggcagcggcaacaacatcagcaaggtgcagggcctgctggagaatggagacagcgtgaccagccctgagaacatggcccctggaaaaggaagtgacctggagctgctgagcagcctgctgccccagctgaccggccctgtgctggagctgcctgaggccatccgggcccccctggaggagctgatgatggagggggacctgctggaggtgaccctggatgagaaccacagcatctggcagctgctgcaggccggccagcccccagacctggaccgcatccgcaccctgctggagctggagaagtttgagcaccagggcagcaggaccaggagccgggccctggagaggagaagaagacggcagaaggtggaccagggcagaaatgtggagaacctggtgcagcaggagctgcagagcaagagggcccggagcagcggcatcatgagccaggtgggccgggaggaggagcactaccaggagaaggctgaccgggagaacatgttcctgacccccagcacagaccacagccccttcctgaagggcaaccagaacagcctgcagcacaaggacagcggcagcagcgctgcctgccccagcctgatgcccctgctgcagctgagctacagtgatgagcagcagctgtag

SEQ ID NO: 60050 - DNA, 5579 bp, Artificial Sequence
  derived and/or modified sequence
cattttaaaaaagatccggccatactatttttatcttgctttttcgttctgtcgcagtactgtttaatatgagtccagcgacggctctgtgactgttttcctctggtaaaatcgctcttgcgtcctcagcgtttatctcaggtgcggaaggtctcacaggtttggaaatagcgccggaaaaatcgatccgcggagtgagacggctcgtaccacactgcagggcccggaggtcaagatggtggctgtaaaactaggatccctgacgattgcttagcattaaggcccgacatggaaccggggtgtgacgagttcctgccgccaccggagtgcccggtttttgagcctagctgggctgaattccaagacccgcttggctacattgcgaaaataaggcccatagcagagaagtctggcatctgcaaaatccgcccacccgcggattggcagcctccttttgcagtagaagttgacaatttcagatttactcctcgcgtccaaaggctaaatgaactggaggcccaaactagagtgaaattgaactatttggatcagattgcaaaattctgggaaattcaaggctcctctttaaagattcccaatgtggagcggaagatcttggacctctacagccttagtaagattgtgattgaggaaggtggctatgaagccatctgcaaggatcgtcggtgggctcgagttgcccagcgtctccactacccaccaggcaaaaacattggctccctgctacgatcacattacgaacgcattatttacccctatgaaatgtttcagtctggagccaaccatgtgcaatgtaacacacacccgtttgacaatgaggtaaaagataaggaatacaagccccacagcatcccccttagacagtctgtgcagccttcaaagttcagcagctacagtcgacgggcaaaaaggctacagcctgatccagagcctacagaggaggacattgagaagcatccagagctaaagaagttacagatatatgggccaggtcccaaaatgatgggcttgggccttatggctaaggataaggataagactgtgcataagaaagtcacatgccccccaactgttacggtgaaggatgagcaaagtggaggtgggaacgtgtcatcaacattgctcaagcagcacttgagcctagagccctgcactaagacaaccatgcaacttcgaaagaatcacagcagtgcccagtttattgactcatatatttgccaagtatgctcccgtggggatgaagatgataagcttcttttctgtgatggctgtgatgacaattaccacatcttctgcttgttaccaccccttcctgaaatccccagaggcatctggaggtgcccaaaatgtatcttggcggagtgtaaacagcctcctgaagcttttggatttgaacaggctacccaggagtacagtttgcagagttttggtgaaatggctgattccttcaagtccgactacttcaacatgcctgtacatatggtgcctacagaacttgtagagaaggaattctggaggctggtgagcagcattgaggaagacgtgacagttgaatatggagctgatattcattccaaagaatttggcagtggctttcctgtcagcaatagcaaacaaaacttatctcctgaggagaagagacaaagtctcactgtgttgaccaggctgatctcaagcttctgggctcaagcagtcctcccaccttggcctcccaaagtgttgggattacaggagtatgcgaccagtggttggaacctgaatgtgatgccagtgctagatcagtctgttctctgtcacatcaatgcagacatctcaggcatgaaggtgccctggctgtacgtgggcatggttttctcagcattttgttggcatattgaggatcactggagttactctattaactatctgcattggggtgagccgaagacctggtatggtgtaccctccctggcagcagagcatttggaggaggtgatgaagatgctgacacctgagctgtttgatagccagcctgatctcctacaccagcttgtcactctcatgaatcccaacactttgatgtcccatggtgtgccagttgtccgcacaaaccagtgtgcaggggagtttgtcatcacttttcctcgtgcttaccacagtggttttaaccaaggctacaattttgctgaagctgtcaacttttgtactgctgactggctacctgctggacgccagtgcattgaacactaccgccggctccggcgctattgtgtcttctcccacgaggagctcatctgcaagatggctgccttcccagagacgttggatctcaatctagcagtagctgtgcacaaggagatgttcattatggttcaggaggagcgacgtctacgaaaggcccttttggagaagggcgtcacggaggctgagcgagaggcttttgagctgctcccagatgatgaacgccagtgcatcaagtgcaagaccacgtgcttcttgtcagccctggcctgctacgactgcccagatggccttgtatgcctttcccacatcaatgacctctgcaagtgctctagtagccgacagtacctccggtatcggtacaccttggatgagctccccaccatgctgcataaactgaagattcgggctgagtcttttgacacctgggccaacaaagtgcgagtggccttggaggtggaggatggccgtaaacgcagctttgaagagctaagggcactggagtctgaggctcgtgagaggaggtttcctaatagtgagctgcttcagcgactgaagaactgcctgagtgaggtggaggcttgtattgctcaagtcctggggctggtcagtggtcaggtggccaggatggacactccacagctgaccttgactgaactccgggtccttcttgagcagatgggcagcctgccctgtgccatgcatcagattggggatgtcaaggatgtcctggaacaggtggaggcctatcaagctgaggctcgtgaggctctggccacactgccctctagtccagggctattgcggtccctgttggagagggggcagcagctgggtgtagaggtgcctgaagcccatcagcttcagcagcaggtggagcaggcgcaatggctagatgaagtgaagcaggccctggccccttctgctcacaggggctctctggtcatcatgcaggggcttttggttatgggtgccaagatagcctccagcccttctgtggacaaggcccgggctgagctgcaagaactactgaccattgcagagcgctgggaagaaaaggctcatttctgcctggaggccaggcagaagcatccaccagccacattggaagccataattcgtgagacagaaaacatccctgttcacctgcctaacatccaggctctcaaagaagctctgactaaggcacaagcttggattgctgatgtggatgagatccaaaatggtgaccactacccctgtctagatgacttggagggcctggtggctgtgggccgggacctgcctgtggggctggaagagctgagacagctagagctgcaggtattgacagcacattcctggagagagaaggcctccaagacctttctcaagaagaattcttgctacacactgcttgaggtgctttgcccgtgtgcagacgctggctcagacagcaccaagcgtagccggtggatggagaaggcgctggggttgtaccagtgtgacacagagctgctggggctgtctgcacaggacctcagagacccaggctctgtgattgtggccttcaaggaaggggaacagaaggagaaggagggtatcctgcagctgcgtcgcaccaactcagccaagcccagtccactggcaccatccctcatggcctcttctccgacttctatctgtgtgtgtgggcaggtgccagctggggtgggagttctgcagtgtgacctgtgtcaggactggttccatgggcagtgtgtgtcagtgccccatctcctcacctctccaaagcccagtctcacttcatctccactgctagcctggtgggaatgggacacaaaattcctgtgtccactgtgtatgcgctcacgacggccacgcctagagacaatcctagccttgctggttgccctgcagaggctgcccgtgcggctgcctgagggtgaggcccttcagtgtctcacagagagggccattggctggcaagaccgtgccagaaaggctctggcctctgaagatgtgactgctctgttgcgacagctggctgagcttcgccaacagctacaggccaaacccagaccagaggaggcctcagtctacacttcagccactgcctgtgaccctatcagagaaggcagtggcaacaatatttctaaggtccaagggctgctggagaatggagacagtgtgaccagtcctgagaacatggctccaggaaagggctctgacctggagctactgtcctcactgttgccgcagttgactggccctgtgttggagctgcctgaggcaatccgggctcccctggaggagctcatgatggaaggggacctgcttgaggtgaccctggatgagaaccacagcatctggcagctgctgcaggctggacagcctccagacctggacagaattcgcacacttctggagctggaaaaatttgaacatcaagggagtcggacaaggagccgggctctggagaggcgacggcggcggcagaaggtggatcagggtagaaacgttgagaatcttgttcaacaggagcttcagtcaaaaagggctcggagctcagggattatgtctcaggtgggccgagaagaagaacattatcaggagaaagcagaccgtgaaaatatgttcctgacaccttccacagaccacagccctttcttgaaaggaaaccaaaatagcttacaacacaaggattcaggctcttcagctgcttgtccttctttaatgcctttgctacaactctcctactctgatgagcaacagttgtgacagtggcaccaaaggtcatttgtggttgtttttgtttgtttgtttcttaaatcctactatctcctggcctggacctcagaaggagctttttgcttatctataatttttcactgccaatttttgatatcctctctcctagagttactgttaaaaggttggttcgtaaagtccacaccccgatgctcagaagtgtcttgccagcaacattcctgctagcatacaggagtgatttcctaaaccagtttcattctagtctgaatagggacaaacaaatcttgaggaagcccaagtgcgtacctttatttttgcccccaccaccctctttctgtacttcaatttttgtttgttttttgtttttttgtccctgtcataaaatattttggtgcttcaaaacttgtaccttcattgtacatccttttcttttctccccttgggtcttattataaaagaagacaatgtacgttgtaattaccaaaaagaatagggaaaaacaagaatttcatgactctacctgtggtctatctttaatttcatttcttttgttaaaaataaaacaatgagtatgtttggatactatg

SEQ ID NO: 60051 - DNA, 4713 bp, Artificial Sequence
  derived and/or modified sequence
atggagcccggctgcgacgagttcctgcccccccccgagtgccccgtcttcgagccctcttgggccgagttccaggaccctttaggctacatagcaaaaattcggcctatcgccgaaaaatctggtatatgcaagattagacctccagcagactggcaaccccccttcgcagttgaggtggacaactttagatttacacctagagtgcagagactgaacgagctggaagcccagacacgggtgaagttgaattatctggaccaaatcgccaaattctgggagatccaaggttcatccttgaaaattcctaatgttgagagaaaaattctagacctgtactccctgtcaaaaattgttatagaagaaggagggtatgaagcaatttgtaaggatcgtcggtgggccagagtggcgcagaggctccattatcccccaggcaaaaacattggatctctgctccgctctcattatgaacgtataatctacccatacgagatgtttcaatccggagccaatcatgtccagtgtaatacgcacccatttgacaatgaggtcaaagacaaggaatacaagccccactcaattccattaaggcaatcagttcagccatccaaattttcctcttacagccggcgagccaagagactgcaacctgaccctgaaccaaccgaggaagatatcgaaaagcatcccgagctcaaaaagcttcagatctacggccctgggcctaaaatgatgggcttgggattaatggccaaggacaaggataaaaccgtgcacaaaaaggttacatgtccccccacggtaaccgtgaaggatgagcaaagcgggggaggcaacgtttcatccacactgctgaaacagcacctatcccttgaaccatgcaccaagaccacaatgcagctcaggaagaaccattcgtccgcccagttcattgactcttacatatgccaggtctgtagtagaggcgatgaagatgacaagttactcttctgtgatgggtgtgatgacaactaccacatcttctgcctgctgccgccgttacccgagatcccgagagggatatggaggtgcccaaaatgcatcctcgccgaatgcaaacagcctccagaggcctttggatttgagcaggccacacaggagtacagccttcagagcttcggcgaaatggctgattcttttaagtctgattactttaacatgcctgtccacatggtacccactgagctggtggagaaagagttctggaggctggtgagttcaattgaagaggacgtgaccgtagagtacggcgcggatatccattccaaagagttcggctccgggttccctgtatcgaacagtaaacaaaacctcagccccgaagagaagcggcagagtcttactgttctgacacggctgatatcatctttttgggcacaagcagttctaccgccctggcctccaaaagtgctgggattacaagaatacgccacttctgggtggaacctgaatgttatgcccgtactcgatcagtcggtcttgtgccacataaacgccgatatcagcggcatgaaagtcccctggctctatgtaggcatggttttctctgccttttgttggcacatcgaggatcattggtcttatagtatcaactatttacactggggggagcctaagacctggtacggcgttcccagtctggctgctgaacatctggaagaggtaatgaagatgctcacccctgagcttttcgacagccagccagacctgctgcaccagctagtaactctgatgaatccaaataccctgatgtctcatggcgtgcctgtcgtgagaaccaaccagtgtgctggggagttcgtgattacatttccacgggcatatcatagtgggttcaaccagggctacaattttgccgaggctgtgaacttctgtacggctgactggctgcctgcaggcaggcagtgtatcgagcattatcgtagattgagacgctactgtgtgtttagtcatgaggagttaatctgtaagatggcagcatttcccgagacactagacctcaatctggccgtggctgtccacaaagagatgttcattatggttcaagaagagcggagactgcgtaaggcactgctagagaagggagttacggaagccgaaagggaggcctttgaactccttcctgatgacgagagacagtgcattaaatgtaaaactacatgtttcctgtctgccctggcgtgttatgattgtcccgacggcttggtttgcctttcccatattaatgacctgtgcaagtgctcttccagcaggcagtacctgagatacagatacactctggatgagttgccaacaatgttgcacaaattgaagatcagggcagagtcattcgacacatgggcaaacaaggtccgcgtagctctcgaagtggaagacggtagaaagagatcattcgaggaactgcgggcactcgagagcgaggcccgtgaacgacgttttccaaactcagaactgttgcaaaggctcaaaaattgcttgtccgaggtcgaagcatgcatcgcccaggtgctcggactggtgagcggccaggtggctcgaatggacaccccacagctcacgctgacagagcttagagtgctgctagaacagatggggtctctgccatgcgctatgcaccaaatcggggacgtgaaagatgtattagaacaggtagaggcttatcaagctgaagcccgcgaagcgctggccacactcccgagcagtcccgggctgctcagaagcctccttgagaggggccagcaactgggtgttgaagtccccgaagcccatcagctgcagcagcaggtggaacaggcacagtggctggatgaagtcaaacaagctcttgcgcctagcgcgcaccgcggaagtctcgtcatcatgcaaggcctcctagtcatgggggctaagattgcctcctcacccagcgtggacaaagcccgggccgagctacaagagctactcactatagccgaaagatgggaagaaaaagcccacttttgtttagaagccaggcagaagcatccgccagcaaccctcgaggccatcattcgagagacggaaaacatccctgttcacctgccaaacatccaagctctgaaagaggcactcactaaagcccaggcctggatcgcagacgtggacgaaattcagaatggagaccactacccctgcctagacgatttggaggggcttgtggcggtgggccgcgacctcccagtgggattggaggagctccgccaactcgagctgcaggtccttaccgcacattcttggagggagaaggcatcgaagacgtttctgaaaaaaaactcttgttacaccctgttggaggtcctatgcccttgcgcggatgccggtagcgacagcaccaagagaagccgatggatggagaaagcccttggtttataccaatgcgatactgagctgctaggtctaagtgcccaggacctccgggatccaggcagcgtgattgtcgcctttaaggaaggcgaacagaaagagaaggagggaattcttcagctcagacggacaaattcagcaaagccctctcccttggccccttcactgatggccagcagccccactagtatctgcgtgtgcggccaagtcccagctggtgtcggggttctgcagtgcgacctgtgtcaggactggtttcatgggcaatgtgtgtctgtgccccacctcctgacgtccccaaagccctctctcaccagttcccccctgctcgcatggtgggaatgggataccaagttcttgtgtcccctctgcatgaggtctaggcggcctagattagaaactattttggccctcctggttgccctgcaacgcctgcccgttcgcttaccggaaggagaggccctgcagtgtttgactgagagagcgatagggtggcaggatagggcacgcaaggcacttgcttcggaggatgtgaccgctctgctgcgacaacttgctgagctgcgtcaacagctgcaagccaagccaaggcctgaggaagcatccgtgtacactagcgccacagcttgcgacccgatccgagaggggtcgggcaacaacatatccaaagttcagggattactagaaaacggagactccgtaacatccccagagaacatggcaccggggaagggatcagacctcgaattgctttcctccctactgccacagctgacgggccctgtgctagagctcccagaagctattcgagctcctcttgaggaacttatgatggagggggatttactcgaagtaacactcgatgaaaatcattcgatttggcagctactgcaagcaggacagccacccgacctggatcgcatccggacattactcgagcttgaaaaattcgagcaccaagggtctcggacacgctcaagggccctggagagacggcgccgaagacagaaggtagaccagggaaggaatgtggaaaatttggtacagcaggagttacagagtaagcgggcccgctctagcggcataatgtcacaggttgggagggaagaagagcattaccaggaaaaagctgatcgggaaaatatgttcttaacccccagtacggaccacagtcctttcttgaagggcaaccaaaactcactccagcataaggattcaggatcctccgctgcatgcccatcattaatgccgctcctgcagctctcatatagcgatgaacagcagctgtag

SEQ ID NO: 60052 - DNA, 4713 bp, Artificial Sequence
  derived and/or modified sequence
atggagccagggtgcgatgaatttttgcctcctcctgagtgtcctgtttttgagccttcatgggcagaattccaggatccccttggttacattgcaaagattcgccctattgccgaaaaatctggaatttgtaagatacggcctccagcggattggcagcccccattcgctgttgaagtagacaatttcaggttcacaccccgagtgcagcggctgaatgaactggaagcgcagacaagggttaaactgaattacttggatcagattgccaagttttgggaaattcaggggtcttctctgaagatccccaacgtcgagcggaagatcctcgatttatatagcttgtccaagattgtcattgaagaggggggatatgaggccatctgcaaggaccgaaggtgggctcgcgtggcacagaggctccattaccctccaggcaaaaacatcggctccctgctccggtctcattacgaaaggatcatatatccgtatgagatgtttcagtctggcgctaaccatgtgcagtgtaacacgcatccattcgacaacgaagttaaagacaaggaatataagccacattctattccactgcgtcaaagtgtccagccatccaagtttagctcttatagccgtcgcgctaagcggttacaacccgatccagagcccacggaggaggatatcgaaaaacatcctgagctcaagaaactgcagatctatggccctggaccaaaaatgatgggcctagggttaatggctaaggacaaggacaagacagtgcacaagaaagtgacttgtccacctaccgtgacagtgaaggatgagcagagtggaggtggcaatgtgagctccacccttttgaaacagcacctatccctcgaaccttgcactaaaacaacaatgcaactgcgcaagaatcacagttccgcgcagttcattgacagctatatttgtcaggtctgttcccgaggcgacgaagacgataaactccttttctgtgatggatgtgacgataattatcacatattctgccttctgcctccactcccggaaattcctagaggaatctggagatgccccaagtgtattctcgctgagtgtaaacagccaccagaagcctttggttttgaacaggcaacccaggaatactctttacagtcatttggggagatggcagactccttcaagtccgattattttaatatgcccgtccacatggtgcctaccgaactggttgagaaggagttctggaggctggtcagtagcatcgaggaagatgtaaccgttgagtacggcgctgatatccactcgaaggagtttggctctgggttccctgttagtaattcaaagcagaaccttagccccgaagaaaagcgccagagtctcacagtgctgacaaggttgatttcaagtttctgggcacaggctgttttgcctccatggcctccaaaggtcctaggactgcaggagtatgccactagcggttggaacctgaacgtgatgcccgtgcttgatcaaagtgtgttgtgtcacatcaatgccgacatttcaggaatgaaggtgccatggctgtatgttggcatggtgttttcagcgttttgttggcacatcgaagaccattggtcatactcaatcaactatctccactggggagagcctaagacctggtacggcgtgccctctctcgccgctgagcacttggaggaggtaatgaagatgctcacccctgagctatttgacagccagcccgacctgttacaccaactagtgactctgatgaatccaaacaccctgatgtctcacggtgttcccgttgtgcggacgaaccaatgtgccggagagtttgtgattacctttccgagagcataccacagcgggtttaaccagggctataacttcgctgaagctgtcaatttttgcaccgctgactggctccccgcaggacgccaatgcatcgaacattacaggcggcttagaaggtactgtgttttctcccatgaggagctgatctgcaaaatggcagcatttcccgaaacactcgacctcaacctcgccgtagctgtacacaaagaaatgttcattatggttcaagaggagagacgcctgcgcaaagctctcctggaaaaaggagtcactgaagcggaaagggaagcgttcgaactcctgcctgatgatgagagacagtgcatcaagtgtaagactacgtgtttcctctccgcactagcttgttatgattgcccggacggactggtctgtctcagccacattaatgatctgtgcaagtgcagttcatctaggcagtatttacgttaccgctatactttggatgagctcccaacaatgctgcataagttaaaaatccgcgcagagagcttcgatacttgggcaaacaaggttcgtgtggcactggaggtcgaagacggacgtaaacgtagcttcgaagaattgagagccctggaatccgaggcccgagagcgaagattcccgaacagcgagctgctacagaggctcaaaaactgtctcagcgaggtggaagcatgtatcgcccaggttttgggtctcgtcagcggccaggtggctaggatggatacaccacagctaacgctcacagagcttcgcgtgctcctggagcagatggggtctttgccttgcgcaatgcaccagattggcgacgtgaaagacgttctggaacaggtggaggcatatcaggctgaggcacgtgaagcactcgcgactctgccttcctcgcccggtctcctgcggtccctactggagcgcggacagcagcttggagtggaagtacctgaagctcaccagttgcagcagcaagtggaacaagcccaatggttagatgaagtcaaacaagccttggctccaagtgcacaccggggaagtttggtcatcatgcagggcctgttggtgatgggagctaaaatagcatccagtcctagcgtggacaaagcacgggctgagctccaggaacttctgactattgccgagaggtgggaagagaaggcccatttttgcctcgaagccagacagaaacacccccctgctacactggaagcaataataagagagactgaaaacattccagtccacttaccaaatatccaggccctcaaggaagccctcaccaaagcccaagcatggatcgcagatgtcgacgaaattcagaacggcgaccattacccatgcttagatgacttggaaggcctcgtggctgtgggaagagacctcccagtgggcctcgaggagctgcggcagctggagctccaagtcctgacagcccactcatggagagagaaggcctcaaaaaccttcctgaagaagaactcttgctacaccttgctggaggtgctctgtccttgtgccgacgctggctcagactcaaccaaaagaagtcgttggatggagaaggctctgggactgtatcagtgtgacaccgagttgctgggtctgagtgcccaggacctccgagatcccggatcagtgattgtggcattcaaagagggagaacagaaggaaaaagaggggatactgcaactcagaaggactaattcagccaaaccctcacctctggccccatctctgatggcctcatccccaacaagtatctgcgtctgcggacaggttccggctggtgttggcgtcttacagtgtgacctctgtcaggactggtttcacggtcaatgcgtgtcagtgcctcatctcctaacctcacctaagccctcgctgacttcatcccctctgctagcctggtgggagtgggacactaagttcctctgtccactctgcatgagaagtcgcaggcctaggctggagacaattctcgcactgctggttgccttgcaacggttgcctgttcgtctccccgagggggaggccctgcagtgcctcactgagagggcaataggatggcaggacagggctcggaaagccctcgcaagcgaggatgtgaccgcgctgttaaggcagctcgcagagctgcggcagcaactgcaggctaaaccaaggcctgaagaggctagtgtgtatacttcagcaaccgcctgtgatccaattagagaaggctcaggaaataacatttcaaaggtgcagggcttgctagaaaacggcgactcagtcacctcacccgagaacatggccccaggcaagggatccgatttagagctgctgtctagtctcttgcctcagcttacaggcccagtgctggaactgccagaagctatcagggccccactagaggagctcatgatggaaggggatctgcttgaagtcacgttggacgagaatcattcgatttggcagctgctgcaggccggacaaccaccagatctggacaggatacgtaccttattagagctcgagaaatttgagcaccaagggagtaggaccagatctagagccctcgaacgcaggaggaggagacagaaggtggatcaaggaaggaatgtggagaatttggtccagcaggagttgcagagcaagagggccagaagttccgggattatgagccaggtcgggagggaagaggagcattaccaggagaaggctgatcgggaaaacatgtttctgacgccaagcactgatcactcccccttcctgaagggaaaccagaattctctgcagcataaggatagtgggagctccgcagcatgtcccagtctgatgcccttgctgcagttgagttactctgatgagcagcaattgtag

SEQ ID NO: 60053 - DNA, 4713 bp, Artificial Sequence
  derived and/or modified sequence
atggagcccggctgcgacgagttcctgcccccccccgagtgccccgtgttcgagcccagctgggccgagttccaggaccccctgggctacatcgccaagatcagacccatcgccgagaagagcggcatctgcaagatcagaccccccgccgactggcagccccccttcgccgtggaggtggacaacttcagattcacccccagagtgcagagactgaacgagctggaggcccagaccagagtgaagctgaactacctggaccagatcgccaagttctgggagatccagggcagcagcctgaagatccccaacgtggagagaaagatcctggacctgtacagcctgagcaagatcgtgatcgaggagggcggctacgaggccatctgcaaggacagaagatgggccagagtggcccagagactgcactacccccccggcaagaacatcggcagcctgctgagaagccactacgagagaatcatctacccctacgagatgttccagagcggcgccaaccacgtgcagtgcaacacccaccccttcgacaacgaggtgaaggacaaggagtacaagccccacagcatccccctgagacagagcgtgcagcccagcaagttcagcagctacagcagaagagccaagagactgcagcccgaccccgagcccaccgaggaggacatcgagaagcaccccgagctgaagaagctgcagatctacggccccggccccaagatgatgggcctgggcctgatggccaaggacaaggacaagaccgtgcacaagaaggtgacctgcccccccaccgtgaccgtgaaggacgagcagagcggcggcggcaacgtgagcagcaccctgctgaagcagcacctgagcctggagccctgcaccaagaccaccatgcagctgagaaagaaccacagcagcgcccagttcatcgacagctacatctgccaggtgtgcagcagaggcgacgaggacgacaagctgctgttctgcgacggctgcgacgacaactaccacatcttctgcctgctgccccccctgcccgagatccccagaggcatctggagatgccccaagtgcatcctggccgagtgcaagcagccccccgaggccttcggcttcgagcaggccacccaggagtacagcctgcagagcttcggcgagatggccgacagcttcaagagcgactacttcaacatgcccgtgcacatggtgcccaccgagctggtggagaaggagttctggagactggtgagcagcatcgaggaggacgtgaccgtggagtacggcgccgacatccacagcaaggagttcggcagcggcttccccgtgagcaacagcaagcagaacctgagccccgaggagaagagacagagcctgaccgtgctgaccagactgatcagcagcttctgggcccaggccgtgctgcccccctggccccccaaggtgctgggcctgcaggagtacgccaccagcggctggaacctgaacgtgatgcccgtgctggaccagagcgtgctgtgccacatcaacgccgacatcagcggcatgaaggtgccctggctgtacgtgggcatggtgttcagcgccttctgctggcacatcgaggaccactggagctacagcatcaactacctgcactggggcgagcccaagacctggtacggcgtgcccagcctggccgccgagcacctggaggaggtgatgaagatgctgacccccgagctgttcgacagccagcccgacctgctgcaccagctggtgaccctgatgaaccccaacaccctgatgagccacggcgtgcccgtggtgagaaccaaccagtgcgccggcgagttcgtgatcaccttccccagagcctaccacagcggcttcaaccagggctacaacttcgccgaggccgtgaacttctgcaccgccgactggctgcccgccggcagacagtgcatcgagcactacagaagactgagaagatactgcgtgttcagccacgaggagctgatctgcaagatggccgccttccccgagaccctggacctgaacctggccgtggccgtgcacaaggagatgttcatcatggtgcaggaggagagaagactgagaaaggccctgctggagaagggcgtgaccgaggccgagagagaggccttcgagctgctgcccgacgacgagagacagtgcatcaagtgcaagaccacctgcttcctgagcgccctggcctgctacgactgccccgacggcctggtgtgcctgagccacatcaacgacctgtgcaagtgcagcagcagcagacagtacctgagatacagatacaccctggacgagctgcccaccatgctgcacaagctgaagatcagagccgagagcttcgacacctgggccaacaaggtgagagtggccctggaggtggaggacggcagaaagagaagcttcgaggagctgagagccctggagagcgaggccagagagagaagattccccaacagcgagctgctgcagagactgaagaactgcctgagcgaggtggaggcctgcatcgcccaggtgctgggcctggtgagcggccaggtggccagaatggacaccccccagctgaccctgaccgagctgagagtgctgctggagcagatgggcagcctgccctgcgccatgcaccagatcggcgacgtgaaggacgtgctggagcaggtggaggcctaccaggccgaggccagagaggccctggccaccctgcccagcagccccggcctgctgagaagcctgctggagagaggccagcagctgggcgtggaggtgcccgaggcccaccagctgcagcagcaggtggagcaggcccagtggctggacgaggtgaagcaggccctggcccccagcgcccacagaggcagcctggtgatcatgcagggcctgctggtgatgggcgccaagatcgccagcagccccagcgtggacaaggccagagccgagctgcaggagctgctgaccatcgccgagagatgggaggagaaggcccacttctgcctggaggccagacagaagcacccccccgccaccctggaggccatcatcagagagaccgagaacatccccgtgcacctgcccaacatccaggccctgaaggaggccctgaccaaggcccaggcctggatcgccgacgtggacgagatccagaacggcgaccactacccctgcctggacgacctggagggcctggtggccgtgggcagagacctgcccgtgggcctggaggagctgagacagctggagctgcaggtgctgaccgcccacagctggagagagaaggccagcaagaccttcctgaagaagaacagctgctacaccctgctggaggtgctgtgcccctgcgccgacgccggcagcgacagcaccaagagaagcagatggatggagaaggccctgggcctgtaccagtgcgacaccgagctgctgggcctgagcgcccaggacctgagagaccccggcagcgtgatcgtggccttcaaggagggcgagcagaaggagaaggagggcatcctgcagctgagaagaaccaacagcgccaagcccagccccctggcccccagcctgatggccagcagccccaccagcatctgcgtgtgcggccaggtgcccgccggcgtgggcgtgctgcagtgcgacctgtgccaggactggttccacggccagtgcgtgagcgtgccccacctgctgaccagccccaagcccagcctgaccagcagccccctgctggcctggtgggagtgggacaccaagttcctgtgccccctgtgcatgagaagcagaagacccagactggagaccatcctggccctgctggtggccctgcagagactgcccgtgagactgcccgagggcgaggccctgcagtgcctgaccgagagagccatcggctggcaggacagagccagaaaggccctggccagcgaggacgtgaccgccctgctgagacagctggccgagctgagacagcagctgcaggccaagcccagacccgaggaggccagcgtgtacaccagcgccaccgcctgcgaccccatcagagagggcagcggcaacaacatcagcaaggtgcagggcctgctggagaacggcgacagcgtgaccagccccgagaacatggcccccggcaagggcagcgacctggagctgctgagcagcctgctgccccagctgaccggccccgtgctggagctgcccgaggccatcagagcccccctggaggagctgatgatggagggcgacctgctggaggtgaccctggacgagaaccacagcatctggcagctgctgcaggccggccagccccccgacctggacagaatcagaaccctgctggagctggagaagttcgagcaccagggcagcagaaccagaagcagagccctggagagaagaagaagaagacagaaggtggaccagggcagaaacgtggagaacctggtgcagcaggagctgcagagcaagagagccagaagcagcggcatcatgagccaggtgggcagagaggaggagcactaccaggagaaggccgacagagagaacatgttcctgacccccagcaccgaccacagccccttcctgaagggcaaccagaacagcctgcagcacaaggacagcggcagcagcgccgcctgccccagcctgatgcccctgctgcagctgagctacagcgacgagcagcagctgtag

SEQ ID NO: 60054 - protein, 1482 aa, Artificial Sequence
  derived and/or modified sequence
MEPGCDEFLPPPECPVFEPSWAEFQDPLGYIAKIRPIAEKSGICKIRPPADWQPPFAVEVDNFRFTPRVQRLNELEAQTRVKLNYLDQIAKFWEIQGSSLKIPNVERKILDLYSLSKQCNTHPFDNEVKDKEYKPHSIPLRQSVQPSKFSSYSRRAKRLQPDPEPTEEDIEKHPELKKLQIYGPGPKMMGLGLMAKDKDKTVHKKVTCPPTVTVKDEQSGGGNVSSTLLKQHLSLEPCTKTTMQLRKNHSSAQFIDSYICQVCSRGDEDDKLLFCDGCDDNYHIFCLLPPLPEIPRGIWRCPKCILAECKQPPEAFGFEQATQEYSLQSFGEMADSFKSDYFNMPVHMVPTELVEKEFWRLVSSIEEDVTVEYGADIHSKEFGSGFPVSNSKQNLSPEEKEYATSGWNLNVMPVLDQSVLCHINADISGMKVPWLYVGMVFSAFCWHIEDHWSYSINYLHWGEPKTWYGVPSLAAEHLEEVMKMLTPELFDSQPDLLHQLVTLMNPNTLMSHGVPVVRTNQCAGEFVITFPRAYHSGFNQGYNFAEAVNFCTADWLPAGRQCIEHYRRLRRYCVFSHEELICKMAAFPETLDLNLAVAVHKEMFIMVQEERRLRKALLEKGVTEAEREAFELLPDDERQCIKCKTTCFLSALACYDCPDGLVCLSHINDLCKCSSSRQYLRYRYTLDELPTMLHKLKIRAESFDTWANKVRVALEVEDGRKRSFEELRALESEARERRFPNSELLQRLKNCLSEVEACIAQVLGLVSGQVARMDTPQLTLTELRVLLEQMGSLPCAMHQIGDVKDVLEQVEAYQAEAREALATLPSSPGLLRSLLERGQQLGVEVPEAHQLQQQVEQAQWLDEVKQALAPSAHRGSLVIMQGLLVMGAKIASSPSVDKARAELQELLTIAERWEEKAHFCLEARQKHPPATLEAIIRETENIPVHLPNIQALKEALTKAQAWIADVDEIQNGDHYPCLDDLEGLVAVGRDLPVGLEELRQLELQVLTAHSWREKASKTFLKKNSCYTLLEVLCPCADAGSDSTKRSRWMEKALGLYQCDTELLGLSAQDLRDPGSVIVAFKEGEQKEKEGILQLRRTNSAKPSPLAPSLMASSPTSICVCGQVPAGVGVLQCDLCQDWFHGQCVSVPHLLTSPKPSLTSSPLLAWWEWDTKFLCPLCMRSRRPRLETILALLVALQRLPVRLPEGEALQCLTERAIGWQDRARKALASEDVTALLRQLAELRQQLQAKPRPEEASVYTSATACDPIREGSGNNISKVQGLLENGDSVTSPENMAPGKGSDLELLSSLLPQLTGPVLELPEAIRAPLEELMMEGDLLEVTLDENHSIWQLLQAGQPPDLDRIRTLLELEKFEHQGSRTRSRALERRRRRQKVDQGRNVENLVQQELQSKRARSSGIMSQVGREEEHYQEKADRENMFLTPSTDHSPFLKGNQNSLQHKDSGSSAACPSLMPLLQLSYSDEQQL

SEQ ID NO: 60055 - DNA, 4449 bp, Artificial Sequence
  derived and/or modified sequence
atggaacccggatgtgacgaattcctgcccccccctgagtgccctgtgttcgagccaagctgggcagagtttcaagacccgctgggttacatcgccaagatccgtcccatagcagaaaagtccgggatctgcaaaattagacctcccgctgattggcagccacccttcgcagtggaagtcgataattttagattcacgccccgtgttcagcgacttaatgagttagaggcacagacaagagttaaactcaattatctagaccagatcgccaaattctgggagatacagggctcaagcctcaagatccccaacgtggagaggaaaatcctagatttatactcactgagcaagcaatgtaatacgcacccatttgataacgaagtaaaagacaaggagtacaaaccgcatagcattcccctgcgccagtcggtgcagcccagcaagttcagtagctactctcgtcgggctaagcggttgcagcctgaccccgagcctacagaggaggacatagagaagcatccagaactaaaaaaactccagatttacggcccaggccccaaaatgatgggtctggggttgatggcaaaggacaaggacaaaactgtccacaagaaagtaacttgccctcccaccgtgacagtcaaggacgagcagtccggaggcggaaacgtgtcatccacccttctcaagcagcacctttccttggaaccttgtactaaaaccaccatgcagcttcgaaaaaaccactcctcagcacaatttatagattcatacatctgccaggtgtgctcgcgcggggatgaggacgataagctgcttttctgcgacggatgcgatgacaattaccatatcttttgcctgcttcccccattacccgaaatcccacgcggaatttggcgttgcccaaagtgtatcctcgccgagtgcaaacagccccctgaagccttcggttttgaacaggccacccaggagtattcattgcagtcttttggagaaatggctgacagttttaaaagtgattacttcaacatgccggtccatatggtgccaacagagttggtcgaaaaagagttttggaggctcgtgtcatctattgaggaagatgttacagtcgaatacggcgcagacatccatagcaaggaattcgggtccgggtttccggtgtcgaatagtaaacagaacctgagtcctgaggagaaagagtatgctaccagtggatggaacttgaatgtgatgcccgtgttagatcagagtgttctgtgtcatattaacgctgacatcagcgggatgaaggtgccctggctgtatgtcggaatggtcttctctgcattctgctggcacatcgaggatcattggagctactccatcaactacctacattggggggaacccaaaacctggtacggcgtgcctagcctcgccgcagaacacctcgaagaggttatgaagatgttaacccccgagctgtttgactcccagcccgatctactgcaccaactggtcacactcatgaatccaaacacacttatgtcgcacggtgtgcccgttgtgcgtacaaatcagtgtgctggggaattcgtgatcacattcccaagggcctaccacagcggttttaatcaggggtataatttcgctgaagctgtgaatttctgtaccgcagattggctgccagcaggcagacagtgcatcgaacactaccgtaggctgcgcaggtactgtgtgtttagccatgaggaacttatctgtaagatggctgcattccctgagaccctggatctgaacctggcagtcgctgtgcacaaggagatgtttattatggtacaggaagaacgtcggctgaggaaagccttactcgaaaagggcgtcaccgaggctgagcgagaagccttcgagctcttgcccgacgatgagcgccaatgtattaagtgtaaaacaacatgctttcttagcgctctcgcttgctatgattgcccagacgggctggtttgcttgtctcacatcaacgatctgtgcaagtgtagctcttcccggcagtaccttaggtatcgctataccctcgacgagctgcctactatgctgcacaagcttaaaatcagggcagagtccttcgatacgtgggcaaataaggtgagggtggcactcgaagttgaggatggcagaaaaagatcctttgaagaactacgggccctggagagcgaagccagagaaagacgctttcctaatagcgagctactccagcggctcaagaattgtctgagtgaagtggaagcatgcatcgcccaggtcctcgggctcgtgagcggtcaagtggcaagaatggacactcctcagctgactctgaccgagcttcgcgtcttactggagcagatgggaagcctgccttgtgccatgcatcagatcggagatgtaaaagatgtcctggaacaggtggaggcatatcaggctgaggcgcgcgaggcactcgccactcttccgagcagtccaggcctgttgcggtctctcctggagagagggcagcaactgggcgtcgaggtgccggaggctcatcagctgcaacagcaggtggagcaagcccagtggctggatgaggtaaagcaggcgctcgcgccttccgcacacaggggaagtttggtgataatgcaaggcttactagtcatgggggcaaagatcgcaagttctccctctgtagataaagcccgggccgaactgcaggagctgctgactatagctgaacgctgggaggaaaaggctcatttttgcttggaagcacgacagaagcatcctcctgcaaccctggaggccataatacgtgagactgaaaacatacccgttcacctgcctaatatacaggccctcaaggaggccctaacgaaggcgcaagcgtggatcgctgatgtggacgagatccagaatggagaccattatccatgcttggacgatctcgaaggcttggtagccgtggggagagaccttcctgtgggtctggaggagctccgccagctggagcttcaagtgctgactgcccactcatggcgcgagaaagcaagcaagacctttttgaaaaaaaattcctgctacaccctgctggaggtgctctgtccttgtgcagatgccgggagcgacagtaccaagcgtagtcgctggatggagaaagcactaggattatatcagtgtgacactgagctgctgggcttaagcgctcaggatctccgggatcctgggagcgttatcgtagccttcaaggagggtgaacaaaaagaaaaagagggaatcctacagctgcgccggactaactccgctaaaccatctccacttgcaccatctttgatggctagctccccgacttcaatatgtgtgtgcggccaggttccggctggggttggggtgctccagtgtgacctgtgccaggattggttccacggccagtgcgtgagcgtgcctcacttactgaccagccctaagccttccctcacgagttctcccctgctggcttggtgggagtgggacacaaagttcctgtgccctctgtgcatgcggagcaggcgacctagactggagacaatccttgccttgctcgttgctctgcagagacttcccgtccgtctccctgaaggagaagcactccagtgcctcacagaaagagcaatcggctggcaagatagagcacgcaaagcccttgccagcgaggacgtgactgccctactgcgccaactggccgaactgaggcagcagctgcaggcaaagccacgccccgaagaggctagcgtctacacgtcagccacagcttgtgacccgataagagaaggcagtgggaataatattagtaaggtgcaggggctcctcgagaatggagatagcgtaactagccccgagaacatggcaccaggcaagggtagcgatcttgaactgctgagcagcctcctgccccagctcaccggtcccgtgctggagctgcccgaggctatacgggccccactggaagagctgatgatggaaggtgaccttctggaagtgactctcgatgagaatcattcaatatggcaactactgcaggccggccagccccccgatctcgataggattcgcacactgctggaattggaaaagtttgagcatcagggctcgagaacaagatcccgggccctcgaacgcaggcgcaggcgacagaaggttgatcagggcaggaatgtggagaatctggtgcagcaggaacttcagagtaaaagggcgagaagcagtggcattatgtctcaggttggacgcgaggaagagcattatcaagaaaaggctgatagggaaaacatgttcctgacgccaagtaccgatcattctccatttttgaaaggaaatcagaactccttgcagcacaaagactctggttcttccgccgcatgccccagtctgatgcctttgctgcagctttcgtatagtgatgaacaacagctgtag

SEQ ID NO: 60056 - DNA, 4449 bp, Artificial Sequence
  derived and/or modified sequence
atggagcccggctgtgatgagttcctgcccccaccagaatgtcctgtgtttgagcccagctgggccgagttccaggaccccctgggctacatcgccaagatccggcccatcgccgagaagagcggcatctgcaagatccggcccccagctgactggcagcccccatttgctgtggaggtggacaacttccgcttcaccccccgggtgcagaggctgaatgagctggaggcccagaccagggtgaagctgaactacctggaccagatcgccaagttctgggagatccagggcagcagcctgaagatccccaacgtggagaggaagatcctggacctgtacagcctgagcaagcagtgcaacacccacccctttgacaatgaggtgaaggacaaggagtacaagccccacagcatccccctgcggcagagcgtgcagcccagcaagttcagcagctacagccggcgggccaagaggctgcagcctgaccctgagcccacagaggaggacatcgagaagcaccctgagctgaagaagctgcagatctacggccctggccccaagatgatgggcctgggcctgatggccaaggacaaggacaagacagtgcacaagaaggtgacctgccccccaacagtgacagtgaaggatgagcagagcggcggcggcaatgtgagcagcaccctgctgaagcagcacctgagcctggagccctgcaccaagaccaccatgcagctgaggaagaaccacagcagcgcccagttcatcgacagctacatctgccaggtgtgcagcagaggagatgaagatgacaagctgctcttctgtgatggctgtgatgacaactaccacatcttctgcctgctgccccccctgcctgagatcccccggggcatctggcgctgccccaagtgcatcctggccgagtgcaagcagcccccagaggccttcggctttgagcaggccacccaggagtacagcctgcagagctttggagagatggctgacagcttcaagagtgactacttcaacatgcctgtgcacatggtgcccacagagctggtggagaaggagttctggaggctggtgagcagcattgaagaagatgtgacagtggagtatggagctgacatccacagcaaggagtttggcagcggcttccctgtgagcaacagcaagcagaacctgagccctgaggagaaggagtatgccaccagcggctggaacctgaatgtgatgcctgtgctggaccagagcgtgctgtgccacatcaatgctgacatcagcggcatgaaggtgccctggctgtatgtgggcatggtgttcagcgccttctgctggcacatcgaggaccactggagctacagcatcaactacctgcactggggcgagcccaagacctggtacggcgtgcccagcctggccgctgagcacctggaggaggtgatgaagatgctgaccccagagctgtttgacagccagcctgacctgctgcaccagctggtgaccctgatgaaccccaacaccctgatgagccacggcgtgcctgtggtgaggaccaaccagtgtgccggggagtttgtgatcaccttcccccgggcctaccacagcggcttcaaccagggctacaactttgctgaggccgtgaacttctgcacagctgactggctgcctgctggccggcagtgcatcgagcactacagaaggctgcggcgctactgtgtgttcagccatgaggagctgatctgcaagatggccgccttccctgagaccctggacctgaacctggccgtggccgtgcacaaggagatgttcatcatggtgcaggaggagcggcggctgaggaaggccctgctggagaagggcgtgacagaagctgagcgggaggcctttgagctgctgcctgatgatgagcggcagtgcatcaagtgcaagaccacctgcttcctgagcgccctggcctgctatgactgcccagatggcctggtgtgcctgagccacatcaatgacctgtgcaagtgcagcagcagccggcagtacctgcgctaccgctacaccctggatgagctgcccaccatgctgcacaagctgaagatccgggcagagagctttgacacctgggccaacaaggtgcgggtggccctggaggtggaggatggcaggaagaggagctttgaggagctgcgggccctggagagcgaggcccgggagcggcgcttccccaacagcgagctgctgcagaggctgaagaactgcctgtctgaggtggaggcctgcatcgcccaggtgctgggcctggtgtctggccaggtggccaggatggacaccccccagctgaccctgacagagctgcgggtgctgctggagcagatgggcagcctgccctgtgccatgcaccagattggagatgtgaaggatgtgctggagcaggtggaggcctaccaggccgaggcccgggaggccctggccaccctgcccagcagccctggcctgctgcggagcctgctggagcggggccagcagctgggcgtggaggtgcctgaggcccaccagctgcagcagcaggtggagcaggcccagtggctggatgaggtgaagcaggccctggcccccagcgcccaccggggcagcctggtgatcatgcagggcctgctggtgatgggcgccaagatcgccagcagccccagcgtggacaaggcccgggcagagctgcaggagctgctgaccatcgccgagcgctgggaggagaaggcccacttctgcctggaggcccggcagaagcaccccccagccaccctggaggccatcatccgggagacagagaacatccctgtgcacctgcccaacatccaggccctgaaggaggccctgaccaaggcccaggcctggattgctgatgtggatgagatccagaatggagaccactacccctgcctggatgacctggagggcctggtggccgtgggccgggacctgcctgtgggcctggaggagctgcggcagctggagctgcaggtgctgacagcccacagctggagggagaaggccagcaagaccttcctgaagaagaacagctgctacaccctgctggaggtgctgtgcccctgtgctgatgctggcagtgacagcaccaagaggagccgctggatggagaaggccctgggcctgtaccagtgtgacacagagctgctgggcctgagcgcccaggacctgcgggaccccggctctgtgattgtggccttcaaggagggggagcagaaggagaaggagggcatcctgcagctgcggaggaccaacagcgccaagcccagccccctggcccccagcctgatggccagcagccccaccagcatctgtgtgtgtggccaggtgcctgctggggtgggcgtgctgcagtgtgacctgtgccaggactggttccacggccagtgtgtgtctgtgccccacctgctgaccagccccaagcccagcctgaccagcagccccctgctggcctggtgggagtgggacaccaagttcctgtgccccctgtgcatgaggagcagaagaccccggctggagaccatcctggccctgctggtggccctgcagaggctgcctgtgcggctgcctgagggggaggccctgcagtgcctgacagagcgggccatcggctggcaggaccgggccaggaaggccctggcctctgaagatgtgacagccctgctgcggcagctggccgagctgcggcagcagctgcaggccaagcccaggcctgaggaggcctctgtgtacaccagcgccacagcctgtgaccccatccgggagggcagcggcaacaacatcagcaaggtgcagggcctgctggagaatggagacagcgtgaccagccctgagaacatggcccctggaaaaggaagtgacctggagctgctgagcagcctgctgccccagctgaccggccctgtgctggagctgcctgaggccatccgggcccccctggaggagctgatgatggagggggacctgctggaggtgaccctggatgagaaccacagcatctggcagctgctgcaggccggccagcccccagacctggaccgcatccgcaccctgctggagctggagaagtttgagcaccagggcagcaggaccaggagccgggccctggagaggagaagaagacggcagaaggtggaccagggcagaaatgtggagaacctggtgcagcaggagctgcagagcaagagggcccggagcagcggcatcatgagccaggtgggccgggaggaggagcactaccaggagaaggctgaccgggagaacatgttcctgacccccagcacagaccacagccccttcctgaagggcaaccagaacagcctgcagcacaaggacagcggcagcagcgctgcctgccccagcctgatgcccctgctgcagctgagctacagtgatgagcagcagctgtag

SEQ ID NO: 60057 - DNA, 5134 bp, Artificial Sequence
  derived and/or modified sequence
aaaatcgatccgcggagtgagacggctcgtaccacactgcagggcccggaggtcaagatggtggctgtaaaactaggatccctgacgattgcttagcattaaggcccgacatggaaccggggtgtgacgagttcctgccgccaccggagtgcccggtttttgagcctagctgggctgaattccaagacccgcttggctacattgcgaaaataaggcccatagcagagaagtctggcatctgcaaaatccgcccacccgcggattggcagcctccttttgcagtagaagttgacaatttcagatttactcctcgcgtccaaaggctaaatgaactggaggcccaaactagagtgaaattgaactatttggatcagattgcaaaattctgggaaattcaaggctcctctttaaagattcccaatgtggagcggaagatcttggacctctacagccttagtaagcaatgtaacacacacccgtttgacaatgaggtaaaagataaggaatacaagccccacagcatcccccttagacagtctgtgcagccttcaaagttcagcagctacagtcgacgggcaaaaaggctacagcctgatccagagcctacagaggaggacattgagaagcatccagagctaaagaagttacagatatatgggccaggtcccaaaatgatgggcttgggccttatggctaaggataaggataagactgtgcataagaaagtcacatgccccccaactgttacggtgaaggatgagcaaagtggaggtgggaacgtgtcatcaacattgctcaagcagcacttgagcctagagccctgcactaagacaaccatgcaacttcgaaagaatcacagcagtgcccagtttattgactcatatatttgccaagtatgctcccgtggggatgaagatgataagcttcttttctgtgatggctgtgatgacaattaccacatcttctgcttgttaccaccccttcctgaaatccccagaggcatctggaggtgcccaaaatgtatcttggcggagtgtaaacagcctcctgaagcttttggatttgaacaggctacccaggagtacagtttgcagagttttggtgaaatggctgattccttcaagtccgactacttcaacatgcctgtacatatggtgcctacagaacttgtagagaaggaattctggaggctggtgagcagcattgaggaagacgtgacagttgaatatggagctgatattcattccaaagaatttggcagtggctttcctgtcagcaatagcaaacaaaacttatctcctgaggagaaggagtatgcgaccagtggttggaacctgaatgtgatgccagtgctagatcagtctgttctctgtcacatcaatgcagacatctcaggcatgaaggtgccctggctgtacgtgggcatggttttctcagcattttgttggcatattgaggatcactggagttactctattaactatctgcattggggtgagccgaagacctggtatggtgtaccctccctggcagcagagcatttggaggaggtgatgaagatgctgacacctgagctgtttgatagccagcctgatctcctacaccagcttgtcactctcatgaatcccaacactttgatgtcccatggtgtgccagttgtccgcacaaaccagtgtgcaggggagtttgtcatcacttttcctcgtgcttaccacagtggttttaaccaaggctacaattttgctgaagctgtcaacttttgtactgctgactggctacctgctggacgccagtgcattgaacactaccgccggctccggcgctattgtgtcttctcccacgaggagctcatctgcaagatggctgccttcccagagacgttggatctcaatctagcagtagctgtgcacaaggagatgttcattatggttcaggaggagcgacgtctacgaaaggcccttttggagaagggcgtcacggaggctgagcgagaggcttttgagctgctcccagatgatgaacgccagtgcatcaagtgcaagaccacgtgcttcttgtcagccctggcctgctacgactgcccagatggccttgtatgcctttcccacatcaatgacctctgcaagtgctctagtagccgacagtacctccggtatcggtacaccttggatgagctccccaccatgctgcataaactgaagattcgggctgagtcttttgacacctgggccaacaaagtgcgagtggccttggaggtggaggatggccgtaaacgcagctttgaagagctaagggcactggagtctgaggctcgtgagaggaggtttcctaatagtgagctgcttcagcgactgaagaactgcctgagtgaggtggaggcttgtattgctcaagtcctggggctggtcagtggtcaggtggccaggatggacactccacagctgaccttgactgaactccgggtccttcttgagcagatgggcagcctgccctgtgccatgcatcagattggggatgtcaaggatgtcctggaacaggtggaggcctatcaagctgaggctcgtgaggctctggccacactgccctctagtccagggctattgcggtccctgttggagagggggcagcagctgggtgtagaggtgcctgaagcccatcagcttcagcagcaggtggagcaggcgcaatggctagatgaagtgaagcaggccctggccccttctgctcacaggggctctctggtcatcatgcaggggcttttggttatgggtgccaagatagcctccagcccttctgtggacaaggcccgggctgagctgcaagaactactgaccattgcagagcgctgggaagaaaaggctcatttctgcctggaggccaggcagaagcatccaccagccacattggaagccataattcgtgagacagaaaacatccctgttcacctgcctaacatccaggctctcaaagaagctctgactaaggcacaagcttggattgctgatgtggatgagatccaaaatggtgaccactacccctgtctagatgacttggagggcctggtggctgtgggccgggacctgcctgtggggctggaagagctgagacagctagagctgcaggtattgacagcacattcctggagagagaaggcctccaagacctttctcaagaagaattcttgctacacactgcttgaggtgctttgcccgtgtgcagacgctggctcagacagcaccaagcgtagccggtggatggagaaggcgctggggttgtaccagtgtgacacagagctgctggggctgtctgcacaggacctcagagacccaggctctgtgattgtggccttcaaggaaggggaacagaaggagaaggagggtatcctgcagctgcgtcgcaccaactcagccaagcccagtccactggcaccatccctcatggcctcttctccgacttctatctgtgtgtgtgggcaggtgccagctggggtgggagttctgcagtgtgacctgtgtcaggactggttccatgggcagtgtgtgtcagtgccccatctcctcacctctccaaagcccagtctcacttcatctccactgctagcctggtgggaatgggacacaaaattcctgtgtccactgtgtatgcgctcacgacggccacgcctagagacaatcctagccttgctggttgccctgcagaggctgcccgtgcggctgcctgagggtgaggcccttcagtgtctcacagagagggccattggctggcaagaccgtgccagaaaggctctggcctctgaagatgtgactgctctgttgcgacagctggctgagcttcgccaacagctacaggccaaacccagaccagaggaggcctcagtctacacttcagccactgcctgtgaccctatcagagaaggcagtggcaacaatatttctaaggtccaagggctgctggagaatggagacagtgtgaccagtcctgagaacatggctccaggaaagggctctgacctggagctactgtcctcactgttgccgcagttgactggccctgtgttggagctgcctgaggcaatccgggctcccctggaggagctcatgatggaaggggacctgcttgaggtgaccctggatgagaaccacagcatctggcagctgctgcaggctggacagcctccagacctggacagaattcgcacacttctggagctggaaaaatttgaacatcaagggagtcggacaaggagccgggctctggagaggcgacggcggcggcagaaggtggatcagggtagaaacgttgagaatcttgttcaacaggagcttcagtcaaaaagggctcggagctcagggattatgtctcaggtgggccgagaagaagaacattatcaggagaaagcagaccgtgaaaatatgttcctgacaccttccacagaccacagccctttcttgaaaggaaaccaaaatagcttacaacacaaggattcaggctcttcagctgcttgtccttctttaatgcctttgctacaactctcctactctgatgagcaacagttgtgacagtggcaccaaaggtcatttgtggttgtttttgtttgtttgtttcttaaatcctactatctcctggcctggacctcagaaggagctttttgcttatctataatttttcactgccaatttttgatatcctctctcctagagttactgttaaaaggttggttcgtaaagtccacaccccgatgctcagaagtgtcttgccagcaacattcctgctagcatacaggagtgatttcctaaaccagtttcattctagtctgaatagggacaaacaaatcttgaggaagcccaagtgcgtacctttatttttgcccccaccaccctctttctgtacttcaatttttgtttgttttttgtttttttgtccctgtcataaaatattttggtgcttcaaaacttgtaccttcattgtacatccttttcttttctccccttgggtcttattataaaagaagacaatgtacgttgtaattaccaaaaagaatagggaaaaacaagaatttcatgactctacctgtggtctatctttaatttcatttcttttgttaaaaataaaacaatgagtatgtttggatact

SEQ ID NO: 60058 - DNA, 4449 bp, Artificial Sequence
  derived and/or modified sequence
atggagcccggctgcgacgagttcctgcccccccccgagtgccccgtcttcgaaccttcatgggctgagttccaggatccacttggatatattgccaaaatccggcctatagccgaaaagagcggcatttgcaaaatacggccacctgctgactggcagcctcctttcgctgtagaagtggacaactttagatttaccccacgggttcagagactaaatgaactagaggcccagactagggttaagttgaactacttggatcagattgccaaattttgggagatccaagggtcctccctgaagatccctaatgtggagcgcaagatcctcgacttatactccctgagtaagcagtgtaacactcacccattcgacaatgaagtgaaggataaagaatacaagccccattccatcccgctccgccagtcagtacagccctcgaaattcagttcctattcaaggcgggcaaagcgcctgcagcccgatccagagcctactgaagaagatatcgaaaaacatcccgagctgaagaagctccagatttacgggcccggtcccaagatgatgggacttggactcatggctaaggataaggataagacagtccataagaaggtgacttgccccccgacagtcaccgtcaaggatgagcagtcaggcggggggaacgtttcctccacgctgctgaaacagcacctgtccctggagccttgtactaaaactacaatgcagcttcgcaaaaatcacagttcggcccagtttatcgacagctacatctgtcaggtgtgctctagaggcgacgaagatgataagctccttttctgcgatggttgtgatgataactaccacattttctgtctgctgcctccactgccggagattccccgcgggatttggagatgtccaaaatgcatcctggccgaatgtaagcaaccccccgaagccttcgggtttgagcaggccacccaagaatattccctgcagagcttcggagaaatggcggattccttcaagagcgactacttcaatatgcccgtgcatatggtccccaccgagctggttgagaaggagttttggcgcttagtttcgagcatcgaagaggatgtcaccgtcgaatatggagctgacatccattcgaaagagtttggttcaggtttcccagtttccaattctaagcagaacctgtccccggaagagaaggaatatgccacgagtggttggaacttgaacgtgatgcccgtgttggatcagtccgttttgtgtcatatcaacgccgacatttccggaatgaaggttccttggttatatgtgggtatggtgttcagcgctttctgctggcacattgaagaccattggtcctattctattaactatctgcactggggggagccgaagacttggtatggcgtgccttctcttgccgcggagcatctggaggaggttatgaaaatgctaacacctgagctgtttgacagccagcctgacctacttcaccaactggtaaccctcatgaatccgaataccctgatgagtcacggggtacccgtggtgcggacaaatcaatgcgccggcgagtttgtgatcacattcccccgagcctatcatagtgggtttaaccagggttataattttgccgaagcagtgaacttctgtactgctgactggctgccagcagggcggcagtgtatagaacactaccgtaggttgcggcgctattgcgtattctcgcatgaagagctgatttgcaagatggctgctttccccgagacccttgatctgaatctcgctgtggcggttcacaaggaaatgttcattatggttcaggaagaacggcgacttagaaaagctcttctcgaaaaaggcgtaacagaagccgaaagagaggcgttcgaattgctgccagatgatgagcgacaatgcattaaatgcaagacaacatgctttctcagtgcccttgcatgctacgattgtcccgacgggctggtttgccttagccacatcaacgacctctgcaagtgctctagtagtcgccagtaccttcggtatcgatacaccttagatgagctgccaactatgcttcacaaactgaagatacgcgcagagtcgttcgacacttgggcgaacaaagttagagtggcgctggaggtggaagatggaagaaaaaggagctttgaggaacttcgagctttagaatctgaggctcgagagcgcaggtttcccaactcagagcttttgcagcggctgaagaactgtctgagtgaggtggaagcctgtattgctcaagtactcggactggtcagcggccaggtggcacggatggatacgccacagctgacgcttactgaactgcgggtcctgctggaacagatgggatctctgccatgcgcaatgcaccagattggggatgtaaaggatgtgctcgagcaggtcgaagcatatcaggctgaggctcgagaagcattggcgaccttaccttcttccccagggctgctacggagtcttctggagaggggacagcagctgggtgtagaagtgcccgaagctcaccagctgcagcagcaggtcgagcaggcgcagtggctcgatgaggtgaagcaagctctagctccttctgctcacagaggttccctcgtgataatgcagggcctgctggtcatgggagcgaaaattgccagctccccctccgtggataaagccagagctgagctgcaggaactacttactatagctgaacgctgggaggaaaaagcccatttttgcttagaggcccgccagaagcacccccctgctacacttgaagccattatccgagagacagagaatatccccgtacatttaccaaatattcaggcattgaaggaagctctcaccaaagcgcaggcctggatcgccgacgtggacgagatccagaacggcgaccattatccgtgcctcgacgatttggaggggctagtagccgtgggacgggacctgcctgtcgggttggaggaactgcggcaactggagctgcaggtgctgacagcccattcttggcgggaaaaggctagtaaaacctttctgaaaaaaaacagttgttacactttgttagaggtgctgtgcccctgcgctgatgcgggatccgactccacaaagaggtctagatggatggaaaaggccctcggcctgtaccagtgcgatactgagctgctcggattgagtgcacaggacctgagggacccgggctccgtgatcgtagcattcaaggagggggaacagaaggagaaggagggaattcttcagttgagacgaactaacagcgccaagcccagtccactcgccccttcgttaatggcgtcgagccctaccagcatttgcgtgtgcggccaagtgccggccggggtcggagtgctgcagtgcgacctgtgtcaagactggttccatggccagtgcgtgagtgtgccccacctcctgacatcacccaaaccaagtttgacctcaagtcccttgctcgcttggtgggagtgggatactaaattcctctgtcctctctgcatgcgctctagacgtcccaggttggaaaccatcctggctttgctcgttgcccttcagagactccctgttcgtctcccagagggagaggccctgcagtgcctgaccgagagggccatcgggtggcaggaccgcgccaggaaggctctggcaagcgaggatgtgaccgccctgctgaggcagctggccgagctgcgtcaacagttacaggccaaaccccggcctgaggaggccagcgtgtatacaagcgccacagcttgtgatcctatcagagaaggatcaggaaataatatctcaaaggtccagggtctgctcgagaatggagatagcgtgactagtccggagaatatggctcccgggaaggggagcgatcttgagttattatcctcattgctgccgcagctgactgggccagtgctagagctcccagaagctatccgcgccccactggaggagttgatgatggagggggacctcttggaggttactctggacgagaaccactctatatggcagctgctgcaggctggtcagccacccgacctggaccggatccggacactgctggaactcgaaaagtttgagcaccaggggagccggactcgttcacgagctttagagagacgtcggcgtagacagaaggttgatcaggggcgaaatgtggaaaacttggtgcaacaggagctgcagtccaagagagccagatcctctggtataatgagtcaggtgggtcgcgaggaagagcattaccaagagaaggccgaccgggaaaatatgttcctgaccccttctaccgaccactcaccgtttcttaaaggaaaccagaactcattgcaacataaagactcaggaagttcagctgcgtgcccttcacttatgcccctgctgcagctctcttacagtgacgaacagcagctgtag

SEQ ID NO: 60059 - DNA, 4449 bp, Artificial Sequence
  derived and/or modified sequence
atggagccagggtgtgatgagttcctaccaccacccgagtgcccagtctttgagccatcctgggcagaattccaagatccactgggctatatagctaagatacggcctatcgctgaaaaaagtgggatttgcaagattcgacctcccgctgactggcagccgccattcgccgtagaagtcgataactttagatttactccccgagttcagcgattaaatgaactggaggcccagacccgcgtgaagctgaactatctcgaccagattgctaagttctgggagattcagggttcctccctcaagatccccaatgttgagagaaaaattcttgatctgtactctttatcaaaacagtgcaatacccacccctttgacaatgaggtaaaggataaggagtacaagccccatagtatccctctccggcaatctgtgcaacctagtaagttttccagctactccagaagagctaaacgtctccagcctgatcctgaacctactgaggaagatatcgagaagcatccagagctgaagaaactacagatttatggtcccggacccaagatgatggggttaggcctgatggcaaaagacaaagataagactgtgcacaagaaagtgacctgcccacccaccgtgaccgttaaggatgagcagtccggaggcggtaacgtctcatccactctcctgaagcagcacctgtcactggaaccatgtacgaagactaccatgcaactccgaaagaaccactcttctgcccaattcatcgatagctacatttgtcaggtttgctcacgcggtgatgaagatgacaagttgctgttttgcgatggatgtgatgataactaccacattttctgcctgttacctccattgcctgaaattccacggggaatatggagatgtcctaagtgtatcctcgctgagtgtaaacagcctcctgaagctttcggctttgaacaggcaacccaggagtatagccttcagtctttcggggagatggccgactccttcaagagcgattacttcaatatgccagtgcatatggttcctaccgagttggtcgaaaaagaattctggcggcttgttagttctattgaagaggacgtcactgtggaatatggtgccgacatccactccaaagaatttggatccgggttccccgtttccaacagcaagcaaaaccttagcccagaagaaaaggagtatgccactagcggctggaacttaaatgtgatgccagtgctcgatcagtcagttctatgtcacattaatgctgacataagcgggatgaaagtcccatggctatacgtgggcatggtgttctcagctttttgttggcatattgaggaccattggtcttacagcatcaattacctgcactggggggaacctaaaacgtggtacggggtacctagtctcgccgctgagcatctggaggaggtgatgaaaatgctgacacccgagctcttcgacagccaacccgatttacttcatcaattagtgaccctaatgaacccaaacactctgatgtcacatggcgtcccagtggttagaacaaaccagtgcgctggggagttcgtcatcacattccctcgggcatatcactcaggattcaaccagggatacaattttgcagaggcagtgaacttttgcactgcagattggctccctgccggaagacagtgcatcgagcattatagacggctgaggaggtactgcgttttcagtcatgaggaacttatctgtaaaatggcagcatttccggagacattggacctcaatctggccgtggccgtccataaggagatgttcatcatggtacaggaggagcgcaggctgagaaaggcacttcttgagaaaggagttactgaggcagagcgtgaagccttcgaattgctgcccgatgacgagcgccagtgtataaaatgcaagacgacctgtttcctctcagctctggcatgttatgactgcccagacggcttggtgtgtttatcccacataaacgacctctgtaagtgctcgagcagtaggcagtatttgcgctaccgctacacactcgatgagttaccgacaatgctgcacaagttgaaaatcagagctgaatcctttgacacctgggcgaacaaagtgcgggtcgccctggaggtcgaagacggacgcaagagatcgtttgaagagttgagagccttagaatctgaagccagggagcgcagattccctaattccgagctgcttcaacgtctgaagaattgcctttccgaggtagaggcttgtatcgctcaggtcctgggactcgtttctggtcaagttgccaggatggacactcctcagctgactctcacagaactcagagtgttgctagagcagatgggtagcctcccttgcgccatgcaccagatcggggatgtaaaggatgtccttgagcaggttgaagcctaccaggccgaggcccgagaggccctcgcaacgctccctagttcccctgggcttctacgctcgctgctcgagcgcggacagcagctgggcgtcgaagtgcccgaggcccaccagctccagcagcaggttgagcaggcacagtggttagacgaagttaaacaggccctggcacctagcgcccacagaggttctcttgtgattatgcaaggtctcctggtgatgggagctaaaatcgcgagctcgccgagtgtggacaaggccagggctgagcttcaagaattgctaacaatcgccgagagatgggaggaaaaggcccatttttgtctcgaggccaggcagaaacaccctcctgctaccctggaggccatcatcagggagacagaaaatattccggtgcatctgcccaacatacaggctctaaaggaagccctgaccaaggcacaggcctggatagctgacgtggatgagattcaaaacggagatcattatccttgtctcgacgacctggagggattagttgctgtgggaagagacctccccgtggggctggaggaactccgacagcttgaactgcaagtgctgaccgcgcacagctggcgtgagaaagcatctaaaacattcctgaagaagaattcgtgctacactctattagaagtcctgtgcccttgcgccgatgccggttcagattcaactaaacgctctagatggatggaaaaggcactaggcctctatcagtgtgacaccgagctcttggggttatccgctcaagacttgcgagaccctggcagcgtcatcgtggcattcaaagagggggagcaaaaggaaaaggaggggatactccagctcaggcggactaactcagctaagccatcgccacttgctcctagcctgatggcctcaagcccaacctccatatgtgtttgtggccaggtgcccgctggtgttggcgtgctgcaatgcgatttgtgtcaggattggttccatggacagtgcgtcagcgtgccgcatctgctgacctcccccaagccttcactgaccagctctccactactggcctggtgggagtgggatactaagtttttgtgtccattgtgtatgcgctcccgtcgtccgcgtcttgaaacaatcttggcactgctcgttgctctgcagagactgcctgtccgcctgccggagggcgaggccttgcagtgtctgaccgaaagggcaatcggatggcaggatcgcgctcgcaaggccctggcttctgaggacgtgacggctctgctgagacagctcgcggaactgcgccagcaactccaggccaaacctaggccagaggaggcaagcgtgtatacatctgctacagcttgtgacccaatccgagaaggcagcgggaataacattagtaaagtgcagggcctgttggaaaacggagacagcgtgaccagtcccgagaatatggctccgggaaaaggttctgatctcgaattgctcagttcacttttgccgcaactgaccggcccagtgctcgagttgcctgaagccattcgagcccctttagaggagctcatgatggagggcgatcttttggaagtgaccctggacgagaaccactcaatatggcagttattgcaggccggtcaacccccagacttagatagaattcggaccttgctggagctggagaagttcgagcaccaaggttctagaacccggtctagggctctggagcggaggcggaggcgccagaaggtggaccaaggacgcaatgtcgagaacctggtccaacaggaactgcagtcaaagcgggctagatcctctggtattatgtcccaagtcggcagggaggaggaacactatcaggagaaggccgatcgggaaaacatgttcctgaccccgagcacagatcattctcccttcttaaaggggaaccagaactcactgcagcacaaggattctggttcctccgccgcatgcccctctctcatgcctctgttgcagctgtcttactccgacgaacagcagctttag

SEQ ID NO: 60060 - DNA, 4449 bp, Artificial Sequence
  derived and/or modified sequence
atggagcccggctgcgacgagttcctgcccccccccgagtgccccgtgttcgagcccagctgggccgagttccaggaccccctgggctacatcgccaagatcagacccatcgccgagaagagcggcatctgcaagatcagaccccccgccgactggcagccccccttcgccgtggaggtggacaacttcagattcacccccagagtgcagagactgaacgagctggaggcccagaccagagtgaagctgaactacctggaccagatcgccaagttctgggagatccagggcagcagcctgaagatccccaacgtggagagaaagatcctggacctgtacagcctgagcaagcagtgcaacacccaccccttcgacaacgaggtgaaggacaaggagtacaagccccacagcatccccctgagacagagcgtgcagcccagcaagttcagcagctacagcagaagagccaagagactgcagcccgaccccgagcccaccgaggaggacatcgagaagcaccccgagctgaagaagctgcagatctacggccccggccccaagatgatgggcctgggcctgatggccaaggacaaggacaagaccgtgcacaagaaggtgacctgcccccccaccgtgaccgtgaaggacgagcagagcggcggcggcaacgtgagcagcaccctgctgaagcagcacctgagcctggagccctgcaccaagaccaccatgcagctgagaaagaaccacagcagcgcccagttcatcgacagctacatctgccaggtgtgcagcagaggcgacgaggacgacaagctgctgttctgcgacggctgcgacgacaactaccacatcttctgcctgctgccccccctgcccgagatccccagaggcatctggagatgccccaagtgcatcctggccgagtgcaagcagccccccgaggccttcggcttcgagcaggccacccaggagtacagcctgcagagcttcggcgagatggccgacagcttcaagagcgactacttcaacatgcccgtgcacatggtgcccaccgagctggtggagaaggagttctggagactggtgagcagcatcgaggaggacgtgaccgtggagtacggcgccgacatccacagcaaggagttcggcagcggcttccccgtgagcaacagcaagcagaacctgagccccgaggagaaggagtacgccaccagcggctggaacctgaacgtgatgcccgtgctggaccagagcgtgctgtgccacatcaacgccgacatcagcggcatgaaggtgccctggctgtacgtgggcatggtgttcagcgccttctgctggcacatcgaggaccactggagctacagcatcaactacctgcactggggcgagcccaagacctggtacggcgtgcccagcctggccgccgagcacctggaggaggtgatgaagatgctgacccccgagctgttcgacagccagcccgacctgctgcaccagctggtgaccctgatgaaccccaacaccctgatgagccacggcgtgcccgtggtgagaaccaaccagtgcgccggcgagttcgtgatcaccttccccagagcctaccacagcggcttcaaccagggctacaacttcgccgaggccgtgaacttctgcaccgccgactggctgcccgccggcagacagtgcatcgagcactacagaagactgagaagatactgcgtgttcagccacgaggagctgatctgcaagatggccgccttccccgagaccctggacctgaacctggccgtggccgtgcacaaggagatgttcatcatggtgcaggaggagagaagactgagaaaggccctgctggagaagggcgtgaccgaggccgagagagaggccttcgagctgctgcccgacgacgagagacagtgcatcaagtgcaagaccacctgcttcctgagcgccctggcctgctacgactgccccgacggcctggtgtgcctgagccacatcaacgacctgtgcaagtgcagcagcagcagacagtacctgagatacagatacaccctggacgagctgcccaccatgctgcacaagctgaagatcagagccgagagcttcgacacctgggccaacaaggtgagagtggccctggaggtggaggacggcagaaagagaagcttcgaggagctgagagccctggagagcgaggccagagagagaagattccccaacagcgagctgctgcagagactgaagaactgcctgagcgaggtggaggcctgcatcgcccaggtgctgggcctggtgagcggccaggtggccagaatggacaccccccagctgaccctgaccgagctgagagtgctgctggagcagatgggcagcctgccctgcgccatgcaccagatcggcgacgtgaaggacgtgctggagcaggtggaggcctaccaggccgaggccagagaggccctggccaccctgcccagcagccccggcctgctgagaagcctgctggagagaggccagcagctgggcgtggaggtgcccgaggcccaccagctgcagcagcaggtggagcaggcccagtggctggacgaggtgaagcaggccctggcccccagcgcccacagaggcagcctggtgatcatgcagggcctgctggtgatgggcgccaagatcgccagcagccccagcgtggacaaggccagagccgagctgcaggagctgctgaccatcgccgagagatgggaggagaaggcccacttctgcctggaggccagacagaagcacccccccgccaccctggaggccatcatcagagagaccgagaacatccccgtgcacctgcccaacatccaggccctgaaggaggccctgaccaaggcccaggcctggatcgccgacgtggacgagatccagaacggcgaccactacccctgcctggacgacctggagggcctggtggccgtgggcagagacctgcccgtgggcctggaggagctgagacagctggagctgcaggtgctgaccgcccacagctggagagagaaggccagcaagaccttcctgaagaagaacagctgctacaccctgctggaggtgctgtgcccctgcgccgacgccggcagcgacagcaccaagagaagcagatggatggagaaggccctgggcctgtaccagtgcgacaccgagctgctgggcctgagcgcccaggacctgagagaccccggcagcgtgatcgtggccttcaaggagggcgagcagaaggagaaggagggcatcctgcagctgagaagaaccaacagcgccaagcccagccccctggcccccagcctgatggccagcagccccaccagcatctgcgtgtgcggccaggtgcccgccggcgtgggcgtgctgcagtgcgacctgtgccaggactggttccacggccagtgcgtgagcgtgccccacctgctgaccagccccaagcccagcctgaccagcagccccctgctggcctggtgggagtgggacaccaagttcctgtgccccctgtgcatgagaagcagaagacccagactggagaccatcctggccctgctggtggccctgcagagactgcccgtgagactgcccgagggcgaggccctgcagtgcctgaccgagagagccatcggctggcaggacagagccagaaaggccctggccagcgaggacgtgaccgccctgctgagacagctggccgagctgagacagcagctgcaggccaagcccagacccgaggaggccagcgtgtacaccagcgccaccgcctgcgaccccatcagagagggcagcggcaacaacatcagcaaggtgcagggcctgctggagaacggcgacagcgtgaccagccccgagaacatggcccccggcaagggcagcgacctggagctgctgagcagcctgctgccccagctgaccggccccgtgctggagctgcccgaggccatcagagcccccctggaggagctgatgatggagggcgacctgctggaggtgaccctggacgagaaccacagcatctggcagctgctgcaggccggccagccccccgacctggacagaatcagaaccctgctggagctggagaagttcgagcaccagggcagcagaaccagaagcagagccctggagagaagaagaagaagacagaaggtggaccagggcagaaacgtggagaacctggtgcagcaggagctgcagagcaagagagccagaagcagcggcatcatgagccaggtgggcagagaggaggagcactaccaggagaaggccgacagagagaacatgttcctgacccccagcaccgaccacagccccttcctgaagggcaaccagaacagcctgcagcacaaggacagcggcagcagcgccgcctgccccagcctgatgcccctgctgcagctgagctacagcgacgagcagcagctgtag

SEQ ID NO: 60061 - protein, 350 aa, Artificial Sequence
  derived and/or modified sequence
MSKEPLILWLMIEFWWLYLTPVTSETVVTEVLGHRVTLPCLYSSWSHNSNSMCWGKDQCPYSGCKEALIRTDGMRVTSRKSAKYRLQGTIPRGDVSLTILNPSESDSGVYCCRIEVPGWFNDVKINVRLNLQRASTTTHRTATTTTRRTTTTSPTTTRQMTTTPAALPTTVVTTPDLTTGTPLQMTTIAVFTTANTCLSLTPSTLPEEATGLLTPEPSKEGPILTAESETVLPSDSWSSVESTSADTVLLTSKASDTAVPEQNKTTKTGQMDGIPMSMKNEMPISQLLMIIAPSLGFVLFALFVAFLLRGKLMETYCSQKHTRLDYIGDSKNVLNDVQHGREDEDGLFTL

SEQ ID NO: 60062 - DNA, 1053 bp, Artificial Sequence
  derived and/or modified sequence
atgagcaaggagcccctgatcctgtggctgatgatcgagttctggtggctgtacctgacccccgtgaccagcgagaccgtggtgaccgaggtgctgggccacagagtgaccctgccctgcctgtacagcagctggagccacaacagcaacagcatgtgctggggcaaggaccagtgcccctacagcggctgcaaggaggccctgatcagaaccgacggcatgagagtgaccagcagaaagagcgccaagtacagactgcagggcaccatccccagaggcgacgtgagcctgaccatcctgaaccccagcgagagcgacagcggcgtgtactgctgcagaatcgaggtgcccggctggttcaacgacgtgaagatcaacgtgagactgaacctgcagagagccagcaccaccacccacagaaccgccaccaccaccaccagaagaaccaccaccaccagccccaccaccaccagacagatgaccaccacccccgccgccctgcccaccaccgtggtgaccacccccgacctgaccaccggcacccccctgcagatgaccaccatcgccgtgttcaccaccgccaacacctgcctgagcctgacccccagcaccctgcccgaggaggccaccggcctgctgacccccgagcccagcaaggagggccccatcctgaccgccgagagcgagaccgtgctgcccagcgacagctggagcagcgtggagagcaccagcgccgacaccgtgctgctgaccagcaaggccagcgacaccgccgtgcccgagcagaacaagaccaccaagaccggccagatggacggcatccccatgagcatgaagaacgagatgcccatcagccagctgctgatgatcatcgcccccagcctgggcttcgtgctgttcgccctgttcgtggccttcctgctgagaggcaagctgatggagacctactgcagccagaagcacaccagactggactacatcggcgacagcaagaacgtgctgaacgacgtgcagcacggcagagaggacgaggacggcctgttcaccctgtag

SEQ ID NO: 60063 - DNA, 1053 bp, Artificial Sequence
  derived and/or modified sequence
atgtctaaggagcccctgatcctctggttgatgatcgagttttggtggttgtaccttacacctgtgacaagtgaaacagtggtgacggaggtactgggtcatagagtgactttgccttgcctctatagttcatggagtcacaactccaattccatgtgttggggaaaagaccagtgtccttactctgggtgcaaggaagctctgattcgcaccgacggaatgcgcgtaactagccgcaaatccgctaaatatcgacttcagggtacgattccaaggggtgacgtgtcgttgaccattcttaacccctccgaatcagattcaggggtgtattgctgtcgaattgaggtgcctggatggttcaacgacgtcaagatcaatgtacgcctcaacctgcaacgcgcgagtacgacaacgcacaggacggccacaacgacaacacgcaggaccaccaccacgtcccccaccacgacaaggcagatgactacaacacccgctgccctccccaccactgtggttacaacacccgatctcacaaccggaacccccctccagatgactaccattgctgtcttcacgaccgctaacacctgcttgtccctgacaccgtctactcttcccgaggaagccaccggccttctcaccccagaaccaagcaaggagggtcccattctgacggcagaatcagagacagtactgccatcagattcctggtccagcgtggagagcacctcagctgataccgttctgctgacaagtaaagccagtgacacagcggtgccggagcagaataagacaactaaaacagggcaaatggatggaatcccaatgtcaatgaagaacgagatgccaatttcccagctgctcatgatcatcgcaccatccctcggtttcgtgctttttgccctttttgtggcattcctgctgcgcgggaagctgatggagacgtactgctcccagaaacacacccggttagactacatcggggattccaaaaatgttctcaacgacgtgcagcatggcagagaggacgaagacgggctcttcaccctctag

SEQ ID NO: 60064 - DNA, 1053 bp, Artificial Sequence
  derived and/or modified sequence
atgagcaaggagcccctcatcctgtggctgatgattgagttctggtggctgtacctgacccctgtgaccagcgagaccgtggtgacagaggtgctgggccaccgggtgaccctgccctgcctgtacagctcctggagccacaacagcaacagcatgtgctggggcaaggaccagtgcccctacagcggctgcaaggaggccctgatcagaacagatggcatgagggtgaccagcaggaagagcgccaagtaccgcctgcagggcaccatccccagaggagatgtgtccctgaccatcctgaaccccagcgagagtgacagcggcgtgtactgctgccgcatcgaggtgcccggctggttcaatgatgtgaagatcaacgtgcggctgaacctgcagagggccagcaccaccacccacaggacagccaccaccaccaccaggaggaccaccaccaccagccccaccaccacccggcagatgaccaccaccccagctgccctgcccaccaccgtggtgaccaccccagacctgaccaccggcacccccctgcagatgaccaccatcgctgtgttcaccacagccaacacctgcctgagcctgacccccagcaccctgcctgaggaggccaccggcctgctgaccccagagcccagcaaggagggccccatcctgacagctgagagcgagaccgtgctgcccagcgacagctggagctctgtggagagcaccagcgctgacacagtgctgctgaccagcaaggccagtgacacagctgtgcctgagcagaacaagaccaccaagacaggccagatggatggcatccccatgtccatgaagaatgagatgcccatcagccagctgctgatgatcatcgcccccagcctgggctttgtgctgtttgccctgtttgtggccttcctgctgcggggcaagctgatggagacctactgcagccagaagcacacccggctggactacatcggggacagcaagaatgtgctgaatgatgtgcagcacggccgggaggatgaagatggcctcttcaccctgtag

SEQ ID NO: 60065 - DNA, 1053 bp, Artificial Sequence
  derived and/or modified sequence
atgagcaaggagcccctgatcctgtggctgatgatcgagttctggtggctctacctcaccccagtcactagtgagactgtagtaaccgaggttctgggtcatagagttacccttccgtgcctgtattcctcttggagtcataactctaattcaatgtgttggggcaaggatcaatgtccatacagtggctgcaaggaagcactaatcagaactgatggtatgcgtgttactagcaggaagtcagctaaatatcggctccaaggaacaattcctcgcggagacgtttcactgaccatcttgaatccaagcgagagcgactcgggtgtctactgttgtagaatagaggtaccaggatggtttaatgacgtgaagattaacgtgaggctcaacctccagcgggctagcacaacgacgcatcggacagcaactacaactacacggcgcacgaccaccacgagccctactactactcgacagatgaccacaacccctgcggccctgccaacaacagtggttaccactcctgacctgacaaccgggacgccactccaaatgactacaatagccgtatttaccacagcaaacacatgcctctcccttacgccgtctaccctgcctgaagaggcaactgggctgcttactccagaacccagcaaggaaggaccaattcttacagcagagtctgaaactgtcttgccttcagactcttggtccagcgtagagagtaccagcgccgataccgtgctgctgaccagtaaggcctctgatacagcagtcccagagcagaacaaaacgaccaagacgggtcagatggacggaatacccatgagcatgaaaaatgagatgcctattagtcaactgttgatgattatagctccttcccttggcttcgtgctgtttgccctattcgtggcattcttgctcaggggaaaacttatggagacttattgttctcagaaacatacgaggctcgactacatcggagatagtaaaaacgttctaaacgacgtacagcacggtagggaggacgaagatggtctcttcactttgtag

SEQ ID NO: 60066 - DNA, 1053 bp, Artificial Sequence
  derived and/or modified sequence
atgagtaaagaacctcttatcctctggctgatgatcgagttctggtggctgtatctgactccggtgacttcggaaacagtggtcaccgaagtgctcggacatagggtcacactgccctgcttatactcctcatggtcccataatagcaacagcatgtgttggggcaaggatcagtgcccttactcgggttgcaaggaggcgctgatccggaccgatgggatgcgtgtgacaagtcgcaagtctgccaaataccgcctgcagggcacaattccccgaggcgatgtgagtcttaccattctgaacccctcagaatctgacagcggcgtctactgttgccgcatcgaagtgccgggatggttcaatgatgtgaaaatcaacgtgcggctcaacctgcagcgcgcaagtactacaacgcatagaacggcaactacaactactcggagaacgacaacaacctcacccactactactaggcagatgaccacgactcccgcagctctccccaccaccgttgtgaccacacccgatttgacaaccggaaccccccttcagatgacaaccatcgcagtgttcaccaccgctaatacctgtctctcactgactccttctaccttaccagaagaggccaccggcttgttgactcctgagccctctaaagagggcccaatcctgactgctgagagcgaaacagtgctaccgagcgatagctggagttctgtggaatctacttctgccgacacagtgctgctgacaagtaaagcatcagataccgccgtaccagagcagaacaagactactaagactggccagatggacggcatacctatgagcatgaagaacgagatgccaatttctcagctcctgatgatcatcgccccttcattaggtttcgtgctgtttgcactttttgtggcctttctacttcggggtaagctcatggagacctattgctctcagaaacatacacggctggactatattggcgactcaaagaacgtgcttaacgacgtgcagcacggaagagaagacgaggacgggttgttcacactctag

SEQ ID NO: 60067 - DNA, 1145 bp, Artificial Sequence
  derived and/or modified sequence
tcctgggtccggtcaaccgtcaaaatgtccaaagaacctctcattctctggctgatgattgagttttggtggctttacctgacaccagtcacttcagagactgttgtgacggaggttttgggtcaccgggtgactttgccctgtctgtactcatcctggtctcacaacagcaacagcatgtgctgggggaaagaccagtgcccctactccggttgcaaggaggcgctcatccgcactgatggaatgagggtgacctcaagaaagtcagcaaaatatagacttcaggggactatcccgagaggtgatgtctccttgaccatcttaaaccccagtgaaagtgacagcggtgtgtactgctgccgcatagaagtgcctggctggttcaacgatgtaaagataaacgtgcgcctgaatctacagagagcctcaacaaccacgcacagaacagcaaccaccaccacacgcagaacaacaacaacaagccccaccaccacccgacaaatgacaacaaccccagctgcacttccaacaacagtcgtgaccacacccgatctcacaaccggaacaccactccagatgacaaccattgccgtcttcacaacagcaaacacgtgcctttcactaaccccaagcacccttccggaggaagccacaggtcttctgactcccgagccttctaaggaagggcccatcctcactgcagaatcagaaactgtcctccccagtgattcctggagtagtgttgagtctacttctgctgacactgtcctgctgacatccaaagcatctgatacagcagttcctgagcagaacaaaacaacaaaaacaggacagatggatggaatacccatgtcaatgaagaatgaaatgcccatctcccaactactgatgatcatcgccccctccttgggatttgtgctcttcgcattgtttgtggcgtttctcctgagagggaaactcatggaaacctattgttcgcagaaacacacaaggctagactacattggagatagtaaaaatgtcctcaatgacgtgcagcatggaagggaagacgaagacggcctttttaccctctaacaacgcagtagcatgttagattgaggatgggggcatgacactccagtgtcaaaataagtcttagtaga

SEQ ID NO: 60068 - protein, 967 aa, Artificial Sequence
  derived and/or modified sequence
MAKGFYISKSLGILGILLGVAAVCTIIALSVVYSQEKNKNANSSPVASTTPSASATTNPASATTLDQSKAWNRYRLPNTLKPDSYRVTLRPYLTPNDRGLYVFKGSSTVRFTCKEATDVIIIHSKKLNYTLSQGHRVVLRGVGGSQPPDIDKTELVEPTEYLVVHLKGSLVKDSQYEMDSEFEGELADDLAGFYRSEYMEGNVRKVVATTQMQAADARKSFPCFDEPAMKAEFNITLIHPKDLTALSNMLPKGPSTPLPEDPNWNVTEFHTTPKMSTYLLAFIVSEFDYVEKQASNGVLIRIWARPSAIAAGHGDYALNVTGPILNFFAGHYDTPYPLPKSDQIGLPDFNAGAMENWGLVTYRENSLLFDPLSSSSSNKERVVTVIAHELAHQWFGNLVTIEWWNDLWLNEGFASYVEYLGADYAEPTWNLKDLMVLNDVYRVMAVDALASSHPLSTPASEINTPAQISELFDAISYSKGASVLRMLSSFLSEDVFKQGLASYLHTFAYQNTIYLNLWDHLQEAVNNRSIQLPTTVRDIMNRWTLQMGFPVITVDTSTGTLSQEHFLLDPDSNVTRPSEFNYVWIVPITSIRDGRQQQDYWLIDVRAQNDLFSTSGNEWVLLNLNVTGYYRVNYDEENWRKIQTQLQRDHSAIPVINRAQIINDAFNLASAHKVPVTLALNNTLFLIEERQYMPWEAALSSLSYFKLMFDRSEVYGPMKNYLKKQVTPLFIHFRNNTNNWREIPENLMDQYSEVNAISTACSNGVPECEEMVSGLFKQWMENPNNNPIHPNLRSTVYCNAIAQGGEEEWDFAWEQFRNATLVNEADKLRAALACSKELWILNRYLSYTLNPDLIRKQDATSTIISITNNVIGQGLVWDFVQSNWKKLFNDYGGGSFSFSNLIQAVTRRFSTEYELQQLEQFKKDNEETGFGSGTRALEQALEKTKANIKWVKENKEVVLQWFTENSK

SEQ ID NO: 60069 - protein, 103 aa, Artificial Sequence
  derived and/or modified sequence
MAKGFYISKSLGILGILLGVAAVCTIIALSVVYSQEKNKNANSSPVASTTPSASATTNPASATTLDQSKAWNRYRLPNTLKPDSYRVTLRPYLTPNDRGLYVF

SEQ ID NO: 60070 - protein, 61 aa, Artificial Sequence
  derived and/or modified sequence
MAKGFYISKSLGILGILLGVAAVCTIIALSVVYSQEKNKNANSSPVASTTPSASATTNPAS

SEQ ID NO: 60071 - DNA, 2904 bp, Artificial Sequence
  derived and/or modified sequence
atggctaaggggttttatatcagcaaatccctaggcatcctggggattctactcggggtggcagctgtttgtaccattatcgccctctctgtggtgtattctcaagagaagaataagaacgcaaacagctctcccgtggcatccacgaccccctcagctagcgccacgacaaatccggcctctgcaactacgctagaccagagcaaagcctggaaccgctaccgactgccaaatacattgaaacccgattcctatagagtaacacttagaccctacctgactcctaatgatcgcgggttatacgttttcaaagggagcagtaccgtacgctttacatgtaaagaggcaacggacgttatcatcatccacagcaaaaaactgaactatactctgagtcagggccacagagtggtgctccggggcgtgggtggctcccagcctcctgatatcgataaaacggagctggtagaaccgactgagtatctggtagtgcaccttaagggctcactggtaaaggattcacagtatgagatggactccgaattcgagggcgagctggctgatgaccttgccgggttctatagatccgaatatatggaggggaacgtcaggaaagtagttgccactactcaaatgcaggcagccgacgcccggaaaagcttcccatgcttcgatgagcctgcaatgaaagctgaattcaatatcaccctgattcacccaaaagacctaacggccctgtccaacatgttgcctaaagggccgtctacacctctgcccgaagacccaaattggaatgttaccgagttccacactacccctaagatgagtacatatttgctcgcttttattgtttcagagtttgattacgtggagaagcaagcctctaacggcgtgctgatacggatttgggcccgaccatccgcaattgctgccggacatggggattatgcccttaatgttacagggccaatccttaacttctttgcgggacactacgataccccctaccccctgcctaagtctgaccaaataggactgccggattttaacgcaggagctatggagaattggggcctggtcacataccgagaaaattcactgttgttcgacccacttagcagctcatcatcaaacaaggagagggtcgttactgttatcgctcacgaactggcccaccagtggtttggcaatctagttaccatcgagtggtggaatgatctctggctgaatgagggattcgcatcgtatgtcgaatacttgggggccgattacgcagaaccaacctggaaccttaaggatcttatggtgctcaacgacgtttatcgtgtgatggccgttgatgctttagcatcttcgcatcctctgtcaacccctgcgtccgaaattaacacccctgcccagatctctgaactgttcgacgcgataagctattctaagggagcttccgtgcttcgcatgttatcctctttcctgtcagaggacgtatttaaacagggtttagcttcttatttgcacaccttcgcgtatcagaacacaatctatctaaatctgtgggaccatcttcaggaggctgtgaataaccgctctatacagctcccaacaactgttagagatattatgaaccggtggacattgcaaatgggattccccgtgattacagtggatacctctacaggtactctgtcacaggagcattttctcctcgaccctgacagtaacgtaactaggccttctgaattcaattacgtttggatcgttcccattacatccatcagggacgggaggcagcagcaggactattggctcatcgatgtgcgcgcacagaatgatcttttctctacatctggaaatgaatgggtgttgctgaatctcaatgtgaccggttattatcgcgtcaattacgatgaagagaactggcgcaagattcaaacccagctccaacgtgaccatagcgcaattccagtcatcaacagagcacagatcatcaacgatgcattcaatttagcctccgctcacaaagtaccagtcaccttggctcttaataatactctgtttctgatcgaagagaggcagtatatgccatgggaggcagcgctcagttccttaagctacttcaaattaatgttcgacaggagtgaagtttacggcccaatgaagaactacttaaaaaagcaggttactccactgttcattcactttagaaacaatactaataattggcgcgaaattcccgagaatttaatggatcagtattccgaggtgaatgctatcagtacagcatgttctaacggagtcccagagtgcgaagagatggtctctggcctgtttaagcagtggatggaaaaccctaataataatccaatacatccaaacctccgatctaccgtctactgtaacgctatcgcccagggcggtgaagaggagtgggattttgcttgggagcagttcaggaacgcaaccctcgtgaacgaggcagacaagctccgcgccgctctggcttgcagcaaagagctatggatccttaaccgttacctgtcttatactctaaatcctgacctcatccgaaagcaggatgccaccagcacaatcatctcaattaccaataacgtcattggtcaaggcctcgtgtgggacttcgtccagagcaactggaaaaagttgttcaacgattacggcggcggttccttttcatttagcaatctgatccaggccgttacacgccggttctccacagaatacgagctgcagcagctggagcagttcaagaaagacaacgaagaaacaggcttcgggagtgggacaagagccctggagcaggcattagaaaagacaaaggccaatattaagtgggtgaaagagaacaaagaggtggtcctgcagtggtttactgaaaactctaagtag

SEQ ID NO: 60072 - DNA, 2904 bp, Artificial Sequence
  derived and/or modified sequence
atggccaagggcttctacatcagcaagagcctgggcatcctgggcatcctgctgggcgtggccgctgtgtgcaccatcatcgccctgtctgtggtgtacagccaggagaagaacaagaatgccaacagcagccctgtggccagcaccacccccagcgccagcgccaccaccaacccagccagcgccaccaccctggaccagagcaaggcctggaaccgctaccgcctgcccaacaccctgaagccagacagctacagagtgaccctgcggccctacctgaccccaaatgaccggggcctgtatgtgttcaagggcagcagcacagtgcgcttcacctgcaaggaggccacagatgtgatcatcatccacagcaagaagctgaactacaccctgagccagggccaccgggtggtgctgcggggcgtgggcggcagccagcccccagacatcgacaagacagagctggtggagcccacagagtacctggtggtgcacctgaagggcagcctggtgaaggacagccagtatgagatggacagcgagtttgaaggagagctggctgatgacctggccggcttctacagaagtgagtacatggagggcaatgtgaggaaggtggtggccaccacccagatgcaggccgcagatgccaggaagagcttcccctgctttgatgagcccgccatgaaggccgagttcaacatcaccctcatccaccccaaggacctgacagccctgagcaacatgctgcccaagggccccagcacccccctgcctgaggaccccaactggaatgtgacagagttccacaccacccccaagatgagcacctacctgctggccttcatcgtgtctgaatttgattatgtggagaagcaggccagcaatggagtgctgatccgcatctgggcccggcccagcgccatcgctgctggccatggagactatgccctgaatgtgacaggccccatcctgaacttctttgctggccactatgacaccccctaccccctgcccaagagtgaccagatcggcctgcctgacttcaatgctggggccatggagaactggggcctggtgacctaccgggagaacagcctgctgtttgaccccctgagcagcagcagcagcaacaaggagcgggtggtgaccgtcatcgcccacgagctggcccaccagtggtttggaaacctggtgaccatcgagtggtggaatgacctgtggctgaatgaaggatttgccagctatgtggagtacctgggcgctgactatgcagagcccacctggaacctgaaggacctgatggtgctgaatgatgtgtacagagtgatggctgtggatgccctggccagcagccaccccctgagcaccccagccagcgagatcaacaccccagcccagatcagcgagctgtttgatgccatctcctacagcaaaggagcctctgtgctgaggatgctgagcagcttcctgtctgaagatgtgttcaagcagggcctggccagctacctgcacacctttgcctaccagaacaccatctacctgaacctgtgggaccacctgcaggaggccgtgaacaacagaagcatccagctgcccaccaccgtgcgggacatcatgaaccgctggaccctgcagatgggcttccctgtgatcaccgtggacaccagcacaggcaccctgagccaggagcacttcctgctggaccctgacagcaatgtgacccggcccagcgagttcaactacgtgtggatcgtgcccatcaccagcatcagagatggccggcagcagcaggactactggctgattgatgtgcgggcccagaatgacctcttcagcaccagcggaaatgagtgggtgctgctgaacctgaatgtgacaggctactacagagtgaactatgatgaggagaactggaggaagatccagacccagctgcagagggaccacagcgccatccctgtgatcaacagagcccagatcatcaatgatgccttcaacctggccagcgcccacaaggtgcctgtgaccctggccctgaacaacaccctcttcctgattgaggagcggcagtacatgccctgggaggccgccctgagcagcctgagctacttcaagctgatgtttgacagaagtgaggtgtatggccccatgaagaactacctgaagaagcaggtgacccccctcttcatccacttcaggaacaacaccaacaactggagggagatccctgagaacctgatggaccagtacagcgaggtgaatgccatcagcacagcctgcagcaatggagtgcctgaatgtgaggagatggtgtctggcctcttcaagcagtggatggagaaccccaacaacaaccccatccaccccaacctgcggagcacagtgtactgcaatgccatcgcccagggcggggaggaggagtgggactttgcctgggagcagttcagaaatgccaccctggtgaatgaagctgacaagctgcgggccgccctggcctgcagcaaggagctgtggatcctgaaccgctacctgagctacaccctgaacccagacctgatcaggaagcaggatgccaccagcaccatcatcagcatcaccaacaacgtgattggccagggcctggtgtgggactttgtgcagagcaactggaagaagctgttcaatgactatggaggcggcagcttctccttcagcaacctgatccaggccgtgacccggcgcttcagcacagaatatgagctgcagcagctggagcagttcaagaaggacaatgaggagaccggcttcggcagcggcacccgggccctggagcaggccctggagaagaccaaggccaacatcaagtgggtgaaggagaacaaggaggtggtgctgcagtggttcacagagaacagcaagtag

SEQ ID NO: 60073 - DNA, 2904 bp, Artificial Sequence
  derived and/or modified sequence
atggccaagggcttctacatcagcaagagcctgggcatcctgggcattttactgggcgtggccgcagtatgcactattattgcgctgtctgtggtttactcccaggagaaaaataagaacgccaattctagcccagtggcatcaaccacacctagcgcgagtgccaccactaaccctgcaagcgccacgactctcgaccagtctaaggcctggaacagatatcggctgccaaatacgctgaaacctgattcttatcgggtaactctgcgaccctacctgacacccaacgatcggggactgtatgtcttcaaagggtcatccacagtcagatttacatgtaaagaagctacagacgtcataattatccatagcaaaaaattgaactacaccctgagtcaagggcatcgagtggttctgcgaggggtcgggggatcccagccaccagatattgataagacagagctcgtggaaccaaccgaatacctcgtggttcatctcaaggggtccctcgtgaaggatagccagtatgaaatggactccgagttcgagggggagctagccgatgacctggccggcttctaccggagtgaatacatggagggaaacgtaagaaaagtggtagccacaacccagatgcaagccgccgacgctcgcaaaagcttcccctgctttgatgaacctgccatgaaagctgagttcaacattactctcatccacccaaaggatctgaccgctttgagcaatatgctaccaaaggggccctcgacccccctcccagaggaccccaattggaatgtgacagagttccatacgactccaaaaatgtcaacctatctgcttgccttcattgtgtcagagttcgattatgttgaaaagcaggccagcaatggagtgctgataaggatctgggccagaccctccgcgattgccgcgggccatggagattacgcgttgaacgtgacaggcccaattctcaatttctttgccggacattacgacactccgtaccctttgccaaagtcagaccagatcgggctgcctgactttaacgccggcgcaatggaaaattggggactggtgacctaccgagaaaattccctgctctttgatccattgtcttcatccagctcgaataaagagcgagtcgtgaccgtcatcgcgcatgaactggctcatcagtggtttggaaatctcgttactatcgagtggtggaacgatctatggctgaatgaaggatttgcgtcctacgtggaatatctgggggctgactacgctgaacccacttggaatctgaaggacctgatggtactgaacgacgtctaccgagtgatggccgttgacgccttagcctcatcccaccccttgtcaacaccagcaagcgagattaatactcccgcacagatcagtgagttgttcgacgccatttcatattccaagggtgcgtctgttttgcgcatgttgtcctcatttttgtccgaggacgtgtttaagcaaggtctcgcgtcatatctgcacacctttgcttatcagaacactatatatctaaatctgtgggaccacctacaagaggccgtgaataaccggagcattcagcttccgactacggtgagagatatcatgaaccgctggacactgcagatgggttttcccgtcattactgtggacaccagtaccgggaccttgagccaggaacatttcttgttggatcccgatagtaacgtgactagacccagcgaattcaactacgtgtggatcgtgcctattactagcatccgggacggcagacagcagcaggactattggctgatagatgtgcgagcccagaacgatttgttctcaacctccggaaacgaatgggtgctcctaaatcttaacgtaacagggtactaccgggtgaactatgatgaggaaaattggcgaaagatccagactcagttacagcgtgatcactcagccattcctgtgatcaaccgtgcgcagataattaatgatgcatttaatctcgcctccgcccataaggtgccagttactctcgcccttaacaacacgctgtttctgatcgaggaaaggcagtacatgccatgggaagctgcactctcgagcctctcatatttcaaacttatgttcgatcgcagtgaagtttacgggcctatgaagaactaccttaaaaagcaggtcaccccgctttttattcacttccgaaacaataccaacaactggagggagatcccggagaacctgatggatcagtacagcgaggtcaatgctatttccaccgcttgttccaatggagtgcccgagtgtgaagaaatggtttccggactgtttaaacaatggatggaaaaccctaacaataatcccatccacccaaaccttagatctactgtgtattgcaatgccattgcgcaggggggggaagaggaatgggattttgcatgggaacagttcagaaacgcaacccttgtcaacgaagccgataagctgcgggccgccctggcctgctccaaagaactctggatactgaatcgatacctgagctacacgcttaatcctgatcttattcgaaaacaggacgcaacaagtacaattatctccattaccaacaacgtcataggtcaggggctggtgtgggatttcgtgcaatcgaattggaaaaagttattcaacgattacggcggcggctctttcagcttctccaacttgatacaagccgtgaccagacgattttccacggaatatgagctccagcagcttgagcaatttaaaaaagacaacgaagagactggtttcggaagcggaaccagagcattggaacaagctcttgagaaaacaaaggccaacataaaatgggttaaggaaaataaggaggtcgtcctgcaatggtttacagagaattcgaagtag

SEQ ID NO: 60074 - DNA, 2904 bp, Artificial Sequence
  derived and/or modified sequence
atggctaaagggttttacatctccaagagcttggggatcctggggattttactcggcgtggccgctgtgtgcaccattattgccttatccgtagtgtactcccaggaaaagaataagaacgcgaacagcagtcccgtggcatcgaccacgcccagcgcttcagcaactactaaccccgcttcagctacaaccttggaccaaagcaaagcttggaacaggtacagattgccaaacaccctcaaaccagattcctacagagttactcttaggccatacctgacaccgaatgatagggggttgtatgtgtttaaaggctcatcaactgtgcgcttcacgtgcaaggaggcaacagacgtaattattatacacagtaagaagttgaattacactctgagccaaggtcacagggttgtacttcggggagttggaggttctcagccccctgatatcgacaagacagaacttgtcgagcccacagaatatctggtggtccacctcaaggggtcactcgtgaaggactcacagtacgaaatggatagcgagtttgaaggcgagttggccgatgacctggctggattctacagaagcgaatacatggagggcaacgtgagaaaggtcgtcgctaccacacagatgcaggcggctgacgcgaggaaaagtttcccttgcttcgatgagccggcaatgaaagccgaattcaacatcacactcatccatcccaaggaccttactgctttgtctaatatgctccccaaggggccttcgacaccactacccgaggaccccaactggaatgtgactgaatttcatactacacccaagatgtctacatacttattggcgttcattgtgtctgaattcgattatgttgaaaagcaagcgtcaaacggtgtattgattagaatctgggcgcgtccctccgccattgccgctggtcacggagattacgctctcaacgtgacaggcccaatcttaaacttcttcgctggccactacgacacaccttatcctctgcccaagtcggaccagattggtctgccggattttaacgcgggtgcaatggagaattgggggctagtcacctaccgggaaaatagcctgctgttcgatcctctgagcagtagctccagtaacaaagaacgtgtggtgactgtgatagctcacgagttggcacaccagtggtttggaaacctggttactatcgagtggtggaatgatctttggctgaacgagggatttgcttcttatgtggagtatctcggtgccgattacgccgagcctacatggaacctgaaggacctaatggtgctgaacgacgtgtatcgggtgatggcagtagacgcactggccagttcccacccgctgtcaacaccggcttctgaaatcaacacaccagctcagatcagtgagctatttgatgccatttcgtattctaagggagcaagtgtgttgaggatgctcagtagttttctgtctgaggacgtgtttaagcaaggccttgcttcctacctccatacttttgcttaccagaacactatctacctcaatctctgggatcacctacaggaggccgttaacaatagatcaatacaactaccgaccaccgttagggatatcatgaataggtggacattacaaatggggttccctgtcattaccgtcgacacaagcacgggtaccttgtctcaggaacactttctcttggacccagattccaatgtgaccagacccagcgagttcaactatgtctggatcgttcctattacctctatcagagacggaagacagcagcaagattactggctgatagacgtgagggcacagaatgatctcttctccacttcggggaatgagtgggtgctgctcaacctgaacgtgaccggctactaccgagtgaactatgatgaggagaattggagaaagattcagacacagctgcaacgcgatcactccgcaatccctgttatcaatagagctcagataatcaatgatgccttcaatctggcatctgcacacaaggtgcccgtaacattagccctgaataatactctgttcctgatagaggagcggcagtatatgccctgggaagccgcactctcgtccctcagttatttcaaactgatgttcgacaggtccgaagtgtatggcccaatgaaaaactatctgaagaagcaggtcaccccgctgtttatccactttcgaaacaatacaaacaattggcgcgagattccagagaatctgatggaccaatactctgaggttaatgcaatcagtactgcttgcagcaatggcgtccctgagtgtgaagaaatggtctctggcctgttcaagcaatggatggaaaaccccaataataatccaatccaccccaacctgagatcgactgtctactgcaacgctattgcacaaggcggagaagaagagtgggactttgcatgggaacagttcaggaacgcaactctagtgaatgaggctgacaaactgagagcggcactggcctgcagcaaagaactgtggattctcaaccgatacctgtcgtacaccctcaacccagatctcatccgcaaacaggacgctacttccactattatttcaattacaaataacgtgatcggccaagggctggtgtgggatttcgtgcagagtaattggaagaaattgtttaatgattatggtgggggtagtttttccttttccaacctgatccaggcagtgacacgtaggttctccactgagtatgaactgcaacaactagaacagtttaagaaagacaatgaggagactggctttggctctggcacccgcgcactggaacaggccttggagaagactaaggcgaacatcaaatgggtgaaagagaataaggaagtggtgcttcagtggtttactgaaaactcaaagtag

SEQ ID NO: 60075 - DNA, 3678 bp, Artificial Sequence
  derived and/or modified sequence
ggagtccagtgctggaggggcagggacggcggcggcgcagctcggaacccgccagggtccagggtccaggttccagcgcccggcggcccaggcaccccccgagcccagctccacacaccgttcctggatctcctctccccaggcggagcgtgcccctgcccagtccagtgaccttcgcctgttggagccctggttaatttttgcccagtctgcctgttgtggggctcctcccctttggggatataagcccggcctggggctgctccgttctctgcctggcctgaggctccctgagccgcctccccaccatcaccatggccaagggcttctatatttccaagtccctgggcatcctggggatcctcctgggcgtggcagccgtgtgcacaatcatcgcactgtcagtggtgtactcccaggagaagaacaagaacgccaacagctcccccgtggcctccaccaccccgtccgcctcagccaccaccaaccccgcctcggccaccaccttggaccaaagtaaagcgtggaatcgttaccgcctccccaacacgctgaaacccgattcctaccgggtgacgctgagaccgtacctcacccccaatgacaggggcctgtacgtttttaagggctccagcaccgtccgtttcacctgcaaggaggccactgacgtcatcatcatccacagcaagaagctcaactacaccctcagccaggggcacagggtggtcctgcgtggtgtgggaggctcccagccccccgacattgacaagactgagctggtggagcccaccgagtacctggtggtgcacctcaagggctccctggtgaaggacagccagtatgagatggacagcgagttcgagggggagttggcagatgacctggcgggcttctaccgcagcgagtacatggagggcaatgtcagaaaggtggtggccactacacagatgcaggctgcagatgcccggaagtccttcccatgcttcgatgagccggccatgaaggccgagttcaacatcacgcttatccaccccaaggacctgacagccctgtccaacatgcttcccaaaggtcccagcaccccacttccagaagaccccaactggaatgtcactgagttccacaccacgcccaagatgtccacgtacttgctggccttcattgtcagtgagttcgactacgtggagaagcaggcatccaatggtgtcttgatccggatctgggcccggcccagtgccattgcggcgggccacggcgattatgccctgaacgtgacgggccccatccttaacttctttgctggtcattatgacacaccctacccactcccaaaatcagaccagattggcctgccagacttcaacgccggcgccatggagaactggggactggtgacctaccgggagaactccctgctgttcgaccccctgtcctcctccagcagcaacaaggagcgggtggtcactgtgattgctcatgagctggcccaccagtggttcgggaacctggtgaccatagagtggtggaatgacctgtggctgaacgagggcttcgcctcctacgtggagtacctgggtgctgactatgcggagcccacctggaacttgaaagacctcatggtgctgaatgatgtgtaccgcgtgatggcagtggatgcactggcctcctcccacccgctgtccacacccgcctcggagatcaacacgccggcccagatcagtgagctgtttgacgccatctcctacagcaagggcgcctcagtcctcaggatgctctccagcttcctgtccgaggacgtattcaagcagggcctggcgtcctacctccacacctttgcctaccagaacaccatctacctgaacctgtgggaccacctgcaggaggctgtgaacaaccggtccatccaactccccaccaccgtgcgggacatcatgaaccgctggaccctgcagatgggcttcccggtcatcacggtggataccagcacggggaccctttcccaggagcacttcctccttgaccccgattccaatgttacccgcccctcagaattcaactacgtgtggattgtgcccatcacatccatcagagatggcagacagcagcaggactactggctgatagatgtaagagcccagaacgatctcttcagcacatcaggcaatgagtgggtcctgctgaacctcaatgtgacgggctattaccgggtgaactacgacgaagagaactggaggaagattcagactcagctgcagagagaccactcggccatccctgtcatcaatcgggcacagatcattaatgacgccttcaacctggccagtgcccataaggtccctgtcactctggcgctgaacaacaccctcttcctgattgaagagagacagtacatgccctgggaggccgccctgagcagcctgagctacttcaagctcatgtttgaccgctccgaggtctatggccccatgaagaactacctgaagaagcaggtcacacccctcttcattcacttcagaaataataccaacaactggagggagatcccagaaaacctgatggaccagtacagcgaggttaatgccatcagcaccgcctgctccaacggagttccagagtgtgaggagatggtctctggccttttcaagcagtggatggagaaccccaataataacccgatccaccccaacctgcggtccaccgtctactgcaacgctatcgcccagggcggggaggaggagtgggacttcgcctgggagcagttccgaaatgccacactggtcaatgaggctgacaagctccgggcagccctggcctgcagcaaagagttgtggatcctgaacaggtacctgagctacaccctgaacccggacttaatccggaagcaggacgccacctctaccatcatcagcattaccaacaacgtcattgggcaaggtctggtctgggactttgtccagagcaactggaagaagctttttaacgattatggtggtggctcgttctccttctccaacctcatccaggcagtgacacgacgattctccaccgagtatgagctgcagcagctggagcagttcaagaaggacaacgaggaaacaggcttcggctcaggcacccgggccctggagcaagccctggagaagacgaaagccaacatcaagtgggtgaaggagaacaaggaggtggtgctccagtggttcacagaaaacagcaaatagtccccagcccttgaagtcacccggcccccatgcaaggtgcccacatgtgtccatcccagcggctggtgcagggcctccattcctggagcccgaggcaccagtgtcctcccctcaaggacaaagtctccagcccacgttctctctgcctgtgagccagtctagttcctgatgacccaggctgcctgagcacctcccagcccctgcccctcatgccaaccccgccctaggcctggcatggcacctgtcgcccagtgccctggggctgatctcagggaagcccagctccagggccagatgagcagaagctctcgatggacaatgaacggccttgctgggggccgccctgtaccctctttcacctttccctaaagaccctaaatctgaggaatcaacagggcagcagatctgtatatttttttctaagagaaaatgtaaataaaggatttctagatgagtgaga

SEQ ID NO: 60076 - DNA, 2904 bp, Artificial Sequence
  derived and/or modified sequence
atggccaagggcttctacatcagcaagagcctgggcatcctgggcatcctgctgggcgtggccgccgtgtgcaccatcatcgccctgagcgtggtgtacagccaggagaagaacaagaacgccaacagcagccccgtggccagcaccacccccagcgccagcgccaccaccaaccccgccagcgccaccaccctggaccagagcaaggcctggaacagatacagactgcccaacaccctgaagcccgacagctacagagtgaccctgagaccctacctgacccccaacgacagaggcctgtacgtgttcaagggcagcagcaccgtgagattcacctgcaaggaggccaccgacgtgatcatcatccacagcaagaagctgaactacaccctgagccagggccacagagtggtgctgagaggcgtgggcggcagccagccccccgacatcgacaagaccgagctggtggagcccaccgagtacctggtggtgcacctgaagggcagcctggtgaaggacagccagtacgagatggacagcgagttcgagggcgagctggccgacgacctggccggcttctacagaagcgagtacatggagggcaacgtgagaaaggtggtggccaccacccagatgcaggccgccgacgccagaaagagcttcccctgcttcgacgagcccgccatgaaggccgagttcaacatcaccctgatccaccccaaggacctgaccgccctgagcaacatgctgcccaagggccccagcacccccctgcccgaggaccccaactggaacgtgaccgagttccacaccacccccaagatgagcacctacctgctggccttcatcgtgagcgagttcgactacgtggagaagcaggccagcaacggcgtgctgatcagaatctgggccagacccagcgccatcgccgccggccacggcgactacgccctgaacgtgaccggccccatcctgaacttcttcgccggccactacgacaccccctaccccctgcccaagagcgaccagatcggcctgcccgacttcaacgccggcgccatggagaactggggcctggtgacctacagagagaacagcctgctgttcgaccccctgagcagcagcagcagcaacaaggagagagtggtgaccgtgatcgcccacgagctggcccaccagtggttcggcaacctggtgaccatcgagtggtggaacgacctgtggctgaacgagggcttcgccagctacgtggagtacctgggcgccgactacgccgagcccacctggaacctgaaggacctgatggtgctgaacgacgtgtacagagtgatggccgtggacgccctggccagcagccaccccctgagcacccccgccagcgagatcaacacccccgcccagatcagcgagctgttcgacgccatcagctacagcaagggcgccagcgtgctgagaatgctgagcagcttcctgagcgaggacgtgttcaagcagggcctggccagctacctgcacaccttcgcctaccagaacaccatctacctgaacctgtgggaccacctgcaggaggccgtgaacaacagaagcatccagctgcccaccaccgtgagagacatcatgaacagatggaccctgcagatgggcttccccgtgatcaccgtggacaccagcaccggcaccctgagccaggagcacttcctgctggaccccgacagcaacgtgaccagacccagcgagttcaactacgtgtggatcgtgcccatcaccagcatcagagacggcagacagcagcaggactactggctgatcgacgtgagagcccagaacgacctgttcagcaccagcggcaacgagtgggtgctgctgaacctgaacgtgaccggctactacagagtgaactacgacgaggagaactggagaaagatccagacccagctgcagagagaccacagcgccatccccgtgatcaacagagcccagatcatcaacgacgccttcaacctggccagcgcccacaaggtgcccgtgaccctggccctgaacaacaccctgttcctgatcgaggagagacagtacatgccctgggaggccgccctgagcagcctgagctacttcaagctgatgttcgacagaagcgaggtgtacggccccatgaagaactacctgaagaagcaggtgacccccctgttcatccacttcagaaacaacaccaacaactggagagagatccccgagaacctgatggaccagtacagcgaggtgaacgccatcagcaccgcctgcagcaacggcgtgcccgagtgcgaggagatggtgagcggcctgttcaagcagtggatggagaaccccaacaacaaccccatccaccccaacctgagaagcaccgtgtactgcaacgccatcgcccagggcggcgaggaggagtgggacttcgcctgggagcagttcagaaacgccaccctggtgaacgaggccgacaagctgagagccgccctggcctgcagcaaggagctgtggatcctgaacagatacctgagctacaccctgaaccccgacctgatcagaaagcaggacgccaccagcaccatcatcagcatcaccaacaacgtgatcggccagggcctggtgtgggacttcgtgcagagcaactggaagaagctgttcaacgactacggcggcggcagcttcagcttcagcaacctgatccaggccgtgaccagaagattcagcaccgagtacgagctgcagcagctggagcagttcaagaaggacaacgaggagaccggcttcggcagcggcaccagagccctggagcaggccctggagaagaccaaggccaacatcaagtgggtgaaggagaacaaggaggtggtgctgcagtggttcaccgagaacagcaagtag

SEQ ID NO: 60077 - protein, 298 aa, Artificial Sequence
  derived and/or modified sequence
MGDHAWSFLKDFLAGGVAAAVSKTAVAPIERVKLLLQVQHASKQISAEKQYKGIIDCVVRIPKEQGFLSFWRGNLANVIRYFPTQALNFAFKDKYKQLFLGGVDRHKQFWRYFAGNLASGGAAGATSLCFVYPLDFARTRLAADVGKGAAQREFHGLGDCIIKIFKSDGLRGLYQGFNVSVQGIIIYRAAYFGVYDTAKGMLPDPKNVHIFVSWMIAQSVTAVAGLVSYPFDTVRRRMMMQSGRKGADIMYTGTVDCWRKIAKDEGAKAFFKGAWSNVLRGMGGAFVLVLYDEIKKYV

SEQ ID NO: 60078 - DNA, 897 bp, Artificial Sequence
  derived and/or modified sequence
atgggagaccatgcttggtcttttctgaaagatttcttggccggaggcgtggccgctgctgtgagcaagaccgcagtagctcccatcgagcgcgtcaagctgctactgcaagtccagcatgccagcaaacagatttcagccgagaaacaatacaagggcattattgattgcgtggtcagaatccccaaggagcagggattcctctctttttggcgcgggaacctggctaatgtcatccggtactttccaactcaggccctgaatttcgccttcaaggacaaatacaagcagctgttcctcgggggcgttgacagacataagcagttctggcgatacttcgctggcaacctggcctccggaggagccgcgggcgccacgtccctgtgttttgtctatccgctggattttgcacgaaccagactcgctgcagacgttggcaagggtgctgcccaaagggagtttcatgggcttggggactgcatcataaagatcttcaagtccgatgggcttcggggcctctatcaaggtttcaacgtgagcgtgcagggaataatcatatatagagccgcctacttcggggtgtacgataccgccaagggcatgttgccagaccccaagaacgttcatatttttgtgtcatggatgatcgcccaaagtgtgactgcggttgccggtctcgtctcatatccattcgacacagtccgccgccgtatgatgatgcaatcaggccggaaaggtgcggacataatgtacacaggtacagtcgattgctggcggaaaatagctaaggatgagggggcaaaagcttttttcaagggagcatggtctaacgtgcttagaggtatgggtggtgccttcgtcctagtgctgtacgacgaaatcaagaagtacgtctag

SEQ ID NO: 60079 - DNA, 897 bp, Artificial Sequence
  derived and/or modified sequence
atgggagaccacgcctggagcttcctgaaggacttcctggccggcggcgtggccgctgctgtgtccaagacagctgtggcccccatcgagcgggtgaagctgctgctgcaggtgcagcacgccagcaagcagatctctgctgagaagcagtacaagggcatcatcgactgtgtggtgcgcatccccaaggagcagggcttcctgtccttctggaggggcaacctggccaacgtcatccgctacttccccacccaggccctgaactttgccttcaaggacaagtacaagcagctgttcctgggcggcgtggacagacacaagcagttctggagatactttgctggcaacctggccagcggcggcgctgctggggccaccagcctgtgctttgtgtaccccctggactttgcccggacccggctggccgcagatgtgggcaaaggagctgcccagcgggagttccacggcctgggggactgcatcatcaagatcttcaagagtgatggcctgcggggcctgtaccagggcttcaacgtgtctgtgcagggcatcatcatctacagagctgcctactttggagtgtatgacacagccaagggcatgctgcctgaccccaagaatgtgcacatctttgtgtcctggatgattgcccagagcgtgacagctgtggccggcctggtgtcctacccctttgacacagtgagaagaaggatgatgatgcagagcggcaggaaaggagctgacatcatgtacacaggcaccgtggactgctggaggaagatcgccaaggatgagggcgccaaggccttcttcaagggggcctggagcaatgtgctgcggggcatgggcggggcctttgtgctggtgctgtatgatgagatcaagaagtatgtgtag

SEQ ID NO: 60080 - DNA, 897 bp, Artificial Sequence
  derived and/or modified sequence
atgggcgaccacgcctggagcttcctgaaggacttcctggccggcggcgtagctgcagctgtttcgaaaaccgcagtcgcccccatcgaaagagtgaaacttctcctgcaggtgcagcacgccagcaagcagattagcgcggaaaagcaatataagggcatcatcgattgcgtggtaaggatccctaaagaacagggctttctctccttttggcgaggcaatctggctaacgtgattcggtacttcccaacccaggccctgaattttgcattcaaggataaatacaagcagctatttctggggggggttgacaggcacaaacagttttggaggtacttcgccggaaacctggcaagtgggggggctgctggggccacttctctttgctttgtgtatcctctcgatttcgcccggacacgtctggcagccgacgttggaaagggggccgcgcagcgggaatttcacggcctgggcgattgcatcattaagatctttaaatccgatggcctgcgaggtctctaccaggggttcaacgtatcagtgcaaggaatcatcatttatagagcggcttacttcggggtctacgatactgctaagggcatgctccccgacccgaaaaatgttcacatcttcgtgtcttggatgatcgcacagtctgtgaccgccgtggcggggttagtatcttacccattcgacaccgttagaaggcgcatgatgatgcagagcggcaggaaaggcgcagacattatgtacaccggcacagtagattgctggagaaagatcgccaaggacgagggtgctaaagcctttttcaagggcgcttggagcaacgttctgcggggtatgggaggggccttcgtgttagtgctatatgatgagatcaagaagtacgtgtag

SEQ ID NO: 60081 - DNA, 897 bp, Artificial Sequence
  derived and/or modified sequence
atgggggaccacgcatggtccttcctgaaggacttccttgccggtggagtggcagccgcagtgtctaaaacagccgtcgcccctatcgaaagagtgaagttattgctccaggtccagcacgcttcaaaacagatatccgccgaaaagcagtataagggaatcatcgattgcgtggtgaggatacctaaggagcaaggctttctgagcttttggcgcggaaacctggccaatgtaattagatacttccctacgcaggcgctaaattttgcatttaaagacaaatataaacagctgtttcttggtggcgtggataggcataagcagttttggcgctactttgcgggaaaccttgccagcggcggagcagccggtgccaccagcttgtgcttcgtgtaccccctcgacttcgcaagaactcggctggccgctgacgtcgggaagggagcggctcagagggagtttcacgggttaggtgactgcataatcaaaatcttcaaatcggacggccttcgaggactctaccagggcttcaacgtctctgtacagggcatcatcatataccgtgcggcttactttggggtgtatgacaccgccaagggaatgctccctgaccccaaaaatgtccatattttcgtgtcctggatgattgcacagtcagtaacagctgtcgccggtctggtgtcctaccccttcgacactgtcaggcgaagaatgatgatgcagtctggccgtaagggagctgacatcatgtacacaggaacggtggactgttggcggaagatagccaaagatgagggcgctaaggccttttttaagggtgcctggtctaacgtccttagaggtatgggcggtgcgtttgttttagtcttgtatgatgagattaagaaatatgtgtag

SEQ ID NO: 60082 - DNA, 1338 bp, Artificial Sequence
  derived and/or modified sequence
aagggggagctgcgggccaggcggcggccccctagcgtcgcgcagggtcggggactgcgcggcggtgccaggccgggcgtgggcgagagcacgaacgggctgcctgcgggctgagagcgtcgagctgtcaccatgggtgatcacgcttggagcttcctaaaggacttcctggccgggggcgtcgccgctgccgtctccaagaccgcggtcgcccccatcgagagggtcaaactgctgctgcaggtccagcatgccagcaaacagatcagtgctgagaagcagtacaaagggatcattgattgtgtggtgagaatccctaaggagcagggcttcctctccttctggaggggtaacctggccaacgtgatccgttacttccccacccaagctctcaacttcgccttcaaggacaagtacaagcagctcttcttagggggtgtggatcggcataagcagttctggcgctactttgctggtaacctggcgtccggtggggccgctggggccacctccctttgctttgtctacccgctggactttgctaggaccaggttggctgctgatgtgggcaagggcgccgcccagcgtgagttccatggtctgggcgactgtatcatcaagatcttcaagtctgatggcctgagggggctctaccagggtttcaacgtctctgtccaaggcatcattatctatagagctgcctacttcggagtctatgatactgccaaggggatgctgcctgaccccaagaacgtgcacatttttgtgagctggatgattgcccagagtgtgacggcagtcgcagggctggtgtcctacccctttgacactgttcgtcgtagaatgatgatgcagtccggccggaaaggggccgatattatgtacacggggacagttgactgctggaggaagattgcaaaagacgaaggagccaaggccttcttcaaaggtgcctggtccaatgtgctgagaggcatgggcggtgcttttgtattggtgttgtatgatgagatcaaaaaatatgtctaatgtaattaaaacacaagttcacagatttacagtgaacttgatctacaagttcacagatccattgtgtggtttaatagactattcctaggggaagtaaaaagatctgggataaaaccagactgaaaggaatacctcagaagagatgcttcattgagtgttcattaaaccacacatgtattttgtatttattttacatttaaattcccacagcaaatagaaaataatttatcatacttgtacaattaactgaagaattgataataactgaatgtgaaacatcaataaagaccacttaatgcacgctttcta

SEQ ID NO: 60083 - DNA, 897 bp, Artificial Sequence
  derived and/or modified sequence
atgggcgaccacgcctggagcttcctgaaggacttcctggccggcggcgtggccgccgccgtgagcaagaccgccgtggcccccatcgagagagtgaagctgctgctgcaggtgcagcacgccagcaagcagatcagcgccgagaagcagtacaagggcatcatcgactgcgtggtgagaatccccaaggagcagggcttcctgagcttctggagaggcaacctggccaacgtgatcagatacttccccacccaggccctgaacttcgccttcaaggacaagtacaagcagctgttcctgggcggcgtggacagacacaagcagttctggagatacttcgccggcaacctggccagcggcggcgccgccggcgccaccagcctgtgcttcgtgtaccccctggacttcgccagaaccagactggccgccgacgtgggcaagggcgccgcccagagagagttccacggcctgggcgactgcatcatcaagatcttcaagagcgacggcctgagaggcctgtaccagggcttcaacgtgagcgtgcagggcatcatcatctacagagccgcctacttcggcgtgtacgacaccgccaagggcatgctgcccgaccccaagaacgtgcacatcttcgtgagctggatgatcgcccagagcgtgaccgccgtggccggcctggtgagctaccccttcgacaccgtgagaagaagaatgatgatgcagagcggcagaaagggcgccgacatcatgtacaccggcaccgtggactgctggagaaagatcgccaaggacgagggcgccaaggccttcttcaagggcgcctggagcaacgtgctgagaggcatgggcggcgccttcgtgctggtgctgtacgacgagatcaagaagtacgtgtag

SEQ ID NO: 60084 - protein, 298 aa, Artificial Sequence
  derived and/or modified sequence
MTDAAVSFAKDFLAGGVAAAISKTAVAPIERVKLLLQVQHASKQITADKQYKGIIDCVVRIPKEQGVLSFWRGNLANVIRYFPTQALNFAFKDKYKQIFLGGVDKRTQFWLYFAGNLASGGAAGATSLCFVYPLDFARTRLAADVGKAGAEREFRGLGDCLVKIYKSDGIKGLYQGFNVSVQGIIIYRAAYFGIYDTAKGMLPDPKNTHIVISWMIAQTVTAVAGLTSYPFDTVRRRMMMQSGRKGTDIMYTGTLDCWRKIARDEGGKAFFKGAWSNVLRGMGGAFVLVLYDEIKKYT

SEQ ID NO: 60085 - DNA, 897 bp, Artificial Sequence
  derived and/or modified sequence
atgactgacgctgctgtctcctttgctaaagacttcctggcagggggggtggcagccgcgatctccaagacggcagtcgctcctattgaacgggtgaagctactccttcaggttcagcatgcctccaagcaaatcacagcagacaaacaatacaagggaattatcgactgcgttgtgaggatcccgaaggaacagggagtgctgtcgttctggcgtgggaacctagcgaacgttatcaggtattttccaacgcaggccctgaatttcgcctttaaagataaatataagcagatcttcctgggaggtgtggacaaaaggacgcaattctggctgtacttcgcggggaatctagcatcggggggagccgcaggcgctacctctctgtgcttcgtgtatcctttagacttcgctcggacgaggttggccgctgatgtaggtaaagccggtgcagaacgcgaattccgcggacttggagattgtctcgtgaagatctacaaaagcgatgggattaagggcctttatcagggctttaacgtctcagtgcaggggatcatcatctacagagccgcctactttggcatttatgacactgctaaaggaatgctccccgaccccaagaacactcacattgtcatcagttggatgatagcacagacagtaaccgcagttgctggattaacgagttatccgttcgacaccgtccgccggcgcatgatgatgcagagtggcaggaaggggacagatatcatgtacaccggaacactcgattgctggagaaagatcgcgcgggacgaaggtggcaaagctttctttaagggcgcctggtcaaacgtccttaggggcatggggggtgcctttgtcctcgtgctctacgatgagatcaaaaagtacacatag

SEQ ID NO: 60086 - DNA, 897 bp, Artificial Sequence
  derived and/or modified sequence
atgacagatgctgctgtgtcctttgccaaggacttcctggccggcggcgtggccgccgccatcagcaagacagctgtggcccccatcgagcgggtgaagctgctgctgcaggtgcagcacgccagcaagcagatcacagctgacaagcagtacaagggcatcatcgactgtgtggtgcgcatccccaaggagcagggcgtgctgtccttctggaggggcaacctggccaacgtcatccgctacttccccacccaggccctgaactttgccttcaaggacaagtacaagcagatcttcctgggcggcgtggacaagaggacccagttctggctgtactttgctggcaacctggccagcggcggcgctgctggggccaccagcctgtgctttgtgtaccccctggactttgcccggacccggctggccgcagatgtgggcaaggccggggctgagcgggagttccggggcctgggggactgcctggtgaagatctacaagagtgatggcatcaagggcctgtaccagggcttcaacgtgtctgtgcagggcatcatcatctacagagctgcctacttcggcatctatgacacagccaagggcatgctgcctgaccccaagaacacccacatcgtcatctcctggatgattgcccagacagtgacagctgtggccggcctgaccagctacccctttgacacagtgagaagaaggatgatgatgcagagcggcaggaaaggaacagacatcatgtacacaggcaccctggactgctggaggaagatcgccagagatgagggcggcaaggccttcttcaagggggcctggagcaatgtgctgcggggcatgggcggggcctttgtgctggtgctgtatgatgagatcaagaagtacacctag

SEQ ID NO: 60087 - DNA, 897 bp, Artificial Sequence
  derived and/or modified sequence
atgaccgacgccgccgtgagcttcgccaaggacttcctggccggcggcgtcgccgcagccatcagtaagaccgcagttgcacctattgagagagtgaagcttctcctccaggtacagcacgcttcaaaacagatcactgcagacaaacagtataaaggcatcattgattgtgtggtgcggatccccaaagagcagggggtcttatctttttggaggggaaatttagcaaatgtgattcgctacttccccactcaagcactcaactttgcatttaaggacaagtataagcagatttttctggggggtgtagataagaggacccagttctggctctacttcgccggaaacctcgcctccggaggtgcagccggcgcaacatccctttgcttcgtataccccctagacttcgccagaacccggttggccgctgatgtgggcaaggcgggagccgagagggagttccgagggttgggtgattgtctggtgaaaatttacaagtctgacggaatcaaaggtctgtaccagggcttcaacgtgtcggtgcaggggattatcatctaccgggcggcatactttgggatttacgacacagcgaagggaatgctgccagatccaaaaaacactcatatcgtaatcagctggatgatagctcagaccgtgacggctgtagcaggtctcaccagctaccccttcgataccgtgcggcgcaggatgatgatgcagtccggacgaaaagggacagatattatgtacacaggaacccttgattgttggcggaaaatcgcgcgggacgagggagggaaagctttcttcaagggagcatggtcaaatgtgctgagaggaatggggggtgcctttgtcttggttctctacgatgaaataaaaaaatacacctag

SEQ ID NO: 60088 - DNA, 897 bp, Artificial Sequence
  derived and/or modified sequence
atgacagatgcggctgttagtttcgccaaggatttcttagccggaggagtggcagcagctatctcaaagactgcagttgcccctatcgaaagggtgaagttgctgcttcaggttcaacatgcgagtaagcaaattaccgcagacaagcagtacaaaggaataatagactgtgtggtgcggattccaaaagagcagggggtcctctcattctggagaggcaacctggccaacgttattcgctattttcctactcaggccctcaacttcgcgtttaaagacaagtataaacaaatttttttgggaggggtcgataagcgaacccaattctggttatacttcgccggaaacctggcttcaggcggagctgctggcgcaacttccctatgttttgtctatccccttgactttgcacggaccagactggctgcggatgttggtaaagccggagccgaacgcgaatttcggggacttggcgactgtctggtaaagatttacaaatccgacggcatcaagggattataccagggattcaacgtctccgtccaaggcatcatcatatacagagccgcttacttcgggatatatgacaccgccaaaggaatgttgcccgatcctaagaatacccacatagtgatctcctggatgatcgcccaaactgtaactgccgttgccggactaacctcatatccttttgacactgtgcggaggcgtatgatgatgcagtccgggcgtaaaggcacagacataatgtacacaggaacactcgattgctggcggaaaatagccagggacgaggggggtaaggccttctttaaaggcgcttggagtaatgtcttgcgtggaatggggggagcttttgtgctggtgctgtacgacgaaatcaaaaaatacacatag

SEQ ID NO: 60089 - DNA, 1274 bp, Artificial Sequence
  derived and/or modified sequence
agctccggctccccctatataaatcggccatttgcttcgctccgccccgcagcgccggagtcaaagccggttcccggcccagtcccgtcctgcagcagtctgcctcctctttcaacatgacagatgccgctgtgtccttcgccaaggacttcctggcaggtggagtggccgcagccatctccaagacggcggtagcgcccatcgagcgggtcaagctgctgctgcaggtgcagcatgccagcaagcagatcactgcagataagcaatacaaaggcattatagactgcgtggtccgtattcccaaggagcagggagttctgtccttctggcgcggtaacctggccaatgtcatcagatacttccccacccaggctcttaacttcgccttcaaagataaatacaagcagatcttcctgggtggtgtggacaagagaacccagttttggctctactttgcagggaatctggcatcgggtggtgccgcaggggccacatccctgtgttttgtgtaccctcttgattttgcccgtacccgtctagcagctgatgtgggtaaagctggagctgaaagggaattccgaggcctcggtgactgcctggttaagatctacaaatctgatgggattaagggcctgtaccaaggctttaacgtgtctgtgcagggtattatcatctaccgagccgcctacttcggtatctatgacactgcaaagggaatgcttccggatcccaagaacactcacatcgtcatcagctggatgatcgcacagactgtcactgctgttgccgggttgacttcctatccatttgacactgttcgccgccgcatgatgatgcagtcagggcgcaaaggaactgacatcatgtacacaggcacgcttgactgctggcggaagattgctcgtgatgaaggaggcaaagcttttttcaagggtgcatggtccaatgttctcagaggcatgggtggtgcttttgtgcttgtcttgtatgatgaaatcaagaagtacacataagttatttcctaggatttttccccctgtgaacaggcatgttgtattatataacatatcttgagcattcttgacagactcctggctgtcagtttctcagtggcaactatttactggttgaaaatgggaagcaataatattcatctgaccagttttctcttaaagccatttccatgatgatgatgatgggactcaattgtattttttatttcagtcactcctgataaataacaaatttggagaaataaaaatatctaaaataaa

SEQ ID NO: 60090 - DNA, 897 bp, Artificial Sequence
  derived and/or modified sequence
atgaccgacgccgccgtgagcttcgccaaggacttcctggccggcggcgtggccgccgccatcagcaagaccgccgtggcccccatcgagagagtgaagctgctgctgcaggtgcagcacgccagcaagcagatcaccgccgacaagcagtacaagggcatcatcgactgcgtggtgagaatccccaaggagcagggcgtgctgagcttctggagaggcaacctggccaacgtgatcagatacttccccacccaggccctgaacttcgccttcaaggacaagtacaagcagatcttcctgggcggcgtggacaagagaacccagttctggctgtacttcgccggcaacctggccagcggcggcgccgccggcgccaccagcctgtgcttcgtgtaccccctggacttcgccagaaccagactggccgccgacgtgggcaaggccggcgccgagagagagttcagaggcctgggcgactgcctggtgaagatctacaagagcgacggcatcaagggcctgtaccagggcttcaacgtgagcgtgcagggcatcatcatctacagagccgcctacttcggcatctacgacaccgccaagggcatgctgcccgaccccaagaacacccacatcgtgatcagctggatgatcgcccagaccgtgaccgccgtggccggcctgaccagctaccccttcgacaccgtgagaagaagaatgatgatgcagagcggcagaaagggcaccgacatcatgtacaccggcaccctggactgctggagaaagatcgccagagacgagggcggcaaggccttcttcaagggcgcctggagcaacgtgctgagaggcatgggcggcgccttcgtgctggtgctgtacgacgagatcaagaagtacacctag

SEQ ID NO: 60091 - protein, 320 aa, Artificial Sequence
  derived and/or modified sequence
MAQVLRGTVTDFPGFDERADAETLRKAMKGLGTDEESILTLLTSRSNAQRQEISAAFKTLFGRDLLDDLKSELTGKFEKLIVALMKPSRLYDAYELKHALKGAGTNEKVLTEIIASRTPEELRAIKQVYEEEYGSSLEDDVVGDTSGYYQRMLVVLLQANRDPDAGIDEAQVEQDAQALFQAGELKWGTDEEKFITIFGTRSVSHLRKVFDKYMTISGFQIEETIDRETSGNLEQLLLAVVKSIRSIPAYLAETLYYAMKGAGTDDHTLIRVMVSRSEIDLFNIRKEFRKNFATSLYSMIKGDTSGDYKKALLLLCGEDD

SEQ ID NO: 60092 - DNA, 963 bp, Artificial Sequence
  derived and/or modified sequence
atggcacaagtcctgagagggacagtaactgattttccgggtttcgacgagcgggcagatgctgaaactttgcgtaaagccatgaaaggacttggcacagacgaggagagtatcctgacccttctcacaagtagatctaacgcgcagcgacaggaaatctccgcagccttcaagacactctttggtagagaccttctggatgatctaaagagtgagctgaccggtaaatttgaaaaactcatcgtggccctaatgaaaccctctaggctgtatgatgcctatgagctgaaacacgcccttaaaggcgccgggaccaatgaaaaggtgttgactgagatcattgcctcccgcaccccagaagagctgagggccatcaagcaggtgtacgaggaagagtatggttcctctctcgaggacgacgttgtaggggacactagcggctactatcaacgcatgctggtggttctcctccaggcaaatagagatccggatgcaggaattgacgaggcccaagtggagcaggacgcgcaggccttattccaggccggtgaactgaaatggggtaccgacgaagaaaagtttataaccatttttgggacacgtagtgtcagccaccttcgcaaagtctttgataaatacatgactattagtgggtttcaaatcgaggagacgatcgacagagagacatcaggcaacctggagcagctgctcctggccgtggtgaagtctattagaagcattcccgcatacctggccgagaccttgtactatgctatgaagggtgctggcacggacgatcataccctcatacgggtaatggtgtctcgcagtgagatcgatctgttcaatatacgcaaagaatttcgaaagaactttgcaacctcattgtacagtatgataaagggcgacaccagtggtgattacaaaaaagcactgctcctgttatgtggcgaggatgattag

SEQ ID NO: 60093 - DNA, 963 bp, Artificial Sequence
  derived and/or modified sequence
atggcccaggtgctgcggggcaccgtgacagacttccctggctttgatgaaagagcagatgctgagaccctgaggaaggccatgaagggcctgggcacagatgaggagagcatcctgaccctgctgaccagccgcagcaatgcccagaggcaggagatctctgctgccttcaagaccctgtttggccgggacctgctggatgacctgaagtctgagctgaccgggaagtttgagaagctgattgtggccctgatgaagcccagccggctgtatgatgcctatgagctgaagcacgccctgaagggagctggcaccaatgagaaggtgctgacagagatcatcgccagcaggaccccagaggagctgcgggccatcaagcaggtgtatgaggaggagtatggcagcagcctggaggatgatgtggtgggggacaccagcggctactaccagaggatgctggtggtgctgctgcaggccaacagagatcctgatgctggcattgatgaggcccaggtggagcaggatgcccaggccctcttccaggccggggagctgaagtggggcacagatgaggagaagttcatcaccatcttcggcaccaggtctgtgagccacctgaggaaggtgtttgacaagtacatgaccatcagcggcttccagatcgaggagaccatcgaccgggagaccagcggcaacctggagcagctgctgctggccgtggtgaagagcatccgcagcatcccagcctacctggccgagaccctgtactatgccatgaagggggccggcacagatgaccacaccctcatccgggtgatggtgagccgctcagaaattgacctcttcaacatcaggaaggagttcaggaagaactttgccaccagcctgtacagcatgatcaagggggacaccagcggggactacaagaaggccctgctgctgctgtgtggggaggatgactag

SEQ ID NO: 60094 - DNA, 963 bp, Artificial Sequence
  derived and/or modified sequence
atggcccaggtgctgcggggcaccgtgaccgacttccccggcttcgacgaacgcgctgacgcagaaacacttcggaaggccatgaagggtctgggaaccgatgaagagtccatcttaaccctgctcaccagtaggtccaacgcccagagacaagagatttcagcagccttcaagacgttgtttgggcgggacctgctcgacgacctcaaatccgagctcacggggaagttcgagaagcttattgttgctctgatgaagccttcaagactgtacgatgcctacgagctgaaacatgctctcaaaggggctggcacaaacgagaaagtactgacggaaatcatagccagcaggaccccagaagaactccgcgctattaagcaggtttacgaggaggaatatggcagttcacttgaagatgacgtggttggggacacatcagggtactatcagcggatgctggtggtgcttctgcaggccaacagggaccccgatgcgggcatcgacgaagcacaggtggagcaggacgcccaggcactatttcaggctggtgaactgaagtgggggactgacgaagaaaagttcattaccatcttcggaacccgctctgtaagtcacctccggaaagtgtttgataagtatatgacaatctcagggtttcaaatcgaggaaaccattgatcgtgagaccagtggaaacttggagcaactcttgctggctgtggtcaaatcaattagaagcatacctgcttatctggcagagacactgtactatgcaatgaagggcgcgggtacagatgatcacacactgattcgggtgatggtgtcccgatccgagatcgatctgttcaatattcggaaggagttcagaaaaaatttcgctacaagcttgtacagcatgatcaagggggacacttctggcgattacaagaaggccctcctgttactgtgtggtgaggatgattag

SEQ ID NO: 60095 - DNA, 1762 bp, Artificial Sequence
  derived and/or modified sequence
aggcgcgctgaggccggggcaggggcgggcccggctggcgcggccggcctgcggttggggccctggcgggggtgggacgggccaagccgggcagggccggggtggggccgctggcgtttccgttgcttggatcagtctaggtgcagctgccggatccttcagcgtctgcatctcggcgtcgccccgcgtaccgtcgcccggctctccgccgctctcccggggtttcggggcacttgggtcccacagtctggtcctgcttcaccttcccctgacctgagtagtcgccatggcacaggttctcagaggcactgtgactgacttccctggatttgatgagcgggctgatgcagaaactcttcggaaggctatgaaaggcttgggcacagatgaggagagcatcctgactctgttgacatcccgaagtaatgctcagcgccaggaaatctctgcagcttttaagactctgtttggcagggatcttctggatgacctgaaatcagaactaactggaaaatttgaaaaattaattgtggctctgatgaaaccctctcggctttatgatgcttatgaactgaaacatgccttgaagggagctggaacaaatgaaaaagtactgacagaaattattgcttcaaggacacctgaagaactgagagccatcaaacaagtttatgaagaagaatatggctcaagcctggaagatgacgtggtgggggacacttcagggtactaccagcggatgttggtggttctccttcaggctaacagagaccctgatgctggaattgatgaagctcaagttgaacaagatgctcaggctttatttcaggctggagaacttaaatgggggacagatgaagaaaagtttatcaccatctttggaacacgaagtgtgtctcatttgagaaaggtgtttgacaagtacatgactatatcaggatttcaaattgaggaaaccattgaccgcgagacttctggcaatttagagcaactactccttgctgttgtgaaatctattcgaagtatacctgcctaccttgcagagaccctctattatgctatgaagggagctgggacagatgatcataccctcatcagagtcatggtttccaggagtgagattgatctgtttaacatcaggaaggagtttaggaagaattttgccacctctctttattccatgattaagggagatacatctggggactataagaaagctcttctgctgctctgtggagaagatgactaacgtgtcacggggaagagctccctgctgtgtgcctgcaccaccccactgccttccttcagcacctttagctgcatttgtatgccagtgcttaacacattgccttattcatactagcatgctcatgaccaacacatacacgtcatagaagaaaatagtggtgcttctttctgatctctagtggagatctctttgactgctgtagtactaaagtgtacttaatgttactaagtttaatgcctggccattttccatttatatatattttttaagaggctagagtgcttttagccttttttaaaaactccatttatattacatttgtaaccatgatactttaatcagaagcttagccttgaaattgtgaactcttggaaatgttattagtgaagttcgcaactaaactaaacctgtaaaattatgatgattgtattcaaaagattaatgaaaaataaacatttctgtccccctgaattatgtgtacatgtgtgtttagatttattattaaatttattt

SEQ ID NO: 60096 - DNA, 963 bp, Artificial Sequence
  derived and/or modified sequence
atggcgcaggtcctacggggaaccgttaccgactttcccggatttgacgagagagcagatgccgaaaccttgcggaaggccatgaaagggctcggaacggatgaagagtctatcctcactctacttacgtcgagatctaatgctcagaggcaggagatcagcgctgcattcaaaactctgtttgggagagacctcctggacgacctgaaatcagaacttaccgggaagtttgaaaaacttatcgtggcactaatgaaacccagcagactgtatgatgcttacgaactgaaacacgcgcttaaaggcgctggcactaacgagaaggttttgaccgagatcatcgcctcacggactcctgaagagctgcgtgcaataaaacaggtgtacgaggaggagtatgggagctcactggaagatgatgtggtgggggataccagcggttactaccagcggatgcttgtggtgctattacaggcaaatcgagaccctgacgctggcattgacgaggcgcaagtggaacaagatgcacaggccctgttccaggctggtgaacttaaatggggcaccgacgaggagaaatttatcactatctttggcacccggtctgtgagccacctgcgcaaggtcttcgacaagtacatgaccattagcggtttccagattgaggagaccatcgatagggaaacctccggcaatctagaacagctgctgctggccgtggtgaaaagtattcgtagcataccagcatacctagcagaaactctgtattacgctatgaaaggtgcgggaaccgacgatcacacacttatccgggttatggtttccaggtctgagattgacctgtttaatatccgtaaggaatttcggaagaatttcgcaacctccctgtattccatgatcaagggagacacctcaggcgattataaaaaggccctgctactgctctgcggtgaggatgattag

SEQ ID NO: 60097 - DNA, 963 bp, Artificial Sequence
  derived and/or modified sequence
atggcccaggtgctgagaggcaccgtgaccgacttccccggcttcgacgagagagccgacgccgagaccctgagaaaggccatgaagggcctgggcaccgacgaggagagcatcctgaccctgctgaccagcagaagcaacgcccagagacaggagatcagcgccgccttcaagaccctgttcggcagagacctgctggacgacctgaagagcgagctgaccggcaagttcgagaagctgatcgtggccctgatgaagcccagcagactgtacgacgcctacgagctgaagcacgccctgaagggcgccggcaccaacgagaaggtgctgaccgagatcatcgccagcagaacccccgaggagctgagagccatcaagcaggtgtacgaggaggagtacggcagcagcctggaggacgacgtggtgggcgacaccagcggctactaccagagaatgctggtggtgctgctgcaggccaacagagaccccgacgccggcatcgacgaggcccaggtggagcaggacgcccaggccctgttccaggccggcgagctgaagtggggcaccgacgaggagaagttcatcaccatcttcggcaccagaagcgtgagccacctgagaaaggtgttcgacaagtacatgaccatcagcggcttccagatcgaggagaccatcgacagagagaccagcggcaacctggagcagctgctgctggccgtggtgaagagcatcagaagcatccccgcctacctggccgagaccctgtactacgccatgaagggcgccggcaccgacgaccacaccctgatcagagtgatggtgagcagaagcgagatcgacctgttcaacatcagaaaggagttcagaaagaacttcgccaccagcctgtacagcatgatcaagggcgacaccagcggcgactacaagaaggccctgctgctgctgtgcggcgaggacgactag

SEQ ID NO: 60098 - protein, 312 aa, Artificial Sequence
  derived and/or modified sequence
MDPLRRSPSPCLSSQPSSPSTPPCEMLGPVGIEAVLDQLKIKAMKMGFEFNIMVVGQSGLGKSTMVNTLFKSKVWKSNPPGLGVPTPQTLQLHSLTHVIEEKGVKLKLTVTDTPGFGDQINNDNCLRPLDIEFLQRLCRTVNVVPVIARADSLTMEEREAFRRRIQQNLRTHCIDVYPQMCFDEDINDKILNSKLRDRIPFAVVGADQEHLVNGRCVLGRKTKWGIIEVENMAHCEFPLLRDLLIRSHLQDLKDITHNIHYENYRVIRLNESHLLPRGPGWVNLAPASPGQLTTPRTFKVCRGAHDDSDDEF

SEQ ID NO: 60099 - DNA, 939 bp, Artificial Sequence
  derived and/or modified sequence
atggatccgcttcggcggtcaccaagtccctgcctgagctcacagcccagttcccctagtacacctccttgcgagatgctggggccggttggtatcgaggccgtgttggatcagctgaagattaaagctatgaagatgggttttgaatttaatattatggtggtggggcaatctggtttagggaagagtacaatggtaaacacactttttaaatcaaaagtctggaagtcgaacccccctggcctgggagtgcccactccccaaacgcttcagctccattccctaacccacgttatcgaggagaagggagttaaactgaaactgacagtcaccgatacaccagggtttggcgaccagattaacaacgataactgtctgaggccactggatattgaatttcttcagagactgtgtagaacagttaatgtggtgccggtaatcgctcgggctgatagcctcacaatggaagagcgggaggctttccgccgcagaatacaacagaacctcaggacacactgtattgacgtttatccccagatgtgtttcgacgaggacataaatgataaaattttgaactccaagctgcgagaccgaattcctttcgccgtggttggggcagaccaagaacacttggtcaatgggaggtgcgtactcggaaggaaaactaagtggggaattatcgaagtggagaatatggctcactgcgaatttcctctactccgggatcttcttatcagatcgcacttgcaggaccttaaagacatcacgcataatatacactacgaaaactacagggtaatcaggcttaacgaaagccacctgctgcctagggggccaggctgggtgaatctcgcccctgctagccccgggcagttgactaccccccggacttttaaggtatgtcgcggcgctcatgatgacagcgatgacgagttttag

SEQ ID NO: 60100 - DNA, 939 bp, Artificial Sequence
  derived and/or modified sequence
atggaccccctgcggcgcagccccagcccctgcctgagcagccagcccagcagccccagcaccccaccctgtgagatgctgggccctgtgggcatcgaggccgtgctggaccagctgaagatcaaggccatgaagatgggctttgagttcaacatcatggtggtgggccagagcggcctgggcaagagcaccatggtgaacaccctcttcaagagcaaggtgtggaagagcaaccccccaggcctgggcgtgcccaccccccagaccctgcagctgcacagcctgacccacgtgattgaggagaagggcgtgaagctgaagctgactgtgacagacaccccaggctttggagaccagatcaacaatgacaactgcctgcggcccctggacatcgagttcctgcagaggctgtgcaggacagtgaatgtggtgcctgtgattgcccgggctgacagcctgaccatggaggagcgggaggccttcagaagacgcatccagcagaacctgcggacccactgcattgatgtgtacccccagatgtgctttgatgaggacatcaatgacaagatcctgaacagcaagctgcgggaccgcatcccctttgctgtggtgggcgctgaccaggagcacctggtgaatggccgctgtgtgctgggcaggaagaccaagtggggcatcatcgaggtggagaacatggcccactgtgagttccccctgctgcgggacctgctgatccgcagccacctgcaggacctgaaggacatcacccacaacatccactatgagaactacagagtcatccggctgaatgaaagccacctgctgccccggggccctggctgggtgaacctggccccagccagccctggccagctgaccacccccaggaccttcaaggtgtgccgcggggcccatgatgacagtgatgatgagttctag

SEQ ID NO: 60101 - DNA, 939 bp, Artificial Sequence
  derived and/or modified sequence
atggaccccctgcggcggagccccagcccctgcctgagcagccagccaagctctccttcgacacctccctgtgagatgctaggcccagtgggaattgaggccgtgctcgaccagcttaaaatcaaggcaatgaaaatgggtttcgagttcaatattatggtggtgggacagagcggcttaggcaagagtacaatggtaaatacgctatttaaatccaaagtttggaagtcaaatcctcctggactgggggtgccaacaccacagactctccaactgcattccctcacgcacgtaatcgaggaaaaaggagtgaaactcaaattgaccgtgaccgacactcctggattcggtgaccaaatcaataacgacaattgtttgagacctctcgacattgaattcctgcaacgcttatgccggactgtcaacgtcgttcccgtgattgcaagagcagactccctcactatggaagaaagagaggcctttaggcggcgcatacagcagaatctccggactcattgtattgacgtctatccacaaatgtgctttgacgaagacatcaatgacaagatcttaaattccaagttgagggataggattccgttcgccgtcgtcggcgccgatcaggagcaccttgtcaacggccggtgtgtgctgggacgcaagaccaagtggggaataatcgaggttgagaacatggctcattgtgagttccccctgcttcgggatctgctgatccgctcccatttgcaggatctgaaggacatcacccacaatattcactacgaaaattatagggtaataaggctgaatgagtcacaccttttaccgaggggcccaggatgggtcaacctagcaccggcctctcccggacagcttaccactccccgcacatttaaggtgtgcaggggtgctcacgacgattccgacgatgagttttag

SEQ ID NO: 60102 - DNA, 939 bp, Artificial Sequence
  derived and/or modified sequence
atggacccgttaaggcgcagccccagtccctgcctatcatcccaaccctccagtccttcgactccgccttgcgaaatgctcggaccggtggggatcgaagccgtgctcgatcaacttaagatcaaggcgatgaagatgggttttgaatttaatatcatggtggtgggccagtccggcctgggcaagtctacaatggttaacactctattcaagtcaaaggtctggaaatccaatcctccaggtctcggcgtcccgaccccccagactctgcagctgcactcattgacacatgtaatcgaggaaaaaggtgtcaagctgaaactgacagttacagatacaccaggtttcggagaccagattaataatgacaattgcctccgccctttggacatcgagttcctgcagcggctgtgcaggactgtaaacgttgtgcccgtgattgcgagagcagactctctcactatggaagagcgtgaggccttcaggagacgcattcaacagaacctgaggacccactgcatcgacgtgtatccgcagatgtgcttcgatgaagatattaacgacaaaatactgaacagcaagctcagagatcgaatcccatttgcggttgttggtgcggaccaggagcacttggtcaacgggcgttgcgttctggggagaaagaccaagtggggtattatcgaggtagaaaatatggcacattgcgaattcccactcctcagagatcttttgattaggagccatctccaagatttgaaagacattacacacaacatccactacgagaattatcgggtgattagacttaatgagtcccacctgctgccacggggaccagggtgggtgaatctggcccctgcctcgcccggacagttaacaacccccaggactttcaaagtctgcagaggcgcacacgacgattccgacgatgagttctag

SEQ ID NO: 60103 - DNA, 1386 bp, Artificial Sequence
  derived and/or modified sequence
cttgggcccctggttctacttggggattattgtattattaggctggggtcattgtggggattagaagggtaacagctcctgctcctgctgcagagaagcctccaggtgggggtcacagcaagtgcagatggagctcagattcttcggttaactgtcaccctctcccctcccccatcacacacaccaggccctgccaggacaaggcagctcctggaagctccaccaggacccacgtccaccaggcatctcgaacccttggcccccatggaccccctgaggcgctccccctctccctgcctgtcctcgcagccctccagccccagcaccccaccctgcgagatgcttggtcctgtgggcattgaggctgtgctggaccagctgaagatcaaggctatgaagatggggtttgagttcaacatcatggtggtggggcaaagcgggctgggcaagtccacgatggtgaacacgctgttcaagtccaaagtgtggaagtcaaacccaccgggcttgggggtgcccacaccccagacgctgcagctgcattcactgacccatgtcatagaggagaagggtgtgaagctgaagctgacggtgacggacacgcccggcttcggggaccagatcaacaatgacaactgcctgcggcccctggacattgagttcctgcagcggctgtgccggactgtgaatgtggtgcccgtgattgccagggccgacagcctgaccatggaggagcgagaggccttcaggcgcaggatccagcagaacctgaggacccactgcatcgacgtctacccccagatgtgctttgacgaggacatcaatgacaaaatcctcaacagcaagttacgggaccgaatcccttttgccgtggtaggggctgaccaagagcacctggtgaacgggaggtgtgtcctgggccggaagaccaagtggggcatcattgaagtggagaacatggcgcactgtgaatttcctctcctgagagacctgcttatccgctcccacctccaagacctgaaggacataacccacaacatccactatgagaactaccgcgtcatcagactcaatgaaagccacctgctgccccgcgggcccggctgggtgaacctggccccggcctccccaggacagctgaccaccccccggaccttcaaggtctgcaggggggcccatgacgattctgatgatgagttctgaccaccggcggatcccggggctgctgggcttcctgagtccccagcggctctcaacacacacctatgtaccagagcatctattaaatgtgagccttgctttttatgaaaagctgtgctttgaaaacaaaaggcattttgtaaatgacttctttgagctatccacaaataaaaaggctgggtgtca

SEQ ID NO: 60104 - DNA, 939 bp, Artificial Sequence
  derived and/or modified sequence
atggaccccctgagaagaagccccagcccctgcctgagcagccagcccagcagccccagcacccccccctgcgagatgctgggccccgtgggcatcgaggccgtgctggaccagctgaagatcaaggccatgaagatgggcttcgagttcaacatcatggtggtgggccagagcggcctgggcaagagcaccatggtgaacaccctgttcaagagcaaggtgtggaagagcaacccccccggcctgggcgtgcccaccccccagaccctgcagctgcacagcctgacccacgtgatcgaggagaagggcgtgaagctgaagctgaccgtgaccgacacccccggcttcggcgaccagatcaacaacgacaactgcctgagacccctggacatcgagttcctgcagagactgtgcagaaccgtgaacgtggtgcccgtgatcgccagagccgacagcctgaccatggaggagagagaggccttcagaagaagaatccagcagaacctgagaacccactgcatcgacgtgtacccccagatgtgcttcgacgaggacatcaacgacaagatcctgaacagcaagctgagagacagaatccccttcgccgtggtgggcgccgaccaggagcacctggtgaacggcagatgcgtgctgggcagaaagaccaagtggggcatcatcgaggtggagaacatggcccactgcgagttccccctgctgagagacctgctgatcagaagccacctgcaggacctgaaggacatcacccacaacatccactacgagaactacagagtgatcagactgaacgagagccacctgctgcccagaggccccggctgggtgaacctggcccccgccagccccggccagctgaccacccccagaaccttcaaggtgtgcagaggcgcccacgacgacagcgacgacgagttctag

SEQ ID NO: 60105 - protein, 466 aa, Artificial Sequence
  derived and/or modified sequence
MSYPGYPPTGYPPFPGYPPAGQESSFPPSGQYPYPSGFPPMGGGAYPQVPSSGYPGAGGYPAPGGYPAPGGYPGAPQPGGAPSYPGVPPGQGFGVPPGGAGFSGYPQPPSQSYGGGPAQVPLPGGFPGGQMPSQYPGGQPTYPSQPATVTQVTQGTIRPAANFDAIRDAEILRKAMKGFGTDEQAIVDVVANRSNDQRQKIKAAFKTSYGKDLIKDLKSELSGNMEELILALFMPPTYYDAWSLRKAMQGAGTQERVLIEILCTRTNQEIREIVRCYQSEFGRDLEKDIRSDTSGHFERLLVSMCQGNRDENQSINHQMAQEDAQRLYQAGEGRLGTDESCFNMILATRSFPQLRATMEAYSRMANRDLLSSVSREFSGYVESGLKTILQCALNRPAFFAERLYYAMKGAGTDDSTLVRIVVTRSEIDLVQIKQMFAQMYQKTLGTMIAGDTSGDYRRLLLAIVGQ

SEQ ID NO: 60106 - protein, 144 aa, Artificial Sequence
  derived and/or modified sequence
MSYPGYPPTGYPPFPGYPPAGQESSFPPSGQYPYPSGFPPMGGGAYPQVPSSGYPGAGGYPAPGGYPAPGGYPGAPQPGGAPSYPGVPPGQGFGVPPGGAGFSGYPQPPSQSYGGGPAQVPLPGGFPGGQMPSQYPGGQPTYPS

SEQ ID NO: 60107 - protein, 336 aa, Artificial Sequence
  derived and/or modified sequence
MPSQYPGGQPTYPSQPATVTQVTQGTIRPAANFDAIRDAEILRKAMKGFGTDEQAIVDVVANRSNDQRQKIKAAFKTSYGKDLIKDLKSELSGNMEELILALFMPPTYYDAWSLRKAMQGAGTQERVLIEILCTRTNQEIREIVRCYQSEFGRDLEKDIRSDTSGHFERLLVSMCQGNRDENQSINHQMAQEDAQRLYQAGEGRLGTDESCFNMILATRSFPQLRATMEAYSRMANRDLLSSVSREFSGYVESGLKTILQCALNRPAFFAERLYYAMKGAGTDDSTLVRIVVTRSEIDLVQIKQMFAQMYQKTLGTMIAGDTSGDYRRLLLAIVGQ

SEQ ID NO: 60108 - protein, 1338 aa, Artificial Sequence
  derived and/or modified sequence
MDRASELLFYVNGRKVIEKNVDPETMLLPYLRKKLRLTGTKYGCGGGGCGACTVMISRYNPITKRIRHHPANACLIPICSLYGAAVTTVEGIGSTHTRIHPVQERIAKCHGTQCGFCTPGMVMSIYTLLRNHPEPTLDQLTDALGGNLCRCTGYRPIIDACKTFCKTSGCCQSKENGVCCLDQGINGLPEFEEGSKTSPKLFAEEEFLPLDPTQELIFPPELMIMAEKQSQRTRVFGSERMMWFSPVTLKELLEFKFKYPQAPVIMGNTSVGPEVKFKGVFHPVIISPDRIEELSVVNHAYNGLTLGAGLSLAQVKDILADVVQKLPEEKTQMYHALLKHLGTLAGSQIRNMASLGGHIISRHPDSDLNPILAVGNCTLNLLSKEGKRQIPLNEQFLSKCPNADLKPQEILVSVNIPYSRKWEFVSAFRQAQRQENALAIVNSGMRVFFGEGDGIIRELCISYGGVGPATICAKNSCQKLIGRHWNEQMLDIACRLILNEVSLLGSAPGGKVEFKRTLIISFLFKFYLEVSQILKKMDPVHYPSLADKYESALEDLHSKHHCSTLKYQNIGPKQHPEDPIGHPIMHLSGVKHATGEAIYCDDMPLVDQELFLTFVTSSRAHAKIVSIDLSEALSMPGVVDIMTAEHLSDVNSFCFFTEAEKFLATDKVFCVGQLVCAVLADSEVQAKRAAKRVKIVYQDLEPLILTIEESIQHNSSFKPERKLEYGNVDEAFKVVDQILEGEIHMGGQEHFYMETQSMLVVPKGEDQEMDVYVSTQFPKYIQDIVASTLKLPANKVMCHVRRVGGAFGGKVLKTGIIAAVTAFAANKHGRAVRCVLERGEDMLITGGRHPYLGKYKAGFMNDGRILALDMEHYSNAGASLDESLFVIEMGLLKMDNAYKFPNLRCRGWACRTNLPSNTAFRGFGFPQAALITESCITEVAAKCGLSPEKVRIINMYKEIDQTPYKQEINAKNLIQCWRECMAMSSYSLRKVAVEKFNAENYWKKKGLAMVPLKFPVGLGSRAAGQAAALVHIYLDGSVLVTHGGIEMGQGVHTKMIQVVSRELRMPMSNVHLRGTSTETVPNANISGGSVVADLNGLAVKDACQTLLKRLEPIISKNPKGTWKDWAQTAFDESINLSAVGYFRGYESDMNWEKGEGQPFEYFVYGAACSEVEIDCLTGDHKNIRTDIVMDVGCSINPAIDIGQIEGAFIQGMGLYTIEELNYSPQGILHTRGPDQYKIPAICDMPTELHIALLPPSQNSNTLYSSKGLGESGVFLGCSVFFAIHDAVSAARQERGLHGPLTLNSPLTPEKIRMACEDKFTKMIPRDEPGSYVPWNVPI

SEQ ID NO: 60109 - DNA, 4017 bp, Artificial Sequence
  derived and/or modified sequence
atggacagggctagcgagctcctgttttatgtcaacggcaggaaggtgatagagaagaatgtggacccagaaaccatgctcctgccatacttacgtaagaaactccgcctgacagggacaaagtacgggtgcggcggaggcggatgcggcgcatgcaccgtcatgatctcgcggtataatccaatcactaagcggattcgtcaccatcccgctaacgcctgccttatccccatatgctccctctatggggccgccgtgactaccgtcgaggggattggatctacccacactcggatccatcctgtgcaggaaaggatcgcaaagtgccacggtactcagtgtgggttctgcactccaggaatggtgatgtctatctatacactgttgcgtaatcatcccgagccaacattggatcaacttactgacgcccttgggggcaatttgtgccggtgtaccggctaccggcccataattgacgcatgcaaaactttttgcaagactagcggctgctgccagtccaaggaaaatggcgtttgctgcctggaccagggcatcaacggtcttccggagtttgaggaagggagtaagacatcccctaaattattcgccgaagaagagttcctgcctttggaccccactcaggaactgatcttccctccggagcttatgattatggccgaaaagcagagtcagcgtacccgcgtttttggttctgagaggatgatgtggttctcacctgtcaccctgaaagaactgctcgagtttaagtttaaatatccccaggccccagtcatcatgggcaatacaagtgtgggcccagaagtcaaattcaaaggtgtgttccacccggtgatcatatcccccgatcgcatagaagagctcagcgttgtaaatcatgcatacaatgggctgaccttaggcgctggattatcattagcgcaggttaaggacatcctggctgatgtagttcagaaactgcctgaggagaagacccagatgtaccacgcgttgctgaagcacttggggactctagccggctcccagattagaaatatggcatccctgggtggtcatatcattagtaggcatcctgacagcgaccttaatcccattctcgcagtgggcaattgcacactcaacctgctgtccaaggaagggaagagacagatcccactgaacgaacagtttttgagtaaatgtccaaatgctgatctaaagcctcaagagatcctcgtttcagtgaacattccttactctcggaagtgggagttcgtgtcagcctttagacaggcgcagcgccaagaaaatgcactggccattgtcaacagcggtatgagggtcttcttcggagaaggggacggcatcatcagggagttgtgcattagttatggaggagtcggccccgcaacaatctgtgcgaagaactcttgtcagaagcttatcggccgccactggaacgagcagatgctcgacatcgcctgtcggctgatactcaatgaggtgtctctcctcggatccgctccggggggcaaggttgaattcaaacgtaccttgatcatttcatttctcttcaagttttatctggaagtttcacaaatcttgaagaagatggaccctgtgcattacccttcccttgccgataagtacgagtccgcactagaggaccttcacagtaagcatcactgttccactcttaagtaccaaaacattggccccaagcagcaccctgaagacccgattggacatcccatcatgcatctctcaggcgtgaaacacgcgaccggcgaagccatctattgtgatgatatgcccctcgtggaccaggaattgtttctgactttcgtcacgagttcccgggctcacgctaagatcgtgtccatcgatctgagcgaagccttgagtatgccaggcgtggtcgatataatgaccgccgagcatctgtcggacgtgaactctttttgcttttttacagaggctgagaaattccttgcaacggataaggtattctgtgtcggacagctagtttgcgccgtcctggccgatagcgaggttcaggctaaaagggcagcaaaacgtgttaagatcgtgtaccaagacctcgagcccctcattctaacgattgaagaatccattcaacacaactcgtctttcaagccggagcgaaagctggagtacggcaatgtcgacgaagcgttcaaggttgttgaccagattctggaaggagagatccacatgggtggccaagagcatttttatatggagacacaaagcatgctcgttgtaccgaagggagaagaccaggagatggatgtttatgtttctacacagtttccaaagtacatccaggacattgtcgcttcaaccttgaagcttcccgctaataaagtcatgtgtcacgtgcgccgcgtgggcggagcatttggggggaaagttctgaaaactggaatcatcgcggccgtcacagcgttcgcagccaataagcatggccgggcggttcgctgtgtgctggaacgaggcgaagacatgcttatcaccggcggtcgacacccctacctcgggaaatacaaggcaggatttatgaacgacggtcgtattctcgcgctggacatggagcactatagcaatgcaggggcgagcctggacgagagtttgttcgtgatcgaaatgggcctgcttaaaatggataacgcttataaattccccaacttgaggtgtcgcgggtgggcttgtcgcaccaatctgccatctaatacagcatttcggggtttcggatttccccaggccgccctgatcacggaaagttgtatcacagaggtggcggccaaatgcggactttccccagagaaggtccgcattataaatatgtataaggaaattgaccagacaccgtataaacaagagatcaatgcaaaaaatctcatccaatgctggagggagtgcatggccatgagctcttattccctccggaaggttgctgtggaaaagttcaacgccgagaattactggaagaagaagggactggcaatggtgcccctcaagtttcctgtgggccttggctctcgtgccgcagggcaagccgccgccctagtgcacatctatttagacggcagcgtgctcgtgacgcatggtggcatcgaaatgggtcaaggcgttcacactaagatgattcaagtcgtgtcacgggagctccgaatgcctatgagtaacgtccatttgcgcggtacctctactgagacggtccccaacgcaaatatatcaggaggtagtgtggtggctgatctcaatgggctggccgtgaaggatgcatgtcaaaccctgctgaagcggttggaaccgatcatcagcaaaaatccgaaagggacatggaaagactgggctcaaacagcttttgatgaatcaatcaacttatcagccgtagggtacttccggggctatgaatccgatatgaactgggaaaagggtgaaggccaaccatttgaatactttgtatacggtgctgcttgtagcgaggtggagattgactgcttgactggcgatcataagaacattaggaccgacattgtcatggacgtaggatgcagcatcaaccctgctatcgacatcggtcagattgagggagcctttatccagggcatgggtctatacaccatagaagagctgaactatagtccacaaggtatcctgcatacacgcggaccggaccagtacaagatccccgctatctgcgatatgcccacggaactgcatatagctttgctgccgcccagtcagaactctaacacactttattcatccaaagggctgggggaatccggagtgtttctgggatgctctgtgttcttcgcaatccatgatgctgtgagcgccgccaggcaggaaagagggctgcatgggccgctcactctgaactctcctttgacccccgaaaaaattcgcatggcgtgtgaagacaaatttactaaaatgataccccgcgatgaacctggtagctacgtaccatggaatgtgccaatctag

SEQ ID NO: 60110 - DNA, 456 bp, Artificial Sequence
  derived and/or modified sequence
atgctcctcccgtatctgcgtaaaaagctgagacttactgggactaaatatggttgcggggggggcggctgcggcgcttgcacagtgatgatcagccgatataatcccatcactaaaagaattcgccaccatcctgcgaatgcctgcctgatcccgatttgctccctttacggcgctgccgtcacgaccgtcgaggggatcggtagtacgcatacccggatccaccccgtacaggaaaggatagctaagtgtcacggtacgcagtgtggattctgtaccccgggaatggtcatgtccatttatactcttctccgcaaccaccccgagcccacgctggatcagttgactgacgctcttgggggcaacctctgtaggtgcaccgggtaccggccgatcattgacgcctgtaaaactttctgtaagactagcggctgttgtcaaagtaaggaaaattag

SEQ ID NO: 60111 - DNA, 4017 bp, Artificial Sequence
  derived and/or modified sequence
atggaccgggccagcgagctgctcttctacgtgaatggaaggaaggtgattgagaagaatgtggaccctgagaccatgctgctgccctacctgaggaagaagctgcggctgaccggcaccaagtatggctgcggcggcggcggctgtggggcctgcaccgtgatgatcagccgctacaaccccatcaccaagaggatccgccaccacccagccaatgcctgcctgatccccatctgcagcctgtatggagctgctgtgaccaccgtggagggcatcggcagcacccacacccgcatccaccctgtgcaggagcgcatcgccaagtgccacggcacccagtgtggcttctgcaccccaggcatggtgatgagcatctacaccctgctgaggaaccaccctgagcccaccctggaccagctgacagatgccctgggcggcaacctgtgccgctgcaccggctaccggcccatcattgatgcctgcaagaccttctgcaagaccagcggctgctgccagagcaaagaaaatggagtgtgctgcctggaccagggcatcaatggcctgcctgagtttgaggagggcagcaagaccagccccaagctgtttgctgaggaggagttcctgcccctggaccccacccaggagctgatcttccccccagagctgatgatcatggccgagaagcagagccagaggaccagggtgtttggcagcgagaggatgatgtggttcagccctgtgaccctgaaggagctgctggagttcaagttcaagtacccccaggcccctgtgatcatgggcaacacctctgtgggccctgaggtgaagttcaagggcgtcttccaccctgtgatcatcagcccagacagaattgaggagctgtctgtggtgaaccacgcctacaacggcctgaccctgggcgccggcctgagcctggcccaggtgaaggacatcctggctgatgtggtgcagaagctgcctgaggagaagacccagatgtaccacgccctgctgaagcacctgggcaccctggccggcagccagatccggaacatggccagcctgggcggccacatcatcagccgccacccagacagcgacctgaaccccatcctggccgtgggcaactgcaccctgaacctgctgagcaaggagggcaagaggcagatccccctgaatgagcagttcctgagcaaatgtccaaatgctgacctgaagccccaggagatcctggtgtctgtgaacatcccctacagcaggaagtgggagtttgtgtctgccttccggcaggcccagaggcaggagaatgccctggccatcgtgaacagcggcatgagggtcttctttggagaaggagatggcatcatccgggagctgtgcatctcctatggaggagtgggccctgccaccatctgtgccaagaacagctgccagaagctgattggccgccactggaatgagcagatgctggacatcgcctgccgcctcatcctgaatgaggtgtccctgctgggcagcgcccctgggggcaaggtggagttcaagaggaccctcatcatctccttcctgttcaagttctacctggaggtgtcccagatcctgaagaagatggaccctgtgcactaccccagcctggccgacaagtatgaaagtgccctggaggacctgcacagcaagcaccactgcagcaccctgaagtaccagaacatcggccccaagcagcaccctgaggaccccatcggccaccccatcatgcacctgagcggcgtgaagcacgccaccggggaggccatctactgtgatgacatgcccctggtggaccaggagctgttcctgacctttgtgaccagcagccgggcccacgccaagatcgtgtccattgacctgtctgaggccctgtccatgcctggggtggtggacatcatgacagctgagcacctgagtgatgtgaacagcttctgcttcttcacagaagctgagaagttcctggccacagacaaggtgttctgtgtgggccagctggtgtgtgctgtgctggccgacagcgaggtgcaggccaagagagctgccaagagggtgaagatcgtgtaccaggacctggagcccctcatcctgaccatcgaggagagcatccagcacaacagcagcttcaagccagagaggaagctggagtatggaaatgtggatgaggccttcaaggtggtggaccagatcctggagggggagatccacatgggcggccaggagcacttctacatggagacccagagcatgctggtggtgcccaagggggaggaccaggagatggatgtgtatgtgtccacccagttccccaagtacatccaggacatcgtggccagcaccctgaagctgcctgccaacaaggtgatgtgccacgtgagaagagtgggcggggcctttggaggcaaggtgctgaagacaggcatcatcgctgctgtgacagcctttgctgccaacaagcacggccgggctgtgcgctgtgtgctggagcggggggaggacatgctgatcactggaggccgccacccctacctgggcaagtacaaggccggcttcatgaatgatggccgcatcctggccctggacatggagcactacagcaatgctggggccagcctggatgagagcctgtttgtgattgagatgggcctgctgaagatggacaatgcctacaagttccccaacctgcgctgccggggctgggcctgcaggaccaacctgcccagcaacacagccttccggggcttcggcttcccccaggccgccctgatcacagagagctgcatcacagaggtggccgccaagtgtggcctgagccctgagaaggtgcgcatcatcaacatgtacaaggagattgaccagaccccctacaagcaggagatcaatgccaagaacctgatccagtgctggagggagtgcatggccatgagcagctacagcctgaggaaggtggccgtggagaagttcaatgctgagaactactggaagaagaagggcctggccatggtgcccctgaagtttcctgtgggcctgggcagcagagctgctggccaggccgccgccctggtgcacatctacctggatggctctgtgctggtgacccacggcggcatcgagatgggccagggcgtgcacaccaagatgatccaggtggtgtcccgggagctgaggatgcccatgagcaatgtgcacctgcggggcaccagcacagaaacagtgcccaatgccaacatcagcggcggctctgtggtggccgacctgaatggcctggccgtgaaggatgcctgccagaccctgctgaagaggctggagcccatcatcagcaagaaccccaagggcacctggaaggactgggcccagacagcctttgatgagagcatcaacctgtctgctgtgggctacttccggggctatgaaagtgacatgaactgggagaagggggagggccagccctttgagtactttgtgtatggagctgcctgcagcgaggtggagattgactgcctgactggagaccacaagaacatcagaacagacatcgtgatggatgtgggctgcagcatcaacccagccattgatattggccagatcgagggcgccttcatccagggcatgggcctgtacaccatcgaggagctgaactacagcccccagggcatcctgcacacccggggccctgaccagtacaagatcccagccatctgtgacatgcccacagagctgcacatcgccctgctgccccccagccagaacagcaacaccctgtacagcagcaagggcctgggggagagcggggtcttcctgggctgcagcgtcttctttgccatccatgatgctgtgtctgctgcccggcaggagcggggcctgcacggccccctgaccctgaacagccccctgaccccagagaagatccgcatggcctgtgaggacaagttcaccaagatgatccccagagatgagcccggcagctatgtgccctggaatgtgcccatctag

SEQ ID NO: 60112 - DNA, 456 bp, Artificial Sequence
  derived and/or modified sequence
atgctgctgccctacctgaggaagaagctgcggctgaccggcaccaagtatggctgcggcggcggcggctgtggggcctgcaccgtgatgatcagccgctacaaccccatcaccaagaggatccgccaccacccagccaatgcctgcctgatccccatctgcagcctgtatggagctgctgtgaccaccgtggagggcatcggcagcacccacacccgcatccaccctgtgcaggagagaattgccaagtgccacggcacccagtgtggcttctgcaccccaggcatggtgatgagcatctacaccctgctgaggaaccaccctgagcccaccctggaccagctgacagatgccctgggcggcaacctgtgccgctgcaccggctaccggcccatcattgatgcctgcaagaccttctgcaagaccagcggctgctgccagagcaaggagaactag

SEQ ID NO: 60113 - DNA, 5070 bp, Artificial Sequence
  derived and/or modified sequence
acatagagggcgccagtgacgcccacacacgtgctggtgtcccgggaagagttcctggcaaagagctcaggaacgttggatcttaatcaaggctttctccgtcggggtggatgggttggactttaggctccagcaagccccgccccactcggcgggtcggtgccgccgggtcccaggtgcccgctacttcccagaacctccgcctcccgctccgggccctcgaaccagcgcggacaccacaatggaccgggcgtccgagctgctcttctacgtgaacggccgcaaggtgatagaaaaaaatgtcgatcctgaaacaatgctgttgccttatttgaggaagaagcttcgactcacaggaactaagtatggctgtggaggaggaggctgtggtgcttgtacagtgatgatatcacgatacaaccccatcaccaagaggataaggcatcacccagccaatgcctgtctgattcccatctgttctctgtatggtgctgccgtcaccacagtagaaggcataggaagcacccacaccagaattcatcctgttcaggagaggattgccaagtgtcatggcacccagtgtggcttctgcacacctgggatggtgatgtccatctacacgctgctcaggaaccacccagagcccactctggatcagttaactgatgcccttggtggtaacctgtgccgttgcactggatacaggcccataattgatgcatgcaagactttctgtaaaacttcgggctgctgtcaaagtaaagaaaatggggtttgctgtttggatcaaggaatcaatggattgccagaatttgaggaaggaagtaagacaagtccaaaactcttcgcagaagaggagtttctgccattggatccaacccaggaactgatatttcctcctgagctaatgataatggctgagaaacagtcgcaaaggaccagggtgtttggcagtgagagaatgatgtggttttcccccgtgaccctgaaggaactgctggaatttaaattcaagtatccccaggctcctgttatcatgggaaacacctctgtggggcctgaagtgaaatttaaaggcgtctttcacccagttataatttctcctgatagaattgaagaactgagtgttgtaaaccatgcatataatggactcacccttggtgctggtctcagcctagcccaggtgaaggacattttggctgatgtagtccagaagcttccagaggagaagacacagatgtaccatgctctcctgaagcatttgggaactctggctgggtcccagatcaggaacatggcttctttagggggacacatcattagcaggcatccagattcagatctgaatcccatcctggctgtgggtaactgtaccctcaacttgctatcaaaagaaggaaaacgacagattcctttaaatgagcaattcctcagcaagtgccctaatgcagatcttaagcctcaagaaatcttggtctcagtgaacatcccctactcaaggaagtgggaatttgtgtcagccttccgacaagcccagcgacaggagaatgcgctagcgatagtcaattcaggaatgagagtcttttttggagaaggggatggcattattagagagttatgcatctcatatggaggcgttggtccagccaccatctgtgccaagaattcctgccagaaactcattggaaggcactggaacgaacagatgctggatatagcctgcaggcttattctgaatgaagtctcccttttgggctcggcgccaggtgggaaagtggagttcaagaggactctcatcatcagcttcctcttcaagttctacctggaagtgtcacagattttgaaaaagatggatccagttcactatcctagccttgcagacaagtatgaaagtgctttagaagatcttcattccaaacatcactgcagtacattaaagtaccagaatataggcccaaagcagcatcctgaagacccaattggccaccccatcatgcatctgtctggtgtgaagcatgccacgggggaggccatctactgtgatgacatgcctctggtggaccaggaacttttcttgacttttgtgactagttcaagagctcatgctaagattgtgtctattgatctgtcagaagctctcagcatgcccggtgtggtggacatcatgacagcagaacatcttagtgacgtcaactccttctgcttttttactgaagctgagaaatttctggcgacagataaggtgttctgtgtgggtcagcttgtctgtgctgtgcttgccgattctgaggttcaggcaaagcgagctgctaagcgagtgaagattgtctatcaagacttggagccgctgatactaacaattgaggaaagtatacaacacaactcctccttcaagccagaaaggaaactggaatatggaaatgttgacgaagcatttaaagtggttgatcaaattcttgaaggtgaaatacatatgggaggtcaagaacatttttatatggaaacccaaagcatgcttgtcgttcccaagggagaggatcaagaaatggatgtctacgtgtccacacagtttcccaaatatatacaggacattgttgcctcaaccttgaagctcccagctaacaaggtcatgtgccatgtaaggcgtgttggtggagcgtttggagggaaggtgttaaaaaccggaatcattgcagccgtcactgcatttgccgcaaacaaacatggccgtgcagttcgctgtgttctggaacgaggagaagacatgttaataactggaggccgccatccttaccttggaaagtacaaagctggattcatgaacgatggcagaatcttggccctggacatggagcattacagcaatgcaggcgcctccttggatgaatcattattcgtgatagaaatgggacttctgaaaatggacaatgcttacaagtttcccaatctccgctgccggggttgggcatgcagaaccaaccttccatccaacacagcttttcgtgggtttggctttcctcaggcagcgctgatcaccgaatcttgtatcacggaagttgcagccaaatgtggactatcccctgagaaggtgcgaatcataaacatgtacaaggaaattgatcaaacaccctacaaacaagagatcaatgccaagaacctaatccagtgttggagagaatgtatggccatgtcttcctactccttgaggaaagttgctgtggaaaagttcaatgcagagaattattggaagaagaaaggactggccatggtccccctgaagtttcctgttggccttggctcacgtgctgctggtcaggctgctgccttggttcacatttatcttgatggctctgtgctggtcactcacggtggaattgaaatggggcagggggtccacactaaaatgattcaggtggtcagccgtgaattaagaatgccaatgtcgaatgtccacctgcgtggaacaagcacagaaactgtccctaatgcaaatatctctggaggttctgtggtggcagatctcaacggtttggcagtaaaggatgcctgtcaaactcttctaaaacgcctcgaacccatcatcagcaagaatcctaaaggaacttggaaagactgggcacagactgcttttgatgaaagcattaacctttcagctgttggatacttcagaggttatgagtcagacatgaactgggagaaaggcgaaggccagcccttcgaatactttgtttatggagctgcctgttccgaggttgaaatagactgcctgacgggggatcataagaacatcagaacagacattgtcatggatgttggctgcagtataaatccagccattgacataggccagattgaaggtgcatttattcaaggcatgggactttatacaatagaggaactgaattattctccccagggcattctgcacactcgtggtccagaccaatataaaatccctgccatctgtgacatgcccacggagttgcacattgctttgttgcctccttctcaaaactcaaatactctttattcatctaagggtctgggagagtcgggggtgttcctggggtgttccgtgtttttcgctatccatgacgcagtgagtgcagcacgacaggagagaggcctgcatggacccttgacccttaatagtccactgaccccggagaagattaggatggcctgtgaagacaagttcacaaaaatgattccgagagatgaacctggatcctacgttccttggaatgtacccatctgaatcaaatgcaaacttctggagaaaacagagtgcctcttcccagatggcaatctgtcctatctctgtgctggaagatgctagatctgaaagacagagtttccacagttcagaaatcatcccacagtgttgcttttctatggagctgatttaaagtattccatttagatttgatagatatgcttaagcaatctataaatcattttcaatgttataaacactaattggtttcctctagggtgatatccgtcattactctgtctcttcaatccatccagctaaatggaataggtgatgacttgcatgtgactcctacttggcttctatccaccaacagaaattataccatatagtgaaaggcaattttctaaataatttcattactaatatgaactgtgaagttgtcattttttcatttgtccttttctgctatcaccttcctcttgtcagaatgaatatagacactgtatctaagtgggaccaaagaaaaaatagcgaactttcaccaaagttttcatgaaaacccaaaagctttaaaagttactatcaagaaattgaaaggaaacccacagaataggataaaatatttgtaaatcatatatttgataaaagtcttgtaaccagatacataaagagctcttacaactcaataaaaggcaagtaatttaaaaataggcaaaagaattgctggatggtatggtagttctatttttagtttttaccctaactactctgacttgatcatttaacattctgtgtatgtaacaaaatatcacatgcataaatattatgtatcaataaaattttttaatggg

SEQ ID NO: 60114 - DNA, 581 bp, Artificial Sequence
  derived and/or modified sequence
tttgagcagtgactgggatgcagtgaggagcaagccatgcaaacatctggggagacagcatccaggcagtgggaatggcaggtgcaaaggtcctgaggtgatagaaaaaaatgtcgatcctgaaacaatgctgttgccttatttgaggaagaagcttcgactcacaggaactaagtatggctgtggaggaggaggctgtggtgcttgtacagtgatgatatcacgatacaaccccatcaccaagaggataaggcatcacccagccaatgcctgtctgattcccatctgttctctgtatggtgctgccgtcaccacagtagaaggcataggaagcacccacaccagaattcatcctgttcaggagaggattgccaagtgtcatggcacccagtgtggcttctgcacacctgggatggtgatgtccatctacacgctgctcaggaaccacccagagcccactctggatcagttaactgatgcccttggtggtaacctgtgccgttgcactggatacaggcccataattgatgcatgcaagactttctgtaaaacttcgggctgctgtcaaagtaaagaaaatg

SEQ ID NO: 60115 - DNA, 4017 bp, Artificial Sequence
  derived and/or modified sequence
atggaccgggccagcgagctgctgttctacgtgaacggccggaaggtcatcgagaagaatgtggaccccgagaccatgttactgccttaccttcgtaagaaactgagactgactggaacgaagtacgggtgcggcggtggcggatgcggtgcatgcactgtaatgatctcccggtataatcctatcaccaaaagaattcgacaccatccagctaacgcctgcctgatccctatctgtagcctgtacggcgctgccgtgacgacagtggaaggtatcggctccacccacacgaggatccacccggtccaggaacggatcgccaaatgccatggaacccagtgcgggttctgtacgcctgggatggtcatgtccatttacacattgctgcggaatcacccagaacccactcttgatcagctcaccgatgctctgggcggcaacctctgccgatgcaccggatatagacctatcatagatgcctgcaagactttctgcaagacgtcaggctgttgccagtccaaagagaatggagtctgctgtctcgaccaggggatcaatggcctccctgagttcgaagagggtagcaaaacatctccaaaactctttgccgaagaggagttcctgcctctcgatcccacccaggagctcattttccccccggagcttatgattatggctgaaaagcagtcacagagaaccagagtattcggctcagagcgaatgatgtggttcagccctgtaactctgaaagagctgctggaatttaaatttaaatatccccaggcccctgtgataatgggtaacacctcggttgggcccgaggtgaagttcaaaggggtctttcaccctgttatcatctctcccgatagaatcgaggaactatccgtcgtcaaccacgcctataatgggctcactttaggtgcagggctttctctggcacaggttaaagatatcctagccgacgtggtgcagaagctgccagaagaaaaaacacagatgtatcatgcgcttctgaagcatcttggaacgctcgcaggttcacagattagaaatatggcatctctcggcggacatattatcagtagacacccagatagcgacctcaaccctatcctggccgttggtaattgtaccctgaatttactgtccaaggaagggaagagacagattcccttaaacgagcagtttctgtcaaagtgtccaaacgccgacctaaagcctcaggagatcctggtctctgtgaacatcccttacagccgcaagtgggagtttgtcagcgcattccgccaggcgcagcgccaagagaatgccctcgccatcgtcaattccggtatgagagtgttctttggcgagggtgatggcataatccgcgagttgtgtataagctatggaggagtcggccccgccacaatatgcgccaaaaattcttgccaaaagctgatcggaaggcattggaacgagcagatgctggatatcgcctgccgtctcattttgaacgaggtgtccctgctgggatccgcccccggaggaaaagtggagtttaagcgaacgctaattattagttttttatttaagttctatctggaagttagtcagatactgaagaaaatggaccccgtgcattacccttcactggccgacaaatacgaatctgcactggaggacttacattccaagcaccactgctcaactctgaagtaccaaaacatagggccgaaacagcatccggaggaccctattggacacccgattatgcacctaagcggcgtcaagcacgcaactggcgaggccatctattgcgacgacatgccattggtggaccaggagttgtttctgacctttgtaacttctagtcgcgcccatgcaaagatcgtcagcattgacctttccgaggccctgagtatgccaggtgtggtcgatatcatgactgccgaacacctgagcgacgttaactctttctgtttcttcacagaggccgagaagtttttagctacagataaggtgttttgcgtgggacaactggtctgcgcagtgctcgctgactcagaggtacaggccaagagagccgcaaaacgggtaaagattgtgtatcaagatctggaaccccttattttaaccattgaagagtccattcagcataattcatcatttaaacctgaacgcaagctggaatatggaaatgtggacgaggcatttaaggtggtcgaccagatccttgagggggagattcacatgggcggtcaggagcacttttacatggaaacccagtcaatgctggtggtccctaaaggagaggaccaggaaatggatgtctacgtgagcacccaatttccaaaatatattcaggatattgtggcgtccacactaaaacttcctgccaataaggtcatgtgtcatgttagacgggttggcggggcattcgggggaaaagttctcaaaacaggcattattgctgccgtcactgctttcgccgccaataagcacggccgggccgtcaggtgcgttctagaaagaggagaagacatgctcattacaggcggaagacacccctatttgggcaaatacaaggccgggttcatgaacgacggccgcattctggctctcgacatggagcactactctaacgccggggcctccctggacgaatccctgtttgtgattgaaatgggtctgctcaaaatggacaacgcctacaagttcccaaacctgaggtgtcgaggttgggcatgtaggacaaacctgccatcaaatactgcctttcgtggattcggcttcccccaggccgccctgatcaccgaaagttgcattactgaggtcgccgctaaatgcggactgtctccagagaaggtgagaatcatcaatatgtataaggaaatcgatcagacaccttataagcaagaaattaacgctaagaatctgattcagtgttggcgagagtgcatggcaatgtcatcatattccttacggaaagtcgccgttgaaaagtttaacgcagagaactactggaaaaaaaaaggcttggcaatggtaccactcaagttcccggttggcctggggtcaagagcagcggggcaggcagcagctcttgttcacatatatctagatggaagtgtgttggtcactcacggcggaatcgagatgggacagggcgtgcataccaaaatgatccaggtagtaagcagagagctccgaatgccgatgtccaacgtgcaccttcgcggaacctccacggaaactgtgccaaatgcaaatataagcggtggaagtgtggtggccgacctcaatggcctggccgtaaaagacgcttgtcaaacactgctaaagcggttagagccaatcattagcaaaaatcctaaaggaacctggaaggactgggcccagaccgccttcgacgagagcattaacttgagcgcagttggctacttcagaggctatgagagtgatatgaactgggagaaaggggaaggacagcccttcgaatatttcgtctatggggcagcctgttcagaggtagagatcgactgcctgacgggcgaccataaaaatatacgcaccgatatcgttatggacgtggggtgttctattaacccagcgatcgacattggccaaatcgagggagctttcattcagggcatgggcttgtatacgatcgaagagctgaattacagccctcagggtattctccacacgagagggcctgaccagtataagatacccgccatatgcgatatgcctaccgaacttcacatcgccttgctccccccaagccagaattccaatactctctactcatcaaagggcctgggtgaatcaggcgtgttcctgggatgctctgtgttctttgcaatccacgatgccgtctccgcagcgaggcaggaacgcgggttacacggccctctcactctcaattctcccctcacgcctgagaagatacggatggcttgcgaggataagtttacgaagatgatccccagagacgagccaggaagctatgtcccttggaatgtgcccatttag

SEQ ID NO: 60116 - DNA, 456 bp, Artificial Sequence
  derived and/or modified sequence
atgctgctgccctacctgcggaagaagctgcggctgaccggcaccaagtacggatgtggcgggggcggttgcggggcttgtacagtcatgatctctcggtacaacccgattacaaaacgtatacggcatcacccagccaacgcttgcctgatccccatctgtagcttgtatggtgcagccgtgacgacagtggaaggcatcggttccacacacacaagaatccaccccgttcaagagcggatcgcaaagtgtcacggaacccaatgtgggttctgcaccccgggaatggtgatgagcatctacactctattacggaaccaccctgaaccaaccctggaccagctgaccgatgcactgggaggcaacctgtgtagatgtaccggctaccggcccattatcgatgcatgtaagactttttgcaagacgtccggatgttgtcagtctaaggaaaactag

SEQ ID NO: 60117 - DNA, 4017 bp, Artificial Sequence
  derived and/or modified sequence
atggatagggcctccgagctgctgttctacgtgaatggcagaaaagttattgagaagaacgtcgaccccgagacaatgctgctgccatatctccgcaaaaagttgagacttactggcaccaaatacggttgcggcggaggtggctgcggcgcatgtactgtcatgataagtaggtataatcctatcacgaagcgaatccgccatcatccagcaaacgcatgcctgatacctatctgctcactttatggtgccgctgttaccactgtggaaggcattggatccacacataccaggattcatccggtccaagagcggatcgccaaatgtcatgggactcagtgcgggttctgcacccccggaatggtcatgtccatttacacccttcttagaaaccacccagaaccaacattagatcaattgacagacgcgctgggtggcaacttgtgtaggtgcaccggatataggcctatcatagatgcttgtaagaccttttgtaagactagcggatgctgtcagtccaaagaaaacggcgtttgctgcctcgaccaggggattaatgggctgcccgaatttgaagagggatccaagacaagcccaaaactgtttgccgaagaggagtttctcccactggatcccacgcaggagcttatctttccacctgagctgatgatcatggctgaaaaacagtcacaaaggacccgcgtgttcggttctgagaggatgatgtggttttctcctgtcacactcaaggaattgcttgagttcaagttcaagtacccgcaggccccagtcattatggggaatacgtccgttggccctgaggtaaaattcaaaggagtgtttcatccagtgatcataagccctgatcgaatcgaggaattgtctgtcgtgaatcacgcgtataatggtctcacacttggggctgggctgagcctggctcaagtaaaggatatattggcggacgttgtccagaagctccctgaggagaagacccagatgtaccacgctcttctgaagcacttgggaaccctggcaggatcacagatccggaacatggccagtctgggtggacacatcatcagcagacacccggattccgacctgaatcctatactggccgtaggcaattgcacccttaacctattgagcaaggaaggcaagcgtcaaatccctttaaatgaacagtttctttctaagtgcccaaacgctgatttgaagcctcaggagattcttgtcagcgtcaatattccctactctcgcaagtgggaatttgtatctgccttcagacaagctcagcgccaggagaacgctcttgccatcgttaactcaggaatgcgcgtcttttttggggagggagatgggattatcagagagctctgcatctcatacggcggagttggccctgccactatctgcgccaaaaacagctgtcagaagctcatagggagacactggaacgagcagatgttagatattgcctgtcgcttaatccttaatgaggtgagtttgcttgggagcgctcccggaggcaaggtcgagttcaagagaacccttatcatctcatttctgttcaaattttacctggaggtatcgcaaatcctgaagaagatggaccctgtgcattaccctagtctggctgataaatacgagtcagcattggaggatctgcactcaaagcaccactgttcaacactcaagtaccagaacattggtcccaagcagcatcctgaggacccaataggacatccgatcatgcatctctctggagtgaagcatgcaactggcgaagctatctattgtgacgatatgccccttgtggatcaggaactgtttctgacattcgtgacttccagcagagcgcacgctaagatcgtgtccatagacctgtctgaagcattgagtatgcccggagtggttgacatcatgacagctgagcacctgtccgatgtcaacagtttttgcttcttcacagaagcggaaaagttcctggccactgacaaggtattttgtgtaggccaactcgtttgtgctgtgttagccgactcggaagtccaagccaagcgggcagccaaaagagtgaagattgtgtaccaggatctggaacctctaattttgaccattgaggagagcattcagcataattcgagctttaagcctgagcgcaaactggaatatgggaatgttgatgaggcattcaaggtggtcgaccagattctagagggcgaaatccatatggggggacaggaacatttttacatggaaacccaatccatgctggttgtgccgaagggggaggaccaagagatggatgtatacgtgagcacgcagttccccaaatatatccaggatatcgtagcttctactctgaagctacctgccaacaaagtgatgtgtcacgtgcggagagtgggtggagcatttgggggaaaagtgctcaagaccggcataatcgcagctgtaaccgcctttgccgcaaataaacacggacgcgctgttagatgtgtcctcgagagaggggaggacatgctgatcacagggggtcgccatccttatctcgggaagtacaaagcaggcttcatgaatgatggaagaatcttggcactcgatatggagcactattctaatgctggcgcatctttggacgagtccctgttcgtaatcgaaatggggctgctcaagatggacaacgcttataagtttccgaacttgcgatgtagggggtgggcatgtcgcaccaatctgcccagtaacaccgccttccgcggatttggcttccctcaagcagccctcattacagagtcctgcattactgaggtcgctgctaagtgtggactttcccctgaaaaagtcaggattattaacatgtataaggagattgatcaaacgccgtataaacaggaaattaatgcgaagaacttgatccagtgttggagggagtgtatggcgatgagctcttattccctccgcaaagtggcagtggaaaaatttaatgcggagaactactggaagaagaaagggttagcaatggtgccactcaaattcccagtaggtctggggagccgtgctgcaggacaggctgccgcactcgtccatatctatttagatggcagcgtgctggtcacccatggcggaatcgagatgggccaaggcgtacacacaaagatgatacaggtagtttctcgagaactccgaatgcccatgtcaaacgtgcacctccgcggaacctccacggaaactgtacccaatgccaatatatcgggaggtagcgtcgtggccgacctgaatggcctggctgtaaaagacgcatgtcaaacccttcttaaacgcctggagcccataataagtaaaaatccaaagggtacgtggaaagactgggcacagaccgcatttgatgaaagcataaatctttctgctgtcggctacttccggggatatgagtctgacatgaactgggaaaaaggggagggccagccatttgaatatttcgtctacggcgctgcctgctccgaagtcgagatcgactgtctgacgggggaccacaaaaacattaggaccgacattgtcatggacgtaggctgctcgatcaatccagctattgacatcggccagattgaaggcgcattcattcagggaatgggcctgtatactattgaggaactgaactattccccacagggcatattgcacacacgtggtccagatcagtataagatacctgccatctgtgatatgcccacagaactgcacattgctctgctgccaccaagccaaaattcaaacaccctgtacagttccaaaggacttggcgagtccggagtgttcttggggtgcagtgtgttttttgccatccacgacgctgtgtccgccgcaaggcaagaaagaggactccatggtcccctcacgcttaattctccactgaccccagaaaagatcagaatggcgtgtgaggataagttcacaaaaatgatccctcgcgacgagccaggcagctacgtgccatggaatgttcctatctag

SEQ ID NO: 60118 - DNA, 456 bp, Artificial Sequence
  derived and/or modified sequence
atgctgctgccatatctacgtaagaagctgcggcttactggaactaagtatggctgtggtgggggtgggtgtggtgcctgcacggtcatgatttcaaggtataaccccataacaaaaaggatcagacatcatcctgcaaatgcatgcctcatacctatctgtagtctgtacggggcagccgtgaccacggtagaaggtatcggaagtacacacaccagaatccatcccgtacaagagaggatagccaaatgccatggtacacaatgtggtttttgcacccccggtatggttatgtctatctatacattgctgcgaaaccacccagaacctacactcgaccagttgactgacgctttaggcggaaacctatgtaggtgtaccggctaccgcccaatcattgacgcctgcaaaacattctgcaaaacctctgggtgttgccaatcaaaggagaactag

SEQ ID NO: 60119 - DNA, 4017 bp, Artificial Sequence
  derived and/or modified sequence
atggacagagccagcgagctgctgttctacgtgaacggcagaaaggtgatcgagaagaacgtggaccccgagaccatgctgctgccctacctgagaaagaagctgagactgaccggcaccaagtacggctgcggcggcggcggctgcggcgcctgcaccgtgatgatcagcagatacaaccccatcaccaagagaatcagacaccaccccgccaacgcctgcctgatccccatctgcagcctgtacggcgccgccgtgaccaccgtggagggcatcggcagcacccacaccagaatccaccccgtgcaggagagaatcgccaagtgccacggcacccagtgcggcttctgcacccccggcatggtgatgagcatctacaccctgctgagaaaccaccccgagcccaccctggaccagctgaccgacgccctgggcggcaacctgtgcagatgcaccggctacagacccatcatcgacgcctgcaagaccttctgcaagaccagcggctgctgccagagcaaggagaacggcgtgtgctgcctggaccagggcatcaacggcctgcccgagttcgaggagggcagcaagaccagccccaagctgttcgccgaggaggagttcctgcccctggaccccacccaggagctgatcttcccccccgagctgatgatcatggccgagaagcagagccagagaaccagagtgttcggcagcgagagaatgatgtggttcagccccgtgaccctgaaggagctgctggagttcaagttcaagtacccccaggcccccgtgatcatgggcaacaccagcgtgggccccgaggtgaagttcaagggcgtgttccaccccgtgatcatcagccccgacagaatcgaggagctgagcgtggtgaaccacgcctacaacggcctgaccctgggcgccggcctgagcctggcccaggtgaaggacatcctggccgacgtggtgcagaagctgcccgaggagaagacccagatgtaccacgccctgctgaagcacctgggcaccctggccggcagccagatcagaaacatggccagcctgggcggccacatcatcagcagacaccccgacagcgacctgaaccccatcctggccgtgggcaactgcaccctgaacctgctgagcaaggagggcaagagacagatccccctgaacgagcagttcctgagcaagtgccccaacgccgacctgaagccccaggagatcctggtgagcgtgaacatcccctacagcagaaagtgggagttcgtgagcgccttcagacaggcccagagacaggagaacgccctggccatcgtgaacagcggcatgagagtgttcttcggcgagggcgacggcatcatcagagagctgtgcatcagctacggcggcgtgggccccgccaccatctgcgccaagaacagctgccagaagctgatcggcagacactggaacgagcagatgctggacatcgcctgcagactgatcctgaacgaggtgagcctgctgggcagcgcccccggcggcaaggtggagttcaagagaaccctgatcatcagcttcctgttcaagttctacctggaggtgagccagatcctgaagaagatggaccccgtgcactaccccagcctggccgacaagtacgagagcgccctggaggacctgcacagcaagcaccactgcagcaccctgaagtaccagaacatcggccccaagcagcaccccgaggaccccatcggccaccccatcatgcacctgagcggcgtgaagcacgccaccggcgaggccatctactgcgacgacatgcccctggtggaccaggagctgttcctgaccttcgtgaccagcagcagagcccacgccaagatcgtgagcatcgacctgagcgaggccctgagcatgcccggcgtggtggacatcatgaccgccgagcacctgagcgacgtgaacagcttctgcttcttcaccgaggccgagaagttcctggccaccgacaaggtgttctgcgtgggccagctggtgtgcgccgtgctggccgacagcgaggtgcaggccaagagagccgccaagagagtgaagatcgtgtaccaggacctggagcccctgatcctgaccatcgaggagagcatccagcacaacagcagcttcaagcccgagagaaagctggagtacggcaacgtggacgaggccttcaaggtggtggaccagatcctggagggcgagatccacatgggcggccaggagcacttctacatggagacccagagcatgctggtggtgcccaagggcgaggaccaggagatggacgtgtacgtgagcacccagttccccaagtacatccaggacatcgtggccagcaccctgaagctgcccgccaacaaggtgatgtgccacgtgagaagagtgggcggcgccttcggcggcaaggtgctgaagaccggcatcatcgccgccgtgaccgccttcgccgccaacaagcacggcagagccgtgagatgcgtgctggagagaggcgaggacatgctgatcaccggcggcagacacccctacctgggcaagtacaaggccggcttcatgaacgacggcagaatcctggccctggacatggagcactacagcaacgccggcgccagcctggacgagagcctgttcgtgatcgagatgggcctgctgaagatggacaacgcctacaagttccccaacctgagatgcagaggctgggcctgcagaaccaacctgcccagcaacaccgccttcagaggcttcggcttcccccaggccgccctgatcaccgagagctgcatcaccgaggtggccgccaagtgcggcctgagccccgagaaggtgagaatcatcaacatgtacaaggagatcgaccagaccccctacaagcaggagatcaacgccaagaacctgatccagtgctggagagagtgcatggccatgagcagctacagcctgagaaaggtggccgtggagaagttcaacgccgagaactactggaagaagaagggcctggccatggtgcccctgaagttccccgtgggcctgggcagcagagccgccggccaggccgccgccctggtgcacatctacctggacggcagcgtgctggtgacccacggcggcatcgagatgggccagggcgtgcacaccaagatgatccaggtggtgagcagagagctgagaatgcccatgagcaacgtgcacctgagaggcaccagcaccgagaccgtgcccaacgccaacatcagcggcggcagcgtggtggccgacctgaacggcctggccgtgaaggacgcctgccagaccctgctgaagagactggagcccatcatcagcaagaaccccaagggcacctggaaggactgggcccagaccgccttcgacgagagcatcaacctgagcgccgtgggctacttcagaggctacgagagcgacatgaactgggagaagggcgagggccagcccttcgagtacttcgtgtacggcgccgcctgcagcgaggtggagatcgactgcctgaccggcgaccacaagaacatcagaaccgacatcgtgatggacgtgggctgcagcatcaaccccgccatcgacatcggccagatcgagggcgccttcatccagggcatgggcctgtacaccatcgaggagctgaactacagcccccagggcatcctgcacaccagaggccccgaccagtacaagatccccgccatctgcgacatgcccaccgagctgcacatcgccctgctgccccccagccagaacagcaacaccctgtacagcagcaagggcctgggcgagagcggcgtgttcctgggctgcagcgtgttcttcgccatccacgacgccgtgagcgccgccagacaggagagaggcctgcacggccccctgaccctgaacagccccctgacccccgagaagatcagaatggcctgcgaggacaagttcaccaagatgatccccagagacgagcccggcagctacgtgccctggaacgtgcccatctag

SEQ ID NO: 60120 - DNA, 456 bp, Artificial Sequence
  derived and/or modified sequence
atgctgctgccctacctgagaaagaagctgagactgaccggcaccaagtacggctgcggcggcggcggctgcggcgcctgcaccgtgatgatcagcagatacaaccccatcaccaagagaatcagacaccaccccgccaacgcctgcctgatccccatctgcagcctgtacggcgccgccgtgaccaccgtggagggcatcggcagcacccacaccagaatccaccccgtgcaggagagaatcgccaagtgccacggcacccagtgcggcttctgcacccccggcatggtgatgagcatctacaccctgctgagaaaccaccccgagcccaccctggaccagctgaccgacgccctgggcggcaacctgtgcagatgcaccggctacagacccatcatcgacgcctgcaagaccttctgcaagaccagcggctgctgccagagcaaggagaactag

SEQ ID NO: 60121 - protein, 242 aa, Artificial Sequence
  derived and/or modified sequence
MSLGIMEEEDLAEYFRLQYGERLLQMLQKLPNVEGASESPSIWLLEKKKETEIMHQTMVQKKKMFQRRMETLNLRWEELGVKEAQLKAHIQKSEQFIQENDQKRIRAMKKANKERELKCQHMQELTKRKQEMVALRLEHQRLSAKLKDYYIFNKYLEKVVENSEESRWAHIQNTAAKKTLLLGTIKMATLNLFQIVSKHLKEVTEVALEDTHKQLDMIQQFIQDRSDIWAEVKKKEQQRVRI

SEQ ID NO: 60122 - DNA, 729 bp, Artificial Sequence
  derived and/or modified sequence
atgagcctgggcatcatggaggaggaggacctggccgagtacttcagactgcagtacggcgagagactgctgcagatgctgcagaagctgcccaacgtggagggcgccagcgagagccccagcatctggctgctggagaagaagaaggagaccgagatcatgcaccagaccatggtgcagaagaagaagatgttccagagaagaatggagaccctgaacctgagatgggaggagctgggcgtgaaggaggcccagctgaaggcccacatccagaagagcgagcagttcatccaggagaacgaccagaagagaatcagagccatgaagaaggccaacaaggagagagagctgaagtgccagcacatgcaggagctgaccaagagaaagcaggagatggtggccctgagactggagcaccagagactgagcgccaagctgaaggactactacatcttcaacaagtacctggagaaggtggtggagaacagcgaggagagcagatgggcccacatccagaacaccgccgccaagaagaccctgctgctgggcaccatcaagatggccaccctgaacctgttccagatcgtgagcaagcacctgaaggaggtgaccgaggtggccctggaggacacccacaagcagctggacatgatccagcagttcatccaggacagaagcgacatctgggccgaggtgaagaagaaggagcagcagagagtgagaatctag

SEQ ID NO: 60123 - DNA, 1158 bp, Artificial Sequence
  derived and/or modified sequence
gttgctaggtaaccacatctcccataactgccccagcacatcgtcctgagccgcccaacctgtctccagccaccttctgtggagtctcaaactccatcatctgtgggaccctgtaggccgaagggagaaacaagagtgcagccaccacccctgagccacctgtggctctgctacccacaatttcactgtgaagagtcagctgcctgggccgtgaggtcactgccaccatgagtctgggcatcatggaagaggaagacctggccgagtacttccggctgcagtatggggagcggctgctgcagatgctccagaaactccccaatgttgagggggcgtcggagtccccatccatctggctactggagaagaaaaaggagacagaaatcatgcatcaaactatggtgcagaagaagaagatgtttcagcgcagaatggaaaccctgaacctgcgctgggaggaactgggcgttaaggaagcccaactgaaggctcacatccagaagtctgagcagttcatccaggagaacgaccagaaacggatccgcgccatgaagaaagccaacaaggagcgagaactcaagtgccagcacatgcaggagctgaccaagcgcaagcaggagatggtggcgctgcggctggagcaccagcggctgagcgccaagctgaaggactactacatcttcaacaagtacctagagaaggtggtggagaactccgaggaatctcgctgggcgcacatccagaacaccgcagccaagaagaccctcctgcttggcaccattaagatggccacgctgaacctcttccagatcgtgagcaagcacctgaaggaggtgactgaggtggcactggaggacacccacaagcagctggacatgatccagcaatttatccaagaccggtcggacatctgggcagaggtgaaaaagaaggaacaacagcgagtccggatttaaggaggcagccttgttccagaatgtcctgagacagagatcgtgaaagaagaagtcgtgagcctgcggtccagtcagtccagctcgggaccgatgcctgctgtgccttcctgctgagggacacctgcttattttcccccgtgggcctcactctatccctgaaaacagtgaatgttatatgaagtttgttctcaagttctctcta

SEQ ID NO: 60124 - DNA, 729 bp, Artificial Sequence
  derived and/or modified sequence
atgtccctaggtatcatggaagaggaggacctcgcagaatacttcaggctgcagtacggcgagagactgctgcagatgcttcagaaattgccgaatgttgaaggagcctcagagtcacctagcatctggctgctcgaaaaaaaaaaggaaaccgagatcatgcatcagactatggtacagaagaaaaaaatgttccagcgcagaatggaaacgcttaatttgcgttgggaggagctcggggtcaaggaagcgcagctgaaggctcacattcagaagtctgagcaatttatccaggagaacgaccagaagcggattagggctatgaaaaaggcaaacaaagagcgagaactgaaatgccaacacatgcaggaattgactaaacgcaagcaggagatggtggccctgagattagaacaccaacgcctttccgcaaagctcaaggattattacatctttaacaagtatttggagaaagtggtggaaaatagcgaggaatcacgctgggctcatattcagaacaccgctgccaagaaaaccttacttctcggaactattaaaatggcaacactcaatttgttccagatcgtgtccaagcacctgaaagaagtcacagaagttgccctcgaagacacccacaagcagttggacatgatccaacagtttatccaagacagatccgacatttgggctgaagttaagaagaaggagcagcagcgcgtcagaatttag

SEQ ID NO: 60125 - DNA, 729 bp, Artificial Sequence
  derived and/or modified sequence
atgagcctgggcatcatggaggaggaggacctggccgagtacttccggctgcagtatggagagcggctgctgcagatgctgcagaagctgcccaacgtggagggcgccagcgagagccccagcatctggctgctggagaagaagaaggagacagagatcatgcaccagaccatggtgcagaagaagaagatgttccagaggaggatggagaccctgaacctgcgctgggaggagctgggcgtgaaggaggcccagctgaaggcccacatccagaagtctgagcagttcatccaggagaatgaccagaagaggatccgggccatgaagaaggccaacaaggagcgggagctgaagtgccagcacatgcaggagctgaccaagaggaagcaggagatggtggccctgcggctggagcaccagaggctgagcgccaagctgaaggactactacatcttcaacaagtacctggagaaggtggtggagaacagcgaggagagccgctgggcccacatccagaacacagctgccaagaagaccctgctgctgggcaccatcaagatggccaccctgaacctcttccagatcgtgtccaagcacctgaaggaggtgacagaggtggccctggaggacacccacaagcagctggacatgatccagcagttcatccaggacagaagtgacatctgggccgaggtgaagaagaaggagcagcagagggtgcgcatctag

SEQ ID NO: 60126 - DNA, 729 bp, Artificial Sequence
  derived and/or modified sequence
atgagcctgggcatcatggaggaggaggacctggccgagtacttcagactgcagtacggcgagagactgctgcaaatgcttcagaagctgcccaacgtcgagggcgcttcagagtcgcccagcatttggttactggaaaagaagaaagaaaccgaaatcatgcatcagactatggtacagaaaaaaaagatgtttcagcgtagaatggaaaccctcaatctacgatgggaggaattgggagtgaaggaggcacagctgaaggctcatatacagaaatcggaacagtttatccaagaaaacgatcagaaacgaattagggccatgaagaaagccaataaagagagagagctgaagtgtcaacacatgcaagaattgacaaagaggaaacaggaaatggtggcgctgagactcgagcatcagaggctctctgctaagctgaaggactactacatttttaacaagtatttggaaaaggtggtcgaaaactcagaagagtcccggtgggcgcatatacagaataccgccgctaagaaaactctgctgcttggaactattaagatggctacattaaacctgttccagatcgtgtccaaacacttgaaggaagtgactgaggtggctctggaagatacccataaacagctggatatgattcagcagtttattcaggatagatctgacatttgggcagaagtaaaaaaaaaggagcagcaaagggtgaggatctag

SEQ ID NO: 60127 - DNA, 729 bp, Artificial Sequence
  derived and/or modified sequence
atgagcttgggtataatggaggaagaagatctcgccgagtactttagactgcagtacggcgagagacttttgcagatgctgcaaaagctgcccaatgtggaaggcgcttcagaatccccgtctatctggctgctggagaaaaaaaaagaaacagagatcatgcatcagactatggtgcagaaaaaaaaaatgtttcagcgaaggatggagacacttaaccttcggtgggaggagctgggggttaaggaagcccagctcaaagctcacattcagaagtccgaacagtttattcaggaaaatgatcagaaacggatccgggctatgaaaaaagccaacaaagagagggaattgaagtgccagcacatgcaggagctgactaaacgcaaacaggagatggtggctctgaggctggagcaccagcgtctgtctgctaaactgaaagattactatatctttaataagtacttggagaaggtcgtcgagaactccgaagaatccagatgggcccacatacagaataccgctgcaaagaaaactcttttgctgggtaccatcaagatggccaccctcaatctgtttcagatcgtgtccaaacacttaaaggaggtcaccgaagtggccctggaagatacccataagcaactggacatgatccagcagtttattcaggaccgctcagacatttgggctgaggttaagaagaaggagcagcagagggtacggatctag

SEQ ID NO: 60128 - protein, 1194 aa, Artificial Sequence
  derived and/or modified sequence
MDAKARNCLLQHREALEKDIKTSYIMDHMISDGFLTISEEEKVRNEPTQQQRAAMLIKMILKKDNDSYVSFYNALLHEGYKDLAALLHDGIPVVSSSSVRTVLCEGGVPQRPVVFVTRKKLVNAIQQKLSKLKGEPGWVTIHGMAGCGKSVLAAEAVRDHSLLEGCFPGGVHWVSVGKQDKSGLLMKLQNLCTRLDQDESFSQRLPLNIEEAKDRLRILMLRKHPRSLLILDDVWDSWVLKAFDSQCQILLTTRDKSVTDSVMGPKYVVPVESSLGKEKGLEILSLFVNMKKADLPEQAHSIIKECKGSPLVVSLIGALLRDFPNRWEYYLKQLQNKQFKRIRKSSSYDYEALDEAMSISVEMLREDIKDYYTDLSILQKDVKVPTKVLCILWDMETEEVEDILQEFVNKSLLFCDRNGKSFRYYLHDLQVDFLTEKNCSQLQDLHKKIITQFQRYHQPHTLSPDQEDCMYWYNFLAYHMASAKMHKELCALMFSLDWIKAKTELVGPAHLIHEFVEYRHILDEKDCAVSENFQEFLSLNGHLLGRQPFPNIVQLGLCEPETSEVYQQAKLQAKQEVDNGMLYLEWINKKNITNLSRLVVRPHTDAVYHACFSEDGQRIASCGADKTLQVFKAETGEKLLEIKAHEDEVLCCAFSTDDRFIATCSVDKKVKIWNSMTGELVHTYDEHSEQVNCCHFTNSSHHLLLATGSSDCFLKLWDLNQKECRNTMFGHTNSVNHCRFSPDDKLLASCSADGTLKLWDATSANERKSINVKQFFLNLEDPQEDMEVIVKCCSWSADGARIMVAAKNKIFLWNTDSRSKVADCRGHLSWVHGVMFSPDGSSFLTSSDDQTIRLWETKKVCKNSAVMLKQEVDVVFQENEVMVLAVDHIRRLQLINGRTGQIDYLTEAQVSCCCLSPHLQYIAFGDENGAIEILELVNNRIFQSRFQHKKTVWHIQFTADEKTLISSSDDAEIQVWNWQLDKCIFLRGHQETVKDFRLLKNSRLLSWSFDGTVKVWNIITGNKEKDFVCHQGTVLSCDISHDATKFSSTSADKTAKIWSFDLLLPLHELRGHNGCVRCSAFSVDSTLLATGDDNGEIRIWNVSNGELLHLCAPLSEEGAATHGGWVTDLCFSPDGKMLISAGGYIKWWNVVTGESSQTFYTNGTNLKKIHVSPDFKTYVTVDNLGILYILQTLE

SEQ ID NO: 60129 - protein, 483 aa, Artificial Sequence
  derived and/or modified sequence
MGLLTFRDIAIEFSLAEWQCLDHAQQNLYRDVMLENYRNLVSLGIAVSKPDLITCLEQNKEPQNIKRNEMVAKHPVTCSHFTQDLQSEQGIKDSLQKVILRRYGKCGQEDLQVKKCCKSVGECEVHKGGYNYVNQCLSATQNKTFQTHKCVKVFGKFSNSNRHKTRHTGKKHFKCKNDGKSFCMLSRLNQHQIIHTREKSYKCEECGKSFNCSSTLTRHKRIHTGEKPYRCEECGKAFSWSASLTKHKRIHTGEKPYTCEERGKVFSRSTLTNYKRIHTGEKPYTCEECGKAFSRSSTLTNHKRIHTGERPYKCEECGKAFSLSSTLKKHKIVHTGEKLYTCEECGKAFTFSSTLNTHKRIHTGEKPYTCEECGKAFSLPSTFTYHKRTHTGEKPYKCEECGKAFNCSSTLKKHKIIHTGEKLYKCKECGKAFTFSSTLNTHKRIHTGEKPYKCEECDQTFKWHSSLANHKNMHTGEKPYKYE
